United States Patent Application Publication US 2023/0192864 A1 - sequence listing, part 3

SEQ ID NO: 43876 - RNA, 19 nt, synthetic construct
  misc_feature 1..19: note = siRNA sense sequence
  source 1..19: mol_type = other RNA
gacctgattcatcttagga

SEQ ID NO: 43877 - RNA, 19 nt, synthetic construct
  misc_feature 1..19: note = siRNA antisense sequence
  source 1..19: mol_type = other RNA
tcctaagatgaatcaggtc

SEQ ID NO: 43878 - RNA, 19 nt, synthetic construct
  misc_feature 1..19: note = siRNA sense sequence
  source 1..19: mol_type = other RNA
acctgattcatcttaggat

SEQ ID NO: 43879 - RNA, 19 nt, synthetic construct
  misc_feature 1..19: note = siRNA antisense sequence
  source 1..19: mol_type = other RNA
atcctaagatgaatcaggt

SEQ ID NO: 43880 - RNA, 19 nt, synthetic construct
  misc_feature 1..19: note = siRNA sense sequence
  source 1..19: mol_type = other RNA
cctgattcatcttaggata

SEQ ID NO: 43881 - RNA, 19 nt, synthetic construct
  misc_feature 1..19: note = siRNA antisense sequence
  source 1..19: mol_type = other RNA
tatcctaagatgaatcagg

SEQ ID NO: 43882 - RNA, 19 nt, synthetic construct
  misc_feature 1..19: note = siRNA sense sequence
  source 1..19: mol_type = other RNA
ctgattcatcttaggataa

SEQ ID NO: 43883 - RNA, 19 nt, synthetic construct
  misc_feature 1..19: note = siRNA antisense sequence
  source 1..19: mol_type = other RNA
ttatcctaagatgaatcag

SEQ ID NO: 43884 - RNA, 19 nt, synthetic construct
  misc_feature 1..19: note = siRNA sense sequence
  source 1..19: mol_type = other RNA
ttcatcttaggataatacc

SEQ ID NO: 43885 - RNA, 19 nt, synthetic construct
  misc_feature 1..19: note = siRNA antisense sequence
  source 1..19: mol_type = other RNA
ggtattatcctaagatgaa

SEQ ID NO: 43886 - RNA, 19 nt, synthetic construct
  misc_feature 1..19: note = siRNA sense sequence
  source 1..19: mol_type = other RNA
tcatcttaggataatacca

SEQ ID NO: 43887 - RNA, 19 nt, synthetic construct
  misc_feature 1..19: note = siRNA antisense sequence
  source 1..19: mol_type = other RNA
tggtattatcctaagatga

SEQ ID NO: 43888 - RNA, 19 nt, synthetic construct
  misc_feature 1..19: note = siRNA sense sequence
  source 1..19: mol_type = other RNA
catcttaggataataccaa

SEQ ID NO: 43889 - RNA, 19 nt, synthetic construct
  misc_feature 1..19: note = siRNA antisense sequence
  source 1..19: mol_type = other RNA
ttggtattatcctaagatg

SEQ ID NO: 43890 - RNA, 19 nt, synthetic construct
  misc_feature 1..19: note = siRNA sense sequence
  source 1..19: mol_type = other RNA
tcttaggataataccaatg

SEQ ID NO: 43891 - RNA, 19 nt, synthetic construct
  misc_feature 1..19: note = siRNA antisense sequence
  source 1..19: mol_type = other RNA
cattggtattatcctaaga

SEQ ID NO: 43892 - RNA, 19 nt, synthetic construct
  misc_feature 1..19: note = siRNA sense sequence
  source 1..19: mol_type = other RNA
cttaggataataccaatgc

SEQ ID NO: 43893 - RNA, 19 nt, synthetic construct
  misc_feature 1..19: note = siRNA antisense sequence
  source 1..19: mol_type = other RNA
gcattggtattatcctaag

SEQ ID NO: 43894 - RNA, 19 nt, synthetic construct
  misc_feature 1..19: note = siRNA sense sequence
  source 1..19: mol_type = other RNA
tccttatttatcttcccta

SEQ ID NO: 43895 - RNA, 19 nt, synthetic construct
  misc_feature 1..19: note = siRNA antisense sequence
  source 1..19: mol_type = other RNA
tagggaagataaataagga

SEQ ID NO: 43896 - RNA, 19 nt, synthetic construct
  misc_feature 1..19: note = siRNA sense sequence
  source 1..19: mol_type = other RNA
ccttatttatcttccctac

SEQ ID NO: 43897 - RNA, 19 nt, synthetic construct
  misc_feature 1..19: note = siRNA antisense sequence
  source 1..19: mol_type = other RNA
gtagggaagataaataagg

SEQ ID NO: 43898 - RNA, 19 nt, synthetic construct
  misc_feature 1..19: note = siRNA sense sequence
  source 1..19: mol_type = other RNA
cttatttatcttccctacc

SEQ ID NO: 43899 - RNA, 19 nt, synthetic construct
  misc_feature 1..19: note = siRNA antisense sequence
  source 1..19: mol_type = other RNA
ggtagggaagataaataag

SEQ ID NO: 43900 - RNA, 19 nt, synthetic construct
  misc_feature 1..19: note = siRNA sense sequence
  source 1..19: mol_type = other RNA
ttatcttccctacctctgt

SEQ ID NO: 43901 - RNA, 19 nt, synthetic construct
  misc_feature 1..19: note = siRNA antisense sequence
  source 1..19: mol_type = other RNA
acagaggtagggaagataa

SEQ ID NO: 43902 - RNA, 19 nt, synthetic construct
  misc_feature 1..19: note = siRNA sense sequence
  source 1..19: mol_type = other RNA
tatcttccctacctctgtc

SEQ ID NO: 43903 - RNA, 19 nt, synthetic construct
  misc_feature 1..19: note = siRNA antisense sequence
  source 1..19: mol_type = other RNA
gacagaggtagggaagata

SEQ ID NO: 43904 - RNA, 19 nt, synthetic construct
  misc_feature 1..19: note = siRNA sense sequence
  source 1..19: mol_type = other RNA
atcttccctacctctgtcc

SEQ ID NO: 43905 - RNA, 19 nt, synthetic construct
  misc_feature 1..19: note = siRNA antisense sequence
  source 1..19: mol_type = other RNA
ggacagaggtagggaagat

SEQ ID NO: 43906 - RNA, 19 nt, synthetic construct
  misc_feature 1..19: note = siRNA sense sequence
  source 1..19: mol_type = other RNA
tcttccctacctctgtccc

SEQ ID NO: 43907 - RNA, 19 nt, synthetic construct
  misc_feature 1..19: note = siRNA antisense sequence
  source 1..19: mol_type = other RNA
gggacagaggtagggaaga

SEQ ID NO: 43908 - RNA, 19 nt, synthetic construct
  misc_feature 1..19: note = siRNA sense sequence
  source 1..19: mol_type = other RNA
cttccctacctctgtccct

SEQ ID NO: 43909 - RNA, 19 nt, synthetic construct
  misc_feature 1..19: note = siRNA antisense sequence
  source 1..19: mol_type = other RNA
agggacagaggtagggaag

SEQ ID NO: 43910 - RNA, 19 nt, synthetic construct
  misc_feature 1..19: note = siRNA sense sequence
  source 1..19: mol_type = other RNA
ctacctctgtccctggaag

SEQ ID NO: 43911 - RNA, 19 nt, synthetic construct
  misc_feature 1..19: note = siRNA antisense sequence
  source 1..19: mol_type = other RNA
cttccagggacagaggtag

SEQ ID NO: 43912 - RNA, 19 nt, synthetic construct
  misc_feature 1..19: note = siRNA sense sequence
  source 1..19: mol_type = other RNA
tgtccctggaaggtcagaa

SEQ ID NO: 43913 - RNA, 19 nt, synthetic construct
  misc_feature 1..19: note = siRNA antisense sequence
  source 1..19: mol_type = other RNA
ttctgaccttccagggaca

SEQ ID NO: 43914 - RNA, 19 nt, synthetic construct
  misc_feature 1..19: note = siRNA sense sequence
  source 1..19: mol_type = other RNA
aatcacagttagcactcta

SEQ ID NO: 43915 - RNA, 19 nt, synthetic construct
  misc_feature 1..19: note = siRNA antisense sequence
  source 1..19: mol_type = other RNA
tagagtgctaactgtgatt

SEQ ID NO: 43916 - RNA, 19 nt, synthetic construct
  misc_feature 1..19: note = siRNA sense sequence
  source 1..19: mol_type = other RNA
caaataaaagccagtcatg

SEQ ID NO: 43917 - RNA, 19 nt, synthetic construct
  misc_feature 1..19: note = siRNA antisense sequence
  source 1..19: mol_type = other RNA
catgactggcttttatttg

SEQ ID NO: 43918 - RNA, 19 nt, synthetic construct
  misc_feature 1..19: note = siRNA sense sequence
  source 1..19: mol_type = other RNA
aaataaaagccagtcatgc

SEQ ID NO: 43919 - RNA, 19 nt, synthetic construct
  misc_feature 1..19: note = siRNA antisense sequence
  source 1..19: mol_type = other RNA
gcatgactggcttttattt

SEQ ID NO: 43920 - RNA, 19 nt, synthetic construct
  misc_feature 1..19: note = siRNA sense sequence
  source 1..19: mol_type = other RNA
aataaaagccagtcatgca

SEQ ID NO: 43921 - RNA, 19 nt, synthetic construct
  misc_feature 1..19: note = siRNA antisense sequence
  source 1..19: mol_type = other RNA
tgcatgactggcttttatt

SEQ ID NO: 43922 - RNA, 19 nt, synthetic construct
  misc_feature 1..19: note = siRNA sense sequence
  source 1..19: mol_type = other RNA
ataaaagccagtcatgcat

SEQ ID NO: 43923 - RNA, 19 nt, synthetic construct
  misc_feature 1..19: note = siRNA antisense sequence
  source 1..19: mol_type = other RNA
atgcatgactggcttttat

SEQ ID NO: 43924 - RNA, 19 nt, synthetic construct
  misc_feature 1..19: note = siRNA sense sequence
  source 1..19: mol_type = other RNA
taaaagccagtcatgcatc

SEQ ID NO: 43925 - RNA, 19 nt, synthetic construct
  misc_feature 1..19: note = siRNA antisense sequence
  source 1..19: mol_type = other RNA
gatgcatgactggctttta

SEQ ID NO: 43926 - RNA, 19 nt, synthetic construct
  misc_feature 1..19: note = siRNA sense sequence
  source 1..19: mol_type = other RNA
aaaagccagtcatgcatct

SEQ ID NO: 43927 - RNA, 19 nt, synthetic construct
  misc_feature 1..19: note = siRNA antisense sequence
  source 1..19: mol_type = other RNA
agatgcatgactggctttt

SEQ ID NO: 43928 - RNA, 19 nt, synthetic construct
  misc_feature 1..19: note = siRNA sense sequence
  source 1..19: mol_type = other RNA
aaagccagtcatgcatctt

SEQ ID NO: 43929 - RNA, 19 nt, synthetic construct
  misc_feature 1..19: note = siRNA antisense sequence
  source 1..19: mol_type = other RNA
aagatgcatgactggcttt

SEQ ID NO: 43930 - RNA, 19 nt, synthetic construct
  misc_feature 1..19: note = siRNA sense sequence
  source 1..19: mol_type = other RNA
agccagtcatgcatctttc

SEQ ID NO: 43931 - RNA, 19 nt, synthetic construct
  misc_feature 1..19: note = siRNA antisense sequence
  source 1..19: mol_type = other RNA
gaaagatgcatgactggct

SEQ ID NO: 43932 - RNA, 19 nt, synthetic construct
  misc_feature 1..19: note = siRNA sense sequence
  source 1..19: mol_type = other RNA
gccagtcatgcatctttct

SEQ ID NO: 43933 - RNA, 19 nt, synthetic construct
  misc_feature 1..19: note = siRNA antisense sequence
  source 1..19: mol_type = other RNA
agaaagatgcatgactggc

SEQ ID NO: 43934 - RNA, 19 nt, synthetic construct
  misc_feature 1..19: note = siRNA sense sequence
  source 1..19: mol_type = other RNA
gtcatgcatctttctcaac

SEQ ID NO: 43935 - RNA, 19 nt, synthetic construct
  misc_feature 1..19: note = siRNA antisense sequence
  source 1..19: mol_type = other RNA
gttgagaaagatgcatgac

SEQ ID NO: 43936 - RNA, 19 nt, synthetic construct
  misc_feature 1..19: note = siRNA sense sequence
  source 1..19: mol_type = other RNA
tcatgcatctttctcaact

SEQ ID NO: 43937 - RNA, 19 nt, synthetic construct
  misc_feature 1..19: note = siRNA antisense sequence
  source 1..19: mol_type = other RNA
agttgagaaagatgcatga

SEQ ID NO: 43938 - RNA, 19 nt, synthetic construct
  misc_feature 1..19: note = siRNA sense sequence
  source 1..19: mol_type = other RNA
catgcatctttctcaacta

SEQ ID NO: 43939 - RNA, 19 nt, synthetic construct
  misc_feature 1..19: note = siRNA antisense sequence
  source 1..19: mol_type = other RNA
tagttgagaaagatgcatg

SEQ ID NO: 43940 - RNA, 19 nt, synthetic construct
  misc_feature 1..19: note = siRNA sense sequence
  source 1..19: mol_type = other RNA
atgcatctttctcaactac

SEQ ID NO: 43941 - RNA, 19 nt, synthetic construct
  misc_feature 1..19: note = siRNA antisense sequence
  source 1..19: mol_type = other RNA
gtagttgagaaagatgcat

SEQ ID NO: 43942 - RNA, 19 nt, synthetic construct
  misc_feature 1..19: note = siRNA sense sequence
  source 1..19: mol_type = other RNA
tgcatctttctcaactaca

SEQ ID NO: 43943 - RNA, 19 nt, synthetic construct
  misc_feature 1..19: note = siRNA antisense sequence
  source 1..19: mol_type = other RNA
tgtagttgagaaagatgca

SEQ ID NO: 43944 - RNA, 19 nt, synthetic construct
  misc_feature 1..19: note = siRNA sense sequence
  source 1..19: mol_type = other RNA
gcatctttctcaactacag

SEQ ID NO: 43945 - RNA, 19 nt, synthetic construct
  misc_feature 1..19: note = siRNA antisense sequence
  source 1..19: mol_type = other RNA
ctgtagttgagaaagatgc

SEQ ID NO: 43946 - RNA, 19 nt, synthetic construct
  misc_feature 1..19: note = siRNA sense sequence
  source 1..19: mol_type = other RNA
ctttctcaactacaggctt

SEQ ID NO: 43947 - RNA, 19 nt, synthetic construct
  misc_feature 1..19: note = siRNA antisense sequence
  source 1..19: mol_type = other RNA
aagcctgtagttgagaaag

SEQ ID NO: 43948 - RNA, 19 nt, synthetic construct
  misc_feature 1..19: note = siRNA sense sequence
  source 1..19: mol_type = other RNA
ttctcaactacaggcttct

SEQ ID NO: 43949 - RNA, 19 nt, synthetic construct
  misc_feature 1..19: note = siRNA antisense sequence
  source 1..19: mol_type = other RNA
agaagcctgtagttgagaa

SEQ ID NO: 43950 - RNA, 19 nt, synthetic construct
  misc_feature 1..19: note = siRNA sense sequence
  source 1..19: mol_type = other RNA
tctcaactacaggcttctt

SEQ ID NO: 43951 - RNA, 19 nt, synthetic construct
  misc_feature 1..19: note = siRNA antisense sequence
  source 1..19: mol_type = other RNA
aagaagcctgtagttgaga

SEQ ID NO: 43952 - RNA, 19 nt, synthetic construct
  misc_feature 1..19: note = siRNA sense sequence
  source 1..19: mol_type = other RNA
tcaactacaggcttcttac

SEQ ID NO: 43953 - RNA, 19 nt, synthetic construct
  misc_feature 1..19: note = siRNA antisense sequence
  source 1..19: mol_type = other RNA
gtaagaagcctgtagttga

SEQ ID NO: 43954 - RNA, 19 nt, synthetic construct
  misc_feature 1..19: note = siRNA sense sequence
  source 1..19: mol_type = other RNA
caactacaggcttcttacc

SEQ ID NO: 43955 - RNA, 19 nt, synthetic construct
  misc_feature 1..19: note = siRNA antisense sequence
  source 1..19: mol_type = other RNA
ggtaagaagcctgtagttg

SEQ ID NO: 43956 - RNA, 19 nt, synthetic construct
  misc_feature 1..19: note = siRNA sense sequence
  source 1..19: mol_type = other RNA
aactacaggcttcttacct

SEQ ID NO: 43957 - RNA, 19 nt, synthetic construct
  misc_feature 1..19: note = siRNA antisense sequence
  source 1..19: mol_type = other RNA
aggtaagaagcctgtagtt

SEQ ID NO: 43958 - RNA, 19 nt, synthetic construct
  misc_feature 1..19: note = siRNA sense sequence
  source 1..19: mol_type = other RNA
acaggcttcttacctcgtg

SEQ ID NO: 43959 - RNA, 19 nt, synthetic construct
  misc_feature 1..19: note = siRNA antisense sequence
  source 1..19: mol_type = other RNA
cacgaggtaagaagcctgt

SEQ ID NO: 43960 - RNA, 19 nt, synthetic construct
  misc_feature 1..19: note = siRNA sense sequence
  source 1..19: mol_type = other RNA
caggcttcttacctcgtgt

SEQ ID NO: 43961 - RNA, 19 nt, synthetic construct
  misc_feature 1..19: note = siRNA antisense sequence
  source 1..19: mol_type = other RNA
acacgaggtaagaagcctg

SEQ ID NO: 43962 - RNA, 19 nt, synthetic construct
  misc_feature 1..19: note = siRNA sense sequence
  source 1..19: mol_type = other RNA
aggcttcttacctcgtgta

SEQ ID NO: 43963 - RNA, 19 nt, synthetic construct
  misc_feature 1..19: note = siRNA antisense sequence
  source 1..19: mol_type = other RNA
tacacgaggtaagaagcct

SEQ ID NO: 43964 - RNA, 19 nt, synthetic construct
  misc_feature 1..19: note = siRNA sense sequence
  source 1..19: mol_type = other RNA
tacctcgtgtaagccctta

SEQ ID NO: 43965 - RNA, 19 nt, synthetic construct
  misc_feature 1..19: note = siRNA antisense sequence
  source 1..19: mol_type = other RNA
taagggcttacacgaggta

SEQ ID NO: 43966 - RNA, 19 nt, synthetic construct
  misc_feature 1..19: note = siRNA sense sequence
  source 1..19: mol_type = other RNA
acctcgtgtaagcccttag

SEQ ID NO: 43967 - RNA, 19 nt, synthetic construct
  misc_feature 1..19: note = siRNA antisense sequence
  source 1..19: mol_type = other RNA
ctaagggcttacacgaggt

SEQ ID NO: 43968 - RNA, 19 nt, synthetic construct
  misc_feature 1..19: note = siRNA sense sequence
  source 1..19: mol_type = other RNA
cctcgtgtaagcccttagt

SEQ ID NO: 43969 - RNA, 19 nt, synthetic construct
  misc_feature 1..19: note = siRNA antisense sequence
  source 1..19: mol_type = other RNA
actaagggcttacacgagg

SEQ ID NO: 43970 - RNA, 19 nt, synthetic construct
  misc_feature 1..19: note = siRNA sense sequence
  source 1..19: mol_type = other RNA
ctcgtgtaagcccttagta

SEQ ID NO: 43971 - RNA, 19 nt, synthetic construct
  misc_feature 1..19: note = siRNA antisense sequence
  source 1..19: mol_type = other RNA
tactaagggcttacacgag

SEQ ID NO: 43972 - RNA, 19 nt, synthetic construct
  misc_feature 1..19: note = siRNA sense sequence
  source 1..19: mol_type = other RNA
tcgtgtaagcccttagtag

SEQ ID NO: 43973 - RNA, 19 nt, synthetic construct
  misc_feature 1..19: note = siRNA antisense sequence
  source 1..19: mol_type = other RNA
ctactaagggcttacacga

SEQ ID NO: 43974 - RNA, 19 nt, synthetic construct
  misc_feature 1..19: note = siRNA sense sequence
  source 1..19: mol_type = other RNA
cgtgtaagcccttagtaga

SEQ ID NO: 43975 - RNA, 19 nt, synthetic construct
  misc_feature 1..19: note = siRNA antisense sequence
  source 1..19: mol_type = other RNA
tctactaagggcttacacg

SEQ ID NO: 43976 - RNA, 19 nt, synthetic construct
  misc_feature 1..19: note = siRNA sense sequence
  source 1..19: mol_type = other RNA
gtgtaagcccttagtagaa

SEQ ID NO: 43977 - RNA, 19 nt, synthetic construct
  misc_feature 1..19: note = siRNA antisense sequence
  source 1..19: mol_type = other RNA
ttctactaagggcttacac

SEQ ID NO: 43978 - RNA, 19 nt, synthetic construct
  misc_feature 1..19: note = siRNA sense sequence
  source 1..19: mol_type = other RNA
tgtaagcccttagtagaag

SEQ ID NO: 43979 - RNA, 19 nt, synthetic construct
  misc_feature 1..19: note = siRNA antisense sequence
  source 1..19: mol_type = other RNA
cttctactaagggcttaca

SEQ ID NO: 43980 - RNA, 19 nt, synthetic construct
  misc_feature 1..19: note = siRNA sense sequence
  source 1..19: mol_type = other RNA
gtaagcccttagtagaagt

SEQ ID NO: 43981 - RNA, 19 nt, synthetic construct
  misc_feature 1..19: note = siRNA antisense sequence
  source 1..19: mol_type = other RNA
acttctactaagggcttac

SEQ ID NO: 43982 - RNA, 19 nt, synthetic construct
  misc_feature 1..19: note = siRNA sense sequence
  source 1..19: mol_type = other RNA
taagcccttagtagaagta

SEQ ID NO: 43983 - RNA, 19 nt, synthetic construct
  misc_feature 1..19: note = siRNA antisense sequence
  source 1..19: mol_type = other RNA
tacttctactaagggctta

SEQ ID NO: 43984 - RNA, 19 nt, synthetic construct
  misc_feature 1..19: note = siRNA sense sequence
  source 1..19: mol_type = other RNA
agcccttagtagaagtagg

SEQ ID NO: 43985 - RNA, 19 nt, synthetic construct
  misc_feature 1..19: note = siRNA antisense sequence
  source 1..19: mol_type = other RNA
cctacttctactaagggct

SEQ ID NO: 43986 - RNA, 19 nt, synthetic construct
  misc_feature 1..19: note = siRNA sense sequence
  source 1..19: mol_type = other RNA
atgtttcgccttgttggtt

SEQ ID NO: 43987 - RNA, 19 nt, synthetic construct
  misc_feature 1..19: note = siRNA antisense sequence
  source 1..19: mol_type = other RNA
aaccaacaaggcgaaacat

SEQ ID NO: 43988 - RNA, 19 nt, synthetic construct
  misc_feature 1..19: note = siRNA sense sequence
  source 1..19: mol_type = other RNA
tgtttcgccttgttggttt

SEQ ID NO: 43989 - RNA, 19 nt, synthetic construct
  misc_feature 1..19: note = siRNA antisense sequence
  source 1..19: mol_type = other RNA
aaaccaacaaggcgaaaca

SEQ ID NO: 43990 - RNA, 19 nt, synthetic construct
  misc_feature 1..19: note = siRNA sense sequence
  source 1..19: mol_type = other RNA
gtttcgccttgttggtttt

SEQ ID NO: 43991 - RNA, 19 nt, synthetic construct
  misc_feature 1..19: note = siRNA antisense sequence
  source 1..19: mol_type = other RNA
aaaaccaacaaggcgaaac

SEQ ID NO: 43992 - RNA, 19 nt, synthetic construct
  misc_feature 1..19: note = siRNA sense sequence
  source 1..19: mol_type = other RNA
tttcgccttgttggtttta

SEQ ID NO: 43993 - RNA, 19 nt, synthetic construct
  misc_feature 1..19: note = siRNA antisense sequence
  source 1..19: mol_type = other RNA
taaaaccaacaaggcgaaa

SEQ ID NO: 43994 - RNA, 19 nt, synthetic construct
  misc_feature 1..19: note = siRNA sense sequence
  source 1..19: mol_type = other RNA
ttcgccttgttggttttaa

SEQ ID NO: 43995 - RNA, 19 nt, synthetic construct
  misc_feature 1..19: note = siRNA antisense sequence
  source 1..19: mol_type = other RNA
ttaaaaccaacaaggcgaa

SEQ ID NO: 43996 - RNA, 19 nt, synthetic construct
  misc_feature 1..19: note = siRNA sense sequence
  source 1..19: mol_type = other RNA
tcgccttgttggttttaat

SEQ ID NO: 43997 - RNA, 19 nt, synthetic construct
  misc_feature 1..19: note = siRNA antisense sequence
  source 1..19: mol_type = other RNA
attaaaaccaacaaggcga

SEQ ID NO: 43998 - RNA, 19 nt, synthetic construct
  misc_feature 1..19: note = siRNA sense sequence
  source 1..19: mol_type = other RNA
cgccttgttggttttaatt

SEQ ID NO: 43999 - RNA, 19 nt, synthetic construct
  misc_feature 1..19: note = siRNA antisense sequence
  source 1..19: mol_type = other RNA
aattaaaaccaacaaggcg

SEQ ID NO: 44000 - RNA, 19 nt, synthetic construct
  misc_feature 1..19: note = siRNA sense sequence
  source 1..19: mol_type = other RNA
gccttgttggttttaattt

SEQ ID NO: 44001 - RNA, 19 nt, synthetic construct
  misc_feature 1..19: note = siRNA antisense sequence
  source 1..19: mol_type = other RNA
aaattaaaaccaacaaggc

SEQ ID NO: 44002 - RNA, 19 nt, synthetic construct
  misc_feature 1..19: note = siRNA sense sequence
  source 1..19: mol_type = other RNA
tacagcaatttcatttggt

SEQ ID NO: 44003 - RNA, 19 nt, synthetic construct
  misc_feature 1..19: note = siRNA antisense sequence
  source 1..19: mol_type = other RNA
accaaatgaaattgctgta

SEQ ID NO: 44004 - RNA, 19 nt, synthetic construct
  misc_feature 1..19: note = siRNA sense sequence
  source 1..19: mol_type = other RNA
gcaatttcatttggtacag

SEQ ID NO: 44005 - RNA, 19 nt, synthetic construct
  misc_feature 1..19: note = siRNA antisense sequence
  source 1..19: mol_type = other RNA
ctgtaccaaatgaaattgc

SEQ ID NO: 44006 - RNA, 19 nt, synthetic construct
  misc_feature 1..19: note = siRNA sense sequence
  source 1..19: mol_type = other RNA
tcatttggtacagcctaaa

SEQ ID NO: 44007 - RNA, 19 nt, synthetic construct
  misc_feature 1..19: note = siRNA antisense sequence
  source 1..19: mol_type = other RNA
tttaggctgtaccaaatga

SEQ ID NO: 44008 - RNA, 19 nt, synthetic construct
  misc_feature 1..19: note = siRNA sense sequence
  source 1..19: mol_type = other RNA
tttggtacagcctaaatta

SEQ ID NO: 44009 - RNA, 19 nt, synthetic construct
  misc_feature 1..19: note = siRNA antisense sequence
  source 1..19: mol_type = other RNA
taatttaggctgtaccaaa

SEQ ID NO: 44010 - RNA, 19 nt, synthetic construct
  misc_feature 1..19: note = siRNA sense sequence
  source 1..19: mol_type = other RNA
ttggtacagcctaaattaa

SEQ ID NO: 44011 - RNA, 19 nt, synthetic construct
  misc_feature 1..19: note = siRNA antisense sequence
  source 1..19: mol_type = other RNA
ttaatttaggctgtaccaa

SEQ ID NO: 44012 - RNA, 19 nt, synthetic construct
  misc_feature 1..19: note = siRNA sense sequence
  source 1..19: mol_type = other RNA
tggtacagcctaaattaaa

SEQ ID NO: 44013 - RNA, 19 nt, synthetic construct
  misc_feature 1..19: note = siRNA antisense sequence
  source 1..19: mol_type = other RNA
tttaatttaggctgtacca

SEQ ID NO: 44014 - RNA, 19 nt, synthetic construct
  misc_feature 1..19: note = siRNA sense sequence
  source 1..19: mol_type = other RNA
ggtacagcctaaattaaaa

SEQ ID NO: 44015 - RNA, 19 nt, synthetic construct
  misc_feature 1..19: note = siRNA antisense sequence
  source 1..19: mol_type = other RNA
ttttaatttaggctgtacc

SEQ ID NO: 44016 - RNA, 19 nt, synthetic construct
  misc_feature 1..19: note = siRNA sense sequence
  source 1..19: mol_type = other RNA
tttatctttccatctaggg

SEQ ID NO: 44017 - RNA, 19 nt, synthetic construct
  misc_feature 1..19: note = siRNA antisense sequence
  source 1..19: mol_type = other RNA
ccctagatggaaagataaa

SEQ ID NO: 44018 - RNA, 19 nt, synthetic construct
  misc_feature 1..19: note = siRNA sense sequence
  source 1..19: mol_type = other RNA
ttatctttccatctaggga

SEQ ID NO: 44019 - RNA, 19 nt, synthetic construct
  misc_feature 1..19: note = siRNA antisense sequence
  source 1..19: mol_type = other RNA
tccctagatggaaagataa

SEQ ID NO: 44020 - RNA, 19 nt, synthetic construct
  misc_feature 1..19: note = siRNA sense sequence
  source 1..19: mol_type = other RNA
tttccatctagggatagca

SEQ ID NO: 44021 - RNA, 19 nt, synthetic construct
  misc_feature 1..19: note = siRNA antisense sequence
  source 1..19: mol_type = other RNA
tgctatccctagatggaaa

SEQ ID NO: 44022 - RNA, 19 nt, synthetic construct
  misc_feature 1..19: note = siRNA sense sequence
  source 1..19: mol_type = other RNA
ttccatctagggatagcaa

SEQ ID NO: 44023 - RNA, 19 nt, synthetic construct
  misc_feature 1..19: note = siRNA antisense sequence
  source 1..19: mol_type = other RNA
ttgctatccctagatggaa

SEQ ID NO: 44024 - RNA, 19 nt, synthetic construct
  misc_feature 1..19: note = siRNA sense sequence
  source 1..19: mol_type = other RNA
tccatctagggatagcaaa

SEQ ID NO: 44025 - RNA, 19 nt, synthetic construct
  misc_feature 1..19: note = siRNA antisense sequence
  source 1..19: mol_type = other RNA
tttgctatccctagatgga

SEQ ID NO: 44026 - RNA, 19 nt, synthetic construct
  misc_feature 1..19: note = siRNA sense sequence
  source 1..19: mol_type = other RNA
ccatctagggatagcaaaa

SEQ ID NO: 44027 - RNA, 19 nt, synthetic construct
  misc_feature 1..19: note = siRNA antisense sequence
  source 1..19: mol_type = other RNA
ttttgctatccctagatgg

SEQ ID NO: 44028 - RNA, 19 nt, synthetic construct
  misc_feature 1..19: note = siRNA sense sequence
  source 1..19: mol_type = other RNA
catctagggatagcaaaat

SEQ ID NO: 44029 - RNA, 19 nt, synthetic construct
  misc_feature 1..19: note = siRNA antisense sequence
  source 1..19: mol_type = other RNA
attttgctatccctagatg

SEQ ID NO: 44030 - RNA, 19 nt, synthetic construct
  misc_feature 1..19: note = siRNA sense sequence
  source 1..19: mol_type = other RNA
atctagggatagcaaaata

SEQ ID NO: 44031 - RNA, 19 nt, synthetic construct
  misc_feature 1..19: note = siRNA antisense sequence
  source 1..19: mol_type = other RNA
tattttgctatccctagat

SEQ ID NO: 44032 - RNA, 19 nt, synthetic construct
  misc_feature 1..19: note = siRNA sense sequence
  source 1..19: mol_type = other RNA
tctagggatagcaaaatac

SEQ ID NO: 44033 - RNA, 19 nt, synthetic construct
  misc_feature 1..19: note = siRNA antisense sequence
  source 1..19: mol_type = other RNA
gtattttgctatccctaga

SEQ ID NO: 44034 - RNA, 19 nt, synthetic construct
  misc_feature 1..19: note = siRNA sense sequence
  source 1..19: mol_type = other RNA
ctagggatagcaaaatact

SEQ ID NO: 44035 - RNA, 19 nt, synthetic construct
  misc_feature 1..19: note = siRNA antisense sequence
  source 1..19: mol_type = other RNA
agtattttgctatccctag

SEQ ID NO: 44036 - RNA, 19 nt, synthetic construct
  misc_feature 1..19: note = siRNA sense sequence
  source 1..19: mol_type = other RNA
tagggatagcaaaatactt

SEQ ID NO: 44037 - RNA, 19 nt, synthetic construct
  misc_feature 1..19: note = siRNA antisense sequence
  source 1..19: mol_type = other RNA
aagtattttgctatcccta

SEQ ID NO: 44038 - RNA, 19 nt, synthetic construct
  misc_feature 1..19: note = siRNA sense sequence
  source 1..19: mol_type = other RNA
agggatagcaaaatacttc

SEQ ID NO: 44039 - RNA, 19 nt, synthetic construct
  misc_feature 1..19: note = siRNA antisense sequence
  source 1..19: mol_type = other RNA
gaagtattttgctatccct

SEQ ID NO: 44040 - RNA, 19 nt, synthetic construct
  misc_feature 1..19: note = siRNA sense sequence
  source 1..19: mol_type = other RNA
gggatagcaaaatacttca

SEQ ID NO: 44041 - RNA, 19 nt, synthetic construct
  misc_feature 1..19: note = siRNA antisense sequence
  source 1..19: mol_type = other RNA
tgaagtattttgctatccc

SEQ ID NO: 44042 - RNA, 19 nt, synthetic construct
  misc_feature 1..19: note = siRNA sense sequence
  source 1..19: mol_type = other RNA
ggatagcaaaatacttcac

SEQ ID NO: 44043 - RNA, 19 nt, synthetic construct
  misc_feature 1..19: note = siRNA antisense sequence
  source 1..19: mol_type = other RNA
gtgaagtattttgctatcc

SEQ ID NO: 44044 - RNA, 19 nt, synthetic construct
  misc_feature 1..19: note = siRNA sense sequence
  source 1..19: mol_type = other RNA
gatagcaaaatacttcact

SEQ ID NO: 44045 - RNA, 19 nt, synthetic construct
  misc_feature 1..19: note = siRNA antisense sequence
  source 1..19: mol_type = other RNA
agtgaagtattttgctatc

SEQ ID NO: 44046 - RNA, 19 nt, synthetic construct
  misc_feature 1..19: note = siRNA sense sequence
  source 1..19: mol_type = other RNA
atattctaattacacctcc

SEQ ID NO: 44047 - RNA, 19 nt, synthetic construct
  misc_feature 1..19: note = siRNA antisense sequence
  source 1..19: mol_type = other RNA
ggaggtgtaattagaatat

SEQ ID NO: 44048 - RNA, 19 nt, synthetic construct
  misc_feature 1..19: note = siRNA sense sequence
  source 1..19: mol_type = other RNA
tgtttgctgtattgattag

SEQ ID NO: 44049 - RNA, 19 nt, synthetic construct
  misc_feature 1..19: note = siRNA antisense sequence
  source 1..19: mol_type = other RNA
ctaatcaatacagcaaaca

SEQ ID NO: 44050 - RNA, 19 nt, synthetic construct
  misc_feature 1..19: note = siRNA sense sequence
  source 1..19: mol_type = other RNA
gtttgctgtattgattagt

SEQ ID NO: 44051 - RNA, 19 nt, synthetic construct
  misc_feature 1..19: note = siRNA antisense sequence
  source 1..19: mol_type = other RNA
actaatcaatacagcaaac

SEQ ID NO: 44052 - RNA, 19 nt, synthetic construct
  misc_feature 1..19: note = siRNA sense sequence
  source 1..19: mol_type = other RNA
tgctgtattgattagttac

SEQ ID NO: 44053 - RNA, 19 nt, synthetic construct
  misc_feature 1..19: note = siRNA antisense sequence
  source 1..19: mol_type = other RNA
gtaactaatcaatacagca

SEQ ID NO: 44054 - RNA, 19 nt, synthetic construct
  misc_feature 1..19: note = siRNA sense sequence
  source 1..19: mol_type = other RNA
gtcatttagtaattgcaag

SEQ ID NO: 44055 - RNA, 19 nt, synthetic construct
  misc_feature 1..19: note = siRNA antisense sequence
  source 1..19: mol_type = other RNA
cttgcaattactaaatgac

SEQ ID NO: 44056 - RNA, 19 nt, synthetic construct
  misc_feature 1..19: note = siRNA sense sequence
  source 1..19: mol_type = other RNA
tcatttagtaattgcaagc

SEQ ID NO: 44057 - RNA, 19 nt, synthetic construct
  misc_feature 1..19: note = siRNA antisense sequence
  source 1..19: mol_type = other RNA
gcttgcaattactaaatga

SEQ ID NO: 44058 - RNA, 19 nt, synthetic construct
  misc_feature 1..19: note = siRNA sense sequence
  source 1..19: mol_type = other RNA
catttagtaattgcaagca

SEQ ID NO: 44059 - RNA, 19 nt, synthetic construct
  misc_feature 1..19: note = siRNA antisense sequence
  source 1..19: mol_type = other RNA
tgcttgcaattactaaatg

SEQ ID NO: 44060 - RNA, 19 nt, synthetic construct
  misc_feature 1..19: note = siRNA sense sequence
  source 1..19: mol_type = other RNA
agcaataaaaggcagagtc

SEQ ID NO: 44061 - RNA, 19 nt, synthetic construct
  misc_feature 1..19: note = siRNA antisense sequence
  source 1..19: mol_type = other RNA
gactctgccttttattgct

SEQ ID NO: 44062 - RNA, 19 nt, synthetic construct
  misc_feature 1..19: note = siRNA sense sequence
  source 1..19: mol_type = other RNA
gcaataaaaggcagagtca

SEQ ID NO: 44063 - RNA, 19 nt, synthetic construct
  misc_feature 1..19: note = siRNA antisense sequence
  source 1..19: mol_type = other RNA
tgactctgccttttattgc

SEQ ID NO: 44064 - RNA, 19 nt, synthetic construct
  misc_feature 1..19: note = siRNA sense sequence
  source 1..19: mol_type = other RNA
aaggcagagtcaaagatat

SEQ ID NO: 44065 - RNA, 19 nt, synthetic construct
  misc_feature 1..19: note = siRNA antisense sequence
  source 1..19: mol_type = other RNA
atatctttgactctgcctt

SEQ ID NO: 44066 - RNA, 19 nt, synthetic construct
  misc_feature 1..19: note = siRNA sense sequence
  source 1..19: mol_type = other RNA
ggcagagtcaaagatatgg

SEQ ID NO: 44067 - RNA, 19 nt, synthetic construct
  misc_feature 1..19: note = siRNA antisense sequence
  source 1..19: mol_type = other RNA
ccatatctttgactctgcc

SEQ ID NO: 44068 - RNA, 19 nt, synthetic construct
  misc_feature 1..19: note = siRNA sense sequence
  source 1..19: mol_type = other RNA
gcagagtcaaagatatgga

SEQ ID NO: 44069 - RNA, 19 nt, synthetic construct
  misc_feature 1..19: note = siRNA antisense sequence
  source 1..19: mol_type = other RNA
tccatatctttgactctgc

SEQ ID NO: 44070 - RNA, 19 nt, synthetic construct
  misc_feature 1..19: note = siRNA sense sequence
  source 1..19: mol_type = other RNA
cagagtcaaagatatggaa

SEQ ID NO: 44071 - RNA, 19 nt, synthetic construct
  misc_feature 1..19: note = siRNA antisense sequence
  source 1..19: mol_type = other RNA
ttccatatctttgactctg

SEQ ID NO: 44072 - RNA, 19 nt, synthetic construct
  misc_feature 1..19: note = siRNA sense sequence
  source 1..19: mol_type = other RNA
agagtcaaagatatggaat

SEQ ID NO: 44073 - RNA, 19 nt, synthetic construct
  misc_feature 1..19: note = siRNA antisense sequence
  source 1..19: mol_type = other RNA
attccatatctttgactct

SEQ ID NO: 44074 - RNA, 19 nt, synthetic construct
  misc_feature 1..19: note = siRNA sense sequence
  source 1..19: mol_type = other RNA
gagtcaaagatatggaata

SEQ ID NO: 44075 - RNA, 19 nt, synthetic construct
  misc_feature 1..19: note = siRNA antisense sequence
  source 1..19: mol_type = other RNA
tattccatatctttgactc

SEQ ID NO: 44076 - RNA, 19 nt, synthetic construct
  misc_feature 1..19: note = siRNA sense sequence
  source 1..19: mol_type = other RNA
ctctaaagagttactcaaa

SEQ ID NO: 44077 - RNA, 19 nt, synthetic construct
  misc_feature 1..19: note = siRNA antisense sequence
  source 1..19: mol_type = other RNA
tttgagtaactctttagag

SEQ ID NO: 44078 - RNA, 19 nt, synthetic construct
  misc_feature 1..19: note = siRNA sense sequence
  source 1..19: mol_type = other RNA
gagttactcaaaatccatt

SEQ ID NO: 44079 - RNA, 19 nt, synthetic construct
  misc_feature 1..19: note = siRNA antisense sequence
  source 1..19: mol_type = other RNA
aatggattttgagtaactc

SEQ ID NO: 44080 - RNA, 19 nt, synthetic construct
  misc_feature 1..19: note = siRNA sense sequence
  source 1..19: mol_type = other RNA
agttactcaaaatccattc

SEQ ID NO: 44081 - RNA, 19 nt, synthetic construct
  misc_feature 1..19: note = siRNA antisense sequence
  source 1..19: mol_type = other RNA
gaatggattttgagtaact

SEQ ID NO: 44082 - RNA, 19 nt, synthetic construct
  misc_feature 1..19: note = siRNA sense sequence
  source 1..19: mol_type = other RNA
gttactcaaaatccattct

SEQ ID NO: 44083 - RNA, 19 nt, synthetic construct
  misc_feature 1..19: note = siRNA antisense sequence
  source 1..19: mol_type = other RNA
agaatggattttgagtaac

SEQ ID NO: 44084 - RNA, 19 nt, synthetic construct
  misc_feature 1..19: note = siRNA sense sequence
  source 1..19: mol_type = other RNA
actcaaaatccattctatg

SEQ ID NO: 44085 - RNA, 19 nt, synthetic construct
  misc_feature 1..19: note = siRNA antisense sequence
  source 1..19: mol_type = other RNA
catagaatggattttgagt

SEQ ID NO: 44086 - RNA, 19 nt, synthetic construct
  misc_feature 1..19: note = siRNA sense sequence
  source 1..19: mol_type = other RNA
atccattctatgtttctgt

SEQ ID NO: 44087 - RNA, 19 nt, synthetic construct
  misc_feature 1..19: note = siRNA antisense sequence
  source 1..19: mol_type = other RNA
acagaaacatagaatggat

SEQ ID NO: 44088 - RNA, 19 nt, synthetic construct
  misc_feature 1..19: note = siRNA sense sequence
  source 1..19: mol_type = other RNA
attctatgtttctgtgtgg

SEQ ID NO: 44089 - RNA, 19 nt, synthetic construct
  misc_feature 1..19: note = siRNA antisense sequence
  source 1..19: mol_type = other RNA
ccacacagaaacatagaat

SEQ ID NO: 44090 - RNA, 19 nt, synthetic construct
  misc_feature 1..19: note = siRNA sense sequence
  source 1..19: mol_type = other RNA
ttctatgtttctgtgtggc

SEQ ID NO: 44091 - RNA, 19 nt, synthetic construct
  misc_feature 1..19: note = siRNA antisense sequence
  source 1..19: mol_type = other RNA
gccacacagaaacatagaa

SEQ ID NO: 44092 - RNA, 19 nt, synthetic construct
  misc_feature 1..19: note = siRNA sense sequence
  source 1..19: mol_type = other RNA
tctatgtttctgtgtggcc

SEQ ID NO: 44093 - RNA, 19 nt, synthetic construct
  misc_feature 1..19: note = siRNA antisense sequence
  source 1..19: mol_type = other RNA
ggccacacagaaacataga

SEQ ID NO: 44094 - RNA, 19 nt, synthetic construct
  misc_feature 1..19: note = siRNA sense sequence
  source 1..19: mol_type = other RNA
ctatgtttctgtgtggccc

SEQ ID NO: 44095 - RNA, 19 nt, synthetic construct
  misc_feature 1..19: note = siRNA antisense sequence
  source 1..19: mol_type = other RNA
gggccacacagaaacatag

SEQ ID NO: 44096 - RNA, 19 nt, synthetic construct
  misc_feature 1..19: note = siRNA sense sequence
  source 1..19: mol_type = other RNA
tatgtttctgtgtggccca

SEQ ID NO: 44097 - RNA, 19 nt, synthetic construct
  misc_feature 1..19: note = siRNA antisense sequence
  source 1..19: mol_type = other RNA
tgggccacacagaaacata

SEQ ID NO: 44098 - RNA, 19 nt, synthetic construct
  misc_feature 1..19: note = siRNA sense sequence
  source 1..19: mol_type = other RNA
tgtttctgtgtggcccaat

SEQ ID NO: 44099 - RNA, 19 nt, synthetic construct
  misc_feature 1..19: note = siRNA antisense sequence
  source 1..19: mol_type = other RNA
attgggccacacagaaaca

SEQ ID NO: 44100 - RNA, 19 nt, synthetic construct
  misc_feature 1..19: note = siRNA sense sequence
  source 1..19: mol_type = other RNA
gtttctgtgtggcccaatt

SEQ ID NO: 44101 - RNA, 19 nt, synthetic construct
  misc_feature 1..19: note = siRNA antisense sequence
  source 1..19: mol_type = other RNA
aattgggccacacagaaac

SEQ ID NO: 44102 - RNA, 19 nt, synthetic construct
  misc_feature 1..19: note = siRNA sense sequence
  source 1..19: mol_type = other RNA
tttctgtgtggcccaatta

SEQ ID NO: 44103 - RNA, 19 nt, synthetic construct
  misc_feature 1..19: note = siRNA antisense sequence
  source 1..19: mol_type = other RNA
taattgggccacacagaaa

SEQ ID NO: 44104 - RNA, 19 nt, synthetic construct
  misc_feature 1..19: note = siRNA sense sequence
  source 1..19: mol_type = other RNA
ttctgtgtggcccaattaa

SEQ ID NO: 44105 - RNA, 19 nt, synthetic construct
  misc_feature 1..19: note = siRNA antisense sequence
  source 1..19: mol_type = other RNA
ttaattgggccacacagaa

SEQ ID NO: 44106 - RNA, 19 nt, synthetic construct
  misc_feature 1..19: note = siRNA sense sequence
  source 1..19: mol_type = other RNA
tctgtgtggcccaattaag

SEQ ID NO: 44107 - RNA, 19 nt, synthetic construct
  misc_feature 1..19: note = siRNA antisense sequence
  source 1..19: mol_type = other RNA
cttaattgggccacacaga

SEQ ID NO: 44108 - RNA, 19 nt, synthetic construct
  misc_feature 1..19: note = siRNA sense sequence
  source 1..19: mol_type = other RNA
ctgtgtggcccaattaaga

SEQ ID NO: 44109 - RNA, 19 nt, synthetic construct
  misc_feature 1..19: note = siRNA antisense sequence
  source 1..19: mol_type = other RNA
tcttaattgggccacacag

SEQ ID NO: 44110 - RNA, 19 nt, synthetic construct
  misc_feature 1..19: note = siRNA sense sequence
  source 1..19: mol_type = other RNA
gtggcccaattaagacttt

SEQ ID NO: 44111 - RNA, 19 nt, synthetic construct
  misc_feature 1..19: note = siRNA antisense sequence
  source 1..19: mol_type = other RNA
aaagtcttaattgggccac

SEQ ID NO: 44112 - RNA, 19 nt, synthetic construct
  misc_feature 1..19: note = siRNA sense sequence
  source 1..19: mol_type = other RNA
tggcccaattaagactttt

SEQ ID NO: 44113 - RNA, 19 nt, synthetic construct
  misc_feature 1..19: note = siRNA antisense sequence
  source 1..19: mol_type = other RNA
aaaagtcttaattgggcca

SEQ ID NO: 44114 - RNA, 19 nt, synthetic construct
  misc_feature 1..19: note = siRNA sense sequence
  source 1..19: mol_type = other RNA
ggcccaattaagacttttg

SEQ ID NO: 44115 - RNA, 19 nt, synthetic construct
  misc_feature 1..19: note = siRNA antisense sequence
  source 1..19: mol_type = other RNA
caaaagtcttaattgggcc

SEQ ID NO: 44116 - RNA, 19 nt, synthetic construct
  misc_feature 1..19: note = siRNA sense sequence
  source 1..19: mol_type = other RNA
gcccaattaagacttttgc

SEQ ID NO: 44117 - RNA, 19 nt, synthetic construct
  misc_feature 1..19: note = siRNA antisense sequence
  source 1..19: mol_type = other RNA
gcaaaagtcttaattgggc

SEQ ID NO: 44118 - RNA, 19 nt, synthetic construct
  misc_feature 1..19: note = siRNA sense sequence
  source 1..19: mol_type = other RNA
ccaattaagacttttgcaa

SEQ ID NO: 44119 - RNA, 19 nt, synthetic construct
  misc_feature 1..19: note = siRNA antisense sequence
  source 1..19: mol_type = other RNA
ttgcaaaagtcttaattgg

SEQ ID NO: 44120 - RNA, 19 nt, synthetic construct
  misc_feature 1..19: note = siRNA sense sequence
  source 1..19: mol_type = other RNA
caattaagacttttgcaag

SEQ ID NO: 44121 - RNA, 19 nt, synthetic construct
  misc_feature 1..19: note = siRNA antisense sequence
  source 1..19: mol_type = other RNA
cttgcaaaagtcttaattg

SEQ ID NO: 44122 - RNA, 19 nt, synthetic construct
  misc_feature 1..19: note = siRNA sense sequence
  source 1..19: mol_type = other RNA
aattaagacttttgcaagc

SEQ ID NO: 44123 - RNA, 19 nt, synthetic construct
  misc_feature 1..19: note = siRNA antisense sequence
  source 1..19: mol_type = other RNA
gcttgcaaaagtcttaatt

SEQ ID NO: 44124 - RNA, 19 nt, synthetic construct
  misc_feature 1..19: note = siRNA sense sequence
  source 1..19: mol_type = other RNA
attaagacttttgcaagca

SEQ ID NO: 44125 - RNA, 19 nt, synthetic construct
  misc_feature 1..19: note = siRNA antisense sequence
  source 1..19: mol_type = other RNA
tgcttgcaaaagtcttaat

SEQ ID NO: 44126 - RNA, 19 nt, synthetic construct
  misc_feature 1..19: note = siRNA sense sequence
  source 1..19: mol_type = other RNA
ttaagacttttgcaagcat

SEQ ID NO: 44127 - RNA, 19 nt, synthetic construct
  misc_feature 1..19: note = siRNA antisense sequence
  source 1..19: mol_type = other RNA
atgcttgcaaaagtcttaa

SEQ ID NO: 44128 - RNA, 19 nt, synthetic construct
  misc_feature 1..19: note = siRNA sense sequence
  source 1..19: mol_type = other RNA
taagacttttgcaagcata

SEQ ID NO: 44129 - RNA, 19 nt, synthetic construct
  misc_feature 1..19: note = siRNA antisense sequence
  source 1..19: mol_type = other RNA
tatgcttgcaaaagtctta

SEQ ID NO: 44130 - RNA, 19 nt, synthetic construct
  misc_feature 1..19: note = siRNA sense sequence
  source 1..19: mol_type = other RNA
aagacttttgcaagcatag

SEQ ID NO: 44131 - RNA, 19 nt, synthetic construct
  misc_feature 1..19: note = siRNA antisense sequence
  source 1..19: mol_type = other RNA
ctatgcttgcaaaagtctt

SEQ ID NO: 44132 - RNA, 19 nt, synthetic construct
  misc_feature 1..19: note = siRNA sense sequence
  source 1..19: mol_type = other RNA
agacttttgcaagcatagt

SEQ ID NO: 44133 - RNA, 19 nt, synthetic construct
  misc_feature 1..19: note = siRNA antisense sequence
  source 1..19: mol_type = other RNA
actatgcttgcaaaagtct

SEQ ID NO: 44134 - RNA, 19 nt, synthetic construct
  misc_feature 1..19: note = siRNA sense sequence
  source 1..19: mol_type = other RNA
acttttgcaagcatagtca

SEQ ID NO: 44135 - RNA, 19 nt, synthetic construct
  misc_feature 1..19: note = siRNA antisense sequence
  source 1..19: mol_type = other RNA
tgactatgcttgcaaaagt

SEQ ID NO: 44136 - RNA, 19 nt, synthetic construct
  misc_feature 1..19: note = siRNA sense sequence
  source 1..19: mol_type = other RNA
cttttgcaagcatagtcaa

SEQ ID NO: 44137 - RNA, 19 nt, synthetic construct
  misc_feature 1..19: note = siRNA antisense sequence
  source 1..19: mol_type = other RNA
ttgactatgcttgcaaaag

SEQ ID NO: 44138 - RNA, 19 nt, synthetic construct
  misc_feature 1..19: note = siRNA sense sequence
  source 1..19: mol_type = other RNA
ttttgcaagcatagtcaag

SEQ ID NO: 44139 - RNA, 19 nt, synthetic construct
  misc_feature 1..19: note = siRNA antisense sequence
  source 1..19: mol_type = other RNA
cttgactatgcttgcaaaa

SEQ ID NO: 44140 - RNA, 19 nt, synthetic construct
  misc_feature 1..19: note = siRNA sense sequence
  source 1..19: mol_type = other RNA
tttgcaagcatagtcaagg

SEQ ID NO: 44141 - RNA, 19 nt, synthetic construct
  misc_feature 1..19: note = siRNA antisense sequence
  source 1..19: mol_type = other RNA
ccttgactatgcttgcaaa

SEQ ID NO: 44142 - RNA, 19 nt, synthetic construct
  misc_feature 1..19: note = siRNA sense sequence
  source 1..19: mol_type = other RNA
ttgcaagcatagtcaagga

SEQ ID NO: 44143 - RNA, 19 nt, synthetic construct
  misc_feature 1..19: note = siRNA antisense sequence
  source 1..19: mol_type = other RNA
tccttgactatgcttgcaa

SEQ ID NO: 44144 - RNA, 19 nt, synthetic construct
  misc_feature 1..19: note = siRNA sense sequence
  source 1..19: mol_type = other RNA
tgcaagcatagtcaaggaa

SEQ ID NO: 44145 - RNA, 19 nt, synthetic construct
  misc_feature 1..19: note = siRNA antisense sequence
  source 1..19: mol_type = other RNA
ttccttgactatgcttgca

SEQ ID NO: 44146 - RNA, 19 nt, synthetic construct
  misc_feature 1..19: note = siRNA sense sequence
  source 1..19: mol_type = other RNA
gcaagcatagtcaaggaat

SEQ ID NO: 44147 - RNA, 19 nt, synthetic construct
  misc_feature 1..19: note = siRNA antisense sequence
  source 1..19: mol_type = other RNA
attccttgactatgcttgc

SEQ ID NO: 44148 - RNA, 19 nt, synthetic construct
  misc_feature 1..19: note = siRNA sense sequence
  source 1..19: mol_type = other RNA
caagcatagtcaaggaatt

SEQ ID NO: 44149 - RNA, 19 nt, synthetic construct
  misc_feature 1..19: note = siRNA antisense sequence
  source 1..19: mol_type = other RNA
aattccttgactatgcttg

SEQ ID NO: 44150 - RNA, 19 nt, synthetic construct
  misc_feature 1..19: note = siRNA sense sequence
  source 1..19: mol_type = other RNA
tacccaagacagagtaaag

SEQ ID NO: 44151 - RNA, 19 nt, synthetic construct
  misc_feature 1..19: note = siRNA antisense sequence
  source 1..19: mol_type = other RNA
ctttactctgtcttgggta

SEQ ID NO: 44152 - RNA, 19 nt, synthetic construct
  misc_feature 1..19: note = siRNA sense sequence
  source 1..19: mol_type = other RNA
acccaagacagagtaaagg

SEQ ID NO: 44153 - RNA, 19 nt, synthetic construct
  misc_feature 1..19: note = siRNA antisense sequence
  source 1..19: mol_type = other RNA
cctttactctgtcttgggt

SEQ ID NO: 44154 - RNA, 19 nt, synthetic construct
  misc_feature 1..19: note = siRNA sense sequence
  source 1..19: mol_type = other RNA
cccaagacagagtaaaggc

SEQ ID NO: 44155 - RNA, 19 nt, synthetic construct
  misc_feature 1..19: note = siRNA antisense sequence
  source 1..19: mol_type = other RNA
gcctttactctgtcttggg

SEQ ID NO: 44156 - RNA, 19 nt, synthetic construct
  misc_feature 1..19: note = siRNA sense sequence
  source 1..19: mol_type = other RNA
ccaagacagagtaaaggct

SEQ ID NO: 44157 - RNA, 19 nt, synthetic construct
  misc_feature 1..19: note = siRNA antisense sequence
  source 1..19: mol_type = other RNA
agcctttactctgtcttgg

SEQ ID NO: 44158 - RNA, 19 nt, synthetic construct
  misc_feature 1..19: note = siRNA sense sequence
  source 1..19: mol_type = other RNA
caagacagagtaaaggcta

SEQ ID NO: 44159 - RNA, 19 nt, synthetic construct
  misc_feature 1..19: note = siRNA antisense sequence
  source 1..19: mol_type = other RNA
tagcctttactctgtcttg

SEQ ID NO: 44160 - RNA, 19 nt, synthetic construct
  misc_feature 1..19: note = siRNA sense sequence
  source 1..19: mol_type = other RNA
aagacagagtaaaggctat

SEQ ID NO: 44161 - RNA, 19 nt, synthetic construct
  misc_feature 1..19: note = siRNA antisense sequence
  source 1..19: mol_type = other RNA
atagcctttactctgtctt

SEQ ID NO: 44162 - RNA, 19 nt, synthetic construct
  misc_feature 1..19: note = siRNA sense sequence
  source 1..19: mol_type = other RNA
agacagagtaaaggctata

SEQ ID NO: 44163 - RNA, 19 nt, synthetic construct
  misc_feature 1..19: note = siRNA antisense sequence
  source 1..19: mol_type = other RNA
tatagcctttactctgtct

SEQ ID NO: 44164 - RNA, 19 nt, synthetic construct
  misc_feature 1..19: note = siRNA sense sequence
  source 1..19: mol_type = other RNA
gacagagtaaaggctataa

SEQ ID NO: 44165 - RNA, 19 nt, synthetic construct
  misc_feature 1..19: note = siRNA antisense sequence
  source 1..19: mol_type = other RNA
ttatagcctttactctgtc

SEQ ID NO: 44166 - RNA, 19 nt, synthetic construct
  misc_feature 1..19: note = siRNA sense sequence
  source 1..19: mol_type = other RNA
cagagtaaaggctataaaa

SEQ ID NO: 44167 - RNA, 19 nt, synthetic construct
  misc_feature 1..19: note = siRNA antisense sequence
  source 1..19: mol_type = other RNA
ttttatagcctttactctg

SEQ ID NO: 44168 - RNA, 19 nt, synthetic construct
  misc_feature 1..19: note = siRNA sense sequence
  source 1..19: mol_type = other RNA
gtaaaggctataaaattgc

SEQ ID NO: 44169 - RNA, 19 nt, synthetic construct
  misc_feature 1..19: note = siRNA antisense sequence
  source 1..19: mol_type = other RNA
gcaattttatagcctttac

SEQ ID NO: 44170 - RNA, 19 nt, synthetic construct
  misc_feature 1..19: note = siRNA sense sequence
  source 1..19: mol_type = other RNA
taaaggctataaaattgcc

SEQ ID NO: 44171 - RNA, 19 nt, synthetic construct
  misc_feature 1..19: note = siRNA antisense sequence
  source 1..19: mol_type = other RNA
ggcaattttatagccttta

SEQ ID NO: 44172 - RNA, 19 nt, synthetic construct
  misc_feature 1..19: note = siRNA sense sequence
  source 1..19: mol_type = other RNA
actctgagcttgccattaa

SEQ ID NO: 44173 - RNA, 19 nt, synthetic construct
  misc_feature 1..19: note = siRNA antisense sequence
  source 1..19: mol_type = other RNA
ttaatggcaagctcagagt

SEQ ID NO: 44174 - RNA, 19 nt, synthetic construct
  misc_feature 1..19: note = siRNA sense sequence
  source 1..19: mol_type = other RNA
ctctgagcttgccattaaa

SEQ ID NO: 44175 - RNA, 19 nt, synthetic construct
  misc_feature 1..19: note = siRNA antisense sequence
  source 1..19: mol_type = other RNA
tttaatggcaagctcagag

SEQ ID NO: 44176 - RNA, 19 nt, synthetic construct
  misc_feature 1..19: note = siRNA sense sequence
  source 1..19: mol_type = other RNA
tctgagcttgccattaaag

SEQ ID NO: 44177 - RNA, 19 nt, synthetic construct
  misc_feature 1..19: note = siRNA antisense sequence
  source 1..19: mol_type = other RNA
ctttaatggcaagctcaga

SEQ ID NO: 44178 - RNA, 19 nt, synthetic construct
  misc_feature 1..19: note = siRNA sense sequence
  source 1..19: mol_type = other RNA
ctgagcttgccattaaaga

SEQ ID NO: 44179 - RNA, 19 nt, synthetic construct
  misc_feature 1..19: note = siRNA antisense sequence
  source 1..19: mol_type = other RNA
tctttaatggcaagctcag

SEQ ID NO: 44180 - RNA, 19 nt, synthetic construct
  misc_feature 1..19: note = siRNA sense sequence
  source 1..19: mol_type = other RNA
tgagcttgccattaaagat

SEQ ID NO: 44181 - RNA, 19 nt, synthetic construct
  misc_feature 1..19: note = siRNA antisense sequence
  source 1..19: mol_type = other RNA
atctttaatggcaagctca

SEQ ID NO: 44182 - RNA, 19 nt, synthetic construct
  misc_feature 1..19: note = siRNA sense sequence
  source 1..19: mol_type = other RNA
gagcttgccattaaagata

SEQ ID NO: 44183 - RNA, 19 nt, synthetic construct
  misc_feature 1..19: note = siRNA antisense sequence
  source 1..19: mol_type = other RNA
tatctttaatggcaagctc

SEQ ID NO: 44184 - RNA, 19 nt, synthetic construct
  misc_feature 1..19: note = siRNA sense sequence
  source 1..19: mol_type = other RNA
agcttgccattaaagatat

SEQ ID NO: 44185 - RNA, 19 nt, synthetic construct
  misc_feature 1..19: note = siRNA antisense sequence
  source 1..19: mol_type = other RNA
atatctttaatggcaagct

SEQ ID NO: 44186 - RNA, 19 nt, synthetic construct
  misc_feature 1..19: note = siRNA sense sequence
  source 1..19: mol_type = other RNA
gcttgccattaaagatatg

SEQ ID NO: 44187 - RNA, 19 nt, synthetic construct
  misc_feature 1..19: note = siRNA antisense sequence
  source 1..19: mol_type = other RNA
catatctttaatggcaagc

SEQ ID NO: 44188 - RNA, 19 nt, synthetic construct
  misc_feature 1..19: note = siRNA sense sequence
  source 1..19: mol_type = other RNA
cttgccattaaagatatga

SEQ ID NO: 44189 - RNA, 19 nt, synthetic construct
  misc_feature 1..19: note = siRNA antisense sequence
  source 1..19: mol_type = other RNA
tcatatctttaatggcaag

SEQ ID NO: 44190 - RNA, 19 nt, synthetic construct
  misc_feature 1..19: note = siRNA sense sequence
  source 1..19: mol_type = other RNA
cattaaagatatgatggtg

SEQ ID NO: 44191 - RNA, 19 nt, synthetic construct
  misc_feature 1..19: note = siRNA antisense sequence
  source 1..19: mol_type = other RNA
caccatcatatctttaatg

SEQ ID NO: 44192 - RNA, 19 nt, synthetic construct
  misc_feature 1..19: note = siRNA sense sequence
  source 1..19: mol_type = other RNA
cattatggaggtcttattg

SEQ ID NO: 44193 - RNA, 19 nt, synthetic construct
  misc_feature 1..19: note = siRNA antisense sequence
  source 1..19: mol_type = other RNA
caataagacctccataatg

SEQ ID NO: 44194 - RNA, 19 nt, synthetic construct
  misc_feature 1..19: note = siRNA sense sequence
  source 1..19: mol_type = other RNA
attatggaggtcttattga

SEQ ID NO: 44195 - RNA, 19 nt, synthetic construct
  misc_feature 1..19: note = siRNA antisense sequence
  source 1..19: mol_type = other RNA
tcaataagacctccataat

SEQ ID NO: 44196 - RNA, 19 nt, synthetic construct
  misc_feature 1..19: note = siRNA sense sequence
  source 1..19: mol_type = other RNA
ttatggaggtcttattgat

SEQ ID NO: 44197 - RNA, 19 nt, synthetic construct
  misc_feature 1..19: note = siRNA antisense sequence
  source 1..19: mol_type = other RNA
atcaataagacctccataa

SEQ ID NO: 44198 - RNA, 19 nt, synthetic construct
  misc_feature 1..19: note = siRNA sense sequence
  source 1..19: mol_type = other RNA
tatggaggtcttattgatc

SEQ ID NO: 44199 - RNA, 19 nt, synthetic construct
  misc_feature 1..19: note = siRNA antisense sequence
  source 1..19: mol_type = other RNA
gatcaataagacctccata

SEQ ID NO: 44200 - RNA, 19 nt, synthetic construct
  misc_feature 1..19: note = siRNA sense sequence
  source 1..19: mol_type = other RNA
atggaggtcttattgatcc

SEQ ID NO: 44201 - RNA, 19 nt, synthetic construct
  misc_feature 1..19: note = siRNA antisense sequence
  source 1..19: mol_type = other RNA
ggatcaataagacctccat

SEQ ID NO: 44202 - RNA, 19 nt, synthetic construct
  misc_feature 1..19: note = siRNA sense sequence
  source 1..19: mol_type = other RNA
atatgtcaaataagtgtgc

SEQ ID NO: 44203 - RNA, 19 nt, synthetic construct
  misc_feature 1..19: note = siRNA antisense sequence
  source 1..19: mol_type = other RNA
gcacacttatttgacatat

SEQ ID NO: 44204 - RNA, 19 nt, synthetic construct
  misc_feature 1..19: note = siRNA sense sequence
  source 1..19: mol_type = other RNA
tatgtcaaataagtgtgca

SEQ ID NO: 44205 - RNA, 19 nt, synthetic construct
  misc_feature 1..19: note = siRNA antisense sequence
  source 1..19: mol_type = other RNA
tgcacacttatttgacata

SEQ ID NO: 44206 - RNA, 19 nt, synthetic construct
  misc_feature 1..19: note = siRNA sense sequence
  source 1..19: mol_type = other RNA
aaataagtgtgcattaccc

SEQ ID NO: 44207 - RNA, 19 nt, synthetic construct
  misc_feature 1..19: note = siRNA antisense sequence
  source 1..19: mol_type = other RNA
gggtaatgcacacttattt

SEQ ID NO: 44208 - RNA, 19 nt, synthetic construct
  misc_feature 1..19: note = siRNA sense sequence
  source 1..19: mol_type = other RNA
aataagtgtgcattaccct

SEQ ID NO: 44209 - RNA, 19 nt, synthetic construct
  misc_feature 1..19: note = siRNA antisense sequence
  source 1..19: mol_type = other RNA
agggtaatgcacacttatt

SEQ ID NO: 44210 - RNA, 19 nt, synthetic construct
  misc_feature 1..19: note = siRNA sense sequence
  source 1..19: mol_type = other RNA
ataagtgtgcattacccta

SEQ ID NO: 44211 - RNA, 19 nt, synthetic construct
  misc_feature 1..19: note = siRNA antisense sequence
  source 1..19: mol_type = other RNA
tagggtaatgcacacttat

SEQ ID NO: 44212 - RNA, 19 nt, synthetic construct
  misc_feature 1..19: note = siRNA sense sequence
  source 1..19: mol_type = other RNA
taagtgtgcattaccctaa

SEQ ID NO: 44213 - RNA, 19 nt, synthetic construct
  misc_feature 1..19: note = siRNA antisense sequence
  source 1..19: mol_type = other RNA
ttagggtaatgcacactta

SEQ ID NO: 44214 - RNA, 19 nt, synthetic construct
  misc_feature 1..19: note = siRNA sense sequence
  source 1..19: mol_type = other RNA
aagtgtgcattaccctaaa

SEQ ID NO: 44215 - RNA, 19 nt, synthetic construct
  misc_feature 1..19: note = siRNA antisense sequence
  source 1..19: mol_type = other RNA
tttagggtaatgcacactt

SEQ ID NO: 44216 - RNA, 19 nt, synthetic construct
  misc_feature 1..19: note = siRNA sense sequence
  source 1..19: mol_type = other RNA
agtgtgcattaccctaaat

SEQ ID NO: 44217 - RNA, 19 nt, synthetic construct
  misc_feature 1..19: note = siRNA antisense sequence
  source 1..19: mol_type = other RNA
atttagggtaatgcacact

SEQ ID NO: 44218 - RNA, 19 nt, synthetic construct
  misc_feature 1..19: note = siRNA sense sequence
  source 1..19: mol_type = other RNA
gtgtgcattaccctaaata

SEQ ID NO: 44219 - RNA, 19 nt, synthetic construct
  misc_feature 1..19: note = siRNA antisense sequence
  source 1..19: mol_type = other RNA
tatttagggtaatgcacac

SEQ ID NO: 44220 - RNA, 19 nt, synthetic construct
  misc_feature 1..19: note = siRNA sense sequence
  source 1..19: mol_type = other RNA
tgtgcattaccctaaataa

SEQ ID NO: 44221 - RNA, 19 nt, synthetic construct
  misc_feature 1..19: note = siRNA antisense sequence
  source 1..19: mol_type = other RNA
ttatttagggtaatgcaca

SEQ ID NO: 44222 - RNA, 19 nt, synthetic construct
  misc_feature 1..19: note = siRNA sense sequence
  source 1..19: mol_type = other RNA
gtgcattaccctaaataaa

SEQ ID NO: 44223 - RNA, 19 nt, synthetic construct
  misc_feature 1..19: note = siRNA antisense sequence
  source 1..19: mol_type = other RNA
tttatttagggtaatgcac

SEQ ID NO: 44224 - RNA, 19 nt, synthetic construct
  misc_feature 1..19: note = siRNA sense sequence
  source 1..19: mol_type = other RNA
agtaaattgtgaggcttga

SEQ ID NO: 44225 - RNA, 19 nt, synthetic construct
  misc_feature 1..19: note = siRNA antisense sequence
  source 1..19: mol_type = other RNA
tcaagcctcacaatttact

SEQ ID NO: 44226 - RNA, 19 nt, synthetic construct
  misc_feature 1..19: note = siRNA sense sequence
  source 1..19: mol_type = other RNA
gtaaattgtgaggcttgat

SEQ ID NO: 44227 - RNA, 19 nt, synthetic construct
  misc_feature 1..19: note = siRNA antisense sequence
  source 1..19: mol_type = other RNA
atcaagcctcacaatttac

SEQ ID NO: 44228 - RNA, 19 nt, synthetic construct
  misc_feature 1..19: note = siRNA sense sequence
  source 1..19: mol_type = other RNA
taaattgtgaggcttgata

SEQ ID NO: 44229 - RNA, 19 nt, synthetic construct
  misc_feature 1..19: note = siRNA antisense sequence
  source 1..19: mol_type = other RNA
tatcaagcctcacaattta

SEQ ID NO: 44230 - RNA, 19 nt, synthetic construct
  misc_feature 1..19: note = siRNA sense sequence
  source 1..19: mol_type = other RNA
ttgtgaggcttgatataaa

SEQ ID NO: 44231 - RNA, 19 nt, synthetic construct
  misc_feature 1..19: note = siRNA antisense sequence
  source 1..19: mol_type = other RNA
tttatatcaagcctcacaa

SEQ ID NO: 44232 - RNA, 19 nt, synthetic construct
  misc_feature 1..19: note = siRNA sense sequence
  source 1..19: mol_type = other RNA
gtgaggcttgatataaaag

SEQ ID NO: 44233 - RNA, 19 nt, synthetic construct
  misc_feature 1..19: note = siRNA antisense sequence
  source 1..19: mol_type = other RNA
cttttatatcaagcctcac

SEQ ID NO: 44234 - RNA, 19 nt, synthetic construct
  misc_feature 1..19: note = siRNA sense sequence
  source 1..19: mol_type = other RNA
tgaggcttgatataaaagt

SEQ ID NO: 44235 - RNA, 19 nt, synthetic construct
  misc_feature 1..19: note = siRNA antisense sequence
  source 1..19: mol_type = other RNA
acttttatatcaagcctca

SEQ ID NO: 44236 - RNA, 19 nt, synthetic construct
  misc_feature 1..19: note = siRNA sense sequence
  source 1..19: mol_type = other RNA
gaggcttgatataaaagtg

SEQ ID NO: 44237 - RNA, 19 nt, synthetic construct
  misc_feature 1..19: note = siRNA antisense sequence
  source 1..19: mol_type = other RNA
cacttttatatcaagcctc

SEQ ID NO: 44238 - RNA, 19 nt, synthetic construct
  misc_feature 1..19: note = siRNA sense sequence
  source 1..19: mol_type = other RNA
aggcttgatataaaagtga

SEQ ID NO: 44239 - RNA, 19 nt, synthetic construct
  misc_feature 1..19: note = siRNA antisense sequence
  source 1..19: mol_type = other RNA
tcacttttatatcaagcct

SEQ ID NO: 44240 - RNA, 19 nt, synthetic construct
  misc_feature 1..19: note = siRNA sense sequence
  source 1..19: mol_type = other RNA
aatgtctagattgttcaca

SEQ ID NO: 44241 - RNA, 19 nt, synthetic construct
  misc_feature 1..19: note = siRNA antisense sequence
  source 1..19: mol_type = other RNA
tgtgaacaatctagacatt

SEQ ID NO: 44242 - RNA, 19 nt, synthetic construct
  misc_feature 1..19: note = siRNA sense sequence
  source 1..19: mol_type = other RNA
tgtctagattgttcacatc

SEQ ID NO: 44243 - RNA, 19 nt, synthetic construct
  misc_feature 1..19: note = siRNA antisense sequence
  source 1..19: mol_type = other RNA
gatgtgaacaatctagaca

SEQ ID NO: 44244 - RNA, 19 nt, synthetic construct
  misc_feature 1..19: note = siRNA sense sequence
  source 1..19: mol_type = other RNA
tctagattgttcacatcaa

SEQ ID NO: 44245 - RNA, 19 nt, synthetic construct
  misc_feature 1..19: note = siRNA antisense sequence
  source 1..19: mol_type = other RNA
ttgatgtgaacaatctaga

SEQ ID NO: 44246 - RNA, 19 nt, synthetic construct
  misc_feature 1..19: note = siRNA sense sequence
  source 1..19: mol_type = other RNA
ctagattgttcacatcaaa

SEQ ID NO: 44247 - RNA, 19 nt, synthetic construct
  misc_feature 1..19: note = siRNA antisense sequence
  source 1..19: mol_type = other RNA
tttgatgtgaacaatctag

SEQ ID NO: 44248 - RNA, 19 nt, synthetic construct
  misc_feature 1..19: note = siRNA sense sequence
  source 1..19: mol_type = other RNA
agattgttcacatcaaaag

SEQ ID NO: 44249 - RNA, 19 nt, synthetic construct
  misc_feature 1..19: note = siRNA antisense sequence
  source 1..19: mol_type = other RNA
cttttgatgtgaacaatct

SEQ ID NO: 44250 - RNA, 19 nt, synthetic construct
  misc_feature 1..19: note = siRNA sense sequence
  source 1..19: mol_type = other RNA
gattgttcacatcaaaagt

SEQ ID NO: 44251 - RNA, 19 nt, synthetic construct
  misc_feature 1..19: note = siRNA antisense sequence
  source 1..19: mol_type = other RNA
acttttgatgtgaacaatc

SEQ ID NO: 44252 - RNA, 19 nt, synthetic construct
  misc_feature 1..19: note = siRNA sense sequence
  source 1..19: mol_type = other RNA
attgttcacatcaaaagtg

SEQ ID NO: 44253 - RNA, 19 nt, synthetic construct
  misc_feature 1..19: note = siRNA antisense sequence
  source 1..19: mol_type = other RNA
cacttttgatgtgaacaat

SEQ ID NO: 44254 - RNA, 19 nt, synthetic construct
  misc_feature 1..19: note = siRNA sense sequence
  source 1..19: mol_type = other RNA
tgttcacatcaaaagtgta

SEQ ID NO: 44255 - RNA, 19 nt, synthetic construct
  misc_feature 1..19: note = siRNA antisense sequence
  source 1..19: mol_type = other RNA
tacacttttgatgtgaaca

SEQ ID NO: 44256 - RNA, 19 nt, synthetic construct
  misc_feature 1..19: note = siRNA sense sequence
  source 1..19: mol_type = other RNA
gttcacatcaaaagtgtag

SEQ ID NO: 44257 - RNA, 19 nt, synthetic construct
  misc_feature 1..19: note = siRNA antisense sequence
  source 1..19: mol_type = other RNA
ctacacttttgatgtgaac

SEQ ID NO: 44258 - RNA, 19 nt, synthetic construct
  misc_feature 1..19: note = siRNA sense sequence
  source 1..19: mol_type = other RNA
acatcaaaagtgtagcata

SEQ ID NO: 44259 - RNA, 19 nt, synthetic construct
  misc_feature 1..19: note = siRNA antisense sequence
  source 1..19: mol_type = other RNA
tatgctacacttttgatgt

SEQ ID NO: 44260 - RNA, 19 nt, synthetic construct
  misc_feature 1..19: note = siRNA sense sequence
  source 1..19: mol_type = other RNA
catcaaaagtgtagcatag

SEQ ID NO: 44261 - RNA, 19 nt, synthetic construct
  misc_feature 1..19: note = siRNA antisense sequence
  source 1..19: mol_type = other RNA
ctatgctacacttttgatg

SEQ ID NO: 44262 - RNA, 19 nt, synthetic construct
  misc_feature 1..19: note = siRNA sense sequence
  source 1..19: mol_type = other RNA
aaaagtgtagcatagcatt

SEQ ID NO: 44263 - RNA, 19 nt, synthetic construct
  misc_feature 1..19: note = siRNA antisense sequence
  source 1..19: mol_type = other RNA
aatgctatgctacactttt

SEQ ID NO: 44264 - RNA, 19 nt, synthetic construct
  misc_feature 1..19: note = siRNA sense sequence
  source 1..19: mol_type = other RNA
tttactgctgattttatgg

SEQ ID NO: 44265 - RNA, 19 nt, synthetic construct
  misc_feature 1..19: note = siRNA antisense sequence
  source 1..19: mol_type = other RNA
ccataaaatcagcagtaaa

SEQ ID NO: 44266 - RNA, 19 nt, synthetic construct
  misc_feature 1..19: note = siRNA sense sequence
  source 1..19: mol_type = other RNA
ttactgctgattttatggc

SEQ ID NO: 44267 - RNA, 19 nt, synthetic construct
  misc_feature 1..19: note = siRNA antisense sequence
  source 1..19: mol_type = other RNA
gccataaaatcagcagtaa

SEQ ID NO: 44268 - RNA, 19 nt, synthetic construct
  misc_feature 1..19: note = siRNA sense sequence
  source 1..19: mol_type = other RNA
tactgctgattttatggcc

SEQ ID NO: 44269 - RNA, 19 nt, synthetic construct
  misc_feature 1..19: note = siRNA antisense sequence
  source 1..19: mol_type = other RNA
ggccataaaatcagcagta

SEQ ID NO: 44270 - RNA, 19 nt, synthetic construct
  misc_feature 1..19: note = siRNA sense sequence
  source 1..19: mol_type = other RNA
actgctgattttatggcca

SEQ ID NO: 44271 - RNA, 19 nt, synthetic construct
  misc_feature 1..19: note = siRNA antisense sequence
  source 1..19: mol_type = other RNA
tggccataaaatcagcagt

SEQ ID NO: 44272 - RNA, 19 nt, synthetic construct
  misc_feature 1..19: note = siRNA sense sequence
  source 1..19: mol_type = other RNA
tgctgattttatggccatt

SEQ ID NO: 44273 - RNA, 19 nt, synthetic construct
  misc_feature 1..19: note = siRNA antisense sequence
  source 1..19: mol_type = other RNA
aatggccataaaatcagca

SEQ ID NO: 44274 - RNA, 19 nt, synthetic construct
  misc_feature 1..19: note = siRNA sense sequence
  source 1..19: mol_type = other RNA
gctgattttatggccattt

SEQ ID NO: 44275 - RNA, 19 nt, synthetic construct
  misc_feature 1..19: note = siRNA antisense sequence
  source 1..19: mol_type = other RNA
aaatggccataaaatcagc

SEQ ID NO: 44276 - RNA, 19 nt, synthetic construct
  misc_feature 1..19: note = siRNA sense sequence
  source 1..19: mol_type = other RNA
tgattttatggccatttcc

SEQ ID NO: 44277 - RNA, 19 nt, synthetic construct
  misc_feature 1..19: note = siRNA antisense sequence
  source 1..19: mol_type = other RNA
ggaaatggccataaaatca

SEQ ID NO: 44278 - RNA, 19 nt, synthetic construct
  misc_feature 1..19: note = siRNA sense sequence
  source 1..19: mol_type = other RNA
tttatggccatttccctag

SEQ ID NO: 44279 - RNA, 19 nt, synthetic construct
  misc_feature 1..19: note = siRNA antisense sequence
  source 1..19: mol_type = other RNA
ctagggaaatggccataaa

SEQ ID NO: 44280 - RNA, 19 nt, synthetic construct
  misc_feature 1..19: note = siRNA sense sequence
  source 1..19: mol_type = other RNA
ttatggccatttccctaga

SEQ ID NO: 44281 - RNA, 19 nt, synthetic construct
  misc_feature 1..19: note = siRNA antisense sequence
  source 1..19: mol_type = other RNA
tctagggaaatggccataa

SEQ ID NO: 44282 - RNA, 19 nt, synthetic construct
  misc_feature 1..19: note = siRNA sense sequence
  source 1..19: mol_type = other RNA
tatggccatttccctagaa

SEQ ID NO: 44283 - RNA, 19 nt, synthetic construct
  misc_feature 1..19: note = siRNA antisense sequence
  source 1..19: mol_type = other RNA
ttctagggaaatggccata

SEQ ID NO: 44284 - RNA, 19 nt, synthetic construct
  misc_feature 1..19: note = siRNA sense sequence
  source 1..19: mol_type = other RNA
ccatttccctagaagcctt

SEQ ID NO: 44285 - RNA, 19 nt, synthetic construct
  misc_feature 1..19: note = siRNA antisense sequence
  source 1..19: mol_type = other RNA
aaggcttctagggaaatgg

SEQ ID NO: 44286 - RNA, 19 nt, synthetic construct
  misc_feature 1..19: note = siRNA sense sequence
  source 1..19: mol_type = other RNA
catttccctagaagcctta

SEQ ID NO: 44287 - RNA, 19 nt, synthetic construct
  misc_feature 1..19: note = siRNA antisense sequence
  source 1..19: mol_type = other RNA
taaggcttctagggaaatg

SEQ ID NO: 44288 - RNA, 19 nt, synthetic construct
  misc_feature 1..19: note = siRNA sense sequence
  source 1..19: mol_type = other RNA
atttccctagaagccttaa

SEQ ID NO: 44289 - RNA, 19 nt, synthetic construct
  misc_feature 1..19: note = siRNA antisense sequence
  source 1..19: mol_type = other RNA
ttaaggcttctagggaaat

SEQ ID NO: 44290 - RNA, 19 nt, synthetic construct
  misc_feature 1..19: note = siRNA sense sequence
  source 1..19: mol_type = other RNA
tttccctagaagccttaaa

SEQ ID NO: 44291 - RNA, 19 nt, synthetic construct
  misc_feature 1..19: note = siRNA antisense sequence
  source 1..19: mol_type = other RNA
tttaaggcttctagggaaa

SEQ ID NO: 44292 - RNA, 19 nt, synthetic construct
  misc_feature 1..19: note = siRNA sense sequence
  source 1..19: mol_type = other RNA
ttccctagaagccttaaat

SEQ ID NO: 44293 - RNA, 19 nt, synthetic construct
  misc_feature 1..19: note = siRNA antisense sequence
  source 1..19: mol_type = other RNA
atttaaggcttctagggaa

SEQ ID NO: 44294 - RNA, 19 nt, synthetic construct
  misc_feature 1..19: note = siRNA sense sequence
  source 1..19: mol_type = other RNA
tccctagaagccttaaatc

SEQ ID NO: 44295 - RNA, 19 nt, synthetic construct
  misc_feature 1..19: note = siRNA antisense sequence
  source 1..19: mol_type = other RNA
gatttaaggcttctaggga

SEQ ID NO: 44296 - RNA, 19 nt, synthetic construct
  misc_feature 1..19: note = siRNA sense sequence
  source 1..19: mol_type = other RNA
ccctagaagccttaaatct

SEQ ID NO: 44297 - RNA, 19 nt, synthetic construct
  misc_feature 1..19: note = siRNA antisense sequence
  source 1..19: mol_type = other RNA
agatttaaggcttctaggg

SEQ ID NO: 44298 - RNA, 19 nt, synthetic construct
  misc_feature 1..19: note = siRNA sense sequence
  source 1..19: mol_type = other RNA
cctagaagccttaaatctg

SEQ ID NO: 44299 - RNA, 19 nt, synthetic construct
  misc_feature 1..19: note = siRNA antisense sequence
  source 1..19: mol_type = other RNA
cagatttaaggcttctagg

SEQ ID NO: 44300 - RNA, 19 nt, synthetic construct
  misc_feature 1..19: note = siRNA sense sequence
  source 1..19: mol_type = other RNA
ggcctgattcattgtttgt

SEQ ID NO: 44301 - RNA, 19 nt, synthetic construct
  misc_feature 1..19: note = siRNA antisense sequence
  source 1..19: mol_type = other RNA
acaaacaatgaatcaggcc

SEQ ID NO: 44302 - RNA, 19 nt, synthetic construct
  misc_feature 1..19: note = siRNA sense sequence
  source 1..19: mol_type = other RNA
cctgattcattgtttgtag

SEQ ID NO: 44303 - RNA, 19 nt, synthetic construct
  misc_feature 1..19: note = siRNA antisense sequence
  source 1..19: mol_type = other RNA
ctacaaacaatgaatcagg

SEQ ID NO: 44304 - RNA, 19 nt, synthetic construct
  misc_feature 1..19: note = siRNA sense sequence
  source 1..19: mol_type = other RNA
ctgattcattgtttgtagg

SEQ ID NO: 44305 - RNA, 19 nt, synthetic construct
  misc_feature 1..19: note = siRNA antisense sequence
  source 1..19: mol_type = other RNA
cctacaaacaatgaatcag

SEQ ID NO: 44306 - RNA, 19 nt, synthetic construct
  misc_feature 1..19: note = siRNA sense sequence
  source 1..19: mol_type = other RNA
tgattcattgtttgtaggt

SEQ ID NO: 44307 - RNA, 19 nt, synthetic construct
  misc_feature 1..19: note = siRNA antisense sequence
  source 1..19: mol_type = other RNA
acctacaaacaatgaatca

SEQ ID NO: 44308 - RNA, 19 nt, synthetic construct
  misc_feature 1..19: note = siRNA sense sequence
  source 1..19: mol_type = other RNA
gattcattgtttgtaggtc

SEQ ID NO: 44309 - RNA, 19 nt, synthetic construct
  misc_feature 1..19: note = siRNA antisense sequence
  source 1..19: mol_type = other RNA
gacctacaaacaatgaatc

SEQ ID NO: 44310 - RNA, 19 nt, synthetic construct
  misc_feature 1..19: note = siRNA sense sequence
  source 1..19: mol_type = other RNA
attcattgtttgtaggtct

SEQ ID NO: 44311 - RNA, 19 nt, synthetic construct
  misc_feature 1..19: note = siRNA antisense sequence
  source 1..19: mol_type = other RNA
agacctacaaacaatgaat

SEQ ID NO: 44312 - RNA, 19 nt, synthetic construct
  misc_feature 1..19: note = siRNA sense sequence
  source 1..19: mol_type = other RNA
ttcattgtttgtaggtctg

SEQ ID NO: 44313 - RNA, 19 nt, synthetic construct
  misc_feature 1..19: note = siRNA antisense sequence
  source 1..19: mol_type = other RNA
cagacctacaaacaatgaa

SEQ ID NO: 44314 - RNA, 19 nt, synthetic construct
  misc_feature 1..19: note = siRNA sense sequence
  source 1..19: mol_type = other RNA
tcattgtttgtaggtctga

SEQ ID NO: 44315 - RNA, 19 nt, synthetic construct
  misc_feature 1..19: note = siRNA antisense sequence
  source 1..19: mol_type = other RNA
tcagacctacaaacaatga

SEQ ID NO: 44316 - RNA, 19 nt, synthetic construct
  misc_feature 1..19: note = siRNA sense sequence
  source 1..19: mol_type = other RNA
cattgtttgtaggtctgaa

SEQ ID NO: 44317 - RNA, 19 nt, synthetic construct
  misc_feature 1..19: note = siRNA antisense sequence
  source 1..19: mol_type = other RNA
ttcagacctacaaacaatg

SEQ ID NO: 44318 - RNA, 19 nt, synthetic construct
  misc_feature 1..19: note = siRNA sense sequence
  source 1..19: mol_type = other RNA
agacatgcagccatacctt

SEQ ID NO: 44319 - RNA, 19 nt, synthetic construct
  misc_feature 1..19: note = siRNA antisense sequence
  source 1..19: mol_type = other RNA
aaggtatggctgcatgtct

SEQ ID NO: 44320 - RNA, 19 nt, synthetic construct
  misc_feature 1..19: note = siRNA sense sequence
  source 1..19: mol_type = other RNA
gacatgcagccataccttt

SEQ ID NO: 44321 - RNA, 19 nt, synthetic construct
  misc_feature 1..19: note = siRNA antisense sequence
  source 1..19: mol_type = other RNA
aaaggtatggctgcatgtc

SEQ ID NO: 44322 - RNA, 19 nt, synthetic construct
  misc_feature 1..19: note = siRNA sense sequence
  source 1..19: mol_type = other RNA
acatgcagccatacctttg

SEQ ID NO: 44323 - RNA, 19 nt, synthetic construct
  misc_feature 1..19: note = siRNA antisense sequence
  source 1..19: mol_type = other RNA
caaaggtatggctgcatgt

SEQ ID NO: 44324 - RNA, 19 nt, synthetic construct
  misc_feature 1..19: note = siRNA sense sequence
  source 1..19: mol_type = other RNA
catgcagccatacctttgt

SEQ ID NO: 44325 - RNA, 19 nt, synthetic construct
  misc_feature 1..19: note = siRNA antisense sequence
  source 1..19: mol_type = other RNA
acaaaggtatggctgcatg

SEQ ID NO: 44326 - RNA, 19 nt, synthetic construct
  misc_feature 1..19: note = siRNA sense sequence
  source 1..19: mol_type = other RNA
atgcagccatacctttgtc

SEQ ID NO: 44327 - RNA, 19 nt, synthetic construct
  misc_feature 1..19: note = siRNA antisense sequence
  source 1..19: mol_type = other RNA
gacaaaggtatggctgcat

SEQ ID NO: 44328 - RNA, 19 nt, synthetic construct
  misc_feature 1..19: note = siRNA sense sequence
  source 1..19: mol_type = other RNA
tgcagccatacctttgtca

SEQ ID NO: 44329 - RNA, 19 nt, synthetic construct
  misc_feature 1..19: note = siRNA antisense sequence
  source 1..19: mol_type = other RNA
tgacaaaggtatggctgca

SEQ ID NO: 44330 - RNA, 19 nt, synthetic construct
  misc_feature 1..19: note = siRNA sense sequence
  source 1..19: mol_type = other RNA
gcagccatacctttgtcag

SEQ ID NO: 44331 - RNA, 19 nt, synthetic construct
  misc_feature 1..19: note = siRNA antisense sequence
  source 1..19: mol_type = other RNA
ctgacaaaggtatggctgc

SEQ ID NO: 44332 - RNA, 19 nt, synthetic construct
  misc_feature 1..19: note = siRNA sense sequence
  source 1..19: mol_type = other RNA
cagccatacctttgtcagt

SEQ ID NO: 44333 - RNA, 19 nt, synthetic construct
  misc_feature 1..19: note = siRNA antisense sequence
  source 1..19: mol_type = other RNA
actgacaaaggtatggctg

SEQ ID NO: 44334 - RNA, 19 nt, synthetic construct
  misc_feature 1..19: note = siRNA sense sequence
  source 1..19: mol_type = other RNA
agccatacctttgtcagtc

SEQ ID NO: 44335 - RNA, 19 nt, synthetic construct
  misc_feature 1..19: note = siRNA antisense sequence
  source 1..19: mol_type = other RNA
gactgacaaaggtatggct

SEQ ID NO: 44336 - RNA, 19 nt, synthetic construct
  misc_feature 1..19: note = siRNA sense sequence
  source 1..19: mol_type = other RNA
tacctttgtcagtctgctt

SEQ ID NO: 44337 - RNA, 19 nt, synthetic construct
  misc_feature 1..19: note = siRNA antisense sequence
  source 1..19: mol_type = other RNA
aagcagactgacaaaggta

SEQ ID NO: 44338 - RNA, 19 nt, synthetic construct
  misc_feature 1..19: note = siRNA sense sequence
  source 1..19: mol_type = other RNA
acctttgtcagtctgctta

SEQ ID NO: 44339 - RNA, 19 nt, synthetic construct
  misc_feature 1..19: note = siRNA antisense sequence
  source 1..19: mol_type = other RNA
taagcagactgacaaaggt

SEQ ID NO: 44340 - RNA, 19 nt, synthetic construct
  misc_feature 1..19: note = siRNA sense sequence
  source 1..19: mol_type = other RNA
cctttgtcagtctgcttac

SEQ ID NO: 44341 - RNA, 19 nt, synthetic construct
  misc_feature 1..19: note = siRNA antisense sequence
  source 1..19: mol_type = other RNA
gtaagcagactgacaaagg

SEQ ID NO: 44342 - RNA, 19 nt, synthetic construct
  misc_feature 1..19: note = siRNA sense sequence
  source 1..19: mol_type = other RNA
ctttgtcagtctgcttaca

SEQ ID NO: 44343 - RNA, 19 nt, synthetic construct
  misc_feature 1..19: note = siRNA antisense sequence
  source 1..19: mol_type = other RNA
tgtaagcagactgacaaag

SEQ ID NO: 44344 - RNA, 19 nt, synthetic construct
  misc_feature 1..19: note = siRNA sense sequence
  source 1..19: mol_type = other RNA
tttgtcagtctgcttacag

SEQ ID NO: 44345 - RNA, 19 nt, synthetic construct
  misc_feature 1..19: note = siRNA antisense sequence
  source 1..19: mol_type = other RNA
ctgtaagcagactgacaaa

SEQ ID NO: 44346 - RNA, 19 nt, synthetic construct
  misc_feature 1..19: note = siRNA sense sequence
  source 1..19: mol_type = other RNA
ttgtcagtctgcttacagt

SEQ ID NO: 44347 - RNA, 19 nt, synthetic construct
  misc_feature 1..19: note = siRNA antisense sequence
  source 1..19: mol_type = other RNA
actgtaagcagactgacaa

SEQ ID NO: 44348 - RNA, 19 nt, synthetic construct
  misc_feature 1..19: note = siRNA sense sequence
  source 1..19: mol_type = other RNA
tgtcagtctgcttacagtt

SEQ ID NO: 44349 - RNA, 19 nt, synthetic construct
  misc_feature 1..19: note = siRNA antisense sequence
  source 1..19: mol_type = other RNA
aactgtaagcagactgaca

SEQ ID NO: 44350 - RNA, 19 nt, synthetic construct
  misc_feature 1..19: note = siRNA sense sequence
  source 1..19: mol_type = other RNA
gtcagtctgcttacagttt

SEQ ID NO: 44351 - RNA, 19 nt, synthetic construct
  misc_feature 1..19: note = siRNA antisense sequence
  source 1..19: mol_type = other RNA
aaactgtaagcagactgac

SEQ ID NO: 44352 - RNA, 19 nt, synthetic construct
  misc_feature 1..19: note = siRNA sense sequence
  source 1..19: mol_type = other RNA
tcagtctgcttacagtttc

SEQ ID NO: 44353 - RNA, 19 nt, synthetic construct
  misc_feature 1..19: note = siRNA antisense sequence
  source 1..19: mol_type = other RNA
gaaactgtaagcagactga

SEQ ID NO: 44354 - RNA, 19 nt, synthetic construct
  misc_feature 1..19: note = siRNA sense sequence
  source 1..19: mol_type = other RNA
cagtctgcttacagtttcc

SEQ ID NO: 44355 - RNA, 19 nt, synthetic construct
  misc_feature 1..19: note = siRNA antisense sequence
  source 1..19: mol_type = other RNA
ggaaactgtaagcagactg

SEQ ID NO: 44356 - RNA, 19 nt, synthetic construct
  misc_feature 1..19: note = siRNA sense sequence
  source 1..19: mol_type = other RNA
agtctgcttacagtttccg

SEQ ID NO: 44357 - RNA, 19 nt, synthetic construct
  misc_feature 1..19: note = siRNA antisense sequence
  source 1..19: mol_type = other RNA
cggaaactgtaagcagact

SEQ ID NO: 44358 - RNA, 19 nt, synthetic construct
  misc_feature 1..19: note = siRNA sense sequence
  source 1..19: mol_type = other RNA
gtctgcttacagtttccga

SEQ ID NO: 44359 - RNA, 19 nt, synthetic construct
  misc_feature 1..19: note = siRNA antisense sequence
  source 1..19: mol_type = other RNA
tcggaaactgtaagcagac

SEQ ID NO: 44360 - RNA, 19 nt, synthetic construct
  misc_feature 1..19: note = siRNA sense sequence
  source 1..19: mol_type = other RNA
tctgcttacagtttccgaa

SEQ ID NO: 44361 - RNA, 19 nt, synthetic construct
  misc_feature 1..19: note = siRNA antisense sequence
  source 1..19: mol_type = other RNA
ttcggaaactgtaagcaga

SEQ ID NO: 44362 - RNA, 19 nt, synthetic construct
  misc_feature 1..19: note = siRNA sense sequence
  source 1..19: mol_type = other RNA
ctgcttacagtttccgaat

SEQ ID NO: 44363 - RNA, 19 nt, synthetic construct
  misc_feature 1..19: note = siRNA antisense sequence
  source 1..19: mol_type = other RNA
attcggaaactgtaagcag

SEQ ID NO: 44364 - RNA, 19 nt, synthetic construct
  misc_feature 1..19: note = siRNA sense sequence
  source 1..19: mol_type = other RNA
tgcttacagtttccgaatg

SEQ ID NO: 44365 - RNA, 19 nt, synthetic construct
  misc_feature 1..19: note = siRNA antisense sequence
  source 1..19: mol_type = other RNA
cattcggaaactgtaagca

SEQ ID NO: 44366 - RNA, 19 nt, synthetic construct
  misc_feature 1..19: note = siRNA sense sequence
  source 1..19: mol_type = other RNA
tacagtttccgaatgtggg

SEQ ID NO: 44367 - RNA, 19 nt, synthetic construct
  misc_feature 1..19: note = siRNA antisense sequence
  source 1..19: mol_type = other RNA
cccacattcggaaactgta

SEQ ID NO: 44368 - RNA, 19 nt, synthetic construct
  misc_feature 1..19: note = siRNA sense sequence
  source 1..19: mol_type = other RNA
gggtgaatcttctctctca

SEQ ID NO: 44369 - RNA, 19 nt, synthetic construct
  misc_feature 1..19: note = siRNA antisense sequence
  source 1..19: mol_type = other RNA
tgagagagaagattcaccc

SEQ ID NO: 44370 - RNA, 19 nt, synthetic construct
  misc_feature 1..19: note = siRNA sense sequence
  source 1..19: mol_type = other RNA
tgaatcttctctctcacta

SEQ ID NO: 44371 - RNA, 19 nt, synthetic construct
  misc_feature 1..19: note = siRNA antisense sequence
  source 1..19: mol_type = other RNA
tagtgagagagaagattca

SEQ ID NO: 44372 - RNA, 19 nt, synthetic construct
  misc_feature 1..19: note = siRNA sense sequence
  source 1..19: mol_type = other RNA
gaatcttctctctcactag

SEQ ID NO: 44373 - RNA, 19 nt, synthetic construct
  misc_feature 1..19: note = siRNA antisense sequence
  source 1..19: mol_type = other RNA
ctagtgagagagaagattc

SEQ ID NO: 44374 - RNA, 19 nt, synthetic construct
  misc_feature 1..19: note = siRNA sense sequence
  source 1..19: mol_type = other RNA
aatcttctctctcactagc

SEQ ID NO: 44375 - RNA, 19 nt, synthetic construct
  misc_feature 1..19: note = siRNA antisense sequence
  source 1..19: mol_type = other RNA
gctagtgagagagaagatt

SEQ ID NO: 44376 - RNA, 19 nt, synthetic construct
  misc_feature 1..19: note = siRNA sense sequence
  source 1..19: mol_type = other RNA
atcttctctctcactagcc

SEQ ID NO: 44377 - RNA, 19 nt, synthetic construct
  misc_feature 1..19: note = siRNA antisense sequence
  source 1..19: mol_type = other RNA
ggctagtgagagagaagat

SEQ ID NO: 44378 - RNA, 19 nt, synthetic construct
  misc_feature 1..19: note = siRNA sense sequence
  source 1..19: mol_type = other RNA
tcttctctctcactagcct

SEQ ID NO: 44379 - RNA, 19 nt, synthetic construct
  misc_feature 1..19: note = siRNA antisense sequence
  source 1..19: mol_type = other RNA
aggctagtgagagagaaga

SEQ ID NO: 44380 - RNA, 19 nt, synthetic construct
  misc_feature 1..19: note = siRNA sense sequence
  source 1..19: mol_type = other RNA
gcctctagtctccattctc

SEQ ID NO: 44381 - RNA, 19 nt, synthetic construct
  misc_feature 1..19: note = siRNA antisense sequence
  source 1..19: mol_type = other RNA
gagaatggagactagaggc

SEQ ID NO: 44382 - RNA, 19 nt, synthetic construct
  misc_feature 1..19: note = siRNA sense sequence
  source 1..19: mol_type = other RNA
cctctagtctccattctcc

SEQ ID NO: 44383 - RNA, 19 nt, synthetic construct
  misc_feature 1..19: note = siRNA antisense sequence
  source 1..19: mol_type = other RNA
ggagaatggagactagagg

SEQ ID NO: 44384 - RNA, 19 nt, synthetic construct
  misc_feature 1..19: note = siRNA sense sequence
  source 1..19: mol_type = other RNA
ctctagtctccattctccc

SEQ ID NO: 44385 - RNA, 19 nt, synthetic construct
  misc_feature 1..19: note = siRNA antisense sequence
  source 1..19: mol_type = other RNA
gggagaatggagactagag

SEQ ID NO: 44386 - RNA, 19 nt, synthetic construct
  misc_feature 1..19: note = siRNA sense sequence
  source 1..19: mol_type = other RNA
ccagccatcaggcactaga

SEQ ID NO: 44387 - RNA, 19 nt, synthetic construct
  misc_feature 1..19: note = siRNA antisense sequence
  source 1..19: mol_type = other RNA
tctagtgcctgatggctgg

SEQ ID NO: 44388 - RNA, 19 nt, synthetic construct
  misc_feature 1..19: note = siRNA sense sequence
  source 1..19: mol_type = other RNA
cagccatcaggcactagaa

SEQ ID NO: 44389 - RNA, 19 nt, synthetic construct
  misc_feature 1..19: note = siRNA antisense sequence
  source 1..19: mol_type = other RNA
ttctagtgcctgatggctg

SEQ ID NO: 44390 - RNA, 19 nt, synthetic construct
  misc_feature 1..19: note = siRNA sense sequence
  source 1..19: mol_type = other RNA
agccatcaggcactagaat

SEQ ID NO: 44391 - RNA, 19 nt, synthetic construct
  misc_feature 1..19: note = siRNA antisense sequence
  source 1..19: mol_type = other RNA
attctagtgcctgatggct

SEQ ID NO: 44392 - RNA, 19 nt, synthetic construct
  misc_feature 1..19: note = siRNA sense sequence
  source 1..19: mol_type = other RNA
gccatcaggcactagaata

SEQ ID NO: 44393 - RNA, 19 nt, synthetic construct
  misc_feature 1..19: note = siRNA antisense sequence
  source 1..19: mol_type = other RNA
tattctagtgcctgatggc

SEQ ID NO: 44394 - RNA, 19 nt, synthetic construct
  misc_feature 1..19: note = siRNA sense sequence
  source 1..19: mol_type = other RNA
ccatcaggcactagaataa

SEQ ID NO: 44395 - RNA, 19 nt, synthetic construct
  misc_feature 1..19: note = siRNA antisense sequence
  source 1..19: mol_type = other RNA
ttattctagtgcctgatgg

SEQ ID NO: 44396 - RNA, 19 nt, synthetic construct
  misc_feature 1..19: note = siRNA sense sequence
  source 1..19: mol_type = other RNA
caggcactagaataatcat

SEQ ID NO: 44397 - RNA, 19 nt, synthetic construct
  misc_feature 1..19: note = siRNA antisense sequence
  source 1..19: mol_type = other RNA
atgattattctagtgcctg

SEQ ID NO: 44398 - RNA, 19 nt, synthetic construct
  misc_feature 1..19: note = siRNA sense sequence
  source 1..19: mol_type = other RNA
aggcactagaataatcatt

SEQ ID NO: 44399 - RNA, 19 nt, synthetic construct
  misc_feature 1..19: note = siRNA antisense sequence
  source 1..19: mol_type = other RNA
aatgattattctagtgcct

SEQ ID NO: 44400 - RNA, 19 nt, synthetic construct
  misc_feature 1..19: note = siRNA sense sequence
  source 1..19: mol_type = other RNA
aataatcattccgaagtga

SEQ ID NO: 44401 - RNA, 19 nt, synthetic construct
  misc_feature 1..19: note = siRNA antisense sequence
  source 1..19: mol_type = other RNA
tcacttcggaatgattatt

SEQ ID NO: 44402 - RNA, 19 nt, synthetic construct
  misc_feature 1..19: note = siRNA sense sequence
  source 1..19: mol_type = other RNA
ataatcattccgaagtgag

SEQ ID NO: 44403 - RNA, 19 nt, synthetic construct
  misc_feature 1..19: note = siRNA antisense sequence
  source 1..19: mol_type = other RNA
ctcacttcggaatgattat

SEQ ID NO: 44404 - RNA, 19 nt, synthetic construct
  misc_feature 1..19: note = siRNA sense sequence
  source 1..19: mol_type = other RNA
ttccgaagtgagttcagaa

SEQ ID NO: 44405 - RNA, 19 nt, synthetic construct
  misc_feature 1..19: note = siRNA antisense sequence
  source 1..19: mol_type = other RNA
ttctgaactcacttcggaa

SEQ ID NO: 44406 - RNA, 19 nt, synthetic construct
  misc_feature 1..19: note = siRNA sense sequence
  source 1..19: mol_type = other RNA
ttcttgttgcctgctaaat

SEQ ID NO: 44407 - RNA, 19 nt, synthetic construct
  misc_feature 1..19: note = siRNA antisense sequence
  source 1..19: mol_type = other RNA
atttagcaggcaacaagaa

SEQ ID NO: 44408 - RNA, 19 nt, synthetic construct
  misc_feature 1..19: note = siRNA sense sequence
  source 1..19: mol_type = other RNA
tcttgttgcctgctaaata

SEQ ID NO: 44409 - RNA, 19 nt, synthetic construct
  misc_feature 1..19: note = siRNA antisense sequence
  source 1..19: mol_type = other RNA
tatttagcaggcaacaaga

SEQ ID NO: 44410 - RNA, 19 nt, synthetic construct
  misc_feature 1..19: note = siRNA sense sequence
  source 1..19: mol_type = other RNA
cttgttgcctgctaaataa

SEQ ID NO: 44411 - RNA, 19 nt, synthetic construct
  misc_feature 1..19: note = siRNA antisense sequence
  source 1..19: mol_type = other RNA
ttatttagcaggcaacaag

SEQ ID NO: 44412 - RNA, 19 nt, synthetic construct
  misc_feature 1..19: note = siRNA sense sequence
  source 1..19: mol_type = other RNA
ttgcctgctaaataatatc

SEQ ID NO: 44413 - RNA, 19 nt, synthetic construct
  misc_feature 1..19: note = siRNA antisense sequence
  source 1..19: mol_type = other RNA
gatattatttagcaggcaa

SEQ ID NO: 44414 - RNA, 19 nt, synthetic construct
  misc_feature 1..19: note = siRNA sense sequence
  source 1..19: mol_type = other RNA
tgcctgctaaataatatcc

SEQ ID NO: 44415 - RNA, 19 nt, synthetic construct
  misc_feature 1..19: note = siRNA antisense sequence
  source 1..19: mol_type = other RNA
ggatattatttagcaggca

SEQ ID NO: 44416 - RNA, 19 nt, synthetic construct
  misc_feature 1..19: note = siRNA sense sequence
  source 1..19: mol_type = other RNA
tgctaaataatatccaagc

SEQ ID NO: 44417 - RNA, 19 nt, synthetic construct
  misc_feature 1..19: note = siRNA antisense sequence
  source 1..19: mol_type = other RNA
gcttggatattatttagca

SEQ ID NO: 44418 - RNA, 19 nt, synthetic construct
  misc_feature 1..19: note = siRNA sense sequence
  source 1..19: mol_type = other RNA
gctaaataatatccaagct

SEQ ID NO: 44419 - RNA, 19 nt, synthetic construct
  misc_feature 1..19: note = siRNA antisense sequence
  source 1..19: mol_type = other RNA
agcttggatattatttagc

SEQ ID NO: 44420 - RNA, 19 nt, synthetic construct
  misc_feature 1..19: note = siRNA sense sequence
  source 1..19: mol_type = other RNA
aataatatccaagctctct

SEQ ID NO: 44421 - RNA, 19 nt, synthetic construct
  misc_feature 1..19: note = siRNA antisense sequence
  source 1..19: mol_type = other RNA
agagagcttggatattatt

SEQ ID NO: 44422 - RNA, 19 nt, synthetic construct
  misc_feature 1..19: note = siRNA sense sequence
  source 1..19: mol_type = other RNA
ataatatccaagctctcta

SEQ ID NO: 44423 - RNA, 19 nt, synthetic construct
  misc_feature 1..19: note = siRNA antisense sequence
  source 1..19: mol_type = other RNA
tagagagcttggatattat

SEQ ID NO: 44424 - RNA, 19 nt, synthetic construct
  misc_feature 1..19: note = siRNA sense sequence
  source 1..19: mol_type = other RNA
taatatccaagctctctag

SEQ ID NO: 44425 - RNA, 19 nt, synthetic construct
  misc_feature 1..19: note = siRNA antisense sequence
  source 1..19: mol_type = other RNA
ctagagagcttggatatta

SEQ ID NO: 44426 - RNA, 19 nt, synthetic construct
  misc_feature 1..19: note = siRNA sense sequence
  source 1..19: mol_type = other RNA
ccaagctctctagtggact

SEQ ID NO: 44427 - RNA, 19 nt, synthetic construct
  misc_feature 1..19: note = siRNA antisense sequence
  source 1..19: mol_type = other RNA
agtccactagagagcttgg

SEQ ID NO: 44428 - RNA, 19 nt, synthetic construct
  misc_feature 1..19: note = siRNA sense sequence
  source 1..19: mol_type = other RNA
caagctctctagtggacta

SEQ ID NO: 44429 - RNA, 19 nt, synthetic construct
  misc_feature 1..19: note = siRNA antisense sequence
  source 1..19: mol_type = other RNA
tagtccactagagagcttg

SEQ ID NO: 44430 - RNA, 19 nt, synthetic construct
  misc_feature 1..19: note = siRNA sense sequence
  source 1..19: mol_type = other RNA
aagctctctagtggactaa

SEQ ID NO: 44431 - RNA, 19 nt, synthetic construct
  misc_feature 1..19: note = siRNA antisense sequence
  source 1..19: mol_type = other RNA
ttagtccactagagagctt

SEQ ID NO: 44432 - RNA, 19 nt, synthetic construct
  misc_feature 1..19: note = siRNA sense sequence
  source 1..19: mol_type = other RNA
agctctctagtggactaac

SEQ ID NO: 44433 - RNA, 19 nt, synthetic construct
  misc_feature 1..19: note = siRNA antisense sequence
  source 1..19: mol_type = other RNA
gttagtccactagagagct

SEQ ID NO: 44434 - RNA, 19 nt, synthetic construct
  misc_feature 1..19: note = siRNA sense sequence
  source 1..19: mol_type = other RNA
tctagtggactaactggca

SEQ ID NO: 44435 - RNA, 19 nt, synthetic construct
  misc_feature 1..19: note = siRNA antisense sequence
  source 1..19: mol_type = other RNA
tgccagttagtccactaga

SEQ ID NO: 44436 - RNA, 19 nt, synthetic construct
  misc_feature 1..19: note = siRNA sense sequence
  source 1..19: mol_type = other RNA
ggcccagccatttctcatg

SEQ ID NO: 44437 - RNA, 19 nt, synthetic construct
  misc_feature 1..19: note = siRNA antisense sequence
  source 1..19: mol_type = other RNA
catgagaaatggctgggcc

SEQ ID NO: 44438 - RNA, 19 nt, synthetic construct
  misc_feature 1..19: note = siRNA sense sequence
  source 1..19: mol_type = other RNA
gcccagccatttctcatgc

SEQ ID NO: 44439 - RNA, 19 nt, synthetic construct
  misc_feature 1..19: note = siRNA antisense sequence
  source 1..19: mol_type = other RNA
gcatgagaaatggctgggc

SEQ ID NO: 44440 - RNA, 19 nt, synthetic construct
  misc_feature 1..19: note = siRNA sense sequence
  source 1..19: mol_type = other RNA
cccagccatttctcatgca

SEQ ID NO: 44441 - RNA, 19 nt, synthetic construct
  misc_feature 1..19: note = siRNA antisense sequence
  source 1..19: mol_type = other RNA
tgcatgagaaatggctggg

SEQ ID NO: 44442 - RNA, 19 nt, synthetic construct
  misc_feature 1..19: note = siRNA sense sequence
  source 1..19: mol_type = other RNA
ccagccatttctcatgcat

SEQ ID NO: 44443 - RNA, 19 nt, synthetic construct
  misc_feature 1..19: note = siRNA antisense sequence
  source 1..19: mol_type = other RNA
atgcatgagaaatggctgg

SEQ ID NO: 44444 - RNA, 19 nt, synthetic construct
  misc_feature 1..19: note = siRNA sense sequence
  source 1..19: mol_type = other RNA
cagccatttctcatgcatc

SEQ ID NO: 44445 - RNA, 19 nt, synthetic construct
  misc_feature 1..19: note = siRNA antisense sequence
  source 1..19: mol_type = other RNA
gatgcatgagaaatggctg

SEQ ID NO: 44446 - RNA, 19 nt, synthetic construct
  misc_feature 1..19: note = siRNA sense sequence
  source 1..19: mol_type = other RNA
agccatttctcatgcatcc

SEQ ID NO: 44447 - RNA, 19 nt, synthetic construct
  misc_feature 1..19: note = siRNA antisense sequence
  source 1..19: mol_type = other RNA
ggatgcatgagaaatggct

SEQ ID NO: 44448 - RNA, 19 nt, synthetic construct
  misc_feature 1..19: note = siRNA sense sequence
  source 1..19: mol_type = other RNA
gccatttctcatgcatcct

SEQ ID NO: 44449 - RNA, 19 nt, synthetic construct
  misc_feature 1..19: note = siRNA antisense sequence
  source 1..19: mol_type = other RNA
aggatgcatgagaaatggc

SEQ ID NO: 44450 - RNA, 19 nt, synthetic construct
  misc_feature 1..19: note = siRNA sense sequence
  source 1..19: mol_type = other RNA
ccatttctcatgcatcctg

SEQ ID NO: 44451 - RNA, 19 nt, synthetic construct
  misc_feature 1..19: note = siRNA antisense sequence
  source 1..19: mol_type = other RNA
caggatgcatgagaaatgg

SEQ ID NO: 44452 - RNA, 19 nt, synthetic construct
  misc_feature 1..19: note = siRNA sense sequence
  source 1..19: mol_type = other RNA
catttctcatgcatcctgc

SEQ ID NO: 44453 - RNA, 19 nt, synthetic construct
  misc_feature 1..19: note = siRNA antisense sequence
  source 1..19: mol_type = other RNA
gcaggatgcatgagaaatg

SEQ ID NO: 44454 - RNA, 19 nt, synthetic construct
  misc_feature 1..19: note = siRNA sense sequence
  source 1..19: mol_type = other RNA
atttctcatgcatcctgct

SEQ ID NO: 44455 - RNA, 19 nt, synthetic construct
  misc_feature 1..19: note = siRNA antisense sequence
  source 1..19: mol_type = other RNA
agcaggatgcatgagaaat

SEQ ID NO: 44456 - RNA, 19 nt, synthetic construct
  misc_feature 1..19: note = siRNA sense sequence
  source 1..19: mol_type = other RNA
tctcatgcatcctgcttcc

SEQ ID NO: 44457 - RNA, 19 nt, synthetic construct
  misc_feature 1..19: note = siRNA antisense sequence
  source 1..19: mol_type = other RNA
ggaagcaggatgcatgaga

SEQ ID NO: 44458 - RNA, 19 nt, synthetic construct
  misc_feature 1..19: note = siRNA sense sequence
  source 1..19: mol_type = other RNA
ctcatgcatcctgcttccc

SEQ ID NO: 44459 - RNA, 19 nt, synthetic construct
  misc_feature 1..19: note = siRNA antisense sequence
  source 1..19: mol_type = other RNA
gggaagcaggatgcatgag

SEQ ID NO: 44460 - RNA, 19 nt, synthetic construct
  misc_feature 1..19: note = siRNA sense sequence
  source 1..19: mol_type = other RNA
gagttttgctccgatctca

SEQ ID NO: 44461 - RNA, 19 nt, synthetic construct
  misc_feature 1..19: note = siRNA antisense sequence
  source 1..19: mol_type = other RNA
tgagatcggagcaaaactc

SEQ ID NO: 44462 - RNA, 19 nt, synthetic construct
  misc_feature 1..19: note = siRNA sense sequence
  source 1..19: mol_type = other RNA
agttttgctccgatctcag

SEQ ID NO: 44463 - RNA, 19 nt, synthetic construct
  misc_feature 1..19: note = siRNA antisense sequence
  source 1..19: mol_type = other RNA
ctgagatcggagcaaaact

SEQ ID NO: 44464 - RNA, 19 nt, synthetic construct
  misc_feature 1..19: note = siRNA sense sequence
  source 1..19: mol_type = other RNA
ttgctccgatctcagctca

SEQ ID NO: 44465 - RNA, 19 nt, synthetic construct
  misc_feature 1..19: note = siRNA antisense sequence
  source 1..19: mol_type = other RNA
tgagctgagatcggagcaa

SEQ ID NO: 44466 - RNA, 19 nt, synthetic construct
  misc_feature 1..19: note = siRNA sense sequence
  source 1..19: mol_type = other RNA
tgctccgatctcagctcac

SEQ ID NO: 44467 - RNA, 19 nt, synthetic construct
  misc_feature 1..19: note = siRNA antisense sequence
  source 1..19: mol_type = other RNA
gtgagctgagatcggagca

SEQ ID NO: 44468 - RNA, 19 nt, synthetic construct
  misc_feature 1..19: note = siRNA sense sequence
  source 1..19: mol_type = other RNA
gctccgatctcagctcact

SEQ ID NO: 44469 - RNA, 19 nt, synthetic construct
  misc_feature 1..19: note = siRNA antisense sequence
  source 1..19: mol_type = other RNA
agtgagctgagatcggagc

SEQ ID NO: 44470 - RNA, 19 nt, synthetic construct
  misc_feature 1..19: note = siRNA sense sequence
  source 1..19: mol_type = other RNA
ctccgatctcagctcactg

SEQ ID NO: 44471 - RNA, 19 nt, synthetic construct
  misc_feature 1..19: note = siRNA antisense sequence
  source 1..19: mol_type = other RNA
cagtgagctgagatcggag

SEQ ID NO: 44472 - RNA, 19 nt, synthetic construct
  misc_feature 1..19: note = siRNA sense sequence
  source 1..19: mol_type = other RNA
tccgatctcagctcactgc

SEQ ID NO: 44473 - RNA, 19 nt, synthetic construct
  misc_feature 1..19: note = siRNA antisense sequence
  source 1..19: mol_type = other RNA
gcagtgagctgagatcgga

SEQ ID NO: 44474 - RNA, 19 nt, synthetic construct
  misc_feature 1..19: note = siRNA sense sequence
  source 1..19: mol_type = other RNA
ccgatctcagctcactgca

SEQ ID NO: 44475 - RNA, 19 nt, synthetic construct
  misc_feature 1..19: note = siRNA antisense sequence
  source 1..19: mol_type = other RNA
tgcagtgagctgagatcgg

SEQ ID NO: 44476 - RNA, 19 nt, synthetic construct
  misc_feature 1..19: note = siRNA sense sequence
  source 1..19: mol_type = other RNA
cgatctcagctcactgcaa

SEQ ID NO: 44477 - RNA, 19 nt, synthetic construct
  misc_feature 1..19: note = siRNA antisense sequence
  source 1..19: mol_type = other RNA
ttgcagtgagctgagatcg

SEQ ID NO: 44478 - RNA, 19 nt, synthetic construct
  misc_feature 1..19: note = siRNA sense sequence
  source 1..19: mol_type = other RNA
gatctcagctcactgcaac

SEQ ID NO: 44479 - RNA, 19 nt, synthetic construct
  misc_feature 1..19: note = siRNA antisense sequence
  source 1..19: mol_type = other RNA
gttgcagtgagctgagatc

SEQ ID NO: 44480 - RNA, 19 nt, synthetic construct
  misc_feature 1..19: note = siRNA sense sequence
  source 1..19: mol_type = other RNA
atctcagctcactgcaacc

SEQ ID NO: 44481 - RNA, 19 nt, synthetic construct
  misc_feature 1..19: note = siRNA antisense sequence
  source 1..19: mol_type = other RNA
ggttgcagtgagctgagat

SEQ ID NO: 44482 - RNA, 19 nt, synthetic construct
  misc_feature 1..19: note = siRNA sense sequence
  source 1..19: mol_type = other RNA
tctcagctcactgcaacct

SEQ ID NO: 44483 - RNA, 19 nt, synthetic construct
  misc_feature 1..19: note = siRNA antisense sequence
  source 1..19: mol_type = other RNA
aggttgcagtgagctgaga

SEQ ID NO: 44484 - RNA, 19 nt, synthetic construct
  misc_feature 1..19: note = siRNA sense sequence
  source 1..19: mol_type = other RNA
agctcactgcaacctccgc

SEQ ID NO: 44485 - RNA, 19 nt, synthetic construct
  misc_feature 1..19: note = siRNA antisense sequence
  source 1..19: mol_type = other RNA
gcggaggttgcagtgagct

SEQ ID NO: 44486 - RNA, 19 nt, synthetic construct
  misc_feature 1..19: note = siRNA sense sequence
  source 1..19: mol_type = other RNA
tcaggctcccgagtagctt

SEQ ID NO: 44487 - RNA, 19 nt, synthetic construct
  misc_feature 1..19: note = siRNA antisense sequence
  source 1..19: mol_type = other RNA
aagctactcgggagcctga

SEQ ID NO: 44488 - RNA, 19 nt, synthetic construct
  misc_feature 1..19: note = siRNA sense sequence
  source 1..19: mol_type = other RNA
caggctcccgagtagctta

SEQ ID NO: 44489 - RNA, 19 nt, synthetic construct
  misc_feature 1..19: note = siRNA antisense sequence
  source 1..19: mol_type = other RNA
taagctactcgggagcctg

SEQ ID NO: 44490 - RNA, 19 nt, synthetic construct
  misc_feature 1..19: note = siRNA sense sequence
  source 1..19: mol_type = other RNA
aggctcccgagtagcttac

SEQ ID NO: 44491 - RNA, 19 nt, synthetic construct
  misc_feature 1..19: note = siRNA antisense sequence
  source 1..19: mol_type = other RNA
gtaagctactcgggagcct

SEQ ID NO: 44492 - RNA, 19 nt, synthetic construct
  misc_feature 1..19: note = siRNA sense sequence
  source 1..19: mol_type = other RNA
ggctcccgagtagcttacc

SEQ ID NO: 44493 - RNA, 19 nt, synthetic construct
  misc_feature 1..19: note = siRNA antisense sequence
  source 1..19: mol_type = other RNA
ggtaagctactcgggagcc

SEQ ID NO: 44494 - RNA, 19 nt, synthetic construct
  misc_feature 1..19: note = siRNA sense sequence
  source 1..19: mol_type = other RNA
gctcccgagtagcttaccc

SEQ ID NO: 44495 - RNA, 19 nt, synthetic construct
  misc_feature 1..19: note = siRNA antisense sequence
  source 1..19: mol_type = other RNA
gggtaagctactcgggagc

SEQ ID NO: 44496 - RNA, 19 nt, synthetic construct
  misc_feature 1..19: note = siRNA sense sequence
  source 1..19: mol_type = other RNA
ctcccgagtagcttaccct

SEQ ID NO: 44497 - RNA, 19 nt, synthetic construct
  misc_feature 1..19: note = siRNA antisense sequence
  source 1..19: mol_type = other RNA
agggtaagctactcgggag

SEQ ID NO: 44498 - RNA, 19 nt, synthetic construct
  misc_feature 1..19: note = siRNA sense sequence
  source 1..19: mol_type = other RNA
tcccgagtagcttaccctt

SEQ ID NO: 44499 - RNA, 19 nt, synthetic construct
  misc_feature 1..19: note = siRNA antisense sequence
  source 1..19: mol_type = other RNA
aagggtaagctactcggga

SEQ ID NO: 44500 - RNA, 19 nt, synthetic construct
  misc_feature 1..19: note = siRNA sense sequence
  source 1..19: mol_type = other RNA
cccgagtagcttacccttc

SEQ ID NO: 44501 - RNA, 19 nt, synthetic construct
  misc_feature 1..19: note = siRNA antisense sequence
  source 1..19: mol_type = other RNA
gaagggtaagctactcggg

SEQ ID NO: 44502 - RNA, 19 nt, synthetic construct
  misc_feature 1..19: note = siRNA sense sequence
  source 1..19: mol_type = other RNA
ccgagtagcttacccttca

SEQ ID NO: 44503 - RNA, 19 nt, synthetic construct
  misc_feature 1..19: note = siRNA antisense sequence
  source 1..19: mol_type = other RNA
tgaagggtaagctactcgg

SEQ ID NO: 44504 - RNA, 19 nt, synthetic construct
  misc_feature 1..19: note = siRNA sense sequence
  source 1..19: mol_type = other RNA
cgagtagcttacccttcag

SEQ ID NO: 44505 - RNA, 19 nt, synthetic construct
  misc_feature 1..19: note = siRNA antisense sequence
  source 1..19: mol_type = other RNA
ctgaagggtaagctactcg

SEQ ID NO: 44506 - RNA, 19 nt, synthetic construct
  misc_feature 1..19: note = siRNA sense sequence
  source 1..19: mol_type = other RNA
gagtagcttacccttcagc

SEQ ID NO: 44507 - RNA, 19 nt, synthetic construct
  misc_feature 1..19: note = siRNA antisense sequence
  source 1..19: mol_type = other RNA
gctgaagggtaagctactc

SEQ ID NO: 44508 - RNA, 19 nt, synthetic construct
  misc_feature 1..19: note = siRNA sense sequence
  source 1..19: mol_type = other RNA
ggcccttgccttccttgtt

SEQ ID NO: 44509 - RNA, 19 nt, synthetic construct
  misc_feature 1..19: note = siRNA antisense sequence
  source 1..19: mol_type = other RNA
aacaaggaaggcaagggcc

SEQ ID NO: 44510 - RNA, 19 nt, synthetic construct
  misc_feature 1..19: note = siRNA sense sequence
  source 1..19: mol_type = other RNA
gcccttgccttccttgttc

SEQ ID NO: 44511 - RNA, 19 nt, synthetic construct
  misc_feature 1..19: note = siRNA antisense sequence
  source 1..19: mol_type = other RNA
gaacaaggaaggcaagggc

SEQ ID NO: 44512 - RNA, 19 nt, synthetic construct
  misc_feature 1..19: note = siRNA sense sequence
  source 1..19: mol_type = other RNA
gcttttcctgtgattccct

SEQ ID NO: 44513 - RNA, 19 nt, synthetic construct
  misc_feature 1..19: note = siRNA antisense sequence
  source 1..19: mol_type = other RNA
agggaatcacaggaaaagc

SEQ ID NO: 44514 - RNA, 19 nt, synthetic construct
  misc_feature 1..19: note = siRNA sense sequence
  source 1..19: mol_type = other RNA
cttttcctgtgattccctg

SEQ ID NO: 44515 - RNA, 19 nt, synthetic construct
  misc_feature 1..19: note = siRNA antisense sequence
  source 1..19: mol_type = other RNA
cagggaatcacaggaaaag

SEQ ID NO: 44516 - RNA, 19 nt, synthetic construct
  misc_feature 1..19: note = siRNA sense sequence
  source 1..19: mol_type = other RNA
tcctgtgattccctgctcc

SEQ ID NO: 44517 - RNA, 19 nt, synthetic construct
  misc_feature 1..19: note = siRNA antisense sequence
  source 1..19: mol_type = other RNA
ggagcagggaatcacagga

SEQ ID NO: 44518 - RNA, 19 nt, synthetic construct
  misc_feature 1..19: note = siRNA sense sequence
  source 1..19: mol_type = other RNA
cctgtgattccctgctcca

SEQ ID NO: 44519 - RNA, 19 nt, synthetic construct
  misc_feature 1..19: note = siRNA antisense sequence
  source 1..19: mol_type = other RNA
tggagcagggaatcacagg

SEQ ID NO: 44520 - RNA, 19 nt, synthetic construct
  misc_feature 1..19: note = siRNA sense sequence
  source 1..19: mol_type = other RNA
ttccctgctccatctcaag

SEQ ID NO: 44521 - RNA, 19 nt, synthetic construct
  misc_feature 1..19: note = siRNA antisense sequence
  source 1..19: mol_type = other RNA
cttgagatggagcagggaa

SEQ ID NO: 44522 - RNA, 19 nt, synthetic construct
  misc_feature 1..19: note = siRNA sense sequence
  source 1..19: mol_type = other RNA
tccctgctccatctcaagc

SEQ ID NO: 44523 - RNA, 19 nt, synthetic construct
  misc_feature 1..19: note = siRNA antisense sequence
  source 1..19: mol_type = other RNA
gcttgagatggagcaggga

SEQ ID NO: 44524 - RNA, 19 nt, synthetic construct
  misc_feature 1..19: note = siRNA sense sequence
  source 1..19: mol_type = other RNA
ccctgctccatctcaagcg

SEQ ID NO: 44525 - RNA, 19 nt, synthetic construct
  misc_feature 1..19: note = siRNA antisense sequence
  source 1..19: mol_type = other RNA
cgcttgagatggagcaggg

SEQ ID NO: 44526 - RNA, 19 nt, synthetic construct
  misc_feature 1..19: note = siRNA sense sequence
  source 1..19: mol_type = other RNA
cctgctccatctcaagcgc

SEQ ID NO: 44527 - RNA, 19 nt, synthetic construct
  misc_feature 1..19: note = siRNA antisense sequence
  source 1..19: mol_type = other RNA
gcgcttgagatggagcagg

SEQ ID NO: 44528 - RNA, 19 nt, synthetic construct
  misc_feature 1..19: note = siRNA sense sequence
  source 1..19: mol_type = other RNA
ctgctccatctcaagcgct

SEQ ID NO: 44529 - RNA, 19 nt, synthetic construct
  misc_feature 1..19: note = siRNA antisense sequence
  source 1..19: mol_type = other RNA
agcgcttgagatggagcag

SEQ ID NO: 44530 - RNA, 19 nt, synthetic construct
  misc_feature 1..19: note = siRNA sense sequence
  source 1..19: mol_type = other RNA
tgctccatctcaagcgctg

SEQ ID NO: 44531 - RNA, 19 nt, synthetic construct
  misc_feature 1..19: note = siRNA antisense sequence
  source 1..19: mol_type = other RNA
cagcgcttgagatggagca

SEQ ID NO: 44532 - RNA, 19 nt, synthetic construct
  misc_feature 1..19: note = siRNA sense sequence
  source 1..19: mol_type = other RNA
gctccatctcaagcgctgt

SEQ ID NO: 44533 - RNA, 19 nt, synthetic construct
  misc_feature 1..19: note = siRNA antisense sequence
  source 1..19: mol_type = other RNA
acagcgcttgagatggagc

SEQ ID NO: 44534 - RNA, 19 nt, synthetic construct
  misc_feature 1..19: note = siRNA sense sequence
  source 1..19: mol_type = other RNA
ctccatctcaagcgctgta

SEQ ID NO: 44535 - RNA, 19 nt, synthetic construct
  misc_feature 1..19: note = siRNA antisense sequence
  source 1..19: mol_type = other RNA
tacagcgcttgagatggag

SEQ ID NO: 44536 - RNA, 19 nt, synthetic construct
  misc_feature 1..19: note = siRNA sense sequence
  source 1..19: mol_type = other RNA
tccatctcaagcgctgtat

SEQ ID NO: 44537 - RNA, 19 nt, synthetic construct
  misc_feature 1..19: note = siRNA antisense sequence
  source 1..19: mol_type = other RNA
atacagcgcttgagatgga

SEQ ID NO: 44538 - RNA, 19 nt, synthetic construct
  misc_feature 1..19: note = siRNA sense sequence
  source 1..19: mol_type = other RNA
ccatctcaagcgctgtatt

SEQ ID NO: 44539 - RNA, 19 nt, synthetic construct
  misc_feature 1..19: note = siRNA antisense sequence
  source 1..19: mol_type = other RNA
aatacagcgcttgagatgg

SEQ ID NO: 44540 - RNA, 19 nt, synthetic construct
  misc_feature 1..19: note = siRNA sense sequence
  source 1..19: mol_type = other RNA
catctcaagcgctgtattc

SEQ ID NO: 44541 - RNA, 19 nt, synthetic construct
  misc_feature 1..19: note = siRNA antisense sequence
  source 1..19: mol_type = other RNA
gaatacagcgcttgagatg

SEQ ID NO: 44542 - RNA, 19 nt, synthetic construct
  misc_feature 1..19: note = siRNA sense sequence
  source 1..19: mol_type = other RNA
atctcaagcgctgtattct

SEQ ID NO: 44543 - RNA, 19 nt, synthetic construct
  misc_feature 1..19: note = siRNA antisense sequence
  source 1..19: mol_type = other RNA
agaatacagcgcttgagat

SEQ ID NO: 44544 - RNA, 19 nt, synthetic construct
  misc_feature 1..19: note = siRNA sense sequence
  source 1..19: mol_type = other RNA
tctcaagcgctgtattcta

SEQ ID NO: 44545 - RNA, 19 nt, synthetic construct
  misc_feature 1..19: note = siRNA antisense sequence
  source 1..19: mol_type = other RNA
tagaatacagcgcttgaga

SEQ ID NO: 44546 - RNA, 19 nt, synthetic construct
  misc_feature 1..19: note = siRNA sense sequence
  source 1..19: mol_type = other RNA
ctcaagcgctgtattctag

SEQ ID NO: 44547 - RNA, 19 nt, synthetic construct
  misc_feature 1..19: note = siRNA antisense sequence
  source 1..19: mol_type = other RNA
ctagaatacagcgcttgag

SEQ ID NO: 44548 - RNA, 19 nt, synthetic construct
  misc_feature 1..19: note = siRNA sense sequence
  source 1..19: mol_type = other RNA
tcaagcgctgtattctagg

SEQ ID NO: 44549 - RNA, 19 nt, synthetic construct
  misc_feature 1..19: note = siRNA antisense sequence
  source 1..19: mol_type = other RNA
cctagaatacagcgcttga

SEQ ID NO: 44550 - RNA, 19 nt, synthetic construct
  misc_feature 1..19: note = siRNA sense sequence
  source 1..19: mol_type = other RNA
caagcgctgtattctagga

SEQ ID NO: 44551 - RNA, 19 nt, synthetic construct
  misc_feature 1..19: note = siRNA antisense sequence
  source 1..19: mol_type = other RNA
tcctagaatacagcgcttg

SEQ ID NO: 44552 - RNA, 19 nt, synthetic construct
  misc_feature 1..19: note = siRNA sense sequence
  source 1..19: mol_type = other RNA
aagcgctgtattctaggag

SEQ ID NO: 44553 - RNA, 19 nt, synthetic construct
  misc_feature 1..19: note = siRNA antisense sequence
  source 1..19: mol_type = other RNA
ctcctagaatacagcgctt

SEQ ID NO: 44554 - RNA, 19 nt, synthetic construct
  misc_feature 1..19: note = siRNA sense sequence
  source 1..19: mol_type = other RNA
tgtcactttctctgtaatt

SEQ ID NO: 44555 - RNA, 19 nt, synthetic construct
  misc_feature 1..19: note = siRNA antisense sequence
  source 1..19: mol_type = other RNA
aattacagagaaagtgaca

SEQ ID NO: 44556 - RNA, 19 nt, synthetic construct
  misc_feature 1..19: note = siRNA sense sequence
  source 1..19: mol_type = other RNA
gtcactttctctgtaattt

SEQ ID NO: 44557 - RNA, 19 nt, synthetic construct
  misc_feature 1..19: note = siRNA antisense sequence
  source 1..19: mol_type = other RNA
aaattacagagaaagtgac

SEQ ID NO: 44558 - RNA, 19 nt, synthetic construct
  misc_feature 1..19: note = siRNA sense sequence
  source 1..19: mol_type = other RNA
tttctatgattatcctacc

SEQ ID NO: 44559 - RNA, 19 nt, synthetic construct
  misc_feature 1..19: note = siRNA antisense sequence
  source 1..19: mol_type = other RNA
ggtaggataatcatagaaa

SEQ ID NO: 44560 - RNA, 19 nt, synthetic construct
  misc_feature 1..19: note = siRNA sense sequence
  source 1..19: mol_type = other RNA
ttctatgattatcctaccc

SEQ ID NO: 44561 - RNA, 19 nt, synthetic construct
  misc_feature 1..19: note = siRNA antisense sequence
  source 1..19: mol_type = other RNA
gggtaggataatcatagaa

SEQ ID NO: 44562 - RNA, 19 nt, synthetic construct
  misc_feature 1..19: note = siRNA sense sequence
  source 1..19: mol_type = other RNA
tctatgattatcctaccca

SEQ ID NO: 44563 - RNA, 19 nt, synthetic construct
  misc_feature 1..19: note = siRNA antisense sequence
  source 1..19: mol_type = other RNA
tgggtaggataatcataga

SEQ ID NO: 44564 - RNA, 19 nt, synthetic construct
  misc_feature 1..19: note = siRNA sense sequence
  source 1..19: mol_type = other RNA
ctatgattatcctacccac

SEQ ID NO: 44565 - RNA, 19 nt, synthetic construct
  misc_feature 1..19: note = siRNA antisense sequence
  source 1..19: mol_type = other RNA
gtgggtaggataatcatag

SEQ ID NO: 44566 - RNA, 19 nt, synthetic construct
  misc_feature 1..19: note = siRNA sense sequence
  source 1..19: mol_type = other RNA
tatgattatcctacccact

SEQ ID NO: 44567 - RNA, 19 nt, synthetic construct
  misc_feature 1..19: note = siRNA antisense sequence
  source 1..19: mol_type = other RNA
agtgggtaggataatcata

SEQ ID NO: 44568 - RNA, 19 nt, synthetic construct
  misc_feature 1..19: note = siRNA sense sequence
  source 1..19: mol_type = other RNA
tatcctacccactgttctt

SEQ ID NO: 44569 - RNA, 19 nt, synthetic construct
  misc_feature 1..19: note = siRNA antisense sequence
  source 1..19: mol_type = other RNA
aagaacagtgggtaggata

SEQ ID NO: 44570 - RNA, 19 nt, synthetic construct
  misc_feature 1..19: note = siRNA sense sequence
  source 1..19: mol_type = other RNA
cctacccactgttcttgag

SEQ ID NO: 44571 - RNA, 19 nt, synthetic construct
  misc_feature 1..19: note = siRNA antisense sequence
  source 1..19: mol_type = other RNA
ctcaagaacagtgggtagg

SEQ ID NO: 44572 - RNA, 19 nt, synthetic construct
  misc_feature 1..19: note = siRNA sense sequence
  source 1..19: mol_type = other RNA
tgttcccatagcagctgca

SEQ ID NO: 44573 - RNA, 19 nt, synthetic construct
  misc_feature 1..19: note = siRNA antisense sequence
  source 1..19: mol_type = other RNA
tgcagctgctatgggaaca

SEQ ID NO: 44574 - RNA, 19 nt, synthetic construct
  misc_feature 1..19: note = siRNA sense sequence
  source 1..19: mol_type = other RNA
tcccatagcagctgcaacc

SEQ ID NO: 44575 - RNA, 19 nt, synthetic construct
  misc_feature 1..19: note = siRNA antisense sequence
  source 1..19: mol_type = other RNA
ggttgcagctgctatggga

SEQ ID NO: 44576 - RNA, 19 nt, synthetic construct
  misc_feature 1..19: note = siRNA sense sequence
  source 1..19: mol_type = other RNA
cccatagcagctgcaaccg

SEQ ID NO: 44577 - RNA, 19 nt, synthetic construct
  misc_feature 1..19: note = siRNA antisense sequence
  source 1..19: mol_type = other RNA
cggttgcagctgctatggg

SEQ ID NO: 44578 - RNA, 19 nt, synthetic construct
  misc_feature 1..19: note = siRNA sense sequence
  source 1..19: mol_type = other RNA
ccatagcagctgcaaccgt

SEQ ID NO: 44579 - RNA, 19 nt, synthetic construct
  misc_feature 1..19: note = siRNA antisense sequence
  source 1..19: mol_type = other RNA
acggttgcagctgctatgg

SEQ ID NO: 44580 - RNA, 19 nt, synthetic construct
  misc_feature 1..19: note = siRNA sense sequence
  source 1..19: mol_type = other RNA
catagcagctgcaaccgtg

SEQ ID NO: 44581 - RNA, 19 nt, synthetic construct
  misc_feature 1..19: note = siRNA antisense sequence
  source 1..19: mol_type = other RNA
cacggttgcagctgctatg

SEQ ID NO: 44582 - RNA, 19 nt, synthetic construct
  misc_feature 1..19: note = siRNA sense sequence
  source 1..19: mol_type = other RNA
atagcagctgcaaccgtga

SEQ ID NO: 44583 - RNA, 19 nt, synthetic construct
  misc_feature 1..19: note = siRNA antisense sequence
  source 1..19: mol_type = other RNA
tcacggttgcagctgctat

SEQ ID NO: 44584 - RNA, 19 nt, synthetic construct
  misc_feature 1..19: note = siRNA sense sequence
  source 1..19: mol_type = other RNA
tagcagctgcaaccgtgag

SEQ ID NO: 44585 - RNA, 19 nt, synthetic construct
  misc_feature 1..19: note = siRNA antisense sequence
  source 1..19: mol_type = other RNA
ctcacggttgcagctgcta

SEQ ID NO: 44586 - RNA, 19 nt, synthetic construct
  misc_feature 1..19: note = siRNA sense sequence
  source 1..19: mol_type = other RNA
gcacatttccttactgctc

SEQ ID NO: 44587 - RNA, 19 nt, synthetic construct
  misc_feature 1..19: note = siRNA antisense sequence
  source 1..19: mol_type = other RNA
gagcagtaaggaaatgtgc

SEQ ID NO: 44588 - RNA, 19 nt, synthetic construct
  misc_feature 1..19: note = siRNA sense sequence
  source 1..19: mol_type = other RNA
cacatttccttactgctct

SEQ ID NO: 44589 - RNA, 19 nt, synthetic construct
  misc_feature 1..19: note = siRNA antisense sequence
  source 1..19: mol_type = other RNA
agagcagtaaggaaatgtg

SEQ ID NO: 44590 - RNA, 19 nt, synthetic construct
  misc_feature 1..19: note = siRNA sense sequence
  source 1..19: mol_type = other RNA
ttccttactgctcttatca

SEQ ID NO: 44591 - RNA, 19 nt, synthetic construct
  misc_feature 1..19: note = siRNA antisense sequence
  source 1..19: mol_type = other RNA
tgataagagcagtaaggaa

SEQ ID NO: 44592 - RNA, 19 nt, synthetic construct
  misc_feature 1..19: note = siRNA sense sequence
  source 1..19: mol_type = other RNA
tccttactgctcttatcac

SEQ ID NO: 44593 - RNA, 19 nt, synthetic construct
  misc_feature 1..19: note = siRNA antisense sequence
  source 1..19: mol_type = other RNA
gtgataagagcagtaagga

SEQ ID NO: 44594 - RNA, 19 nt, synthetic construct
  misc_feature 1..19: note = siRNA sense sequence
  source 1..19: mol_type = other RNA
ccttactgctcttatcact

SEQ ID NO: 44595 - RNA, 19 nt, synthetic construct
  misc_feature 1..19: note = siRNA antisense sequence
  source 1..19: mol_type = other RNA
agtgataagagcagtaagg

SEQ ID NO: 44596 - RNA, 19 nt, synthetic construct
  misc_feature 1..19: note = siRNA sense sequence
  source 1..19: mol_type = other RNA
cttactgctcttatcactc

SEQ ID NO: 44597 - RNA, 19 nt, synthetic construct
  misc_feature 1..19: note = siRNA antisense sequence
  source 1..19: mol_type = other RNA
gagtgataagagcagtaag

SEQ ID NO: 44598 - RNA, 19 nt, synthetic construct
  misc_feature 1..19: note = siRNA sense sequence
  source 1..19: mol_type = other RNA
tgctcttatcactcagtag

SEQ ID NO: 44599 - RNA, 19 nt, synthetic construct
  misc_feature 1..19: note = siRNA antisense sequence
  source 1..19: mol_type = other RNA
ctactgagtgataagagca

SEQ ID NO: 44600 - RNA, 19 nt, synthetic construct
  misc_feature 1..19: note = siRNA sense sequence
  source 1..19: mol_type = other RNA
gctcttatcactcagtagc

SEQ ID NO: 44601 - RNA, 19 nt, synthetic construct
  misc_feature 1..19: note = siRNA antisense sequence
  source 1..19: mol_type = other RNA
gctactgagtgataagagc

SEQ ID NO: 44602 - RNA, 19 nt, synthetic construct
  misc_feature 1..19: note = siRNA sense sequence
  source 1..19: mol_type = other RNA
ctcttatcactcagtagca

SEQ ID NO: 44603 - RNA, 19 nt, synthetic construct
  misc_feature 1..19: note = siRNA antisense sequence
  source 1..19: mol_type = other RNA
tgctactgagtgataagag

SEQ ID NO: 44604 - RNA, 19 nt, synthetic construct
  misc_feature 1..19: note = siRNA sense sequence
  source 1..19: mol_type = other RNA
tcttatcactcagtagcat

SEQ ID NO: 44605 - RNA, 19 nt, synthetic construct
  misc_feature 1..19: note = siRNA antisense sequence
  source 1..19: mol_type = other RNA
atgctactgagtgataaga

SEQ ID NO: 44606 - RNA, 19 nt, synthetic construct
  misc_feature 1..19: note = siRNA sense sequence
  source 1..19: mol_type = other RNA
ttatcactcagtagcattg

SEQ ID NO: 44607 - RNA, 19 nt, synthetic construct
  misc_feature 1..19: note = siRNA antisense sequence
  source 1..19: mol_type = other RNA
caatgctactgagtgataa

SEQ ID NO: 44608 - RNA, 19 nt, synthetic construct
  misc_feature 1..19: note = siRNA sense sequence
  source 1..19: mol_type = other RNA
tatcactcagtagcattgc

SEQ ID NO: 44609 - RNA, 19 nt, synthetic construct
  misc_feature 1..19: note = siRNA antisense sequence
  source 1..19: mol_type = other RNA
gcaatgctactgagtgata

SEQ ID NO: 44610 - RNA, 19 nt, synthetic construct
  misc_feature 1..19: note = siRNA sense sequence
  source 1..19: mol_type = other RNA
atcactcagtagcattgct

SEQ ID NO: 44611 - RNA, 19 nt, synthetic construct
  misc_feature 1..19: note = siRNA antisense sequence
  source 1..19: mol_type = other RNA
agcaatgctactgagtgat

SEQ ID NO: 44612 - RNA, 19 nt, synthetic construct
  misc_feature 1..19: note = siRNA sense sequence
  source 1..19: mol_type = other RNA
tcactcagtagcattgctc

SEQ ID NO: 44613 - RNA, 19 nt, synthetic construct
  misc_feature 1..19: note = siRNA antisense sequence
  source 1..19: mol_type = other RNA
gagcaatgctactgagtga

SEQ ID NO: 44614 - RNA, 19 nt, synthetic construct
  misc_feature 1..19: note = siRNA sense sequence
  source 1..19: mol_type = other RNA
cactcagtagcattgctct

SEQ ID NO: 44615 - RNA, 19 nt, synthetic construct
  misc_feature 1..19: note = siRNA antisense sequence
  source 1..19: mol_type = other RNA
agagcaatgctactgagtg

SEQ ID NO: 44616 - RNA, 19 nt, synthetic construct
  misc_feature 1..19: note = siRNA sense sequence
  source 1..19: mol_type = other RNA
actcagtagcattgctctt

SEQ ID NO: 44617 - RNA, 19 nt, synthetic construct
  misc_feature 1..19: note = siRNA antisense sequence
  source 1..19: mol_type = other RNA
aagagcaatgctactgagt

SEQ ID NO: 44618 - RNA, 19 nt, synthetic construct
  misc_feature 1..19: note = siRNA sense sequence
  source 1..19: mol_type = other RNA
tcagtagcattgctctttg

SEQ ID NO: 44619 - RNA, 19 nt, synthetic construct
  misc_feature 1..19: note = siRNA antisense sequence
  source 1..19: mol_type = other RNA
caaagagcaatgctactga

SEQ ID NO: 44620 - RNA, 19 nt, synthetic construct
  misc_feature 1..19: note = siRNA sense sequence
  source 1..19: mol_type = other RNA
gacagaattgtgccttagt

SEQ ID NO: 44621 - RNA, 19 nt, synthetic construct
  misc_feature 1..19: note = siRNA antisense sequence
  source 1..19: mol_type = other RNA
actaaggcacaattctgtc

SEQ ID NO: 44622 - RNA, 19 nt, synthetic construct
  misc_feature 1..19: note = siRNA sense sequence
  source 1..19: mol_type = other RNA
acagaattgtgccttagtc

SEQ ID NO: 44623 - RNA, 19 nt, synthetic construct
  misc_feature 1..19: note = siRNA antisense sequence
  source 1..19: mol_type = other RNA
gactaaggcacaattctgt

SEQ ID NO: 44624 - RNA, 19 nt, synthetic construct
  misc_feature 1..19: note = siRNA sense sequence
  source 1..19: mol_type = other RNA
cagaattgtgccttagtct

SEQ ID NO: 44625 - RNA, 19 nt, synthetic construct
  misc_feature 1..19: note = siRNA antisense sequence
  source 1..19: mol_type = other RNA
agactaaggcacaattctg

SEQ ID NO: 44626 - RNA, 19 nt, synthetic construct
  misc_feature 1..19: note = siRNA sense sequence
  source 1..19: mol_type = other RNA
agaattgtgccttagtctt

SEQ ID NO: 44627 - RNA, 19 nt, synthetic construct
  misc_feature 1..19: note = siRNA antisense sequence
  source 1..19: mol_type = other RNA
aagactaaggcacaattct

SEQ ID NO: 44628 - RNA, 19 nt, synthetic construct
  misc_feature 1..19: note = siRNA sense sequence
  source 1..19: mol_type = other RNA
gatagtctagggttttatg

SEQ ID NO: 44629 - RNA, 19 nt, synthetic construct
  misc_feature 1..19: note = siRNA antisense sequence
  source 1..19: mol_type = other RNA
cataaaaccctagactatc

SEQ ID NO: 44630 - RNA, 19 nt, synthetic construct
  misc_feature 1..19: note = siRNA sense sequence
  source 1..19: mol_type = other RNA
atagtctagggttttatgt

SEQ ID NO: 44631 - RNA, 19 nt, synthetic construct
  misc_feature 1..19: note = siRNA antisense sequence
  source 1..19: mol_type = other RNA
acataaaaccctagactat

SEQ ID NO: 44632 - RNA, 19 nt, synthetic construct
  misc_feature 1..19: note = siRNA sense sequence
  source 1..19: mol_type = other RNA
tagtctagggttttatgtt

SEQ ID NO: 44633 - RNA, 19 nt, synthetic construct
  misc_feature 1..19: note = siRNA antisense sequence
  source 1..19: mol_type = other RNA
aacataaaaccctagacta

SEQ ID NO: 44634 - RNA, 19 nt, synthetic construct
  misc_feature 1..19: note = siRNA sense sequence
  source 1..19: mol_type = other RNA
agtctagggttttatgttt

SEQ ID NO: 44635 - RNA, 19 nt, synthetic construct
  misc_feature 1..19: note = siRNA antisense sequence
  source 1..19: mol_type = other RNA
aaacataaaaccctagact

SEQ ID NO: 44636 - RNA, 19 nt, synthetic construct
  misc_feature 1..19: note = siRNA sense sequence
  source 1..19: mol_type = other RNA
gggttttatgtttcctagc

SEQ ID NO: 44637 - RNA, 19 nt, synthetic construct
  misc_feature 1..19: note = siRNA antisense sequence
  source 1..19: mol_type = other RNA
gctaggaaacataaaaccc

SEQ ID NO: 44638 - RNA, 19 nt, synthetic construct
  misc_feature 1..19: note = siRNA sense sequence
  source 1..19: mol_type = other RNA
gttttatgtttcctagcac

SEQ ID NO: 44639 - RNA, 19 nt, synthetic construct
  misc_feature 1..19: note = siRNA antisense sequence
  source 1..19: mol_type = other RNA
gtgctaggaaacataaaac

SEQ ID NO: 44640 - RNA, 19 nt, synthetic construct
  misc_feature 1..19: note = siRNA sense sequence
  source 1..19: mol_type = other RNA
tgaattttcaccttctcat

SEQ ID NO: 44641 - RNA, 19 nt, synthetic construct
  misc_feature 1..19: note = siRNA antisense sequence
  source 1..19: mol_type = other RNA
atgagaaggtgaaaattca

SEQ ID NO: 44642 - RNA, 19 nt, synthetic construct
  misc_feature 1..19: note = siRNA sense sequence
  source 1..19: mol_type = other RNA
aattttcaccttctcatgt

SEQ ID NO: 44643 - RNA, 19 nt, synthetic construct
  misc_feature 1..19: note = siRNA antisense sequence
  source 1..19: mol_type = other RNA
acatgagaaggtgaaaatt

SEQ ID NO: 44644 - RNA, 19 nt, synthetic construct
  misc_feature 1..19: note = siRNA sense sequence
  source 1..19: mol_type = other RNA
attttcaccttctcatgta

SEQ ID NO: 44645 - RNA, 19 nt, synthetic construct
  misc_feature 1..19: note = siRNA antisense sequence
  source 1..19: mol_type = other RNA
tacatgagaaggtgaaaat

SEQ ID NO: 44646 - RNA, 19 nt, synthetic construct
  misc_feature 1..19: note = siRNA sense sequence
  source 1..19: mol_type = other RNA
ttttcaccttctcatgtat

SEQ ID NO: 44647 - RNA, 19 nt, synthetic construct
  misc_feature 1..19: note = siRNA antisense sequence
  source 1..19: mol_type = other RNA
atacatgagaaggtgaaaa

SEQ ID NO: 44648 - RNA, 19 nt, synthetic construct
  misc_feature 1..19: note = siRNA sense sequence
  source 1..19: mol_type = other RNA
caccttctcatgtataaaa

SEQ ID NO: 44649 - RNA, 19 nt, synthetic construct
  misc_feature 1..19: note = siRNA antisense sequence
  source 1..19: mol_type = other RNA
ttttatacatgagaaggtg

SEQ ID NO: 44650 - RNA, 19 nt, synthetic construct
  misc_feature 1..19: note = siRNA sense sequence
  source 1..19: mol_type = other RNA
ccttctcatgtataaaatc

SEQ ID NO: 44651 - RNA, 19 nt, synthetic construct
  misc_feature 1..19: note = siRNA antisense sequence
  source 1..19: mol_type = other RNA
gattttatacatgagaagg

SEQ ID NO: 44652 - RNA, 19 nt, synthetic construct
  misc_feature 1..19: note = siRNA sense sequence
  source 1..19: mol_type = other RNA
tagtgacctctttccctta

SEQ ID NO: 44653 - RNA, 19 nt, synthetic construct
  misc_feature 1..19: note = siRNA antisense sequence
  source 1..19: mol_type = other RNA
taagggaaagaggtcacta

SEQ ID NO: 44654 - RNA, 19 nt, synthetic construct
  misc_feature 1..19: note = siRNA sense sequence
  source 1..19: mol_type = other RNA
agtgacctctttcccttac

SEQ ID NO: 44655 - RNA, 19 nt, synthetic construct
  misc_feature 1..19: note = siRNA antisense sequence
  source 1..19: mol_type = other RNA
gtaagggaaagaggtcact

SEQ ID NO: 44656 - RNA, 19 nt, synthetic construct
  misc_feature 1..19: note = siRNA sense sequence
  source 1..19: mol_type = other RNA
gtgacctctttcccttact

SEQ ID NO: 44657 - RNA, 19 nt, synthetic construct
  misc_feature 1..19: note = siRNA antisense sequence
  source 1..19: mol_type = other RNA
agtaagggaaagaggtcac

SEQ ID NO: 44658 - RNA, 19 nt, synthetic construct
  misc_feature 1..19: note = siRNA sense sequence
  source 1..19: mol_type = other RNA
acctctttcccttactttg

SEQ ID NO: 44659 - RNA, 19 nt, synthetic construct
  misc_feature 1..19: note = siRNA antisense sequence
  source 1..19: mol_type = other RNA
caaagtaagggaaagaggt

SEQ ID NO: 44660 - RNA, 19 nt, synthetic construct
  misc_feature 1..19: note = siRNA sense sequence
  source 1..19: mol_type = other RNA
cctctttcccttactttgc

SEQ ID NO: 44661 - RNA, 19 nt, synthetic construct
  misc_feature 1..19: note = siRNA antisense sequence
  source 1..19: mol_type = other RNA
gcaaagtaagggaaagagg

SEQ ID NO: 44662 - RNA, 19 nt, synthetic construct
  misc_feature 1..19: note = siRNA sense sequence
  source 1..19: mol_type = other RNA
ctctttcccttactttgct

SEQ ID NO: 44663 - RNA, 19 nt, synthetic construct
  misc_feature 1..19: note = siRNA antisense sequence
  source 1..19: mol_type = other RNA
agcaaagtaagggaaagag

SEQ ID NO: 44664 - RNA, 19 nt, synthetic construct
  misc_feature 1..19: note = siRNA sense sequence
  source 1..19: mol_type = other RNA
tctttcccttactttgctt

SEQ ID NO: 44665 - RNA, 19 nt, synthetic construct
  misc_feature 1..19: note = siRNA antisense sequence
  source 1..19: mol_type = other RNA
aagcaaagtaagggaaaga

SEQ ID NO: 44666 - RNA, 19 nt, synthetic construct
  misc_feature 1..19: note = siRNA sense sequence
  source 1..19: mol_type = other RNA
ctttcccttactttgcttc

SEQ ID NO: 44667 - RNA, 19 nt, synthetic construct
  misc_feature 1..19: note = siRNA antisense sequence
  source 1..19: mol_type = other RNA
gaagcaaagtaagggaaag

SEQ ID NO: 44668 - RNA, 19 nt, synthetic construct
  misc_feature 1..19: note = siRNA sense sequence
  source 1..19: mol_type = other RNA
cccttactttgcttcataa

SEQ ID NO: 44669 - RNA, 19 nt, synthetic construct
  misc_feature 1..19: note = siRNA antisense sequence
  source 1..19: mol_type = other RNA
ttatgaagcaaagtaaggg

SEQ ID NO: 44670 - RNA, 19 nt, synthetic construct
  misc_feature 1..19: note = siRNA sense sequence
  source 1..19: mol_type = other RNA
ccttactttgcttcataaa

SEQ ID NO: 44671 - RNA, 19 nt, synthetic construct
  misc_feature 1..19: note = siRNA antisense sequence
  source 1..19: mol_type = other RNA
tttatgaagcaaagtaagg

SEQ ID NO: 44672 - RNA, 19 nt, synthetic construct
  misc_feature 1..19: note = siRNA sense sequence
  source 1..19: mol_type = other RNA
cataaagtcatattgatcc

SEQ ID NO: 44673 - RNA, 19 nt, synthetic construct
  misc_feature 1..19: note = siRNA antisense sequence
  source 1..19: mol_type = other RNA
ggatcaatatgactttatg

SEQ ID NO: 44674 - RNA, 19 nt, synthetic construct
  misc_feature 1..19: note = siRNA sense sequence
  source 1..19: mol_type = other RNA
taaagtcatattgatccac

SEQ ID NO: 44675 - RNA, 19 nt, synthetic construct
  misc_feature 1..19: note = siRNA antisense sequence
  source 1..19: mol_type = other RNA
gtggatcaatatgacttta

SEQ ID NO: 44676 - RNA, 19 nt, synthetic construct
  misc_feature 1..19: note = siRNA sense sequence
  source 1..19: mol_type = other RNA
aaagtcatattgatccact

SEQ ID NO: 44677 - RNA, 19 nt, synthetic construct
  misc_feature 1..19: note = siRNA antisense sequence
  source 1..19: mol_type = other RNA
agtggatcaatatgacttt

SEQ ID NO: 44678 - RNA, 19 nt, synthetic construct
  misc_feature 1..19: note = siRNA sense sequence
  source 1..19: mol_type = other RNA
tcatattgatccactgagc

SEQ ID NO: 44679 - RNA, 19 nt, synthetic construct
  misc_feature 1..19: note = siRNA antisense sequence
  source 1..19: mol_type = other RNA
gctcagtggatcaatatga

SEQ ID NO: 44680 - RNA, 19 nt, synthetic construct
  misc_feature 1..19: note = siRNA sense sequence
  source 1..19: mol_type = other RNA
catattgatccactgagct

SEQ ID NO: 44681 - RNA, 19 nt, synthetic construct
  misc_feature 1..19: note = siRNA antisense sequence
  source 1..19: mol_type = other RNA
agctcagtggatcaatatg

SEQ ID NO: 44682 - RNA, 19 nt, synthetic construct
  misc_feature 1..19: note = siRNA sense sequence
  source 1..19: mol_type = other RNA
atattgatccactgagctg

SEQ ID NO: 44683 - RNA, 19 nt, synthetic construct
  misc_feature 1..19: note = siRNA antisense sequence
  source 1..19: mol_type = other RNA
cagctcagtggatcaatat

SEQ ID NO: 44684 - RNA, 19 nt, synthetic construct
  misc_feature 1..19: note = siRNA sense sequence
  source 1..19: mol_type = other RNA
tattgatccactgagctgg

SEQ ID NO: 44685 - RNA, 19 nt, synthetic construct
  misc_feature 1..19: note = siRNA antisense sequence
  source 1..19: mol_type = other RNA
ccagctcagtggatcaata

SEQ ID NO: 44686 - RNA, 19 nt, synthetic construct
  misc_feature 1..19: note = siRNA sense sequence
  source 1..19: mol_type = other RNA
cactgagctggaaggtact

SEQ ID NO: 44687 - RNA, 19 nt, synthetic construct
  misc_feature 1..19: note = siRNA antisense sequence
  source 1..19: mol_type = other RNA
agtaccttccagctcagtg

SEQ ID NO: 44688 - RNA, 19 nt, synthetic construct
  misc_feature 1..19: note = siRNA sense sequence
  source 1..19: mol_type = other RNA
ctgagctggaaggtacttg

SEQ ID NO: 44689 - RNA, 19 nt, synthetic construct
  misc_feature 1..19: note = siRNA antisense sequence
  source 1..19: mol_type = other RNA
caagtaccttccagctcag

SEQ ID NO: 44690 - RNA, 19 nt, synthetic construct
  misc_feature 1..19: note = siRNA sense sequence
  source 1..19: mol_type = other RNA
tgagctggaaggtacttgc

SEQ ID NO: 44691 - RNA, 19 nt, synthetic construct
  misc_feature 1..19: note = siRNA antisense sequence
  source 1..19: mol_type = other RNA
gcaagtaccttccagctca

SEQ ID NO: 44692 - RNA, 19 nt, synthetic construct
  misc_feature 1..19: note = siRNA sense sequence
  source 1..19: mol_type = other RNA
gagctggaaggtacttgct

SEQ ID NO: 44693 - RNA, 19 nt, synthetic construct
  misc_feature 1..19: note = siRNA antisense sequence
  source 1..19: mol_type = other RNA
agcaagtaccttccagctc

SEQ ID NO: 44694 - RNA, 19 nt, synthetic construct
  misc_feature 1..19: note = siRNA sense sequence
  source 1..19: mol_type = other RNA
agctggaaggtacttgctt

SEQ ID NO: 44695 - RNA, 19 nt, synthetic construct
  misc_feature 1..19: note = siRNA antisense sequence
  source 1..19: mol_type = other RNA
aagcaagtaccttccagct

SEQ ID NO: 44696 - RNA, 19 nt, synthetic construct
  misc_feature 1..19: note = siRNA sense sequence
  source 1..19: mol_type = other RNA
gctggaaggtacttgcttg

SEQ ID NO: 44697 - RNA, 19 nt, synthetic construct
  misc_feature 1..19: note = siRNA antisense sequence
  source 1..19: mol_type = other RNA
caagcaagtaccttccagc

SEQ ID NO: 44698 - RNA, 19 nt, synthetic construct
  misc_feature 1..19: note = siRNA sense sequence
  source 1..19: mol_type = other RNA
ctggaaggtacttgcttgt

SEQ ID NO: 44699 - RNA, 19 nt, synthetic construct
  misc_feature 1..19: note = siRNA antisense sequence
  source 1..19: mol_type = other RNA
acaagcaagtaccttccag

SEQ ID NO: 44700 - RNA, 19 nt, synthetic construct
  misc_feature 1..19: note = siRNA sense sequence
  source 1..19: mol_type = other RNA
tggaaggtacttgcttgtg

SEQ ID NO: 44701 - RNA, 19 nt, synthetic construct
  misc_feature 1..19: note = siRNA antisense sequence
  source 1..19: mol_type = other RNA
cacaagcaagtaccttcca

SEQ ID NO: 44702 - RNA, 19 nt, synthetic construct
  misc_feature 1..19: note = siRNA sense sequence
  source 1..19: mol_type = other RNA
ggaaggtacttgcttgtgg

SEQ ID NO: 44703 - RNA, 19 nt, synthetic construct
  misc_feature 1..19: note = siRNA antisense sequence
  source 1..19: mol_type = other RNA
ccacaagcaagtaccttcc

SEQ ID NO: 44704 - RNA, 19 nt, synthetic construct
  misc_feature 1..19: note = siRNA sense sequence
  source 1..19: mol_type = other RNA
gaaggtacttgcttgtggg

SEQ ID NO: 44705 - RNA, 19 nt, synthetic construct
  misc_feature 1..19: note = siRNA antisense sequence
  source 1..19: mol_type = other RNA
cccacaagcaagtaccttc

SEQ ID NO: 44706 - RNA, 19 nt, synthetic construct
  misc_feature 1..19: note = siRNA sense sequence
  source 1..19: mol_type = other RNA
accctttacattgtatttc

SEQ ID NO: 44707 - RNA, 19 nt, synthetic construct
  misc_feature 1..19: note = siRNA antisense sequence
  source 1..19: mol_type = other RNA
gaaatacaatgtaaagggt

SEQ ID NO: 44708 - RNA, 19 nt, synthetic construct
  misc_feature 1..19: note = siRNA sense sequence
  source 1..19: mol_type = other RNA
tttcagtcttttctttgca

SEQ ID NO: 44709 - RNA, 19 nt, synthetic construct
  misc_feature 1..19: note = siRNA antisense sequence
  source 1..19: mol_type = other RNA
tgcaaagaaaagactgaaa

SEQ ID NO: 44710 - RNA, 19 nt, synthetic construct
  misc_feature 1..19: note = siRNA sense sequence
  source 1..19: mol_type = other RNA
ttcagtcttttctttgcag

SEQ ID NO: 44711 - RNA, 19 nt, synthetic construct
  misc_feature 1..19: note = siRNA antisense sequence
  source 1..19: mol_type = other RNA
ctgcaaagaaaagactgaa

SEQ ID NO: 44712 - RNA, 19 nt, synthetic construct
  misc_feature 1..19: note = siRNA sense sequence
  source 1..19: mol_type = other RNA
tcagtcttttctttgcagg

SEQ ID NO: 44713 - RNA, 19 nt, synthetic construct
  misc_feature 1..19: note = siRNA antisense sequence
  source 1..19: mol_type = other RNA
cctgcaaagaaaagactga

SEQ ID NO: 44714 - RNA, 19 nt, synthetic construct
  misc_feature 1..19: note = siRNA sense sequence
  source 1..19: mol_type = other RNA
agtcttttctttgcaggtg

SEQ ID NO: 44715 - RNA, 19 nt, synthetic construct
  misc_feature 1..19: note = siRNA antisense sequence
  source 1..19: mol_type = other RNA
cacctgcaaagaaaagact

SEQ ID NO: 44716 - RNA, 19 nt, synthetic construct
  misc_feature 1..19: note = siRNA sense sequence
  source 1..19: mol_type = other RNA
gtcttttctttgcaggtgt

SEQ ID NO: 44717 - RNA, 19 nt, synthetic construct
  misc_feature 1..19: note = siRNA antisense sequence
  source 1..19: mol_type = other RNA
acacctgcaaagaaaagac

SEQ ID NO: 44718 - RNA, 19 nt, synthetic construct
  misc_feature 1..19: note = siRNA sense sequence
  source 1..19: mol_type = other RNA
tcttttctttgcaggtgtt

SEQ ID NO: 44719 - RNA, 19 nt, synthetic construct
  misc_feature 1..19: note = siRNA antisense sequence
  source 1..19: mol_type = other RNA
aacacctgcaaagaaaaga

SEQ ID NO: 44720 - RNA, 19 nt, synthetic construct
  misc_feature 1..19: note = siRNA sense sequence
  source 1..19: mol_type = other RNA
ctttgcaggtgtttaccca

SEQ ID NO: 44721 - RNA, 19 nt, synthetic construct
  misc_feature 1..19: note = siRNA antisense sequence
  source 1..19: mol_type = other RNA
tgggtaaacacctgcaaag

SEQ ID NO: 44722 - RNA, 19 nt, synthetic construct
  misc_feature 1..19: note = siRNA sense sequence
  source 1..19: mol_type = other RNA
tttgcaggtgtttacccac

SEQ ID NO: 44723 - RNA, 19 nt, synthetic construct
  misc_feature 1..19: note = siRNA antisense sequence
  source 1..19: mol_type = other RNA
gtgggtaaacacctgcaaa

SEQ ID NO: 44724 - RNA, 19 nt, synthetic construct
  misc_feature 1..19: note = siRNA sense sequence
  source 1..19: mol_type = other RNA
gtgtttacccacctagccc

SEQ ID NO: 44725 - RNA, 19 nt, synthetic construct
  misc_feature 1..19: note = siRNA antisense sequence
  source 1..19: mol_type = other RNA
gggctaggtgggtaaacac

SEQ ID NO: 44726 - RNA, 19 nt, synthetic construct
  misc_feature 1..19: note = siRNA sense sequence
  source 1..19: mol_type = other RNA
tgtttacccacctagccct

SEQ ID NO: 44727 - RNA, 19 nt, synthetic construct
  misc_feature 1..19: note = siRNA antisense sequence
  source 1..19: mol_type = other RNA
agggctaggtgggtaaaca

SEQ ID NO: 44728 - RNA, 19 nt, synthetic construct
  misc_feature 1..19: note = siRNA sense sequence
  source 1..19: mol_type = other RNA
gtttacccacctagcccta

SEQ ID NO: 44729 - RNA, 19 nt, synthetic construct
  misc_feature 1..19: note = siRNA antisense sequence
  source 1..19: mol_type = other RNA
tagggctaggtgggtaaac

SEQ ID NO: 44730 - RNA, 19 nt, synthetic construct
  misc_feature 1..19: note = siRNA sense sequence
  source 1..19: mol_type = other RNA
tttacccacctagccctat

SEQ ID NO: 44731 - RNA, 19 nt, synthetic construct
  misc_feature 1..19: note = siRNA antisense sequence
  source 1..19: mol_type = other RNA
atagggctaggtgggtaaa

SEQ ID NO: 44732 - RNA, 19 nt, synthetic construct
  misc_feature 1..19: note = siRNA sense sequence
  source 1..19: mol_type = other RNA
ttacccacctagccctatt

SEQ ID NO: 44733 - RNA, 19 nt, synthetic construct
  misc_feature 1..19: note = siRNA antisense sequence
  source 1..19: mol_type = other RNA
aatagggctaggtgggtaa

SEQ ID NO: 44734 - RNA, 19 nt, synthetic construct
  misc_feature 1..19: note = siRNA sense sequence
  source 1..19: mol_type = other RNA
tacccacctagccctattc

SEQ ID NO: 44735 - RNA, 19 nt, synthetic construct
  misc_feature 1..19: note = siRNA antisense sequence
  source 1..19: mol_type = other RNA
gaatagggctaggtgggta

SEQ ID NO: 44736 - RNA, 19 nt, synthetic construct
  misc_feature 1..19: note = siRNA sense sequence
  source 1..19: mol_type = other RNA
acccacctagccctattcc

SEQ ID NO: 44737 - RNA, 19 nt, synthetic construct
  misc_feature 1..19: note = siRNA antisense sequence
  source 1..19: mol_type = other RNA
ggaatagggctaggtgggt

SEQ ID NO: 44738 - RNA, 19 nt, synthetic construct
  misc_feature 1..19: note = siRNA sense sequence
  source 1..19: mol_type = other RNA
cccacctagccctattccc

SEQ ID NO: 44739 - RNA, 19 nt, synthetic construct
  misc_feature 1..19: note = siRNA antisense sequence
  source 1..19: mol_type = other RNA
gggaatagggctaggtggg

SEQ ID NO: 44740 - RNA, 19 nt, synthetic construct
  misc_feature 1..19: note = siRNA sense sequence
  source 1..19: mol_type = other RNA
tcagccctaatttctccta

SEQ ID NO: 44741 - RNA, 19 nt, synthetic construct
  misc_feature 1..19: note = siRNA antisense sequence
  source 1..19: mol_type = other RNA
taggagaaattagggctga

SEQ ID NO: 44742 - RNA, 19 nt, synthetic construct
  misc_feature 1..19: note = siRNA sense sequence
  source 1..19: mol_type = other RNA
cagccctaatttctcctat

SEQ ID NO: 44743 - RNA, 19 nt, synthetic construct
  misc_feature 1..19: note = siRNA antisense sequence
  source 1..19: mol_type = other RNA
ataggagaaattagggctg

SEQ ID NO: 44744 - RNA, 19 nt, synthetic construct
  misc_feature 1..19: note = siRNA sense sequence
  source 1..19: mol_type = other RNA
agccctaatttctcctata

SEQ ID NO: 44745 - RNA, 19 nt, synthetic construct
  misc_feature 1..19: note = siRNA antisense sequence
  source 1..19: mol_type = other RNA
tataggagaaattagggct

SEQ ID NO: 44746 - RNA, 19 nt, synthetic construct
  misc_feature 1..19: note = siRNA sense sequence
  source 1..19: mol_type = other RNA
gccctaatttctcctatag

SEQ ID NO: 44747 - RNA, 19 nt, synthetic construct
  misc_feature 1..19: note = siRNA antisense sequence
  source 1..19: mol_type = other RNA
ctataggagaaattagggc

SEQ ID NO: 44748 - RNA, 19 nt, synthetic construct
  misc_feature 1..19: note = siRNA sense sequence
  source 1..19: mol_type = other RNA
ccctaatttctcctatagc

SEQ ID NO: 44749 - RNA, 19 nt, synthetic construct
  misc_feature 1..19: note = siRNA antisense sequence
  source 1..19: mol_type = other RNA
gctataggagaaattaggg

SEQ ID NO: 44750 - RNA, 19 nt, synthetic construct
  misc_feature 1..19: note = siRNA sense sequence
  source 1..19: mol_type = other RNA
cctaatttctcctatagcc

SEQ ID NO: 44751 - RNA, 19 nt, synthetic construct
  misc_feature 1..19: note = siRNA antisense sequence
  source 1..19: mol_type = other RNA
ggctataggagaaattagg

SEQ ID NO: 44752 - RNA, 19 nt, synthetic construct
  misc_feature 1..19: note = siRNA sense sequence
  source 1..19: mol_type = other RNA
ctaatttctcctatagccc

SEQ ID NO: 44753 - RNA, 19 nt, synthetic construct
  misc_feature 1..19: note = siRNA antisense sequence
  source 1..19: mol_type = other RNA
gggctataggagaaattag

SEQ ID NO: 44754 - RNA, 19 nt, synthetic construct
  misc_feature 1..19: note = siRNA sense sequence
  source 1..19: mol_type = other RNA
taatttctcctatagccct

SEQ ID NO: 44755 - RNA, 19 nt, synthetic construct
  misc_feature 1..19: note = siRNA antisense sequence
  source 1..19: mol_type = other RNA
agggctataggagaaatta

SEQ ID NO: 44756 - RNA, 19 nt, synthetic construct
  misc_feature 1..19: note = siRNA sense sequence
  source 1..19: mol_type = other RNA
aatttctcctatagccctt

SEQ ID NO: 44757 - RNA, 19 nt, synthetic construct
  misc_feature 1..19: note = siRNA antisense sequence
  source 1..19: mol_type = other RNA
aagggctataggagaaatt

SEQ ID NO: 44758 - RNA, 19 nt, synthetic construct
  misc_feature 1..19: note = siRNA sense sequence
  source 1..19: mol_type = other RNA
atttctcctatagcccttg

SEQ ID NO: 44759 - RNA, 19 nt, synthetic construct
  misc_feature 1..19: note = siRNA antisense sequence
  source 1..19: mol_type = other RNA
caagggctataggagaaat

SEQ ID NO: 44760 - RNA, 19 nt, synthetic construct
  misc_feature 1..19: note = siRNA sense sequence
  source 1..19: mol_type = other RNA
tcctatagcccttgccctt

SEQ ID NO: 44761 - RNA, 19 nt, synthetic construct
  misc_feature 1..19: note = siRNA antisense sequence
  source 1..19: mol_type = other RNA
aagggcaagggctatagga

SEQ ID NO: 44762 - RNA, 19 nt, synthetic construct
  misc_feature 1..19: note = siRNA sense sequence
  source 1..19: mol_type = other RNA
cctatagcccttgcccttc

SEQ ID NO: 44763 - RNA, 19 nt, synthetic construct
  misc_feature 1..19: note = siRNA antisense sequence
  source 1..19: mol_type = other RNA
gaagggcaagggctatagg

SEQ ID NO: 44764 - RNA, 19 nt, synthetic construct
  misc_feature 1..19: note = siRNA sense sequence
  source 1..19: mol_type = other RNA
ctatagcccttgcccttct

SEQ ID NO: 44765 - RNA, 19 nt, synthetic construct
  misc_feature 1..19: note = siRNA antisense sequence
  source 1..19: mol_type = other RNA
agaagggcaagggctatag

SEQ ID NO: 44766 - RNA, 19 nt, synthetic construct
  misc_feature 1..19: note = siRNA sense sequence
  source 1..19: mol_type = other RNA
tatagcccttgcccttctc

SEQ ID NO: 44767 - RNA, 19 nt, synthetic construct
  misc_feature 1..19: note = siRNA antisense sequence
  source 1..19: mol_type = other RNA
gagaagggcaagggctata

SEQ ID NO: 44768 - RNA, 19 nt, synthetic construct
  misc_feature 1..19: note = siRNA sense sequence
  source 1..19: mol_type = other RNA
atagcccttgcccttctcc

SEQ ID NO: 44769 - RNA, 19 nt, synthetic construct
  misc_feature 1..19: note = siRNA antisense sequence
  source 1..19: mol_type = other RNA
ggagaagggcaagggctat

SEQ ID NO: 44770 - RNA, 19 nt, synthetic construct
  misc_feature 1..19: note = siRNA sense sequence
  source 1..19: mol_type = other RNA
tagcccttgcccttctcca

SEQ ID NO: 44771 - RNA, 19 nt, synthetic construct
  misc_feature 1..19: note = siRNA antisense sequence
  source 1..19: mol_type = other RNA
tggagaagggcaagggcta

SEQ ID NO: 44772 - RNA, 19 nt, synthetic construct
  misc_feature 1..19: note = siRNA sense sequence
  source 1..19: mol_type = other RNA
gcccttgcccttctccaca

SEQ ID NO: 44773 - RNA, 19 nt, synthetic construct
  misc_feature 1..19: note = siRNA antisense sequence
  source 1..19: mol_type = other RNA
tgtggagaagggcaagggc

SEQ ID NO: 44774 - RNA, 19 nt, synthetic construct
  misc_feature 1..19: note = siRNA sense sequence
  source 1..19: mol_type = other RNA
gttttaacctctcctatct

SEQ ID NO: 44775 - RNA, 19 nt, synthetic construct
  misc_feature 1..19: note = siRNA antisense sequence
  source 1..19: mol_type = other RNA
agataggagaggttaaaac

SEQ ID NO: 44776 - RNA, 19 nt, synthetic construct
  misc_feature 1..19: note = siRNA sense sequence
  source 1..19: mol_type = other RNA
ttaacctctcctatctttg

SEQ ID NO: 44777 - RNA, 19 nt, synthetic construct
  misc_feature 1..19: note = siRNA antisense sequence
  source 1..19: mol_type = other RNA
caaagataggagaggttaa

SEQ ID NO: 44778 - RNA, 19 nt, synthetic construct
  misc_feature 1..19: note = siRNA sense sequence
  source 1..19: mol_type = other RNA
taacctctcctatctttgc

SEQ ID NO: 44779 - RNA, 19 nt, synthetic construct
  misc_feature 1..19: note = siRNA antisense sequence
  source 1..19: mol_type = other RNA
gcaaagataggagaggtta

SEQ ID NO: 44780 - RNA, 19 nt, synthetic construct
  misc_feature 1..19: note = siRNA sense sequence
  source 1..19: mol_type = other RNA
aacctctcctatctttgca

SEQ ID NO: 44781 - RNA, 19 nt, synthetic construct
  misc_feature 1..19: note = siRNA antisense sequence
  source 1..19: mol_type = other RNA
tgcaaagataggagaggtt

SEQ ID NO: 44782 - RNA, 19 nt, synthetic construct
  misc_feature 1..19: note = siRNA sense sequence
  source 1..19: mol_type = other RNA
acctctcctatctttgcat

SEQ ID NO: 44783 - RNA, 19 nt, synthetic construct
  misc_feature 1..19: note = siRNA antisense sequence
  source 1..19: mol_type = other RNA
atgcaaagataggagaggt

SEQ ID NO: 44784 - RNA, 19 nt, synthetic construct
  misc_feature 1..19: note = siRNA sense sequence
  source 1..19: mol_type = other RNA
cctctcctatctttgcatt

SEQ ID NO: 44785 - RNA, 19 nt, synthetic construct
  misc_feature 1..19: note = siRNA antisense sequence
  source 1..19: mol_type = other RNA
aatgcaaagataggagagg

SEQ ID NO: 44786 - RNA, 19 nt, synthetic construct
  misc_feature 1..19: note = siRNA sense sequence
  source 1..19: mol_type = other RNA
ttttgagcctacgtcactt

SEQ ID NO: 44787 - RNA, 19 nt, synthetic construct
  misc_feature 1..19: note = siRNA antisense sequence
  source 1..19: mol_type = other RNA
aagtgacgtaggctcaaaa

SEQ ID NO: 44788 - RNA, 19 nt, synthetic construct
  misc_feature 1..19: note = siRNA sense sequence
  source 1..19: mol_type = other RNA
gcctacgtcactttcattg

SEQ ID NO: 44789 - RNA, 19 nt, synthetic construct
  misc_feature 1..19: note = siRNA antisense sequence
  source 1..19: mol_type = other RNA
caatgaaagtgacgtaggc

SEQ ID NO: 44790 - RNA, 19 nt, synthetic construct
  misc_feature 1..19: note = siRNA sense sequence
  source 1..19: mol_type = other RNA
cctacgtcactttcattgt

SEQ ID NO: 44791 - RNA, 19 nt, synthetic construct
  misc_feature 1..19: note = siRNA antisense sequence
  source 1..19: mol_type = other RNA
acaatgaaagtgacgtagg

SEQ ID NO: 44792 - RNA, 19 nt, synthetic construct
  misc_feature 1..19: note = siRNA sense sequence
  source 1..19: mol_type = other RNA
ctacgtcactttcattgta

SEQ ID NO: 44793 - RNA, 19 nt, synthetic construct
  misc_feature 1..19: note = siRNA antisense sequence
  source 1..19: mol_type = other RNA
tacaatgaaagtgacgtag

SEQ ID NO: 44794 - RNA, 19 nt, synthetic construct
  misc_feature 1..19: note = siRNA sense sequence
  source 1..19: mol_type = other RNA
tacgtcactttcattgtag

SEQ ID NO: 44795 - RNA, 19 nt, synthetic construct
  misc_feature 1..19: note = siRNA antisense sequence
  source 1..19: mol_type = other RNA
ctacaatgaaagtgacgta

SEQ ID NO: 44796 - RNA, 19 nt, synthetic construct
  misc_feature 1..19: note = siRNA sense sequence
  source 1..19: mol_type = other RNA
tcactttcattgtagcatc

SEQ ID NO: 44797 - RNA, 19 nt, synthetic construct
  misc_feature 1..19: note = siRNA antisense sequence
  source 1..19: mol_type = other RNA
gatgctacaatgaaagtga

SEQ ID NO: 44798 - RNA, 19 nt, synthetic construct
  misc_feature 1..19: note = siRNA sense sequence
  source 1..19: mol_type = other RNA
actttcattgtagcatctt

SEQ ID NO: 44799 - RNA, 19 nt, synthetic construct
  misc_feature 1..19: note = siRNA antisense sequence
  source 1..19: mol_type = other RNA
aagatgctacaatgaaagt

SEQ ID NO: 44800 - RNA, 19 nt, synthetic construct
  misc_feature 1..19: note = siRNA sense sequence
  source 1..19: mol_type = other RNA
ctttcattgtagcatcttc

SEQ ID NO: 44801 - RNA, 19 nt, synthetic construct
  misc_feature 1..19: note = siRNA antisense sequence
  source 1..19: mol_type = other RNA
gaagatgctacaatgaaag

SEQ ID NO: 44802 - RNA, 19 nt, synthetic construct
  misc_feature 1..19: note = siRNA sense sequence
  source 1..19: mol_type = other RNA
ttccatgaagcaagagtcc

SEQ ID NO: 44803 - RNA, 19 nt, synthetic construct
  misc_feature 1..19: note = siRNA antisense sequence
  source 1..19: mol_type = other RNA
ggactcttgcttcatggaa

SEQ ID NO: 44804 - RNA, 19 nt, synthetic construct
  misc_feature 1..19: note = siRNA sense sequence
  source 1..19: mol_type = other RNA
tccatgaagcaagagtcca

SEQ ID NO: 44805 - RNA, 19 nt, synthetic construct
  misc_feature 1..19: note = siRNA antisense sequence
  source 1..19: mol_type = other RNA
tggactcttgcttcatgga

SEQ ID NO: 44806 - RNA, 19 nt, synthetic construct
  misc_feature 1..19: note = siRNA sense sequence
  source 1..19: mol_type = other RNA
gaagcaagagtccagataa

SEQ ID NO: 44807 - RNA, 19 nt, synthetic construct
  misc_feature 1..19: note = siRNA antisense sequence
  source 1..19: mol_type = other RNA
ttatctggactcttgcttc

SEQ ID NO: 44808 - RNA, 19 nt, synthetic construct
  misc_feature 1..19: note = siRNA sense sequence
  source 1..19: mol_type = other RNA
aagcaagagtccagataaa

SEQ ID NO: 44809 - RNA, 19 nt, synthetic construct
  misc_feature 1..19: note = siRNA antisense sequence
  source 1..19: mol_type = other RNA
tttatctggactcttgctt

SEQ ID NO: 44810 - RNA, 19 nt, synthetic construct
  misc_feature 1..19: note = siRNA sense sequence
  source 1..19: mol_type = other RNA
agcaagagtccagataaag

SEQ ID NO: 44811 - RNA, 19 nt, synthetic construct
  misc_feature 1..19: note = siRNA antisense sequence
  source 1..19: mol_type = other RNA
ctttatctggactcttgct

SEQ ID NO: 44812 - RNA, 19 nt, synthetic construct
  misc_feature 1..19: note = siRNA sense sequence
  source 1..19: mol_type = other RNA
gcaagagtccagataaaga

SEQ ID NO: 44813 - RNA, 19 nt, synthetic construct
  misc_feature 1..19: note = siRNA antisense sequence
  source 1..19: mol_type = other RNA
tctttatctggactcttgc

SEQ ID NO: 44814 - RNA, 19 nt, synthetic construct
  misc_feature 1..19: note = siRNA sense sequence
  source 1..19: mol_type = other RNA
caagagtccagataaagat

SEQ ID NO: 44815 - RNA, 19 nt, synthetic construct
  misc_feature 1..19: note = siRNA antisense sequence
  source 1..19: mol_type = other RNA
atctttatctggactcttg

SEQ ID NO: 44816 - RNA, 19 nt, synthetic construct
  misc_feature 1..19: note = siRNA sense sequence
  source 1..19: mol_type = other RNA
aagagtccagataaagata

SEQ ID NO: 44817 - RNA, 19 nt, synthetic construct
  misc_feature 1..19: note = siRNA antisense sequence
  source 1..19: mol_type = other RNA
tatctttatctggactctt

SEQ ID NO: 44818 - RNA, 19 nt, synthetic construct
  misc_feature 1..19: note = siRNA sense sequence
  source 1..19: mol_type = other RNA
agagtccagataaagatac

SEQ ID NO: 44819 - RNA, 19 nt, synthetic construct
  misc_feature 1..19: note = siRNA antisense sequence
  source 1..19: mol_type = other RNA
gtatctttatctggactct

SEQ ID NO: 44820 - RNA, 19 nt, synthetic construct
  misc_feature 1..19: note = siRNA sense sequence
  source 1..19: mol_type = other RNA
gagtccagataaagatacc

SEQ ID NO: 44821 - RNA, 19 nt, synthetic construct
  misc_feature 1..19: note = siRNA antisense sequence
  source 1..19: mol_type = other RNA
ggtatctttatctggactc

SEQ ID NO: 44822 - RNA, 19 nt, synthetic construct
  misc_feature 1..19: note = siRNA sense sequence
  source 1..19: mol_type = other RNA
agtccagataaagataccc

SEQ ID NO: 44823 - RNA, 19 nt, synthetic construct
  misc_feature 1..19: note = siRNA antisense sequence
  source 1..19: mol_type = other RNA
gggtatctttatctggact

SEQ ID NO: 44824 - RNA, 19 nt, synthetic construct
  misc_feature 1..19: note = siRNA sense sequence
  source 1..19: mol_type = other RNA
gtccagataaagataccct

SEQ ID NO: 44825 - RNA, 19 nt, synthetic construct
  misc_feature 1..19: note = siRNA antisense sequence
  source 1..19: mol_type = other RNA
agggtatctttatctggac

SEQ ID NO: 44826 - RNA, 19 nt, synthetic construct
  misc_feature 1..19: note = siRNA sense sequence
  source 1..19: mol_type = other RNA
tccagataaagataccctt

SEQ ID NO: 44827 - RNA, 19 nt, synthetic construct
  misc_feature 1..19: note = siRNA antisense sequence
  source 1..19: mol_type = other RNA
aagggtatctttatctgga

SEQ ID NO: 44828 - RNA, 19 nt, synthetic construct
  misc_feature 1..19: note = siRNA sense sequence
  source 1..19: mol_type = other RNA
cctgtatctattatgtatc

SEQ ID NO: 44829 - RNA, 19 nt, synthetic construct
  misc_feature 1..19: note = siRNA antisense sequence
  source 1..19: mol_type = other RNA
gatacataatagatacagg

SEQ ID NO: 44830 - RNA, 19 nt, synthetic construct
  misc_feature 1..19: note = siRNA sense sequence
  source 1..19: mol_type = other RNA
aatcatctacctgtaaatc

SEQ ID NO: 44831 - RNA, 19 nt, synthetic construct
  misc_feature 1..19: note = siRNA antisense sequence
  source 1..19: mol_type = other RNA
gatttacaggtagatgatt

SEQ ID NO: 44832 - RNA, 19 nt, synthetic construct
  misc_feature 1..19: note = siRNA sense sequence
  source 1..19: mol_type = other RNA
tctacctgtaaatcagtcc

SEQ ID NO: 44833 - RNA, 19 nt, synthetic construct
  misc_feature 1..19: note = siRNA antisense sequence
  source 1..19: mol_type = other RNA
ggactgatttacaggtaga

SEQ ID NO: 44834 - RNA, 19 nt, synthetic construct
  misc_feature 1..19: note = siRNA sense sequence
  source 1..19: mol_type = other RNA
ctacctgtaaatcagtccc

SEQ ID NO: 44835 - RNA, 19 nt, synthetic construct
  misc_feature 1..19: note = siRNA antisense sequence
  source 1..19: mol_type = other RNA
gggactgatttacaggtag

SEQ ID NO: 44836 - RNA, 19 nt, synthetic construct
  misc_feature 1..19: note = siRNA sense sequence
  source 1..19: mol_type = other RNA
tacctgtaaatcagtccca

SEQ ID NO: 44837 - RNA, 19 nt, synthetic construct
  misc_feature 1..19: note = siRNA antisense sequence
  source 1..19: mol_type = other RNA
tgggactgatttacaggta

SEQ ID NO: 44838 - RNA, 19 nt, synthetic construct
  misc_feature 1..19: note = siRNA sense sequence
  source 1..19: mol_type = other RNA
acctgtaaatcagtcccat

SEQ ID NO: 44839 - RNA, 19 nt, synthetic construct
  misc_feature 1..19: note = siRNA antisense sequence
  source 1..19: mol_type = other RNA
atgggactgatttacaggt

SEQ ID NO: 44840 - RNA, 19 nt, synthetic construct
  misc_feature 1..19: note = siRNA sense sequence
  source 1..19: mol_type = other RNA
cctgtaaatcagtcccatt

SEQ ID NO: 44841 - RNA, 19 nt, synthetic construct
  misc_feature 1..19: note = siRNA antisense sequence
  source 1..19: mol_type = other RNA
aatgggactgatttacagg

SEQ ID NO: 44842 - RNA, 19 nt, synthetic construct
  misc_feature 1..19: note = siRNA sense sequence
  source 1..19: mol_type = other RNA
tcagtcccatttatatccc

SEQ ID NO: 44843 - RNA, 19 nt, synthetic construct
  misc_feature 1..19: note = siRNA antisense sequence
  source 1..19: mol_type = other RNA
gggatataaatgggactga

SEQ ID NO: 44844 - RNA, 19 nt, synthetic construct
  misc_feature 1..19: note = siRNA sense sequence
  source 1..19: mol_type = other RNA
tcccatttatatccctctt

SEQ ID NO: 44845 - RNA, 19 nt, synthetic construct
  misc_feature 1..19: note = siRNA antisense sequence
  source 1..19: mol_type = other RNA
aagagggatataaatggga

SEQ ID NO: 44846 - RNA, 19 nt, synthetic construct
  misc_feature 1..19: note = siRNA sense sequence
  source 1..19: mol_type = other RNA
cccatttatatccctcttt

SEQ ID NO: 44847 - RNA, 19 nt, synthetic construct
  misc_feature 1..19: note = siRNA antisense sequence
  source 1..19: mol_type = other RNA
aaagagggatataaatggg

SEQ ID NO: 44848 - RNA, 19 nt, synthetic construct
  misc_feature 1..19: note = siRNA sense sequence
  source 1..19: mol_type = other RNA
ccatttatatccctcttta

SEQ ID NO: 44849 - RNA, 19 nt, synthetic construct
  misc_feature 1..19: note = siRNA antisense sequence
  source 1..19: mol_type = other RNA
taaagagggatataaatgg

SEQ ID NO: 44850 - RNA, 19 nt, synthetic construct
  misc_feature 1..19: note = siRNA sense sequence
  source 1..19: mol_type = other RNA
tatccctctttataatgac

SEQ ID NO: 44851 - RNA, 19 nt, synthetic construct
  misc_feature 1..19: note = siRNA antisense sequence
  source 1..19: mol_type = other RNA
gtcattataaagagggata

SEQ ID NO: 44852 - RNA, 19 nt, synthetic construct
  misc_feature 1..19: note = siRNA sense sequence
  source 1..19: mol_type = other RNA
atccctctttataatgaca

SEQ ID NO: 44853 - RNA, 19 nt, synthetic construct
  misc_feature 1..19: note = siRNA antisense sequence
  source 1..19: mol_type = other RNA
tgtcattataaagagggat

SEQ ID NO: 44854 - RNA, 19 nt, synthetic construct
  misc_feature 1..19: note = siRNA sense sequence
  source 1..19: mol_type = other RNA
acatagcttcagaatggtt

SEQ ID NO: 44855 - RNA, 19 nt, synthetic construct
  misc_feature 1..19: note = siRNA antisense sequence
  source 1..19: mol_type = other RNA
aaccattctgaagctatgt

SEQ ID NO: 44856 - RNA, 19 nt, synthetic construct
  misc_feature 1..19: note = siRNA sense sequence
  source 1..19: mol_type = other RNA
catagcttcagaatggttt

SEQ ID NO: 44857 - RNA, 19 nt, synthetic construct
  misc_feature 1..19: note = siRNA antisense sequence
  source 1..19: mol_type = other RNA
aaaccattctgaagctatg

SEQ ID NO: 44858 - RNA, 19 nt, synthetic construct
  misc_feature 1..19: note = siRNA sense sequence
  source 1..19: mol_type = other RNA
gcttcagaatggtttgtgc

SEQ ID NO: 44859 - RNA, 19 nt, synthetic construct
  misc_feature 1..19: note = siRNA antisense sequence
  source 1..19: mol_type = other RNA
gcacaaaccattctgaagc

SEQ ID NO: 44860 - RNA, 19 nt, synthetic construct
  misc_feature 1..19: note = siRNA sense sequence
  source 1..19: mol_type = other RNA
cttcagaatggtttgtgct

SEQ ID NO: 44861 - RNA, 19 nt, synthetic construct
  misc_feature 1..19: note = siRNA antisense sequence
  source 1..19: mol_type = other RNA
agcacaaaccattctgaag

SEQ ID NO: 44862 - RNA, 19 nt, synthetic construct
  misc_feature 1..19: note = siRNA sense sequence
  source 1..19: mol_type = other RNA
ttcagaatggtttgtgcta

SEQ ID NO: 44863 - RNA, 19 nt, synthetic construct
  misc_feature 1..19: note = siRNA antisense sequence
  source 1..19: mol_type = other RNA
tagcacaaaccattctgaa

SEQ ID NO: 44864 - RNA, 19 nt, synthetic construct
  misc_feature 1..19: note = siRNA sense sequence
  source 1..19: mol_type = other RNA
tcagaatggtttgtgctaa

SEQ ID NO: 44865 - RNA, 19 nt, synthetic construct
  misc_feature 1..19: note = siRNA antisense sequence
  source 1..19: mol_type = other RNA
ttagcacaaaccattctga

SEQ ID NO: 44866 - RNA, 19 nt, synthetic construct
  misc_feature 1..19: note = siRNA sense sequence
  source 1..19: mol_type = other RNA
cagaatggtttgtgctaac

SEQ ID NO: 44867 - RNA, 19 nt, synthetic construct
  misc_feature 1..19: note = siRNA antisense sequence
  source 1..19: mol_type = other RNA
gttagcacaaaccattctg

SEQ ID NO: 44868 - RNA, 19 nt, synthetic construct
  misc_feature 1..19: note = siRNA sense sequence
  source 1..19: mol_type = other RNA
acagttaactgggattgta

SEQ ID NO: 44869 - RNA, 19 nt, synthetic construct
  misc_feature 1..19: note = siRNA antisense sequence
  source 1..19: mol_type = other RNA
tacaatcccagttaactgt

SEQ ID NO: 44870 - RNA, 19 nt, synthetic construct
  misc_feature 1..19: note = siRNA sense sequence
  source 1..19: mol_type = other RNA
ttgtatcctgtattatcac

SEQ ID NO: 44871 - RNA, 19 nt, synthetic construct
  misc_feature 1..19: note = siRNA antisense sequence
  source 1..19: mol_type = other RNA
gtgataatacaggatacaa

SEQ ID NO: 44872 - RNA, 19 nt, synthetic construct
  misc_feature 1..19: note = siRNA sense sequence
  source 1..19: mol_type = other RNA
tgtatcctgtattatcact

SEQ ID NO: 44873 - RNA, 19 nt, synthetic construct
  misc_feature 1..19: note = siRNA antisense sequence
  source 1..19: mol_type = other RNA
agtgataatacaggataca

SEQ ID NO: 44874 - RNA, 19 nt, synthetic construct
  misc_feature 1..19: note = siRNA sense sequence
  source 1..19: mol_type = other RNA
gtatcctgtattatcacta

SEQ ID NO: 44875 - RNA, 19 nt, synthetic construct
  misc_feature 1..19: note = siRNA antisense sequence
  source 1..19: mol_type = other RNA
tagtgataatacaggatac

SEQ ID NO: 44876 - RNA, 19 nt, synthetic construct
  misc_feature 1..19: note = siRNA sense sequence
  source 1..19: mol_type = other RNA
tcactacatttatatcctg

SEQ ID NO: 44877 - RNA, 19 nt, synthetic construct
  misc_feature 1..19: note = siRNA antisense sequence
  source 1..19: mol_type = other RNA
caggatataaatgtagtga

SEQ ID NO: 44878 - RNA, 19 nt, synthetic construct
  misc_feature 1..19: note = siRNA sense sequence
  source 1..19: mol_type = other RNA
cactacatttatatcctga

SEQ ID NO: 44879 - RNA, 19 nt, synthetic construct
  misc_feature 1..19: note = siRNA antisense sequence
  source 1..19: mol_type = other RNA
tcaggatataaatgtagtg

SEQ ID NO: 44880 - RNA, 19 nt, synthetic construct
  misc_feature 1..19: note = siRNA sense sequence
  source 1..19: mol_type = other RNA
actacatttatatcctgac

SEQ ID NO: 44881 - RNA, 19 nt, synthetic construct
  misc_feature 1..19: note = siRNA antisense sequence
  source 1..19: mol_type = other RNA
gtcaggatataaatgtagt

SEQ ID NO: 44882 - RNA, 19 nt, synthetic construct
  misc_feature 1..19: note = siRNA sense sequence
  source 1..19: mol_type = other RNA
ctacatttatatcctgact

SEQ ID NO: 44883 - RNA, 19 nt, synthetic construct
  misc_feature 1..19: note = siRNA antisense sequence
  source 1..19: mol_type = other RNA
agtcaggatataaatgtag

SEQ ID NO: 44884 - RNA, 19 nt, synthetic construct
  misc_feature 1..19: note = siRNA sense sequence
  source 1..19: mol_type = other RNA
catttatatcctgacttag

SEQ ID NO: 44885 - RNA, 19 nt, synthetic construct
  misc_feature 1..19: note = siRNA antisense sequence
  source 1..19: mol_type = other RNA
ctaagtcaggatataaatg

SEQ ID NO: 44886 - RNA, 19 nt, synthetic construct
  misc_feature 1..19: note = siRNA sense sequence
  source 1..19: mol_type = other RNA
tttatatcctgacttagtc

SEQ ID NO: 44887 - RNA, 19 nt, synthetic construct
  misc_feature 1..19: note = siRNA antisense sequence
  source 1..19: mol_type = other RNA
gactaagtcaggatataaa

SEQ ID NO: 44888 - RNA, 19 nt, synthetic construct
  misc_feature 1..19: note = siRNA sense sequence
  source 1..19: mol_type = other RNA
acttagtcacactggaagc

SEQ ID NO: 44889 - RNA, 19 nt, synthetic construct
  misc_feature 1..19: note = siRNA antisense sequence
  source 1..19: mol_type = other RNA
gcttccagtgtgactaagt

SEQ ID NO: 44890 - RNA, 19 nt, synthetic construct
  misc_feature 1..19: note = siRNA sense sequence
  source 1..19: mol_type = other RNA
cttagtcacactggaagca

SEQ ID NO: 44891 - RNA, 19 nt, synthetic construct
  misc_feature 1..19: note = siRNA antisense sequence
  source 1..19: mol_type = other RNA
tgcttccagtgtgactaag

SEQ ID NO: 44892 - RNA, 19 nt, synthetic construct
  misc_feature 1..19: note = siRNA sense sequence
  source 1..19: mol_type = other RNA
ttagtcacactggaagcat

SEQ ID NO: 44893 - RNA, 19 nt, synthetic construct
  misc_feature 1..19: note = siRNA antisense sequence
  source 1..19: mol_type = other RNA
atgcttccagtgtgactaa

SEQ ID NO: 44894 - RNA, 19 nt, synthetic construct
  misc_feature 1..19: note = siRNA sense sequence
  source 1..19: mol_type = other RNA
tagtcacactggaagcatg

SEQ ID NO: 44895 - RNA, 19 nt, synthetic construct
  misc_feature 1..19: note = siRNA antisense sequence
  source 1..19: mol_type = other RNA
catgcttccagtgtgacta

SEQ ID NO: 44896 - RNA, 19 nt, synthetic construct
  misc_feature 1..19: note = siRNA sense sequence
  source 1..19: mol_type = other RNA
agtcacactggaagcatgt

SEQ ID NO: 44897 - RNA, 19 nt, synthetic construct
  misc_feature 1..19: note = siRNA antisense sequence
  source 1..19: mol_type = other RNA
acatgcttccagtgtgact

SEQ ID NO: 44898 - RNA, 19 nt, synthetic construct
  misc_feature 1..19: note = siRNA sense sequence
  source 1..19: mol_type = other RNA
gtcacactggaagcatgtt

SEQ ID NO: 44899 - RNA, 19 nt, synthetic construct
  misc_feature 1..19: note = siRNA antisense sequence
  source 1..19: mol_type = other RNA
aacatgcttccagtgtgac

SEQ ID NO: 44900 - RNA, 19 nt, synthetic construct
  misc_feature 1..19: note = siRNA sense sequence
  source 1..19: mol_type = other RNA
tcacactggaagcatgttg

SEQ ID NO: 44901 - RNA, 19 nt, synthetic construct
  misc_feature 1..19: note = siRNA antisense sequence
  source 1..19: mol_type = other RNA
caacatgcttccagtgtga

SEQ ID NO: 44902 - RNA, 19 nt, synthetic construct
  misc_feature 1..19: note = siRNA sense sequence
  source 1..19: mol_type = other RNA
cacactggaagcatgttgt

SEQ ID NO: 44903 - RNA, 19 nt, synthetic construct
  misc_feature 1..19: note = siRNA antisense sequence
  source 1..19: mol_type = other RNA
acaacatgcttccagtgtg

SEQ ID NO: 44904 - RNA, 19 nt, synthetic construct
  misc_feature 1..19: note = siRNA sense sequence
  source 1..19: mol_type = other RNA
acactggaagcatgttgta

SEQ ID NO: 44905 - RNA, 19 nt, synthetic construct
  misc_feature 1..19: note = siRNA antisense sequence
  source 1..19: mol_type = other RNA
tacaacatgcttccagtgt

SEQ ID NO: 44906 - RNA, 19 nt, synthetic construct
  misc_feature 1..19: note = siRNA sense sequence
  source 1..19: mol_type = other RNA
cactggaagcatgttgtag

SEQ ID NO: 44907 - RNA, 19 nt, synthetic construct
  misc_feature 1..19: note = siRNA antisense sequence
  source 1..19: mol_type = other RNA
ctacaacatgcttccagtg

SEQ ID NO: 44908 - RNA, 19 nt, synthetic construct
  misc_feature 1..19: note = siRNA sense sequence
  source 1..19: mol_type = other RNA
actggaagcatgttgtagg

SEQ ID NO: 44909 - RNA, 19 nt, synthetic construct
  misc_feature 1..19: note = siRNA antisense sequence
  source 1..19: mol_type = other RNA
cctacaacatgcttccagt

SEQ ID NO: 44910 - RNA, 19 nt, synthetic construct
  misc_feature 1..19: note = siRNA sense sequence
  source 1..19: mol_type = other RNA
ctggaagcatgttgtaggg

SEQ ID NO: 44911 - RNA, 19 nt, synthetic construct
  misc_feature 1..19: note = siRNA antisense sequence
  source 1..19: mol_type = other RNA
ccctacaacatgcttccag

SEQ ID NO: 44912 - RNA, 19 nt, synthetic construct
  misc_feature 1..19: note = siRNA sense sequence
  source 1..19: mol_type = other RNA
tggaagcatgttgtagggt

SEQ ID NO: 44913 - RNA, 19 nt, synthetic construct
  misc_feature 1..19: note = siRNA antisense sequence
  source 1..19: mol_type = other RNA
accctacaacatgcttcca

SEQ ID NO: 44914 - RNA, 19 nt, synthetic construct
  misc_feature 1..19: note = siRNA sense sequence
  source 1..19: mol_type = other RNA
ggaagcatgttgtagggta

SEQ ID NO: 44915 - RNA, 19 nt, synthetic construct
  misc_feature 1..19: note = siRNA antisense sequence
  source 1..19: mol_type = other RNA
taccctacaacatgcttcc

SEQ ID NO: 44916 - RNA, 19 nt, synthetic construct
  misc_feature 1..19: note = siRNA sense sequence
  source 1..19: mol_type = other RNA
gaagcatgttgtagggtag

SEQ ID NO: 44917 - RNA, 19 nt, synthetic construct
  misc_feature 1..19: note = siRNA antisense sequence
  source 1..19: mol_type = other RNA
ctaccctacaacatgcttc

SEQ ID NO: 44918 - RNA, 19 nt, synthetic construct
  misc_feature 1..19: note = siRNA sense sequence
  source 1..19: mol_type = other RNA
aagcatgttgtagggtagg

SEQ ID NO: 44919 - RNA, 19 nt, synthetic construct
  misc_feature 1..19: note = siRNA antisense sequence
  source 1..19: mol_type = other RNA
cctaccctacaacatgctt

SEQ ID NO: 44920 - RNA, 19 nt, synthetic construct
  misc_feature 1..19: note = siRNA sense sequence
  source 1..19: mol_type = other RNA
agcatgttgtagggtaggg

SEQ ID NO: 44921 - RNA, 19 nt, synthetic construct
  misc_feature 1..19: note = siRNA antisense sequence
  source 1..19: mol_type = other RNA
ccctaccctacaacatgct

SEQ ID NO: 44922 - RNA, 19 nt, synthetic construct
  misc_feature 1..19: note = siRNA sense sequence
  source 1..19: mol_type = other RNA
gcatgttgtagggtagggc

SEQ ID NO: 44923 - RNA, 19 nt, synthetic construct
  misc_feature 1..19: note = siRNA antisense sequence
  source 1..19: mol_type = other RNA
gccctaccctacaacatgc

SEQ ID NO: 44924 - RNA, 19 nt, synthetic construct
  misc_feature 1..19: note = siRNA sense sequence
  source 1..19: mol_type = other RNA
gtagggtagggctttgtac

SEQ ID NO: 44925 - RNA, 19 nt, synthetic construct
  misc_feature 1..19: note = siRNA antisense sequence
  source 1..19: mol_type = other RNA
gtacaaagccctaccctac

SEQ ID NO: 44926 - RNA, 19 nt, synthetic construct
  misc_feature 1..19: note = siRNA sense sequence
  source 1..19: mol_type = other RNA
gtagggctttgtaccatag

SEQ ID NO: 44927 - RNA, 19 nt, synthetic construct
  misc_feature 1..19: note = siRNA antisense sequence
  source 1..19: mol_type = other RNA
ctatggtacaaagccctac

SEQ ID NO: 44928 - RNA, 19 nt, synthetic construct
  misc_feature 1..19: note = siRNA sense sequence
  source 1..19: mol_type = other RNA
tagggctttgtaccatagt

SEQ ID NO: 44929 - RNA, 19 nt, synthetic construct
  misc_feature 1..19: note = siRNA antisense sequence
  source 1..19: mol_type = other RNA
actatggtacaaagcccta

SEQ ID NO: 44930 - RNA, 19 nt, synthetic construct
  misc_feature 1..19: note = siRNA sense sequence
  source 1..19: mol_type = other RNA
agggctttgtaccatagtt

SEQ ID NO: 44931 - RNA, 19 nt, synthetic construct
  misc_feature 1..19: note = siRNA antisense sequence
  source 1..19: mol_type = other RNA
aactatggtacaaagccct

SEQ ID NO: 44932 - RNA, 19 nt, synthetic construct
  misc_feature 1..19: note = siRNA sense sequence
  source 1..19: mol_type = other RNA
gggctttgtaccatagttt

SEQ ID NO: 44933 - RNA, 19 nt, synthetic construct
  misc_feature 1..19: note = siRNA antisense sequence
  source 1..19: mol_type = other RNA
aaactatggtacaaagccc

SEQ ID NO: 44934 - RNA, 19 nt, synthetic construct
  misc_feature 1..19: note = siRNA sense sequence
  source 1..19: mol_type = other RNA
ggctttgtaccatagtttg

SEQ ID NO: 44935 - RNA, 19 nt, synthetic construct
  misc_feature 1..19: note = siRNA antisense sequence
  source 1..19: mol_type = other RNA
caaactatggtacaaagcc

SEQ ID NO: 44936 - RNA, 19 nt, synthetic construct
  misc_feature 1..19: note = siRNA sense sequence
  source 1..19: mol_type = other RNA
gctttgtaccatagtttga

SEQ ID NO: 44937 - RNA, 19 nt, synthetic construct
  misc_feature 1..19: note = siRNA antisense sequence
  source 1..19: mol_type = other RNA
tcaaactatggtacaaagc

SEQ ID NO: 44938 - RNA, 19 nt, synthetic construct
  misc_feature 1..19: note = siRNA sense sequence
  source 1..19: mol_type = other RNA
accatagtttgataaaagg

SEQ ID NO: 44939 - RNA, 19 nt, synthetic construct
  misc_feature 1..19: note = siRNA antisense sequence
  source 1..19: mol_type = other RNA
ccttttatcaaactatggt

SEQ ID NO: 44940 - RNA, 19 nt, synthetic construct
  misc_feature 1..19: note = siRNA sense sequence
  source 1..19: mol_type = other RNA
ccatagtttgataaaagga

SEQ ID NO: 44941 - RNA, 19 nt, synthetic construct
  misc_feature 1..19: note = siRNA antisense sequence
  source 1..19: mol_type = other RNA
tccttttatcaaactatgg

SEQ ID NO: 44942 - RNA, 19 nt, synthetic construct
  misc_feature 1..19: note = siRNA sense sequence
  source 1..19: mol_type = other RNA
aaatatacattggccagac

SEQ ID NO: 44943 - RNA, 19 nt, synthetic construct
  misc_feature 1..19: note = siRNA antisense sequence
  source 1..19: mol_type = other RNA
gtctggccaatgtatattt

SEQ ID NO: 44944 - RNA, 19 nt, synthetic construct
  misc_feature 1..19: note = siRNA sense sequence
  source 1..19: mol_type = other RNA
aatatacattggccagaca

SEQ ID NO: 44945 - RNA, 19 nt, synthetic construct
  misc_feature 1..19: note = siRNA antisense sequence
  source 1..19: mol_type = other RNA
tgtctggccaatgtatatt

SEQ ID NO: 44946 - RNA, 19 nt, synthetic construct
  misc_feature 1..19: note = siRNA sense sequence
  source 1..19: mol_type = other RNA
tacattggccagacataaa

SEQ ID NO: 44947 - RNA, 19 nt, synthetic construct
  misc_feature 1..19: note = siRNA antisense sequence
  source 1..19: mol_type = other RNA
tttatgtctggccaatgta

SEQ ID NO: 44948 - RNA, 19 nt, synthetic construct
  misc_feature 1..19: note = siRNA sense sequence
  source 1..19: mol_type = other RNA
acattggccagacataaag

SEQ ID NO: 44949 - RNA, 19 nt, synthetic construct
  misc_feature 1..19: note = siRNA antisense sequence
  source 1..19: mol_type = other RNA
ctttatgtctggccaatgt

SEQ ID NO: 44950 - RNA, 19 nt, synthetic construct
  misc_feature 1..19: note = siRNA sense sequence
  source 1..19: mol_type = other RNA
cattggccagacataaagc

SEQ ID NO: 44951 - RNA, 19 nt, synthetic construct
  misc_feature 1..19: note = siRNA antisense sequence
  source 1..19: mol_type = other RNA
gctttatgtctggccaatg

SEQ ID NO: 44952 - RNA, 19 nt, synthetic construct
  misc_feature 1..19: note = siRNA sense sequence
  source 1..19: mol_type = other RNA
attggccagacataaagcc

SEQ ID NO: 44953 - RNA, 19 nt, synthetic construct
  misc_feature 1..19: note = siRNA antisense sequence
  source 1..19: mol_type = other RNA
ggctttatgtctggccaat

SEQ ID NO: 44954 - RNA, 19 nt, synthetic construct
  misc_feature 1..19: note = siRNA sense sequence
  source 1..19: mol_type = other RNA
ttggccagacataaagcct

SEQ ID NO: 44955 - RNA, 19 nt, synthetic construct
  misc_feature 1..19: note = siRNA antisense sequence
  source 1..19: mol_type = other RNA
aggctttatgtctggccaa

SEQ ID NO: 44956 - RNA, 19 nt, synthetic construct
  misc_feature 1..19: note = siRNA sense sequence
  source 1..19: mol_type = other RNA
cagacataaagcctgagct

SEQ ID NO: 44957 - RNA, 19 nt, synthetic construct
  misc_feature 1..19: note = siRNA antisense sequence
  source 1..19: mol_type = other RNA
agctcaggctttatgtctg

SEQ ID NO: 44958 - RNA, 19 nt, synthetic construct
  misc_feature 1..19: note = siRNA sense sequence
  source 1..19: mol_type = other RNA
gacataaagcctgagctct

SEQ ID NO: 44959 - RNA, 19 nt, synthetic construct
  misc_feature 1..19: note = siRNA antisense sequence
  source 1..19: mol_type = other RNA
agagctcaggctttatgtc

SEQ ID NO: 44960 - RNA, 19 nt, synthetic construct
  misc_feature 1..19: note = siRNA sense sequence
  source 1..19: mol_type = other RNA
acataaagcctgagctctt

SEQ ID NO: 44961 - RNA, 19 nt, synthetic construct
  misc_feature 1..19: note = siRNA antisense sequence
  source 1..19: mol_type = other RNA
aagagctcaggctttatgt

SEQ ID NO: 44962 - RNA, 19 nt, synthetic construct
  misc_feature 1..19: note = siRNA sense sequence
  source 1..19: mol_type = other RNA
aagcctgagctcttttcat

SEQ ID NO: 44963 - RNA, 19 nt, synthetic construct
  misc_feature 1..19: note = siRNA antisense sequence
  source 1..19: mol_type = other RNA
atgaaaagagctcaggctt

SEQ ID NO: 44964 - RNA, 19 nt, synthetic construct
  misc_feature 1..19: note = siRNA sense sequence
  source 1..19: mol_type = other RNA
agcctgagctcttttcata

SEQ ID NO: 44965 - RNA, 19 nt, synthetic construct
  misc_feature 1..19: note = siRNA antisense sequence
  source 1..19: mol_type = other RNA
tatgaaaagagctcaggct

SEQ ID NO: 44966 - RNA, 19 nt, synthetic construct
  misc_feature 1..19: note = siRNA sense sequence
  source 1..19: mol_type = other RNA
gcctgagctcttttcatat

SEQ ID NO: 44967 - RNA, 19 nt, synthetic construct
  misc_feature 1..19: note = siRNA antisense sequence
  source 1..19: mol_type = other RNA
atatgaaaagagctcaggc

SEQ ID NO: 44968 - RNA, 19 nt, synthetic construct
  misc_feature 1..19: note = siRNA sense sequence
  source 1..19: mol_type = other RNA
cctgagctcttttcatatt

SEQ ID NO: 44969 - RNA, 19 nt, synthetic construct
  misc_feature 1..19: note = siRNA antisense sequence
  source 1..19: mol_type = other RNA
aatatgaaaagagctcagg

SEQ ID NO: 44970 - RNA, 19 nt, synthetic construct
  misc_feature 1..19: note = siRNA sense sequence
  source 1..19: mol_type = other RNA
tgagctcttttcatattag

SEQ ID NO: 44971 - RNA, 19 nt, synthetic construct
  misc_feature 1..19: note = siRNA antisense sequence
  source 1..19: mol_type = other RNA
ctaatatgaaaagagctca

SEQ ID NO: 44972 - RNA, 19 nt, synthetic construct
  misc_feature 1..19: note = siRNA sense sequence
  source 1..19: mol_type = other RNA
agctcttttcatattaggc

SEQ ID NO: 44973 - RNA, 19 nt, synthetic construct
  misc_feature 1..19: note = siRNA antisense sequence
  source 1..19: mol_type = other RNA
gcctaatatgaaaagagct

SEQ ID NO: 44974 - RNA, 19 nt, synthetic construct
  misc_feature 1..19: note = siRNA sense sequence
  source 1..19: mol_type = other RNA
gctcttttcatattaggca

SEQ ID NO: 44975 - RNA, 19 nt, synthetic construct
  misc_feature 1..19: note = siRNA antisense sequence
  source 1..19: mol_type = other RNA
tgcctaatatgaaaagagc

SEQ ID NO: 44976 - RNA, 19 nt, synthetic construct
  misc_feature 1..19: note = siRNA sense sequence
  source 1..19: mol_type = other RNA
ctcttttcatattaggcaa

SEQ ID NO: 44977 - RNA, 19 nt, synthetic construct
  misc_feature 1..19: note = siRNA antisense sequence
  source 1..19: mol_type = other RNA
ttgcctaatatgaaaagag

SEQ ID NO: 44978 - RNA, 19 nt, synthetic construct
  misc_feature 1..19: note = siRNA sense sequence
  source 1..19: mol_type = other RNA
ttcatattaggcaattgtg

SEQ ID NO: 44979 - RNA, 19 nt, synthetic construct
  misc_feature 1..19: note = siRNA antisense sequence
  source 1..19: mol_type = other RNA
cacaattgcctaatatgaa

SEQ ID NO: 44980 - RNA, 19 nt, synthetic construct
  misc_feature 1..19: note = siRNA sense sequence
  source 1..19: mol_type = other RNA
tcatattaggcaattgtgc

SEQ ID NO: 44981 - RNA, 19 nt, synthetic construct
  misc_feature 1..19: note = siRNA antisense sequence
  source 1..19: mol_type = other RNA
gcacaattgcctaatatga

SEQ ID NO: 44982 - RNA, 19 nt, synthetic construct
  misc_feature 1..19: note = siRNA sense sequence
  source 1..19: mol_type = other RNA
catattaggcaattgtgca

SEQ ID NO: 44983 - RNA, 19 nt, synthetic construct
  misc_feature 1..19: note = siRNA antisense sequence
  source 1..19: mol_type = other RNA
tgcacaattgcctaatatg

SEQ ID NO: 44984 - RNA, 19 nt, synthetic construct
  misc_feature 1..19: note = siRNA sense sequence
  source 1..19: mol_type = other RNA
ttaggcaattgtgcatctt

SEQ ID NO: 44985 - RNA, 19 nt, synthetic construct
  misc_feature 1..19: note = siRNA antisense sequence
  source 1..19: mol_type = other RNA
aagatgcacaattgcctaa

SEQ ID NO: 44986 - RNA, 19 nt, synthetic construct
  misc_feature 1..19: note = siRNA sense sequence
  source 1..19: mol_type = other RNA
taggcaattgtgcatctta

SEQ ID NO: 44987 - RNA, 19 nt, synthetic construct
  misc_feature 1..19: note = siRNA antisense sequence
  source 1..19: mol_type = other RNA
taagatgcacaattgccta

SEQ ID NO: 44988 - RNA, 19 nt, synthetic construct
  misc_feature 1..19: note = siRNA sense sequence
  source 1..19: mol_type = other RNA
aggcaattgtgcatcttac

SEQ ID NO: 44989 - RNA, 19 nt, synthetic construct
  misc_feature 1..19: note = siRNA antisense sequence
  source 1..19: mol_type = other RNA
gtaagatgcacaattgcct

SEQ ID NO: 44990 - RNA, 19 nt, synthetic construct
  misc_feature 1..19: note = siRNA sense sequence
  source 1..19: mol_type = other RNA
ggcaattgtgcatcttaca

SEQ ID NO: 44991 - RNA, 19 nt, synthetic construct
  misc_feature 1..19: note = siRNA antisense sequence
  source 1..19: mol_type = other RNA
tgtaagatgcacaattgcc

SEQ ID NO: 44992 - RNA, 19 nt, synthetic construct
  misc_feature 1..19: note = siRNA sense sequence
  source 1..19: mol_type = other RNA
gcaattgtgcatcttacag

SEQ ID NO: 44993 - RNA, 19 nt, synthetic construct
  misc_feature 1..19: note = siRNA antisense sequence
  source 1..19: mol_type = other RNA
ctgtaagatgcacaattgc

SEQ ID NO: 44994 - RNA, 19 nt, synthetic construct
  misc_feature 1..19: note = siRNA sense sequence
  source 1..19: mol_type = other RNA
acacctcattgtttcacct

SEQ ID NO: 44995 - RNA, 19 nt, synthetic construct
  misc_feature 1..19: note = siRNA antisense sequence
  source 1..19: mol_type = other RNA
aggtgaaacaatgaggtgt

SEQ ID NO: 44996 - RNA, 19 nt, synthetic construct
  misc_feature 1..19: note = siRNA sense sequence
  source 1..19: mol_type = other RNA
ctcattgtttcaccttgtc

SEQ ID NO: 44997 - RNA, 19 nt, synthetic construct
  misc_feature 1..19: note = siRNA antisense sequence
  source 1..19: mol_type = other RNA
gacaaggtgaaacaatgag

SEQ ID NO: 44998 - RNA, 19 nt, synthetic construct
  misc_feature 1..19: note = siRNA sense sequence
  source 1..19: mol_type = other RNA
tcattgtttcaccttgtca

SEQ ID NO: 44999 - RNA, 19 nt, synthetic construct
  misc_feature 1..19: note = siRNA antisense sequence
  source 1..19: mol_type = other RNA
tgacaaggtgaaacaatga

SEQ ID NO: 45000 - RNA, 19 nt, synthetic construct
  misc_feature 1..19: note = siRNA sense sequence
  source 1..19: mol_type = other RNA
tgtttcaccttgtcattac

SEQ ID NO: 45001 - RNA, 19 nt, synthetic construct
  misc_feature 1..19: note = siRNA antisense sequence
  source 1..19: mol_type = other RNA
gtaatgacaaggtgaaaca

SEQ ID NO: 45002 - RNA, 19 nt, synthetic construct
  misc_feature 1..19: note = siRNA sense sequence
  source 1..19: mol_type = other RNA
gtttcaccttgtcattact

SEQ ID NO: 45003 - RNA, 19 nt, synthetic construct
  misc_feature 1..19: note = siRNA antisense sequence
  source 1..19: mol_type = other RNA
agtaatgacaaggtgaaac

SEQ ID NO: 45004 - RNA, 19 nt, synthetic construct
  misc_feature 1..19: note = siRNA sense sequence
  source 1..19: mol_type = other RNA
tttcaccttgtcattactt

SEQ ID NO: 45005 - RNA, 19 nt, synthetic construct
  misc_feature 1..19: note = siRNA antisense sequence
  source 1..19: mol_type = other RNA
aagtaatgacaaggtgaaa

SEQ ID NO: 45006 - RNA, 19 nt, synthetic construct
  misc_feature 1..19: note = siRNA sense sequence
  source 1..19: mol_type = other RNA
ttcaccttgtcattacttc

SEQ ID NO: 45007 - RNA, 19 nt, synthetic construct
  misc_feature 1..19: note = siRNA antisense sequence
  source 1..19: mol_type = other RNA
gaagtaatgacaaggtgaa

SEQ ID NO: 45008 - RNA, 19 nt, synthetic construct
  misc_feature 1..19: note = siRNA sense sequence
  source 1..19: mol_type = other RNA
caccttgtcattacttctg

SEQ ID NO: 45009 - RNA, 19 nt, synthetic construct
  misc_feature 1..19: note = siRNA antisense sequence
  source 1..19: mol_type = other RNA
cagaagtaatgacaaggtg

SEQ ID NO: 45010 - RNA, 19 nt, synthetic construct
  misc_feature 1..19: note = siRNA sense sequence
  source 1..19: mol_type = other RNA
accttgtcattacttctgt

SEQ ID NO: 45011 - RNA, 19 nt, synthetic construct
  misc_feature 1..19: note = siRNA antisense sequence
  source 1..19: mol_type = other RNA
acagaagtaatgacaaggt

SEQ ID NO: 45012 - RNA, 19 nt, synthetic construct
  misc_feature 1..19: note = siRNA sense sequence
  source 1..19: mol_type = other RNA
ctgggcattaaaatttggg

SEQ ID NO: 45013 - RNA, 19 nt, synthetic construct
  misc_feature 1..19: note = siRNA antisense sequence
  source 1..19: mol_type = other RNA
cccaaattttaatgcccag

SEQ ID NO: 45014 - RNA, 19 nt, synthetic construct
  misc_feature 1..19: note = siRNA sense sequence
  source 1..19: mol_type = other RNA
tgggcattaaaatttgggt

SEQ ID NO: 45015 - RNA, 19 nt, synthetic construct
  misc_feature 1..19: note = siRNA antisense sequence
  source 1..19: mol_type = other RNA
acccaaattttaatgccca

SEQ ID NO: 45016 - RNA, 19 nt, synthetic construct
  misc_feature 1..19: note = siRNA sense sequence
  source 1..19: mol_type = other RNA
gggcattaaaatttgggtg

SEQ ID NO: 45017 - RNA, 19 nt, synthetic construct
  misc_feature 1..19: note = siRNA antisense sequence
  source 1..19: mol_type = other RNA
cacccaaattttaatgccc

SEQ ID NO: 45018 - RNA, 19 nt, synthetic construct
  misc_feature 1..19: note = siRNA sense sequence
  source 1..19: mol_type = other RNA
aaatttgggtgctggtgta

SEQ ID NO: 45019 - RNA, 19 nt, synthetic construct
  misc_feature 1..19: note = siRNA antisense sequence
  source 1..19: mol_type = other RNA
tacaccagcacccaaattt

SEQ ID NO: 45020 - RNA, 19 nt, synthetic construct
  misc_feature 1..19: note = siRNA sense sequence
  source 1..19: mol_type = other RNA
aatttgggtgctggtgtaa

SEQ ID NO: 45021 - RNA, 19 nt, synthetic construct
  misc_feature 1..19: note = siRNA antisense sequence
  source 1..19: mol_type = other RNA
ttacaccagcacccaaatt

SEQ ID NO: 45022 - RNA, 19 nt, synthetic construct
  misc_feature 1..19: note = siRNA sense sequence
  source 1..19: mol_type = other RNA
atttgggtgctggtgtaac

SEQ ID NO: 45023 - RNA, 19 nt, synthetic construct
  misc_feature 1..19: note = siRNA antisense sequence
  source 1..19: mol_type = other RNA
gttacaccagcacccaaat

SEQ ID NO: 45024 - RNA, 19 nt, synthetic construct
  misc_feature 1..19: note = siRNA sense sequence
  source 1..19: mol_type = other RNA
gtgctggtgtaaccctgac

SEQ ID NO: 45025 - RNA, 19 nt, synthetic construct
  misc_feature 1..19: note = siRNA antisense sequence
  source 1..19: mol_type = other RNA
gtcagggttacaccagcac

SEQ ID NO: 45026 - RNA, 19 nt, synthetic construct
  misc_feature 1..19: note = siRNA sense sequence
  source 1..19: mol_type = other RNA
tgctggtgtaaccctgact

SEQ ID NO: 45027 - RNA, 19 nt, synthetic construct
  misc_feature 1..19: note = siRNA antisense sequence
  source 1..19: mol_type = other RNA
agtcagggttacaccagca

SEQ ID NO: 45028 - RNA, 19 nt, synthetic construct
  misc_feature 1..19: note = siRNA sense sequence
  source 1..19: mol_type = other RNA
gctggtgtaaccctgactt

SEQ ID NO: 45029 - RNA, 19 nt, synthetic construct
  misc_feature 1..19: note = siRNA antisense sequence
  source 1..19: mol_type = other RNA
aagtcagggttacaccagc

SEQ ID NO: 45030 - RNA, 19 nt, synthetic construct
  misc_feature 1..19: note = siRNA sense sequence
  source 1..19: mol_type = other RNA
ctggtgtaaccctgactta

SEQ ID NO: 45031 - RNA, 19 nt, synthetic construct
  misc_feature 1..19: note = siRNA antisense sequence
  source 1..19: mol_type = other RNA
taagtcagggttacaccag

SEQ ID NO: 45032 - RNA, 19 nt, synthetic construct
  misc_feature 1..19: note = siRNA sense sequence
  source 1..19: mol_type = other RNA
tggtgtaaccctgacttaa

SEQ ID NO: 45033 - RNA, 19 nt, synthetic construct
  misc_feature 1..19: note = siRNA antisense sequence
  source 1..19: mol_type = other RNA
ttaagtcagggttacacca

SEQ ID NO: 45034 - RNA, 19 nt, synthetic construct
  misc_feature 1..19: note = siRNA sense sequence
  source 1..19: mol_type = other RNA
tagataactccattccttc

SEQ ID NO: 45035 - RNA, 19 nt, synthetic construct
  misc_feature 1..19: note = siRNA antisense sequence
  source 1..19: mol_type = other RNA
gaaggaatggagttatcta

SEQ ID NO: 45036 - RNA, 19 nt, synthetic construct
  misc_feature 1..19: note = siRNA sense sequence
  source 1..19: mol_type = other RNA
ataactccattccttcata

SEQ ID NO: 45037 - RNA, 19 nt, synthetic construct
  misc_feature 1..19: note = siRNA antisense sequence
  source 1..19: mol_type = other RNA
tatgaaggaatggagttat

SEQ ID NO: 45038 - RNA, 19 nt, synthetic construct
  misc_feature 1..19: note = siRNA sense sequence
  source 1..19: mol_type = other RNA
taactccattccttcataa

SEQ ID NO: 45039 - RNA, 19 nt, synthetic construct
  misc_feature 1..19: note = siRNA antisense sequence
  source 1..19: mol_type = other RNA
ttatgaaggaatggagtta

SEQ ID NO: 45040 - RNA, 19 nt, synthetic construct
  misc_feature 1..19: note = siRNA sense sequence
  source 1..19: mol_type = other RNA
aactccattccttcataac

SEQ ID NO: 45041 - RNA, 19 nt, synthetic construct
  misc_feature 1..19: note = siRNA antisense sequence
  source 1..19: mol_type = other RNA
gttatgaaggaatggagtt

SEQ ID NO: 45042 - RNA, 19 nt, synthetic construct
  misc_feature 1..19: note = siRNA sense sequence
  source 1..19: mol_type = other RNA
actccattccttcataact

SEQ ID NO: 45043 - RNA, 19 nt, synthetic construct
  misc_feature 1..19: note = siRNA antisense sequence
  source 1..19: mol_type = other RNA
agttatgaaggaatggagt

SEQ ID NO: 45044 - RNA, 19 nt, synthetic construct
  misc_feature 1..19: note = siRNA sense sequence
  source 1..19: mol_type = other RNA
ctccattccttcataactc

SEQ ID NO: 45045 - RNA, 19 nt, synthetic construct
  misc_feature 1..19: note = siRNA antisense sequence
  source 1..19: mol_type = other RNA
gagttatgaaggaatggag

SEQ ID NO: 45046 - RNA, 19 nt, synthetic construct
  misc_feature 1..19: note = siRNA sense sequence
  source 1..19: mol_type = other RNA
tccattccttcataactct

SEQ ID NO: 45047 - RNA, 19 nt, synthetic construct
  misc_feature 1..19: note = siRNA antisense sequence
  source 1..19: mol_type = other RNA
agagttatgaaggaatgga

SEQ ID NO: 45048 - RNA, 19 nt, synthetic construct
  misc_feature 1..19: note = siRNA sense sequence
  source 1..19: mol_type = other RNA
ccattccttcataactctt

SEQ ID NO: 45049 - RNA, 19 nt, synthetic construct
  misc_feature 1..19: note = siRNA antisense sequence
  source 1..19: mol_type = other RNA
aagagttatgaaggaatgg

SEQ ID NO: 45050 - RNA, 19 nt, synthetic construct
  misc_feature 1..19: note = siRNA sense sequence
  source 1..19: mol_type = other RNA
cattccttcataactcttt

SEQ ID NO: 45051 - RNA, 19 nt, synthetic construct
  misc_feature 1..19: note = siRNA antisense sequence
  source 1..19: mol_type = other RNA
aaagagttatgaaggaatg

SEQ ID NO: 45052 - RNA, 19 nt, synthetic construct
  misc_feature 1..19: note = siRNA sense sequence
  source 1..19: mol_type = other RNA
attccttcataactctttg

SEQ ID NO: 45053 - RNA, 19 nt, synthetic construct
  misc_feature 1..19: note = siRNA antisense sequence
  source 1..19: mol_type = other RNA
caaagagttatgaaggaat

SEQ ID NO: 45054 - RNA, 19 nt, synthetic construct
  misc_feature 1..19: note = siRNA sense sequence
  source 1..19: mol_type = other RNA
ccttcataactctttgact

SEQ ID NO: 45055 - RNA, 19 nt, synthetic construct
  misc_feature 1..19: note = siRNA antisense sequence
  source 1..19: mol_type = other RNA
agtcaaagagttatgaagg

SEQ ID NO: 45056 - RNA, 19 nt, synthetic construct
  misc_feature 1..19: note = siRNA sense sequence
  source 1..19: mol_type = other RNA
tatacttatcctagttgag

SEQ ID NO: 45057 - RNA, 19 nt, synthetic construct
  misc_feature 1..19: note = siRNA antisense sequence
  source 1..19: mol_type = other RNA
ctcaactaggataagtata

SEQ ID NO: 45058 - RNA, 19 nt, synthetic construct
  misc_feature 1..19: note = siRNA sense sequence
  source 1..19: mol_type = other RNA
atacttatcctagttgagt

SEQ ID NO: 45059 - RNA, 19 nt, synthetic construct
  misc_feature 1..19: note = siRNA antisense sequence
  source 1..19: mol_type = other RNA
actcaactaggataagtat

SEQ ID NO: 45060 - RNA, 19 nt, synthetic construct
  misc_feature 1..19: note = siRNA sense sequence
  source 1..19: mol_type = other RNA
tacttatcctagttgagtt

SEQ ID NO: 45061 - RNA, 19 nt, synthetic construct
  misc_feature 1..19: note = siRNA antisense sequence
  source 1..19: mol_type = other RNA
aactcaactaggataagta

SEQ ID NO: 45062 - RNA, 19 nt, synthetic construct
  misc_feature 1..19: note = siRNA sense sequence
  source 1..19: mol_type = other RNA
acttatcctagttgagttt

SEQ ID NO: 45063 - RNA, 19 nt, synthetic construct
  misc_feature 1..19: note = siRNA antisense sequence
  source 1..19: mol_type = other RNA
aaactcaactaggataagt

SEQ ID NO: 45064 - RNA, 19 nt, synthetic construct
  misc_feature 1..19: note = siRNA sense sequence
  source 1..19: mol_type = other RNA
cttatcctagttgagtttc

SEQ ID NO: 45065 - RNA, 19 nt, synthetic construct
  misc_feature 1..19: note = siRNA antisense sequence
  source 1..19: mol_type = other RNA
gaaactcaactaggataag

SEQ ID NO: 45066 - RNA, 19 nt, synthetic construct
  misc_feature 1..19: note = siRNA sense sequence
  source 1..19: mol_type = other RNA
tcctagttgagtttctgtt

SEQ ID NO: 45067 - RNA, 19 nt, synthetic construct
  misc_feature 1..19: note = siRNA antisense sequence
  source 1..19: mol_type = other RNA
aacagaaactcaactagga

SEQ ID NO: 45068 - RNA, 19 nt, synthetic construct
  misc_feature 1..19: note = siRNA sense sequence
  source 1..19: mol_type = other RNA
cctagttgagtttctgttg

SEQ ID NO: 45069 - RNA, 19 nt, synthetic construct
  misc_feature 1..19: note = siRNA antisense sequence
  source 1..19: mol_type = other RNA
caacagaaactcaactagg

SEQ ID NO: 45070 - RNA, 19 nt, synthetic construct
  misc_feature 1..19: note = siRNA sense sequence
  source 1..19: mol_type = other RNA
ctagttgagtttctgttgc

SEQ ID NO: 45071 - RNA, 19 nt, synthetic construct
  misc_feature 1..19: note = siRNA antisense sequence
  source 1..19: mol_type = other RNA
gcaacagaaactcaactag

SEQ ID NO: 45072 - RNA, 19 nt, synthetic construct
  misc_feature 1..19: note = siRNA sense sequence
  source 1..19: mol_type = other RNA
aaaaggtggattatttagc

SEQ ID NO: 45073 - RNA, 19 nt, synthetic construct
  misc_feature 1..19: note = siRNA antisense sequence
  source 1..19: mol_type = other RNA
gctaaataatccacctttt

SEQ ID NO: 45074 - RNA, 19 nt, synthetic construct
  misc_feature 1..19: note = siRNA sense sequence
  source 1..19: mol_type = other RNA
aaaggtggattatttagct

SEQ ID NO: 45075 - RNA, 19 nt, synthetic construct
  misc_feature 1..19: note = siRNA antisense sequence
  source 1..19: mol_type = other RNA
agctaaataatccaccttt

SEQ ID NO: 45076 - RNA, 19 nt, synthetic construct
  misc_feature 1..19: note = siRNA sense sequence
  source 1..19: mol_type = other RNA
aaggtggattatttagctc

SEQ ID NO: 45077 - RNA, 19 nt, synthetic construct
  misc_feature 1..19: note = siRNA antisense sequence
  source 1..19: mol_type = other RNA
gagctaaataatccacctt

SEQ ID NO: 45078 - RNA, 19 nt, synthetic construct
  misc_feature 1..19: note = siRNA sense sequence
  source 1..19: mol_type = other RNA
aggtggattatttagctca

SEQ ID NO: 45079 - RNA, 19 nt, synthetic construct
  misc_feature 1..19: note = siRNA antisense sequence
  source 1..19: mol_type = other RNA
tgagctaaataatccacct

SEQ ID NO: 45080 - RNA, 19 nt, synthetic construct
  misc_feature 1..19: note = siRNA sense sequence
  source 1..19: mol_type = other RNA
ggtggattatttagctcat

SEQ ID NO: 45081 - RNA, 19 nt, synthetic construct
  misc_feature 1..19: note = siRNA antisense sequence
  source 1..19: mol_type = other RNA
atgagctaaataatccacc

SEQ ID NO: 45082 - RNA, 19 nt, synthetic construct
  misc_feature 1..19: note = siRNA sense sequence
  source 1..19: mol_type = other RNA
gtggattatttagctcatg

SEQ ID NO: 45083 - RNA, 19 nt, synthetic construct
  misc_feature 1..19: note = siRNA antisense sequence
  source 1..19: mol_type = other RNA
catgagctaaataatccac

SEQ ID NO: 45084 - RNA, 19 nt, synthetic construct
  misc_feature 1..19: note = siRNA sense sequence
  source 1..19: mol_type = other RNA
ggctgggagggccaagata

SEQ ID NO: 45085 - RNA, 19 nt, synthetic construct
  misc_feature 1..19: note = siRNA antisense sequence
  source 1..19: mol_type = other RNA
tatcttggccctcccagcc

SEQ ID NO: 45086 - RNA, 19 nt, synthetic construct
  misc_feature 1..19: note = siRNA sense sequence
  source 1..19: mol_type = other RNA
tgggagggccaagataggg

SEQ ID NO: 45087 - RNA, 19 nt, synthetic construct
  misc_feature 1..19: note = siRNA antisense sequence
  source 1..19: mol_type = other RNA
ccctatcttggccctccca

SEQ ID NO: 45088 - RNA, 19 nt, synthetic construct
  misc_feature 1..19: note = siRNA sense sequence
  source 1..19: mol_type = other RNA
gggagggccaagatagggt

SEQ ID NO: 45089 - RNA, 19 nt, synthetic construct
  misc_feature 1..19: note = siRNA antisense sequence
  source 1..19: mol_type = other RNA
accctatcttggccctccc

SEQ ID NO: 45090 - RNA, 19 nt, synthetic construct
  misc_feature 1..19: note = siRNA sense sequence
  source 1..19: mol_type = other RNA
ccaagatagggtggctgca

SEQ ID NO: 45091 - RNA, 19 nt, synthetic construct
  misc_feature 1..19: note = siRNA antisense sequence
  source 1..19: mol_type = other RNA
tgcagccaccctatcttgg

SEQ ID NO: 45092 - RNA, 19 nt, synthetic construct
  misc_feature 1..19: note = siRNA sense sequence
  source 1..19: mol_type = other RNA
gggtggctgcagctgttca

SEQ ID NO: 45093 - RNA, 19 nt, synthetic construct
  misc_feature 1..19: note = siRNA antisense sequence
  source 1..19: mol_type = other RNA
tgaacagctgcagccaccc

SEQ ID NO: 45094 - RNA, 19 nt, synthetic construct
  misc_feature 1..19: note = siRNA sense sequence
  source 1..19: mol_type = other RNA
ggtggctgcagctgttcag

SEQ ID NO: 45095 - RNA, 19 nt, synthetic construct
  misc_feature 1..19: note = siRNA antisense sequence
  source 1..19: mol_type = other RNA
ctgaacagctgcagccacc

SEQ ID NO: 45096 - RNA, 19 nt, synthetic construct
  misc_feature 1..19: note = siRNA sense sequence
  source 1..19: mol_type = other RNA
tggtgagggccttgcgctt

SEQ ID NO: 45097 - RNA, 19 nt, synthetic construct
  misc_feature 1..19: note = siRNA antisense sequence
  source 1..19: mol_type = other RNA
aagcgcaaggccctcacca

SEQ ID NO: 45098 - RNA, 19 nt, synthetic construct
  misc_feature 1..19: note = siRNA sense sequence
  source 1..19: mol_type = other RNA
ggccttgcgcttgggtcat

SEQ ID NO: 45099 - RNA, 19 nt, synthetic construct
  misc_feature 1..19: note = siRNA antisense sequence
  source 1..19: mol_type = other RNA
atgacccaagcgcaaggcc

SEQ ID NO: 45100 - RNA, 19 nt, synthetic construct
  misc_feature 1..19: note = siRNA sense sequence
  source 1..19: mol_type = other RNA
gccttgcgcttgggtcata

SEQ ID NO: 45101 - RNA, 19 nt, synthetic construct
  misc_feature 1..19: note = siRNA antisense sequence
  source 1..19: mol_type = other RNA
tatgacccaagcgcaaggc

SEQ ID NO: 45102 - RNA, 19 nt, synthetic construct
  misc_feature 1..19: note = siRNA sense sequence
  source 1..19: mol_type = other RNA
ccttgcgcttgggtcataa

SEQ ID NO: 45103 - RNA, 19 nt, synthetic construct
  misc_feature 1..19: note = siRNA antisense sequence
  source 1..19: mol_type = other RNA
ttatgacccaagcgcaagg

SEQ ID NO: 45104 - RNA, 19 nt, synthetic construct
  misc_feature 1..19: note = siRNA sense sequence
  source 1..19: mol_type = other RNA
cttgcgcttgggtcataac

SEQ ID NO: 45105 - RNA, 19 nt, synthetic construct
  misc_feature 1..19: note = siRNA antisense sequence
  source 1..19: mol_type = other RNA
gttatgacccaagcgcaag

SEQ ID NO: 45106 - RNA, 19 nt, synthetic construct
  misc_feature 1..19: note = siRNA sense sequence
  source 1..19: mol_type = other RNA
ggaatggaagcagccacgt

SEQ ID NO: 45107 - RNA, 19 nt, synthetic construct
  misc_feature 1..19: note = siRNA antisense sequence
  source 1..19: mol_type = other RNA
acgtggctgcttccattcc

SEQ ID NO: 45108 - RNA, 19 nt, synthetic construct
  misc_feature 1..19: note = siRNA sense sequence
  source 1..19: mol_type = other RNA
gaatggaagcagccacgtg

SEQ ID NO: 45109 - RNA, 19 nt, synthetic construct
  misc_feature 1..19: note = siRNA antisense sequence
  source 1..19: mol_type = other RNA
cacgtggctgcttccattc

SEQ ID NO: 45110 - RNA, 19 nt, synthetic construct
  misc_feature 1..19: note = siRNA sense sequence
  source 1..19: mol_type = other RNA
aatggaagcagccacgtgc

SEQ ID NO: 45111 - RNA, 19 nt, synthetic construct
  misc_feature 1..19: note = siRNA antisense sequence
  source 1..19: mol_type = other RNA
gcacgtggctgcttccatt

SEQ ID NO: 45112 - RNA, 19 nt, synthetic construct
  misc_feature 1..19: note = siRNA sense sequence
  source 1..19: mol_type = other RNA
atggaagcagccacgtgca

SEQ ID NO: 45113 - RNA, 19 nt, synthetic construct
  misc_feature 1..19: note = siRNA antisense sequence
  source 1..19: mol_type = other RNA
tgcacgtggctgcttccat

SEQ ID NO: 45114 - RNA, 19 nt, synthetic construct
  misc_feature 1..19: note = siRNA sense sequence
  source 1..19: mol_type = other RNA
tggaagcagccacgtgcaa

SEQ ID NO: 45115 - RNA, 19 nt, synthetic construct
  misc_feature 1..19: note = siRNA antisense sequence
  source 1..19: mol_type = other RNA
ttgcacgtggctgcttcca

SEQ ID NO: 45116 - RNA, 19 nt, synthetic construct
  misc_feature 1..19: note = siRNA sense sequence
  source 1..19: mol_type = other RNA
ggaagcagccacgtgcaaa

SEQ ID NO: 45117 - RNA, 19 nt, synthetic construct
  misc_feature 1..19: note = siRNA antisense sequence
  source 1..19: mol_type = other RNA
tttgcacgtggctgcttcc

SEQ ID NO: 45118 - RNA, 19 nt, synthetic construct
  misc_feature 1..19: note = siRNA sense sequence
  source 1..19: mol_type = other RNA
gaagcagccacgtgcaaaa

SEQ ID NO: 45119 - RNA, 19 nt, synthetic construct
  misc_feature 1..19: note = siRNA antisense sequence
  source 1..19: mol_type = other RNA
ttttgcacgtggctgcttc

SEQ ID NO: 45120 - RNA, 19 nt, synthetic construct
  misc_feature 1..19: note = siRNA sense sequence
  source 1..19: mol_type = other RNA
aggcagcctcgctttgtaa

SEQ ID NO: 45121 - RNA, 19 nt, synthetic construct
  misc_feature 1..19: note = siRNA antisense sequence
  source 1..19: mol_type = other RNA
ttacaaagcgaggctgcct

SEQ ID NO: 45122 - RNA, 19 nt, synthetic construct
  misc_feature 1..19: note = siRNA sense sequence
  source 1..19: mol_type = other RNA
ggcagcctcgctttgtaac

SEQ ID NO: 45123 - RNA, 19 nt, synthetic construct
  misc_feature 1..19: note = siRNA antisense sequence
  source 1..19: mol_type = other RNA
gttacaaagcgaggctgcc

SEQ ID NO: 45124 - RNA, 19 nt, synthetic construct
  misc_feature 1..19: note = siRNA sense sequence
  source 1..19: mol_type = other RNA
caacctgttctcttgtagt

SEQ ID NO: 45125 - RNA, 19 nt, synthetic construct
  misc_feature 1..19: note = siRNA antisense sequence
  source 1..19: mol_type = other RNA
actacaagagaacaggttg

SEQ ID NO: 45126 - RNA, 19 nt, synthetic construct
  misc_feature 1..19: note = siRNA sense sequence
  source 1..19: mol_type = other RNA
aacctgttctcttgtagta

SEQ ID NO: 45127 - RNA, 19 nt, synthetic construct
  misc_feature 1..19: note = siRNA antisense sequence
  source 1..19: mol_type = other RNA
tactacaagagaacaggtt

SEQ ID NO: 45128 - RNA, 19 nt, synthetic construct
  misc_feature 1..19: note = siRNA sense sequence
  source 1..19: mol_type = other RNA
cctgttctcttgtagtaac

SEQ ID NO: 45129 - RNA, 19 nt, synthetic construct
  misc_feature 1..19: note = siRNA antisense sequence
  source 1..19: mol_type = other RNA
gttactacaagagaacagg

SEQ ID NO: 45130 - RNA, 19 nt, synthetic construct
  misc_feature 1..19: note = siRNA sense sequence
  source 1..19: mol_type = other RNA
ctgttctcttgtagtaact

SEQ ID NO: 45131 - RNA, 19 nt, synthetic construct
  misc_feature 1..19: note = siRNA antisense sequence
  source 1..19: mol_type = other RNA
agttactacaagagaacag

SEQ ID NO: 45132 - RNA, 19 nt, synthetic construct
  misc_feature 1..19: note = siRNA sense sequence
  source 1..19: mol_type = other RNA
tgttctcttgtagtaacta

SEQ ID NO: 45133 - RNA, 19 nt, synthetic construct
  misc_feature 1..19: note = siRNA antisense sequence
  source 1..19: mol_type = other RNA
tagttactacaagagaaca

SEQ ID NO: 45134 - RNA, 19 nt, synthetic construct
  misc_feature 1..19: note = siRNA sense sequence
  source 1..19: mol_type = other RNA
gttctcttgtagtaactaa

SEQ ID NO: 45135 - RNA, 19 nt, synthetic construct
  misc_feature 1..19: note = siRNA antisense sequence
  source 1..19: mol_type = other RNA
ttagttactacaagagaac

SEQ ID NO: 45136 - RNA, 19 nt, synthetic construct
  misc_feature 1..19: note = siRNA sense sequence
  source 1..19: mol_type = other RNA
tctcttgtagtaactaatc

SEQ ID NO: 45137 - RNA, 19 nt, synthetic construct
  misc_feature 1..19: note = siRNA antisense sequence
  source 1..19: mol_type = other RNA
gattagttactacaagaga

SEQ ID NO: 45138 - RNA, 19 nt, synthetic construct
  misc_feature 1..19: note = siRNA sense sequence
  source 1..19: mol_type = other RNA
ctcttgtagtaactaatcc

SEQ ID NO: 45139 - RNA, 19 nt, synthetic construct
  misc_feature 1..19: note = siRNA antisense sequence
  source 1..19: mol_type = other RNA
ggattagttactacaagag

SEQ ID NO: 45140 - RNA, 19 nt, synthetic construct
  misc_feature 1..19: note = siRNA sense sequence
  source 1..19: mol_type = other RNA
tcttgtagtaactaatcca

SEQ ID NO: 45141 - RNA, 19 nt, synthetic construct
  misc_feature 1..19: note = siRNA antisense sequence
  source 1..19: mol_type = other RNA
tggattagttactacaaga

SEQ ID NO: 45142 - RNA, 19 nt, synthetic construct
  misc_feature 1..19: note = siRNA sense sequence
  source 1..19: mol_type = other RNA
cttgtagtaactaatccag

SEQ ID NO: 45143 - RNA, 19 nt, synthetic construct
  misc_feature 1..19: note = siRNA antisense sequence
  source 1..19: mol_type = other RNA
ctggattagttactacaag

SEQ ID NO: 45144 - RNA, 19 nt, synthetic construct
  misc_feature 1..19: note = siRNA sense sequence
  source 1..19: mol_type = other RNA
ttgtagtaactaatccagc

SEQ ID NO: 45145 - RNA, 19 nt, synthetic construct
  misc_feature 1..19: note = siRNA antisense sequence
  source 1..19: mol_type = other RNA
gctggattagttactacaa

SEQ ID NO: 45146 - RNA, 19 nt, synthetic construct
  misc_feature 1..19: note = siRNA sense sequence
  source 1..19: mol_type = other RNA
cactcctgtgataaagtcc

SEQ ID NO: 45147 - RNA, 19 nt, synthetic construct
  misc_feature 1..19: note = siRNA antisense sequence
  source 1..19: mol_type = other RNA
ggactttatcacaggagtg

SEQ ID NO: 45148 - RNA, 19 nt, synthetic construct
  misc_feature 1..19: note = siRNA sense sequence
  source 1..19: mol_type = other RNA
actcctgtgataaagtccc

SEQ ID NO: 45149 - RNA, 19 nt, synthetic construct
  misc_feature 1..19: note = siRNA antisense sequence
  source 1..19: mol_type = other RNA
gggactttatcacaggagt

SEQ ID NO: 45150 - RNA, 19 nt, synthetic construct
  misc_feature 1..19: note = siRNA sense sequence
  source 1..19: mol_type = other RNA
ctcctgtgataaagtccct

SEQ ID NO: 45151 - RNA, 19 nt, synthetic construct
  misc_feature 1..19: note = siRNA antisense sequence
  source 1..19: mol_type = other RNA
agggactttatcacaggag

SEQ ID NO: 45152 - RNA, 19 nt, synthetic construct
  misc_feature 1..19: note = siRNA sense sequence
  source 1..19: mol_type = other RNA
tcctgtgataaagtccctc

SEQ ID NO: 45153 - RNA, 19 nt, synthetic construct
  misc_feature 1..19: note = siRNA antisense sequence
  source 1..19: mol_type = other RNA
gagggactttatcacagga

SEQ ID NO: 45154 - RNA, 19 nt, synthetic construct
  misc_feature 1..19: note = siRNA sense sequence
  source 1..19: mol_type = other RNA
cctgtgataaagtccctct

SEQ ID NO: 45155 - RNA, 19 nt, synthetic construct
  misc_feature 1..19: note = siRNA antisense sequence
  source 1..19: mol_type = other RNA
agagggactttatcacagg

SEQ ID NO: 45156 - RNA, 19 nt, synthetic construct
  misc_feature 1..19: note = siRNA sense sequence
  source 1..19: mol_type = other RNA
ctgtgataaagtccctctt

SEQ ID NO: 45157 - RNA, 19 nt, synthetic construct
  misc_feature 1..19: note = siRNA antisense sequence
  source 1..19: mol_type = other RNA
aagagggactttatcacag

SEQ ID NO: 45158 - RNA, 19 nt, synthetic construct
  misc_feature 1..19: note = siRNA sense sequence
  source 1..19: mol_type = other RNA
gtccctcttgactcctctt

SEQ ID NO: 45159 - RNA, 19 nt, synthetic construct
  misc_feature 1..19: note = siRNA antisense sequence
  source 1..19: mol_type = other RNA
aagaggagtcaagagggac

SEQ ID NO: 45160 - RNA, 19 nt, synthetic construct
  misc_feature 1..19: note = siRNA sense sequence
  source 1..19: mol_type = other RNA
atattcaagctgtagcaga

SEQ ID NO: 45161 - RNA, 19 nt, synthetic construct
  misc_feature 1..19: note = siRNA antisense sequence
  source 1..19: mol_type = other RNA
tctgctacagcttgaatat

SEQ ID NO: 45162 - RNA, 19 nt, synthetic construct
  misc_feature 1..19: note = siRNA sense sequence
  source 1..19: mol_type = other RNA
acatagctactttagatac

SEQ ID NO: 45163 - RNA, 19 nt, synthetic construct
  misc_feature 1..19: note = siRNA antisense sequence
  source 1..19: mol_type = other RNA
gtatctaaagtagctatgt

SEQ ID NO: 45164 - RNA, 19 nt, synthetic construct
  misc_feature 1..19: note = siRNA sense sequence
  source 1..19: mol_type = other RNA
catagctactttagatact

SEQ ID NO: 45165 - RNA, 19 nt, synthetic construct
  misc_feature 1..19: note = siRNA antisense sequence
  source 1..19: mol_type = other RNA
agtatctaaagtagctatg

SEQ ID NO: 45166 - RNA, 19 nt, synthetic construct
  misc_feature 1..19: note = siRNA sense sequence
  source 1..19: mol_type = other RNA
tagctactttagatacttc

SEQ ID NO: 45167 - RNA, 19 nt, synthetic construct
  misc_feature 1..19: note = siRNA antisense sequence
  source 1..19: mol_type = other RNA
gaagtatctaaagtagcta

SEQ ID NO: 45168 - RNA, 19 nt, synthetic construct
  misc_feature 1..19: note = siRNA sense sequence
  source 1..19: mol_type = other RNA
agctactttagatacttct

SEQ ID NO: 45169 - RNA, 19 nt, synthetic construct
  misc_feature 1..19: note = siRNA antisense sequence
  source 1..19: mol_type = other RNA
agaagtatctaaagtagct

SEQ ID NO: 45170 - RNA, 19 nt, synthetic construct
  misc_feature 1..19: note = siRNA sense sequence
  source 1..19: mol_type = other RNA
gactttcagtttcataaga

SEQ ID NO: 45171 - RNA, 19 nt, synthetic construct
  misc_feature 1..19: note = siRNA antisense sequence
  source 1..19: mol_type = other RNA
tcttatgaaactgaaagtc

SEQ ID NO: 45172 - RNA, 19 nt, synthetic construct
  misc_feature 1..19: note = siRNA sense sequence
  source 1..19: mol_type = other RNA
actttcagtttcataagag

SEQ ID NO: 45173 - RNA, 19 nt, synthetic construct
  misc_feature 1..19: note = siRNA antisense sequence
  source 1..19: mol_type = other RNA
ctcttatgaaactgaaagt

SEQ ID NO: 45174 - RNA, 19 nt, synthetic construct
  misc_feature 1..19: note = siRNA sense sequence
  source 1..19: mol_type = other RNA
agactaatccaaaaggccc

SEQ ID NO: 45175 - RNA, 19 nt, synthetic construct
  misc_feature 1..19: note = siRNA antisense sequence
  source 1..19: mol_type = other RNA
gggccttttggattagtct

SEQ ID NO: 45176 - RNA, 19 nt, synthetic construct
  misc_feature 1..19: note = siRNA sense sequence
  source 1..19: mol_type = other RNA
actaatccaaaaggccctc

SEQ ID NO: 45177 - RNA, 19 nt, synthetic construct
  misc_feature 1..19: note = siRNA antisense sequence
  source 1..19: mol_type = other RNA
gagggccttttggattagt

SEQ ID NO: 45178 - RNA, 19 nt, synthetic construct
  misc_feature 1..19: note = siRNA sense sequence
  source 1..19: mol_type = other RNA
ctaatccaaaaggccctcc

SEQ ID NO: 45179 - RNA, 19 nt, synthetic construct
  misc_feature 1..19: note = siRNA antisense sequence
  source 1..19: mol_type = other RNA
ggagggccttttggattag

SEQ ID NO: 45180 - RNA, 19 nt, synthetic construct
  misc_feature 1..19: note = siRNA sense sequence
  source 1..19: mol_type = other RNA
cctcctttcagtgttttct

SEQ ID NO: 45181 - RNA, 19 nt, synthetic construct
  misc_feature 1..19: note = siRNA antisense sequence
  source 1..19: mol_type = other RNA
agaaaacactgaaaggagg

SEQ ID NO: 45182 - RNA, 19 nt, synthetic construct
  misc_feature 1..19: note = siRNA sense sequence
  source 1..19: mol_type = other RNA
cagtgttttctgatagtgt

SEQ ID NO: 45183 - RNA, 19 nt, synthetic construct
  misc_feature 1..19: note = siRNA antisense sequence
  source 1..19: mol_type = other RNA
acactatcagaaaacactg

SEQ ID NO: 45184 - RNA, 19 nt, synthetic construct
  misc_feature 1..19: note = siRNA sense sequence
  source 1..19: mol_type = other RNA
agtgttttctgatagtgtc

SEQ ID NO: 45185 - RNA, 19 nt, synthetic construct
  misc_feature 1..19: note = siRNA antisense sequence
  source 1..19: mol_type = other RNA
gacactatcagaaaacact

SEQ ID NO: 45186 - RNA, 19 nt, synthetic construct
  misc_feature 1..19: note = siRNA sense sequence
  source 1..19: mol_type = other RNA
gtgttttctgatagtgtcc

SEQ ID NO: 45187 - RNA, 19 nt, synthetic construct
  misc_feature 1..19: note = siRNA antisense sequence
  source 1..19: mol_type = other RNA
ggacactatcagaaaacac

SEQ ID NO: 45188 - RNA, 19 nt, synthetic construct
  misc_feature 1..19: note = siRNA sense sequence
  source 1..19: mol_type = other RNA
ttttctgatagtgtccttc

SEQ ID NO: 45189 - RNA, 19 nt, synthetic construct
  misc_feature 1..19: note = siRNA antisense sequence
  source 1..19: mol_type = other RNA
gaaggacactatcagaaaa

SEQ ID NO: 45190 - RNA, 19 nt, synthetic construct
  misc_feature 1..19: note = siRNA sense sequence
  source 1..19: mol_type = other RNA
tttctgatagtgtccttcc

SEQ ID NO: 45191 - RNA, 19 nt, synthetic construct
  misc_feature 1..19: note = siRNA antisense sequence
  source 1..19: mol_type = other RNA
ggaaggacactatcagaaa

SEQ ID NO: 45192 - RNA, 19 nt, synthetic construct
  misc_feature 1..19: note = siRNA sense sequence
  source 1..19: mol_type = other RNA
ttctgatagtgtccttcct

SEQ ID NO: 45193 - RNA, 19 nt, synthetic construct
  misc_feature 1..19: note = siRNA antisense sequence
  source 1..19: mol_type = other RNA
aggaaggacactatcagaa

SEQ ID NO: 45194 - RNA, 19 nt, synthetic construct
  misc_feature 1..19: note = siRNA sense sequence
  source 1..19: mol_type = other RNA
tctgatagtgtccttcctt

SEQ ID NO: 45195 - RNA, 19 nt, synthetic construct
  misc_feature 1..19: note = siRNA antisense sequence
  source 1..19: mol_type = other RNA
aaggaaggacactatcaga

SEQ ID NO: 45196 - RNA, 19 nt, synthetic construct
  misc_feature 1..19: note = siRNA sense sequence
  source 1..19: mol_type = other RNA
ctgatagtgtccttccttt

SEQ ID NO: 45197 - RNA, 19 nt, synthetic construct
  misc_feature 1..19: note = siRNA antisense sequence
  source 1..19: mol_type = other RNA
aaaggaaggacactatcag

SEQ ID NO: 45198 - RNA, 19 nt, synthetic construct
  misc_feature 1..19: note = siRNA sense sequence
  source 1..19: mol_type = other RNA
agtgtccttcctttcatgt

SEQ ID NO: 45199 - RNA, 19 nt, synthetic construct
  misc_feature 1..19: note = siRNA antisense sequence
  source 1..19: mol_type = other RNA
acatgaaaggaaggacact

SEQ ID NO: 45200 - RNA, 19 nt, synthetic construct
  misc_feature 1..19: note = siRNA sense sequence
  source 1..19: mol_type = other RNA
gtccttcctttcatgttca

SEQ ID NO: 45201 - RNA, 19 nt, synthetic construct
  misc_feature 1..19: note = siRNA antisense sequence
  source 1..19: mol_type = other RNA
tgaacatgaaaggaaggac

SEQ ID NO: 45202 - RNA, 19 nt, synthetic construct
  misc_feature 1..19: note = siRNA sense sequence
  source 1..19: mol_type = other RNA
tccttcctttcatgttcac

SEQ ID NO: 45203 - RNA, 19 nt, synthetic construct
  misc_feature 1..19: note = siRNA antisense sequence
  source 1..19: mol_type = other RNA
gtgaacatgaaaggaagga

SEQ ID NO: 45204 - RNA, 19 nt, synthetic construct
  misc_feature 1..19: note = siRNA sense sequence
  source 1..19: mol_type = other RNA
ccttcctttcatgttcaca

SEQ ID NO: 45205 - RNA, 19 nt, synthetic construct
  misc_feature 1..19: note = siRNA antisense sequence
  source 1..19: mol_type = other RNA
tgtgaacatgaaaggaagg

SEQ ID NO: 45206 - RNA, 19 nt, synthetic construct
  misc_feature 1..19: note = siRNA sense sequence
  source 1..19: mol_type = other RNA
cttcctttcatgttcacac

SEQ ID NO: 45207 - RNA, 19 nt, synthetic construct
  misc_feature 1..19: note = siRNA antisense sequence
  source 1..19: mol_type = other RNA
gtgtgaacatgaaaggaag

SEQ ID NO: 45208 - RNA, 19 nt, synthetic construct
  misc_feature 1..19: note = siRNA sense sequence
  source 1..19: mol_type = other RNA
cacactcacttttctccct

SEQ ID NO: 45209 - RNA, 19 nt, synthetic construct
  misc_feature 1..19: note = siRNA antisense sequence
  source 1..19: mol_type = other RNA
agggagaaaagtgagtgtg

SEQ ID NO: 45210 - RNA, 19 nt, synthetic construct
  misc_feature 1..19: note = siRNA sense sequence
  source 1..19: mol_type = other RNA
acactcacttttctccctc

SEQ ID NO: 45211 - RNA, 19 nt, synthetic construct
  misc_feature 1..19: note = siRNA antisense sequence
  source 1..19: mol_type = other RNA
gagggagaaaagtgagtgt

SEQ ID NO: 45212 - RNA, 19 nt, synthetic construct
  misc_feature 1..19: note = siRNA sense sequence
  source 1..19: mol_type = other RNA
actcacttttctccctctt

SEQ ID NO: 45213 - RNA, 19 nt, synthetic construct
  misc_feature 1..19: note = siRNA antisense sequence
  source 1..19: mol_type = other RNA
aagagggagaaaagtgagt

SEQ ID NO: 45214 - RNA, 19 nt, synthetic construct
  misc_feature 1..19: note = siRNA sense sequence
  source 1..19: mol_type = other RNA
tctttcttctctgcaccca

SEQ ID NO: 45215 - RNA, 19 nt, synthetic construct
  misc_feature 1..19: note = siRNA antisense sequence
  source 1..19: mol_type = other RNA
tgggtgcagagaagaaaga

SEQ ID NO: 45216 - RNA, 19 nt, synthetic construct
  misc_feature 1..19: note = siRNA sense sequence
  source 1..19: mol_type = other RNA
tttcttctctgcacccaaa

SEQ ID NO: 45217 - RNA, 19 nt, synthetic construct
  misc_feature 1..19: note = siRNA antisense sequence
  source 1..19: mol_type = other RNA
tttgggtgcagagaagaaa

SEQ ID NO: 45218 - RNA, 19 nt, synthetic construct
  misc_feature 1..19: note = siRNA sense sequence
  source 1..19: mol_type = other RNA
ttcttctctgcacccaaaa

SEQ ID NO: 45219 - RNA, 19 nt, synthetic construct
  misc_feature 1..19: note = siRNA antisense sequence
  source 1..19: mol_type = other RNA
ttttgggtgcagagaagaa

SEQ ID NO: 45220 - RNA, 19 nt, synthetic construct
  misc_feature 1..19: note = siRNA sense sequence
  source 1..19: mol_type = other RNA
tcttctctgcacccaaaag

SEQ ID NO: 45221 - RNA, 19 nt, synthetic construct
  misc_feature 1..19: note = siRNA antisense sequence
  source 1..19: mol_type = other RNA
cttttgggtgcagagaaga

SEQ ID NO: 45222 - RNA, 19 nt, synthetic construct
  misc_feature 1..19: note = siRNA sense sequence
  source 1..19: mol_type = other RNA
cttctctgcacccaaaaga

SEQ ID NO: 45223 - RNA, 19 nt, synthetic construct
  misc_feature 1..19: note = siRNA antisense sequence
  source 1..19: mol_type = other RNA
tcttttgggtgcagagaag

SEQ ID NO: 45224 - RNA, 19 nt, synthetic construct
  misc_feature 1..19: note = siRNA sense sequence
  source 1..19: mol_type = other RNA
gctttaattgagcagatat

SEQ ID NO: 45225 - RNA, 19 nt, synthetic construct
  misc_feature 1..19: note = siRNA antisense sequence
  source 1..19: mol_type = other RNA
atatctgctcaattaaagc

SEQ ID NO: 45226 - RNA, 19 nt, synthetic construct
  misc_feature 1..19: note = siRNA sense sequence
  source 1..19: mol_type = other RNA
tataaagtgtctggacgat

SEQ ID NO: 45227 - RNA, 19 nt, synthetic construct
  misc_feature 1..19: note = siRNA antisense sequence
  source 1..19: mol_type = other RNA
atcgtccagacactttata

SEQ ID NO: 45228 - RNA, 19 nt, synthetic construct
  misc_feature 1..19: note = siRNA sense sequence
  source 1..19: mol_type = other RNA
ataaagtgtctggacgatc

SEQ ID NO: 45229 - RNA, 19 nt, synthetic construct
  misc_feature 1..19: note = siRNA antisense sequence
  source 1..19: mol_type = other RNA
gatcgtccagacactttat

SEQ ID NO: 45230 - RNA, 19 nt, synthetic construct
  misc_feature 1..19: note = siRNA sense sequence
  source 1..19: mol_type = other RNA
taaagtgtctggacgatca

SEQ ID NO: 45231 - RNA, 19 nt, synthetic construct
  misc_feature 1..19: note = siRNA antisense sequence
  source 1..19: mol_type = other RNA
tgatcgtccagacacttta

SEQ ID NO: 45232 - RNA, 19 nt, synthetic construct
  misc_feature 1..19: note = siRNA sense sequence
  source 1..19: mol_type = other RNA
aaagtgtctggacgatcaa

SEQ ID NO: 45233 - RNA, 19 nt, synthetic construct
  misc_feature 1..19: note = siRNA antisense sequence
  source 1..19: mol_type = other RNA
ttgatcgtccagacacttt

SEQ ID NO: 45234 - RNA, 19 nt, synthetic construct
  misc_feature 1..19: note = siRNA sense sequence
  source 1..19: mol_type = other RNA
aagtgtctggacgatcaag

SEQ ID NO: 45235 - RNA, 19 nt, synthetic construct
  misc_feature 1..19: note = siRNA antisense sequence
  source 1..19: mol_type = other RNA
cttgatcgtccagacactt

SEQ ID NO: 45236 - RNA, 19 nt, synthetic construct
  misc_feature 1..19: note = siRNA sense sequence
  source 1..19: mol_type = other RNA
agtgtctggacgatcaagt

SEQ ID NO: 45237 - RNA, 19 nt, synthetic construct
  misc_feature 1..19: note = siRNA antisense sequence
  source 1..19: mol_type = other RNA
acttgatcgtccagacact

SEQ ID NO: 45238 - RNA, 19 nt, synthetic construct
  misc_feature 1..19: note = siRNA sense sequence
  source 1..19: mol_type = other RNA
gtgtctggacgatcaagta

SEQ ID NO: 45239 - RNA, 19 nt, synthetic construct
  misc_feature 1..19: note = siRNA antisense sequence
  source 1..19: mol_type = other RNA
tacttgatcgtccagacac

SEQ ID NO: 45240 - RNA, 19 nt, synthetic construct
  misc_feature 1..19: note = siRNA sense sequence
  source 1..19: mol_type = other RNA
tgtctggacgatcaagtat

SEQ ID NO: 45241 - RNA, 19 nt, synthetic construct
  misc_feature 1..19: note = siRNA antisense sequence
  source 1..19: mol_type = other RNA
atacttgatcgtccagaca

SEQ ID NO: 45242 - RNA, 19 nt, synthetic construct
  misc_feature 1..19: note = siRNA sense sequence
  source 1..19: mol_type = other RNA
gacgatcaagtattatgct

SEQ ID NO: 45243 - RNA, 19 nt, synthetic construct
  misc_feature 1..19: note = siRNA antisense sequence
  source 1..19: mol_type = other RNA
agcataatacttgatcgtc

SEQ ID NO: 45244 - RNA, 19 nt, synthetic construct
  misc_feature 1..19: note = siRNA sense sequence
  source 1..19: mol_type = other RNA
acgatcaagtattatgcta

SEQ ID NO: 45245 - RNA, 19 nt, synthetic construct
  misc_feature 1..19: note = siRNA antisense sequence
  source 1..19: mol_type = other RNA
tagcataatacttgatcgt

SEQ ID NO: 45246 - RNA, 19 nt, synthetic construct
  misc_feature 1..19: note = siRNA sense sequence
  source 1..19: mol_type = other RNA
cgatcaagtattatgctag

SEQ ID NO: 45247 - RNA, 19 nt, synthetic construct
  misc_feature 1..19: note = siRNA antisense sequence
  source 1..19: mol_type = other RNA
ctagcataatacttgatcg

SEQ ID NO: 45248 - RNA, 19 nt, synthetic construct
  misc_feature 1..19: note = siRNA sense sequence
  source 1..19: mol_type = other RNA
gatcaagtattatgctagg

SEQ ID NO: 45249 - RNA, 19 nt, synthetic construct
  misc_feature 1..19: note = siRNA antisense sequence
  source 1..19: mol_type = other RNA
cctagcataatacttgatc

SEQ ID NO: 45250 - RNA, 19 nt, synthetic construct
  misc_feature 1..19: note = siRNA sense sequence
  source 1..19: mol_type = other RNA
caagtattatgctaggtgt

SEQ ID NO: 45251 - RNA, 19 nt, synthetic construct
  misc_feature 1..19: note = siRNA antisense sequence
  source 1..19: mol_type = other RNA
acacctagcataatacttg

SEQ ID NO: 45252 - RNA, 19 nt, synthetic construct
  misc_feature 1..19: note = siRNA sense sequence
  source 1..19: mol_type = other RNA
aagtattatgctaggtgtc

SEQ ID NO: 45253 - RNA, 19 nt, synthetic construct
  misc_feature 1..19: note = siRNA antisense sequence
  source 1..19: mol_type = other RNA
gacacctagcataatactt

SEQ ID NO: 45254 - RNA, 19 nt, synthetic construct
  misc_feature 1..19: note = siRNA sense sequence
  source 1..19: mol_type = other RNA
agtattatgctaggtgtca

SEQ ID NO: 45255 - RNA, 19 nt, synthetic construct
  misc_feature 1..19: note = siRNA antisense sequence
  source 1..19: mol_type = other RNA
tgacacctagcataatact

SEQ ID NO: 45256 - RNA, 19 nt, synthetic construct
  misc_feature 1..19: note = siRNA sense sequence
  source 1..19: mol_type = other RNA
tattatgctaggtgtcaag

SEQ ID NO: 45257 - RNA, 19 nt, synthetic construct
  misc_feature 1..19: note = siRNA antisense sequence
  source 1..19: mol_type = other RNA
cttgacacctagcataata

SEQ ID NO: 45258 - RNA, 19 nt, synthetic construct
  misc_feature 1..19: note = siRNA sense sequence
  source 1..19: mol_type = other RNA
attatgctaggtgtcaaga

SEQ ID NO: 45259 - RNA, 19 nt, synthetic construct
  misc_feature 1..19: note = siRNA antisense sequence
  source 1..19: mol_type = other RNA
tcttgacacctagcataat

SEQ ID NO: 45260 - RNA, 19 nt, synthetic construct
  misc_feature 1..19: note = siRNA sense sequence
  source 1..19: mol_type = other RNA
ttatgctaggtgtcaagag

SEQ ID NO: 45261 - RNA, 19 nt, synthetic construct
  misc_feature 1..19: note = siRNA antisense sequence
  source 1..19: mol_type = other RNA
ctcttgacacctagcataa

SEQ ID NO: 45262 - RNA, 19 nt, synthetic construct
  misc_feature 1..19: note = siRNA sense sequence
  source 1..19: mol_type = other RNA
tatgctaggtgtcaagagc

SEQ ID NO: 45263 - RNA, 19 nt, synthetic construct
  misc_feature 1..19: note = siRNA antisense sequence
  source 1..19: mol_type = other RNA
gctcttgacacctagcata

SEQ ID NO: 45264 - RNA, 19 nt, synthetic construct
  misc_feature 1..19: note = siRNA sense sequence
  source 1..19: mol_type = other RNA
gctaggtgtcaagagcaat

SEQ ID NO: 45265 - RNA, 19 nt, synthetic construct
  misc_feature 1..19: note = siRNA antisense sequence
  source 1..19: mol_type = other RNA
attgctcttgacacctagc

SEQ ID NO: 45266 - RNA, 19 nt, synthetic construct
  misc_feature 1..19: note = siRNA sense sequence
  source 1..19: mol_type = other RNA
ggtgtcaagagcaataaaa

SEQ ID NO: 45267 - RNA, 19 nt, synthetic construct
  misc_feature 1..19: note = siRNA antisense sequence
  source 1..19: mol_type = other RNA
ttttattgctcttgacacc

SEQ ID NO: 45268 - RNA, 19 nt, synthetic construct
  misc_feature 1..19: note = siRNA sense sequence
  source 1..19: mol_type = other RNA
atgttgttcctgattctaa

SEQ ID NO: 45269 - RNA, 19 nt, synthetic construct
  misc_feature 1..19: note = siRNA antisense sequence
  source 1..19: mol_type = other RNA
ttagaatcaggaacaacat

SEQ ID NO: 45270 - RNA, 19 nt, synthetic construct
  misc_feature 1..19: note = siRNA sense sequence
  source 1..19: mol_type = other RNA
tgttgttcctgattctaaa

SEQ ID NO: 45271 - RNA, 19 nt, synthetic construct
  misc_feature 1..19: note = siRNA antisense sequence
  source 1..19: mol_type = other RNA
tttagaatcaggaacaaca

SEQ ID NO: 45272 - RNA, 19 nt, synthetic construct
  misc_feature 1..19: note = siRNA sense sequence
  source 1..19: mol_type = other RNA
ataatatattgggacagct

SEQ ID NO: 45273 - RNA, 19 nt, synthetic construct
  misc_feature 1..19: note = siRNA antisense sequence
  source 1..19: mol_type = other RNA
agctgtcccaatatattat

SEQ ID NO: 45274 - RNA, 19 nt, synthetic construct
  misc_feature 1..19: note = siRNA sense sequence
  source 1..19: mol_type = other RNA
taatatattgggacagcta

SEQ ID NO: 45275 - RNA, 19 nt, synthetic construct
  misc_feature 1..19: note = siRNA antisense sequence
  source 1..19: mol_type = other RNA
tagctgtcccaatatatta

SEQ ID NO: 45276 - RNA, 19 nt, synthetic construct
  misc_feature 1..19: note = siRNA sense sequence
  source 1..19: mol_type = other RNA
aatatattgggacagctac

SEQ ID NO: 45277 - RNA, 19 nt, synthetic construct
  misc_feature 1..19: note = siRNA antisense sequence
  source 1..19: mol_type = other RNA
gtagctgtcccaatatatt

SEQ ID NO: 45278 - RNA, 19 nt, synthetic construct
  misc_feature 1..19: note = siRNA sense sequence
  source 1..19: mol_type = other RNA
atatattgggacagctaca

SEQ ID NO: 45279 - RNA, 19 nt, synthetic construct
  misc_feature 1..19: note = siRNA antisense sequence
  source 1..19: mol_type = other RNA
tgtagctgtcccaatatat

SEQ ID NO: 45280 - RNA, 19 nt, synthetic construct
  misc_feature 1..19: note = siRNA sense sequence
  source 1..19: mol_type = other RNA
caatgcatgatggtatgtc

SEQ ID NO: 45281 - RNA, 19 nt, synthetic construct
  misc_feature 1..19: note = siRNA antisense sequence
  source 1..19: mol_type = other RNA
gacataccatcatgcattg

SEQ ID NO: 45282 - RNA, 19 nt, synthetic construct
  misc_feature 1..19: note = siRNA sense sequence
  source 1..19: mol_type = other RNA
aatgcatgatggtatgtca

SEQ ID NO: 45283 - RNA, 19 nt, synthetic construct
  misc_feature 1..19: note = siRNA antisense sequence
  source 1..19: mol_type = other RNA
tgacataccatcatgcatt

SEQ ID NO: 45284 - RNA, 19 nt, synthetic construct
  misc_feature 1..19: note = siRNA sense sequence
  source 1..19: mol_type = other RNA
caattagttgatcttgaca

SEQ ID NO: 45285 - RNA, 19 nt, synthetic construct
  misc_feature 1..19: note = siRNA antisense sequence
  source 1..19: mol_type = other RNA
tgtcaagatcaactaattg

SEQ ID NO: 45286 - RNA, 19 nt, synthetic construct
  misc_feature 1..19: note = siRNA sense sequence
  source 1..19: mol_type = other RNA
taagtcttactgttgtaga

SEQ ID NO: 45287 - RNA, 19 nt, synthetic construct
  misc_feature 1..19: note = siRNA antisense sequence
  source 1..19: mol_type = other RNA
tctacaacagtaagactta

SEQ ID NO: 45288 - RNA, 19 nt, synthetic construct
  misc_feature 1..19: note = siRNA sense sequence
  source 1..19: mol_type = other RNA
aagtcttactgttgtagaa

SEQ ID NO: 45289 - RNA, 19 nt, synthetic construct
  misc_feature 1..19: note = siRNA antisense sequence
  source 1..19: mol_type = other RNA
ttctacaacagtaagactt

SEQ ID NO: 45290 - RNA, 19 nt, synthetic construct
  misc_feature 1..19: note = siRNA sense sequence
  source 1..19: mol_type = other RNA
attgtttcccagtctgagg

SEQ ID NO: 45291 - RNA, 19 nt, synthetic construct
  misc_feature 1..19: note = siRNA antisense sequence
  source 1..19: mol_type = other RNA
cctcagactgggaaacaat

SEQ ID NO: 45292 - RNA, 19 nt, synthetic construct
  misc_feature 1..19: note = siRNA sense sequence
  source 1..19: mol_type = other RNA
ttgtttcccagtctgaggt

SEQ ID NO: 45293 - RNA, 19 nt, synthetic construct
  misc_feature 1..19: note = siRNA antisense sequence
  source 1..19: mol_type = other RNA
acctcagactgggaaacaa

SEQ ID NO: 45294 - RNA, 19 nt, synthetic construct
  misc_feature 1..19: note = siRNA sense sequence
  source 1..19: mol_type = other RNA
tgtttcccagtctgaggtg

SEQ ID NO: 45295 - RNA, 19 nt, synthetic construct
  misc_feature 1..19: note = siRNA antisense sequence
  source 1..19: mol_type = other RNA
cacctcagactgggaaaca

SEQ ID NO: 45296 - RNA, 19 nt, synthetic construct
  misc_feature 1..19: note = siRNA sense sequence
  source 1..19: mol_type = other RNA
gtttcccagtctgaggtgt

SEQ ID NO: 45297 - RNA, 19 nt, synthetic construct
  misc_feature 1..19: note = siRNA antisense sequence
  source 1..19: mol_type = other RNA
acacctcagactgggaaac

SEQ ID NO: 45298 - RNA, 19 nt, synthetic construct
  misc_feature 1..19: note = siRNA sense sequence
  source 1..19: mol_type = other RNA
ttcccagtctgaggtgttg

SEQ ID NO: 45299 - RNA, 19 nt, synthetic construct
  misc_feature 1..19: note = siRNA antisense sequence
  source 1..19: mol_type = other RNA
caacacctcagactgggaa

SEQ ID NO: 45300 - RNA, 19 nt, synthetic construct
  misc_feature 1..19: note = siRNA sense sequence
  source 1..19: mol_type = other RNA
cagtctgaggtgttgaata

SEQ ID NO: 45301 - RNA, 19 nt, synthetic construct
  misc_feature 1..19: note = siRNA antisense sequence
  source 1..19: mol_type = other RNA
tattcaacacctcagactg

SEQ ID NO: 45302 - RNA, 19 nt, synthetic construct
  misc_feature 1..19: note = siRNA sense sequence
  source 1..19: mol_type = other RNA
agtctgaggtgttgaatat

SEQ ID NO: 45303 - RNA, 19 nt, synthetic construct
  misc_feature 1..19: note = siRNA antisense sequence
  source 1..19: mol_type = other RNA
atattcaacacctcagact

SEQ ID NO: 45304 - RNA, 19 nt, synthetic construct
  misc_feature 1..19: note = siRNA sense sequence
  source 1..19: mol_type = other RNA
tctgaggtgttgaatatga

SEQ ID NO: 45305 - RNA, 19 nt, synthetic construct
  misc_feature 1..19: note = siRNA antisense sequence
  source 1..19: mol_type = other RNA
tcatattcaacacctcaga

SEQ ID NO: 45306 - RNA, 19 nt, synthetic construct
  misc_feature 1..19: note = siRNA sense sequence
  source 1..19: mol_type = other RNA
aggtgttgaatatgatcct

SEQ ID NO: 45307 - RNA, 19 nt, synthetic construct
  misc_feature 1..19: note = siRNA antisense sequence
  source 1..19: mol_type = other RNA
aggatcatattcaacacct

SEQ ID NO: 45308 - RNA, 19 nt, synthetic construct
  misc_feature 1..19: note = siRNA sense sequence
  source 1..19: mol_type = other RNA
ggtgttgaatatgatcctc

SEQ ID NO: 45309 - RNA, 19 nt, synthetic construct
  misc_feature 1..19: note = siRNA antisense sequence
  source 1..19: mol_type = other RNA
gaggatcatattcaacacc

SEQ ID NO: 45310 - RNA, 19 nt, synthetic construct
  misc_feature 1..19: note = siRNA sense sequence
  source 1..19: mol_type = other RNA
ccaggtcttccaattagta

SEQ ID NO: 45311 - RNA, 19 nt, synthetic construct
  misc_feature 1..19: note = siRNA antisense sequence
  source 1..19: mol_type = other RNA
tactaattggaagacctgg

SEQ ID NO: 45312 - RNA, 19 nt, synthetic construct
  misc_feature 1..19: note = siRNA sense sequence
  source 1..19: mol_type = other RNA
caggtcttccaattagtaa

SEQ ID NO: 45313 - RNA, 19 nt, synthetic construct
  misc_feature 1..19: note = siRNA antisense sequence
  source 1..19: mol_type = other RNA
ttactaattggaagacctg

SEQ ID NO: 45314 - RNA, 19 nt, synthetic construct
  misc_feature 1..19: note = siRNA sense sequence
  source 1..19: mol_type = other RNA
aggtcttccaattagtaat

SEQ ID NO: 45315 - RNA, 19 nt, synthetic construct
  misc_feature 1..19: note = siRNA antisense sequence
  source 1..19: mol_type = other RNA
attactaattggaagacct

SEQ ID NO: 45316 - RNA, 19 nt, synthetic construct
  misc_feature 1..19: note = siRNA sense sequence
  source 1..19: mol_type = other RNA
ggtcttccaattagtaatc

SEQ ID NO: 45317 - RNA, 19 nt, synthetic construct
  misc_feature 1..19: note = siRNA antisense sequence
  source 1..19: mol_type = other RNA
gattactaattggaagacc

SEQ ID NO: 45318 - RNA, 19 nt, synthetic construct
  misc_feature 1..19: note = siRNA sense sequence
  source 1..19: mol_type = other RNA
gtcttccaattagtaatcc

SEQ ID NO: 45319 - RNA, 19 nt, synthetic construct
  misc_feature 1..19: note = siRNA antisense sequence
  source 1..19: mol_type = other RNA
ggattactaattggaagac

SEQ ID NO: 45320 - RNA, 19 nt, synthetic construct
  misc_feature 1..19: note = siRNA sense sequence
  source 1..19: mol_type = other RNA
tcttccaattagtaatcca

SEQ ID NO: 45321 - RNA, 19 nt, synthetic construct
  misc_feature 1..19: note = siRNA antisense sequence
  source 1..19: mol_type = other RNA
tggattactaattggaaga

SEQ ID NO: 45322 - RNA, 19 nt, synthetic construct
  misc_feature 1..19: note = siRNA sense sequence
  source 1..19: mol_type = other RNA
cttccaattagtaatccac

SEQ ID NO: 45323 - RNA, 19 nt, synthetic construct
  misc_feature 1..19: note = siRNA antisense sequence
  source 1..19: mol_type = other RNA
gtggattactaattggaag

SEQ ID NO: 45324 - RNA, 19 nt, synthetic construct
  misc_feature 1..19: note = siRNA sense sequence
  source 1..19: mol_type = other RNA
ttccaattagtaatccaca

SEQ ID NO: 45325 - RNA, 19 nt, synthetic construct
  misc_feature 1..19: note = siRNA antisense sequence
  source 1..19: mol_type = other RNA
tgtggattactaattggaa

SEQ ID NO: 45326 - RNA, 19 nt, synthetic construct
  misc_feature 1..19: note = siRNA sense sequence
  source 1..19: mol_type = other RNA
caagtagggataggagtaa

SEQ ID NO: 45327 - RNA, 19 nt, synthetic construct
  misc_feature 1..19: note = siRNA antisense sequence
  source 1..19: mol_type = other RNA
ttactcctatccctacttg

SEQ ID NO: 45328 - RNA, 19 nt, synthetic construct
  misc_feature 1..19: note = siRNA sense sequence
  source 1..19: mol_type = other RNA
aagtagggataggagtaag

SEQ ID NO: 45329 - RNA, 19 nt, synthetic construct
  misc_feature 1..19: note = siRNA antisense sequence
  source 1..19: mol_type = other RNA
cttactcctatccctactt

SEQ ID NO: 45330 - RNA, 19 nt, synthetic construct
  misc_feature 1..19: note = siRNA sense sequence
  source 1..19: mol_type = other RNA
agtagggataggagtaaga

SEQ ID NO: 45331 - RNA, 19 nt, synthetic construct
  misc_feature 1..19: note = siRNA antisense sequence
  source 1..19: mol_type = other RNA
tcttactcctatccctact

SEQ ID NO: 45332 - RNA, 19 nt, synthetic construct
  misc_feature 1..19: note = siRNA sense sequence
  source 1..19: mol_type = other RNA
ttgcaatttgtgacagttt

SEQ ID NO: 45333 - RNA, 19 nt, synthetic construct
  misc_feature 1..19: note = siRNA antisense sequence
  source 1..19: mol_type = other RNA
aaactgtcacaaattgcaa

SEQ ID NO: 45334 - RNA, 19 nt, synthetic construct
  misc_feature 1..19: note = siRNA sense sequence
  source 1..19: mol_type = other RNA
tgcaatttgtgacagtttt

SEQ ID NO: 45335 - RNA, 19 nt, synthetic construct
  misc_feature 1..19: note = siRNA antisense sequence
  source 1..19: mol_type = other RNA
aaaactgtcacaaattgca

SEQ ID NO: 45336 - RNA, 19 nt, synthetic construct
  misc_feature 1..19: note = siRNA sense sequence
  source 1..19: mol_type = other RNA
gcaatttgtgacagttttc

SEQ ID NO: 45337 - RNA, 19 nt, synthetic construct
  misc_feature 1..19: note = siRNA antisense sequence
  source 1..19: mol_type = other RNA
gaaaactgtcacaaattgc

SEQ ID NO: 45338 - RNA, 19 nt, synthetic construct
  misc_feature 1..19: note = siRNA sense sequence
  source 1..19: mol_type = other RNA
caatttgtgacagttttca

SEQ ID NO: 45339 - RNA, 19 nt, synthetic construct
  misc_feature 1..19: note = siRNA antisense sequence
  source 1..19: mol_type = other RNA
tgaaaactgtcacaaattg

SEQ ID NO: 45340 - RNA, 19 nt, synthetic construct
  misc_feature 1..19: note = siRNA sense sequence
  source 1..19: mol_type = other RNA
tttgtgacagttttcatag

SEQ ID NO: 45341 - RNA, 19 nt, synthetic construct
  misc_feature 1..19: note = siRNA antisense sequence
  source 1..19: mol_type = other RNA
ctatgaaaactgtcacaaa

SEQ ID NO: 45342 - RNA, 19 nt, synthetic construct
  misc_feature 1..19: note = siRNA sense sequence
  source 1..19: mol_type = other RNA
ttgtgacagttttcatagt

SEQ ID NO: 45343 - RNA, 19 nt, synthetic construct
  misc_feature 1..19: note = siRNA antisense sequence
  source 1..19: mol_type = other RNA
actatgaaaactgtcacaa

SEQ ID NO: 45344 - RNA, 19 nt, synthetic construct
  misc_feature 1..19: note = siRNA sense sequence
  source 1..19: mol_type = other RNA
tgtgacagttttcatagtg

SEQ ID NO: 45345 - RNA, 19 nt, synthetic construct
  misc_feature 1..19: note = siRNA antisense sequence
  source 1..19: mol_type = other RNA
cactatgaaaactgtcaca

SEQ ID NO: 45346 - RNA, 19 nt, synthetic construct
  misc_feature 1..19: note = siRNA sense sequence
  source 1..19: mol_type = other RNA
gtgacagttttcatagtga

SEQ ID NO: 45347 - RNA, 19 nt, synthetic construct
  misc_feature 1..19: note = siRNA antisense sequence
  source 1..19: mol_type = other RNA
tcactatgaaaactgtcac

SEQ ID NO: 45348 - RNA, 19 nt, synthetic construct
  misc_feature 1..19: note = siRNA sense sequence
  source 1..19: mol_type = other RNA
cagttttcatagtgatagg

SEQ ID NO: 45349 - RNA, 19 nt, synthetic construct
  misc_feature 1..19: note = siRNA antisense sequence
  source 1..19: mol_type = other RNA
cctatcactatgaaaactg

SEQ ID NO: 45350 - RNA, 19 nt, synthetic construct
  misc_feature 1..19: note = siRNA sense sequence
  source 1..19: mol_type = other RNA
ctcattgttttccaagatt

SEQ ID NO: 45351 - RNA, 19 nt, synthetic construct
  misc_feature 1..19: note = siRNA antisense sequence
  source 1..19: mol_type = other RNA
aatcttggaaaacaatgag

SEQ ID NO: 45352 - RNA, 19 nt, synthetic construct
  misc_feature 1..19: note = siRNA sense sequence
  source 1..19: mol_type = other RNA
tttccaagattatttgacc

SEQ ID NO: 45353 - RNA, 19 nt, synthetic construct
  misc_feature 1..19: note = siRNA antisense sequence
  source 1..19: mol_type = other RNA
ggtcaaataatcttggaaa

SEQ ID NO: 45354 - RNA, 19 nt, synthetic construct
  misc_feature 1..19: note = siRNA sense sequence
  source 1..19: mol_type = other RNA
ttccaagattatttgacca

SEQ ID NO: 45355 - RNA, 19 nt, synthetic construct
  misc_feature 1..19: note = siRNA antisense sequence
  source 1..19: mol_type = other RNA
tggtcaaataatcttggaa

SEQ ID NO: 45356 - RNA, 19 nt, synthetic construct
  misc_feature 1..19: note = siRNA sense sequence
  source 1..19: mol_type = other RNA
tccaagattatttgaccat

SEQ ID NO: 45357 - RNA, 19 nt, synthetic construct
  misc_feature 1..19: note = siRNA antisense sequence
  source 1..19: mol_type = other RNA
atggtcaaataatcttgga

SEQ ID NO: 45358 - RNA, 19 nt, synthetic construct
  misc_feature 1..19: note = siRNA sense sequence
  source 1..19: mol_type = other RNA
ccaagattatttgaccata

SEQ ID NO: 45359 - RNA, 19 nt, synthetic construct
  misc_feature 1..19: note = siRNA antisense sequence
  source 1..19: mol_type = other RNA
tatggtcaaataatcttgg

SEQ ID NO: 45360 - RNA, 19 nt, synthetic construct
  misc_feature 1..19: note = siRNA sense sequence
  source 1..19: mol_type = other RNA
caagattatttgaccatag

SEQ ID NO: 45361 - RNA, 19 nt, synthetic construct
  misc_feature 1..19: note = siRNA antisense sequence
  source 1..19: mol_type = other RNA
ctatggtcaaataatcttg

SEQ ID NO: 45362 - RNA, 19 nt, synthetic construct
  misc_feature 1..19: note = siRNA sense sequence
  source 1..19: mol_type = other RNA
aaaagtgagtggatatttg

SEQ ID NO: 45363 - RNA, 19 nt, synthetic construct
  misc_feature 1..19: note = siRNA antisense sequence
  source 1..19: mol_type = other RNA
caaatatccactcactttt

SEQ ID NO: 45364 - RNA, 19 nt, synthetic construct
  misc_feature 1..19: note = siRNA sense sequence
  source 1..19: mol_type = other RNA
aaagtgagtggatatttgt

SEQ ID NO: 45365 - RNA, 19 nt, synthetic construct
  misc_feature 1..19: note = siRNA antisense sequence
  source 1..19: mol_type = other RNA
acaaatatccactcacttt

SEQ ID NO: 45366 - RNA, 19 nt, synthetic construct
  misc_feature 1..19: note = siRNA sense sequence
  source 1..19: mol_type = other RNA
aagtgagtggatatttgtg

SEQ ID NO: 45367 - RNA, 19 nt, synthetic construct
  misc_feature 1..19: note = siRNA antisense sequence
  source 1..19: mol_type = other RNA
cacaaatatccactcactt

SEQ ID NO: 45368 - RNA, 19 nt, synthetic construct
  misc_feature 1..19: note = siRNA sense sequence
  source 1..19: mol_type = other RNA
agtgagtggatatttgtgt

SEQ ID NO: 45369 - RNA, 19 nt, synthetic construct
  misc_feature 1..19: note = siRNA antisense sequence
  source 1..19: mol_type = other RNA
acacaaatatccactcact

SEQ ID NO: 45370 - RNA, 19 nt, synthetic construct
  misc_feature 1..19: note = siRNA sense sequence
  source 1..19: mol_type = other RNA
gtgagtggatatttgtgtg

SEQ ID NO: 45371 - RNA, 19 nt, synthetic construct
  misc_feature 1..19: note = siRNA antisense sequence
  source 1..19: mol_type = other RNA
cacacaaatatccactcac

SEQ ID NO: 45372 - RNA, 19 nt, synthetic construct
  misc_feature 1..19: note = siRNA sense sequence
  source 1..19: mol_type = other RNA
tgagtggatatttgtgtgg

SEQ ID NO: 45373 - RNA, 19 nt, synthetic construct
  misc_feature 1..19: note = siRNA antisense sequence
  source 1..19: mol_type = other RNA
ccacacaaatatccactca

SEQ ID NO: 45374 - RNA, 19 nt, synthetic construct
  misc_feature 1..19: note = siRNA sense sequence
  source 1..19: mol_type = other RNA
ctcatatttaagtggaatg

SEQ ID NO: 45375 - RNA, 19 nt, synthetic construct
  misc_feature 1..19: note = siRNA antisense sequence
  source 1..19: mol_type = other RNA
cattccacttaaatatgag

SEQ ID NO: 45376 - RNA, 19 nt, synthetic construct
  misc_feature 1..19: note = siRNA sense sequence
  source 1..19: mol_type = other RNA
agtggaatgttctaataag

SEQ ID NO: 45377 - RNA, 19 nt, synthetic construct
  misc_feature 1..19: note = siRNA antisense sequence
  source 1..19: mol_type = other RNA
cttattagaacattccact

SEQ ID NO: 45378 - RNA, 19 nt, synthetic construct
  misc_feature 1..19: note = siRNA sense sequence
  source 1..19: mol_type = other RNA
gtggaatgttctaataagt

SEQ ID NO: 45379 - RNA, 19 nt, synthetic construct
  misc_feature 1..19: note = siRNA antisense sequence
  source 1..19: mol_type = other RNA
acttattagaacattccac

SEQ ID NO: 45380 - RNA, 19 nt, synthetic construct
  misc_feature 1..19: note = siRNA sense sequence
  source 1..19: mol_type = other RNA
tggaatgttctaataagtg

SEQ ID NO: 45381 - RNA, 19 nt, synthetic construct
  misc_feature 1..19: note = siRNA antisense sequence
  source 1..19: mol_type = other RNA
cacttattagaacattcca

SEQ ID NO: 45382 - RNA, 19 nt, synthetic construct
  misc_feature 1..19: note = siRNA sense sequence
  source 1..19: mol_type = other RNA
ggaatgttctaataagtgt

SEQ ID NO: 45383 - RNA, 19 nt, synthetic construct
  misc_feature 1..19: note = siRNA antisense sequence
  source 1..19: mol_type = other RNA
acacttattagaacattcc

SEQ ID NO: 45384 - RNA, 19 nt, synthetic construct
  misc_feature 1..19: note = siRNA sense sequence
  source 1..19: mol_type = other RNA
aacctcttgttcatgtaac

SEQ ID NO: 45385 - RNA, 19 nt, synthetic construct
  misc_feature 1..19: note = siRNA antisense sequence
  source 1..19: mol_type = other RNA
gttacatgaacaagaggtt

SEQ ID NO: 45386 - RNA, 19 nt, synthetic construct
  misc_feature 1..19: note = siRNA sense sequence
  source 1..19: mol_type = other RNA
attcatagccaattgtgta

SEQ ID NO: 45387 - RNA, 19 nt, synthetic construct
  misc_feature 1..19: note = siRNA antisense sequence
  source 1..19: mol_type = other RNA
tacacaattggctatgaat

SEQ ID NO: 45388 - RNA, 19 nt, synthetic construct
  misc_feature 1..19: note = siRNA sense sequence
  source 1..19: mol_type = other RNA
ttcatagccaattgtgtac

SEQ ID NO: 45389 - RNA, 19 nt, synthetic construct
  misc_feature 1..19: note = siRNA antisense sequence
  source 1..19: mol_type = other RNA
gtacacaattggctatgaa

SEQ ID NO: 45390 - RNA, 19 nt, synthetic construct
  misc_feature 1..19: note = siRNA sense sequence
  source 1..19: mol_type = other RNA
tcatagccaattgtgtacc

SEQ ID NO: 45391 - RNA, 19 nt, synthetic construct
  misc_feature 1..19: note = siRNA antisense sequence
  source 1..19: mol_type = other RNA
ggtacacaattggctatga

SEQ ID NO: 45392 - RNA, 19 nt, synthetic construct
  misc_feature 1..19: note = siRNA sense sequence
  source 1..19: mol_type = other RNA
catagccaattgtgtacct

SEQ ID NO: 45393 - RNA, 19 nt, synthetic construct
  misc_feature 1..19: note = siRNA antisense sequence
  source 1..19: mol_type = other RNA
aggtacacaattggctatg

SEQ ID NO: 45394 - RNA, 19 nt, synthetic construct
  misc_feature 1..19: note = siRNA sense sequence
  source 1..19: mol_type = other RNA
atagccaattgtgtacctg

SEQ ID NO: 45395 - RNA, 19 nt, synthetic construct
  misc_feature 1..19: note = siRNA antisense sequence
  source 1..19: mol_type = other RNA
caggtacacaattggctat

SEQ ID NO: 45396 - RNA, 19 nt, synthetic construct
  misc_feature 1..19: note = siRNA sense sequence
  source 1..19: mol_type = other RNA
tagccaattgtgtacctga

SEQ ID NO: 45397 - RNA, 19 nt, synthetic construct
  misc_feature 1..19: note = siRNA antisense sequence
  source 1..19: mol_type = other RNA
tcaggtacacaattggcta

SEQ ID NO: 45398 - RNA, 19 nt, synthetic construct
  misc_feature 1..19: note = siRNA sense sequence
  source 1..19: mol_type = other RNA
gccaattgtgtacctgatg

SEQ ID NO: 45399 - RNA, 19 nt, synthetic construct
  misc_feature 1..19: note = siRNA antisense sequence
  source 1..19: mol_type = other RNA
catcaggtacacaattggc

SEQ ID NO: 45400 - RNA, 19 nt, synthetic construct
  misc_feature 1..19: note = siRNA sense sequence
  source 1..19: mol_type = other RNA
ccaattgtgtacctgatgt

SEQ ID NO: 45401 - RNA, 19 nt, synthetic construct
  misc_feature 1..19: note = siRNA antisense sequence
  source 1..19: mol_type = other RNA
acatcaggtacacaattgg

SEQ ID NO: 45402 - RNA, 19 nt, synthetic construct
  misc_feature 1..19: note = siRNA sense sequence
  source 1..19: mol_type = other RNA
caattgtgtacctgatgta

SEQ ID NO: 45403 - RNA, 19 nt, synthetic construct
  misc_feature 1..19: note = siRNA antisense sequence
  source 1..19: mol_type = other RNA
tacatcaggtacacaattg

SEQ ID NO: 45404 - RNA, 19 nt, synthetic construct
  misc_feature 1..19: note = siRNA sense sequence
  source 1..19: mol_type = other RNA
aattgtgtacctgatgtat

SEQ ID NO: 45405 - RNA, 19 nt, synthetic construct
  misc_feature 1..19: note = siRNA antisense sequence
  source 1..19: mol_type = other RNA
atacatcaggtacacaatt

SEQ ID NO: 45406 - RNA, 19 nt, synthetic construct
  misc_feature 1..19: note = siRNA sense sequence
  source 1..19: mol_type = other RNA
attgtgtacctgatgtatg

SEQ ID NO: 45407 - RNA, 19 nt, synthetic construct
  misc_feature 1..19: note = siRNA antisense sequence
  source 1..19: mol_type = other RNA
catacatcaggtacacaat

SEQ ID NO: 45408 - RNA, 19 nt, synthetic construct
  misc_feature 1..19: note = siRNA sense sequence
  source 1..19: mol_type = other RNA
ttgtgtacctgatgtatgc

SEQ ID NO: 45409 - RNA, 19 nt, synthetic construct
  misc_feature 1..19: note = siRNA antisense sequence
  source 1..19: mol_type = other RNA
gcatacatcaggtacacaa

SEQ ID NO: 45410 - RNA, 19 nt, synthetic construct
  misc_feature 1..19: note = siRNA sense sequence
  source 1..19: mol_type = other RNA
tgtgtacctgatgtatgcc

SEQ ID NO: 45411 - RNA, 19 nt, synthetic construct
  misc_feature 1..19: note = siRNA antisense sequence
  source 1..19: mol_type = other RNA
ggcatacatcaggtacaca

SEQ ID NO: 45412 - RNA, 19 nt, synthetic construct
  misc_feature 1..19: note = siRNA sense sequence
  source 1..19: mol_type = other RNA
gtgtacctgatgtatgcca

SEQ ID NO: 45413 - RNA, 19 nt, synthetic construct
  misc_feature 1..19: note = siRNA antisense sequence
  source 1..19: mol_type = other RNA
tggcatacatcaggtacac

SEQ ID NO: 45414 - RNA, 19 nt, synthetic construct
  misc_feature 1..19: note = siRNA sense sequence
  source 1..19: mol_type = other RNA
tagcctgaatcagccttta

SEQ ID NO: 45415 - RNA, 19 nt, synthetic construct
  misc_feature 1..19: note = siRNA antisense sequence
  source 1..19: mol_type = other RNA
taaaggctgattcaggcta

SEQ ID NO: 45416 - RNA, 19 nt, synthetic construct
  misc_feature 1..19: note = siRNA sense sequence
  source 1..19: mol_type = other RNA
agcctgaatcagcctttag

SEQ ID NO: 45417 - RNA, 19 nt, synthetic construct
  misc_feature 1..19: note = siRNA antisense sequence
  source 1..19: mol_type = other RNA
ctaaaggctgattcaggct

SEQ ID NO: 45418 - RNA, 19 nt, synthetic construct
  misc_feature 1..19: note = siRNA sense sequence
  source 1..19: mol_type = other RNA
gcctgaatcagcctttagg

SEQ ID NO: 45419 - RNA, 19 nt, synthetic construct
  misc_feature 1..19: note = siRNA antisense sequence
  source 1..19: mol_type = other RNA
cctaaaggctgattcaggc

SEQ ID NO: 45420 - RNA, 19 nt, synthetic construct
  misc_feature 1..19: note = siRNA sense sequence
  source 1..19: mol_type = other RNA
cctgaatcagcctttaggt

SEQ ID NO: 45421 - RNA, 19 nt, synthetic construct
  misc_feature 1..19: note = siRNA antisense sequence
  source 1..19: mol_type = other RNA
acctaaaggctgattcagg

SEQ ID NO: 45422 - RNA, 19 nt, synthetic construct
  misc_feature 1..19: note = siRNA sense sequence
  source 1..19: mol_type = other RNA
ctgaatcagcctttaggtc

SEQ ID NO: 45423 - RNA, 19 nt, synthetic construct
  misc_feature 1..19: note = siRNA antisense sequence
  source 1..19: mol_type = other RNA
gacctaaaggctgattcag

SEQ ID NO: 45424 - RNA, 19 nt, synthetic construct
  misc_feature 1..19: note = siRNA sense sequence
  source 1..19: mol_type = other RNA
gaatcagcctttaggtctc

SEQ ID NO: 45425 - RNA, 19 nt, synthetic construct
  misc_feature 1..19: note = siRNA antisense sequence
  source 1..19: mol_type = other RNA
gagacctaaaggctgattc

SEQ ID NO: 45426 - RNA, 19 nt, synthetic construct
  misc_feature 1..19: note = siRNA sense sequence
  source 1..19: mol_type = other RNA
aatcagcctttaggtctct

SEQ ID NO: 45427 - RNA, 19 nt, synthetic construct
  misc_feature 1..19: note = siRNA antisense sequence
  source 1..19: mol_type = other RNA
agagacctaaaggctgatt

SEQ ID NO: 45428 - RNA, 19 nt, synthetic construct
  misc_feature 1..19: note = siRNA sense sequence
  source 1..19: mol_type = other RNA
atcagcctttaggtctctt

SEQ ID NO: 45429 - RNA, 19 nt, synthetic construct
  misc_feature 1..19: note = siRNA antisense sequence
  source 1..19: mol_type = other RNA
aagagacctaaaggctgat

SEQ ID NO: 45430 - RNA, 19 nt, synthetic construct
  misc_feature 1..19: note = siRNA sense sequence
  source 1..19: mol_type = other RNA
tcagcctttaggtctcttt

SEQ ID NO: 45431 - RNA, 19 nt, synthetic construct
  misc_feature 1..19: note = siRNA antisense sequence
  source 1..19: mol_type = other RNA
aaagagacctaaaggctga

SEQ ID NO: 45432 - RNA, 19 nt, synthetic construct
  misc_feature 1..19: note = siRNA sense sequence
  source 1..19: mol_type = other RNA
cagcctttaggtctctttg

SEQ ID NO: 45433 - RNA, 19 nt, synthetic construct
  misc_feature 1..19: note = siRNA antisense sequence
  source 1..19: mol_type = other RNA
caaagagacctaaaggctg

SEQ ID NO: 45434 - RNA, 19 nt, synthetic construct
  misc_feature 1..19: note = siRNA sense sequence
  source 1..19: mol_type = other RNA
agcctttaggtctctttgg

SEQ ID NO: 45435 - RNA, 19 nt, synthetic construct
  misc_feature 1..19: note = siRNA antisense sequence
  source 1..19: mol_type = other RNA
ccaaagagacctaaaggct

SEQ ID NO: 45436 - RNA, 19 nt, synthetic construct
  misc_feature 1..19: note = siRNA sense sequence
  source 1..19: mol_type = other RNA
gcctttaggtctctttggc

SEQ ID NO: 45437 - RNA, 19 nt, synthetic construct
  misc_feature 1..19: note = siRNA antisense sequence
  source 1..19: mol_type = other RNA
gccaaagagacctaaaggc

SEQ ID NO: 45438 - RNA, 19 nt, synthetic construct
  misc_feature 1..19: note = siRNA sense sequence
  source 1..19: mol_type = other RNA
cctttaggtctctttggcc

SEQ ID NO: 45439 - RNA, 19 nt, synthetic construct
  misc_feature 1..19: note = siRNA antisense sequence
  source 1..19: mol_type = other RNA
ggccaaagagacctaaagg

SEQ ID NO: 45440 - RNA, 19 nt, synthetic construct
  misc_feature 1..19: note = siRNA sense sequence
  source 1..19: mol_type = other RNA
ctttaggtctctttggcct

SEQ ID NO: 45441 - RNA, 19 nt, synthetic construct
  misc_feature 1..19: note = siRNA antisense sequence
  source 1..19: mol_type = other RNA
aggccaaagagacctaaag

SEQ ID NO: 45442 - RNA, 19 nt, synthetic construct
  misc_feature 1..19: note = siRNA sense sequence
  source 1..19: mol_type = other RNA
tttaggtctctttggcctt

SEQ ID NO: 45443 - RNA, 19 nt, synthetic construct
  misc_feature 1..19: note = siRNA antisense sequence
  source 1..19: mol_type = other RNA
aaggccaaagagacctaaa

SEQ ID NO: 45444 - RNA, 19 nt, synthetic construct
  misc_feature 1..19: note = siRNA sense sequence
  source 1..19: mol_type = other RNA
ttaggtctctttggccttg

SEQ ID NO: 45445 - RNA, 19 nt, synthetic construct
  misc_feature 1..19: note = siRNA antisense sequence
  source 1..19: mol_type = other RNA
caaggccaaagagacctaa

SEQ ID NO: 45446 - RNA, 19 nt, synthetic construct
  misc_feature 1..19: note = siRNA sense sequence
  source 1..19: mol_type = other RNA
taggtctctttggccttgg

SEQ ID NO: 45447 - RNA, 19 nt, synthetic construct
  misc_feature 1..19: note = siRNA antisense sequence
  source 1..19: mol_type = other RNA
ccaaggccaaagagaccta

SEQ ID NO: 45448 - RNA, 19 nt, synthetic construct
  misc_feature 1..19: note = siRNA sense sequence
  source 1..19: mol_type = other RNA
ggtctctttggccttggat

SEQ ID NO: 45449 - RNA, 19 nt, synthetic construct
  misc_feature 1..19: note = siRNA antisense sequence
  source 1..19: mol_type = other RNA
atccaaggccaaagagacc

SEQ ID NO: 45450 - RNA, 19 nt, synthetic construct
  misc_feature 1..19: note = siRNA sense sequence
  source 1..19: mol_type = other RNA
gtctctttggccttggatt

SEQ ID NO: 45451 - RNA, 19 nt, synthetic construct
  misc_feature 1..19: note = siRNA antisense sequence
  source 1..19: mol_type = other RNA
aatccaaggccaaagagac

SEQ ID NO: 45452 - RNA, 19 nt, synthetic construct
  misc_feature 1..19: note = siRNA sense sequence
  source 1..19: mol_type = other RNA
tctctttggccttggattg

SEQ ID NO: 45453 - RNA, 19 nt, synthetic construct
  misc_feature 1..19: note = siRNA antisense sequence
  source 1..19: mol_type = other RNA
caatccaaggccaaagaga

SEQ ID NO: 45454 - RNA, 19 nt, synthetic construct
  misc_feature 1..19: note = siRNA sense sequence
  source 1..19: mol_type = other RNA
ctctttggccttggattgt

SEQ ID NO: 45455 - RNA, 19 nt, synthetic construct
  misc_feature 1..19: note = siRNA antisense sequence
  source 1..19: mol_type = other RNA
acaatccaaggccaaagag

SEQ ID NO: 45456 - RNA, 19 nt, synthetic construct
  misc_feature 1..19: note = siRNA sense sequence
  source 1..19: mol_type = other RNA
tctttggccttggattgta

SEQ ID NO: 45457 - RNA, 19 nt, synthetic construct
  misc_feature 1..19: note = siRNA antisense sequence
  source 1..19: mol_type = other RNA
tacaatccaaggccaaaga

SEQ ID NO: 45458 - RNA, 19 nt, synthetic construct
  misc_feature 1..19: note = siRNA sense sequence
  source 1..19: mol_type = other RNA
ctttggccttggattgtaa

SEQ ID NO: 45459 - RNA, 19 nt, synthetic construct
  misc_feature 1..19: note = siRNA antisense sequence
  source 1..19: mol_type = other RNA
ttacaatccaaggccaaag

SEQ ID NO: 45460 - RNA, 19 nt, synthetic construct
  misc_feature 1..19: note = siRNA sense sequence
  source 1..19: mol_type = other RNA
tttggccttggattgtaat

SEQ ID NO: 45461 - RNA, 19 nt, synthetic construct
  misc_feature 1..19: note = siRNA antisense sequence
  source 1..19: mol_type = other RNA
attacaatccaaggccaaa

SEQ ID NO: 45462 - RNA, 19 nt, synthetic construct
  misc_feature 1..19: note = siRNA sense sequence
  source 1..19: mol_type = other RNA
ttggccttggattgtaatt

SEQ ID NO: 45463 - RNA, 19 nt, synthetic construct
  misc_feature 1..19: note = siRNA antisense sequence
  source 1..19: mol_type = other RNA
aattacaatccaaggccaa

SEQ ID NO: 45464 - RNA, 19 nt, synthetic construct
  misc_feature 1..19: note = siRNA sense sequence
  source 1..19: mol_type = other RNA
tggccttggattgtaatta

SEQ ID NO: 45465 - RNA, 19 nt, synthetic construct
  misc_feature 1..19: note = siRNA antisense sequence
  source 1..19: mol_type = other RNA
taattacaatccaaggcca

SEQ ID NO: 45466 - RNA, 19 nt, synthetic construct
  misc_feature 1..19: note = siRNA sense sequence
  source 1..19: mol_type = other RNA
ggccttggattgtaattat

SEQ ID NO: 45467 - RNA, 19 nt, synthetic construct
  misc_feature 1..19: note = siRNA antisense sequence
  source 1..19: mol_type = other RNA
ataattacaatccaaggcc

SEQ ID NO: 45468 - RNA, 19 nt, synthetic construct
  misc_feature 1..19: note = siRNA sense sequence
  source 1..19: mol_type = other RNA
ttgtaattatctacccatc

SEQ ID NO: 45469 - RNA, 19 nt, synthetic construct
  misc_feature 1..19: note = siRNA antisense sequence
  source 1..19: mol_type = other RNA
gatgggtagataattacaa

SEQ ID NO: 45470 - RNA, 19 nt, synthetic construct
  misc_feature 1..19: note = siRNA sense sequence
  source 1..19: mol_type = other RNA
tgtaattatctacccatct

SEQ ID NO: 45471 - RNA, 19 nt, synthetic construct
  misc_feature 1..19: note = siRNA antisense sequence
  source 1..19: mol_type = other RNA
agatgggtagataattaca

SEQ ID NO: 45472 - RNA, 19 nt, synthetic construct
  misc_feature 1..19: note = siRNA sense sequence
  source 1..19: mol_type = other RNA
gtaattatctacccatcta

SEQ ID NO: 45473 - RNA, 19 nt, synthetic construct
  misc_feature 1..19: note = siRNA antisense sequence
  source 1..19: mol_type = other RNA
tagatgggtagataattac

SEQ ID NO: 45474 - RNA, 19 nt, synthetic construct
  misc_feature 1..19: note = siRNA sense sequence
  source 1..19: mol_type = other RNA
tgttctacttaatcaagag

SEQ ID NO: 45475 - RNA, 19 nt, synthetic construct
  misc_feature 1..19: note = siRNA antisense sequence
  source 1..19: mol_type = other RNA
ctcttgattaagtagaaca

SEQ ID NO: 45476 - RNA, 19 nt, synthetic construct
  misc_feature 1..19: note = siRNA sense sequence
  source 1..19: mol_type = other RNA
gttctacttaatcaagagg

SEQ ID NO: 45477 - RNA, 19 nt, synthetic construct
  misc_feature 1..19: note = siRNA antisense sequence
  source 1..19: mol_type = other RNA
cctcttgattaagtagaac

SEQ ID NO: 45478 - RNA, 19 nt, synthetic construct
  misc_feature 1..19: note = siRNA sense sequence
  source 1..19: mol_type = other RNA
ttctacttaatcaagaggt

SEQ ID NO: 45479 - RNA, 19 nt, synthetic construct
  misc_feature 1..19: note = siRNA antisense sequence
  source 1..19: mol_type = other RNA
acctcttgattaagtagaa

SEQ ID NO: 45480 - RNA, 19 nt, synthetic construct
  misc_feature 1..19: note = siRNA sense sequence
  source 1..19: mol_type = other RNA
tctacttaatcaagaggtt

SEQ ID NO: 45481 - RNA, 19 nt, synthetic construct
  misc_feature 1..19: note = siRNA antisense sequence
  source 1..19: mol_type = other RNA
aacctcttgattaagtaga

SEQ ID NO: 45482 - RNA, 19 nt, synthetic construct
  misc_feature 1..19: note = siRNA sense sequence
  source 1..19: mol_type = other RNA
ctacttaatcaagaggttt

SEQ ID NO: 45483 - RNA, 19 nt, synthetic construct
  misc_feature 1..19: note = siRNA antisense sequence
  source 1..19: mol_type = other RNA
aaacctcttgattaagtag

SEQ ID NO: 45484 - RNA, 19 nt, synthetic construct
  misc_feature 1..19: note = siRNA sense sequence
  source 1..19: mol_type = other RNA
cccaggaggtaaatgtatc

SEQ ID NO: 45485 - RNA, 19 nt, synthetic construct
  misc_feature 1..19: note = siRNA antisense sequence
  source 1..19: mol_type = other RNA
gatacatttacctcctggg

SEQ ID NO: 45486 - RNA, 19 nt, synthetic construct
  misc_feature 1..19: note = siRNA sense sequence
  source 1..19: mol_type = other RNA
ccaggaggtaaatgtatcc

SEQ ID NO: 45487 - RNA, 19 nt, synthetic construct
  misc_feature 1..19: note = siRNA antisense sequence
  source 1..19: mol_type = other RNA
ggatacatttacctcctgg

SEQ ID NO: 45488 - RNA, 19 nt, synthetic construct
  misc_feature 1..19: note = siRNA sense sequence
  source 1..19: mol_type = other RNA
ggaggtaaatgtatccttt

SEQ ID NO: 45489 - RNA, 19 nt, synthetic construct
  misc_feature 1..19: note = siRNA antisense sequence
  source 1..19: mol_type = other RNA
aaaggatacatttacctcc

SEQ ID NO: 45490 - RNA, 19 nt, synthetic construct
  misc_feature 1..19: note = siRNA sense sequence
  source 1..19: mol_type = other RNA
taaatgtatcctttccagt

SEQ ID NO: 45491 - RNA, 19 nt, synthetic construct
  misc_feature 1..19: note = siRNA antisense sequence
  source 1..19: mol_type = other RNA
actggaaaggatacattta

SEQ ID NO: 45492 - RNA, 19 nt, synthetic construct
  misc_feature 1..19: note = siRNA sense sequence
  source 1..19: mol_type = other RNA
aatgtatcctttccagttg

SEQ ID NO: 45493 - RNA, 19 nt, synthetic construct
  misc_feature 1..19: note = siRNA antisense sequence
  source 1..19: mol_type = other RNA
caactggaaaggatacatt

SEQ ID NO: 45494 - RNA, 19 nt, synthetic construct
  misc_feature 1..19: note = siRNA sense sequence
  source 1..19: mol_type = other RNA
atgtatcctttccagttgt

SEQ ID NO: 45495 - RNA, 19 nt, synthetic construct
  misc_feature 1..19: note = siRNA antisense sequence
  source 1..19: mol_type = other RNA
acaactggaaaggatacat

SEQ ID NO: 45496 - RNA, 19 nt, synthetic construct
  misc_feature 1..19: note = siRNA sense sequence
  source 1..19: mol_type = other RNA
atcctttccagttgtctct

SEQ ID NO: 45497 - RNA, 19 nt, synthetic construct
  misc_feature 1..19: note = siRNA antisense sequence
  source 1..19: mol_type = other RNA
agagacaactggaaaggat

SEQ ID NO: 45498 - RNA, 19 nt, synthetic construct
  misc_feature 1..19: note = siRNA sense sequence
  source 1..19: mol_type = other RNA
ctttccagttgtctctgaa

SEQ ID NO: 45499 - RNA, 19 nt, synthetic construct
  misc_feature 1..19: note = siRNA antisense sequence
  source 1..19: mol_type = other RNA
ttcagagacaactggaaag

SEQ ID NO: 45500 - RNA, 19 nt, synthetic construct
  misc_feature 1..19: note = siRNA sense sequence
  source 1..19: mol_type = other RNA
ggaattttccttctgcatg

SEQ ID NO: 45501 - RNA, 19 nt, synthetic construct
  misc_feature 1..19: note = siRNA antisense sequence
  source 1..19: mol_type = other RNA
catgcagaaggaaaattcc

SEQ ID NO: 45502 - RNA, 19 nt, synthetic construct
  misc_feature 1..19: note = siRNA sense sequence
  source 1..19: mol_type = other RNA
gaattttccttctgcatgt

SEQ ID NO: 45503 - RNA, 19 nt, synthetic construct
  misc_feature 1..19: note = siRNA antisense sequence
  source 1..19: mol_type = other RNA
acatgcagaaggaaaattc

SEQ ID NO: 45504 - RNA, 19 nt, synthetic construct
  misc_feature 1..19: note = siRNA sense sequence
  source 1..19: mol_type = other RNA
aattttccttctgcatgtg

SEQ ID NO: 45505 - RNA, 19 nt, synthetic construct
  misc_feature 1..19: note = siRNA antisense sequence
  source 1..19: mol_type = other RNA
cacatgcagaaggaaaatt

SEQ ID NO: 45506 - RNA, 19 nt, synthetic construct
  misc_feature 1..19: note = siRNA sense sequence
  source 1..19: mol_type = other RNA
ttccttctgcatgtgactc

SEQ ID NO: 45507 - RNA, 19 nt, synthetic construct
  misc_feature 1..19: note = siRNA antisense sequence
  source 1..19: mol_type = other RNA
gagtcacatgcagaaggaa

SEQ ID NO: 45508 - RNA, 19 nt, synthetic construct
  misc_feature 1..19: note = siRNA sense sequence
  source 1..19: mol_type = other RNA
tccttctgcatgtgactcc

SEQ ID NO: 45509 - RNA, 19 nt, synthetic construct
  misc_feature 1..19: note = siRNA antisense sequence
  source 1..19: mol_type = other RNA
ggagtcacatgcagaagga

SEQ ID NO: 45510 - RNA, 19 nt, synthetic construct
  misc_feature 1..19: note = siRNA sense sequence
  source 1..19: mol_type = other RNA
ttctgcatgtgactcctta

SEQ ID NO: 45511 - RNA, 19 nt, synthetic construct
  misc_feature 1..19: note = siRNA antisense sequence
  source 1..19: mol_type = other RNA
taaggagtcacatgcagaa

SEQ ID NO: 45512 - RNA, 19 nt, synthetic construct
  misc_feature 1..19: note = siRNA sense sequence
  source 1..19: mol_type = other RNA
tctgcatgtgactccttat

SEQ ID NO: 45513 - RNA, 19 nt, synthetic construct
  misc_feature 1..19: note = siRNA antisense sequence
  source 1..19: mol_type = other RNA
ataaggagtcacatgcaga

SEQ ID NO: 45514 - RNA, 19 nt, synthetic construct
  misc_feature 1..19: note = siRNA sense sequence
  source 1..19: mol_type = other RNA
ctgcatgtgactccttatc

SEQ ID NO: 45515 - RNA, 19 nt, synthetic construct
  misc_feature 1..19: note = siRNA antisense sequence
  source 1..19: mol_type = other RNA
gataaggagtcacatgcag

SEQ ID NO: 45516 - RNA, 19 nt, synthetic construct
  misc_feature 1..19: note = siRNA sense sequence
  source 1..19: mol_type = other RNA
tgcatgtgactccttatcc

SEQ ID NO: 45517 - RNA, 19 nt, synthetic construct
  misc_feature 1..19: note = siRNA antisense sequence
  source 1..19: mol_type = other RNA
ggataaggagtcacatgca

SEQ ID NO: 45518 - RNA, 19 nt, synthetic construct
  misc_feature 1..19: note = siRNA sense sequence
  source 1..19: mol_type = other RNA
gcatgtgactccttatccc

SEQ ID NO: 45519 - RNA, 19 nt, synthetic construct
  misc_feature 1..19: note = siRNA antisense sequence
  source 1..19: mol_type = other RNA
gggataaggagtcacatgc

SEQ ID NO: 45520 - RNA, 19 nt, synthetic construct
  misc_feature 1..19: note = siRNA sense sequence
  source 1..19: mol_type = other RNA
tactcttttactgatacca

SEQ ID NO: 45521 - RNA, 19 nt, synthetic construct
  misc_feature 1..19: note = siRNA antisense sequence
  source 1..19: mol_type = other RNA
tggtatcagtaaaagagta

SEQ ID NO: 45522 - RNA, 19 nt, synthetic construct
  misc_feature 1..19: note = siRNA sense sequence
  source 1..19: mol_type = other RNA
actcttttactgataccac

SEQ ID NO: 45523 - RNA, 19 nt, synthetic construct
  misc_feature 1..19: note = siRNA antisense sequence
  source 1..19: mol_type = other RNA
gtggtatcagtaaaagagt

SEQ ID NO: 45524 - RNA, 19 nt, synthetic construct
  misc_feature 1..19: note = siRNA sense sequence
  source 1..19: mol_type = other RNA
tagctgtcatccctgcata

SEQ ID NO: 45525 - RNA, 19 nt, synthetic construct
  misc_feature 1..19: note = siRNA antisense sequence
  source 1..19: mol_type = other RNA
tatgcagggatgacagcta

SEQ ID NO: 45526 - RNA, 19 nt, synthetic construct
  misc_feature 1..19: note = siRNA sense sequence
  source 1..19: mol_type = other RNA
agctgtcatccctgcatac

SEQ ID NO: 45527 - RNA, 19 nt, synthetic construct
  misc_feature 1..19: note = siRNA antisense sequence
  source 1..19: mol_type = other RNA
gtatgcagggatgacagct

SEQ ID NO: 45528 - RNA, 19 nt, synthetic construct
  misc_feature 1..19: note = siRNA sense sequence
  source 1..19: mol_type = other RNA
gctgtcatccctgcatacc

SEQ ID NO: 45529 - RNA, 19 nt, synthetic construct
  misc_feature 1..19: note = siRNA antisense sequence
  source 1..19: mol_type = other RNA
ggtatgcagggatgacagc

SEQ ID NO: 45530 - RNA, 19 nt, synthetic construct
  misc_feature 1..19: note = siRNA sense sequence
  source 1..19: mol_type = other RNA
tgtcatccctgcataccca

SEQ ID NO: 45531 - RNA, 19 nt, synthetic construct
  misc_feature 1..19: note = siRNA antisense sequence
  source 1..19: mol_type = other RNA
tgggtatgcagggatgaca

SEQ ID NO: 45532 - RNA, 19 nt, synthetic construct
  misc_feature 1..19: note = siRNA sense sequence
  source 1..19: mol_type = other RNA
gtcatccctgcatacccat

SEQ ID NO: 45533 - RNA, 19 nt, synthetic construct
  misc_feature 1..19: note = siRNA antisense sequence
  source 1..19: mol_type = other RNA
atgggtatgcagggatgac

SEQ ID NO: 45534 - RNA, 19 nt, synthetic construct
  misc_feature 1..19: note = siRNA sense sequence
  source 1..19: mol_type = other RNA
tcatccctgcatacccatt

SEQ ID NO: 45535 - RNA, 19 nt, synthetic construct
  misc_feature 1..19: note = siRNA antisense sequence
  source 1..19: mol_type = other RNA
aatgggtatgcagggatga

SEQ ID NO: 45536 - RNA, 19 nt, synthetic construct
  misc_feature 1..19: note = siRNA sense sequence
  source 1..19: mol_type = other RNA
catccctgcatacccattt

SEQ ID NO: 45537 - RNA, 19 nt, synthetic construct
  misc_feature 1..19: note = siRNA antisense sequence
  source 1..19: mol_type = other RNA
aaatgggtatgcagggatg

SEQ ID NO: 45538 - RNA, 19 nt, synthetic construct
  misc_feature 1..19: note = siRNA sense sequence
  source 1..19: mol_type = other RNA
atccctgcatacccatttc

SEQ ID NO: 45539 - RNA, 19 nt, synthetic construct
  misc_feature 1..19: note = siRNA antisense sequence
  source 1..19: mol_type = other RNA
gaaatgggtatgcagggat

SEQ ID NO: 45540 - RNA, 19 nt, synthetic construct
  misc_feature 1..19: note = siRNA sense sequence
  source 1..19: mol_type = other RNA
tccctgcatacccatttct

SEQ ID NO: 45541 - RNA, 19 nt, synthetic construct
  misc_feature 1..19: note = siRNA antisense sequence
  source 1..19: mol_type = other RNA
agaaatgggtatgcaggga

SEQ ID NO: 45542 - RNA, 19 nt, synthetic construct
  misc_feature 1..19: note = siRNA sense sequence
  source 1..19: mol_type = other RNA
ccctgcatacccatttcta

SEQ ID NO: 45543 - RNA, 19 nt, synthetic construct
  misc_feature 1..19: note = siRNA antisense sequence
  source 1..19: mol_type = other RNA
tagaaatgggtatgcaggg

SEQ ID NO: 45544 - RNA, 19 nt, synthetic construct
  misc_feature 1..19: note = siRNA sense sequence
  source 1..19: mol_type = other RNA
cctgcatacccatttctat

SEQ ID NO: 45545 - RNA, 19 nt, synthetic construct
  misc_feature 1..19: note = siRNA antisense sequence
  source 1..19: mol_type = other RNA
atagaaatgggtatgcagg

SEQ ID NO: 45546 - RNA, 19 nt, synthetic construct
  misc_feature 1..19: note = siRNA sense sequence
  source 1..19: mol_type = other RNA
ctgcatacccatttctatt

SEQ ID NO: 45547 - RNA, 19 nt, synthetic construct
  misc_feature 1..19: note = siRNA antisense sequence
  source 1..19: mol_type = other RNA
aatagaaatgggtatgcag

SEQ ID NO: 45548 - RNA, 19 nt, synthetic construct
  misc_feature 1..19: note = siRNA sense sequence
  source 1..19: mol_type = other RNA
tgcatacccatttctattc

SEQ ID NO: 45549 - RNA, 19 nt, synthetic construct
  misc_feature 1..19: note = siRNA antisense sequence
  source 1..19: mol_type = other RNA
gaatagaaatgggtatgca

SEQ ID NO: 45550 - RNA, 19 nt, synthetic construct
  misc_feature 1..19: note = siRNA sense sequence
  source 1..19: mol_type = other RNA
gcatacccatttctattca

SEQ ID NO: 45551 - RNA, 19 nt, synthetic construct
  misc_feature 1..19: note = siRNA antisense sequence
  source 1..19: mol_type = other RNA
tgaatagaaatgggtatgc

SEQ ID NO: 45552 - RNA, 19 nt, synthetic construct
  misc_feature 1..19: note = siRNA sense sequence
  source 1..19: mol_type = other RNA
atacccatttctattcatc

SEQ ID NO: 45553 - RNA, 19 nt, synthetic construct
  misc_feature 1..19: note = siRNA antisense sequence
  source 1..19: mol_type = other RNA
gatgaatagaaatgggtat

SEQ ID NO: 45554 - RNA, 19 nt, synthetic construct
  misc_feature 1..19: note = siRNA sense sequence
  source 1..19: mol_type = other RNA
tacccatttctattcatca

SEQ ID NO: 45555 - RNA, 19 nt, synthetic construct
  misc_feature 1..19: note = siRNA antisense sequence
  source 1..19: mol_type = other RNA
tgatgaatagaaatgggta

SEQ ID NO: 45556 - RNA, 19 nt, synthetic construct
  misc_feature 1..19: note = siRNA sense sequence
  source 1..19: mol_type = other RNA
acccatttctattcatcaa

SEQ ID NO: 45557 - RNA, 19 nt, synthetic construct
  misc_feature 1..19: note = siRNA antisense sequence
  source 1..19: mol_type = other RNA
ttgatgaatagaaatgggt

SEQ ID NO: 45558 - RNA, 19 nt, synthetic construct
  misc_feature 1..19: note = siRNA sense sequence
  source 1..19: mol_type = other RNA
ctattcatcaaaatgccta

SEQ ID NO: 45559 - RNA, 19 nt, synthetic construct
  misc_feature 1..19: note = siRNA antisense sequence
  source 1..19: mol_type = other RNA
taggcattttgatgaatag

SEQ ID NO: 45560 - RNA, 19 nt, synthetic construct
  misc_feature 1..19: note = siRNA sense sequence
  source 1..19: mol_type = other RNA
tattcatcaaaatgcctag

SEQ ID NO: 45561 - RNA, 19 nt, synthetic construct
  misc_feature 1..19: note = siRNA antisense sequence
  source 1..19: mol_type = other RNA
ctaggcattttgatgaata

SEQ ID NO: 45562 - RNA, 19 nt, synthetic construct
  misc_feature 1..19: note = siRNA sense sequence
  source 1..19: mol_type = other RNA
ttcatcaaaatgcctagga

SEQ ID NO: 45563 - RNA, 19 nt, synthetic construct
  misc_feature 1..19: note = siRNA antisense sequence
  source 1..19: mol_type = other RNA
tcctaggcattttgatgaa

SEQ ID NO: 45564 - RNA, 19 nt, synthetic construct
  misc_feature 1..19: note = siRNA sense sequence
  source 1..19: mol_type = other RNA
aatgcctaggatatttcca

SEQ ID NO: 45565 - RNA, 19 nt, synthetic construct
  misc_feature 1..19: note = siRNA antisense sequence
  source 1..19: mol_type = other RNA
tggaaatatcctaggcatt

SEQ ID NO: 45566 - RNA, 19 nt, synthetic construct
  misc_feature 1..19: note = siRNA sense sequence
  source 1..19: mol_type = other RNA
atgcctaggatatttccac

SEQ ID NO: 45567 - RNA, 19 nt, synthetic construct
  misc_feature 1..19: note = siRNA antisense sequence
  source 1..19: mol_type = other RNA
gtggaaatatcctaggcat

SEQ ID NO: 45568 - RNA, 19 nt, synthetic construct
  misc_feature 1..19: note = siRNA sense sequence
  source 1..19: mol_type = other RNA
tgcctaggatatttccacc

SEQ ID NO: 45569 - RNA, 19 nt, synthetic construct
  misc_feature 1..19: note = siRNA antisense sequence
  source 1..19: mol_type = other RNA
ggtggaaatatcctaggca

SEQ ID NO: 45570 - RNA, 19 nt, synthetic construct
  misc_feature 1..19: note = siRNA sense sequence
  source 1..19: mol_type = other RNA
gcctaggatatttccacct

SEQ ID NO: 45571 - RNA, 19 nt, synthetic construct
  misc_feature 1..19: note = siRNA antisense sequence
  source 1..19: mol_type = other RNA
aggtggaaatatcctaggc

SEQ ID NO: 45572 - RNA, 19 nt, synthetic construct
  misc_feature 1..19: note = siRNA sense sequence
  source 1..19: mol_type = other RNA
cctaggatatttccacctc

SEQ ID NO: 45573 - RNA, 19 nt, synthetic construct
  misc_feature 1..19: note = siRNA antisense sequence
  source 1..19: mol_type = other RNA
gaggtggaaatatcctagg

SEQ ID NO: 45574 - RNA, 19 nt, synthetic construct
  misc_feature 1..19: note = siRNA sense sequence
  source 1..19: mol_type = other RNA
ctaggatatttccacctcc

SEQ ID NO: 45575 - RNA, 19 nt, synthetic construct
  misc_feature 1..19: note = siRNA antisense sequence
  source 1..19: mol_type = other RNA
ggaggtggaaatatcctag

SEQ ID NO: 45576 - RNA, 19 nt, synthetic construct
  misc_feature 1..19: note = siRNA sense sequence
  source 1..19: mol_type = other RNA
gctctctatccaacttcca

SEQ ID NO: 45577 - RNA, 19 nt, synthetic construct
  misc_feature 1..19: note = siRNA antisense sequence
  source 1..19: mol_type = other RNA
tggaagttggatagagagc

SEQ ID NO: 45578 - RNA, 19 nt, synthetic construct
  misc_feature 1..19: note = siRNA sense sequence
  source 1..19: mol_type = other RNA
ctctctatccaacttccac

SEQ ID NO: 45579 - RNA, 19 nt, synthetic construct
  misc_feature 1..19: note = siRNA antisense sequence
  source 1..19: mol_type = other RNA
gtggaagttggatagagag

SEQ ID NO: 45580 - RNA, 19 nt, synthetic construct
  misc_feature 1..19: note = siRNA sense sequence
  source 1..19: mol_type = other RNA
tctctatccaacttccacc

SEQ ID NO: 45581 - RNA, 19 nt, synthetic construct
  misc_feature 1..19: note = siRNA antisense sequence
  source 1..19: mol_type = other RNA
ggtggaagttggatagaga

SEQ ID NO: 45582 - RNA, 19 nt, synthetic construct
  misc_feature 1..19: note = siRNA sense sequence
  source 1..19: mol_type = other RNA
ctctatccaacttccacca

SEQ ID NO: 45583 - RNA, 19 nt, synthetic construct
  misc_feature 1..19: note = siRNA antisense sequence
  source 1..19: mol_type = other RNA
tggtggaagttggatagag

SEQ ID NO: 45584 - RNA, 19 nt, synthetic construct
  misc_feature 1..19: note = siRNA sense sequence
  source 1..19: mol_type = other RNA
tctatccaacttccaccat

SEQ ID NO: 45585 - RNA, 19 nt, synthetic construct
  misc_feature 1..19: note = siRNA antisense sequence
  source 1..19: mol_type = other RNA
atggtggaagttggataga

SEQ ID NO: 45586 - RNA, 19 nt, synthetic construct
  misc_feature 1..19: note = siRNA sense sequence
  source 1..19: mol_type = other RNA
ctatccaacttccaccatc

SEQ ID NO: 45587 - RNA, 19 nt, synthetic construct
  misc_feature 1..19: note = siRNA antisense sequence
  source 1..19: mol_type = other RNA
gatggtggaagttggatag

SEQ ID NO: 45588 - RNA, 19 nt, synthetic construct
  misc_feature 1..19: note = siRNA sense sequence
  source 1..19: mol_type = other RNA
tatccaacttccaccatct

SEQ ID NO: 45589 - RNA, 19 nt, synthetic construct
  misc_feature 1..19: note = siRNA antisense sequence
  source 1..19: mol_type = other RNA
agatggtggaagttggata

SEQ ID NO: 45590 - RNA, 19 nt, synthetic construct
  misc_feature 1..19: note = siRNA sense sequence
  source 1..19: mol_type = other RNA
atccaacttccaccatctg

SEQ ID NO: 45591 - RNA, 19 nt, synthetic construct
  misc_feature 1..19: note = siRNA antisense sequence
  source 1..19: mol_type = other RNA
cagatggtggaagttggat

SEQ ID NO: 45592 - RNA, 19 nt, synthetic construct
  misc_feature 1..19: note = siRNA sense sequence
  source 1..19: mol_type = other RNA
tccaacttccaccatctga

SEQ ID NO: 45593 - RNA, 19 nt, synthetic construct
  misc_feature 1..19: note = siRNA antisense sequence
  source 1..19: mol_type = other RNA
tcagatggtggaagttgga

SEQ ID NO: 45594 - RNA, 19 nt, synthetic construct
  misc_feature 1..19: note = siRNA sense sequence
  source 1..19: mol_type = other RNA
ccaacttccaccatctgac

SEQ ID NO: 45595 - RNA, 19 nt, synthetic construct
  misc_feature 1..19: note = siRNA antisense sequence
  source 1..19: mol_type = other RNA
gtcagatggtggaagttgg

SEQ ID NO: 45596 - RNA, 19 nt, synthetic construct
  misc_feature 1..19: note = siRNA sense sequence
  source 1..19: mol_type = other RNA
caacttccaccatctgact

SEQ ID NO: 45597 - RNA, 19 nt, synthetic construct
  misc_feature 1..19: note = siRNA antisense sequence
  source 1..19: mol_type = other RNA
agtcagatggtggaagttg

SEQ ID NO: 45598 - RNA, 19 nt, synthetic construct
  misc_feature 1..19: note = siRNA sense sequence
  source 1..19: mol_type = other RNA
aacttccaccatctgactt

SEQ ID NO: 45599 - RNA, 19 nt, synthetic construct
  misc_feature 1..19: note = siRNA antisense sequence
  source 1..19: mol_type = other RNA
aagtcagatggtggaagtt

SEQ ID NO: 45600 - RNA, 19 nt, synthetic construct
  misc_feature 1..19: note = siRNA sense sequence
  source 1..19: mol_type = other RNA
acttccaccatctgacttt

SEQ ID NO: 45601 - RNA, 19 nt, synthetic construct
  misc_feature 1..19: note = siRNA antisense sequence
  source 1..19: mol_type = other RNA
aaagtcagatggtggaagt

SEQ ID NO: 45602 - RNA, 19 nt, synthetic construct
  misc_feature 1..19: note = siRNA sense sequence
  source 1..19: mol_type = other RNA
cttccaccatctgactttt

SEQ ID NO: 45603 - RNA, 19 nt, synthetic construct
  misc_feature 1..19: note = siRNA antisense sequence
  source 1..19: mol_type = other RNA
aaaagtcagatggtggaag

SEQ ID NO: 45604 - RNA, 19 nt, synthetic construct
  misc_feature 1..19: note = siRNA sense sequence
  source 1..19: mol_type = other RNA
ttccaccatctgacttttg

SEQ ID NO: 45605 - RNA, 19 nt, synthetic construct
  misc_feature 1..19: note = siRNA antisense sequence
  source 1..19: mol_type = other RNA
caaaagtcagatggtggaa

SEQ ID NO: 45606 - RNA, 19 nt, synthetic construct
  misc_feature 1..19: note = siRNA sense sequence
  source 1..19: mol_type = other RNA
catctgacttttgtatcat

SEQ ID NO: 45607 - RNA, 19 nt, synthetic construct
  misc_feature 1..19: note = siRNA antisense sequence
  source 1..19: mol_type = other RNA
atgatacaaaagtcagatg

SEQ ID NO: 45608 - RNA, 19 nt, synthetic construct
  misc_feature 1..19: note = siRNA sense sequence
  source 1..19: mol_type = other RNA
atctgacttttgtatcatc

SEQ ID NO: 45609 - RNA, 19 nt, synthetic construct
  misc_feature 1..19: note = siRNA antisense sequence
  source 1..19: mol_type = other RNA
gatgatacaaaagtcagat

SEQ ID NO: 45610 - RNA, 19 nt, synthetic construct
  misc_feature 1..19: note = siRNA sense sequence
  source 1..19: mol_type = other RNA
tctgacttttgtatcatcc

SEQ ID NO: 45611 - RNA, 19 nt, synthetic construct
  misc_feature 1..19: note = siRNA antisense sequence
  source 1..19: mol_type = other RNA
ggatgatacaaaagtcaga

SEQ ID NO: 45612 - RNA, 19 nt, synthetic construct
  misc_feature 1..19: note = siRNA sense sequence
  source 1..19: mol_type = other RNA
ctgacttttgtatcatccc

SEQ ID NO: 45613 - RNA, 19 nt, synthetic construct
  misc_feature 1..19: note = siRNA antisense sequence
  source 1..19: mol_type = other RNA
gggatgatacaaaagtcag

SEQ ID NO: 45614 - RNA, 19 nt, synthetic construct
  misc_feature 1..19: note = siRNA sense sequence
  source 1..19: mol_type = other RNA
cttttgtatcatcccaacg

SEQ ID NO: 45615 - RNA, 19 nt, synthetic construct
  misc_feature 1..19: note = siRNA antisense sequence
  source 1..19: mol_type = other RNA
cgttgggatgatacaaaag

SEQ ID NO: 45616 - RNA, 19 nt, synthetic construct
  misc_feature 1..19: note = siRNA sense sequence
  source 1..19: mol_type = other RNA
ttttgtatcatcccaacgt

SEQ ID NO: 45617 - RNA, 19 nt, synthetic construct
  misc_feature 1..19: note = siRNA antisense sequence
  source 1..19: mol_type = other RNA
acgttgggatgatacaaaa

SEQ ID NO: 45618 - RNA, 19 nt, synthetic construct
  misc_feature 1..19: note = siRNA sense sequence
  source 1..19: mol_type = other RNA
tttgtatcatcccaacgta

SEQ ID NO: 45619 - RNA, 19 nt, synthetic construct
  misc_feature 1..19: note = siRNA antisense sequence
  source 1..19: mol_type = other RNA
tacgttgggatgatacaaa

SEQ ID NO: 45620 - RNA, 19 nt, synthetic construct
  misc_feature 1..19: note = siRNA sense sequence
  source 1..19: mol_type = other RNA
ttgtatcatcccaacgtaa

SEQ ID NO: 45621 - RNA, 19 nt, synthetic construct
  misc_feature 1..19: note = siRNA antisense sequence
  source 1..19: mol_type = other RNA
ttacgttgggatgatacaa

SEQ ID NO: 45622 - RNA, 19 nt, synthetic construct
  misc_feature 1..19: note = siRNA sense sequence
  source 1..19: mol_type = other RNA
tgtatcatcccaacgtaat

SEQ ID NO: 45623 - RNA, 19 nt, synthetic construct
  misc_feature 1..19: note = siRNA antisense sequence
  source 1..19: mol_type = other RNA
attacgttgggatgataca

SEQ ID NO: 45624 - RNA, 19 nt, synthetic construct
  misc_feature 1..19: note = siRNA sense sequence
  source 1..19: mol_type = other RNA
gtatcatcccaacgtaatt

SEQ ID NO: 45625 - RNA, 19 nt, synthetic construct
  misc_feature 1..19: note = siRNA antisense sequence
  source 1..19: mol_type = other RNA
aattacgttgggatgatac

SEQ ID NO: 45626 - RNA, 19 nt, synthetic construct
  misc_feature 1..19: note = siRNA sense sequence
  source 1..19: mol_type = other RNA
tatcatcccaacgtaattg

SEQ ID NO: 45627 - RNA, 19 nt, synthetic construct
  misc_feature 1..19: note = siRNA antisense sequence
  source 1..19: mol_type = other RNA
caattacgttgggatgata

SEQ ID NO: 45628 - RNA, 19 nt, synthetic construct
  misc_feature 1..19: note = siRNA sense sequence
  source 1..19: mol_type = other RNA
caacgtaattggctacttc

SEQ ID NO: 45629 - RNA, 19 nt, synthetic construct
  misc_feature 1..19: note = siRNA antisense sequence
  source 1..19: mol_type = other RNA
gaagtagccaattacgttg

SEQ ID NO: 45630 - RNA, 19 nt, synthetic construct
  misc_feature 1..19: note = siRNA sense sequence
  source 1..19: mol_type = other RNA
aacgtaattggctacttca

SEQ ID NO: 45631 - RNA, 19 nt, synthetic construct
  misc_feature 1..19: note = siRNA antisense sequence
  source 1..19: mol_type = other RNA
tgaagtagccaattacgtt

SEQ ID NO: 45632 - RNA, 19 nt, synthetic construct
  misc_feature 1..19: note = siRNA sense sequence
  source 1..19: mol_type = other RNA
acgtaattggctacttcaa

SEQ ID NO: 45633 - RNA, 19 nt, synthetic construct
  misc_feature 1..19: note = siRNA antisense sequence
  source 1..19: mol_type = other RNA
ttgaagtagccaattacgt

SEQ ID NO: 45634 - RNA, 19 nt, synthetic construct
  misc_feature 1..19: note = siRNA sense sequence
  source 1..19: mol_type = other RNA
gtaattggctacttcaagt

SEQ ID NO: 45635 - RNA, 19 nt, synthetic construct
  misc_feature 1..19: note = siRNA antisense sequence
  source 1..19: mol_type = other RNA
acttgaagtagccaattac

SEQ ID NO: 45636 - RNA, 19 nt, synthetic construct
  misc_feature 1..19: note = siRNA sense sequence
  source 1..19: mol_type = other RNA
taattggctacttcaagtc

SEQ ID NO: 45637 - RNA, 19 nt, synthetic construct
  misc_feature 1..19: note = siRNA antisense sequence
  source 1..19: mol_type = other RNA
gacttgaagtagccaatta

SEQ ID NO: 45638 - RNA, 19 nt, synthetic construct
  misc_feature 1..19: note = siRNA sense sequence
  source 1..19: mol_type = other RNA
aattggctacttcaagtca

SEQ ID NO: 45639 - RNA, 19 nt, synthetic construct
  misc_feature 1..19: note = siRNA antisense sequence
  source 1..19: mol_type = other RNA
tgacttgaagtagccaatt

SEQ ID NO: 45640 - RNA, 19 nt, synthetic construct
  misc_feature 1..19: note = siRNA sense sequence
  source 1..19: mol_type = other RNA
attggctacttcaagtcaa

SEQ ID NO: 45641 - RNA, 19 nt, synthetic construct
  misc_feature 1..19: note = siRNA antisense sequence
  source 1..19: mol_type = other RNA
ttgacttgaagtagccaat

SEQ ID NO: 45642 - RNA, 19 nt, synthetic construct
  misc_feature 1..19: note = siRNA sense sequence
  source 1..19: mol_type = other RNA
ttggctacttcaagtcaaa

SEQ ID NO: 45643 - RNA, 19 nt, synthetic construct
  misc_feature 1..19: note = siRNA antisense sequence
  source 1..19: mol_type = other RNA
tttgacttgaagtagccaa

SEQ ID NO: 45644 - RNA, 19 nt, synthetic construct
  misc_feature 1..19: note = siRNA sense sequence
  source 1..19: mol_type = other RNA
tggctacttcaagtcaaat

SEQ ID NO: 45645 - RNA, 19 nt, synthetic construct
  misc_feature 1..19: note = siRNA antisense sequence
  source 1..19: mol_type = other RNA
atttgacttgaagtagcca

SEQ ID NO: 45646 - RNA, 19 nt, synthetic construct
  misc_feature 1..19: note = siRNA sense sequence
  source 1..19: mol_type = other RNA
ggctacttcaagtcaaata

SEQ ID NO: 45647 - RNA, 19 nt, synthetic construct
  misc_feature 1..19: note = siRNA antisense sequence
  source 1..19: mol_type = other RNA
tatttgacttgaagtagcc

SEQ ID NO: 45648 - RNA, 19 nt, synthetic construct
  misc_feature 1..19: note = siRNA sense sequence
  source 1..19: mol_type = other RNA
gctacttcaagtcaaatat

SEQ ID NO: 45649 - RNA, 19 nt, synthetic construct
  misc_feature 1..19: note = siRNA antisense sequence
  source 1..19: mol_type = other RNA
atatttgacttgaagtagc

SEQ ID NO: 45650 - RNA, 19 nt, synthetic construct
  misc_feature 1..19: note = siRNA sense sequence
  source 1..19: mol_type = other RNA
tttcctctcaatttctagg

SEQ ID NO: 45651 - RNA, 19 nt, synthetic construct
  misc_feature 1..19: note = siRNA antisense sequence
  source 1..19: mol_type = other RNA
cctagaaattgagaggaaa

SEQ ID NO: 45652 - RNA, 19 nt, synthetic construct
  misc_feature 1..19: note = siRNA sense sequence
  source 1..19: mol_type = other RNA
cctctcaatttctaggatg

SEQ ID NO: 45653 - RNA, 19 nt, synthetic construct
  misc_feature 1..19: note = siRNA antisense sequence
  source 1..19: mol_type = other RNA
catcctagaaattgagagg

SEQ ID NO: 45654 - RNA, 19 nt, synthetic construct
  misc_feature 1..19: note = siRNA sense sequence
  source 1..19: mol_type = other RNA
ctctcaatttctaggatga

SEQ ID NO: 45655 - RNA, 19 nt, synthetic construct
  misc_feature 1..19: note = siRNA antisense sequence
  source 1..19: mol_type = other RNA
tcatcctagaaattgagag

SEQ ID NO: 45656 - RNA, 19 nt, synthetic construct
  misc_feature 1..19: note = siRNA sense sequence
  source 1..19: mol_type = other RNA
tctcaatttctaggatgac

SEQ ID NO: 45657 - RNA, 19 nt, synthetic construct
  misc_feature 1..19: note = siRNA antisense sequence
  source 1..19: mol_type = other RNA
gtcatcctagaaattgaga

SEQ ID NO: 45658 - RNA, 19 nt, synthetic construct
  misc_feature 1..19: note = siRNA sense sequence
  source 1..19: mol_type = other RNA
ctcaatttctaggatgact

SEQ ID NO: 45659 - RNA, 19 nt, synthetic construct
  misc_feature 1..19: note = siRNA antisense sequence
  source 1..19: mol_type = other RNA
agtcatcctagaaattgag

SEQ ID NO: 45660 - RNA, 19 nt, synthetic construct
  misc_feature 1..19: note = siRNA sense sequence
  source 1..19: mol_type = other RNA
tcaatttctaggatgactt

SEQ ID NO: 45661 - RNA, 19 nt, synthetic construct
  misc_feature 1..19: note = siRNA antisense sequence
  source 1..19: mol_type = other RNA
aagtcatcctagaaattga

SEQ ID NO: 45662 - RNA, 19 nt, synthetic construct
  misc_feature 1..19: note = siRNA sense sequence
  source 1..19: mol_type = other RNA
caatttctaggatgactta

SEQ ID NO: 45663 - RNA, 19 nt, synthetic construct
  misc_feature 1..19: note = siRNA antisense sequence
  source 1..19: mol_type = other RNA
taagtcatcctagaaattg

SEQ ID NO: 45664 - RNA, 19 nt, synthetic construct
  misc_feature 1..19: note = siRNA sense sequence
  source 1..19: mol_type = other RNA
acatattttccaggctgag

SEQ ID NO: 45665 - RNA, 19 nt, synthetic construct
  misc_feature 1..19: note = siRNA antisense sequence
  source 1..19: mol_type = other RNA
ctcagcctggaaaatatgt

SEQ ID NO: 45666 - RNA, 19 nt, synthetic construct
  misc_feature 1..19: note = siRNA sense sequence
  source 1..19: mol_type = other RNA
catattttccaggctgagg

SEQ ID NO: 45667 - RNA, 19 nt, synthetic construct
  misc_feature 1..19: note = siRNA antisense sequence
  source 1..19: mol_type = other RNA
cctcagcctggaaaatatg

SEQ ID NO: 45668 - RNA, 19 nt, synthetic construct
  misc_feature 1..19: note = siRNA sense sequence
  source 1..19: mol_type = other RNA
atattttccaggctgaggg

SEQ ID NO: 45669 - RNA, 19 nt, synthetic construct
  misc_feature 1..19: note = siRNA antisense sequence
  source 1..19: mol_type = other RNA
ccctcagcctggaaaatat

SEQ ID NO: 45670 - RNA, 19 nt, synthetic construct
  misc_feature 1..19: note = siRNA sense sequence
  source 1..19: mol_type = other RNA
attttccaggctgagggcc

SEQ ID NO: 45671 - RNA, 19 nt, synthetic construct
  misc_feature 1..19: note = siRNA antisense sequence
  source 1..19: mol_type = other RNA
ggccctcagcctggaaaat

SEQ ID NO: 45672 - RNA, 19 nt, synthetic construct
  misc_feature 1..19: note = siRNA sense sequence
  source 1..19: mol_type = other RNA
tccaggctgagggccactt

SEQ ID NO: 45673 - RNA, 19 nt, synthetic construct
  misc_feature 1..19: note = siRNA antisense sequence
  source 1..19: mol_type = other RNA
aagtggccctcagcctgga

SEQ ID NO: 45674 - RNA, 19 nt, synthetic construct
  misc_feature 1..19: note = siRNA sense sequence
  source 1..19: mol_type = other RNA
ggccactttgtttccttcc

SEQ ID NO: 45675 - RNA, 19 nt, synthetic construct
  misc_feature 1..19: note = siRNA antisense sequence
  source 1..19: mol_type = other RNA
ggaaggaaacaaagtggcc

SEQ ID NO: 45676 - RNA, 19 nt, synthetic construct
  misc_feature 1..19: note = siRNA sense sequence
  source 1..19: mol_type = other RNA
gccactttgtttccttcca

SEQ ID NO: 45677 - RNA, 19 nt, synthetic construct
  misc_feature 1..19: note = siRNA antisense sequence
  source 1..19: mol_type = other RNA
tggaaggaaacaaagtggc

SEQ ID NO: 45678 - RNA, 19 nt, synthetic construct
  misc_feature 1..19: note = siRNA sense sequence
  source 1..19: mol_type = other RNA
ttgtttccttccatagtac

SEQ ID NO: 45679 - RNA, 19 nt, synthetic construct
  misc_feature 1..19: note = siRNA antisense sequence
  source 1..19: mol_type = other RNA
gtactatggaaggaaacaa

SEQ ID NO: 45680 - RNA, 19 nt, synthetic construct
  misc_feature 1..19: note = siRNA sense sequence
  source 1..19: mol_type = other RNA
tgtttccttccatagtact

SEQ ID NO: 45681 - RNA, 19 nt, synthetic construct
  misc_feature 1..19: note = siRNA antisense sequence
  source 1..19: mol_type = other RNA
agtactatggaaggaaaca

SEQ ID NO: 45682 - RNA, 19 nt, synthetic construct
  misc_feature 1..19: note = siRNA sense sequence
  source 1..19: mol_type = other RNA
gtttccttccatagtactt

SEQ ID NO: 45683 - RNA, 19 nt, synthetic construct
  misc_feature 1..19: note = siRNA antisense sequence
  source 1..19: mol_type = other RNA
aagtactatggaaggaaac

SEQ ID NO: 45684 - RNA, 19 nt, synthetic construct
  misc_feature 1..19: note = siRNA sense sequence
  source 1..19: mol_type = other RNA
ttccttccatagtactttc

SEQ ID NO: 45685 - RNA, 19 nt, synthetic construct
  misc_feature 1..19: note = siRNA antisense sequence
  source 1..19: mol_type = other RNA
gaaagtactatggaaggaa

SEQ ID NO: 45686 - RNA, 19 nt, synthetic construct
  misc_feature 1..19: note = siRNA sense sequence
  source 1..19: mol_type = other RNA
ccatagtactttcataatc

SEQ ID NO: 45687 - RNA, 19 nt, synthetic construct
  misc_feature 1..19: note = siRNA antisense sequence
  source 1..19: mol_type = other RNA
gattatgaaagtactatgg

SEQ ID NO: 45688 - RNA, 19 nt, synthetic construct
  misc_feature 1..19: note = siRNA sense sequence
  source 1..19: mol_type = other RNA
ctttcataatctcttggct

SEQ ID NO: 45689 - RNA, 19 nt, synthetic construct
  misc_feature 1..19: note = siRNA antisense sequence
  source 1..19: mol_type = other RNA
agccaagagattatgaaag

SEQ ID NO: 45690 - RNA, 19 nt, synthetic construct
  misc_feature 1..19: note = siRNA sense sequence
  source 1..19: mol_type = other RNA
tttcataatctcttggcta

SEQ ID NO: 45691 - RNA, 19 nt, synthetic construct
  misc_feature 1..19: note = siRNA antisense sequence
  source 1..19: mol_type = other RNA
tagccaagagattatgaaa

SEQ ID NO: 45692 - RNA, 19 nt, synthetic construct
  misc_feature 1..19: note = siRNA sense sequence
  source 1..19: mol_type = other RNA
ttcataatctcttggctat

SEQ ID NO: 45693 - RNA, 19 nt, synthetic construct
  misc_feature 1..19: note = siRNA antisense sequence
  source 1..19: mol_type = other RNA
atagccaagagattatgaa

SEQ ID NO: 45694 - RNA, 19 nt, synthetic construct
  misc_feature 1..19: note = siRNA sense sequence
  source 1..19: mol_type = other RNA
tcataatctcttggctatt

SEQ ID NO: 45695 - RNA, 19 nt, synthetic construct
  misc_feature 1..19: note = siRNA antisense sequence
  source 1..19: mol_type = other RNA
aatagccaagagattatga

SEQ ID NO: 45696 - RNA, 19 nt, synthetic construct
  misc_feature 1..19: note = siRNA sense sequence
  source 1..19: mol_type = other RNA
cataatctcttggctattt

SEQ ID NO: 45697 - RNA, 19 nt, synthetic construct
  misc_feature 1..19: note = siRNA antisense sequence
  source 1..19: mol_type = other RNA
aaatagccaagagattatg

SEQ ID NO: 45698 - RNA, 19 nt, synthetic construct
  misc_feature 1..19: note = siRNA sense sequence
  source 1..19: mol_type = other RNA
tttgagctggctttcagat

SEQ ID NO: 45699 - RNA, 19 nt, synthetic construct
  misc_feature 1..19: note = siRNA antisense sequence
  source 1..19: mol_type = other RNA
atctgaaagccagctcaaa

SEQ ID NO: 45700 - RNA, 19 nt, synthetic construct
  misc_feature 1..19: note = siRNA sense sequence
  source 1..19: mol_type = other RNA
ttgagctggctttcagatt

SEQ ID NO: 45701 - RNA, 19 nt, synthetic construct
  misc_feature 1..19: note = siRNA antisense sequence
  source 1..19: mol_type = other RNA
aatctgaaagccagctcaa

SEQ ID NO: 45702 - RNA, 19 nt, synthetic construct
  misc_feature 1..19: note = siRNA sense sequence
  source 1..19: mol_type = other RNA
tgagctggctttcagattc

SEQ ID NO: 45703 - RNA, 19 nt, synthetic construct
  misc_feature 1..19: note = siRNA antisense sequence
  source 1..19: mol_type = other RNA
gaatctgaaagccagctca

SEQ ID NO: 45704 - RNA, 19 nt, synthetic construct
  misc_feature 1..19: note = siRNA sense sequence
  source 1..19: mol_type = other RNA
gagctggctttcagattca

SEQ ID NO: 45705 - RNA, 19 nt, synthetic construct
  misc_feature 1..19: note = siRNA antisense sequence
  source 1..19: mol_type = other RNA
tgaatctgaaagccagctc

SEQ ID NO: 45706 - RNA, 19 nt, synthetic construct
  misc_feature 1..19: note = siRNA sense sequence
  source 1..19: mol_type = other RNA
agctggctttcagattcag

SEQ ID NO: 45707 - RNA, 19 nt, synthetic construct
  misc_feature 1..19: note = siRNA antisense sequence
  source 1..19: mol_type = other RNA
ctgaatctgaaagccagct

SEQ ID NO: 45708 - RNA, 19 nt, synthetic construct
  misc_feature 1..19: note = siRNA sense sequence
  source 1..19: mol_type = other RNA
gctggctttcagattcagg

SEQ ID NO: 45709 - RNA, 19 nt, synthetic construct
  misc_feature 1..19: note = siRNA antisense sequence
  source 1..19: mol_type = other RNA
cctgaatctgaaagccagc

SEQ ID NO: 45710 - RNA, 19 nt, synthetic construct
  misc_feature 1..19: note = siRNA sense sequence
  source 1..19: mol_type = other RNA
ctttcagattcaggaagct

SEQ ID NO: 45711 - RNA, 19 nt, synthetic construct
  misc_feature 1..19: note = siRNA antisense sequence
  source 1..19: mol_type = other RNA
agcttcctgaatctgaaag

SEQ ID NO: 45712 - RNA, 19 nt, synthetic construct
  misc_feature 1..19: note = siRNA sense sequence
  source 1..19: mol_type = other RNA
aagctgaatcctccttcct

SEQ ID NO: 45713 - RNA, 19 nt, synthetic construct
  misc_feature 1..19: note = siRNA antisense sequence
  source 1..19: mol_type = other RNA
aggaaggaggattcagctt

SEQ ID NO: 45714 - RNA, 19 nt, synthetic construct
  misc_feature 1..19: note = siRNA sense sequence
  source 1..19: mol_type = other RNA
agctgaatcctccttcctc

SEQ ID NO: 45715 - RNA, 19 nt, synthetic construct
  misc_feature 1..19: note = siRNA antisense sequence
  source 1..19: mol_type = other RNA
gaggaaggaggattcagct

SEQ ID NO: 45716 - RNA, 19 nt, synthetic construct
  misc_feature 1..19: note = siRNA sense sequence
  source 1..19: mol_type = other RNA
atcctccttcctccttgag

SEQ ID NO: 45717 - RNA, 19 nt, synthetic construct
  misc_feature 1..19: note = siRNA antisense sequence
  source 1..19: mol_type = other RNA
ctcaaggaggaaggaggat

SEQ ID NO: 45718 - RNA, 19 nt, synthetic construct
  misc_feature 1..19: note = siRNA sense sequence
  source 1..19: mol_type = other RNA
atgttcatcacttggctca

SEQ ID NO: 45719 - RNA, 19 nt, synthetic construct
  misc_feature 1..19: note = siRNA antisense sequence
  source 1..19: mol_type = other RNA
tgagccaagtgatgaacat

SEQ ID NO: 45720 - RNA, 19 nt, synthetic construct
  misc_feature 1..19: note = siRNA sense sequence
  source 1..19: mol_type = other RNA
tgttcatcacttggctcac

SEQ ID NO: 45721 - RNA, 19 nt, synthetic construct
  misc_feature 1..19: note = siRNA antisense sequence
  source 1..19: mol_type = other RNA
gtgagccaagtgatgaaca

SEQ ID NO: 45722 - RNA, 19 nt, synthetic construct
  misc_feature 1..19: note = siRNA sense sequence
  source 1..19: mol_type = other RNA
ttcatcacttggctcactt

SEQ ID NO: 45723 - RNA, 19 nt, synthetic construct
  misc_feature 1..19: note = siRNA antisense sequence
  source 1..19: mol_type = other RNA
aagtgagccaagtgatgaa

SEQ ID NO: 45724 - RNA, 19 nt, synthetic construct
  misc_feature 1..19: note = siRNA sense sequence
  source 1..19: mol_type = other RNA
ctttatttgattctgctac

SEQ ID NO: 45725 - RNA, 19 nt, synthetic construct
  misc_feature 1..19: note = siRNA antisense sequence
  source 1..19: mol_type = other RNA
gtagcagaatcaaataaag

SEQ ID NO: 45726 - RNA, 19 nt, synthetic construct
  misc_feature 1..19: note = siRNA sense sequence
  source 1..19: mol_type = other RNA
gattctgctacatacattt

SEQ ID NO: 45727 - RNA, 19 nt, synthetic construct
  misc_feature 1..19: note = siRNA antisense sequence
  source 1..19: mol_type = other RNA
aaatgtatgtagcagaatc

SEQ ID NO: 45728 - RNA, 19 nt, synthetic construct
  misc_feature 1..19: note = siRNA sense sequence
  source 1..19: mol_type = other RNA
tgcttgttttattagcctt

SEQ ID NO: 45729 - RNA, 19 nt, synthetic construct
  misc_feature 1..19: note = siRNA antisense sequence
  source 1..19: mol_type = other RNA
aaggctaataaaacaagca

SEQ ID NO: 45730 - RNA, 19 nt, synthetic construct
  misc_feature 1..19: note = siRNA sense sequence
  source 1..19: mol_type = other RNA
gcttgttttattagcctta

SEQ ID NO: 45731 - RNA, 19 nt, synthetic construct
  misc_feature 1..19: note = siRNA antisense sequence
  source 1..19: mol_type = other RNA
taaggctaataaaacaagc

SEQ ID NO: 45732 - RNA, 19 nt, synthetic construct
  misc_feature 1..19: note = siRNA sense sequence
  source 1..19: mol_type = other RNA
aactatctctgttgaattg

SEQ ID NO: 45733 - RNA, 19 nt, synthetic construct
  misc_feature 1..19: note = siRNA antisense sequence
  source 1..19: mol_type = other RNA
caattcaacagagatagtt

SEQ ID NO: 45734 - RNA, 19 nt, synthetic construct
  misc_feature 1..19: note = siRNA sense sequence
  source 1..19: mol_type = other RNA
actatctctgttgaattga

SEQ ID NO: 45735 - RNA, 19 nt, synthetic construct
  misc_feature 1..19: note = siRNA antisense sequence
  source 1..19: mol_type = other RNA
tcaattcaacagagatagt

SEQ ID NO: 45736 - RNA, 19 nt, synthetic construct
  misc_feature 1..19: note = siRNA sense sequence
  source 1..19: mol_type = other RNA
atctctgttgaattgaatc

SEQ ID NO: 45737 - RNA, 19 nt, synthetic construct
  misc_feature 1..19: note = siRNA antisense sequence
  source 1..19: mol_type = other RNA
gattcaattcaacagagat

SEQ ID NO: 45738 - RNA, 19 nt, synthetic construct
  misc_feature 1..19: note = siRNA sense sequence
  source 1..19: mol_type = other RNA
ctctgttgaattgaatctc

SEQ ID NO: 45739 - RNA, 19 nt, synthetic construct
  misc_feature 1..19: note = siRNA antisense sequence
  source 1..19: mol_type = other RNA
gagattcaattcaacagag

SEQ ID NO: 45740 - RNA, 19 nt, synthetic construct
  misc_feature 1..19: note = siRNA sense sequence
  source 1..19: mol_type = other RNA
tctgttgaattgaatctca

SEQ ID NO: 45741 - RNA, 19 nt, synthetic construct
  misc_feature 1..19: note = siRNA antisense sequence
  source 1..19: mol_type = other RNA
tgagattcaattcaacaga

SEQ ID NO: 45742 - RNA, 19 nt, synthetic construct
  misc_feature 1..19: note = siRNA sense sequence
  source 1..19: mol_type = other RNA
ctgttgaattgaatctcac

SEQ ID NO: 45743 - RNA, 19 nt, synthetic construct
  misc_feature 1..19: note = siRNA antisense sequence
  source 1..19: mol_type = other RNA
gtgagattcaattcaacag

SEQ ID NO: 45744 - RNA, 19 nt, synthetic construct
  misc_feature 1..19: note = siRNA sense sequence
  source 1..19: mol_type = other RNA
tgttgaattgaatctcacc

SEQ ID NO: 45745 - RNA, 19 nt, synthetic construct
  misc_feature 1..19: note = siRNA antisense sequence
  source 1..19: mol_type = other RNA
ggtgagattcaattcaaca

SEQ ID NO: 45746 - RNA, 19 nt, synthetic construct
  misc_feature 1..19: note = siRNA sense sequence
  source 1..19: mol_type = other RNA
gttgaattgaatctcacca

SEQ ID NO: 45747 - RNA, 19 nt, synthetic construct
  misc_feature 1..19: note = siRNA antisense sequence
  source 1..19: mol_type = other RNA
tggtgagattcaattcaac

SEQ ID NO: 45748 - RNA, 19 nt, synthetic construct
  misc_feature 1..19: note = siRNA sense sequence
  source 1..19: mol_type = other RNA
ttgaattgaatctcaccaa

SEQ ID NO: 45749 - RNA, 19 nt, synthetic construct
  misc_feature 1..19: note = siRNA antisense sequence
  source 1..19: mol_type = other RNA
ttggtgagattcaattcaa

SEQ ID NO: 45750 - RNA, 19 nt, synthetic construct
  misc_feature 1..19: note = siRNA sense sequence
  source 1..19: mol_type = other RNA
aatctcaccaatattcagc

SEQ ID NO: 45751 - RNA, 19 nt, synthetic construct
  misc_feature 1..19: note = siRNA antisense sequence
  source 1..19: mol_type = other RNA
gctgaatattggtgagatt

SEQ ID NO: 45752 - RNA, 19 nt, synthetic construct
  misc_feature 1..19: note = siRNA sense sequence
  source 1..19: mol_type = other RNA
tgtttgtttgtgatttgac

SEQ ID NO: 45753 - RNA, 19 nt, synthetic construct
  misc_feature 1..19: note = siRNA antisense sequence
  source 1..19: mol_type = other RNA
gtcaaatcacaaacaaaca

SEQ ID NO: 45754 - RNA, 19 nt, synthetic construct
  misc_feature 1..19: note = siRNA sense sequence
  source 1..19: mol_type = other RNA
gtttgtttgtgatttgacc

SEQ ID NO: 45755 - RNA, 19 nt, synthetic construct
  misc_feature 1..19: note = siRNA antisense sequence
  source 1..19: mol_type = other RNA
ggtcaaatcacaaacaaac

SEQ ID NO: 45756 - RNA, 19 nt, synthetic construct
  misc_feature 1..19: note = siRNA sense sequence
  source 1..19: mol_type = other RNA
tttgtttgtgatttgaccc

SEQ ID NO: 45757 - RNA, 19 nt, synthetic construct
  misc_feature 1..19: note = siRNA antisense sequence
  source 1..19: mol_type = other RNA
gggtcaaatcacaaacaaa

SEQ ID NO: 45758 - RNA, 19 nt, synthetic construct
  misc_feature 1..19: note = siRNA sense sequence
  source 1..19: mol_type = other RNA
ttgtttgtgatttgaccct

SEQ ID NO: 45759 - RNA, 19 nt, synthetic construct
  misc_feature 1..19: note = siRNA antisense sequence
  source 1..19: mol_type = other RNA
agggtcaaatcacaaacaa

SEQ ID NO: 45760 - RNA, 19 nt, synthetic construct
  misc_feature 1..19: note = siRNA sense sequence
  source 1..19: mol_type = other RNA
gtttgtgatttgacccttg

SEQ ID NO: 45761 - RNA, 19 nt, synthetic construct
  misc_feature 1..19: note = siRNA antisense sequence
  source 1..19: mol_type = other RNA
caagggtcaaatcacaaac

SEQ ID NO: 45762 - RNA, 19 nt, synthetic construct
  misc_feature 1..19: note = siRNA sense sequence
  source 1..19: mol_type = other RNA
ttgtgatttgacccttgtc

SEQ ID NO: 45763 - RNA, 19 nt, synthetic construct
  misc_feature 1..19: note = siRNA antisense sequence
  source 1..19: mol_type = other RNA
gacaagggtcaaatcacaa

SEQ ID NO: 45764 - RNA, 19 nt, synthetic construct
  misc_feature 1..19: note = siRNA sense sequence
  source 1..19: mol_type = other RNA
tgatttgacccttgtctgt

SEQ ID NO: 45765 - RNA, 19 nt, synthetic construct
  misc_feature 1..19: note = siRNA antisense sequence
  source 1..19: mol_type = other RNA
acagacaagggtcaaatca

SEQ ID NO: 45766 - RNA, 19 nt, synthetic construct
  misc_feature 1..19: note = siRNA sense sequence
  source 1..19: mol_type = other RNA
gatttgacccttgtctgta

SEQ ID NO: 45767 - RNA, 19 nt, synthetic construct
  misc_feature 1..19: note = siRNA antisense sequence
  source 1..19: mol_type = other RNA
tacagacaagggtcaaatc

SEQ ID NO: 45768 - RNA, 19 nt, synthetic construct
  misc_feature 1..19: note = siRNA sense sequence
  source 1..19: mol_type = other RNA
tttgacccttgtctgtaat

SEQ ID NO: 45769 - RNA, 19 nt, synthetic construct
  misc_feature 1..19: note = siRNA antisense sequence
  source 1..19: mol_type = other RNA
attacagacaagggtcaaa

SEQ ID NO: 45770 - RNA, 19 nt, synthetic construct
  misc_feature 1..19: note = siRNA sense sequence
  source 1..19: mol_type = other RNA
ttgacccttgtctgtaatg

SEQ ID NO: 45771 - RNA, 19 nt, synthetic construct
  misc_feature 1..19: note = siRNA antisense sequence
  source 1..19: mol_type = other RNA
cattacagacaagggtcaa

SEQ ID NO: 45772 - RNA, 19 nt, synthetic construct
  misc_feature 1..19: note = siRNA sense sequence
  source 1..19: mol_type = other RNA
tgacccttgtctgtaatga

SEQ ID NO: 45773 - RNA, 19 nt, synthetic construct
  misc_feature 1..19: note = siRNA antisense sequence
  source 1..19: mol_type = other RNA
tcattacagacaagggtca

SEQ ID NO: 45774 - RNA, 19 nt, synthetic construct
  misc_feature 1..19: note = siRNA sense sequence
  source 1..19: mol_type = other RNA
gacccttgtctgtaatgaa

SEQ ID NO: 45775 - RNA, 19 nt, synthetic construct
  misc_feature 1..19: note = siRNA antisense sequence
  source 1..19: mol_type = other RNA
ttcattacagacaagggtc

SEQ ID NO: 45776 - RNA, 19 nt, synthetic construct
  misc_feature 1..19: note = siRNA sense sequence
  source 1..19: mol_type = other RNA
aggttagtgccaaagtaat

SEQ ID NO: 45777 - RNA, 19 nt, synthetic construct
  misc_feature 1..19: note = siRNA antisense sequence
  source 1..19: mol_type = other RNA
attactttggcactaacct

SEQ ID NO: 45778 - RNA, 19 nt, synthetic construct
  misc_feature 1..19: note = siRNA sense sequence
  source 1..19: mol_type = other RNA
ggttagtgccaaagtaatt

SEQ ID NO: 45779 - RNA, 19 nt, synthetic construct
  misc_feature 1..19: note = siRNA antisense sequence
  source 1..19: mol_type = other RNA
aattactttggcactaacc

SEQ ID NO: 45780 - RNA, 19 nt, synthetic construct
  misc_feature 1..19: note = siRNA sense sequence
  source 1..19: mol_type = other RNA
gttagtgccaaagtaattg

SEQ ID NO: 45781 - RNA, 19 nt, synthetic construct
  misc_feature 1..19: note = siRNA antisense sequence
  source 1..19: mol_type = other RNA
caattactttggcactaac

SEQ ID NO: 45782 - RNA, 19 nt, synthetic construct
  misc_feature 1..19: note = siRNA sense sequence
  source 1..19: mol_type = other RNA
gcggttttgccattatttt

SEQ ID NO: 45783 - RNA, 19 nt, synthetic construct
  misc_feature 1..19: note = siRNA antisense sequence
  source 1..19: mol_type = other RNA
aaaataatggcaaaaccgc

SEQ ID NO: 45784 - RNA, 19 nt, synthetic construct
  misc_feature 1..19: note = siRNA sense sequence
  source 1..19: mol_type = other RNA
aataaatggtacccttttc

SEQ ID NO: 45785 - RNA, 19 nt, synthetic construct
  misc_feature 1..19: note = siRNA antisense sequence
  source 1..19: mol_type = other RNA
gaaaagggtaccatttatt

SEQ ID NO: 45786 - RNA, 19 nt, synthetic construct
  misc_feature 1..19: note = siRNA sense sequence
  source 1..19: mol_type = other RNA
ataaatggtacccttttct

SEQ ID NO: 45787 - RNA, 19 nt, synthetic construct
  misc_feature 1..19: note = siRNA antisense sequence
  source 1..19: mol_type = other RNA
agaaaagggtaccatttat

SEQ ID NO: 45788 - RNA, 19 nt, synthetic construct
  misc_feature 1..19: note = siRNA sense sequence
  source 1..19: mol_type = other RNA
taaatggtacccttttctg

SEQ ID NO: 45789 - RNA, 19 nt, synthetic construct
  misc_feature 1..19: note = siRNA antisense sequence
  source 1..19: mol_type = other RNA
cagaaaagggtaccattta

SEQ ID NO: 45790 - RNA, 19 nt, synthetic construct
  misc_feature 1..19: note = siRNA sense sequence
  source 1..19: mol_type = other RNA
aaatggtacccttttctgg

SEQ ID NO: 45791 - RNA, 19 nt, synthetic construct
  misc_feature 1..19: note = siRNA antisense sequence
  source 1..19: mol_type = other RNA
ccagaaaagggtaccattt

SEQ ID NO: 45792 - RNA, 19 nt, synthetic construct
  misc_feature 1..19: note = siRNA sense sequence
  source 1..19: mol_type = other RNA
aatggtacccttttctggg

SEQ ID NO: 45793 - RNA, 19 nt, synthetic construct
  misc_feature 1..19: note = siRNA antisense sequence
  source 1..19: mol_type = other RNA
cccagaaaagggtaccatt

SEQ ID NO: 45794 - RNA, 19 nt, synthetic construct
  misc_feature 1..19: note = siRNA sense sequence
  source 1..19: mol_type = other RNA
actcacagcacaccttact

SEQ ID NO: 45795 - RNA, 19 nt, synthetic construct
  misc_feature 1..19: note = siRNA antisense sequence
  source 1..19: mol_type = other RNA
agtaaggtgtgctgtgagt

SEQ ID NO: 45796 - RNA, 19 nt, synthetic construct
  misc_feature 1..19: note = siRNA sense sequence
  source 1..19: mol_type = other RNA
ctcacagcacaccttactc

SEQ ID NO: 45797 - RNA, 19 nt, synthetic construct
  misc_feature 1..19: note = siRNA antisense sequence
  source 1..19: mol_type = other RNA
gagtaaggtgtgctgtgag

SEQ ID NO: 45798 - RNA, 19 nt, synthetic construct
  misc_feature 1..19: note = siRNA sense sequence
  source 1..19: mol_type = other RNA
tcacagcacaccttactct

SEQ ID NO: 45799 - RNA, 19 nt, synthetic construct
  misc_feature 1..19: note = siRNA antisense sequence
  source 1..19: mol_type = other RNA
agagtaaggtgtgctgtga

SEQ ID NO: 45800 - RNA, 19 nt, synthetic construct
  misc_feature 1..19: note = siRNA sense sequence
  source 1..19: mol_type = other RNA
cacagcacaccttactctt

SEQ ID NO: 45801 - RNA, 19 nt, synthetic construct
  misc_feature 1..19: note = siRNA antisense sequence
  source 1..19: mol_type = other RNA
aagagtaaggtgtgctgtg

SEQ ID NO: 45802 - RNA, 19 nt, synthetic construct
  misc_feature 1..19: note = siRNA sense sequence
  source 1..19: mol_type = other RNA
acagcacaccttactcttt

SEQ ID NO: 45803 - RNA, 19 nt, synthetic construct
  misc_feature 1..19: note = siRNA antisense sequence
  source 1..19: mol_type = other RNA
aaagagtaaggtgtgctgt

SEQ ID NO: 45804 - RNA, 19 nt, synthetic construct
  misc_feature 1..19: note = siRNA sense sequence
  source 1..19: mol_type = other RNA
cagcacaccttactctttc

SEQ ID NO: 45805 - RNA, 19 nt, synthetic construct
  misc_feature 1..19: note = siRNA antisense sequence
  source 1..19: mol_type = other RNA
gaaagagtaaggtgtgctg

SEQ ID NO: 45806 - RNA, 19 nt, synthetic construct
  misc_feature 1..19: note = siRNA sense sequence
  source 1..19: mol_type = other RNA
cacaccttactctttctgg

SEQ ID NO: 45807 - RNA, 19 nt, synthetic construct
  misc_feature 1..19: note = siRNA antisense sequence
  source 1..19: mol_type = other RNA
ccagaaagagtaaggtgtg

SEQ ID NO: 45808 - RNA, 19 nt, synthetic construct
  misc_feature 1..19: note = siRNA sense sequence
  source 1..19: mol_type = other RNA
acaccttactctttctggt

SEQ ID NO: 45809 - RNA, 19 nt, synthetic construct
  misc_feature 1..19: note = siRNA antisense sequence
  source 1..19: mol_type = other RNA
accagaaagagtaaggtgt

SEQ ID NO: 45810 - RNA, 19 nt, synthetic construct
  misc_feature 1..19: note = siRNA sense sequence
  source 1..19: mol_type = other RNA
accttactctttctggttc

SEQ ID NO: 45811 - RNA, 19 nt, synthetic construct
  misc_feature 1..19: note = siRNA antisense sequence
  source 1..19: mol_type = other RNA
gaaccagaaagagtaaggt

SEQ ID NO: 45812 - RNA, 19 nt, synthetic construct
  misc_feature 1..19: note = siRNA sense sequence
  source 1..19: mol_type = other RNA
ccttactctttctggttcc

SEQ ID NO: 45813 - RNA, 19 nt, synthetic construct
  misc_feature 1..19: note = siRNA antisense sequence
  source 1..19: mol_type = other RNA
ggaaccagaaagagtaagg

SEQ ID NO: 45814 - RNA, 19 nt, synthetic construct
  misc_feature 1..19: note = siRNA sense sequence
  source 1..19: mol_type = other RNA
cttactctttctggttcct

SEQ ID NO: 45815 - RNA, 19 nt, synthetic construct
  misc_feature 1..19: note = siRNA antisense sequence
  source 1..19: mol_type = other RNA
aggaaccagaaagagtaag

SEQ ID NO: 45816 - RNA, 19 nt, synthetic construct
  misc_feature 1..19: note = siRNA sense sequence
  source 1..19: mol_type = other RNA
ttactctttctggttccta

SEQ ID NO: 45817 - RNA, 19 nt, synthetic construct
  misc_feature 1..19: note = siRNA antisense sequence
  source 1..19: mol_type = other RNA
taggaaccagaaagagtaa

SEQ ID NO: 45818 - RNA, 19 nt, synthetic construct
  misc_feature 1..19: note = siRNA sense sequence
  source 1..19: mol_type = other RNA
tactctttctggttcctaa

SEQ ID NO: 45819 - RNA, 19 nt, synthetic construct
  misc_feature 1..19: note = siRNA antisense sequence
  source 1..19: mol_type = other RNA
ttaggaaccagaaagagta

SEQ ID NO: 45820 - RNA, 19 nt, synthetic construct
  misc_feature 1..19: note = siRNA sense sequence
  source 1..19: mol_type = other RNA
actctttctggttcctaag

SEQ ID NO: 45821 - RNA, 19 nt, synthetic construct
  misc_feature 1..19: note = siRNA antisense sequence
  source 1..19: mol_type = other RNA
cttaggaaccagaaagagt

SEQ ID NO: 45822 - RNA, 19 nt, synthetic construct
  misc_feature 1..19: note = siRNA sense sequence
  source 1..19: mol_type = other RNA
cccggtatcagccagggaa

SEQ ID NO: 45823 - RNA, 19 nt, synthetic construct
  misc_feature 1..19: note = siRNA antisense sequence
  source 1..19: mol_type = other RNA
ttccctggctgataccggg

SEQ ID NO: 45824 - RNA, 19 nt, synthetic construct
  misc_feature 1..19: note = siRNA sense sequence
  source 1..19: mol_type = other RNA
ttttccactgctccctctt

SEQ ID NO: 45825 - RNA, 19 nt, synthetic construct
  misc_feature 1..19: note = siRNA antisense sequence
  source 1..19: mol_type = other RNA
aagagggagcagtggaaaa

SEQ ID NO: 45826 - RNA, 19 nt, synthetic construct
  misc_feature 1..19: note = siRNA sense sequence
  source 1..19: mol_type = other RNA
cactgctccctcttcacat

SEQ ID NO: 45827 - RNA, 19 nt, synthetic construct
  misc_feature 1..19: note = siRNA antisense sequence
  source 1..19: mol_type = other RNA
atgtgaagagggagcagtg

SEQ ID NO: 45828 - RNA, 19 nt, synthetic construct
  misc_feature 1..19: note = siRNA sense sequence
  source 1..19: mol_type = other RNA
gctccctcttcacatttcc

SEQ ID NO: 45829 - RNA, 19 nt, synthetic construct
  misc_feature 1..19: note = siRNA antisense sequence
  source 1..19: mol_type = other RNA
ggaaatgtgaagagggagc

SEQ ID NO: 45830 - RNA, 19 nt, synthetic construct
  misc_feature 1..19: note = siRNA sense sequence
  source 1..19: mol_type = other RNA
tcttcacatttcccagact

SEQ ID NO: 45831 - RNA, 19 nt, synthetic construct
  misc_feature 1..19: note = siRNA antisense sequence
  source 1..19: mol_type = other RNA
agtctgggaaatgtgaaga

SEQ ID NO: 45832 - RNA, 19 nt, synthetic construct
  misc_feature 1..19: note = siRNA sense sequence
  source 1..19: mol_type = other RNA
cttcacatttcccagactt

SEQ ID NO: 45833 - RNA, 19 nt, synthetic construct
  misc_feature 1..19: note = siRNA antisense sequence
  source 1..19: mol_type = other RNA
aagtctgggaaatgtgaag

SEQ ID NO: 45834 - RNA, 19 nt, synthetic construct
  misc_feature 1..19: note = siRNA sense sequence
  source 1..19: mol_type = other RNA
ttcacatttcccagacttc

SEQ ID NO: 45835 - RNA, 19 nt, synthetic construct
  misc_feature 1..19: note = siRNA antisense sequence
  source 1..19: mol_type = other RNA
gaagtctgggaaatgtgaa

SEQ ID NO: 45836 - RNA, 19 nt, synthetic construct
  misc_feature 1..19: note = siRNA sense sequence
  source 1..19: mol_type = other RNA
atttcccagacttcgttgt

SEQ ID NO: 45837 - RNA, 19 nt, synthetic construct
  misc_feature 1..19: note = siRNA antisense sequence
  source 1..19: mol_type = other RNA
acaacgaagtctgggaaat

SEQ ID NO: 45838 - RNA, 19 nt, synthetic construct
  misc_feature 1..19: note = siRNA sense sequence
  source 1..19: mol_type = other RNA
tttcccagacttcgttgta

SEQ ID NO: 45839 - RNA, 19 nt, synthetic construct
  misc_feature 1..19: note = siRNA antisense sequence
  source 1..19: mol_type = other RNA
tacaacgaagtctgggaaa

SEQ ID NO: 45840 - RNA, 19 nt, synthetic construct
  misc_feature 1..19: note = siRNA sense sequence
  source 1..19: mol_type = other RNA
ccagacttcgttgtatctc

SEQ ID NO: 45841 - RNA, 19 nt, synthetic construct
  misc_feature 1..19: note = siRNA antisense sequence
  source 1..19: mol_type = other RNA
gagatacaacgaagtctgg

SEQ ID NO: 45842 - RNA, 19 nt, synthetic construct
  misc_feature 1..19: note = siRNA sense sequence
  source 1..19: mol_type = other RNA
cagacttcgttgtatctct

SEQ ID NO: 45843 - RNA, 19 nt, synthetic construct
  misc_feature 1..19: note = siRNA antisense sequence
  source 1..19: mol_type = other RNA
agagatacaacgaagtctg

SEQ ID NO: 45844 - RNA, 19 nt, synthetic construct
  misc_feature 1..19: note = siRNA sense sequence
  source 1..19: mol_type = other RNA
agacttcgttgtatctctc

SEQ ID NO: 45845 - RNA, 19 nt, synthetic construct
  misc_feature 1..19: note = siRNA antisense sequence
  source 1..19: mol_type = other RNA
gagagatacaacgaagtct

SEQ ID NO: 45846 - RNA, 19 nt, synthetic construct
  misc_feature 1..19: note = siRNA sense sequence
  source 1..19: mol_type = other RNA
gacttcgttgtatctctct

SEQ ID NO: 45847 - RNA, 19 nt, synthetic construct
  misc_feature 1..19: note = siRNA antisense sequence
  source 1..19: mol_type = other RNA
agagagatacaacgaagtc

SEQ ID NO: 45848 - RNA, 19 nt, synthetic construct
  misc_feature 1..19: note = siRNA sense sequence
  source 1..19: mol_type = other RNA
acttcgttgtatctctctt

SEQ ID NO: 45849 - RNA, 19 nt, synthetic construct
  misc_feature 1..19: note = siRNA antisense sequence
  source 1..19: mol_type = other RNA
aagagagatacaacgaagt

SEQ ID NO: 45850 - RNA, 19 nt, synthetic construct
  misc_feature 1..19: note = siRNA sense sequence
  source 1..19: mol_type = other RNA
cttcgttgtatctctcttt

SEQ ID NO: 45851 - RNA, 19 nt, synthetic construct
  misc_feature 1..19: note = siRNA antisense sequence
  source 1..19: mol_type = other RNA
aaagagagatacaacgaag

SEQ ID NO: 45852 - RNA, 19 nt, synthetic construct
  misc_feature 1..19: note = siRNA sense sequence
  source 1..19: mol_type = other RNA
ttcgttgtatctctctttt

SEQ ID NO: 45853 - RNA, 19 nt, synthetic construct
  misc_feature 1..19: note = siRNA antisense sequence
  source 1..19: mol_type = other RNA
aaaagagagatacaacgaa

SEQ ID NO: 45854 - RNA, 19 nt, synthetic construct
  misc_feature 1..19: note = siRNA sense sequence
  source 1..19: mol_type = other RNA
tctgcttatcattatttcc

SEQ ID NO: 45855 - RNA, 19 nt, synthetic construct
  misc_feature 1..19: note = siRNA antisense sequence
  source 1..19: mol_type = other RNA
ggaaataatgataagcaga

SEQ ID NO: 45856 - RNA, 19 nt, synthetic construct
  misc_feature 1..19: note = siRNA sense sequence
  source 1..19: mol_type = other RNA
atcattatttccctgctat

SEQ ID NO: 45857 - RNA, 19 nt, synthetic construct
  misc_feature 1..19: note = siRNA antisense sequence
  source 1..19: mol_type = other RNA
atagcagggaaataatgat

SEQ ID NO: 45858 - RNA, 19 nt, synthetic construct
  misc_feature 1..19: note = siRNA sense sequence
  source 1..19: mol_type = other RNA
tcattatttccctgctatc

SEQ ID NO: 45859 - RNA, 19 nt, synthetic construct
  misc_feature 1..19: note = siRNA antisense sequence
  source 1..19: mol_type = other RNA
gatagcagggaaataatga

SEQ ID NO: 45860 - RNA, 19 nt, synthetic construct
  misc_feature 1..19: note = siRNA sense sequence
  source 1..19: mol_type = other RNA
ttatttccctgctatctcg

SEQ ID NO: 45861 - RNA, 19 nt, synthetic construct
  misc_feature 1..19: note = siRNA antisense sequence
  source 1..19: mol_type = other RNA
cgagatagcagggaaataa

SEQ ID NO: 45862 - RNA, 19 nt, synthetic construct
  misc_feature 1..19: note = siRNA sense sequence
  source 1..19: mol_type = other RNA
tatttccctgctatctcgg

SEQ ID NO: 45863 - RNA, 19 nt, synthetic construct
  misc_feature 1..19: note = siRNA antisense sequence
  source 1..19: mol_type = other RNA
ccgagatagcagggaaata

SEQ ID NO: 45864 - RNA, 19 nt, synthetic construct
  misc_feature 1..19: note = siRNA sense sequence
  source 1..19: mol_type = other RNA
atttccctgctatctcggt

SEQ ID NO: 45865 - RNA, 19 nt, synthetic construct
  misc_feature 1..19: note = siRNA antisense sequence
  source 1..19: mol_type = other RNA
accgagatagcagggaaat

SEQ ID NO: 45866 - RNA, 19 nt, synthetic construct
  misc_feature 1..19: note = siRNA sense sequence
  source 1..19: mol_type = other RNA
tttccctgctatctcggtt

SEQ ID NO: 45867 - RNA, 19 nt, synthetic construct
  misc_feature 1..19: note = siRNA antisense sequence
  source 1..19: mol_type = other RNA
aaccgagatagcagggaaa

SEQ ID NO: 45868 - RNA, 19 nt, synthetic construct
  misc_feature 1..19: note = siRNA sense sequence
  source 1..19: mol_type = other RNA
ttccctgctatctcggttt

SEQ ID NO: 45869 - RNA, 19 nt, synthetic construct
  misc_feature 1..19: note = siRNA antisense sequence
  source 1..19: mol_type = other RNA
aaaccgagatagcagggaa

SEQ ID NO: 45870 - RNA, 19 nt, synthetic construct
  misc_feature 1..19: note = siRNA sense sequence
  source 1..19: mol_type = other RNA
tccctgctatctcggtttt

SEQ ID NO: 45871 - RNA, 19 nt, synthetic construct
  misc_feature 1..19: note = siRNA antisense sequence
  source 1..19: mol_type = other RNA
aaaaccgagatagcaggga

SEQ ID NO: 45872 - RNA, 19 nt, synthetic construct
  misc_feature 1..19: note = siRNA sense sequence
  source 1..19: mol_type = other RNA
ccctgctatctcggttttc

SEQ ID NO: 45873 - RNA, 19 nt, synthetic construct
  misc_feature 1..19: note = siRNA antisense sequence
  source 1..19: mol_type = other RNA
gaaaaccgagatagcaggg

SEQ ID NO: 45874 - RNA, 19 nt, synthetic construct
  misc_feature 1..19: note = siRNA sense sequence
  source 1..19: mol_type = other RNA
cctgctatctcggttttcc

SEQ ID NO: 45875 - RNA, 19 nt, synthetic construct
  misc_feature 1..19: note = siRNA antisense sequence
  source 1..19: mol_type = other RNA
ggaaaaccgagatagcagg

SEQ ID NO: 45876 - RNA, 19 nt, synthetic construct
  misc_feature 1..19: note = siRNA sense sequence
  source 1..19: mol_type = other RNA
ctgctatctcggttttcca

SEQ ID NO: 45877 - RNA, 19 nt, synthetic construct
  misc_feature 1..19: note = siRNA antisense sequence
  source 1..19: mol_type = other RNA
tggaaaaccgagatagcag

SEQ ID NO: 45878 - RNA, 19 nt, synthetic construct
  misc_feature 1..19: note = siRNA sense sequence
  source 1..19: mol_type = other RNA
tgctatctcggttttccat

SEQ ID NO: 45879 - RNA, 19 nt, synthetic construct
  misc_feature 1..19: note = siRNA antisense sequence
  source 1..19: mol_type = other RNA
atggaaaaccgagatagca

SEQ ID NO: 45880 - RNA, 19 nt, synthetic construct
  misc_feature 1..19: note = siRNA sense sequence
  source 1..19: mol_type = other RNA
gctatctcggttttccatt

SEQ ID NO: 45881 - RNA, 19 nt, synthetic construct
  misc_feature 1..19: note = siRNA antisense sequence
  source 1..19: mol_type = other RNA
aatggaaaaccgagatagc

SEQ ID NO: 45882 - RNA, 19 nt, synthetic construct
  misc_feature 1..19: note = siRNA sense sequence
  source 1..19: mol_type = other RNA
ctatctcggttttccattt

SEQ ID NO: 45883 - RNA, 19 nt, synthetic construct
  misc_feature 1..19: note = siRNA antisense sequence
  source 1..19: mol_type = other RNA
aaatggaaaaccgagatag

SEQ ID NO: 45884 - RNA, 19 nt, synthetic construct
  misc_feature 1..19: note = siRNA sense sequence
  source 1..19: mol_type = other RNA
tatctcggttttccatttg

SEQ ID NO: 45885 - RNA, 19 nt, synthetic construct
  misc_feature 1..19: note = siRNA antisense sequence
  source 1..19: mol_type = other RNA
caaatggaaaaccgagata

SEQ ID NO: 45886 - RNA, 19 nt, synthetic construct
  misc_feature 1..19: note = siRNA sense sequence
  source 1..19: mol_type = other RNA
atctcggttttccatttgc

SEQ ID NO: 45887 - RNA, 19 nt, synthetic construct
  misc_feature 1..19: note = siRNA antisense sequence
  source 1..19: mol_type = other RNA
gcaaatggaaaaccgagat

SEQ ID NO: 45888 - RNA, 19 nt, synthetic construct
  misc_feature 1..19: note = siRNA sense sequence
  source 1..19: mol_type = other RNA
ttccatttgcttatgcgaa

SEQ ID NO: 45889 - RNA, 19 nt, synthetic construct
  misc_feature 1..19: note = siRNA antisense sequence
  source 1..19: mol_type = other RNA
ttcgcataagcaaatggaa

SEQ ID NO: 45890 - RNA, 19 nt, synthetic construct
  misc_feature 1..19: note = siRNA sense sequence
  source 1..19: mol_type = other RNA
acagtcatctagtaagaat

SEQ ID NO: 45891 - RNA, 19 nt, synthetic construct
  misc_feature 1..19: note = siRNA antisense sequence
  source 1..19: mol_type = other RNA
attcttactagatgactgt

SEQ ID NO: 45892 - RNA, 19 nt, synthetic construct
  misc_feature 1..19: note = siRNA sense sequence
  source 1..19: mol_type = other RNA
cagtcatctagtaagaatg

SEQ ID NO: 45893 - RNA, 19 nt, synthetic construct
  misc_feature 1..19: note = siRNA antisense sequence
  source 1..19: mol_type = other RNA
cattcttactagatgactg

SEQ ID NO: 45894 - RNA, 19 nt, synthetic construct
  misc_feature 1..19: note = siRNA sense sequence
  source 1..19: mol_type = other RNA
agaatgtcttagggtcagc

SEQ ID NO: 45895 - RNA, 19 nt, synthetic construct
  misc_feature 1..19: note = siRNA antisense sequence
  source 1..19: mol_type = other RNA
gctgaccctaagacattct

SEQ ID NO: 45896 - RNA, 19 nt, synthetic construct
  misc_feature 1..19: note = siRNA sense sequence
  source 1..19: mol_type = other RNA
gaatgtcttagggtcagct

SEQ ID NO: 45897 - RNA, 19 nt, synthetic construct
  misc_feature 1..19: note = siRNA antisense sequence
  source 1..19: mol_type = other RNA
agctgaccctaagacattc

SEQ ID NO: 45898 - RNA, 19 nt, synthetic construct
  misc_feature 1..19: note = siRNA sense sequence
  source 1..19: mol_type = other RNA
aatgtcttagggtcagctg

SEQ ID NO: 45899 - RNA, 19 nt, synthetic construct
  misc_feature 1..19: note = siRNA antisense sequence
  source 1..19: mol_type = other RNA
cagctgaccctaagacatt

SEQ ID NO: 45900 - RNA, 19 nt, synthetic construct
  misc_feature 1..19: note = siRNA sense sequence
  source 1..19: mol_type = other RNA
atgtcttagggtcagctgt

SEQ ID NO: 45901 - RNA, 19 nt, synthetic construct
  misc_feature 1..19: note = siRNA antisense sequence
  source 1..19: mol_type = other RNA
acagctgaccctaagacat

SEQ ID NO: 45902 - RNA, 19 nt, synthetic construct
  misc_feature 1..19: note = siRNA sense sequence
  source 1..19: mol_type = other RNA
tgtcttagggtcagctgtg

SEQ ID NO: 45903 - RNA, 19 nt, synthetic construct
  misc_feature 1..19: note = siRNA antisense sequence
  source 1..19: mol_type = other RNA
cacagctgaccctaagaca

SEQ ID NO: 45904 - RNA, 19 nt, synthetic construct
  misc_feature 1..19: note = siRNA sense sequence
  source 1..19: mol_type = other RNA
tagggtcagctgtgagcaa

SEQ ID NO: 45905 - RNA, 19 nt, synthetic construct
  misc_feature 1..19: note = siRNA antisense sequence
  source 1..19: mol_type = other RNA
ttgctcacagctgacccta

SEQ ID NO: 45906 - RNA, 19 nt, synthetic construct
  misc_feature 1..19: note = siRNA sense sequence
  source 1..19: mol_type = other RNA
agggtcagctgtgagcaaa

SEQ ID NO: 45907 - RNA, 19 nt, synthetic construct
  misc_feature 1..19: note = siRNA antisense sequence
  source 1..19: mol_type = other RNA
tttgctcacagctgaccct

SEQ ID NO: 45908 - RNA, 19 nt, synthetic construct
  misc_feature 1..19: note = siRNA sense sequence
  source 1..19: mol_type = other RNA
ggtcagctgtgagcaaagc

SEQ ID NO: 45909 - RNA, 19 nt, synthetic construct
  misc_feature 1..19: note = siRNA antisense sequence
  source 1..19: mol_type = other RNA
gctttgctcacagctgacc

SEQ ID NO: 45910 - RNA, 19 nt, synthetic construct
  misc_feature 1..19: note = siRNA sense sequence
  source 1..19: mol_type = other RNA
gtcagctgtgagcaaagca

SEQ ID NO: 45911 - RNA, 19 nt, synthetic construct
  misc_feature 1..19: note = siRNA antisense sequence
  source 1..19: mol_type = other RNA
tgctttgctcacagctgac

SEQ ID NO: 45912 - RNA, 19 nt, synthetic construct
  misc_feature 1..19: note = siRNA sense sequence
  source 1..19: mol_type = other RNA
tcagctgtgagcaaagcaa

SEQ ID NO: 45913 - RNA, 19 nt, synthetic construct
  misc_feature 1..19: note = siRNA antisense sequence
  source 1..19: mol_type = other RNA
ttgctttgctcacagctga

SEQ ID NO: 45914 - RNA, 19 nt, synthetic construct
  misc_feature 1..19: note = siRNA sense sequence
  source 1..19: mol_type = other RNA
cagctgtgagcaaagcaaa

SEQ ID NO: 45915 - RNA, 19 nt, synthetic construct
  misc_feature 1..19: note = siRNA antisense sequence
  source 1..19: mol_type = other RNA
tttgctttgctcacagctg

SEQ ID NO: 45916 - RNA, 19 nt, synthetic construct
  misc_feature 1..19: note = siRNA sense sequence
  source 1..19: mol_type = other RNA
agctgtgagcaaagcaaaa

SEQ ID NO: 45917 - RNA, 19 nt, synthetic construct
  misc_feature 1..19: note = siRNA antisense sequence
  source 1..19: mol_type = other RNA
ttttgctttgctcacagct

SEQ ID NO: 45918 - RNA, 19 nt, synthetic construct
  misc_feature 1..19: note = siRNA sense sequence
  source 1..19: mol_type = other RNA
cagcagtgaaggataagag

SEQ ID NO: 45919 - RNA, 19 nt, synthetic construct
  misc_feature 1..19: note = siRNA antisense sequence
  source 1..19: mol_type = other RNA
ctcttatccttcactgctg

SEQ ID NO: 45920 - RNA, 19 nt, synthetic construct
  misc_feature 1..19: note = siRNA sense sequence
  source 1..19: mol_type = other RNA
gaatatcaaaagccatgac

SEQ ID NO: 45921 - RNA, 19 nt, synthetic construct
  misc_feature 1..19: note = siRNA antisense sequence
  source 1..19: mol_type = other RNA
gtcatggcttttgatattc

SEQ ID NO: 45922 - RNA, 19 nt, synthetic construct
  misc_feature 1..19: note = siRNA sense sequence
  source 1..19: mol_type = other RNA
aatatcaaaagccatgaca

SEQ ID NO: 45923 - RNA, 19 nt, synthetic construct
  misc_feature 1..19: note = siRNA antisense sequence
  source 1..19: mol_type = other RNA
tgtcatggcttttgatatt

SEQ ID NO: 45924 - RNA, 19 nt, synthetic construct
  misc_feature 1..19: note = siRNA sense sequence
  source 1..19: mol_type = other RNA
atatcaaaagccatgacat

SEQ ID NO: 45925 - RNA, 19 nt, synthetic construct
  misc_feature 1..19: note = siRNA antisense sequence
  source 1..19: mol_type = other RNA
atgtcatggcttttgatat

SEQ ID NO: 45926 - RNA, 19 nt, synthetic construct
  misc_feature 1..19: note = siRNA sense sequence
  source 1..19: mol_type = other RNA
tatcaaaagccatgacata

SEQ ID NO: 45927 - RNA, 19 nt, synthetic construct
  misc_feature 1..19: note = siRNA antisense sequence
  source 1..19: mol_type = other RNA
tatgtcatggcttttgata

SEQ ID NO: 45928 - RNA, 19 nt, synthetic construct
  misc_feature 1..19: note = siRNA sense sequence
  source 1..19: mol_type = other RNA
atcaaaagccatgacatag

SEQ ID NO: 45929 - RNA, 19 nt, synthetic construct
  misc_feature 1..19: note = siRNA antisense sequence
  source 1..19: mol_type = other RNA
ctatgtcatggcttttgat

SEQ ID NO: 45930 - RNA, 19 nt, synthetic construct
  misc_feature 1..19: note = siRNA sense sequence
  source 1..19: mol_type = other RNA
tcaaaagccatgacatagt

SEQ ID NO: 45931 - RNA, 19 nt, synthetic construct
  misc_feature 1..19: note = siRNA antisense sequence
  source 1..19: mol_type = other RNA
actatgtcatggcttttga

SEQ ID NO: 45932 - RNA, 19 nt, synthetic construct
  misc_feature 1..19: note = siRNA sense sequence
  source 1..19: mol_type = other RNA
aagccatgacatagtccat

SEQ ID NO: 45933 - RNA, 19 nt, synthetic construct
  misc_feature 1..19: note = siRNA antisense sequence
  source 1..19: mol_type = other RNA
atggactatgtcatggctt

SEQ ID NO: 45934 - RNA, 19 nt, synthetic construct
  misc_feature 1..19: note = siRNA sense sequence
  source 1..19: mol_type = other RNA
gccatgacatagtccatac

SEQ ID NO: 45935 - RNA, 19 nt, synthetic construct
  misc_feature 1..19: note = siRNA antisense sequence
  source 1..19: mol_type = other RNA
gtatggactatgtcatggc

SEQ ID NO: 45936 - RNA, 19 nt, synthetic construct
  misc_feature 1..19: note = siRNA sense sequence
  source 1..19: mol_type = other RNA
ccatgacatagtccatact

SEQ ID NO: 45937 - RNA, 19 nt, synthetic construct
  misc_feature 1..19: note = siRNA antisense sequence
  source 1..19: mol_type = other RNA
agtatggactatgtcatgg

SEQ ID NO: 45938 - RNA, 19 nt, synthetic construct
  misc_feature 1..19: note = siRNA sense sequence
  source 1..19: mol_type = other RNA
gacatagtccatactcttt

SEQ ID NO: 45939 - RNA, 19 nt, synthetic construct
  misc_feature 1..19: note = siRNA antisense sequence
  source 1..19: mol_type = other RNA
aaagagtatggactatgtc

SEQ ID NO: 45940 - RNA, 19 nt, synthetic construct
  misc_feature 1..19: note = siRNA sense sequence
  source 1..19: mol_type = other RNA
acatagtccatactcttta

SEQ ID NO: 45941 - RNA, 19 nt, synthetic construct
  misc_feature 1..19: note = siRNA antisense sequence
  source 1..19: mol_type = other RNA
taaagagtatggactatgt

SEQ ID NO: 45942 - RNA, 19 nt, synthetic construct
  misc_feature 1..19: note = siRNA sense sequence
  source 1..19: mol_type = other RNA
catagtccatactctttac

SEQ ID NO: 45943 - RNA, 19 nt, synthetic construct
  misc_feature 1..19: note = siRNA antisense sequence
  source 1..19: mol_type = other RNA
gtaaagagtatggactatg

SEQ ID NO: 45944 - RNA, 19 nt, synthetic construct
  misc_feature 1..19: note = siRNA sense sequence
  source 1..19: mol_type = other RNA
atagtccatactctttacc

SEQ ID NO: 45945 - RNA, 19 nt, synthetic construct
  misc_feature 1..19: note = siRNA antisense sequence
  source 1..19: mol_type = other RNA
ggtaaagagtatggactat

SEQ ID NO: 45946 - RNA, 19 nt, synthetic construct
  misc_feature 1..19: note = siRNA sense sequence
  source 1..19: mol_type = other RNA
tagtccatactctttaccc

SEQ ID NO: 45947 - RNA, 19 nt, synthetic construct
  misc_feature 1..19: note = siRNA antisense sequence
  source 1..19: mol_type = other RNA
gggtaaagagtatggacta

SEQ ID NO: 45948 - RNA, 19 nt, synthetic construct
  misc_feature 1..19: note = siRNA sense sequence
  source 1..19: mol_type = other RNA
cctgcctgtccctctaaag

SEQ ID NO: 45949 - RNA, 19 nt, synthetic construct
  misc_feature 1..19: note = siRNA antisense sequence
  source 1..19: mol_type = other RNA
ctttagagggacaggcagg

SEQ ID NO: 45950 - RNA, 19 nt, synthetic construct
  misc_feature 1..19: note = siRNA sense sequence
  source 1..19: mol_type = other RNA
ctgcctgtccctctaaagt

SEQ ID NO: 45951 - RNA, 19 nt, synthetic construct
  misc_feature 1..19: note = siRNA antisense sequence
  source 1..19: mol_type = other RNA
actttagagggacaggcag

SEQ ID NO: 45952 - RNA, 19 nt, synthetic construct
  misc_feature 1..19: note = siRNA sense sequence
  source 1..19: mol_type = other RNA
tgcctgtccctctaaagtt

SEQ ID NO: 45953 - RNA, 19 nt, synthetic construct
  misc_feature 1..19: note = siRNA antisense sequence
  source 1..19: mol_type = other RNA
aactttagagggacaggca

SEQ ID NO: 45954 - RNA, 19 nt, synthetic construct
  misc_feature 1..19: note = siRNA sense sequence
  source 1..19: mol_type = other RNA
gcctgtccctctaaagtta

SEQ ID NO: 45955 - RNA, 19 nt, synthetic construct
  misc_feature 1..19: note = siRNA antisense sequence
  source 1..19: mol_type = other RNA
taactttagagggacaggc

SEQ ID NO: 45956 - RNA, 19 nt, synthetic construct
  misc_feature 1..19: note = siRNA sense sequence
  source 1..19: mol_type = other RNA
cctgtccctctaaagttag

SEQ ID NO: 45957 - RNA, 19 nt, synthetic construct
  misc_feature 1..19: note = siRNA antisense sequence
  source 1..19: mol_type = other RNA
ctaactttagagggacagg

SEQ ID NO: 45958 - RNA, 19 nt, synthetic construct
  misc_feature 1..19: note = siRNA sense sequence
  source 1..19: mol_type = other RNA
ctgtccctctaaagttagg

SEQ ID NO: 45959 - RNA, 19 nt, synthetic construct
  misc_feature 1..19: note = siRNA antisense sequence
  source 1..19: mol_type = other RNA
cctaactttagagggacag

SEQ ID NO: 45960 - RNA, 19 nt, synthetic construct
  misc_feature 1..19: note = siRNA sense sequence
  source 1..19: mol_type = other RNA
tgtccctctaaagttagga

SEQ ID NO: 45961 - RNA, 19 nt, synthetic construct
  misc_feature 1..19: note = siRNA antisense sequence
  source 1..19: mol_type = other RNA
tcctaactttagagggaca

SEQ ID NO: 45962 - RNA, 19 nt, synthetic construct
  misc_feature 1..19: note = siRNA sense sequence
  source 1..19: mol_type = other RNA
gtccctctaaagttaggat

SEQ ID NO: 45963 - RNA, 19 nt, synthetic construct
  misc_feature 1..19: note = siRNA antisense sequence
  source 1..19: mol_type = other RNA
atcctaactttagagggac

SEQ ID NO: 45964 - RNA, 19 nt, synthetic construct
  misc_feature 1..19: note = siRNA sense sequence
  source 1..19: mol_type = other RNA
tccctctaaagttaggatg

SEQ ID NO: 45965 - RNA, 19 nt, synthetic construct
  misc_feature 1..19: note = siRNA antisense sequence
  source 1..19: mol_type = other RNA
catcctaactttagaggga

SEQ ID NO: 45966 - RNA, 19 nt, synthetic construct
  misc_feature 1..19: note = siRNA sense sequence
  source 1..19: mol_type = other RNA
ccctctaaagttaggatgt

SEQ ID NO: 45967 - RNA, 19 nt, synthetic construct
  misc_feature 1..19: note = siRNA antisense sequence
  source 1..19: mol_type = other RNA
acatcctaactttagaggg

SEQ ID NO: 45968 - RNA, 19 nt, synthetic construct
  misc_feature 1..19: note = siRNA sense sequence
  source 1..19: mol_type = other RNA
cctctaaagttaggatgta

SEQ ID NO: 45969 - RNA, 19 nt, synthetic construct
  misc_feature 1..19: note = siRNA antisense sequence
  source 1..19: mol_type = other RNA
tacatcctaactttagagg

SEQ ID NO: 45970 - RNA, 19 nt, synthetic construct
  misc_feature 1..19: note = siRNA sense sequence
  source 1..19: mol_type = other RNA
ctctaaagttaggatgtac

SEQ ID NO: 45971 - RNA, 19 nt, synthetic construct
  misc_feature 1..19: note = siRNA antisense sequence
  source 1..19: mol_type = other RNA
gtacatcctaactttagag

SEQ ID NO: 45972 - RNA, 19 nt, synthetic construct
  misc_feature 1..19: note = siRNA sense sequence
  source 1..19: mol_type = other RNA
tctaaagttaggatgtact

SEQ ID NO: 45973 - RNA, 19 nt, synthetic construct
  misc_feature 1..19: note = siRNA antisense sequence
  source 1..19: mol_type = other RNA
agtacatcctaactttaga

SEQ ID NO: 45974 - RNA, 19 nt, synthetic construct
  misc_feature 1..19: note = siRNA sense sequence
  source 1..19: mol_type = other RNA
agttaggatgtacttggga

SEQ ID NO: 45975 - RNA, 19 nt, synthetic construct
  misc_feature 1..19: note = siRNA antisense sequence
  source 1..19: mol_type = other RNA
tcccaagtacatcctaact

SEQ ID NO: 45976 - RNA, 19 nt, synthetic construct
  misc_feature 1..19: note = siRNA sense sequence
  source 1..19: mol_type = other RNA
taggatgtacttgggaaga

SEQ ID NO: 45977 - RNA, 19 nt, synthetic construct
  misc_feature 1..19: note = siRNA antisense sequence
  source 1..19: mol_type = other RNA
tcttcccaagtacatccta

SEQ ID NO: 45978 - RNA, 19 nt, synthetic construct
  misc_feature 1..19: note = siRNA sense sequence
  source 1..19: mol_type = other RNA
aggatgtacttgggaagat

SEQ ID NO: 45979 - RNA, 19 nt, synthetic construct
  misc_feature 1..19: note = siRNA antisense sequence
  source 1..19: mol_type = other RNA
atcttcccaagtacatcct

SEQ ID NO: 45980 - RNA, 19 nt, synthetic construct
  misc_feature 1..19: note = siRNA sense sequence
  source 1..19: mol_type = other RNA
ggatgtacttgggaagata

SEQ ID NO: 45981 - RNA, 19 nt, synthetic construct
  misc_feature 1..19: note = siRNA antisense sequence
  source 1..19: mol_type = other RNA
tatcttcccaagtacatcc

SEQ ID NO: 45982 - RNA, 19 nt, synthetic construct
  misc_feature 1..19: note = siRNA sense sequence
  source 1..19: mol_type = other RNA
gatgtacttgggaagatat

SEQ ID NO: 45983 - RNA, 19 nt, synthetic construct
  misc_feature 1..19: note = siRNA antisense sequence
  source 1..19: mol_type = other RNA
atatcttcccaagtacatc

SEQ ID NO: 45984 - RNA, 19 nt, synthetic construct
  misc_feature 1..19: note = siRNA sense sequence
  source 1..19: mol_type = other RNA
atgtacttgggaagatata

SEQ ID NO: 45985 - RNA, 19 nt, synthetic construct
  misc_feature 1..19: note = siRNA antisense sequence
  source 1..19: mol_type = other RNA
tatatcttcccaagtacat

SEQ ID NO: 45986 - RNA, 19 nt, synthetic construct
  misc_feature 1..19: note = siRNA sense sequence
  source 1..19: mol_type = other RNA
tgtacttgggaagatatag

SEQ ID NO: 45987 - RNA, 19 nt, synthetic construct
  misc_feature 1..19: note = siRNA antisense sequence
  source 1..19: mol_type = other RNA
ctatatcttcccaagtaca

SEQ ID NO: 45988 - RNA, 19 nt, synthetic construct
  misc_feature 1..19: note = siRNA sense sequence
  source 1..19: mol_type = other RNA
gtacttgggaagatatagt

SEQ ID NO: 45989 - RNA, 19 nt, synthetic construct
  misc_feature 1..19: note = siRNA antisense sequence
  source 1..19: mol_type = other RNA
actatatcttcccaagtac

SEQ ID NO: 45990 - RNA, 19 nt, synthetic construct
  misc_feature 1..19: note = siRNA sense sequence
  source 1..19: mol_type = other RNA
tacttgggaagatatagtg

SEQ ID NO: 45991 - RNA, 19 nt, synthetic construct
  misc_feature 1..19: note = siRNA antisense sequence
  source 1..19: mol_type = other RNA
cactatatcttcccaagta

SEQ ID NO: 45992 - RNA, 19 nt, synthetic construct
  misc_feature 1..19: note = siRNA sense sequence
  source 1..19: mol_type = other RNA
acttgggaagatatagtgt

SEQ ID NO: 45993 - RNA, 19 nt, synthetic construct
  misc_feature 1..19: note = siRNA antisense sequence
  source 1..19: mol_type = other RNA
acactatatcttcccaagt

SEQ ID NO: 45994 - RNA, 19 nt, synthetic construct
  misc_feature 1..19: note = siRNA sense sequence
  source 1..19: mol_type = other RNA
cttgggaagatatagtgtg

SEQ ID NO: 45995 - RNA, 19 nt, synthetic construct
  misc_feature 1..19: note = siRNA antisense sequence
  source 1..19: mol_type = other RNA
cacactatatcttcccaag

SEQ ID NO: 45996 - RNA, 19 nt, synthetic construct
  misc_feature 1..19: note = siRNA sense sequence
  source 1..19: mol_type = other RNA
ttgggaagatatagtgtgc

SEQ ID NO: 45997 - RNA, 19 nt, synthetic construct
  misc_feature 1..19: note = siRNA antisense sequence
  source 1..19: mol_type = other RNA
gcacactatatcttcccaa

SEQ ID NO: 45998 - RNA, 19 nt, synthetic construct
  misc_feature 1..19: note = siRNA sense sequence
  source 1..19: mol_type = other RNA
tgggaagatatagtgtgca

SEQ ID NO: 45999 - RNA, 19 nt, synthetic construct
  misc_feature 1..19: note = siRNA antisense sequence
  source 1..19: mol_type = other RNA
tgcacactatatcttccca

SEQ ID NO: 46000 - RNA, 19 nt, synthetic construct
  misc_feature 1..19: note = siRNA sense sequence
  source 1..19: mol_type = other RNA
gggaagatatagtgtgcac

SEQ ID NO: 46001 - RNA, 19 nt, synthetic construct
  misc_feature 1..19: note = siRNA antisense sequence
  source 1..19: mol_type = other RNA
gtgcacactatatcttccc

SEQ ID NO: 46002 - RNA, 19 nt, synthetic construct
  misc_feature 1..19: note = siRNA sense sequence
  source 1..19: mol_type = other RNA
agtttgtttcagagttcca

SEQ ID NO: 46003 - RNA, 19 nt, synthetic construct
  misc_feature 1..19: note = siRNA antisense sequence
  source 1..19: mol_type = other RNA
tggaactctgaaacaaact

SEQ ID NO: 46004 - RNA, 19 nt, synthetic construct
  misc_feature 1..19: note = siRNA sense sequence
  source 1..19: mol_type = other RNA
tgtttcagagttccaagaa

SEQ ID NO: 46005 - RNA, 19 nt, synthetic construct
  misc_feature 1..19: note = siRNA antisense sequence
  source 1..19: mol_type = other RNA
ttcttggaactctgaaaca

SEQ ID NO: 46006 - RNA, 19 nt, synthetic construct
  misc_feature 1..19: note = siRNA sense sequence
  source 1..19: mol_type = other RNA
gtttcagagttccaagaag

SEQ ID NO: 46007 - RNA, 19 nt, synthetic construct
  misc_feature 1..19: note = siRNA antisense sequence
  source 1..19: mol_type = other RNA
cttcttggaactctgaaac

SEQ ID NO: 46008 - RNA, 19 nt, synthetic construct
  misc_feature 1..19: note = siRNA sense sequence
  source 1..19: mol_type = other RNA
gggaagctcaatatgggct

SEQ ID NO: 46009 - RNA, 19 nt, synthetic construct
  misc_feature 1..19: note = siRNA antisense sequence
  source 1..19: mol_type = other RNA
agcccatattgagcttccc

SEQ ID NO: 46010 - RNA, 19 nt, synthetic construct
  misc_feature 1..19: note = siRNA sense sequence
  source 1..19: mol_type = other RNA
ggaagctcaatatgggcta

SEQ ID NO: 46011 - RNA, 19 nt, synthetic construct
  misc_feature 1..19: note = siRNA antisense sequence
  source 1..19: mol_type = other RNA
tagcccatattgagcttcc

SEQ ID NO: 46012 - RNA, 19 nt, synthetic construct
  misc_feature 1..19: note = siRNA sense sequence
  source 1..19: mol_type = other RNA
gaagctcaatatgggctat

SEQ ID NO: 46013 - RNA, 19 nt, synthetic construct
  misc_feature 1..19: note = siRNA antisense sequence
  source 1..19: mol_type = other RNA
atagcccatattgagcttc

SEQ ID NO: 46014 - RNA, 19 nt, synthetic construct
  misc_feature 1..19: note = siRNA sense sequence
  source 1..19: mol_type = other RNA
aagctcaatatgggctatc

SEQ ID NO: 46015 - RNA, 19 nt, synthetic construct
  misc_feature 1..19: note = siRNA antisense sequence
  source 1..19: mol_type = other RNA
gatagcccatattgagctt

SEQ ID NO: 46016 - RNA, 19 nt, synthetic construct
  misc_feature 1..19: note = siRNA sense sequence
  source 1..19: mol_type = other RNA
agctcaatatgggctatcc

SEQ ID NO: 46017 - RNA, 19 nt, synthetic construct
  misc_feature 1..19: note = siRNA antisense sequence
  source 1..19: mol_type = other RNA
ggatagcccatattgagct

SEQ ID NO: 46018 - RNA, 19 nt, synthetic construct
  misc_feature 1..19: note = siRNA sense sequence
  source 1..19: mol_type = other RNA
gctcaatatgggctatcct

SEQ ID NO: 46019 - RNA, 19 nt, synthetic construct
  misc_feature 1..19: note = siRNA antisense sequence
  source 1..19: mol_type = other RNA
aggatagcccatattgagc

SEQ ID NO: 46020 - RNA, 19 nt, synthetic construct
  misc_feature 1..19: note = siRNA sense sequence
  source 1..19: mol_type = other RNA
ctcaatatgggctatcctg

SEQ ID NO: 46021 - RNA, 19 nt, synthetic construct
  misc_feature 1..19: note = siRNA antisense sequence
  source 1..19: mol_type = other RNA
caggatagcccatattgag

SEQ ID NO: 46022 - RNA, 19 nt, synthetic construct
  misc_feature 1..19: note = siRNA sense sequence
  source 1..19: mol_type = other RNA
tatgggctatcctggcaac

SEQ ID NO: 46023 - RNA, 19 nt, synthetic construct
  misc_feature 1..19: note = siRNA antisense sequence
  source 1..19: mol_type = other RNA
gttgccaggatagcccata

SEQ ID NO: 46024 - RNA, 19 nt, synthetic construct
  misc_feature 1..19: note = siRNA sense sequence
  source 1..19: mol_type = other RNA
gattagcttagtaggaggg

SEQ ID NO: 46025 - RNA, 19 nt, synthetic construct
  misc_feature 1..19: note = siRNA antisense sequence
  source 1..19: mol_type = other RNA
ccctcctactaagctaatc

SEQ ID NO: 46026 - RNA, 19 nt, synthetic construct
  misc_feature 1..19: note = siRNA sense sequence
  source 1..19: mol_type = other RNA
attagcttagtaggaggga

SEQ ID NO: 46027 - RNA, 19 nt, synthetic construct
  misc_feature 1..19: note = siRNA antisense sequence
  source 1..19: mol_type = other RNA
tccctcctactaagctaat

SEQ ID NO: 46028 - RNA, 19 nt, synthetic construct
  misc_feature 1..19: note = siRNA sense sequence
  source 1..19: mol_type = other RNA
ttagcttagtaggagggac

SEQ ID NO: 46029 - RNA, 19 nt, synthetic construct
  misc_feature 1..19: note = siRNA antisense sequence
  source 1..19: mol_type = other RNA
gtccctcctactaagctaa

SEQ ID NO: 46030 - RNA, 19 nt, synthetic construct
  misc_feature 1..19: note = siRNA sense sequence
  source 1..19: mol_type = other RNA
tagcttagtaggagggaca

SEQ ID NO: 46031 - RNA, 19 nt, synthetic construct
  misc_feature 1..19: note = siRNA antisense sequence
  source 1..19: mol_type = other RNA
tgtccctcctactaagcta

SEQ ID NO: 46032 - RNA, 19 nt, synthetic construct
  misc_feature 1..19: note = siRNA sense sequence
  source 1..19: mol_type = other RNA
gtaggagtggagttcatat

SEQ ID NO: 46033 - RNA, 19 nt, synthetic construct
  misc_feature 1..19: note = siRNA antisense sequence
  source 1..19: mol_type = other RNA
atatgaactccactcctac

SEQ ID NO: 46034 - RNA, 19 nt, synthetic construct
  misc_feature 1..19: note = siRNA sense sequence
  source 1..19: mol_type = other RNA
taggagtggagttcatatt

SEQ ID NO: 46035 - RNA, 19 nt, synthetic construct
  misc_feature 1..19: note = siRNA antisense sequence
  source 1..19: mol_type = other RNA
aatatgaactccactccta

SEQ ID NO: 46036 - RNA, 19 nt, synthetic construct
  misc_feature 1..19: note = siRNA sense sequence
  source 1..19: mol_type = other RNA
tggacctagtatttcaagg

SEQ ID NO: 46037 - RNA, 19 nt, synthetic construct
  misc_feature 1..19: note = siRNA antisense sequence
  source 1..19: mol_type = other RNA
ccttgaaatactaggtcca

SEQ ID NO: 46038 - RNA, 19 nt, synthetic construct
  misc_feature 1..19: note = siRNA sense sequence
  source 1..19: mol_type = other RNA
ggacctagtatttcaagga

SEQ ID NO: 46039 - RNA, 19 nt, synthetic construct
  misc_feature 1..19: note = siRNA antisense sequence
  source 1..19: mol_type = other RNA
tccttgaaatactaggtcc

SEQ ID NO: 46040 - RNA, 19 nt, synthetic construct
  misc_feature 1..19: note = siRNA sense sequence
  source 1..19: mol_type = other RNA
gacctagtatttcaaggag

SEQ ID NO: 46041 - RNA, 19 nt, synthetic construct
  misc_feature 1..19: note = siRNA antisense sequence
  source 1..19: mol_type = other RNA
ctccttgaaatactaggtc

SEQ ID NO: 46042 - RNA, 19 nt, synthetic construct
  misc_feature 1..19: note = siRNA sense sequence
  source 1..19: mol_type = other RNA
acctagtatttcaaggagt

SEQ ID NO: 46043 - RNA, 19 nt, synthetic construct
  misc_feature 1..19: note = siRNA antisense sequence
  source 1..19: mol_type = other RNA
actccttgaaatactaggt

SEQ ID NO: 46044 - RNA, 19 nt, synthetic construct
  misc_feature 1..19: note = siRNA sense sequence
  source 1..19: mol_type = other RNA
cctagtatttcaaggagta

SEQ ID NO: 46045 - RNA, 19 nt, synthetic construct
  misc_feature 1..19: note = siRNA antisense sequence
  source 1..19: mol_type = other RNA
tactccttgaaatactagg

SEQ ID NO: 46046 - RNA, 19 nt, synthetic construct
  misc_feature 1..19: note = siRNA sense sequence
  source 1..19: mol_type = other RNA
ctagtatttcaaggagtag

SEQ ID NO: 46047 - RNA, 19 nt, synthetic construct
  misc_feature 1..19: note = siRNA antisense sequence
  source 1..19: mol_type = other RNA
ctactccttgaaatactag

SEQ ID NO: 46048 - RNA, 19 nt, synthetic construct
  misc_feature 1..19: note = siRNA sense sequence
  source 1..19: mol_type = other RNA
gtatttcaaggagtagctt

SEQ ID NO: 46049 - RNA, 19 nt, synthetic construct
  misc_feature 1..19: note = siRNA antisense sequence
  source 1..19: mol_type = other RNA
aagctactccttgaaatac

SEQ ID NO: 46050 - RNA, 19 nt, synthetic construct
  misc_feature 1..19: note = siRNA sense sequence
  source 1..19: mol_type = other RNA
aaggagtagcttgaagttt

SEQ ID NO: 46051 - RNA, 19 nt, synthetic construct
  misc_feature 1..19: note = siRNA antisense sequence
  source 1..19: mol_type = other RNA
aaacttcaagctactcctt

SEQ ID NO: 46052 - RNA, 19 nt, synthetic construct
  misc_feature 1..19: note = siRNA sense sequence
  source 1..19: mol_type = other RNA
aggagtagcttgaagtttt

SEQ ID NO: 46053 - RNA, 19 nt, synthetic construct
  misc_feature 1..19: note = siRNA antisense sequence
  source 1..19: mol_type = other RNA
aaaacttcaagctactcct

SEQ ID NO: 46054 - RNA, 19 nt, synthetic construct
  misc_feature 1..19: note = siRNA sense sequence
  source 1..19: mol_type = other RNA
ggagtagcttgaagtttta

SEQ ID NO: 46055 - RNA, 19 nt, synthetic construct
  misc_feature 1..19: note = siRNA antisense sequence
  source 1..19: mol_type = other RNA
taaaacttcaagctactcc

SEQ ID NO: 46056 - RNA, 19 nt, synthetic construct
  misc_feature 1..19: note = siRNA sense sequence
  source 1..19: mol_type = other RNA
gagtagcttgaagttttat

SEQ ID NO: 46057 - RNA, 19 nt, synthetic construct
  misc_feature 1..19: note = siRNA antisense sequence
  source 1..19: mol_type = other RNA
ataaaacttcaagctactc

SEQ ID NO: 46058 - RNA, 19 nt, synthetic construct
  misc_feature 1..19: note = siRNA sense sequence
  source 1..19: mol_type = other RNA
agtagcttgaagttttatc

SEQ ID NO: 46059 - RNA, 19 nt, synthetic construct
  misc_feature 1..19: note = siRNA antisense sequence
  source 1..19: mol_type = other RNA
gataaaacttcaagctact

SEQ ID NO: 46060 - RNA, 19 nt, synthetic construct
  misc_feature 1..19: note = siRNA sense sequence
  source 1..19: mol_type = other RNA
gtagcttgaagttttatct

SEQ ID NO: 46061 - RNA, 19 nt, synthetic construct
  misc_feature 1..19: note = siRNA antisense sequence
  source 1..19: mol_type = other RNA
agataaaacttcaagctac

SEQ ID NO: 46062 - RNA, 19 nt, synthetic construct
  misc_feature 1..19: note = siRNA sense sequence
  source 1..19: mol_type = other RNA
gtatatttcgaagtcattg

SEQ ID NO: 46063 - RNA, 19 nt, synthetic construct
  misc_feature 1..19: note = siRNA antisense sequence
  source 1..19: mol_type = other RNA
caatgacttcgaaatatac

SEQ ID NO: 46064 - RNA, 19 nt, synthetic construct
  misc_feature 1..19: note = siRNA sense sequence
  source 1..19: mol_type = other RNA
caagtatgttataggatga

SEQ ID NO: 46065 - RNA, 19 nt, synthetic construct
  misc_feature 1..19: note = siRNA antisense sequence
  source 1..19: mol_type = other RNA
tcatcctataacatacttg

SEQ ID NO: 46066 - RNA, 19 nt, synthetic construct
  misc_feature 1..19: note = siRNA sense sequence
  source 1..19: mol_type = other RNA
aagcagagtttcaggacag

SEQ ID NO: 46067 - RNA, 19 nt, synthetic construct
  misc_feature 1..19: note = siRNA antisense sequence
  source 1..19: mol_type = other RNA
ctgtcctgaaactctgctt

SEQ ID NO: 46068 - RNA, 19 nt, synthetic construct
  misc_feature 1..19: note = siRNA sense sequence
  source 1..19: mol_type = other RNA
agcagagtttcaggacagt

SEQ ID NO: 46069 - RNA, 19 nt, synthetic construct
  misc_feature 1..19: note = siRNA antisense sequence
  source 1..19: mol_type = other RNA
actgtcctgaaactctgct

SEQ ID NO: 46070 - RNA, 19 nt, synthetic construct
  misc_feature 1..19: note = siRNA sense sequence
  source 1..19: mol_type = other RNA
gcagagtttcaggacagtt

SEQ ID NO: 46071 - RNA, 19 nt, synthetic construct
  misc_feature 1..19: note = siRNA antisense sequence
  source 1..19: mol_type = other RNA
aactgtcctgaaactctgc

SEQ ID NO: 46072 - RNA, 19 nt, synthetic construct
  misc_feature 1..19: note = siRNA sense sequence
  source 1..19: mol_type = other RNA
cagagtttcaggacagtta

SEQ ID NO: 46073 - RNA, 19 nt, synthetic construct
  misc_feature 1..19: note = siRNA antisense sequence
  source 1..19: mol_type = other RNA
taactgtcctgaaactctg

SEQ ID NO: 46074 - RNA, 19 nt, synthetic construct
  misc_feature 1..19: note = siRNA sense sequence
  source 1..19: mol_type = other RNA
agagtttcaggacagttag

SEQ ID NO: 46075 - RNA, 19 nt, synthetic construct
  misc_feature 1..19: note = siRNA antisense sequence
  source 1..19: mol_type = other RNA
ctaactgtcctgaaactct

SEQ ID NO: 46076 - RNA, 19 nt, synthetic construct
  misc_feature 1..19: note = siRNA sense sequence
  source 1..19: mol_type = other RNA
gagtttcaggacagttagt

SEQ ID NO: 46077 - RNA, 19 nt, synthetic construct
  misc_feature 1..19: note = siRNA antisense sequence
  source 1..19: mol_type = other RNA
actaactgtcctgaaactc

SEQ ID NO: 46078 - RNA, 19 nt, synthetic construct
  misc_feature 1..19: note = siRNA sense sequence
  source 1..19: mol_type = other RNA
agtttcaggacagttagtc

SEQ ID NO: 46079 - RNA, 19 nt, synthetic construct
  misc_feature 1..19: note = siRNA antisense sequence
  source 1..19: mol_type = other RNA
gactaactgtcctgaaact

SEQ ID NO: 46080 - RNA, 19 nt, synthetic construct
  misc_feature 1..19: note = siRNA sense sequence
  source 1..19: mol_type = other RNA
gtttcaggacagttagtct

SEQ ID NO: 46081 - RNA, 19 nt, synthetic construct
  misc_feature 1..19: note = siRNA antisense sequence
  source 1..19: mol_type = other RNA
agactaactgtcctgaaac

SEQ ID NO: 46082 - RNA, 19 nt, synthetic construct
  misc_feature 1..19: note = siRNA sense sequence
  source 1..19: mol_type = other RNA
tttcaggacagttagtctg

SEQ ID NO: 46083 - RNA, 19 nt, synthetic construct
  misc_feature 1..19: note = siRNA antisense sequence
  source 1..19: mol_type = other RNA
cagactaactgtcctgaaa

SEQ ID NO: 46084 - RNA, 19 nt, synthetic construct
  misc_feature 1..19: note = siRNA sense sequence
  source 1..19: mol_type = other RNA
ttcaggacagttagtctgc

SEQ ID NO: 46085 - RNA, 19 nt, synthetic construct
  misc_feature 1..19: note = siRNA antisense sequence
  source 1..19: mol_type = other RNA
gcagactaactgtcctgaa

SEQ ID NO: 46086 - RNA, 19 nt, synthetic construct
  misc_feature 1..19: note = siRNA sense sequence
  source 1..19: mol_type = other RNA
tcaggacagttagtctgcc

SEQ ID NO: 46087 - RNA, 19 nt, synthetic construct
  misc_feature 1..19: note = siRNA antisense sequence
  source 1..19: mol_type = other RNA
ggcagactaactgtcctga

SEQ ID NO: 46088 - RNA, 19 nt, synthetic construct
  misc_feature 1..19: note = siRNA sense sequence
  source 1..19: mol_type = other RNA
caggacagttagtctgcca

SEQ ID NO: 46089 - RNA, 19 nt, synthetic construct
  misc_feature 1..19: note = siRNA antisense sequence
  source 1..19: mol_type = other RNA
tggcagactaactgtcctg

SEQ ID NO: 46090 - RNA, 19 nt, synthetic construct
  misc_feature 1..19: note = siRNA sense sequence
  source 1..19: mol_type = other RNA
aggacagttagtctgccag

SEQ ID NO: 46091 - RNA, 19 nt, synthetic construct
  misc_feature 1..19: note = siRNA antisense sequence
  source 1..19: mol_type = other RNA
ctggcagactaactgtcct

SEQ ID NO: 46092 - RNA, 19 nt, synthetic construct
  misc_feature 1..19: note = siRNA sense sequence
  source 1..19: mol_type = other RNA
cagttagtctgccaggaat

SEQ ID NO: 46093 - RNA, 19 nt, synthetic construct
  misc_feature 1..19: note = siRNA antisense sequence
  source 1..19: mol_type = other RNA
attcctggcagactaactg

SEQ ID NO: 46094 - RNA, 19 nt, synthetic construct
  misc_feature 1..19: note = siRNA sense sequence
  source 1..19: mol_type = other RNA
agttagtctgccaggaata

SEQ ID NO: 46095 - RNA, 19 nt, synthetic construct
  misc_feature 1..19: note = siRNA antisense sequence
  source 1..19: mol_type = other RNA
tattcctggcagactaact

SEQ ID NO: 46096 - RNA, 19 nt, synthetic construct
  misc_feature 1..19: note = siRNA sense sequence
  source 1..19: mol_type = other RNA
gttagtctgccaggaatat

SEQ ID NO: 46097 - RNA, 19 nt, synthetic construct
  misc_feature 1..19: note = siRNA antisense sequence
  source 1..19: mol_type = other RNA
atattcctggcagactaac

SEQ ID NO: 46098 - RNA, 19 nt, synthetic construct
  misc_feature 1..19: note = siRNA sense sequence
  source 1..19: mol_type = other RNA
ttagtctgccaggaatatg

SEQ ID NO: 46099 - RNA, 19 nt, synthetic construct
  misc_feature 1..19: note = siRNA antisense sequence
  source 1..19: mol_type = other RNA
catattcctggcagactaa

SEQ ID NO: 46100 - RNA, 19 nt, synthetic construct
  misc_feature 1..19: note = siRNA sense sequence
  source 1..19: mol_type = other RNA
agtctgccaggaatatgta

SEQ ID NO: 46101 - RNA, 19 nt, synthetic construct
  misc_feature 1..19: note = siRNA antisense sequence
  source 1..19: mol_type = other RNA
tacatattcctggcagact

SEQ ID NO: 46102 - RNA, 19 nt, synthetic construct
  misc_feature 1..19: note = siRNA sense sequence
  source 1..19: mol_type = other RNA
gtctgccaggaatatgtag

SEQ ID NO: 46103 - RNA, 19 nt, synthetic construct
  misc_feature 1..19: note = siRNA antisense sequence
  source 1..19: mol_type = other RNA
ctacatattcctggcagac

SEQ ID NO: 46104 - RNA, 19 nt, synthetic construct
  misc_feature 1..19: note = siRNA sense sequence
  source 1..19: mol_type = other RNA
tctgccaggaatatgtaga

SEQ ID NO: 46105 - RNA, 19 nt, synthetic construct
  misc_feature 1..19: note = siRNA antisense sequence
  source 1..19: mol_type = other RNA
tctacatattcctggcaga

SEQ ID NO: 46106 - RNA, 19 nt, synthetic construct
  misc_feature 1..19: note = siRNA sense sequence
  source 1..19: mol_type = other RNA
ctgccaggaatatgtagaa

SEQ ID NO: 46107 - RNA, 19 nt, synthetic construct
  misc_feature 1..19: note = siRNA antisense sequence
  source 1..19: mol_type = other RNA
ttctacatattcctggcag

SEQ ID NO: 46108 - RNA, 19 nt, synthetic construct
  misc_feature 1..19: note = siRNA sense sequence
  source 1..19: mol_type = other RNA
tgccaggaatatgtagaag

SEQ ID NO: 46109 - RNA, 19 nt, synthetic construct
  misc_feature 1..19: note = siRNA antisense sequence
  source 1..19: mol_type = other RNA
cttctacatattcctggca

SEQ ID NO: 46110 - RNA, 19 nt, synthetic construct
  misc_feature 1..19: note = siRNA sense sequence
  source 1..19: mol_type = other RNA
gaatatgtagaaggatgtg

SEQ ID NO: 46111 - RNA, 19 nt, synthetic construct
  misc_feature 1..19: note = siRNA antisense sequence
  source 1..19: mol_type = other RNA
cacatccttctacatattc

SEQ ID NO: 46112 - RNA, 19 nt, synthetic construct
  misc_feature 1..19: note = siRNA sense sequence
  source 1..19: mol_type = other RNA
atgtagaaggatgtgaaga

SEQ ID NO: 46113 - RNA, 19 nt, synthetic construct
  misc_feature 1..19: note = siRNA antisense sequence
  source 1..19: mol_type = other RNA
tcttcacatccttctacat

SEQ ID NO: 46114 - RNA, 19 nt, synthetic construct
  misc_feature 1..19: note = siRNA sense sequence
  source 1..19: mol_type = other RNA
tgtagaaggatgtgaagag

SEQ ID NO: 46115 - RNA, 19 nt, synthetic construct
  misc_feature 1..19: note = siRNA antisense sequence
  source 1..19: mol_type = other RNA
ctcttcacatccttctaca

SEQ ID NO: 46116 - RNA, 19 nt, synthetic construct
  misc_feature 1..19: note = siRNA sense sequence
  source 1..19: mol_type = other RNA
cattgccatggtccaagtt

SEQ ID NO: 46117 - RNA, 19 nt, synthetic construct
  misc_feature 1..19: note = siRNA antisense sequence
  source 1..19: mol_type = other RNA
aacttggaccatggcaatg

SEQ ID NO: 46118 - RNA, 19 nt, synthetic construct
  misc_feature 1..19: note = siRNA sense sequence
  source 1..19: mol_type = other RNA
attgccatggtccaagttc

SEQ ID NO: 46119 - RNA, 19 nt, synthetic construct
  misc_feature 1..19: note = siRNA antisense sequence
  source 1..19: mol_type = other RNA
gaacttggaccatggcaat

SEQ ID NO: 46120 - RNA, 19 nt, synthetic construct
  misc_feature 1..19: note = siRNA sense sequence
  source 1..19: mol_type = other RNA
ccatggtccaagttcaaag

SEQ ID NO: 46121 - RNA, 19 nt, synthetic construct
  misc_feature 1..19: note = siRNA antisense sequence
  source 1..19: mol_type = other RNA
ctttgaacttggaccatgg

SEQ ID NO: 46122 - RNA, 19 nt, synthetic construct
  misc_feature 1..19: note = siRNA sense sequence
  source 1..19: mol_type = other RNA
catggtccaagttcaaagc

SEQ ID NO: 46123 - RNA, 19 nt, synthetic construct
  misc_feature 1..19: note = siRNA antisense sequence
  source 1..19: mol_type = other RNA
gctttgaacttggaccatg

SEQ ID NO: 46124 - RNA, 19 nt, synthetic construct
  misc_feature 1..19: note = siRNA sense sequence
  source 1..19: mol_type = other RNA
atggtccaagttcaaagca

SEQ ID NO: 46125 - RNA, 19 nt, synthetic construct
  misc_feature 1..19: note = siRNA antisense sequence
  source 1..19: mol_type = other RNA
tgctttgaacttggaccat

SEQ ID NO: 46126 - RNA, 19 nt, synthetic construct
  misc_feature 1..19: note = siRNA sense sequence
  source 1..19: mol_type = other RNA
ggtccaagttcaaagcaat

SEQ ID NO: 46127 - RNA, 19 nt, synthetic construct
  misc_feature 1..19: note = siRNA antisense sequence
  source 1..19: mol_type = other RNA
attgctttgaacttggacc

SEQ ID NO: 46128 - RNA, 19 nt, synthetic construct
  misc_feature 1..19: note = siRNA sense sequence
  source 1..19: mol_type = other RNA
gtccaagttcaaagcaatg

SEQ ID NO: 46129 - RNA, 19 nt, synthetic construct
  misc_feature 1..19: note = siRNA antisense sequence
  source 1..19: mol_type = other RNA
cattgctttgaacttggac

SEQ ID NO: 46130 - RNA, 19 nt, synthetic construct
  misc_feature 1..19: note = siRNA sense sequence
  source 1..19: mol_type = other RNA
tccaagttcaaagcaatga

SEQ ID NO: 46131 - RNA, 19 nt, synthetic construct
  misc_feature 1..19: note = siRNA antisense sequence
  source 1..19: mol_type = other RNA
tcattgctttgaacttgga

SEQ ID NO: 46132 - RNA, 19 nt, synthetic construct
  misc_feature 1..19: note = siRNA sense sequence
  source 1..19: mol_type = other RNA
ccaagttcaaagcaatgat

SEQ ID NO: 46133 - RNA, 19 nt, synthetic construct
  misc_feature 1..19: note = siRNA antisense sequence
  source 1..19: mol_type = other RNA
atcattgctttgaacttgg

SEQ ID NO: 46134 - RNA, 19 nt, synthetic construct
  misc_feature 1..19: note = siRNA sense sequence
  source 1..19: mol_type = other RNA
gttcaaagcaatgatgtct

SEQ ID NO: 46135 - RNA, 19 nt, synthetic construct
  misc_feature 1..19: note = siRNA antisense sequence
  source 1..19: mol_type = other RNA
agacatcattgctttgaac

SEQ ID NO: 46136 - RNA, 19 nt, synthetic construct
  misc_feature 1..19: note = siRNA sense sequence
  source 1..19: mol_type = other RNA
ttcaaagcaatgatgtctg

SEQ ID NO: 46137 - RNA, 19 nt, synthetic construct
  misc_feature 1..19: note = siRNA antisense sequence
  source 1..19: mol_type = other RNA
cagacatcattgctttgaa

SEQ ID NO: 46138 - RNA, 19 nt, synthetic construct
  misc_feature 1..19: note = siRNA sense sequence
  source 1..19: mol_type = other RNA
tcaaagcaatgatgtctgg

SEQ ID NO: 46139 - RNA, 19 nt, synthetic construct
  misc_feature 1..19: note = siRNA antisense sequence
  source 1..19: mol_type = other RNA
ccagacatcattgctttga

SEQ ID NO: 46140 - RNA, 19 nt, synthetic construct
  misc_feature 1..19: note = siRNA sense sequence
  source 1..19: mol_type = other RNA
caaagcaatgatgtctggc

SEQ ID NO: 46141 - RNA, 19 nt, synthetic construct
  misc_feature 1..19: note = siRNA antisense sequence
  source 1..19: mol_type = other RNA
gccagacatcattgctttg

SEQ ID NO: 46142 - RNA, 19 nt, synthetic construct
  misc_feature 1..19: note = siRNA sense sequence
  source 1..19: mol_type = other RNA
aaagcaatgatgtctggcc

SEQ ID NO: 46143 - RNA, 19 nt, synthetic construct
  misc_feature 1..19: note = siRNA antisense sequence
  source 1..19: mol_type = other RNA
ggccagacatcattgcttt

SEQ ID NO: 46144 - RNA, 19 nt, synthetic construct
  misc_feature 1..19: note = siRNA sense sequence
  source 1..19: mol_type = other RNA
aagcaatgatgtctggcct

SEQ ID NO: 46145 - RNA, 19 nt, synthetic construct
  misc_feature 1..19: note = siRNA antisense sequence
  source 1..19: mol_type = other RNA
aggccagacatcattgctt

SEQ ID NO: 46146 - RNA, 19 nt, synthetic construct
  misc_feature 1..19: note = siRNA sense sequence
  source 1..19: mol_type = other RNA
agcaatgatgtctggcctg

SEQ ID NO: 46147 - RNA, 19 nt, synthetic construct
  misc_feature 1..19: note = siRNA antisense sequence
  source 1..19: mol_type = other RNA
caggccagacatcattgct

SEQ ID NO: 46148 - RNA, 19 nt, synthetic construct
  misc_feature 1..19: note = siRNA sense sequence
  source 1..19: mol_type = other RNA
gcaatgatgtctggcctga

SEQ ID NO: 46149 - RNA, 19 nt, synthetic construct
  misc_feature 1..19: note = siRNA antisense sequence
  source 1..19: mol_type = other RNA
tcaggccagacatcattgc

SEQ ID NO: 46150 - RNA, 19 nt, synthetic construct
  misc_feature 1..19: note = siRNA sense sequence
  source 1..19: mol_type = other RNA
caatgatgtctggcctgag

SEQ ID NO: 46151 - RNA, 19 nt, synthetic construct
  misc_feature 1..19: note = siRNA antisense sequence
  source 1..19: mol_type = other RNA
ctcaggccagacatcattg

SEQ ID NO: 46152 - RNA, 19 nt, synthetic construct
  misc_feature 1..19: note = siRNA sense sequence
  source 1..19: mol_type = other RNA
aatgatgtctggcctgagc

SEQ ID NO: 46153 - RNA, 19 nt, synthetic construct
  misc_feature 1..19: note = siRNA antisense sequence
  source 1..19: mol_type = other RNA
gctcaggccagacatcatt

SEQ ID NO: 46154 - RNA, 19 nt, synthetic construct
  misc_feature 1..19: note = siRNA sense sequence
  source 1..19: mol_type = other RNA
atgatgtctggcctgagct

SEQ ID NO: 46155 - RNA, 19 nt, synthetic construct
  misc_feature 1..19: note = siRNA antisense sequence
  source 1..19: mol_type = other RNA
agctcaggccagacatcat

SEQ ID NO: 46156 - RNA, 19 nt, synthetic construct
  misc_feature 1..19: note = siRNA sense sequence
  source 1..19: mol_type = other RNA
tgatgtctggcctgagcta

SEQ ID NO: 46157 - RNA, 19 nt, synthetic construct
  misc_feature 1..19: note = siRNA antisense sequence
  source 1..19: mol_type = other RNA
tagctcaggccagacatca

SEQ ID NO: 46158 - RNA, 19 nt, synthetic construct
  misc_feature 1..19: note = siRNA sense sequence
  source 1..19: mol_type = other RNA
gatgtctggcctgagctaa

SEQ ID NO: 46159 - RNA, 19 nt, synthetic construct
  misc_feature 1..19: note = siRNA antisense sequence
  source 1..19: mol_type = other RNA
ttagctcaggccagacatc

SEQ ID NO: 46160 - RNA, 19 nt, synthetic construct
  misc_feature 1..19: note = siRNA sense sequence
  source 1..19: mol_type = other RNA
atgtctggcctgagctaag

SEQ ID NO: 46161 - RNA, 19 nt, synthetic construct
  misc_feature 1..19: note = siRNA antisense sequence
  source 1..19: mol_type = other RNA
cttagctcaggccagacat

SEQ ID NO: 46162 - RNA, 19 nt, synthetic construct
  misc_feature 1..19: note = siRNA sense sequence
  source 1..19: mol_type = other RNA
tgtctggcctgagctaagg

SEQ ID NO: 46163 - RNA, 19 nt, synthetic construct
  misc_feature 1..19: note = siRNA antisense sequence
  source 1..19: mol_type = other RNA
ccttagctcaggccagaca

SEQ ID NO: 46164 - RNA, 19 nt, synthetic construct
  misc_feature 1..19: note = siRNA sense sequence
  source 1..19: mol_type = other RNA
tctggcctgagctaaggta

SEQ ID NO: 46165 - RNA, 19 nt, synthetic construct
  misc_feature 1..19: note = siRNA antisense sequence
  source 1..19: mol_type = other RNA
taccttagctcaggccaga

SEQ ID NO: 46166 - RNA, 19 nt, synthetic construct
  misc_feature 1..19: note = siRNA sense sequence
  source 1..19: mol_type = other RNA
tggcctgagctaaggtaat

SEQ ID NO: 46167 - RNA, 19 nt, synthetic construct
  misc_feature 1..19: note = siRNA antisense sequence
  source 1..19: mol_type = other RNA
attaccttagctcaggcca

SEQ ID NO: 46168 - RNA, 19 nt, synthetic construct
  misc_feature 1..19: note = siRNA sense sequence
  source 1..19: mol_type = other RNA
ggcctgagctaaggtaatg

SEQ ID NO: 46169 - RNA, 19 nt, synthetic construct
  misc_feature 1..19: note = siRNA antisense sequence
  source 1..19: mol_type = other RNA
cattaccttagctcaggcc

SEQ ID NO: 46170 - RNA, 19 nt, synthetic construct
  misc_feature 1..19: note = siRNA sense sequence
  source 1..19: mol_type = other RNA
gcctgagctaaggtaatga

SEQ ID NO: 46171 - RNA, 19 nt, synthetic construct
  misc_feature 1..19: note = siRNA antisense sequence
  source 1..19: mol_type = other RNA
tcattaccttagctcaggc

SEQ ID NO: 46172 - RNA, 19 nt, synthetic construct
  misc_feature 1..19: note = siRNA sense sequence
  source 1..19: mol_type = other RNA
cctgagctaaggtaatgag

SEQ ID NO: 46173 - RNA, 19 nt, synthetic construct
  misc_feature 1..19: note = siRNA antisense sequence
  source 1..19: mol_type = other RNA
ctcattaccttagctcagg

SEQ ID NO: 46174 - RNA, 19 nt, synthetic construct
  misc_feature 1..19: note = siRNA sense sequence
  source 1..19: mol_type = other RNA
tgagctaaggtaatgaggt

SEQ ID NO: 46175 - RNA, 19 nt, synthetic construct
  misc_feature 1..19: note = siRNA antisense sequence
  source 1..19: mol_type = other RNA
acctcattaccttagctca

SEQ ID NO: 46176 - RNA, 19 nt, synthetic construct
  misc_feature 1..19: note = siRNA sense sequence
  source 1..19: mol_type = other RNA
gagctaaggtaatgaggta

SEQ ID NO: 46177 - RNA, 19 nt, synthetic construct
  misc_feature 1..19: note = siRNA antisense sequence
  source 1..19: mol_type = other RNA
tacctcattaccttagctc

SEQ ID NO: 46178 - RNA, 19 nt, synthetic construct
  misc_feature 1..19: note = siRNA sense sequence
  source 1..19: mol_type = other RNA
agctaaggtaatgaggtag

SEQ ID NO: 46179 - RNA, 19 nt, synthetic construct
  misc_feature 1..19: note = siRNA antisense sequence
  source 1..19: mol_type = other RNA
ctacctcattaccttagct

SEQ ID NO: 46180 - RNA, 19 nt, synthetic construct
  misc_feature 1..19: note = siRNA sense sequence
  source 1..19: mol_type = other RNA
gctaaggtaatgaggtagg

SEQ ID NO: 46181 - RNA, 19 nt, synthetic construct
  misc_feature 1..19: note = siRNA antisense sequence
  source 1..19: mol_type = other RNA
cctacctcattaccttagc

SEQ ID NO: 46182 - RNA, 19 nt, synthetic construct
  misc_feature 1..19: note = siRNA sense sequence
  source 1..19: mol_type = other RNA
aggtaatgaggtaggaggc

SEQ ID NO: 46183 - RNA, 19 nt, synthetic construct
  misc_feature 1..19: note = siRNA antisense sequence
  source 1..19: mol_type = other RNA
gcctcctacctcattacct

SEQ ID NO: 46184 - RNA, 19 nt, synthetic construct
  misc_feature 1..19: note = siRNA sense sequence
  source 1..19: mol_type = other RNA
ggtaatgaggtaggaggcg

SEQ ID NO: 46185 - RNA, 19 nt, synthetic construct
  misc_feature 1..19: note = siRNA antisense sequence
  source 1..19: mol_type = other RNA
cgcctcctacctcattacc

SEQ ID NO: 46186 - RNA, 19 nt, synthetic construct
  misc_feature 1..19: note = siRNA sense sequence
  source 1..19: mol_type = other RNA
gtaatgaggtaggaggcga

SEQ ID NO: 46187 - RNA, 19 nt, synthetic construct
  misc_feature 1..19: note = siRNA antisense sequence
  source 1..19: mol_type = other RNA
tcgcctcctacctcattac

SEQ ID NO: 46188 - RNA, 19 nt, synthetic construct
  misc_feature 1..19: note = siRNA sense sequence
  source 1..19: mol_type = other RNA
taatgaggtaggaggcgag

SEQ ID NO: 46189 - RNA, 19 nt, synthetic construct
  misc_feature 1..19: note = siRNA antisense sequence
  source 1..19: mol_type = other RNA
ctcgcctcctacctcatta

SEQ ID NO: 46190 - RNA, 19 nt, synthetic construct
  misc_feature 1..19: note = siRNA sense sequence
  source 1..19: mol_type = other RNA
cagggatgaggcagaagat

SEQ ID NO: 46191 - RNA, 19 nt, synthetic construct
  misc_feature 1..19: note = siRNA antisense sequence
  source 1..19: mol_type = other RNA
atcttctgcctcatccctg

SEQ ID NO: 46192 - RNA, 19 nt, synthetic construct
  misc_feature 1..19: note = siRNA sense sequence
  source 1..19: mol_type = other RNA
agggatgaggcagaagatg

SEQ ID NO: 46193 - RNA, 19 nt, synthetic construct
  misc_feature 1..19: note = siRNA antisense sequence
  source 1..19: mol_type = other RNA
catcttctgcctcatccct

SEQ ID NO: 46194 - RNA, 19 nt, synthetic construct
  misc_feature 1..19: note = siRNA sense sequence
  source 1..19: mol_type = other RNA
gggatgaggcagaagatgc

SEQ ID NO: 46195 - RNA, 19 nt, synthetic construct
  misc_feature 1..19: note = siRNA antisense sequence
  source 1..19: mol_type = other RNA
gcatcttctgcctcatccc

SEQ ID NO: 46196 - RNA, 19 nt, synthetic construct
  misc_feature 1..19: note = siRNA sense sequence
  source 1..19: mol_type = other RNA
aaccaggagttactgtccc

SEQ ID NO: 46197 - RNA, 19 nt, synthetic construct
  misc_feature 1..19: note = siRNA antisense sequence
  source 1..19: mol_type = other RNA
gggacagtaactcctggtt

SEQ ID NO: 46198 - RNA, 19 nt, synthetic construct
  misc_feature 1..19: note = siRNA sense sequence
  source 1..19: mol_type = other RNA
accaggagttactgtccca

SEQ ID NO: 46199 - RNA, 19 nt, synthetic construct
  misc_feature 1..19: note = siRNA antisense sequence
  source 1..19: mol_type = other RNA
tgggacagtaactcctggt

SEQ ID NO: 46200 - RNA, 19 nt, synthetic construct
  misc_feature 1..19: note = siRNA sense sequence
  source 1..19: mol_type = other RNA
ccaggagttactgtcccat

SEQ ID NO: 46201 - RNA, 19 nt, synthetic construct
  misc_feature 1..19: note = siRNA antisense sequence
  source 1..19: mol_type = other RNA
atgggacagtaactcctgg

SEQ ID NO: 46202 - RNA, 19 nt, synthetic construct
  misc_feature 1..19: note = siRNA sense sequence
  source 1..19: mol_type = other RNA
caggagttactgtcccatt

SEQ ID NO: 46203 - RNA, 19 nt, synthetic construct
  misc_feature 1..19: note = siRNA antisense sequence
  source 1..19: mol_type = other RNA
aatgggacagtaactcctg

SEQ ID NO: 46204 - RNA, 19 nt, synthetic construct
  misc_feature 1..19: note = siRNA sense sequence
  source 1..19: mol_type = other RNA
aggagttactgtcccattc

SEQ ID NO: 46205 - RNA, 19 nt, synthetic construct
  misc_feature 1..19: note = siRNA antisense sequence
  source 1..19: mol_type = other RNA
gaatgggacagtaactcct

SEQ ID NO: 46206 - RNA, 19 nt, synthetic construct
  misc_feature 1..19: note = siRNA sense sequence
  source 1..19: mol_type = other RNA
tggcaatgacccaaggact

SEQ ID NO: 46207 - RNA, 19 nt, synthetic construct
  misc_feature 1..19: note = siRNA antisense sequence
  source 1..19: mol_type = other RNA
agtccttgggtcattgcca

SEQ ID NO: 46208 - RNA, 19 nt, synthetic construct
  misc_feature 1..19: note = siRNA sense sequence
  source 1..19: mol_type = other RNA
ggcaatgacccaaggactc

SEQ ID NO: 46209 - RNA, 19 nt, synthetic construct
  misc_feature 1..19: note = siRNA antisense sequence
  source 1..19: mol_type = other RNA
gagtccttgggtcattgcc

SEQ ID NO: 46210 - RNA, 19 nt, synthetic construct
  misc_feature 1..19: note = siRNA sense sequence
  source 1..19: mol_type = other RNA
gcaatgacccaaggactca

SEQ ID NO: 46211 - RNA, 19 nt, synthetic construct
  misc_feature 1..19: note = siRNA antisense sequence
  source 1..19: mol_type = other RNA
tgagtccttgggtcattgc

SEQ ID NO: 46212 - RNA, 19 nt, synthetic construct
  misc_feature 1..19: note = siRNA sense sequence
  source 1..19: mol_type = other RNA
aatgacccaaggactcaaa

SEQ ID NO: 46213 - RNA, 19 nt, synthetic construct
  misc_feature 1..19: note = siRNA antisense sequence
  source 1..19: mol_type = other RNA
tttgagtccttgggtcatt

SEQ ID NO: 46214 - RNA, 19 nt, synthetic construct
  misc_feature 1..19: note = siRNA sense sequence
  source 1..19: mol_type = other RNA
atgacccaaggactcaaaa

SEQ ID NO: 46215 - RNA, 19 nt, synthetic construct
  misc_feature 1..19: note = siRNA antisense sequence
  source 1..19: mol_type = other RNA
ttttgagtccttgggtcat

SEQ ID NO: 46216 - RNA, 19 nt, synthetic construct
  misc_feature 1..19: note = siRNA sense sequence
  source 1..19: mol_type = other RNA
tgacccaaggactcaaaag

SEQ ID NO: 46217 - RNA, 19 nt, synthetic construct
  misc_feature 1..19: note = siRNA antisense sequence
  source 1..19: mol_type = other RNA
cttttgagtccttgggtca

SEQ ID NO: 46218 - RNA, 19 nt, synthetic construct
  misc_feature 1..19: note = siRNA sense sequence
  source 1..19: mol_type = other RNA
gacccaaggactcaaaagt

SEQ ID NO: 46219 - RNA, 19 nt, synthetic construct
  misc_feature 1..19: note = siRNA antisense sequence
  source 1..19: mol_type = other RNA
acttttgagtccttgggtc

SEQ ID NO: 46220 - RNA, 19 nt, synthetic construct
  misc_feature 1..19: note = siRNA sense sequence
  source 1..19: mol_type = other RNA
acccaaggactcaaaagtt

SEQ ID NO: 46221 - RNA, 19 nt, synthetic construct
  misc_feature 1..19: note = siRNA antisense sequence
  source 1..19: mol_type = other RNA
aacttttgagtccttgggt

SEQ ID NO: 46222 - RNA, 19 nt, synthetic construct
  misc_feature 1..19: note = siRNA sense sequence
  source 1..19: mol_type = other RNA
cccaaggactcaaaagtta

SEQ ID NO: 46223 - RNA, 19 nt, synthetic construct
  misc_feature 1..19: note = siRNA antisense sequence
  source 1..19: mol_type = other RNA
taacttttgagtccttggg

SEQ ID NO: 46224 - RNA, 19 nt, synthetic construct
  misc_feature 1..19: note = siRNA sense sequence
  source 1..19: mol_type = other RNA
ccaaggactcaaaagttat

SEQ ID NO: 46225 - RNA, 19 nt, synthetic construct
  misc_feature 1..19: note = siRNA antisense sequence
  source 1..19: mol_type = other RNA
ataacttttgagtccttgg

SEQ ID NO: 46226 - RNA, 19 nt, synthetic construct
  misc_feature 1..19: note = siRNA sense sequence
  source 1..19: mol_type = other RNA
caaggactcaaaagttatt

SEQ ID NO: 46227 - RNA, 19 nt, synthetic construct
  misc_feature 1..19: note = siRNA antisense sequence
  source 1..19: mol_type = other RNA
aataacttttgagtccttg

SEQ ID NO: 46228 - RNA, 19 nt, synthetic construct
  misc_feature 1..19: note = siRNA sense sequence
  source 1..19: mol_type = other RNA
aggactcaaaagttattac

SEQ ID NO: 46229 - RNA, 19 nt, synthetic construct
  misc_feature 1..19: note = siRNA antisense sequence
  source 1..19: mol_type = other RNA
gtaataacttttgagtcct

SEQ ID NO: 46230 - RNA, 19 nt, synthetic construct
  misc_feature 1..19: note = siRNA sense sequence
  source 1..19: mol_type = other RNA
ggactcaaaagttattact

SEQ ID NO: 46231 - RNA, 19 nt, synthetic construct
  misc_feature 1..19: note = siRNA antisense sequence
  source 1..19: mol_type = other RNA
agtaataacttttgagtcc

SEQ ID NO: 46232 - RNA, 19 nt, synthetic construct
  misc_feature 1..19: note = siRNA sense sequence
  source 1..19: mol_type = other RNA
gactcaaaagttattactc

SEQ ID NO: 46233 - RNA, 19 nt, synthetic construct
  misc_feature 1..19: note = siRNA antisense sequence
  source 1..19: mol_type = other RNA
gagtaataacttttgagtc

SEQ ID NO: 46234 - RNA, 19 nt, synthetic construct
  misc_feature 1..19: note = siRNA sense sequence
  source 1..19: mol_type = other RNA
actcaaaagttattactcc

SEQ ID NO: 46235 - RNA, 19 nt, synthetic construct
  misc_feature 1..19: note = siRNA antisense sequence
  source 1..19: mol_type = other RNA
ggagtaataacttttgagt

SEQ ID NO: 46236 - RNA, 19 nt, synthetic construct
  misc_feature 1..19: note = siRNA sense sequence
  source 1..19: mol_type = other RNA
ctcaaaagttattactcct

SEQ ID NO: 46237 - RNA, 19 nt, synthetic construct
  misc_feature 1..19: note = siRNA antisense sequence
  source 1..19: mol_type = other RNA
aggagtaataacttttgag

SEQ ID NO: 46238 - RNA, 19 nt, synthetic construct
  misc_feature 1..19: note = siRNA sense sequence
  source 1..19: mol_type = other RNA
caaaagttattactccttc

SEQ ID NO: 46239 - RNA, 19 nt, synthetic construct
  misc_feature 1..19: note = siRNA antisense sequence
  source 1..19: mol_type = other RNA
gaaggagtaataacttttg

SEQ ID NO: 46240 - RNA, 19 nt, synthetic construct
  misc_feature 1..19: note = siRNA sense sequence
  source 1..19: mol_type = other RNA
aaaagttattactccttcc

SEQ ID NO: 46241 - RNA, 19 nt, synthetic construct
  misc_feature 1..19: note = siRNA antisense sequence
  source 1..19: mol_type = other RNA
ggaaggagtaataactttt

SEQ ID NO: 46242 - RNA, 19 nt, synthetic construct
  misc_feature 1..19: note = siRNA sense sequence
  source 1..19: mol_type = other RNA
aaagttattactccttccc

SEQ ID NO: 46243 - RNA, 19 nt, synthetic construct
  misc_feature 1..19: note = siRNA antisense sequence
  source 1..19: mol_type = other RNA
gggaaggagtaataacttt

SEQ ID NO: 46244 - RNA, 19 nt, synthetic construct
  misc_feature 1..19: note = siRNA sense sequence
  source 1..19: mol_type = other RNA
aagttattactccttccct

SEQ ID NO: 46245 - RNA, 19 nt, synthetic construct
  misc_feature 1..19: note = siRNA antisense sequence
  source 1..19: mol_type = other RNA
agggaaggagtaataactt

SEQ ID NO: 46246 - RNA, 19 nt, synthetic construct
  misc_feature 1..19: note = siRNA sense sequence
  source 1..19: mol_type = other RNA
agttattactccttcccta

SEQ ID NO: 46247 - RNA, 19 nt, synthetic construct
  misc_feature 1..19: note = siRNA antisense sequence
  source 1..19: mol_type = other RNA
tagggaaggagtaataact

SEQ ID NO: 46248 - RNA, 19 nt, synthetic construct
  misc_feature 1..19: note = siRNA sense sequence
  source 1..19: mol_type = other RNA
gttattactccttccctag

SEQ ID NO: 46249 - RNA, 19 nt, synthetic construct
  misc_feature 1..19: note = siRNA antisense sequence
  source 1..19: mol_type = other RNA
ctagggaaggagtaataac

SEQ ID NO: 46250 - RNA, 19 nt, synthetic construct
  misc_feature 1..19: note = siRNA sense sequence
  source 1..19: mol_type = other RNA
ttattactccttccctaga

SEQ ID NO: 46251 - RNA, 19 nt, synthetic construct
  misc_feature 1..19: note = siRNA antisense sequence
  source 1..19: mol_type = other RNA
tctagggaaggagtaataa

SEQ ID NO: 46252 - RNA, 19 nt, synthetic construct
  misc_feature 1..19: note = siRNA sense sequence
  source 1..19: mol_type = other RNA
aaagttctgcatacaccac

SEQ ID NO: 46253 - RNA, 19 nt, synthetic construct
  misc_feature 1..19: note = siRNA antisense sequence
  source 1..19: mol_type = other RNA
gtggtgtatgcagaacttt

SEQ ID NO: 46254 - RNA, 19 nt, synthetic construct
  misc_feature 1..19: note = siRNA sense sequence
  source 1..19: mol_type = other RNA
ttctgcatacaccacctct

SEQ ID NO: 46255 - RNA, 19 nt, synthetic construct
  misc_feature 1..19: note = siRNA antisense sequence
  source 1..19: mol_type = other RNA
agaggtggtgtatgcagaa

SEQ ID NO: 46256 - RNA, 19 nt, synthetic construct
  misc_feature 1..19: note = siRNA sense sequence
  source 1..19: mol_type = other RNA
tctgcatacaccacctctt

SEQ ID NO: 46257 - RNA, 19 nt, synthetic construct
  misc_feature 1..19: note = siRNA antisense sequence
  source 1..19: mol_type = other RNA
aagaggtggtgtatgcaga

SEQ ID NO: 46258 - RNA, 19 nt, synthetic construct
  misc_feature 1..19: note = siRNA sense sequence
  source 1..19: mol_type = other RNA
ctgcatacaccacctctta

SEQ ID NO: 46259 - RNA, 19 nt, synthetic construct
  misc_feature 1..19: note = siRNA antisense sequence
  source 1..19: mol_type = other RNA
taagaggtggtgtatgcag

SEQ ID NO: 46260 - RNA, 19 nt, synthetic construct
  misc_feature 1..19: note = siRNA sense sequence
  source 1..19: mol_type = other RNA
tgcatacaccacctcttaa

SEQ ID NO: 46261 - RNA, 19 nt, synthetic construct
  misc_feature 1..19: note = siRNA antisense sequence
  source 1..19: mol_type = other RNA
ttaagaggtggtgtatgca

SEQ ID NO: 46262 - RNA, 19 nt, synthetic construct
  misc_feature 1..19: note = siRNA sense sequence
  source 1..19: mol_type = other RNA
gcatacaccacctcttaat

SEQ ID NO: 46263 - RNA, 19 nt, synthetic construct
  misc_feature 1..19: note = siRNA antisense sequence
  source 1..19: mol_type = other RNA
attaagaggtggtgtatgc

SEQ ID NO: 46264 - RNA, 19 nt, synthetic construct
  misc_feature 1..19: note = siRNA sense sequence
  source 1..19: mol_type = other RNA
cacctcttaatgtacatgt

SEQ ID NO: 46265 - RNA, 19 nt, synthetic construct
  misc_feature 1..19: note = siRNA antisense sequence
  source 1..19: mol_type = other RNA
acatgtacattaagaggtg

SEQ ID NO: 46266 - RNA, 19 nt, synthetic construct
  misc_feature 1..19: note = siRNA sense sequence
  source 1..19: mol_type = other RNA
aactgccctgagcttctcc

SEQ ID NO: 46267 - RNA, 19 nt, synthetic construct
  misc_feature 1..19: note = siRNA antisense sequence
  source 1..19: mol_type = other RNA
ggagaagctcagggcagtt

SEQ ID NO: 46268 - RNA, 19 nt, synthetic construct
  misc_feature 1..19: note = siRNA sense sequence
  source 1..19: mol_type = other RNA
actgccctgagcttctcct

SEQ ID NO: 46269 - RNA, 19 nt, synthetic construct
  misc_feature 1..19: note = siRNA antisense sequence
  source 1..19: mol_type = other RNA
aggagaagctcagggcagt

SEQ ID NO: 46270 - RNA, 19 nt, synthetic construct
  misc_feature 1..19: note = siRNA sense sequence
  source 1..19: mol_type = other RNA
ctgccctgagcttctcctc

SEQ ID NO: 46271 - RNA, 19 nt, synthetic construct
  misc_feature 1..19: note = siRNA antisense sequence
  source 1..19: mol_type = other RNA
gaggagaagctcagggcag

SEQ ID NO: 46272 - RNA, 19 nt, synthetic construct
  misc_feature 1..19: note = siRNA sense sequence
  source 1..19: mol_type = other RNA
cctgagcttctcctctctg

SEQ ID NO: 46273 - RNA, 19 nt, synthetic construct
  misc_feature 1..19: note = siRNA antisense sequence
  source 1..19: mol_type = other RNA
cagagaggagaagctcagg

SEQ ID NO: 46274 - RNA, 19 nt, synthetic construct
  misc_feature 1..19: note = siRNA sense sequence
  source 1..19: mol_type = other RNA
ctctctgcctgtgaggtag

SEQ ID NO: 46275 - RNA, 19 nt, synthetic construct
  misc_feature 1..19: note = siRNA antisense sequence
  source 1..19: mol_type = other RNA
ctacctcacaggcagagag

SEQ ID NO: 46276 - RNA, 19 nt, synthetic construct
  misc_feature 1..19: note = siRNA sense sequence
  source 1..19: mol_type = other RNA
tctctgcctgtgaggtagt

SEQ ID NO: 46277 - RNA, 19 nt, synthetic construct
  misc_feature 1..19: note = siRNA antisense sequence
  source 1..19: mol_type = other RNA
actacctcacaggcagaga

SEQ ID NO: 46278 - RNA, 19 nt, synthetic construct
  misc_feature 1..19: note = siRNA sense sequence
  source 1..19: mol_type = other RNA
tctgcctgtgaggtagtcc

SEQ ID NO: 46279 - RNA, 19 nt, synthetic construct
  misc_feature 1..19: note = siRNA antisense sequence
  source 1..19: mol_type = other RNA
ggactacctcacaggcaga

SEQ ID NO: 46280 - RNA, 19 nt, synthetic construct
  misc_feature 1..19: note = siRNA sense sequence
  source 1..19: mol_type = other RNA
ctgcctgtgaggtagtcct

SEQ ID NO: 46281 - RNA, 19 nt, synthetic construct
  misc_feature 1..19: note = siRNA antisense sequence
  source 1..19: mol_type = other RNA
aggactacctcacaggcag

SEQ ID NO: 46282 - RNA, 19 nt, synthetic construct
  misc_feature 1..19: note = siRNA sense sequence
  source 1..19: mol_type = other RNA
tgcctgtgaggtagtcctg

SEQ ID NO: 46283 - RNA, 19 nt, synthetic construct
  misc_feature 1..19: note = siRNA antisense sequence
  source 1..19: mol_type = other RNA
caggactacctcacaggca

SEQ ID NO: 46284 - RNA, 19 nt, synthetic construct
  misc_feature 1..19: note = siRNA sense sequence
  source 1..19: mol_type = other RNA
gcctgtgaggtagtcctgc

SEQ ID NO: 46285 - RNA, 19 nt, synthetic construct
  misc_feature 1..19: note = siRNA antisense sequence
  source 1..19: mol_type = other RNA
gcaggactacctcacaggc

SEQ ID NO: 46286 - RNA, 19 nt, synthetic construct
  misc_feature 1..19: note = siRNA sense sequence
  source 1..19: mol_type = other RNA
cctgtgaggtagtcctgcc

SEQ ID NO: 46287 - RNA, 19 nt, synthetic construct
  misc_feature 1..19: note = siRNA antisense sequence
  source 1..19: mol_type = other RNA
ggcaggactacctcacagg

SEQ ID NO: 46288 - RNA, 19 nt, synthetic construct
  misc_feature 1..19: note = siRNA sense sequence
  source 1..19: mol_type = other RNA
ctgtgaggtagtcctgcct

SEQ ID NO: 46289 - RNA, 19 nt, synthetic construct
  misc_feature 1..19: note = siRNA antisense sequence
  source 1..19: mol_type = other RNA
aggcaggactacctcacag

SEQ ID NO: 46290 - RNA, 19 nt, synthetic construct
  misc_feature 1..19: note = siRNA sense sequence
  source 1..19: mol_type = other RNA
tgtgaggtagtcctgcctg

SEQ ID NO: 46291 - RNA, 19 nt, synthetic construct
  misc_feature 1..19: note = siRNA antisense sequence
  source 1..19: mol_type = other RNA
caggcaggactacctcaca

SEQ ID NO: 46292 - RNA, 19 nt, synthetic construct
  misc_feature 1..19: note = siRNA sense sequence
  source 1..19: mol_type = other RNA
gtgaggtagtcctgcctgg

SEQ ID NO: 46293 - RNA, 19 nt, synthetic construct
  misc_feature 1..19: note = siRNA antisense sequence
  source 1..19: mol_type = other RNA
ccaggcaggactacctcac

SEQ ID NO: 46294 - RNA, 19 nt, synthetic construct
  misc_feature 1..19: note = siRNA sense sequence
  source 1..19: mol_type = other RNA
tgaggtagtcctgcctggc

SEQ ID NO: 46295 - RNA, 19 nt, synthetic construct
  misc_feature 1..19: note = siRNA antisense sequence
  source 1..19: mol_type = other RNA
gccaggcaggactacctca

SEQ ID NO: 46296 - RNA, 19 nt, synthetic construct
  misc_feature 1..19: note = siRNA sense sequence
  source 1..19: mol_type = other RNA
gaggtagtcctgcctggca

SEQ ID NO: 46297 - RNA, 19 nt, synthetic construct
  misc_feature 1..19: note = siRNA antisense sequence
  source 1..19: mol_type = other RNA
tgccaggcaggactacctc

SEQ ID NO: 46298 - RNA, 19 nt, synthetic construct
  misc_feature 1..19: note = siRNA sense sequence
  source 1..19: mol_type = other RNA
tgcctggcaggagcagtca

SEQ ID NO: 46299 - RNA, 19 nt, synthetic construct
  misc_feature 1..19: note = siRNA antisense sequence
  source 1..19: mol_type = other RNA
tgactgctcctgccaggca

SEQ ID NO: 46300 - RNA, 19 nt, synthetic construct
  misc_feature 1..19: note = siRNA sense sequence
  source 1..19: mol_type = other RNA
gtaaggccaccagagctgt

SEQ ID NO: 46301 - RNA, 19 nt, synthetic construct
  misc_feature 1..19: note = siRNA antisense sequence
  source 1..19: mol_type = other RNA
acagctctggtggccttac

SEQ ID NO: 46302 - RNA, 19 nt, synthetic construct
  misc_feature 1..19: note = siRNA sense sequence
  source 1..19: mol_type = other RNA
aaggccaccagagctgtaa

SEQ ID NO: 46303 - RNA, 19 nt, synthetic construct
  misc_feature 1..19: note = siRNA antisense sequence
  source 1..19: mol_type = other RNA
ttacagctctggtggcctt

SEQ ID NO: 46304 - RNA, 19 nt, synthetic construct
  misc_feature 1..19: note = siRNA sense sequence
  source 1..19: mol_type = other RNA
aggccaccagagctgtaac

SEQ ID NO: 46305 - RNA, 19 nt, synthetic construct
  misc_feature 1..19: note = siRNA antisense sequence
  source 1..19: mol_type = other RNA
gttacagctctggtggcct

SEQ ID NO: 46306 - RNA, 19 nt, synthetic construct
  misc_feature 1..19: note = siRNA sense sequence
  source 1..19: mol_type = other RNA
ggccaccagagctgtaacg

SEQ ID NO: 46307 - RNA, 19 nt, synthetic construct
  misc_feature 1..19: note = siRNA antisense sequence
  source 1..19: mol_type = other RNA
cgttacagctctggtggcc

SEQ ID NO: 46308 - RNA, 19 nt, synthetic construct
  misc_feature 1..19: note = siRNA sense sequence
  source 1..19: mol_type = other RNA
gccaccagagctgtaacgc

SEQ ID NO: 46309 - RNA, 19 nt, synthetic construct
  misc_feature 1..19: note = siRNA antisense sequence
  source 1..19: mol_type = other RNA
gcgttacagctctggtggc

SEQ ID NO: 46310 - RNA, 19 nt, synthetic construct
  misc_feature 1..19: note = siRNA sense sequence
  source 1..19: mol_type = other RNA
caccagagctgtaacgctg

SEQ ID NO: 46311 - RNA, 19 nt, synthetic construct
  misc_feature 1..19: note = siRNA antisense sequence
  source 1..19: mol_type = other RNA
cagcgttacagctctggtg

SEQ ID NO: 46312 - RNA, 19 nt, synthetic construct
  misc_feature 1..19: note = siRNA sense sequence
  source 1..19: mol_type = other RNA
accagagctgtaacgctgc

SEQ ID NO: 46313 - RNA, 19 nt, synthetic construct
  misc_feature 1..19: note = siRNA antisense sequence
  source 1..19: mol_type = other RNA
gcagcgttacagctctggt

SEQ ID NO: 46314 - RNA, 19 nt, synthetic construct
  misc_feature 1..19: note = siRNA sense sequence
  source 1..19: mol_type = other RNA
ccagagctgtaacgctgca

SEQ ID NO: 46315 - RNA, 19 nt, synthetic construct
  misc_feature 1..19: note = siRNA antisense sequence
  source 1..19: mol_type = other RNA
tgcagcgttacagctctgg

SEQ ID NO: 46316 - RNA, 19 nt, synthetic construct
  misc_feature 1..19: note = siRNA sense sequence
  source 1..19: mol_type = other RNA
taacgctgcagcttcaaaa

SEQ ID NO: 46317 - RNA, 19 nt, synthetic construct
  misc_feature 1..19: note = siRNA antisense sequence
  source 1..19: mol_type = other RNA
ttttgaagctgcagcgtta

SEQ ID NO: 46318 - RNA, 19 nt, synthetic construct
  misc_feature 1..19: note = siRNA sense sequence
  source 1..19: mol_type = other RNA
aacgctgcagcttcaaaat

SEQ ID NO: 46319 - RNA, 19 nt, synthetic construct
  misc_feature 1..19: note = siRNA antisense sequence
  source 1..19: mol_type = other RNA
attttgaagctgcagcgtt

SEQ ID NO: 46320 - RNA, 19 nt, synthetic construct
  misc_feature 1..19: note = siRNA sense sequence
  source 1..19: mol_type = other RNA
acgctgcagcttcaaaata

SEQ ID NO: 46321 - RNA, 19 nt, synthetic construct
  misc_feature 1..19: note = siRNA antisense sequence
  source 1..19: mol_type = other RNA
tattttgaagctgcagcgt

SEQ ID NO: 46322 - RNA, 19 nt, synthetic construct
  misc_feature 1..19: note = siRNA sense sequence
  source 1..19: mol_type = other RNA
cgctgcagcttcaaaataa

SEQ ID NO: 46323 - RNA, 19 nt, synthetic construct
  misc_feature 1..19: note = siRNA antisense sequence
  source 1..19: mol_type = other RNA
ttattttgaagctgcagcg

SEQ ID NO: 46324 - RNA, 19 nt, synthetic construct
  misc_feature 1..19: note = siRNA sense sequence
  source 1..19: mol_type = other RNA
gctgcagcttcaaaataaa

SEQ ID NO: 46325 - RNA, 19 nt, synthetic construct
  misc_feature 1..19: note = siRNA antisense sequence
  source 1..19: mol_type = other RNA
tttattttgaagctgcagc

SEQ ID NO: 46326 - RNA, 19 nt, synthetic construct
  misc_feature 1..19: note = siRNA sense sequence
  source 1..19: mol_type = other RNA
agttgacagctgccttaga

SEQ ID NO: 46327 - RNA, 19 nt, synthetic construct
  misc_feature 1..19: note = siRNA antisense sequence
  source 1..19: mol_type = other RNA
tctaaggcagctgtcaact

SEQ ID NO: 46328 - RNA, 19 nt, synthetic construct
  misc_feature 1..19: note = siRNA sense sequence
  source 1..19: mol_type = other RNA
gttgacagctgccttagat

SEQ ID NO: 46329 - RNA, 19 nt, synthetic construct
  misc_feature 1..19: note = siRNA antisense sequence
  source 1..19: mol_type = other RNA
atctaaggcagctgtcaac

SEQ ID NO: 46330 - RNA, 19 nt, synthetic construct
  misc_feature 1..19: note = siRNA sense sequence
  source 1..19: mol_type = other RNA
ttgacagctgccttagatc

SEQ ID NO: 46331 - RNA, 19 nt, synthetic construct
  misc_feature 1..19: note = siRNA antisense sequence
  source 1..19: mol_type = other RNA
gatctaaggcagctgtcaa

SEQ ID NO: 46332 - RNA, 19 nt, synthetic construct
  misc_feature 1..19: note = siRNA sense sequence
  source 1..19: mol_type = other RNA
tgacagctgccttagatcc

SEQ ID NO: 46333 - RNA, 19 nt, synthetic construct
  misc_feature 1..19: note = siRNA antisense sequence
  source 1..19: mol_type = other RNA
ggatctaaggcagctgtca

SEQ ID NO: 46334 - RNA, 19 nt, synthetic construct
  misc_feature 1..19: note = siRNA sense sequence
  source 1..19: mol_type = other RNA
gacagctgccttagatcca

SEQ ID NO: 46335 - RNA, 19 nt, synthetic construct
  misc_feature 1..19: note = siRNA antisense sequence
  source 1..19: mol_type = other RNA
tggatctaaggcagctgtc

SEQ ID NO: 46336 - RNA, 19 nt, synthetic construct
  misc_feature 1..19: note = siRNA sense sequence
  source 1..19: mol_type = other RNA
acagctgccttagatccag

SEQ ID NO: 46337 - RNA, 19 nt, synthetic construct
  misc_feature 1..19: note = siRNA antisense sequence
  source 1..19: mol_type = other RNA
ctggatctaaggcagctgt

SEQ ID NO: 46338 - RNA, 19 nt, synthetic construct
  misc_feature 1..19: note = siRNA sense sequence
  source 1..19: mol_type = other RNA
ctgccttagatccagctcc

SEQ ID NO: 46339 - RNA, 19 nt, synthetic construct
  misc_feature 1..19: note = siRNA antisense sequence
  source 1..19: mol_type = other RNA
ggagctggatctaaggcag

SEQ ID NO: 46340 - RNA, 19 nt, synthetic construct
  misc_feature 1..19: note = siRNA sense sequence
  source 1..19: mol_type = other RNA
tgccttagatccagctccc

SEQ ID NO: 46341 - RNA, 19 nt, synthetic construct
  misc_feature 1..19: note = siRNA antisense sequence
  source 1..19: mol_type = other RNA
gggagctggatctaaggca

SEQ ID NO: 46342 - RNA, 19 nt, synthetic construct
  misc_feature 1..19: note = siRNA sense sequence
  source 1..19: mol_type = other RNA
tagatccagctcccagaag

SEQ ID NO: 46343 - RNA, 19 nt, synthetic construct
  misc_feature 1..19: note = siRNA antisense sequence
  source 1..19: mol_type = other RNA
cttctgggagctggatcta

SEQ ID NO: 46344 - RNA, 19 nt, synthetic construct
  misc_feature 1..19: note = siRNA sense sequence
  source 1..19: mol_type = other RNA
tccagctcccagaagcaaa

SEQ ID NO: 46345 - RNA, 19 nt, synthetic construct
  misc_feature 1..19: note = siRNA antisense sequence
  source 1..19: mol_type = other RNA
tttgcttctgggagctgga

SEQ ID NO: 46346 - RNA, 19 nt, synthetic construct
  misc_feature 1..19: note = siRNA sense sequence
  source 1..19: mol_type = other RNA
agaggacgattcacatgat

SEQ ID NO: 46347 - RNA, 19 nt, synthetic construct
  misc_feature 1..19: note = siRNA antisense sequence
  source 1..19: mol_type = other RNA
atcatgtgaatcgtcctct

SEQ ID NO: 46348 - RNA, 19 nt, synthetic construct
  misc_feature 1..19: note = siRNA sense sequence
  source 1..19: mol_type = other RNA
gaggacgattcacatgata

SEQ ID NO: 46349 - RNA, 19 nt, synthetic construct
  misc_feature 1..19: note = siRNA antisense sequence
  source 1..19: mol_type = other RNA
tatcatgtgaatcgtcctc

SEQ ID NO: 46350 - RNA, 19 nt, synthetic construct
  misc_feature 1..19: note = siRNA sense sequence
  source 1..19: mol_type = other RNA
aggacgattcacatgatag

SEQ ID NO: 46351 - RNA, 19 nt, synthetic construct
  misc_feature 1..19: note = siRNA antisense sequence
  source 1..19: mol_type = other RNA
ctatcatgtgaatcgtcct

SEQ ID NO: 46352 - RNA, 19 nt, synthetic construct
  misc_feature 1..19: note = siRNA sense sequence
  source 1..19: mol_type = other RNA
ggacgattcacatgatagt

SEQ ID NO: 46353 - RNA, 19 nt, synthetic construct
  misc_feature 1..19: note = siRNA antisense sequence
  source 1..19: mol_type = other RNA
actatcatgtgaatcgtcc

SEQ ID NO: 46354 - RNA, 19 nt, synthetic construct
  misc_feature 1..19: note = siRNA sense sequence
  source 1..19: mol_type = other RNA
gacgattcacatgatagtg

SEQ ID NO: 46355 - RNA, 19 nt, synthetic construct
  misc_feature 1..19: note = siRNA antisense sequence
  source 1..19: mol_type = other RNA
cactatcatgtgaatcgtc

SEQ ID NO: 46356 - RNA, 19 nt, synthetic construct
  misc_feature 1..19: note = siRNA sense sequence
  source 1..19: mol_type = other RNA
aaagtgtaatttcaagtgg

SEQ ID NO: 46357 - RNA, 19 nt, synthetic construct
  misc_feature 1..19: note = siRNA antisense sequence
  source 1..19: mol_type = other RNA
ccacttgaaattacacttt

SEQ ID NO: 46358 - RNA, 19 nt, synthetic construct
  misc_feature 1..19: note = siRNA sense sequence
  source 1..19: mol_type = other RNA
aagtgtaatttcaagtgga

SEQ ID NO: 46359 - RNA, 19 nt, synthetic construct
  misc_feature 1..19: note = siRNA antisense sequence
  source 1..19: mol_type = other RNA
tccacttgaaattacactt

SEQ ID NO: 46360 - RNA, 19 nt, synthetic construct
  misc_feature 1..19: note = siRNA sense sequence
  source 1..19: mol_type = other RNA
agtgtaatttcaagtggaa

SEQ ID NO: 46361 - RNA, 19 nt, synthetic construct
  misc_feature 1..19: note = siRNA antisense sequence
  source 1..19: mol_type = other RNA
ttccacttgaaattacact

SEQ ID NO: 46362 - RNA, 19 nt, synthetic construct
  misc_feature 1..19: note = siRNA sense sequence
  source 1..19: mol_type = other RNA
gtgtaatttcaagtggaat

SEQ ID NO: 46363 - RNA, 19 nt, synthetic construct
  misc_feature 1..19: note = siRNA antisense sequence
  source 1..19: mol_type = other RNA
attccacttgaaattacac

SEQ ID NO: 46364 - RNA, 19 nt, synthetic construct
  misc_feature 1..19: note = siRNA sense sequence
  source 1..19: mol_type = other RNA
tgtaatttcaagtggaatc

SEQ ID NO: 46365 - RNA, 19 nt, synthetic construct
  misc_feature 1..19: note = siRNA antisense sequence
  source 1..19: mol_type = other RNA
gattccacttgaaattaca

SEQ ID NO: 46366 - RNA, 19 nt, synthetic construct
  misc_feature 1..19: note = siRNA sense sequence
  source 1..19: mol_type = other RNA
gtaatttcaagtggaatcc

SEQ ID NO: 46367 - RNA, 19 nt, synthetic construct
  misc_feature 1..19: note = siRNA antisense sequence
  source 1..19: mol_type = other RNA
ggattccacttgaaattac

SEQ ID NO: 46368 - RNA, 19 nt, synthetic construct
  misc_feature 1..19: note = siRNA sense sequence
  source 1..19: mol_type = other RNA
taatttcaagtggaatcca

SEQ ID NO: 46369 - RNA, 19 nt, synthetic construct
  misc_feature 1..19: note = siRNA antisense sequence
  source 1..19: mol_type = other RNA
tggattccacttgaaatta

SEQ ID NO: 46370 - RNA, 19 nt, synthetic construct
  misc_feature 1..19: note = siRNA sense sequence
  source 1..19: mol_type = other RNA
aatttcaagtggaatccag

SEQ ID NO: 46371 - RNA, 19 nt, synthetic construct
  misc_feature 1..19: note = siRNA antisense sequence
  source 1..19: mol_type = other RNA
ctggattccacttgaaatt

SEQ ID NO: 46372 - RNA, 19 nt, synthetic construct
  misc_feature 1..19: note = siRNA sense sequence
  source 1..19: mol_type = other RNA
atttcaagtggaatccagg

SEQ ID NO: 46373 - RNA, 19 nt, synthetic construct
  misc_feature 1..19: note = siRNA antisense sequence
  source 1..19: mol_type = other RNA
cctggattccacttgaaat

SEQ ID NO: 46374 - RNA, 19 nt, synthetic construct
  misc_feature 1..19: note = siRNA sense sequence
  source 1..19: mol_type = other RNA
tttcaagtggaatccaggc

SEQ ID NO: 46375 - RNA, 19 nt, synthetic construct
  misc_feature 1..19: note = siRNA antisense sequence
  source 1..19: mol_type = other RNA
gcctggattccacttgaaa

SEQ ID NO: 46376 - RNA, 19 nt, synthetic construct
  misc_feature 1..19: note = siRNA sense sequence
  source 1..19: mol_type = other RNA
tcagcttgatatggaaggg

SEQ ID NO: 46377 - RNA, 19 nt, synthetic construct
  misc_feature 1..19: note = siRNA antisense sequence
  source 1..19: mol_type = other RNA
cccttccatatcaagctga

SEQ ID NO: 46378 - RNA, 19 nt, synthetic construct
  misc_feature 1..19: note = siRNA sense sequence
  source 1..19: mol_type = other RNA
gggagtttctacttgagtc

SEQ ID NO: 46379 - RNA, 19 nt, synthetic construct
  misc_feature 1..19: note = siRNA antisense sequence
  source 1..19: mol_type = other RNA
gactcaagtagaaactccc

SEQ ID NO: 46380 - RNA, 19 nt, synthetic construct
  misc_feature 1..19: note = siRNA sense sequence
  source 1..19: mol_type = other RNA
ggagtttctacttgagtca

SEQ ID NO: 46381 - RNA, 19 nt, synthetic construct
  misc_feature 1..19: note = siRNA antisense sequence
  source 1..19: mol_type = other RNA
tgactcaagtagaaactcc

SEQ ID NO: 46382 - RNA, 19 nt, synthetic construct
  misc_feature 1..19: note = siRNA sense sequence
  source 1..19: mol_type = other RNA
gagtttctacttgagtcaa

SEQ ID NO: 46383 - RNA, 19 nt, synthetic construct
  misc_feature 1..19: note = siRNA antisense sequence
  source 1..19: mol_type = other RNA
ttgactcaagtagaaactc

SEQ ID NO: 46384 - RNA, 19 nt, synthetic construct
  misc_feature 1..19: note = siRNA sense sequence
  source 1..19: mol_type = other RNA
gctgatttctcattccctg

SEQ ID NO: 46385 - RNA, 19 nt, synthetic construct
  misc_feature 1..19: note = siRNA antisense sequence
  source 1..19: mol_type = other RNA
cagggaatgagaaatcagc

SEQ ID NO: 46386 - RNA, 19 nt, synthetic construct
  misc_feature 1..19: note = siRNA sense sequence
  source 1..19: mol_type = other RNA
tcattccctgcactcacca

SEQ ID NO: 46387 - RNA, 19 nt, synthetic construct
  misc_feature 1..19: note = siRNA antisense sequence
  source 1..19: mol_type = other RNA
tggtgagtgcagggaatga

SEQ ID NO: 46388 - RNA, 19 nt, synthetic construct
  misc_feature 1..19: note = siRNA sense sequence
  source 1..19: mol_type = other RNA
cattccctgcactcaccat

SEQ ID NO: 46389 - RNA, 19 nt, synthetic construct
  misc_feature 1..19: note = siRNA antisense sequence
  source 1..19: mol_type = other RNA
atggtgagtgcagggaatg

SEQ ID NO: 46390 - RNA, 19 nt, synthetic construct
  misc_feature 1..19: note = siRNA sense sequence
  source 1..19: mol_type = other RNA
attccctgcactcaccatt

SEQ ID NO: 46391 - RNA, 19 nt, synthetic construct
  misc_feature 1..19: note = siRNA antisense sequence
  source 1..19: mol_type = other RNA
aatggtgagtgcagggaat

SEQ ID NO: 46392 - RNA, 19 nt, synthetic construct
  misc_feature 1..19: note = siRNA sense sequence
  source 1..19: mol_type = other RNA
ttccctgcactcaccattg

SEQ ID NO: 46393 - RNA, 19 nt, synthetic construct
  misc_feature 1..19: note = siRNA antisense sequence
  source 1..19: mol_type = other RNA
caatggtgagtgcagggaa

SEQ ID NO: 46394 - RNA, 19 nt, synthetic construct
  misc_feature 1..19: note = siRNA sense sequence
  source 1..19: mol_type = other RNA
tccctgcactcaccattgc

SEQ ID NO: 46395 - RNA, 19 nt, synthetic construct
  misc_feature 1..19: note = siRNA antisense sequence
  source 1..19: mol_type = other RNA
gcaatggtgagtgcaggga

SEQ ID NO: 46396 - RNA, 19 nt, synthetic construct
  misc_feature 1..19: note = siRNA sense sequence
  source 1..19: mol_type = other RNA
ggtaaagcagtctagtagc

SEQ ID NO: 46397 - RNA, 19 nt, synthetic construct
  misc_feature 1..19: note = siRNA antisense sequence
  source 1..19: mol_type = other RNA
gctactagactgctttacc

SEQ ID NO: 46398 - RNA, 19 nt, synthetic construct
  misc_feature 1..19: note = siRNA sense sequence
  source 1..19: mol_type = other RNA
aaagcagtctagtagctca

SEQ ID NO: 46399 - RNA, 19 nt, synthetic construct
  misc_feature 1..19: note = siRNA antisense sequence
  source 1..19: mol_type = other RNA
tgagctactagactgcttt

SEQ ID NO: 46400 - RNA, 19 nt, synthetic construct
  misc_feature 1..19: note = siRNA sense sequence
  source 1..19: mol_type = other RNA
aagcagtctagtagctcaa

SEQ ID NO: 46401 - RNA, 19 nt, synthetic construct
  misc_feature 1..19: note = siRNA antisense sequence
  source 1..19: mol_type = other RNA
ttgagctactagactgctt

SEQ ID NO: 46402 - RNA, 19 nt, synthetic construct
  misc_feature 1..19: note = siRNA sense sequence
  source 1..19: mol_type = other RNA
agtctagtagctcaagtgc

SEQ ID NO: 46403 - RNA, 19 nt, synthetic construct
  misc_feature 1..19: note = siRNA antisense sequence
  source 1..19: mol_type = other RNA
gcacttgagctactagact

SEQ ID NO: 46404 - RNA, 19 nt, synthetic construct
  misc_feature 1..19: note = siRNA sense sequence
  source 1..19: mol_type = other RNA
gtctagtagctcaagtgca

SEQ ID NO: 46405 - RNA, 19 nt, synthetic construct
  misc_feature 1..19: note = siRNA antisense sequence
  source 1..19: mol_type = other RNA
tgcacttgagctactagac

SEQ ID NO: 46406 - RNA, 19 nt, synthetic construct
  misc_feature 1..19: note = siRNA sense sequence
  source 1..19: mol_type = other RNA
gtagctcaagtgcagtcat

SEQ ID NO: 46407 - RNA, 19 nt, synthetic construct
  misc_feature 1..19: note = siRNA antisense sequence
  source 1..19: mol_type = other RNA
atgactgcacttgagctac

SEQ ID NO: 46408 - RNA, 19 nt, synthetic construct
  misc_feature 1..19: note = siRNA sense sequence
  source 1..19: mol_type = other RNA
tagctcaagtgcagtcatc

SEQ ID NO: 46409 - RNA, 19 nt, synthetic construct
  misc_feature 1..19: note = siRNA antisense sequence
  source 1..19: mol_type = other RNA
gatgactgcacttgagcta

SEQ ID NO: 46410 - RNA, 19 nt, synthetic construct
  misc_feature 1..19: note = siRNA sense sequence
  source 1..19: mol_type = other RNA
agctcaagtgcagtcatct

SEQ ID NO: 46411 - RNA, 19 nt, synthetic construct
  misc_feature 1..19: note = siRNA antisense sequence
  source 1..19: mol_type = other RNA
agatgactgcacttgagct

SEQ ID NO: 46412 - RNA, 19 nt, synthetic construct
  misc_feature 1..19: note = siRNA sense sequence
  source 1..19: mol_type = other RNA
gctcaagtgcagtcatctg

SEQ ID NO: 46413 - RNA, 19 nt, synthetic construct
  misc_feature 1..19: note = siRNA antisense sequence
  source 1..19: mol_type = other RNA
cagatgactgcacttgagc

SEQ ID NO: 46414 - RNA, 19 nt, synthetic construct
  misc_feature 1..19: note = siRNA sense sequence
  source 1..19: mol_type = other RNA
ctcaagtgcagtcatctga

SEQ ID NO: 46415 - RNA, 19 nt, synthetic construct
  misc_feature 1..19: note = siRNA antisense sequence
  source 1..19: mol_type = other RNA
tcagatgactgcacttgag

SEQ ID NO: 46416 - RNA, 19 nt, synthetic construct
  misc_feature 1..19: note = siRNA sense sequence
  source 1..19: mol_type = other RNA
caagtgcagtcatctgaag

SEQ ID NO: 46417 - RNA, 19 nt, synthetic construct
  misc_feature 1..19: note = siRNA antisense sequence
  source 1..19: mol_type = other RNA
cttcagatgactgcacttg

SEQ ID NO: 46418 - RNA, 19 nt, synthetic construct
  misc_feature 1..19: note = siRNA sense sequence
  source 1..19: mol_type = other RNA
agtgcagtcatctgaagag

SEQ ID NO: 46419 - RNA, 19 nt, synthetic construct
  misc_feature 1..19: note = siRNA antisense sequence
  source 1..19: mol_type = other RNA
ctcttcagatgactgcact

SEQ ID NO: 46420 - RNA, 19 nt, synthetic construct
  misc_feature 1..19: note = siRNA sense sequence
  source 1..19: mol_type = other RNA
agagtctcaggtagagttg

SEQ ID NO: 46421 - RNA, 19 nt, synthetic construct
  misc_feature 1..19: note = siRNA antisense sequence
  source 1..19: mol_type = other RNA
caactctacctgagactct

SEQ ID NO: 46422 - RNA, 19 nt, synthetic construct
  misc_feature 1..19: note = siRNA sense sequence
  source 1..19: mol_type = other RNA
gagtctcaggtagagttgt

SEQ ID NO: 46423 - RNA, 19 nt, synthetic construct
  misc_feature 1..19: note = siRNA antisense sequence
  source 1..19: mol_type = other RNA
acaactctacctgagactc

SEQ ID NO: 46424 - RNA, 19 nt, synthetic construct
  misc_feature 1..19: note = siRNA sense sequence
  source 1..19: mol_type = other RNA
agtctcaggtagagttgtt

SEQ ID NO: 46425 - RNA, 19 nt, synthetic construct
  misc_feature 1..19: note = siRNA antisense sequence
  source 1..19: mol_type = other RNA
aacaactctacctgagact

SEQ ID NO: 46426 - RNA, 19 nt, synthetic construct
  misc_feature 1..19: note = siRNA sense sequence
  source 1..19: mol_type = other RNA
gtctcaggtagagttgtta

SEQ ID NO: 46427 - RNA, 19 nt, synthetic construct
  misc_feature 1..19: note = siRNA antisense sequence
  source 1..19: mol_type = other RNA
taacaactctacctgagac

SEQ ID NO: 46428 - RNA, 19 nt, synthetic construct
  misc_feature 1..19: note = siRNA sense sequence
  source 1..19: mol_type = other RNA
tctcaggtagagttgttag

SEQ ID NO: 46429 - RNA, 19 nt, synthetic construct
  misc_feature 1..19: note = siRNA antisense sequence
  source 1..19: mol_type = other RNA
ctaacaactctacctgaga

SEQ ID NO: 46430 - RNA, 19 nt, synthetic construct
  misc_feature 1..19: note = siRNA sense sequence
  source 1..19: mol_type = other RNA
ctcaggtagagttgttaga

SEQ ID NO: 46431 - RNA, 19 nt, synthetic construct
  misc_feature 1..19: note = siRNA antisense sequence
  source 1..19: mol_type = other RNA
tctaacaactctacctgag

SEQ ID NO: 46432 - RNA, 19 nt, synthetic construct
  misc_feature 1..19: note = siRNA sense sequence
  source 1..19: mol_type = other RNA
tcaggtagagttgttagaa

SEQ ID NO: 46433 - RNA, 19 nt, synthetic construct
  misc_feature 1..19: note = siRNA antisense sequence
  source 1..19: mol_type = other RNA
ttctaacaactctacctga

SEQ ID NO: 46434 - RNA, 19 nt, synthetic construct
  misc_feature 1..19: note = siRNA sense sequence
  source 1..19: mol_type = other RNA
caggtagagttgttagaag

SEQ ID NO: 46435 - RNA, 19 nt, synthetic construct
  misc_feature 1..19: note = siRNA antisense sequence
  source 1..19: mol_type = other RNA
cttctaacaactctacctg

SEQ ID NO: 46436 - RNA, 19 nt, synthetic construct
  misc_feature 1..19: note = siRNA sense sequence
  source 1..19: mol_type = other RNA
agttgttagaagcaaagta

SEQ ID NO: 46437 - RNA, 19 nt, synthetic construct
  misc_feature 1..19: note = siRNA antisense sequence
  source 1..19: mol_type = other RNA
tactttgcttctaacaact

SEQ ID NO: 46438 - RNA, 19 nt, synthetic construct
  misc_feature 1..19: note = siRNA sense sequence
  source 1..19: mol_type = other RNA
gttgttagaagcaaagtat

SEQ ID NO: 46439 - RNA, 19 nt, synthetic construct
  misc_feature 1..19: note = siRNA antisense sequence
  source 1..19: mol_type = other RNA
atactttgcttctaacaac

SEQ ID NO: 46440 - RNA, 19 nt, synthetic construct
  misc_feature 1..19: note = siRNA sense sequence
  source 1..19: mol_type = other RNA
ttgttagaagcaaagtatc

SEQ ID NO: 46441 - RNA, 19 nt, synthetic construct
  misc_feature 1..19: note = siRNA antisense sequence
  source 1..19: mol_type = other RNA
gatactttgcttctaacaa

SEQ ID NO: 46442 - RNA, 19 nt, synthetic construct
  misc_feature 1..19: note = siRNA sense sequence
  source 1..19: mol_type = other RNA
tgttagaagcaaagtatcc

SEQ ID NO: 46443 - RNA, 19 nt, synthetic construct
  misc_feature 1..19: note = siRNA antisense sequence
  source 1..19: mol_type = other RNA
ggatactttgcttctaaca

SEQ ID NO: 46444 - RNA, 19 nt, synthetic construct
  misc_feature 1..19: note = siRNA sense sequence
  source 1..19: mol_type = other RNA
agcaaagtatccagagcag

SEQ ID NO: 46445 - RNA, 19 nt, synthetic construct
  misc_feature 1..19: note = siRNA antisense sequence
  source 1..19: mol_type = other RNA
ctgctctggatactttgct

SEQ ID NO: 46446 - RNA, 19 nt, synthetic construct
  misc_feature 1..19: note = siRNA sense sequence
  source 1..19: mol_type = other RNA
gcaaagtatccagagcaga

SEQ ID NO: 46447 - RNA, 19 nt, synthetic construct
  misc_feature 1..19: note = siRNA antisense sequence
  source 1..19: mol_type = other RNA
tctgctctggatactttgc

SEQ ID NO: 46448 - RNA, 19 nt, synthetic construct
  misc_feature 1..19: note = siRNA sense sequence
  source 1..19: mol_type = other RNA
caaagtatccagagcagat

SEQ ID NO: 46449 - RNA, 19 nt, synthetic construct
  misc_feature 1..19: note = siRNA antisense sequence
  source 1..19: mol_type = other RNA
atctgctctggatactttg

SEQ ID NO: 46450 - RNA, 19 nt, synthetic construct
  misc_feature 1..19: note = siRNA sense sequence
  source 1..19: mol_type = other RNA
cagagcagataagggaata

SEQ ID NO: 46451 - RNA, 19 nt, synthetic construct
  misc_feature 1..19: note = siRNA antisense sequence
  source 1..19: mol_type = other RNA
tattcccttatctgctctg

SEQ ID NO: 46452 - RNA, 19 nt, synthetic construct
  misc_feature 1..19: note = siRNA sense sequence
  source 1..19: mol_type = other RNA
gcagataagggaataggca

SEQ ID NO: 46453 - RNA, 19 nt, synthetic construct
  misc_feature 1..19: note = siRNA antisense sequence
  source 1..19: mol_type = other RNA
tgcctattcccttatctgc

SEQ ID NO: 46454 - RNA, 19 nt, synthetic construct
  misc_feature 1..19: note = siRNA sense sequence
  source 1..19: mol_type = other RNA
cagataagggaataggcag

SEQ ID NO: 46455 - RNA, 19 nt, synthetic construct
  misc_feature 1..19: note = siRNA antisense sequence
  source 1..19: mol_type = other RNA
ctgcctattcccttatctg

SEQ ID NO: 46456 - RNA, 19 nt, synthetic construct
  misc_feature 1..19: note = siRNA sense sequence
  source 1..19: mol_type = other RNA
agataagggaataggcagt

SEQ ID NO: 46457 - RNA, 19 nt, synthetic construct
  misc_feature 1..19: note = siRNA antisense sequence
  source 1..19: mol_type = other RNA
actgcctattcccttatct

SEQ ID NO: 46458 - RNA, 19 nt, synthetic construct
  misc_feature 1..19: note = siRNA sense sequence
  source 1..19: mol_type = other RNA
gataagggaataggcagtt

SEQ ID NO: 46459 - RNA, 19 nt, synthetic construct
  misc_feature 1..19: note = siRNA antisense sequence
  source 1..19: mol_type = other RNA
aactgcctattcccttatc

SEQ ID NO: 46460 - RNA, 19 nt, synthetic construct
  misc_feature 1..19: note = siRNA sense sequence
  source 1..19: mol_type = other RNA
ataagggaataggcagtta

SEQ ID NO: 46461 - RNA, 19 nt, synthetic construct
  misc_feature 1..19: note = siRNA antisense sequence
  source 1..19: mol_type = other RNA
taactgcctattcccttat

SEQ ID NO: 46462 - RNA, 19 nt, synthetic construct
  misc_feature 1..19: note = siRNA sense sequence
  source 1..19: mol_type = other RNA
taagggaataggcagttat

SEQ ID NO: 46463 - RNA, 19 nt, synthetic construct
  misc_feature 1..19: note = siRNA antisense sequence
  source 1..19: mol_type = other RNA
ataactgcctattccctta

SEQ ID NO: 46464 - RNA, 19 nt, synthetic construct
  misc_feature 1..19: note = siRNA sense sequence
  source 1..19: mol_type = other RNA
aagggaataggcagttata

SEQ ID NO: 46465 - RNA, 19 nt, synthetic construct
  misc_feature 1..19: note = siRNA antisense sequence
  source 1..19: mol_type = other RNA
tataactgcctattccctt

SEQ ID NO: 46466 - RNA, 19 nt, synthetic construct
  misc_feature 1..19: note = siRNA sense sequence
  source 1..19: mol_type = other RNA
agggaataggcagttataa

SEQ ID NO: 46467 - RNA, 19 nt, synthetic construct
  misc_feature 1..19: note = siRNA antisense sequence
  source 1..19: mol_type = other RNA
ttataactgcctattccct

SEQ ID NO: 46468 - RNA, 19 nt, synthetic construct
  misc_feature 1..19: note = siRNA sense sequence
  source 1..19: mol_type = other RNA
gggaataggcagttataac

SEQ ID NO: 46469 - RNA, 19 nt, synthetic construct
  misc_feature 1..19: note = siRNA antisense sequence
  source 1..19: mol_type = other RNA
gttataactgcctattccc

SEQ ID NO: 46470 - RNA, 19 nt, synthetic construct
  misc_feature 1..19: note = siRNA sense sequence
  source 1..19: mol_type = other RNA
ggaataggcagttataact

SEQ ID NO: 46471 - RNA, 19 nt, synthetic construct
  misc_feature 1..19: note = siRNA antisense sequence
  source 1..19: mol_type = other RNA
agttataactgcctattcc

SEQ ID NO: 46472 - RNA, 19 nt, synthetic construct
  misc_feature 1..19: note = siRNA sense sequence
  source 1..19: mol_type = other RNA
gaataggcagttataactc

SEQ ID NO: 46473 - RNA, 19 nt, synthetic construct
  misc_feature 1..19: note = siRNA antisense sequence
  source 1..19: mol_type = other RNA
gagttataactgcctattc

SEQ ID NO: 46474 - RNA, 19 nt, synthetic construct
  misc_feature 1..19: note = siRNA sense sequence
  source 1..19: mol_type = other RNA
aataggcagttataactca

SEQ ID NO: 46475 - RNA, 19 nt, synthetic construct
  misc_feature 1..19: note = siRNA antisense sequence
  source 1..19: mol_type = other RNA
tgagttataactgcctatt

SEQ ID NO: 46476 - RNA, 19 nt, synthetic construct
  misc_feature 1..19: note = siRNA sense sequence
  source 1..19: mol_type = other RNA
ataggcagttataactcat

SEQ ID NO: 46477 - RNA, 19 nt, synthetic construct
  misc_feature 1..19: note = siRNA antisense sequence
  source 1..19: mol_type = other RNA
atgagttataactgcctat

SEQ ID NO: 46478 - RNA, 19 nt, synthetic construct
  misc_feature 1..19: note = siRNA sense sequence
  source 1..19: mol_type = other RNA
taggcagttataactcatc

SEQ ID NO: 46479 - RNA, 19 nt, synthetic construct
  misc_feature 1..19: note = siRNA antisense sequence
  source 1..19: mol_type = other RNA
gatgagttataactgccta

SEQ ID NO: 46480 - RNA, 19 nt, synthetic construct
  misc_feature 1..19: note = siRNA sense sequence
  source 1..19: mol_type = other RNA
aggcagttataactcatct

SEQ ID NO: 46481 - RNA, 19 nt, synthetic construct
  misc_feature 1..19: note = siRNA antisense sequence
  source 1..19: mol_type = other RNA
agatgagttataactgcct

SEQ ID NO: 46482 - RNA, 19 nt, synthetic construct
  misc_feature 1..19: note = siRNA sense sequence
  source 1..19: mol_type = other RNA
ggcagttataactcatctt

SEQ ID NO: 46483 - RNA, 19 nt, synthetic construct
  misc_feature 1..19: note = siRNA antisense sequence
  source 1..19: mol_type = other RNA
aagatgagttataactgcc

SEQ ID NO: 46484 - RNA, 19 nt, synthetic construct
  misc_feature 1..19: note = siRNA sense sequence
  source 1..19: mol_type = other RNA
gcagttataactcatctta

SEQ ID NO: 46485 - RNA, 19 nt, synthetic construct
  misc_feature 1..19: note = siRNA antisense sequence
  source 1..19: mol_type = other RNA
taagatgagttataactgc

SEQ ID NO: 46486 - RNA, 19 nt, synthetic construct
  misc_feature 1..19: note = siRNA sense sequence
  source 1..19: mol_type = other RNA
ccaggcacatattggaggt

SEQ ID NO: 46487 - RNA, 19 nt, synthetic construct
  misc_feature 1..19: note = siRNA antisense sequence
  source 1..19: mol_type = other RNA
acctccaatatgtgcctgg

SEQ ID NO: 46488 - RNA, 19 nt, synthetic construct
  misc_feature 1..19: note = siRNA sense sequence
  source 1..19: mol_type = other RNA
caggcacatattggaggtg

SEQ ID NO: 46489 - RNA, 19 nt, synthetic construct
  misc_feature 1..19: note = siRNA antisense sequence
  source 1..19: mol_type = other RNA
cacctccaatatgtgcctg

SEQ ID NO: 46490 - RNA, 19 nt, synthetic construct
  misc_feature 1..19: note = siRNA sense sequence
  source 1..19: mol_type = other RNA
aggcacatattggaggtgg

SEQ ID NO: 46491 - RNA, 19 nt, synthetic construct
  misc_feature 1..19: note = siRNA antisense sequence
  source 1..19: mol_type = other RNA
ccacctccaatatgtgcct

SEQ ID NO: 46492 - RNA, 19 nt, synthetic construct
  misc_feature 1..19: note = siRNA sense sequence
  source 1..19: mol_type = other RNA
ggcacatattggaggtgga

SEQ ID NO: 46493 - RNA, 19 nt, synthetic construct
  misc_feature 1..19: note = siRNA antisense sequence
  source 1..19: mol_type = other RNA
tccacctccaatatgtgcc

SEQ ID NO: 46494 - RNA, 19 nt, synthetic construct
  misc_feature 1..19: note = siRNA sense sequence
  source 1..19: mol_type = other RNA
gcacatattggaggtggat

SEQ ID NO: 46495 - RNA, 19 nt, synthetic construct
  misc_feature 1..19: note = siRNA antisense sequence
  source 1..19: mol_type = other RNA
atccacctccaatatgtgc

SEQ ID NO: 46496 - RNA, 19 nt, synthetic construct
  misc_feature 1..19: note = siRNA sense sequence
  source 1..19: mol_type = other RNA
cacatattggaggtggata

SEQ ID NO: 46497 - RNA, 19 nt, synthetic construct
  misc_feature 1..19: note = siRNA antisense sequence
  source 1..19: mol_type = other RNA
tatccacctccaatatgtg

SEQ ID NO: 46498 - RNA, 19 nt, synthetic construct
  misc_feature 1..19: note = siRNA sense sequence
  source 1..19: mol_type = other RNA
acatattggaggtggatag

SEQ ID NO: 46499 - RNA, 19 nt, synthetic construct
  misc_feature 1..19: note = siRNA antisense sequence
  source 1..19: mol_type = other RNA
ctatccacctccaatatgt

SEQ ID NO: 46500 - RNA, 19 nt, synthetic construct
  misc_feature 1..19: note = siRNA sense sequence
  source 1..19: mol_type = other RNA
catattggaggtggataga

SEQ ID NO: 46501 - RNA, 19 nt, synthetic construct
  misc_feature 1..19: note = siRNA antisense sequence
  source 1..19: mol_type = other RNA
tctatccacctccaatatg

SEQ ID NO: 46502 - RNA, 19 nt, synthetic construct
  misc_feature 1..19: note = siRNA sense sequence
  source 1..19: mol_type = other RNA
atattggaggtggatagat

SEQ ID NO: 46503 - RNA, 19 nt, synthetic construct
  misc_feature 1..19: note = siRNA antisense sequence
  source 1..19: mol_type = other RNA
atctatccacctccaatat

SEQ ID NO: 46504 - RNA, 19 nt, synthetic construct
  misc_feature 1..19: note = siRNA sense sequence
  source 1..19: mol_type = other RNA
tattggaggtggatagatg

SEQ ID NO: 46505 - RNA, 19 nt, synthetic construct
  misc_feature 1..19: note = siRNA antisense sequence
  source 1..19: mol_type = other RNA
catctatccacctccaata

SEQ ID NO: 46506 - RNA, 19 nt, synthetic construct
  misc_feature 1..19: note = siRNA sense sequence
  source 1..19: mol_type = other RNA
attggaggtggatagatgg

SEQ ID NO: 46507 - RNA, 19 nt, synthetic construct
  misc_feature 1..19: note = siRNA antisense sequence
  source 1..19: mol_type = other RNA
ccatctatccacctccaat

SEQ ID NO: 46508 - RNA, 19 nt, synthetic construct
  misc_feature 1..19: note = siRNA sense sequence
  source 1..19: mol_type = other RNA
ttggaggtggatagatgga

SEQ ID NO: 46509 - RNA, 19 nt, synthetic construct
  misc_feature 1..19: note = siRNA antisense sequence
  source 1..19: mol_type = other RNA
tccatctatccacctccaa

SEQ ID NO: 46510 - RNA, 19 nt, synthetic construct
  misc_feature 1..19: note = siRNA sense sequence
  source 1..19: mol_type = other RNA
tggaggtggatagatggat

SEQ ID NO: 46511 - RNA, 19 nt, synthetic construct
  misc_feature 1..19: note = siRNA antisense sequence
  source 1..19: mol_type = other RNA
atccatctatccacctcca

SEQ ID NO: 46512 - RNA, 19 nt, synthetic construct
  misc_feature 1..19: note = siRNA sense sequence
  source 1..19: mol_type = other RNA
taaagcactgatttctgac

SEQ ID NO: 46513 - RNA, 19 nt, synthetic construct
  misc_feature 1..19: note = siRNA antisense sequence
  source 1..19: mol_type = other RNA
gtcagaaatcagtgcttta

SEQ ID NO: 46514 - RNA, 19 nt, synthetic construct
  misc_feature 1..19: note = siRNA sense sequence
  source 1..19: mol_type = other RNA
aaagcactgatttctgact

SEQ ID NO: 46515 - RNA, 19 nt, synthetic construct
  misc_feature 1..19: note = siRNA antisense sequence
  source 1..19: mol_type = other RNA
agtcagaaatcagtgcttt

SEQ ID NO: 46516 - RNA, 19 nt, synthetic construct
  misc_feature 1..19: note = siRNA sense sequence
  source 1..19: mol_type = other RNA
aagcactgatttctgactt

SEQ ID NO: 46517 - RNA, 19 nt, synthetic construct
  misc_feature 1..19: note = siRNA antisense sequence
  source 1..19: mol_type = other RNA
aagtcagaaatcagtgctt

SEQ ID NO: 46518 - RNA, 19 nt, synthetic construct
  misc_feature 1..19: note = siRNA sense sequence
  source 1..19: mol_type = other RNA
agcactgatttctgactta

SEQ ID NO: 46519 - RNA, 19 nt, synthetic construct
  misc_feature 1..19: note = siRNA antisense sequence
  source 1..19: mol_type = other RNA
taagtcagaaatcagtgct

SEQ ID NO: 46520 - RNA, 19 nt, synthetic construct
  misc_feature 1..19: note = siRNA sense sequence
  source 1..19: mol_type = other RNA
gcactgatttctgacttac

SEQ ID NO: 46521 - RNA, 19 nt, synthetic construct
  misc_feature 1..19: note = siRNA antisense sequence
  source 1..19: mol_type = other RNA
gtaagtcagaaatcagtgc

SEQ ID NO: 46522 - RNA, 19 nt, synthetic construct
  misc_feature 1..19: note = siRNA sense sequence
  source 1..19: mol_type = other RNA
cactgatttctgacttacc

SEQ ID NO: 46523 - RNA, 19 nt, synthetic construct
  misc_feature 1..19: note = siRNA antisense sequence
  source 1..19: mol_type = other RNA
ggtaagtcagaaatcagtg

SEQ ID NO: 46524 - RNA, 19 nt, synthetic construct
  misc_feature 1..19: note = siRNA sense sequence
  source 1..19: mol_type = other RNA
actgatttctgacttacca

SEQ ID NO: 46525 - RNA, 19 nt, synthetic construct
  misc_feature 1..19: note = siRNA antisense sequence
  source 1..19: mol_type = other RNA
tggtaagtcagaaatcagt

SEQ ID NO: 46526 - RNA, 19 nt, synthetic construct
  misc_feature 1..19: note = siRNA sense sequence
  source 1..19: mol_type = other RNA
ctgatttctgacttaccaa

SEQ ID NO: 46527 - RNA, 19 nt, synthetic construct
  misc_feature 1..19: note = siRNA antisense sequence
  source 1..19: mol_type = other RNA
ttggtaagtcagaaatcag

SEQ ID NO: 46528 - RNA, 19 nt, synthetic construct
  misc_feature 1..19: note = siRNA sense sequence
  source 1..19: mol_type = other RNA
ctattcctagtgtgaagat

SEQ ID NO: 46529 - RNA, 19 nt, synthetic construct
  misc_feature 1..19: note = siRNA antisense sequence
  source 1..19: mol_type = other RNA
atcttcacactaggaatag

SEQ ID NO: 46530 - RNA, 19 nt, synthetic construct
  misc_feature 1..19: note = siRNA sense sequence
  source 1..19: mol_type = other RNA
tattcctagtgtgaagata

SEQ ID NO: 46531 - RNA, 19 nt, synthetic construct
  misc_feature 1..19: note = siRNA antisense sequence
  source 1..19: mol_type = other RNA
tatcttcacactaggaata

SEQ ID NO: 46532 - RNA, 19 nt, synthetic construct
  misc_feature 1..19: note = siRNA sense sequence
  source 1..19: mol_type = other RNA
attcctagtgtgaagataa

SEQ ID NO: 46533 - RNA, 19 nt, synthetic construct
  misc_feature 1..19: note = siRNA antisense sequence
  source 1..19: mol_type = other RNA
ttatcttcacactaggaat

SEQ ID NO: 46534 - RNA, 19 nt, synthetic construct
  misc_feature 1..19: note = siRNA sense sequence
  source 1..19: mol_type = other RNA
ttcctagtgtgaagataat

SEQ ID NO: 46535 - RNA, 19 nt, synthetic construct
  misc_feature 1..19: note = siRNA antisense sequence
  source 1..19: mol_type = other RNA
attatcttcacactaggaa

SEQ ID NO: 46536 - RNA, 19 nt, synthetic construct
  misc_feature 1..19: note = siRNA sense sequence
  source 1..19: mol_type = other RNA
tcctagtgtgaagataatt

SEQ ID NO: 46537 - RNA, 19 nt, synthetic construct
  misc_feature 1..19: note = siRNA antisense sequence
  source 1..19: mol_type = other RNA
aattatcttcacactagga

SEQ ID NO: 46538 - RNA, 19 nt, synthetic construct
  misc_feature 1..19: note = siRNA sense sequence
  source 1..19: mol_type = other RNA
cctagtgtgaagataattt

SEQ ID NO: 46539 - RNA, 19 nt, synthetic construct
  misc_feature 1..19: note = siRNA antisense sequence
  source 1..19: mol_type = other RNA
aaattatcttcacactagg

SEQ ID NO: 46540 - RNA, 19 nt, synthetic construct
  misc_feature 1..19: note = siRNA sense sequence
  source 1..19: mol_type = other RNA
catagtaggttctttaaga

SEQ ID NO: 46541 - RNA, 19 nt, synthetic construct
  misc_feature 1..19: note = siRNA antisense sequence
  source 1..19: mol_type = other RNA
tcttaaagaacctactatg

SEQ ID NO: 46542 - RNA, 19 nt, synthetic construct
  misc_feature 1..19: note = siRNA sense sequence
  source 1..19: mol_type = other RNA
gtaggttctttaagatatg

SEQ ID NO: 46543 - RNA, 19 nt, synthetic construct
  misc_feature 1..19: note = siRNA antisense sequence
  source 1..19: mol_type = other RNA
catatcttaaagaacctac

SEQ ID NO: 46544 - RNA, 19 nt, synthetic construct
  misc_feature 1..19: note = siRNA sense sequence
  source 1..19: mol_type = other RNA
gatatgtaaagtgtgttgt

SEQ ID NO: 46545 - RNA, 19 nt, synthetic construct
  misc_feature 1..19: note = siRNA antisense sequence
  source 1..19: mol_type = other RNA
acaacacactttacatatc

SEQ ID NO: 46546 - RNA, 19 nt, synthetic construct
  misc_feature 1..19: note = siRNA sense sequence
  source 1..19: mol_type = other RNA
aaaagcagtcttgttaagt

SEQ ID NO: 46547 - RNA, 19 nt, synthetic construct
  misc_feature 1..19: note = siRNA antisense sequence
  source 1..19: mol_type = other RNA
acttaacaagactgctttt

SEQ ID NO: 46548 - RNA, 19 nt, synthetic construct
  misc_feature 1..19: note = siRNA sense sequence
  source 1..19: mol_type = other RNA
aaagcagtcttgttaagtt

SEQ ID NO: 46549 - RNA, 19 nt, synthetic construct
  misc_feature 1..19: note = siRNA antisense sequence
  source 1..19: mol_type = other RNA
aacttaacaagactgcttt

SEQ ID NO: 46550 - RNA, 19 nt, synthetic construct
  misc_feature 1..19: note = siRNA sense sequence
  source 1..19: mol_type = other RNA
aagcagtcttgttaagttg

SEQ ID NO: 46551 - RNA, 19 nt, synthetic construct
  misc_feature 1..19: note = siRNA antisense sequence
  source 1..19: mol_type = other RNA
caacttaacaagactgctt

SEQ ID NO: 46552 - RNA, 19 nt, synthetic construct
  misc_feature 1..19: note = siRNA sense sequence
  source 1..19: mol_type = other RNA
agcagtcttgttaagttgg

SEQ ID NO: 46553 - RNA, 19 nt, synthetic construct
  misc_feature 1..19: note = siRNA antisense sequence
  source 1..19: mol_type = other RNA
ccaacttaacaagactgct

SEQ ID NO: 46554 - RNA, 19 nt, synthetic construct
  misc_feature 1..19: note = siRNA sense sequence
  source 1..19: mol_type = other RNA
gcagtcttgttaagttggc

SEQ ID NO: 46555 - RNA, 19 nt, synthetic construct
  misc_feature 1..19: note = siRNA antisense sequence
  source 1..19: mol_type = other RNA
gccaacttaacaagactgc

SEQ ID NO: 46556 - RNA, 19 nt, synthetic construct
  misc_feature 1..19: note = siRNA sense sequence
  source 1..19: mol_type = other RNA
cagtcttgttaagttggca

SEQ ID NO: 46557 - RNA, 19 nt, synthetic construct
  misc_feature 1..19: note = siRNA antisense sequence
  source 1..19: mol_type = other RNA
tgccaacttaacaagactg

SEQ ID NO: 46558 - RNA, 19 nt, synthetic construct
  misc_feature 1..19: note = siRNA sense sequence
  source 1..19: mol_type = other RNA
agtcttgttaagttggcat

SEQ ID NO: 46559 - RNA, 19 nt, synthetic construct
  misc_feature 1..19: note = siRNA antisense sequence
  source 1..19: mol_type = other RNA
atgccaacttaacaagact

SEQ ID NO: 46560 - RNA, 19 nt, synthetic construct
  misc_feature 1..19: note = siRNA sense sequence
  source 1..19: mol_type = other RNA
gtcttgttaagttggcatc

SEQ ID NO: 46561 - RNA, 19 nt, synthetic construct
  misc_feature 1..19: note = siRNA antisense sequence
  source 1..19: mol_type = other RNA
gatgccaacttaacaagac

SEQ ID NO: 46562 - RNA, 19 nt, synthetic construct
  misc_feature 1..19: note = siRNA sense sequence
  source 1..19: mol_type = other RNA
tcttgttaagttggcatct

SEQ ID NO: 46563 - RNA, 19 nt, synthetic construct
  misc_feature 1..19: note = siRNA antisense sequence
  source 1..19: mol_type = other RNA
agatgccaacttaacaaga

SEQ ID NO: 46564 - RNA, 19 nt, synthetic construct
  misc_feature 1..19: note = siRNA sense sequence
  source 1..19: mol_type = other RNA
ctcctctcatgtgagctca

SEQ ID NO: 46565 - RNA, 19 nt, synthetic construct
  misc_feature 1..19: note = siRNA antisense sequence
  source 1..19: mol_type = other RNA
tgagctcacatgagaggag

SEQ ID NO: 46566 - RNA, 19 nt, synthetic construct
  misc_feature 1..19: note = siRNA sense sequence
  source 1..19: mol_type = other RNA
tcctctcatgtgagctcat

SEQ ID NO: 46567 - RNA, 19 nt, synthetic construct
  misc_feature 1..19: note = siRNA antisense sequence
  source 1..19: mol_type = other RNA
atgagctcacatgagagga

SEQ ID NO: 46568 - RNA, 19 nt, synthetic construct
  misc_feature 1..19: note = siRNA sense sequence
  source 1..19: mol_type = other RNA
cctctcatgtgagctcatc

SEQ ID NO: 46569 - RNA, 19 nt, synthetic construct
  misc_feature 1..19: note = siRNA antisense sequence
  source 1..19: mol_type = other RNA
gatgagctcacatgagagg

SEQ ID NO: 46570 - RNA, 19 nt, synthetic construct
  misc_feature 1..19: note = siRNA sense sequence
  source 1..19: mol_type = other RNA
ctctcatgtgagctcatcc

SEQ ID NO: 46571 - RNA, 19 nt, synthetic construct
  misc_feature 1..19: note = siRNA antisense sequence
  source 1..19: mol_type = other RNA
ggatgagctcacatgagag

SEQ ID NO: 46572 - RNA, 19 nt, synthetic construct
  misc_feature 1..19: note = siRNA sense sequence
  source 1..19: mol_type = other RNA
tctcatgtgagctcatccc

SEQ ID NO: 46573 - RNA, 19 nt, synthetic construct
  misc_feature 1..19: note = siRNA antisense sequence
  source 1..19: mol_type = other RNA
gggatgagctcacatgaga

SEQ ID NO: 46574 - RNA, 19 nt, synthetic construct
  misc_feature 1..19: note = siRNA sense sequence
  source 1..19: mol_type = other RNA
ggagttggcagtttacgac

SEQ ID NO: 46575 - RNA, 19 nt, synthetic construct
  misc_feature 1..19: note = siRNA antisense sequence
  source 1..19: mol_type = other RNA
gtcgtaaactgccaactcc

SEQ ID NO: 46576 - RNA, 19 nt, synthetic construct
  misc_feature 1..19: note = siRNA sense sequence
  source 1..19: mol_type = other RNA
gagttggcagtttacgaca

SEQ ID NO: 46577 - RNA, 19 nt, synthetic construct
  misc_feature 1..19: note = siRNA antisense sequence
  source 1..19: mol_type = other RNA
tgtcgtaaactgccaactc

SEQ ID NO: 46578 - RNA, 19 nt, synthetic construct
  misc_feature 1..19: note = siRNA sense sequence
  source 1..19: mol_type = other RNA
caacgtggactcattagta

SEQ ID NO: 46579 - RNA, 19 nt, synthetic construct
  misc_feature 1..19: note = siRNA antisense sequence
  source 1..19: mol_type = other RNA
tactaatgagtccacgttg

SEQ ID NO: 46580 - RNA, 19 nt, synthetic construct
  misc_feature 1..19: note = siRNA sense sequence
  source 1..19: mol_type = other RNA
aacgtggactcattagtaa

SEQ ID NO: 46581 - RNA, 19 nt, synthetic construct
  misc_feature 1..19: note = siRNA antisense sequence
  source 1..19: mol_type = other RNA
ttactaatgagtccacgtt

SEQ ID NO: 46582 - RNA, 19 nt, synthetic construct
  misc_feature 1..19: note = siRNA sense sequence
  source 1..19: mol_type = other RNA
acgtggactcattagtaaa

SEQ ID NO: 46583 - RNA, 19 nt, synthetic construct
  misc_feature 1..19: note = siRNA antisense sequence
  source 1..19: mol_type = other RNA
tttactaatgagtccacgt

SEQ ID NO: 46584 - RNA, 19 nt, synthetic construct
  misc_feature 1..19: note = siRNA sense sequence
  source 1..19: mol_type = other RNA
cgtggactcattagtaaaa

SEQ ID NO: 46585 - RNA, 19 nt, synthetic construct
  misc_feature 1..19: note = siRNA antisense sequence
  source 1..19: mol_type = other RNA
ttttactaatgagtccacg

SEQ ID NO: 46586 - RNA, 19 nt, synthetic construct
  misc_feature 1..19: note = siRNA sense sequence
  source 1..19: mol_type = other RNA
aatagttgtagtgtttgac

SEQ ID NO: 46587 - RNA, 19 nt, synthetic construct
  misc_feature 1..19: note = siRNA antisense sequence
  source 1..19: mol_type = other RNA
gtcaaacactacaactatt

SEQ ID NO: 46588 - RNA, 19 nt, synthetic construct
  misc_feature 1..19: note = siRNA sense sequence
  source 1..19: mol_type = other RNA
atagttgtagtgtttgaca

SEQ ID NO: 46589 - RNA, 19 nt, synthetic construct
  misc_feature 1..19: note = siRNA antisense sequence
  source 1..19: mol_type = other RNA
tgtcaaacactacaactat

SEQ ID NO: 46590 - RNA, 19 nt, synthetic construct
  misc_feature 1..19: note = siRNA sense sequence
  source 1..19: mol_type = other RNA
aaatatgcaacctcctttg

SEQ ID NO: 46591 - RNA, 19 nt, synthetic construct
  misc_feature 1..19: note = siRNA antisense sequence
  source 1..19: mol_type = other RNA
caaaggaggttgcatattt

SEQ ID NO: 46592 - RNA, 19 nt, synthetic construct
  misc_feature 1..19: note = siRNA sense sequence
  source 1..19: mol_type = other RNA
aatatgcaacctcctttga

SEQ ID NO: 46593 - RNA, 19 nt, synthetic construct
  misc_feature 1..19: note = siRNA antisense sequence
  source 1..19: mol_type = other RNA
tcaaaggaggttgcatatt

SEQ ID NO: 46594 - RNA, 19 nt, synthetic construct
  misc_feature 1..19: note = siRNA sense sequence
  source 1..19: mol_type = other RNA
caatttgtgtgacttgtgt

SEQ ID NO: 46595 - RNA, 19 nt, synthetic construct
  misc_feature 1..19: note = siRNA antisense sequence
  source 1..19: mol_type = other RNA
acacaagtcacacaaattg

SEQ ID NO: 46596 - RNA, 19 nt, synthetic construct
  misc_feature 1..19: note = siRNA sense sequence
  source 1..19: mol_type = other RNA
aatttgtgtgacttgtgtc

SEQ ID NO: 46597 - RNA, 19 nt, synthetic construct
  misc_feature 1..19: note = siRNA antisense sequence
  source 1..19: mol_type = other RNA
gacacaagtcacacaaatt

SEQ ID NO: 46598 - RNA, 19 nt, synthetic construct
  misc_feature 1..19: note = siRNA sense sequence
  source 1..19: mol_type = other RNA
ttgtgtgacttgtgtctag

SEQ ID NO: 46599 - RNA, 19 nt, synthetic construct
  misc_feature 1..19: note = siRNA antisense sequence
  source 1..19: mol_type = other RNA
ctagacacaagtcacacaa

SEQ ID NO: 46600 - RNA, 19 nt, synthetic construct
  misc_feature 1..19: note = siRNA sense sequence
  source 1..19: mol_type = other RNA
tgtgtgacttgtgtctagc

SEQ ID NO: 46601 - RNA, 19 nt, synthetic construct
  misc_feature 1..19: note = siRNA antisense sequence
  source 1..19: mol_type = other RNA
gctagacacaagtcacaca

SEQ ID NO: 46602 - RNA, 19 nt, synthetic construct
  misc_feature 1..19: note = siRNA sense sequence
  source 1..19: mol_type = other RNA
gtgtgacttgtgtctagca

SEQ ID NO: 46603 - RNA, 19 nt, synthetic construct
  misc_feature 1..19: note = siRNA antisense sequence
  source 1..19: mol_type = other RNA
tgctagacacaagtcacac

SEQ ID NO: 46604 - RNA, 19 nt, synthetic construct
  misc_feature 1..19: note = siRNA sense sequence
  source 1..19: mol_type = other RNA
tgtgacttgtgtctagcag

SEQ ID NO: 46605 - RNA, 19 nt, synthetic construct
  misc_feature 1..19: note = siRNA antisense sequence
  source 1..19: mol_type = other RNA
ctgctagacacaagtcaca

SEQ ID NO: 46606 - RNA, 19 nt, synthetic construct
  misc_feature 1..19: note = siRNA sense sequence
  source 1..19: mol_type = other RNA
gtgacttgtgtctagcagc

SEQ ID NO: 46607 - RNA, 19 nt, synthetic construct
  misc_feature 1..19: note = siRNA antisense sequence
  source 1..19: mol_type = other RNA
gctgctagacacaagtcac

SEQ ID NO: 46608 - RNA, 19 nt, synthetic construct
  misc_feature 1..19: note = siRNA sense sequence
  source 1..19: mol_type = other RNA
tgacttgtgtctagcagca

SEQ ID NO: 46609 - RNA, 19 nt, synthetic construct
  misc_feature 1..19: note = siRNA antisense sequence
  source 1..19: mol_type = other RNA
tgctgctagacacaagtca

SEQ ID NO: 46610 - RNA, 19 nt, synthetic construct
  misc_feature 1..19: note = siRNA sense sequence
  source 1..19: mol_type = other RNA
gacttgtgtctagcagcat

SEQ ID NO: 46611 - RNA, 19 nt, synthetic construct
  misc_feature 1..19: note = siRNA antisense sequence
  source 1..19: mol_type = other RNA
atgctgctagacacaagtc

SEQ ID NO: 46612 - RNA, 19 nt, synthetic construct
  misc_feature 1..19: note = siRNA sense sequence
  source 1..19: mol_type = other RNA
acttgtgtctagcagcatt

SEQ ID NO: 46613 - RNA, 19 nt, synthetic construct
  misc_feature 1..19: note = siRNA antisense sequence
  source 1..19: mol_type = other RNA
aatgctgctagacacaagt

SEQ ID NO: 46614 - RNA, 19 nt, synthetic construct
  misc_feature 1..19: note = siRNA sense sequence
  source 1..19: mol_type = other RNA
cttgtgtctagcagcattc

SEQ ID NO: 46615 - RNA, 19 nt, synthetic construct
  misc_feature 1..19: note = siRNA antisense sequence
  source 1..19: mol_type = other RNA
gaatgctgctagacacaag

SEQ ID NO: 46616 - RNA, 19 nt, synthetic construct
  misc_feature 1..19: note = siRNA sense sequence
  source 1..19: mol_type = other RNA
ttgtgtctagcagcattca

SEQ ID NO: 46617 - RNA, 19 nt, synthetic construct
  misc_feature 1..19: note = siRNA antisense sequence
  source 1..19: mol_type = other RNA
tgaatgctgctagacacaa

SEQ ID NO: 46618 - RNA, 19 nt, synthetic construct
  misc_feature 1..19: note = siRNA sense sequence
  source 1..19: mol_type = other RNA
tgtgtctagcagcattcaa

SEQ ID NO: 46619 - RNA, 19 nt, synthetic construct
  misc_feature 1..19: note = siRNA antisense sequence
  source 1..19: mol_type = other RNA
ttgaatgctgctagacaca

SEQ ID NO: 46620 - RNA, 19 nt, synthetic construct
  misc_feature 1..19: note = siRNA sense sequence
  source 1..19: mol_type = other RNA
gtgtctagcagcattcaaa

SEQ ID NO: 46621 - RNA, 19 nt, synthetic construct
  misc_feature 1..19: note = siRNA antisense sequence
  source 1..19: mol_type = other RNA
tttgaatgctgctagacac

SEQ ID NO: 46622 - RNA, 19 nt, synthetic construct
  misc_feature 1..19: note = siRNA sense sequence
  source 1..19: mol_type = other RNA
tgtctagcagcattcaaag

SEQ ID NO: 46623 - RNA, 19 nt, synthetic construct
  misc_feature 1..19: note = siRNA antisense sequence
  source 1..19: mol_type = other RNA
ctttgaatgctgctagaca

SEQ ID NO: 46624 - RNA, 19 nt, synthetic construct
  misc_feature 1..19: note = siRNA sense sequence
  source 1..19: mol_type = other RNA
gtctagcagcattcaaagc

SEQ ID NO: 46625 - RNA, 19 nt, synthetic construct
  misc_feature 1..19: note = siRNA antisense sequence
  source 1..19: mol_type = other RNA
gctttgaatgctgctagac

SEQ ID NO: 46626 - RNA, 19 nt, synthetic construct
  misc_feature 1..19: note = siRNA sense sequence
  source 1..19: mol_type = other RNA
tctagcagcattcaaagcc

SEQ ID NO: 46627 - RNA, 19 nt, synthetic construct
  misc_feature 1..19: note = siRNA antisense sequence
  source 1..19: mol_type = other RNA
ggctttgaatgctgctaga

SEQ ID NO: 46628 - RNA, 19 nt, synthetic construct
  misc_feature 1..19: note = siRNA sense sequence
  source 1..19: mol_type = other RNA
ctagcagcattcaaagcca

SEQ ID NO: 46629 - RNA, 19 nt, synthetic construct
  misc_feature 1..19: note = siRNA antisense sequence
  source 1..19: mol_type = other RNA
tggctttgaatgctgctag

SEQ ID NO: 46630 - RNA, 19 nt, synthetic construct
  misc_feature 1..19: note = siRNA sense sequence
  source 1..19: mol_type = other RNA
tagcagcattcaaagccac

SEQ ID NO: 46631 - RNA, 19 nt, synthetic construct
  misc_feature 1..19: note = siRNA antisense sequence
  source 1..19: mol_type = other RNA
gtggctttgaatgctgcta

SEQ ID NO: 46632 - RNA, 19 nt, synthetic construct
  misc_feature 1..19: note = siRNA sense sequence
  source 1..19: mol_type = other RNA
agcagcattcaaagccaca

SEQ ID NO: 46633 - RNA, 19 nt, synthetic construct
  misc_feature 1..19: note = siRNA antisense sequence
  source 1..19: mol_type = other RNA
tgtggctttgaatgctgct

SEQ ID NO: 46634 - RNA, 19 nt, synthetic construct
  misc_feature 1..19: note = siRNA sense sequence
  source 1..19: mol_type = other RNA
gcattcaaagccacagaag

SEQ ID NO: 46635 - RNA, 19 nt, synthetic construct
  misc_feature 1..19: note = siRNA antisense sequence
  source 1..19: mol_type = other RNA
cttctgtggctttgaatgc

SEQ ID NO: 46636 - RNA, 19 nt, synthetic construct
  misc_feature 1..19: note = siRNA sense sequence
  source 1..19: mol_type = other RNA
tcaaagccacagaagcata

SEQ ID NO: 46637 - RNA, 19 nt, synthetic construct
  misc_feature 1..19: note = siRNA antisense sequence
  source 1..19: mol_type = other RNA
tatgcttctgtggctttga

SEQ ID NO: 46638 - RNA, 19 nt, synthetic construct
  misc_feature 1..19: note = siRNA sense sequence
  source 1..19: mol_type = other RNA
caaagccacagaagcatat

SEQ ID NO: 46639 - RNA, 19 nt, synthetic construct
  misc_feature 1..19: note = siRNA antisense sequence
  source 1..19: mol_type = other RNA
atatgcttctgtggctttg

SEQ ID NO: 46640 - RNA, 19 nt, synthetic construct
  misc_feature 1..19: note = siRNA sense sequence
  source 1..19: mol_type = other RNA
aaagccacagaagcatata

SEQ ID NO: 46641 - RNA, 19 nt, synthetic construct
  misc_feature 1..19: note = siRNA antisense sequence
  source 1..19: mol_type = other RNA
tatatgcttctgtggcttt

SEQ ID NO: 46642 - RNA, 19 nt, synthetic construct
  misc_feature 1..19: note = siRNA sense sequence
  source 1..19: mol_type = other RNA
agataattggatttaaccc

SEQ ID NO: 46643 - RNA, 19 nt, synthetic construct
  misc_feature 1..19: note = siRNA antisense sequence
  source 1..19: mol_type = other RNA
gggttaaatccaattatct

SEQ ID NO: 46644 - RNA, 19 nt, synthetic construct
  misc_feature 1..19: note = siRNA sense sequence
  source 1..19: mol_type = other RNA
aattggatttaacccgagt

SEQ ID NO: 46645 - RNA, 19 nt, synthetic construct
  misc_feature 1..19: note = siRNA antisense sequence
  source 1..19: mol_type = other RNA
actcgggttaaatccaatt

SEQ ID NO: 46646 - RNA, 19 nt, synthetic construct
  misc_feature 1..19: note = siRNA sense sequence
  source 1..19: mol_type = other RNA
attggatttaacccgagtt

SEQ ID NO: 46647 - RNA, 19 nt, synthetic construct
  misc_feature 1..19: note = siRNA antisense sequence
  source 1..19: mol_type = other RNA
aactcgggttaaatccaat

SEQ ID NO: 46648 - RNA, 19 nt, synthetic construct
  misc_feature 1..19: note = siRNA sense sequence
  source 1..19: mol_type = other RNA
ttggatttaacccgagttg

SEQ ID NO: 46649 - RNA, 19 nt, synthetic construct
  misc_feature 1..19: note = siRNA antisense sequence
  source 1..19: mol_type = other RNA
caactcgggttaaatccaa

SEQ ID NO: 46650 - RNA, 19 nt, synthetic construct
  misc_feature 1..19: note = siRNA sense sequence
  source 1..19: mol_type = other RNA
tggatttaacccgagttgg

SEQ ID NO: 46651 - RNA, 19 nt, synthetic construct
  misc_feature 1..19: note = siRNA antisense sequence
  source 1..19: mol_type = other RNA
ccaactcgggttaaatcca

SEQ ID NO: 46652 - RNA, 19 nt, synthetic construct
  misc_feature 1..19: note = siRNA sense sequence
  source 1..19: mol_type = other RNA
ggatttaacccgagttgga

SEQ ID NO: 46653 - RNA, 19 nt, synthetic construct
  misc_feature 1..19: note = siRNA antisense sequence
  source 1..19: mol_type = other RNA
tccaactcgggttaaatcc

SEQ ID NO: 46654 - RNA, 19 nt, synthetic construct
  misc_feature 1..19: note = siRNA sense sequence
  source 1..19: mol_type = other RNA
gatttaacccgagttggaa

SEQ ID NO: 46655 - RNA, 19 nt, synthetic construct
  misc_feature 1..19: note = siRNA antisense sequence
  source 1..19: mol_type = other RNA
ttccaactcgggttaaatc

SEQ ID NO: 46656 - RNA, 19 nt, synthetic construct
  misc_feature 1..19: note = siRNA sense sequence
  source 1..19: mol_type = other RNA
atttaacccgagttggaag

SEQ ID NO: 46657 - RNA, 19 nt, synthetic construct
  misc_feature 1..19: note = siRNA antisense sequence
  source 1..19: mol_type = other RNA
cttccaactcgggttaaat

SEQ ID NO: 46658 - RNA, 19 nt, synthetic construct
  misc_feature 1..19: note = siRNA sense sequence
  source 1..19: mol_type = other RNA
tttaacccgagttggaagt

SEQ ID NO: 46659 - RNA, 19 nt, synthetic construct
  misc_feature 1..19: note = siRNA antisense sequence
  source 1..19: mol_type = other RNA
acttccaactcgggttaaa

SEQ ID NO: 46660 - RNA, 19 nt, synthetic construct
  misc_feature 1..19: note = siRNA sense sequence
  source 1..19: mol_type = other RNA
ttaacccgagttggaagtt

SEQ ID NO: 46661 - RNA, 19 nt, synthetic construct
  misc_feature 1..19: note = siRNA antisense sequence
  source 1..19: mol_type = other RNA
aacttccaactcgggttaa

SEQ ID NO: 46662 - RNA, 19 nt, synthetic construct
  misc_feature 1..19: note = siRNA sense sequence
  source 1..19: mol_type = other RNA
aacccgagttggaagttag

SEQ ID NO: 46663 - RNA, 19 nt, synthetic construct
  misc_feature 1..19: note = siRNA antisense sequence
  source 1..19: mol_type = other RNA
ctaacttccaactcgggtt

SEQ ID NO: 46664 - RNA, 19 nt, synthetic construct
  misc_feature 1..19: note = siRNA sense sequence
  source 1..19: mol_type = other RNA
acccgagttggaagttagc

SEQ ID NO: 46665 - RNA, 19 nt, synthetic construct
  misc_feature 1..19: note = siRNA antisense sequence
  source 1..19: mol_type = other RNA
gctaacttccaactcgggt

SEQ ID NO: 46666 - RNA, 19 nt, synthetic construct
  misc_feature 1..19: note = siRNA sense sequence
  source 1..19: mol_type = other RNA
cccgagttggaagttagcc

SEQ ID NO: 46667 - RNA, 19 nt, synthetic construct
  misc_feature 1..19: note = siRNA antisense sequence
  source 1..19: mol_type = other RNA
ggctaacttccaactcggg

SEQ ID NO: 46668 - RNA, 19 nt, synthetic construct
  misc_feature 1..19: note = siRNA sense sequence
  source 1..19: mol_type = other RNA
ccgagttggaagttagcca

SEQ ID NO: 46669 - RNA, 19 nt, synthetic construct
  misc_feature 1..19: note = siRNA antisense sequence
  source 1..19: mol_type = other RNA
tggctaacttccaactcgg

SEQ ID NO: 46670 - RNA, 19 nt, synthetic construct
  misc_feature 1..19: note = siRNA sense sequence
  source 1..19: mol_type = other RNA
agttagccaagtgagtcat

SEQ ID NO: 46671 - RNA, 19 nt, synthetic construct
  misc_feature 1..19: note = siRNA antisense sequence
  source 1..19: mol_type = other RNA
atgactcacttggctaact

SEQ ID NO: 46672 - RNA, 19 nt, synthetic construct
  misc_feature 1..19: note = siRNA sense sequence
  source 1..19: mol_type = other RNA
gttagccaagtgagtcatt

SEQ ID NO: 46673 - RNA, 19 nt, synthetic construct
  misc_feature 1..19: note = siRNA antisense sequence
  source 1..19: mol_type = other RNA
aatgactcacttggctaac

SEQ ID NO: 46674 - RNA, 19 nt, synthetic construct
  misc_feature 1..19: note = siRNA sense sequence
  source 1..19: mol_type = other RNA
ttagccaagtgagtcattg

SEQ ID NO: 46675 - RNA, 19 nt, synthetic construct
  misc_feature 1..19: note = siRNA antisense sequence
  source 1..19: mol_type = other RNA
caatgactcacttggctaa

SEQ ID NO: 46676 - RNA, 19 nt, synthetic construct
  misc_feature 1..19: note = siRNA sense sequence
  source 1..19: mol_type = other RNA
caagtgagtcattggaggg

SEQ ID NO: 46677 - RNA, 19 nt, synthetic construct
  misc_feature 1..19: note = siRNA antisense sequence
  source 1..19: mol_type = other RNA
ccctccaatgactcacttg

SEQ ID NO: 46678 - RNA, 19 nt, synthetic construct
  misc_feature 1..19: note = siRNA sense sequence
  source 1..19: mol_type = other RNA
aagtgagtcattggaggga

SEQ ID NO: 46679 - RNA, 19 nt, synthetic construct
  misc_feature 1..19: note = siRNA antisense sequence
  source 1..19: mol_type = other RNA
tccctccaatgactcactt

SEQ ID NO: 46680 - RNA, 19 nt, synthetic construct
  misc_feature 1..19: note = siRNA sense sequence
  source 1..19: mol_type = other RNA
agtgagtcattggagggaa

SEQ ID NO: 46681 - RNA, 19 nt, synthetic construct
  misc_feature 1..19: note = siRNA antisense sequence
  source 1..19: mol_type = other RNA
ttccctccaatgactcact

SEQ ID NO: 46682 - RNA, 19 nt, synthetic construct
  misc_feature 1..19: note = siRNA sense sequence
  source 1..19: mol_type = other RNA
tgattatagtcattggacc

SEQ ID NO: 46683 - RNA, 19 nt, synthetic construct
  misc_feature 1..19: note = siRNA antisense sequence
  source 1..19: mol_type = other RNA
ggtccaatgactataatca

SEQ ID NO: 46684 - RNA, 19 nt, synthetic construct
  misc_feature 1..19: note = siRNA sense sequence
  source 1..19: mol_type = other RNA
gattatagtcattggacca

SEQ ID NO: 46685 - RNA, 19 nt, synthetic construct
  misc_feature 1..19: note = siRNA antisense sequence
  source 1..19: mol_type = other RNA
tggtccaatgactataatc

SEQ ID NO: 46686 - RNA, 19 nt, synthetic construct
  misc_feature 1..19: note = siRNA sense sequence
  source 1..19: mol_type = other RNA
attatagtcattggaccat

SEQ ID NO: 46687 - RNA, 19 nt, synthetic construct
  misc_feature 1..19: note = siRNA antisense sequence
  source 1..19: mol_type = other RNA
atggtccaatgactataat

SEQ ID NO: 46688 - RNA, 19 nt, synthetic construct
  misc_feature 1..19: note = siRNA sense sequence
  source 1..19: mol_type = other RNA
ttatagtcattggaccatg

SEQ ID NO: 46689 - RNA, 19 nt, synthetic construct
  misc_feature 1..19: note = siRNA antisense sequence
  source 1..19: mol_type = other RNA
catggtccaatgactataa

SEQ ID NO: 46690 - RNA, 19 nt, synthetic construct
  misc_feature 1..19: note = siRNA sense sequence
  source 1..19: mol_type = other RNA
tatagtcattggaccatgg

SEQ ID NO: 46691 - RNA, 19 nt, synthetic construct
  misc_feature 1..19: note = siRNA antisense sequence
  source 1..19: mol_type = other RNA
ccatggtccaatgactata

SEQ ID NO: 46692 - RNA, 19 nt, synthetic construct
  misc_feature 1..19: note = siRNA sense sequence
  source 1..19: mol_type = other RNA
atagtcattggaccatgga

SEQ ID NO: 46693 - RNA, 19 nt, synthetic construct
  misc_feature 1..19: note = siRNA antisense sequence
  source 1..19: mol_type = other RNA
tccatggtccaatgactat

SEQ ID NO: 46694 - RNA, 19 nt, synthetic construct
  misc_feature 1..19: note = siRNA sense sequence
  source 1..19: mol_type = other RNA
tagtcattggaccatggaa

SEQ ID NO: 46695 - RNA, 19 nt, synthetic construct
  misc_feature 1..19: note = siRNA antisense sequence
  source 1..19: mol_type = other RNA
ttccatggtccaatgacta

SEQ ID NO: 46696 - RNA, 19 nt, synthetic construct
  misc_feature 1..19: note = siRNA sense sequence
  source 1..19: mol_type = other RNA
agtcattggaccatggaat

SEQ ID NO: 46697 - RNA, 19 nt, synthetic construct
  misc_feature 1..19: note = siRNA antisense sequence
  source 1..19: mol_type = other RNA
attccatggtccaatgact

SEQ ID NO: 46698 - RNA, 19 nt, synthetic construct
  misc_feature 1..19: note = siRNA sense sequence
  source 1..19: mol_type = other RNA
gtcattggaccatggaatc

SEQ ID NO: 46699 - RNA, 19 nt, synthetic construct
  misc_feature 1..19: note = siRNA antisense sequence
  source 1..19: mol_type = other RNA
gattccatggtccaatgac

SEQ ID NO: 46700 - RNA, 19 nt, synthetic construct
  misc_feature 1..19: note = siRNA sense sequence
  source 1..19: mol_type = other RNA
tcattggaccatggaatct

SEQ ID NO: 46701 - RNA, 19 nt, synthetic construct
  misc_feature 1..19: note = siRNA antisense sequence
  source 1..19: mol_type = other RNA
agattccatggtccaatga

SEQ ID NO: 46702 - RNA, 19 nt, synthetic construct
  misc_feature 1..19: note = siRNA sense sequence
  source 1..19: mol_type = other RNA
cattggaccatggaatcta

SEQ ID NO: 46703 - RNA, 19 nt, synthetic construct
  misc_feature 1..19: note = siRNA antisense sequence
  source 1..19: mol_type = other RNA
tagattccatggtccaatg

SEQ ID NO: 46704 - RNA, 19 nt, synthetic construct
  misc_feature 1..19: note = siRNA sense sequence
  source 1..19: mol_type = other RNA
attggaccatggaatctag

SEQ ID NO: 46705 - RNA, 19 nt, synthetic construct
  misc_feature 1..19: note = siRNA antisense sequence
  source 1..19: mol_type = other RNA
ctagattccatggtccaat

SEQ ID NO: 46706 - RNA, 19 nt, synthetic construct
  misc_feature 1..19: note = siRNA sense sequence
  source 1..19: mol_type = other RNA
catggaatctagtctaagt

SEQ ID NO: 46707 - RNA, 19 nt, synthetic construct
  misc_feature 1..19: note = siRNA antisense sequence
  source 1..19: mol_type = other RNA
acttagactagattccatg

SEQ ID NO: 46708 - RNA, 19 nt, synthetic construct
  misc_feature 1..19: note = siRNA sense sequence
  source 1..19: mol_type = other RNA
atggaatctagtctaagta

SEQ ID NO: 46709 - RNA, 19 nt, synthetic construct
  misc_feature 1..19: note = siRNA antisense sequence
  source 1..19: mol_type = other RNA
tacttagactagattccat

SEQ ID NO: 46710 - RNA, 19 nt, synthetic construct
  misc_feature 1..19: note = siRNA sense sequence
  source 1..19: mol_type = other RNA
tggaatctagtctaagtac

SEQ ID NO: 46711 - RNA, 19 nt, synthetic construct
  misc_feature 1..19: note = siRNA antisense sequence
  source 1..19: mol_type = other RNA
gtacttagactagattcca

SEQ ID NO: 46712 - RNA, 19 nt, synthetic construct
  misc_feature 1..19: note = siRNA sense sequence
  source 1..19: mol_type = other RNA
ggaatctagtctaagtacc

SEQ ID NO: 46713 - RNA, 19 nt, synthetic construct
  misc_feature 1..19: note = siRNA antisense sequence
  source 1..19: mol_type = other RNA
ggtacttagactagattcc

SEQ ID NO: 46714 - RNA, 19 nt, synthetic construct
  misc_feature 1..19: note = siRNA sense sequence
  source 1..19: mol_type = other RNA
tctagtctaagtaccaaaa

SEQ ID NO: 46715 - RNA, 19 nt, synthetic construct
  misc_feature 1..19: note = siRNA antisense sequence
  source 1..19: mol_type = other RNA
ttttggtacttagactaga

SEQ ID NO: 46716 - RNA, 19 nt, synthetic construct
  misc_feature 1..19: note = siRNA sense sequence
  source 1..19: mol_type = other RNA
ggcagtattaatgaattag

SEQ ID NO: 46717 - RNA, 19 nt, synthetic construct
  misc_feature 1..19: note = siRNA antisense sequence
  source 1..19: mol_type = other RNA
ctaattcattaatactgcc

SEQ ID NO: 46718 - RNA, 19 nt, synthetic construct
  misc_feature 1..19: note = siRNA sense sequence
  source 1..19: mol_type = other RNA
ttaatgaattagttggagg

SEQ ID NO: 46719 - RNA, 19 nt, synthetic construct
  misc_feature 1..19: note = siRNA antisense sequence
  source 1..19: mol_type = other RNA
cctccaactaattcattaa

SEQ ID NO: 46720 - RNA, 19 nt, synthetic construct
  misc_feature 1..19: note = siRNA sense sequence
  source 1..19: mol_type = other RNA
taatgaattagttggaggt

SEQ ID NO: 46721 - RNA, 19 nt, synthetic construct
  misc_feature 1..19: note = siRNA antisense sequence
  source 1..19: mol_type = other RNA
acctccaactaattcatta

SEQ ID NO: 46722 - RNA, 19 nt, synthetic construct
  misc_feature 1..19: note = siRNA sense sequence
  source 1..19: mol_type = other RNA
aatgaattagttggaggtc

SEQ ID NO: 46723 - RNA, 19 nt, synthetic construct
  misc_feature 1..19: note = siRNA antisense sequence
  source 1..19: mol_type = other RNA
gacctccaactaattcatt

SEQ ID NO: 46724 - RNA, 19 nt, synthetic construct
  misc_feature 1..19: note = siRNA sense sequence
  source 1..19: mol_type = other RNA
atgaattagttggaggtct

SEQ ID NO: 46725 - RNA, 19 nt, synthetic construct
  misc_feature 1..19: note = siRNA antisense sequence
  source 1..19: mol_type = other RNA
agacctccaactaattcat

SEQ ID NO: 46726 - RNA, 19 nt, synthetic construct
  misc_feature 1..19: note = siRNA sense sequence
  source 1..19: mol_type = other RNA
tgaattagttggaggtctt

SEQ ID NO: 46727 - RNA, 19 nt, synthetic construct
  misc_feature 1..19: note = siRNA antisense sequence
  source 1..19: mol_type = other RNA
aagacctccaactaattca

SEQ ID NO: 46728 - RNA, 19 nt, synthetic construct
  misc_feature 1..19: note = siRNA sense sequence
  source 1..19: mol_type = other RNA
gaattagttggaggtcttg

SEQ ID NO: 46729 - RNA, 19 nt, synthetic construct
  misc_feature 1..19: note = siRNA antisense sequence
  source 1..19: mol_type = other RNA
caagacctccaactaattc

SEQ ID NO: 46730 - RNA, 19 nt, synthetic construct
  misc_feature 1..19: note = siRNA sense sequence
  source 1..19: mol_type = other RNA
aattagttggaggtcttga

SEQ ID NO: 46731 - RNA, 19 nt, synthetic construct
  misc_feature 1..19: note = siRNA antisense sequence
  source 1..19: mol_type = other RNA
tcaagacctccaactaatt

SEQ ID NO: 46732 - RNA, 19 nt, synthetic construct
  misc_feature 1..19: note = siRNA sense sequence
  source 1..19: mol_type = other RNA
attagttggaggtcttgat

SEQ ID NO: 46733 - RNA, 19 nt, synthetic construct
  misc_feature 1..19: note = siRNA antisense sequence
  source 1..19: mol_type = other RNA
atcaagacctccaactaat

SEQ ID NO: 46734 - RNA, 19 nt, synthetic construct
  misc_feature 1..19: note = siRNA sense sequence
  source 1..19: mol_type = other RNA
ttagttggaggtcttgata

SEQ ID NO: 46735 - RNA, 19 nt, synthetic construct
  misc_feature 1..19: note = siRNA antisense sequence
  source 1..19: mol_type = other RNA
tatcaagacctccaactaa

SEQ ID NO: 46736 - RNA, 19 nt, synthetic construct
  misc_feature 1..19: note = siRNA sense sequence
  source 1..19: mol_type = other RNA
ttggaggtcttgatatggt

SEQ ID NO: 46737 - RNA, 19 nt, synthetic construct
  misc_feature 1..19: note = siRNA antisense sequence
  source 1..19: mol_type = other RNA
accatatcaagacctccaa

SEQ ID NO: 46738 - RNA, 19 nt, synthetic construct
  misc_feature 1..19: note = siRNA sense sequence
  source 1..19: mol_type = other RNA
tggaggtcttgatatggtc

SEQ ID NO: 46739 - RNA, 19 nt, synthetic construct
  misc_feature 1..19: note = siRNA antisense sequence
  source 1..19: mol_type = other RNA
gaccatatcaagacctcca

SEQ ID NO: 46740 - RNA, 19 nt, synthetic construct
  misc_feature 1..19: note = siRNA sense sequence
  source 1..19: mol_type = other RNA
ggaggtcttgatatggtca

SEQ ID NO: 46741 - RNA, 19 nt, synthetic construct
  misc_feature 1..19: note = siRNA antisense sequence
  source 1..19: mol_type = other RNA
tgaccatatcaagacctcc

SEQ ID NO: 46742 - RNA, 19 nt, synthetic construct
  misc_feature 1..19: note = siRNA sense sequence
  source 1..19: mol_type = other RNA
gaggtcttgatatggtcag

SEQ ID NO: 46743 - RNA, 19 nt, synthetic construct
  misc_feature 1..19: note = siRNA antisense sequence
  source 1..19: mol_type = other RNA
ctgaccatatcaagacctc

SEQ ID NO: 46744 - RNA, 19 nt, synthetic construct
  misc_feature 1..19: note = siRNA sense sequence
  source 1..19: mol_type = other RNA
aggtcttgatatggtcagg

SEQ ID NO: 46745 - RNA, 19 nt, synthetic construct
  misc_feature 1..19: note = siRNA antisense sequence
  source 1..19: mol_type = other RNA
cctgaccatatcaagacct

SEQ ID NO: 46746 - RNA, 19 nt, synthetic construct
  misc_feature 1..19: note = siRNA sense sequence
  source 1..19: mol_type = other RNA
cttgatatggtcagggaat

SEQ ID NO: 46747 - RNA, 19 nt, synthetic construct
  misc_feature 1..19: note = siRNA antisense sequence
  source 1..19: mol_type = other RNA
attccctgaccatatcaag

SEQ ID NO: 46748 - RNA, 19 nt, synthetic construct
  misc_feature 1..19: note = siRNA sense sequence
  source 1..19: mol_type = other RNA
tatggtcagggaattagtg

SEQ ID NO: 46749 - RNA, 19 nt, synthetic construct
  misc_feature 1..19: note = siRNA antisense sequence
  source 1..19: mol_type = other RNA
cactaattccctgaccata

SEQ ID NO: 46750 - RNA, 19 nt, synthetic construct
  misc_feature 1..19: note = siRNA sense sequence
  source 1..19: mol_type = other RNA
atggtcagggaattagtga

SEQ ID NO: 46751 - RNA, 19 nt, synthetic construct
  misc_feature 1..19: note = siRNA antisense sequence
  source 1..19: mol_type = other RNA
tcactaattccctgaccat

SEQ ID NO: 46752 - RNA, 19 nt, synthetic construct
  misc_feature 1..19: note = siRNA sense sequence
  source 1..19: mol_type = other RNA
tggtcagggaattagtgaa

SEQ ID NO: 46753 - RNA, 19 nt, synthetic construct
  misc_feature 1..19: note = siRNA antisense sequence
  source 1..19: mol_type = other RNA
ttcactaattccctgacca

SEQ ID NO: 46754 - RNA, 19 nt, synthetic construct
  misc_feature 1..19: note = siRNA sense sequence
  source 1..19: mol_type = other RNA
aaatgagccaaagttaatg

SEQ ID NO: 46755 - RNA, 19 nt, synthetic construct
  misc_feature 1..19: note = siRNA antisense sequence
  source 1..19: mol_type = other RNA
cattaactttggctcattt

SEQ ID NO: 46756 - RNA, 19 nt, synthetic construct
  misc_feature 1..19: note = siRNA sense sequence
  source 1..19: mol_type = other RNA
agccaaagttaatgttcaa

SEQ ID NO: 46757 - RNA, 19 nt, synthetic construct
  misc_feature 1..19: note = siRNA antisense sequence
  source 1..19: mol_type = other RNA
ttgaacattaactttggct

SEQ ID NO: 46758 - RNA, 19 nt, synthetic construct
  misc_feature 1..19: note = siRNA sense sequence
  source 1..19: mol_type = other RNA
gccaaagttaatgttcaaa

SEQ ID NO: 46759 - RNA, 19 nt, synthetic construct
  misc_feature 1..19: note = siRNA antisense sequence
  source 1..19: mol_type = other RNA
tttgaacattaactttggc

SEQ ID NO: 46760 - RNA, 19 nt, synthetic construct
  misc_feature 1..19: note = siRNA sense sequence
  source 1..19: mol_type = other RNA
aaattgggattgacctgct

SEQ ID NO: 46761 - RNA, 19 nt, synthetic construct
  misc_feature 1..19: note = siRNA antisense sequence
  source 1..19: mol_type = other RNA
agcaggtcaatcccaattt

SEQ ID NO: 46762 - RNA, 19 nt, synthetic construct
  misc_feature 1..19: note = siRNA sense sequence
  source 1..19: mol_type = other RNA
ctagggtattccacagatt

SEQ ID NO: 46763 - RNA, 19 nt, synthetic construct
  misc_feature 1..19: note = siRNA antisense sequence
  source 1..19: mol_type = other RNA
aatctgtggaataccctag

SEQ ID NO: 46764 - RNA, 19 nt, synthetic construct
  misc_feature 1..19: note = siRNA sense sequence
  source 1..19: mol_type = other RNA
agggtattccacagattat

SEQ ID NO: 46765 - RNA, 19 nt, synthetic construct
  misc_feature 1..19: note = siRNA antisense sequence
  source 1..19: mol_type = other RNA
ataatctgtggaataccct

SEQ ID NO: 46766 - RNA, 19 nt, synthetic construct
  misc_feature 1..19: note = siRNA sense sequence
  source 1..19: mol_type = other RNA
gggtattccacagattatc

SEQ ID NO: 46767 - RNA, 19 nt, synthetic construct
  misc_feature 1..19: note = siRNA antisense sequence
  source 1..19: mol_type = other RNA
gataatctgtggaataccc

SEQ ID NO: 46768 - RNA, 19 nt, synthetic construct
  misc_feature 1..19: note = siRNA sense sequence
  source 1..19: mol_type = other RNA
ggtattccacagattatca

SEQ ID NO: 46769 - RNA, 19 nt, synthetic construct
  misc_feature 1..19: note = siRNA antisense sequence
  source 1..19: mol_type = other RNA
tgataatctgtggaatacc

SEQ ID NO: 46770 - RNA, 19 nt, synthetic construct
  misc_feature 1..19: note = siRNA sense sequence
  source 1..19: mol_type = other RNA
gtattccacagattatcag

SEQ ID NO: 46771 - RNA, 19 nt, synthetic construct
  misc_feature 1..19: note = siRNA antisense sequence
  source 1..19: mol_type = other RNA
ctgataatctgtggaatac

SEQ ID NO: 46772 - RNA, 19 nt, synthetic construct
  misc_feature 1..19: note = siRNA sense sequence
  source 1..19: mol_type = other RNA
tattccacagattatcagt

SEQ ID NO: 46773 - RNA, 19 nt, synthetic construct
  misc_feature 1..19: note = siRNA antisense sequence
  source 1..19: mol_type = other RNA
actgataatctgtggaata

SEQ ID NO: 46774 - RNA, 19 nt, synthetic construct
  misc_feature 1..19: note = siRNA sense sequence
  source 1..19: mol_type = other RNA
agattattaagtagatgcc

SEQ ID NO: 46775 - RNA, 19 nt, synthetic construct
  misc_feature 1..19: note = siRNA antisense sequence
  source 1..19: mol_type = other RNA
ggcatctacttaataatct

SEQ ID NO: 46776 - RNA, 19 nt, synthetic construct
  misc_feature 1..19: note = siRNA sense sequence
  source 1..19: mol_type = other RNA
gattattaagtagatgcca

SEQ ID NO: 46777 - RNA, 19 nt, synthetic construct
  misc_feature 1..19: note = siRNA antisense sequence
  source 1..19: mol_type = other RNA
tggcatctacttaataatc

SEQ ID NO: 46778 - RNA, 19 nt, synthetic construct
  misc_feature 1..19: note = siRNA sense sequence
  source 1..19: mol_type = other RNA
agtagatgccaaaattttc

SEQ ID NO: 46779 - RNA, 19 nt, synthetic construct
  misc_feature 1..19: note = siRNA antisense sequence
  source 1..19: mol_type = other RNA
gaaaattttggcatctact

SEQ ID NO: 46780 - RNA, 19 nt, synthetic construct
  misc_feature 1..19: note = siRNA sense sequence
  source 1..19: mol_type = other RNA
gtagatgccaaaattttca

SEQ ID NO: 46781 - RNA, 19 nt, synthetic construct
  misc_feature 1..19: note = siRNA antisense sequence
  source 1..19: mol_type = other RNA
tgaaaattttggcatctac

SEQ ID NO: 46782 - RNA, 19 nt, synthetic construct
  misc_feature 1..19: note = siRNA sense sequence
  source 1..19: mol_type = other RNA
gatgccaaaattttcaaga

SEQ ID NO: 46783 - RNA, 19 nt, synthetic construct
  misc_feature 1..19: note = siRNA antisense sequence
  source 1..19: mol_type = other RNA
tcttgaaaattttggcatc

SEQ ID NO: 46784 - RNA, 19 nt, synthetic construct
  misc_feature 1..19: note = siRNA sense sequence
  source 1..19: mol_type = other RNA
tttcaaagttctttagcct

SEQ ID NO: 46785 - RNA, 19 nt, synthetic construct
  misc_feature 1..19: note = siRNA antisense sequence
  source 1..19: mol_type = other RNA
aggctaaagaactttgaaa

SEQ ID NO: 46786 - RNA, 19 nt, synthetic construct
  misc_feature 1..19: note = siRNA sense sequence
  source 1..19: mol_type = other RNA
aagttctttagcctcttaa

SEQ ID NO: 46787 - RNA, 19 nt, synthetic construct
  misc_feature 1..19: note = siRNA antisense sequence
  source 1..19: mol_type = other RNA
ttaagaggctaaagaactt

SEQ ID NO: 46788 - RNA, 19 nt, synthetic construct
  misc_feature 1..19: note = siRNA sense sequence
  source 1..19: mol_type = other RNA
agttctttagcctcttaat

SEQ ID NO: 46789 - RNA, 19 nt, synthetic construct
  misc_feature 1..19: note = siRNA antisense sequence
  source 1..19: mol_type = other RNA
attaagaggctaaagaact

SEQ ID NO: 46790 - RNA, 19 nt, synthetic construct
  misc_feature 1..19: note = siRNA sense sequence
  source 1..19: mol_type = other RNA
gttctttagcctcttaatc

SEQ ID NO: 46791 - RNA, 19 nt, synthetic construct
  misc_feature 1..19: note = siRNA antisense sequence
  source 1..19: mol_type = other RNA
gattaagaggctaaagaac

SEQ ID NO: 46792 - RNA, 19 nt, synthetic construct
  misc_feature 1..19: note = siRNA sense sequence
  source 1..19: mol_type = other RNA
ttctttagcctcttaatca

SEQ ID NO: 46793 - RNA, 19 nt, synthetic construct
  misc_feature 1..19: note = siRNA antisense sequence
  source 1..19: mol_type = other RNA
tgattaagaggctaaagaa

SEQ ID NO: 46794 - RNA, 19 nt, synthetic construct
  misc_feature 1..19: note = siRNA sense sequence
  source 1..19: mol_type = other RNA
tctttagcctcttaatcaa

SEQ ID NO: 46795 - RNA, 19 nt, synthetic construct
  misc_feature 1..19: note = siRNA antisense sequence
  source 1..19: mol_type = other RNA
ttgattaagaggctaaaga

SEQ ID NO: 46796 - RNA, 19 nt, synthetic construct
  misc_feature 1..19: note = siRNA sense sequence
  source 1..19: mol_type = other RNA
ctttagcctcttaatcaaa

SEQ ID NO: 46797 - RNA, 19 nt, synthetic construct
  misc_feature 1..19: note = siRNA antisense sequence
  source 1..19: mol_type = other RNA
tttgattaagaggctaaag

SEQ ID NO: 46798 - RNA, 19 nt, synthetic construct
  misc_feature 1..19: note = siRNA sense sequence
  source 1..19: mol_type = other RNA
tgatgagcaattaacttcc

SEQ ID NO: 46799 - RNA, 19 nt, synthetic construct
  misc_feature 1..19: note = siRNA antisense sequence
  source 1..19: mol_type = other RNA
ggaagttaattgctcatca

SEQ ID NO: 46800 - RNA, 19 nt, synthetic construct
  misc_feature 1..19: note = siRNA sense sequence
  source 1..19: mol_type = other RNA
gatgagcaattaacttcca

SEQ ID NO: 46801 - RNA, 19 nt, synthetic construct
  misc_feature 1..19: note = siRNA antisense sequence
  source 1..19: mol_type = other RNA
tggaagttaattgctcatc

SEQ ID NO: 46802 - RNA, 19 nt, synthetic construct
  misc_feature 1..19: note = siRNA sense sequence
  source 1..19: mol_type = other RNA
atgagcaattaacttccac

SEQ ID NO: 46803 - RNA, 19 nt, synthetic construct
  misc_feature 1..19: note = siRNA antisense sequence
  source 1..19: mol_type = other RNA
gtggaagttaattgctcat

SEQ ID NO: 46804 - RNA, 19 nt, synthetic construct
  misc_feature 1..19: note = siRNA sense sequence
  source 1..19: mol_type = other RNA
tgagcaattaacttccaca

SEQ ID NO: 46805 - RNA, 19 nt, synthetic construct
  misc_feature 1..19: note = siRNA antisense sequence
  source 1..19: mol_type = other RNA
tgtggaagttaattgctca

SEQ ID NO: 46806 - RNA, 19 nt, synthetic construct
  misc_feature 1..19: note = siRNA sense sequence
  source 1..19: mol_type = other RNA
tttgttcactttgatacct

SEQ ID NO: 46807 - RNA, 19 nt, synthetic construct
  misc_feature 1..19: note = siRNA antisense sequence
  source 1..19: mol_type = other RNA
aggtatcaaagtgaacaaa

SEQ ID NO: 46808 - RNA, 19 nt, synthetic construct
  misc_feature 1..19: note = siRNA sense sequence
  source 1..19: mol_type = other RNA
ttgttcactttgataccta

SEQ ID NO: 46809 - RNA, 19 nt, synthetic construct
  misc_feature 1..19: note = siRNA antisense sequence
  source 1..19: mol_type = other RNA
taggtatcaaagtgaacaa

SEQ ID NO: 46810 - RNA, 19 nt, synthetic construct
  misc_feature 1..19: note = siRNA sense sequence
  source 1..19: mol_type = other RNA
tgttcactttgatacctag

SEQ ID NO: 46811 - RNA, 19 nt, synthetic construct
  misc_feature 1..19: note = siRNA antisense sequence
  source 1..19: mol_type = other RNA
ctaggtatcaaagtgaaca

SEQ ID NO: 46812 - RNA, 19 nt, synthetic construct
  misc_feature 1..19: note = siRNA sense sequence
  source 1..19: mol_type = other RNA
gttcactttgatacctaga

SEQ ID NO: 46813 - RNA, 19 nt, synthetic construct
  misc_feature 1..19: note = siRNA antisense sequence
  source 1..19: mol_type = other RNA
tctaggtatcaaagtgaac

SEQ ID NO: 46814 - RNA, 19 nt, synthetic construct
  misc_feature 1..19: note = siRNA sense sequence
  source 1..19: mol_type = other RNA
ttcactttgatacctagaa

SEQ ID NO: 46815 - RNA, 19 nt, synthetic construct
  misc_feature 1..19: note = siRNA antisense sequence
  source 1..19: mol_type = other RNA
ttctaggtatcaaagtgaa

SEQ ID NO: 46816 - RNA, 19 nt, synthetic construct
  misc_feature 1..19: note = siRNA sense sequence
  source 1..19: mol_type = other RNA
tcactttgatacctagaat

SEQ ID NO: 46817 - RNA, 19 nt, synthetic construct
  misc_feature 1..19: note = siRNA antisense sequence
  source 1..19: mol_type = other RNA
attctaggtatcaaagtga

SEQ ID NO: 46818 - RNA, 19 nt, synthetic construct
  misc_feature 1..19: note = siRNA sense sequence
  source 1..19: mol_type = other RNA
cactttgatacctagaatt

SEQ ID NO: 46819 - RNA, 19 nt, synthetic construct
  misc_feature 1..19: note = siRNA antisense sequence
  source 1..19: mol_type = other RNA
aattctaggtatcaaagtg

SEQ ID NO: 46820 - RNA, 19 nt, synthetic construct
  misc_feature 1..19: note = siRNA sense sequence
  source 1..19: mol_type = other RNA
ctttgatacctagaattag

SEQ ID NO: 46821 - RNA, 19 nt, synthetic construct
  misc_feature 1..19: note = siRNA antisense sequence
  source 1..19: mol_type = other RNA
ctaattctaggtatcaaag

SEQ ID NO: 46822 - RNA, 19 nt, synthetic construct
  misc_feature 1..19: note = siRNA sense sequence
  source 1..19: mol_type = other RNA
tttgatacctagaattagc

SEQ ID NO: 46823 - RNA, 19 nt, synthetic construct
  misc_feature 1..19: note = siRNA antisense sequence
  source 1..19: mol_type = other RNA
gctaattctaggtatcaaa

SEQ ID NO: 46824 - RNA, 19 nt, synthetic construct
  misc_feature 1..19: note = siRNA sense sequence
  source 1..19: mol_type = other RNA
ttgatacctagaattagcc

SEQ ID NO: 46825 - RNA, 19 nt, synthetic construct
  misc_feature 1..19: note = siRNA antisense sequence
  source 1..19: mol_type = other RNA
ggctaattctaggtatcaa

SEQ ID NO: 46826 - RNA, 19 nt, synthetic construct
  misc_feature 1..19: note = siRNA sense sequence
  source 1..19: mol_type = other RNA
tgatacctagaattagcca

SEQ ID NO: 46827 - RNA, 19 nt, synthetic construct
  misc_feature 1..19: note = siRNA antisense sequence
  source 1..19: mol_type = other RNA
tggctaattctaggtatca

SEQ ID NO: 46828 - RNA, 19 nt, synthetic construct
  misc_feature 1..19: note = siRNA sense sequence
  source 1..19: mol_type = other RNA
tggatatgtcccttaataa

SEQ ID NO: 46829 - RNA, 19 nt, synthetic construct
  misc_feature 1..19: note = siRNA antisense sequence
  source 1..19: mol_type = other RNA
ttattaagggacatatcca

SEQ ID NO: 46830 - RNA, 19 nt, synthetic construct
  misc_feature 1..19: note = siRNA sense sequence
  source 1..19: mol_type = other RNA
attattcagtgtttccaag

SEQ ID NO: 46831 - RNA, 19 nt, synthetic construct
  misc_feature 1..19: note = siRNA antisense sequence
  source 1..19: mol_type = other RNA
cttggaaacactgaataat

SEQ ID NO: 46832 - RNA, 19 nt, synthetic construct
  misc_feature 1..19: note = siRNA sense sequence
  source 1..19: mol_type = other RNA
cagtgtttccaaggattac

SEQ ID NO: 46833 - RNA, 19 nt, synthetic construct
  misc_feature 1..19: note = siRNA antisense sequence
  source 1..19: mol_type = other RNA
gtaatccttggaaacactg

SEQ ID NO: 46834 - RNA, 19 nt, synthetic construct
  misc_feature 1..19: note = siRNA sense sequence
  source 1..19: mol_type = other RNA
agtgtttccaaggattact

SEQ ID NO: 46835 - RNA, 19 nt, synthetic construct
  misc_feature 1..19: note = siRNA antisense sequence
  source 1..19: mol_type = other RNA
agtaatccttggaaacact

SEQ ID NO: 46836 - RNA, 19 nt, synthetic construct
  misc_feature 1..19: note = siRNA sense sequence
  source 1..19: mol_type = other RNA
gtgtttccaaggattacta

SEQ ID NO: 46837 - RNA, 19 nt, synthetic construct
  misc_feature 1..19: note = siRNA antisense sequence
  source 1..19: mol_type = other RNA
tagtaatccttggaaacac

SEQ ID NO: 46838 - RNA, 19 nt, synthetic construct
  misc_feature 1..19: note = siRNA sense sequence
  source 1..19: mol_type = other RNA
tgtttccaaggattactaa

SEQ ID NO: 46839 - RNA, 19 nt, synthetic construct
  misc_feature 1..19: note = siRNA antisense sequence
  source 1..19: mol_type = other RNA
ttagtaatccttggaaaca

SEQ ID NO: 46840 - RNA, 19 nt, synthetic construct
  misc_feature 1..19: note = siRNA sense sequence
  source 1..19: mol_type = other RNA
gtttccaaggattactaat

SEQ ID NO: 46841 - RNA, 19 nt, synthetic construct
  misc_feature 1..19: note = siRNA antisense sequence
  source 1..19: mol_type = other RNA
attagtaatccttggaaac

SEQ ID NO: 46842 - RNA, 19 nt, synthetic construct
  misc_feature 1..19: note = siRNA sense sequence
  source 1..19: mol_type = other RNA
aactttagggtcattgaag

SEQ ID NO: 46843 - RNA, 19 nt, synthetic construct
  misc_feature 1..19: note = siRNA antisense sequence
  source 1..19: mol_type = other RNA
cttcaatgaccctaaagtt

SEQ ID NO: 46844 - RNA, 19 nt, synthetic construct
  misc_feature 1..19: note = siRNA sense sequence
  source 1..19: mol_type = other RNA
actttagggtcattgaaga

SEQ ID NO: 46845 - RNA, 19 nt, synthetic construct
  misc_feature 1..19: note = siRNA antisense sequence
  source 1..19: mol_type = other RNA
tcttcaatgaccctaaagt

SEQ ID NO: 46846 - RNA, 19 nt, synthetic construct
  misc_feature 1..19: note = siRNA sense sequence
  source 1..19: mol_type = other RNA
ctttagggtcattgaagaa

SEQ ID NO: 46847 - RNA, 19 nt, synthetic construct
  misc_feature 1..19: note = siRNA antisense sequence
  source 1..19: mol_type = other RNA
ttcttcaatgaccctaaag

SEQ ID NO: 46848 - RNA, 19 nt, synthetic construct
  misc_feature 1..19: note = siRNA sense sequence
  source 1..19: mol_type = other RNA
tttaaatttatgcagaggg

SEQ ID NO: 46849 - RNA, 19 nt, synthetic construct
  misc_feature 1..19: note = siRNA antisense sequence
  source 1..19: mol_type = other RNA
ccctctgcataaatttaaa

SEQ ID NO: 46850 - RNA, 19 nt, synthetic construct
  misc_feature 1..19: note = siRNA sense sequence
  source 1..19: mol_type = other RNA
ttaaatttatgcagagggt

SEQ ID NO: 46851 - RNA, 19 nt, synthetic construct
  misc_feature 1..19: note = siRNA antisense sequence
  source 1..19: mol_type = other RNA
accctctgcataaatttaa

SEQ ID NO: 46852 - RNA, 19 nt, synthetic construct
  misc_feature 1..19: note = siRNA sense sequence
  source 1..19: mol_type = other RNA
taaatttatgcagagggta

SEQ ID NO: 46853 - RNA, 19 nt, synthetic construct
  misc_feature 1..19: note = siRNA antisense sequence
  source 1..19: mol_type = other RNA
taccctctgcataaattta

SEQ ID NO: 46854 - RNA, 19 nt, synthetic construct
  misc_feature 1..19: note = siRNA sense sequence
  source 1..19: mol_type = other RNA
aaatttatgcagagggtaa

SEQ ID NO: 46855 - RNA, 19 nt, synthetic construct
  misc_feature 1..19: note = siRNA antisense sequence
  source 1..19: mol_type = other RNA
ttaccctctgcataaattt

SEQ ID NO: 46856 - RNA, 19 nt, synthetic construct
  misc_feature 1..19: note = siRNA sense sequence
  source 1..19: mol_type = other RNA
aatttatgcagagggtaat

SEQ ID NO: 46857 - RNA, 19 nt, synthetic construct
  misc_feature 1..19: note = siRNA antisense sequence
  source 1..19: mol_type = other RNA
attaccctctgcataaatt

SEQ ID NO: 46858 - RNA, 19 nt, synthetic construct
  misc_feature 1..19: note = siRNA sense sequence
  source 1..19: mol_type = other RNA
atttatgcagagggtaata

SEQ ID NO: 46859 - RNA, 19 nt, synthetic construct
  misc_feature 1..19: note = siRNA antisense sequence
  source 1..19: mol_type = other RNA
tattaccctctgcataaat

SEQ ID NO: 46860 - RNA, 19 nt, synthetic construct
  misc_feature 1..19: note = siRNA sense sequence
  source 1..19: mol_type = other RNA
aaaatatcctgaattgcag

SEQ ID NO: 46861 - RNA, 19 nt, synthetic construct
  misc_feature 1..19: note = siRNA antisense sequence
  source 1..19: mol_type = other RNA
ctgcaattcaggatatttt

SEQ ID NO: 46862 - RNA, 19 nt, synthetic construct
  misc_feature 1..19: note = siRNA sense sequence
  source 1..19: mol_type = other RNA
tatcctgaattgcagtcat

SEQ ID NO: 46863 - RNA, 19 nt, synthetic construct
  misc_feature 1..19: note = siRNA antisense sequence
  source 1..19: mol_type = other RNA
atgactgcaattcaggata

SEQ ID NO: 46864 - RNA, 19 nt, synthetic construct
  misc_feature 1..19: note = siRNA sense sequence
  source 1..19: mol_type = other RNA
cctgaattgcagtcataga

SEQ ID NO: 46865 - RNA, 19 nt, synthetic construct
  misc_feature 1..19: note = siRNA antisense sequence
  source 1..19: mol_type = other RNA
tctatgactgcaattcagg

SEQ ID NO: 46866 - RNA, 19 nt, synthetic construct
  misc_feature 1..19: note = siRNA sense sequence
  source 1..19: mol_type = other RNA
ctgaattgcagtcatagat

SEQ ID NO: 46867 - RNA, 19 nt, synthetic construct
  misc_feature 1..19: note = siRNA antisense sequence
  source 1..19: mol_type = other RNA
atctatgactgcaattcag

SEQ ID NO: 46868 - RNA, 19 nt, synthetic construct
  misc_feature 1..19: note = siRNA sense sequence
  source 1..19: mol_type = other RNA
tgaattgcagtcatagatg

SEQ ID NO: 46869 - RNA, 19 nt, synthetic construct
  misc_feature 1..19: note = siRNA antisense sequence
  source 1..19: mol_type = other RNA
catctatgactgcaattca

SEQ ID NO: 46870 - RNA, 19 nt, synthetic construct
  misc_feature 1..19: note = siRNA sense sequence
  source 1..19: mol_type = other RNA
gaattgcagtcatagatgt

SEQ ID NO: 46871 - RNA, 19 nt, synthetic construct
  misc_feature 1..19: note = siRNA antisense sequence
  source 1..19: mol_type = other RNA
acatctatgactgcaattc

SEQ ID NO: 46872 - RNA, 19 nt, synthetic construct
  misc_feature 1..19: note = siRNA sense sequence
  source 1..19: mol_type = other RNA
aattgcagtcatagatgtg

SEQ ID NO: 46873 - RNA, 19 nt, synthetic construct
  misc_feature 1..19: note = siRNA antisense sequence
  source 1..19: mol_type = other RNA
cacatctatgactgcaatt

SEQ ID NO: 46874 - RNA, 19 nt, synthetic construct
  misc_feature 1..19: note = siRNA sense sequence
  source 1..19: mol_type = other RNA
ttttgtgtaattagttggc

SEQ ID NO: 46875 - RNA, 19 nt, synthetic construct
  misc_feature 1..19: note = siRNA antisense sequence
  source 1..19: mol_type = other RNA
gccaactaattacacaaaa

SEQ ID NO: 46876 - RNA, 19 nt, synthetic construct
  misc_feature 1..19: note = siRNA sense sequence
  source 1..19: mol_type = other RNA
tttgtgtaattagttggct

SEQ ID NO: 46877 - RNA, 19 nt, synthetic construct
  misc_feature 1..19: note = siRNA antisense sequence
  source 1..19: mol_type = other RNA
agccaactaattacacaaa

SEQ ID NO: 46878 - RNA, 19 nt, synthetic construct
  misc_feature 1..19: note = siRNA sense sequence
  source 1..19: mol_type = other RNA
ttgtgtaattagttggctg

SEQ ID NO: 46879 - RNA, 19 nt, synthetic construct
  misc_feature 1..19: note = siRNA antisense sequence
  source 1..19: mol_type = other RNA
cagccaactaattacacaa

SEQ ID NO: 46880 - RNA, 19 nt, synthetic construct
  misc_feature 1..19: note = siRNA sense sequence
  source 1..19: mol_type = other RNA
gtgtaattagttggctgta

SEQ ID NO: 46881 - RNA, 19 nt, synthetic construct
  misc_feature 1..19: note = siRNA antisense sequence
  source 1..19: mol_type = other RNA
tacagccaactaattacac

SEQ ID NO: 46882 - RNA, 19 nt, synthetic construct
  misc_feature 1..19: note = siRNA sense sequence
  source 1..19: mol_type = other RNA
tgtaattagttggctgtat

SEQ ID NO: 46883 - RNA, 19 nt, synthetic construct
  misc_feature 1..19: note = siRNA antisense sequence
  source 1..19: mol_type = other RNA
atacagccaactaattaca

SEQ ID NO: 46884 - RNA, 19 nt, synthetic construct
  misc_feature 1..19: note = siRNA sense sequence
  source 1..19: mol_type = other RNA
gtaattagttggctgtatc

SEQ ID NO: 46885 - RNA, 19 nt, synthetic construct
  misc_feature 1..19: note = siRNA antisense sequence
  source 1..19: mol_type = other RNA
gatacagccaactaattac

SEQ ID NO: 46886 - RNA, 19 nt, synthetic construct
  misc_feature 1..19: note = siRNA sense sequence
  source 1..19: mol_type = other RNA
taattagttggctgtatcc

SEQ ID NO: 46887 - RNA, 19 nt, synthetic construct
  misc_feature 1..19: note = siRNA antisense sequence
  source 1..19: mol_type = other RNA
ggatacagccaactaatta

SEQ ID NO: 46888 - RNA, 19 nt, synthetic construct
  misc_feature 1..19: note = siRNA sense sequence
  source 1..19: mol_type = other RNA
aattagttggctgtatcct

SEQ ID NO: 46889 - RNA, 19 nt, synthetic construct
  misc_feature 1..19: note = siRNA antisense sequence
  source 1..19: mol_type = other RNA
aggatacagccaactaatt

SEQ ID NO: 46890 - RNA, 19 nt, synthetic construct
  misc_feature 1..19: note = siRNA sense sequence
  source 1..19: mol_type = other RNA
attagttggctgtatccta

SEQ ID NO: 46891 - RNA, 19 nt, synthetic construct
  misc_feature 1..19: note = siRNA antisense sequence
  source 1..19: mol_type = other RNA
taggatacagccaactaat

SEQ ID NO: 46892 - RNA, 19 nt, synthetic construct
  misc_feature 1..19: note = siRNA sense sequence
  source 1..19: mol_type = other RNA
ttagttggctgtatcctat

SEQ ID NO: 46893 - RNA, 19 nt, synthetic construct
  misc_feature 1..19: note = siRNA antisense sequence
  source 1..19: mol_type = other RNA
ataggatacagccaactaa

SEQ ID NO: 46894 - RNA, 19 nt, synthetic construct
  misc_feature 1..19: note = siRNA sense sequence
  source 1..19: mol_type = other RNA
agttggctgtatcctatct

SEQ ID NO: 46895 - RNA, 19 nt, synthetic construct
  misc_feature 1..19: note = siRNA antisense sequence
  source 1..19: mol_type = other RNA
agataggatacagccaact

SEQ ID NO: 46896 - RNA, 19 nt, synthetic construct
  misc_feature 1..19: note = siRNA sense sequence
  source 1..19: mol_type = other RNA
gttggctgtatcctatctt

SEQ ID NO: 46897 - RNA, 19 nt, synthetic construct
  misc_feature 1..19: note = siRNA antisense sequence
  source 1..19: mol_type = other RNA
aagataggatacagccaac

SEQ ID NO: 46898 - RNA, 19 nt, synthetic construct
  misc_feature 1..19: note = siRNA sense sequence
  source 1..19: mol_type = other RNA
ttggctgtatcctatcttg

SEQ ID NO: 46899 - RNA, 19 nt, synthetic construct
  misc_feature 1..19: note = siRNA antisense sequence
  source 1..19: mol_type = other RNA
caagataggatacagccaa

SEQ ID NO: 46900 - RNA, 19 nt, synthetic construct
  misc_feature 1..19: note = siRNA sense sequence
  source 1..19: mol_type = other RNA
tggctgtatcctatcttgt

SEQ ID NO: 46901 - RNA, 19 nt, synthetic construct
  misc_feature 1..19: note = siRNA antisense sequence
  source 1..19: mol_type = other RNA
acaagataggatacagcca

SEQ ID NO: 46902 - RNA, 19 nt, synthetic construct
  misc_feature 1..19: note = siRNA sense sequence
  source 1..19: mol_type = other RNA
ggctgtatcctatcttgtt

SEQ ID NO: 46903 - RNA, 19 nt, synthetic construct
  misc_feature 1..19: note = siRNA antisense sequence
  source 1..19: mol_type = other RNA
aacaagataggatacagcc

SEQ ID NO: 46904 - RNA, 19 nt, synthetic construct
  misc_feature 1..19: note = siRNA sense sequence
  source 1..19: mol_type = other RNA
gctgtatcctatcttgttc

SEQ ID NO: 46905 - RNA, 19 nt, synthetic construct
  misc_feature 1..19: note = siRNA antisense sequence
  source 1..19: mol_type = other RNA
gaacaagataggatacagc

SEQ ID NO: 46906 - RNA, 19 nt, synthetic construct
  misc_feature 1..19: note = siRNA sense sequence
  source 1..19: mol_type = other RNA
ctgtatcctatcttgttcc

SEQ ID NO: 46907 - RNA, 19 nt, synthetic construct
  misc_feature 1..19: note = siRNA antisense sequence
  source 1..19: mol_type = other RNA
ggaacaagataggatacag

SEQ ID NO: 46908 - RNA, 19 nt, synthetic construct
  misc_feature 1..19: note = siRNA sense sequence
  source 1..19: mol_type = other RNA
tatcttgttcccaaagggt

SEQ ID NO: 46909 - RNA, 19 nt, synthetic construct
  misc_feature 1..19: note = siRNA antisense sequence
  source 1..19: mol_type = other RNA
accctttgggaacaagata

SEQ ID NO: 46910 - RNA, 19 nt, synthetic construct
  misc_feature 1..19: note = siRNA sense sequence
  source 1..19: mol_type = other RNA
attccaaatatagtagctc

SEQ ID NO: 46911 - RNA, 19 nt, synthetic construct
  misc_feature 1..19: note = siRNA antisense sequence
  source 1..19: mol_type = other RNA
gagctactatatttggaat

SEQ ID NO: 46912 - RNA, 19 nt, synthetic construct
  misc_feature 1..19: note = siRNA sense sequence
  source 1..19: mol_type = other RNA
tccaaatatagtagctctc

SEQ ID NO: 46913 - RNA, 19 nt, synthetic construct
  misc_feature 1..19: note = siRNA antisense sequence
  source 1..19: mol_type = other RNA
gagagctactatatttgga

SEQ ID NO: 46914 - RNA, 19 nt, synthetic construct
  misc_feature 1..19: note = siRNA sense sequence
  source 1..19: mol_type = other RNA
ccaaatatagtagctctct

SEQ ID NO: 46915 - RNA, 19 nt, synthetic construct
  misc_feature 1..19: note = siRNA antisense sequence
  source 1..19: mol_type = other RNA
agagagctactatatttgg

SEQ ID NO: 46916 - RNA, 19 nt, synthetic construct
  misc_feature 1..19: note = siRNA sense sequence
  source 1..19: mol_type = other RNA
caaatatagtagctctctc

SEQ ID NO: 46917 - RNA, 19 nt, synthetic construct
  misc_feature 1..19: note = siRNA antisense sequence
  source 1..19: mol_type = other RNA
gagagagctactatatttg

SEQ ID NO: 46918 - RNA, 19 nt, synthetic construct
  misc_feature 1..19: note = siRNA sense sequence
  source 1..19: mol_type = other RNA
aaatatagtagctctctca

SEQ ID NO: 46919 - RNA, 19 nt, synthetic construct
  misc_feature 1..19: note = siRNA antisense sequence
  source 1..19: mol_type = other RNA
tgagagagctactatattt

SEQ ID NO: 46920 - RNA, 19 nt, synthetic construct
  misc_feature 1..19: note = siRNA sense sequence
  source 1..19: mol_type = other RNA
aatatagtagctctctcag

SEQ ID NO: 46921 - RNA, 19 nt, synthetic construct
  misc_feature 1..19: note = siRNA antisense sequence
  source 1..19: mol_type = other RNA
ctgagagagctactatatt

SEQ ID NO: 46922 - RNA, 19 nt, synthetic construct
  misc_feature 1..19: note = siRNA sense sequence
  source 1..19: mol_type = other RNA
atatagtagctctctcaga

SEQ ID NO: 46923 - RNA, 19 nt, synthetic construct
  misc_feature 1..19: note = siRNA antisense sequence
  source 1..19: mol_type = other RNA
tctgagagagctactatat

SEQ ID NO: 46924 - RNA, 19 nt, synthetic construct
  misc_feature 1..19: note = siRNA sense sequence
  source 1..19: mol_type = other RNA
tatagtagctctctcagaa

SEQ ID NO: 46925 - RNA, 19 nt, synthetic construct
  misc_feature 1..19: note = siRNA antisense sequence
  source 1..19: mol_type = other RNA
ttctgagagagctactata

SEQ ID NO: 46926 - RNA, 19 nt, synthetic construct
  misc_feature 1..19: note = siRNA sense sequence
  source 1..19: mol_type = other RNA
atagtagctctctcagaat

SEQ ID NO: 46927 - RNA, 19 nt, synthetic construct
  misc_feature 1..19: note = siRNA antisense sequence
  source 1..19: mol_type = other RNA
attctgagagagctactat

SEQ ID NO: 46928 - RNA, 19 nt, synthetic construct
  misc_feature 1..19: note = siRNA sense sequence
  source 1..19: mol_type = other RNA
tagtagctctctcagaata

SEQ ID NO: 46929 - RNA, 19 nt, synthetic construct
  misc_feature 1..19: note = siRNA antisense sequence
  source 1..19: mol_type = other RNA
tattctgagagagctacta

SEQ ID NO: 46930 - RNA, 19 nt, synthetic construct
  misc_feature 1..19: note = siRNA sense sequence
  source 1..19: mol_type = other RNA
agctctctcagaataggtg

SEQ ID NO: 46931 - RNA, 19 nt, synthetic construct
  misc_feature 1..19: note = siRNA antisense sequence
  source 1..19: mol_type = other RNA
cacctattctgagagagct

SEQ ID NO: 46932 - RNA, 19 nt, synthetic construct
  misc_feature 1..19: note = siRNA sense sequence
  source 1..19: mol_type = other RNA
gctctctcagaataggtgg

SEQ ID NO: 46933 - RNA, 19 nt, synthetic construct
  misc_feature 1..19: note = siRNA antisense sequence
  source 1..19: mol_type = other RNA
ccacctattctgagagagc

SEQ ID NO: 46934 - RNA, 19 nt, synthetic construct
  misc_feature 1..19: note = siRNA sense sequence
  source 1..19: mol_type = other RNA
tctctcagaataggtggta

SEQ ID NO: 46935 - RNA, 19 nt, synthetic construct
  misc_feature 1..19: note = siRNA antisense sequence
  source 1..19: mol_type = other RNA
taccacctattctgagaga

SEQ ID NO: 46936 - RNA, 19 nt, synthetic construct
  misc_feature 1..19: note = siRNA sense sequence
  source 1..19: mol_type = other RNA
ctctcagaataggtggtaa

SEQ ID NO: 46937 - RNA, 19 nt, synthetic construct
  misc_feature 1..19: note = siRNA antisense sequence
  source 1..19: mol_type = other RNA
ttaccacctattctgagag

SEQ ID NO: 46938 - RNA, 19 nt, synthetic construct
  misc_feature 1..19: note = siRNA sense sequence
  source 1..19: mol_type = other RNA
tctcagaataggtggtaaa

SEQ ID NO: 46939 - RNA, 19 nt, synthetic construct
  misc_feature 1..19: note = siRNA antisense sequence
  source 1..19: mol_type = other RNA
tttaccacctattctgaga

SEQ ID NO: 46940 - RNA, 19 nt, synthetic construct
  misc_feature 1..19: note = siRNA sense sequence
  source 1..19: mol_type = other RNA
ctcagaataggtggtaaag

SEQ ID NO: 46941 - RNA, 19 nt, synthetic construct
  misc_feature 1..19: note = siRNA antisense sequence
  source 1..19: mol_type = other RNA
ctttaccacctattctgag

SEQ ID NO: 46942 - RNA, 19 nt, synthetic construct
  misc_feature 1..19: note = siRNA sense sequence
  source 1..19: mol_type = other RNA
tcagaataggtggtaaagg

SEQ ID NO: 46943 - RNA, 19 nt, synthetic construct
  misc_feature 1..19: note = siRNA antisense sequence
  source 1..19: mol_type = other RNA
cctttaccacctattctga

SEQ ID NO: 46944 - RNA, 19 nt, synthetic construct
  misc_feature 1..19: note = siRNA sense sequence
  source 1..19: mol_type = other RNA
caaggctaacctggacatg

SEQ ID NO: 46945 - RNA, 19 nt, synthetic construct
  misc_feature 1..19: note = siRNA antisense sequence
  source 1..19: mol_type = other RNA
catgtccaggttagccttg

SEQ ID NO: 46946 - RNA, 19 nt, synthetic construct
  misc_feature 1..19: note = siRNA sense sequence
  source 1..19: mol_type = other RNA
aaggctaacctggacatga

SEQ ID NO: 46947 - RNA, 19 nt, synthetic construct
  misc_feature 1..19: note = siRNA antisense sequence
  source 1..19: mol_type = other RNA
tcatgtccaggttagcctt

SEQ ID NO: 46948 - RNA, 19 nt, synthetic construct
  misc_feature 1..19: note = siRNA sense sequence
  source 1..19: mol_type = other RNA
aggctaacctggacatgaa

SEQ ID NO: 46949 - RNA, 19 nt, synthetic construct
  misc_feature 1..19: note = siRNA antisense sequence
  source 1..19: mol_type = other RNA
ttcatgtccaggttagcct

SEQ ID NO: 46950 - RNA, 19 nt, synthetic construct
  misc_feature 1..19: note = siRNA sense sequence
  source 1..19: mol_type = other RNA
taacctggacatgaattga

SEQ ID NO: 46951 - RNA, 19 nt, synthetic construct
  misc_feature 1..19: note = siRNA antisense sequence
  source 1..19: mol_type = other RNA
tcaattcatgtccaggtta

SEQ ID NO: 46952 - RNA, 19 nt, synthetic construct
  misc_feature 1..19: note = siRNA sense sequence
  source 1..19: mol_type = other RNA
aacctggacatgaattgag

SEQ ID NO: 46953 - RNA, 19 nt, synthetic construct
  misc_feature 1..19: note = siRNA antisense sequence
  source 1..19: mol_type = other RNA
ctcaattcatgtccaggtt

SEQ ID NO: 46954 - RNA, 19 nt, synthetic construct
  misc_feature 1..19: note = siRNA sense sequence
  source 1..19: mol_type = other RNA
acctggacatgaattgagc

SEQ ID NO: 46955 - RNA, 19 nt, synthetic construct
  misc_feature 1..19: note = siRNA antisense sequence
  source 1..19: mol_type = other RNA
gctcaattcatgtccaggt

SEQ ID NO: 46956 - RNA, 19 nt, synthetic construct
  misc_feature 1..19: note = siRNA sense sequence
  source 1..19: mol_type = other RNA
cctggacatgaattgagca

SEQ ID NO: 46957 - RNA, 19 nt, synthetic construct
  misc_feature 1..19: note = siRNA antisense sequence
  source 1..19: mol_type = other RNA
tgctcaattcatgtccagg

SEQ ID NO: 46958 - RNA, 19 nt, synthetic construct
  misc_feature 1..19: note = siRNA sense sequence
  source 1..19: mol_type = other RNA
ctggacatgaattgagcag

SEQ ID NO: 46959 - RNA, 19 nt, synthetic construct
  misc_feature 1..19: note = siRNA antisense sequence
  source 1..19: mol_type = other RNA
ctgctcaattcatgtccag

SEQ ID NO: 46960 - RNA, 19 nt, synthetic construct
  misc_feature 1..19: note = siRNA sense sequence
  source 1..19: mol_type = other RNA
tggacatgaattgagcaga

SEQ ID NO: 46961 - RNA, 19 nt, synthetic construct
  misc_feature 1..19: note = siRNA antisense sequence
  source 1..19: mol_type = other RNA
tctgctcaattcatgtcca

SEQ ID NO: 46962 - RNA, 19 nt, synthetic construct
  misc_feature 1..19: note = siRNA sense sequence
  source 1..19: mol_type = other RNA
ggacatgaattgagcagag

SEQ ID NO: 46963 - RNA, 19 nt, synthetic construct
  misc_feature 1..19: note = siRNA antisense sequence
  source 1..19: mol_type = other RNA
ctctgctcaattcatgtcc

SEQ ID NO: 46964 - RNA, 19 nt, synthetic construct
  misc_feature 1..19: note = siRNA sense sequence
  source 1..19: mol_type = other RNA
gacatgaattgagcagagt

SEQ ID NO: 46965 - RNA, 19 nt, synthetic construct
  misc_feature 1..19: note = siRNA antisense sequence
  source 1..19: mol_type = other RNA
actctgctcaattcatgtc

SEQ ID NO: 46966 - RNA, 19 nt, synthetic construct
  misc_feature 1..19: note = siRNA sense sequence
  source 1..19: mol_type = other RNA
acatgaattgagcagagtg

SEQ ID NO: 46967 - RNA, 19 nt, synthetic construct
  misc_feature 1..19: note = siRNA antisense sequence
  source 1..19: mol_type = other RNA
cactctgctcaattcatgt

SEQ ID NO: 46968 - RNA, 19 nt, synthetic construct
  misc_feature 1..19: note = siRNA sense sequence
  source 1..19: mol_type = other RNA
catgaattgagcagagtgc

SEQ ID NO: 46969 - RNA, 19 nt, synthetic construct
  misc_feature 1..19: note = siRNA antisense sequence
  source 1..19: mol_type = other RNA
gcactctgctcaattcatg

SEQ ID NO: 46970 - RNA, 19 nt, synthetic construct
  misc_feature 1..19: note = siRNA sense sequence
  source 1..19: mol_type = other RNA
atgaattgagcagagtgca

SEQ ID NO: 46971 - RNA, 19 nt, synthetic construct
  misc_feature 1..19: note = siRNA antisense sequence
  source 1..19: mol_type = other RNA
tgcactctgctcaattcat

SEQ ID NO: 46972 - RNA, 19 nt, synthetic construct
  misc_feature 1..19: note = siRNA sense sequence
  source 1..19: mol_type = other RNA
attgagcagagtgcatgtt

SEQ ID NO: 46973 - RNA, 19 nt, synthetic construct
  misc_feature 1..19: note = siRNA antisense sequence
  source 1..19: mol_type = other RNA
aacatgcactctgctcaat

SEQ ID NO: 46974 - RNA, 19 nt, synthetic construct
  misc_feature 1..19: note = siRNA sense sequence
  source 1..19: mol_type = other RNA
ttgagcagagtgcatgttc

SEQ ID NO: 46975 - RNA, 19 nt, synthetic construct
  misc_feature 1..19: note = siRNA antisense sequence
  source 1..19: mol_type = other RNA
gaacatgcactctgctcaa

SEQ ID NO: 46976 - RNA, 19 nt, synthetic construct
  misc_feature 1..19: note = siRNA sense sequence
  source 1..19: mol_type = other RNA
tgagcagagtgcatgttca

SEQ ID NO: 46977 - RNA, 19 nt, synthetic construct
  misc_feature 1..19: note = siRNA antisense sequence
  source 1..19: mol_type = other RNA
tgaacatgcactctgctca

SEQ ID NO: 46978 - RNA, 19 nt, synthetic construct
  misc_feature 1..19: note = siRNA sense sequence
  source 1..19: mol_type = other RNA
gagcagagtgcatgttcat

SEQ ID NO: 46979 - RNA, 19 nt, synthetic construct
  misc_feature 1..19: note = siRNA antisense sequence
  source 1..19: mol_type = other RNA
atgaacatgcactctgctc

SEQ ID NO: 46980 - RNA, 19 nt, synthetic construct
  misc_feature 1..19: note = siRNA sense sequence
  source 1..19: mol_type = other RNA
agcagagtgcatgttcatt

SEQ ID NO: 46981 - RNA, 19 nt, synthetic construct
  misc_feature 1..19: note = siRNA antisense sequence
  source 1..19: mol_type = other RNA
aatgaacatgcactctgct

SEQ ID NO: 46982 - RNA, 19 nt, synthetic construct
  misc_feature 1..19: note = siRNA sense sequence
  source 1..19: mol_type = other RNA
gcagagtgcatgttcattc

SEQ ID NO: 46983 - RNA, 19 nt, synthetic construct
  misc_feature 1..19: note = siRNA antisense sequence
  source 1..19: mol_type = other RNA
gaatgaacatgcactctgc

SEQ ID NO: 46984 - RNA, 19 nt, synthetic construct
  misc_feature 1..19: note = siRNA sense sequence
  source 1..19: mol_type = other RNA
cagagtgcatgttcattca

SEQ ID NO: 46985 - RNA, 19 nt, synthetic construct
  misc_feature 1..19: note = siRNA antisense sequence
  source 1..19: mol_type = other RNA
tgaatgaacatgcactctg

SEQ ID NO: 46986 - RNA, 19 nt, synthetic construct
  misc_feature 1..19: note = siRNA sense sequence
  source 1..19: mol_type = other RNA
agagtgcatgttcattcag

SEQ ID NO: 46987 - RNA, 19 nt, synthetic construct
  misc_feature 1..19: note = siRNA antisense sequence
  source 1..19: mol_type = other RNA
ctgaatgaacatgcactct

SEQ ID NO: 46988 - RNA, 19 nt, synthetic construct
  misc_feature 1..19: note = siRNA sense sequence
  source 1..19: mol_type = other RNA
gagtgcatgttcattcagc

SEQ ID NO: 46989 - RNA, 19 nt, synthetic construct
  misc_feature 1..19: note = siRNA antisense sequence
  source 1..19: mol_type = other RNA
gctgaatgaacatgcactc

SEQ ID NO: 46990 - RNA, 19 nt, synthetic construct
  misc_feature 1..19: note = siRNA sense sequence
  source 1..19: mol_type = other RNA
agtgcatgttcattcagct

SEQ ID NO: 46991 - RNA, 19 nt, synthetic construct
  misc_feature 1..19: note = siRNA antisense sequence
  source 1..19: mol_type = other RNA
agctgaatgaacatgcact

SEQ ID NO: 46992 - RNA, 19 nt, synthetic construct
  misc_feature 1..19: note = siRNA sense sequence
  source 1..19: mol_type = other RNA
ttatacctaactaagcaac

SEQ ID NO: 46993 - RNA, 19 nt, synthetic construct
  misc_feature 1..19: note = siRNA antisense sequence
  source 1..19: mol_type = other RNA
gttgcttagttaggtataa

SEQ ID NO: 46994 - RNA, 19 nt, synthetic construct
  misc_feature 1..19: note = siRNA sense sequence
  source 1..19: mol_type = other RNA
tatacctaactaagcaact

SEQ ID NO: 46995 - RNA, 19 nt, synthetic construct
  misc_feature 1..19: note = siRNA antisense sequence
  source 1..19: mol_type = other RNA
agttgcttagttaggtata

SEQ ID NO: 46996 - RNA, 19 nt, synthetic construct
  misc_feature 1..19: note = siRNA sense sequence
  source 1..19: mol_type = other RNA
catatctcagttaactagc

SEQ ID NO: 46997 - RNA, 19 nt, synthetic construct
  misc_feature 1..19: note = siRNA antisense sequence
  source 1..19: mol_type = other RNA
gctagttaactgagatatg

SEQ ID NO: 46998 - RNA, 19 nt, synthetic construct
  misc_feature 1..19: note = siRNA sense sequence
  source 1..19: mol_type = other RNA
atatctcagttaactagct

SEQ ID NO: 46999 - RNA, 19 nt, synthetic construct
  misc_feature 1..19: note = siRNA antisense sequence
  source 1..19: mol_type = other RNA
agctagttaactgagatat

SEQ ID NO: 47000 - RNA, 19 nt, synthetic construct
  misc_feature 1..19: note = siRNA sense sequence
  source 1..19: mol_type = other RNA
tatctcagttaactagcta

SEQ ID NO: 47001 - RNA, 19 nt, synthetic construct
  misc_feature 1..19: note = siRNA antisense sequence
  source 1..19: mol_type = other RNA
tagctagttaactgagata

SEQ ID NO: 47002 - RNA, 19 nt, synthetic construct
  misc_feature 1..19: note = siRNA sense sequence
  source 1..19: mol_type = other RNA
atctcagttaactagctag

SEQ ID NO: 47003 - RNA, 19 nt, synthetic construct
  misc_feature 1..19: note = siRNA antisense sequence
  source 1..19: mol_type = other RNA
ctagctagttaactgagat

SEQ ID NO: 47004 - RNA, 19 nt, synthetic construct
  misc_feature 1..19: note = siRNA sense sequence
  source 1..19: mol_type = other RNA
tctcagttaactagctagt

SEQ ID NO: 47005 - RNA, 19 nt, synthetic construct
  misc_feature 1..19: note = siRNA antisense sequence
  source 1..19: mol_type = other RNA
actagctagttaactgaga

SEQ ID NO: 47006 - RNA, 19 nt, synthetic construct
  misc_feature 1..19: note = siRNA sense sequence
  source 1..19: mol_type = other RNA
ctagctagttaagcaaatt

SEQ ID NO: 47007 - RNA, 19 nt, synthetic construct
  misc_feature 1..19: note = siRNA antisense sequence
  source 1..19: mol_type = other RNA
aatttgcttaactagctag

SEQ ID NO: 47008 - RNA, 19 nt, synthetic construct
  misc_feature 1..19: note = siRNA sense sequence
  source 1..19: mol_type = other RNA
agctagttaagcaaattca

SEQ ID NO: 47009 - RNA, 19 nt, synthetic construct
  misc_feature 1..19: note = siRNA antisense sequence
  source 1..19: mol_type = other RNA
tgaatttgcttaactagct

SEQ ID NO: 47010 - RNA, 19 nt, synthetic construct
  misc_feature 1..19: note = siRNA sense sequence
  source 1..19: mol_type = other RNA
gctagttaagcaaattcat

SEQ ID NO: 47011 - RNA, 19 nt, synthetic construct
  misc_feature 1..19: note = siRNA antisense sequence
  source 1..19: mol_type = other RNA
atgaatttgcttaactagc

SEQ ID NO: 47012 - RNA, 19 nt, synthetic construct
  misc_feature 1..19: note = siRNA sense sequence
  source 1..19: mol_type = other RNA
gttaagcaaattcattgag

SEQ ID NO: 47013 - RNA, 19 nt, synthetic construct
  misc_feature 1..19: note = siRNA antisense sequence
  source 1..19: mol_type = other RNA
ctcaatgaatttgcttaac

SEQ ID NO: 47014 - RNA, 19 nt, synthetic construct
  misc_feature 1..19: note = siRNA sense sequence
  source 1..19: mol_type = other RNA
aagcaaattcattgagtag

SEQ ID NO: 47015 - RNA, 19 nt, synthetic construct
  misc_feature 1..19: note = siRNA antisense sequence
  source 1..19: mol_type = other RNA
ctactcaatgaatttgctt

SEQ ID NO: 47016 - RNA, 19 nt, synthetic construct
  misc_feature 1..19: note = siRNA sense sequence
  source 1..19: mol_type = other RNA
gcaaattcattgagtagcc

SEQ ID NO: 47017 - RNA, 19 nt, synthetic construct
  misc_feature 1..19: note = siRNA antisense sequence
  source 1..19: mol_type = other RNA
ggctactcaatgaatttgc

SEQ ID NO: 47018 - RNA, 19 nt, synthetic construct
  misc_feature 1..19: note = siRNA sense sequence
  source 1..19: mol_type = other RNA
caaattcattgagtagcca

SEQ ID NO: 47019 - RNA, 19 nt, synthetic construct
  misc_feature 1..19: note = siRNA antisense sequence
  source 1..19: mol_type = other RNA
tggctactcaatgaatttg

SEQ ID NO: 47020 - RNA, 19 nt, synthetic construct
  misc_feature 1..19: note = siRNA sense sequence
  source 1..19: mol_type = other RNA
ggcactcagcagaagctag

SEQ ID NO: 47021 - RNA, 19 nt, synthetic construct
  misc_feature 1..19: note = siRNA antisense sequence
  source 1..19: mol_type = other RNA
ctagcttctgctgagtgcc

SEQ ID NO: 47022 - RNA, 19 nt, synthetic construct
  misc_feature 1..19: note = siRNA sense sequence
  source 1..19: mol_type = other RNA
gcactcagcagaagctagc

SEQ ID NO: 47023 - RNA, 19 nt, synthetic construct
  misc_feature 1..19: note = siRNA antisense sequence
  source 1..19: mol_type = other RNA
gctagcttctgctgagtgc

SEQ ID NO: 47024 - RNA, 19 nt, synthetic construct
  misc_feature 1..19: note = siRNA sense sequence
  source 1..19: mol_type = other RNA
cactcagcagaagctagca

SEQ ID NO: 47025 - RNA, 19 nt, synthetic construct
  misc_feature 1..19: note = siRNA antisense sequence
  source 1..19: mol_type = other RNA
tgctagcttctgctgagtg

SEQ ID NO: 47026 - RNA, 19 nt, synthetic construct
  misc_feature 1..19: note = siRNA sense sequence
  source 1..19: mol_type = other RNA
actcagcagaagctagcag

SEQ ID NO: 47027 - RNA, 19 nt, synthetic construct
  misc_feature 1..19: note = siRNA antisense sequence
  source 1..19: mol_type = other RNA
ctgctagcttctgctgagt

SEQ ID NO: 47028 - RNA, 19 nt, synthetic construct
  misc_feature 1..19: note = siRNA sense sequence
  source 1..19: mol_type = other RNA
cagaagctagcaggttgag

SEQ ID NO: 47029 - RNA, 19 nt, synthetic construct
  misc_feature 1..19: note = siRNA antisense sequence
  source 1..19: mol_type = other RNA
ctcaacctgctagcttctg

SEQ ID NO: 47030 - RNA, 19 nt, synthetic construct
  misc_feature 1..19: note = siRNA sense sequence
  source 1..19: mol_type = other RNA
agaagctagcaggttgagg

SEQ ID NO: 47031 - RNA, 19 nt, synthetic construct
  misc_feature 1..19: note = siRNA antisense sequence
  source 1..19: mol_type = other RNA
cctcaacctgctagcttct

SEQ ID NO: 47032 - RNA, 19 nt, synthetic construct
  misc_feature 1..19: note = siRNA sense sequence
  source 1..19: mol_type = other RNA
gaagctagcaggttgaggt

SEQ ID NO: 47033 - RNA, 19 nt, synthetic construct
  misc_feature 1..19: note = siRNA antisense sequence
  source 1..19: mol_type = other RNA
acctcaacctgctagcttc

SEQ ID NO: 47034 - RNA, 19 nt, synthetic construct
  misc_feature 1..19: note = siRNA sense sequence
  source 1..19: mol_type = other RNA
aagctagcaggttgaggtg

SEQ ID NO: 47035 - RNA, 19 nt, synthetic construct
  misc_feature 1..19: note = siRNA antisense sequence
  source 1..19: mol_type = other RNA
cacctcaacctgctagctt

SEQ ID NO: 47036 - RNA, 19 nt, synthetic construct
  misc_feature 1..19: note = siRNA sense sequence
  source 1..19: mol_type = other RNA
agctagcaggttgaggtga

SEQ ID NO: 47037 - RNA, 19 nt, synthetic construct
  misc_feature 1..19: note = siRNA antisense sequence
  source 1..19: mol_type = other RNA
tcacctcaacctgctagct

SEQ ID NO: 47038 - RNA, 19 nt, synthetic construct
  misc_feature 1..19: note = siRNA sense sequence
  source 1..19: mol_type = other RNA
gctagcaggttgaggtgac

SEQ ID NO: 47039 - RNA, 19 nt, synthetic construct
  misc_feature 1..19: note = siRNA antisense sequence
  source 1..19: mol_type = other RNA
gtcacctcaacctgctagc

SEQ ID NO: 47040 - RNA, 19 nt, synthetic construct
  misc_feature 1..19: note = siRNA sense sequence
  source 1..19: mol_type = other RNA
ctagcaggttgaggtgact

SEQ ID NO: 47041 - RNA, 19 nt, synthetic construct
  misc_feature 1..19: note = siRNA antisense sequence
  source 1..19: mol_type = other RNA
agtcacctcaacctgctag

SEQ ID NO: 47042 - RNA, 19 nt, synthetic construct
  misc_feature 1..19: note = siRNA sense sequence
  source 1..19: mol_type = other RNA
tagcaggttgaggtgacta

SEQ ID NO: 47043 - RNA, 19 nt, synthetic construct
  misc_feature 1..19: note = siRNA antisense sequence
  source 1..19: mol_type = other RNA
tagtcacctcaacctgcta

SEQ ID NO: 47044 - RNA, 19 nt, synthetic construct
  misc_feature 1..19: note = siRNA sense sequence
  source 1..19: mol_type = other RNA
agcaggttgaggtgactaa

SEQ ID NO: 47045 - RNA, 19 nt, synthetic construct
  misc_feature 1..19: note = siRNA antisense sequence
  source 1..19: mol_type = other RNA
ttagtcacctcaacctgct

SEQ ID NO: 47046 - RNA, 19 nt, synthetic construct
  misc_feature 1..19: note = siRNA sense sequence
  source 1..19: mol_type = other RNA
gcaggttgaggtgactaaa

SEQ ID NO: 47047 - RNA, 19 nt, synthetic construct
  misc_feature 1..19: note = siRNA antisense sequence
  source 1..19: mol_type = other RNA
tttagtcacctcaacctgc

SEQ ID NO: 47048 - RNA, 19 nt, synthetic construct
  misc_feature 1..19: note = siRNA sense sequence
  source 1..19: mol_type = other RNA
caggttgaggtgactaaag

SEQ ID NO: 47049 - RNA, 19 nt, synthetic construct
  misc_feature 1..19: note = siRNA antisense sequence
  source 1..19: mol_type = other RNA
ctttagtcacctcaacctg

SEQ ID NO: 47050 - RNA, 19 nt, synthetic construct
  misc_feature 1..19: note = siRNA sense sequence
  source 1..19: mol_type = other RNA
aggttgaggtgactaaaga

SEQ ID NO: 47051 - RNA, 19 nt, synthetic construct
  misc_feature 1..19: note = siRNA antisense sequence
  source 1..19: mol_type = other RNA
tctttagtcacctcaacct

SEQ ID NO: 47052 - RNA, 19 nt, synthetic construct
  misc_feature 1..19: note = siRNA sense sequence
  source 1..19: mol_type = other RNA
ggttgaggtgactaaagaa

SEQ ID NO: 47053 - RNA, 19 nt, synthetic construct
  misc_feature 1..19: note = siRNA antisense sequence
  source 1..19: mol_type = other RNA
ttctttagtcacctcaacc

SEQ ID NO: 47054 - RNA, 19 nt, synthetic construct
  misc_feature 1..19: note = siRNA sense sequence
  source 1..19: mol_type = other RNA
gttgaggtgactaaagaat

SEQ ID NO: 47055 - RNA, 19 nt, synthetic construct
  misc_feature 1..19: note = siRNA antisense sequence
  source 1..19: mol_type = other RNA
attctttagtcacctcaac

SEQ ID NO: 47056 - RNA, 19 nt, synthetic construct
  misc_feature 1..19: note = siRNA sense sequence
  source 1..19: mol_type = other RNA
tgaggtgactaaagaatgg

SEQ ID NO: 47057 - RNA, 19 nt, synthetic construct
  misc_feature 1..19: note = siRNA antisense sequence
  source 1..19: mol_type = other RNA
ccattctttagtcacctca

SEQ ID NO: 47058 - RNA, 19 nt, synthetic construct
  misc_feature 1..19: note = siRNA sense sequence
  source 1..19: mol_type = other RNA
gaggtgactaaagaatgga

SEQ ID NO: 47059 - RNA, 19 nt, synthetic construct
  misc_feature 1..19: note = siRNA antisense sequence
  source 1..19: mol_type = other RNA
tccattctttagtcacctc

SEQ ID NO: 47060 - RNA, 19 nt, synthetic construct
  misc_feature 1..19: note = siRNA sense sequence
  source 1..19: mol_type = other RNA
gactaaagaatggaggatt

SEQ ID NO: 47061 - RNA, 19 nt, synthetic construct
  misc_feature 1..19: note = siRNA antisense sequence
  source 1..19: mol_type = other RNA
aatcctccattctttagtc

SEQ ID NO: 47062 - RNA, 19 nt, synthetic construct
  misc_feature 1..19: note = siRNA sense sequence
  source 1..19: mol_type = other RNA
actaaagaatggaggattt

SEQ ID NO: 47063 - RNA, 19 nt, synthetic construct
  misc_feature 1..19: note = siRNA antisense sequence
  source 1..19: mol_type = other RNA
aaatcctccattctttagt

SEQ ID NO: 47064 - RNA, 19 nt, synthetic construct
  misc_feature 1..19: note = siRNA sense sequence
  source 1..19: mol_type = other RNA
ctaaagaatggaggatttt

SEQ ID NO: 47065 - RNA, 19 nt, synthetic construct
  misc_feature 1..19: note = siRNA antisense sequence
  source 1..19: mol_type = other RNA
aaaatcctccattctttag

SEQ ID NO: 47066 - RNA, 19 nt, synthetic construct
  misc_feature 1..19: note = siRNA sense sequence
  source 1..19: mol_type = other RNA
aaagaatggaggattttag

SEQ ID NO: 47067 - RNA, 19 nt, synthetic construct
  misc_feature 1..19: note = siRNA antisense sequence
  source 1..19: mol_type = other RNA
ctaaaatcctccattcttt

SEQ ID NO: 47068 - RNA, 19 nt, synthetic construct
  misc_feature 1..19: note = siRNA sense sequence
  source 1..19: mol_type = other RNA
aagaatggaggattttaga

SEQ ID NO: 47069 - RNA, 19 nt, synthetic construct
  misc_feature 1..19: note = siRNA antisense sequence
  source 1..19: mol_type = other RNA
tctaaaatcctccattctt

SEQ ID NO: 47070 - RNA, 19 nt, synthetic construct
  misc_feature 1..19: note = siRNA sense sequence
  source 1..19: mol_type = other RNA
agaatggaggattttagat

SEQ ID NO: 47071 - RNA, 19 nt, synthetic construct
  misc_feature 1..19: note = siRNA antisense sequence
  source 1..19: mol_type = other RNA
atctaaaatcctccattct

SEQ ID NO: 47072 - RNA, 19 nt, synthetic construct
  misc_feature 1..19: note = siRNA sense sequence
  source 1..19: mol_type = other RNA
aatggaggattttagatag

SEQ ID NO: 47073 - RNA, 19 nt, synthetic construct
  misc_feature 1..19: note = siRNA antisense sequence
  source 1..19: mol_type = other RNA
ctatctaaaatcctccatt

SEQ ID NO: 47074 - RNA, 19 nt, synthetic construct
  misc_feature 1..19: note = siRNA sense sequence
  source 1..19: mol_type = other RNA
atggaggattttagataga

SEQ ID NO: 47075 - RNA, 19 nt, synthetic construct
  misc_feature 1..19: note = siRNA antisense sequence
  source 1..19: mol_type = other RNA
tctatctaaaatcctccat

SEQ ID NO: 47076 - RNA, 19 nt, synthetic construct
  misc_feature 1..19: note = siRNA sense sequence
  source 1..19: mol_type = other RNA
tggaggattttagatagat

SEQ ID NO: 47077 - RNA, 19 nt, synthetic construct
  misc_feature 1..19: note = siRNA antisense sequence
  source 1..19: mol_type = other RNA
atctatctaaaatcctcca

SEQ ID NO: 47078 - RNA, 19 nt, synthetic construct
  misc_feature 1..19: note = siRNA sense sequence
  source 1..19: mol_type = other RNA
ggaggattttagatagatg

SEQ ID NO: 47079 - RNA, 19 nt, synthetic construct
  misc_feature 1..19: note = siRNA antisense sequence
  source 1..19: mol_type = other RNA
catctatctaaaatcctcc

SEQ ID NO: 47080 - RNA, 19 nt, synthetic construct
  misc_feature 1..19: note = siRNA sense sequence
  source 1..19: mol_type = other RNA
gaggattttagatagatgc

SEQ ID NO: 47081 - RNA, 19 nt, synthetic construct
  misc_feature 1..19: note = siRNA antisense sequence
  source 1..19: mol_type = other RNA
gcatctatctaaaatcctc

SEQ ID NO: 47082 - RNA, 19 nt, synthetic construct
  misc_feature 1..19: note = siRNA sense sequence
  source 1..19: mol_type = other RNA
aggattttagatagatgcc

SEQ ID NO: 47083 - RNA, 19 nt, synthetic construct
  misc_feature 1..19: note = siRNA antisense sequence
  source 1..19: mol_type = other RNA
ggcatctatctaaaatcct

SEQ ID NO: 47084 - RNA, 19 nt, synthetic construct
  misc_feature 1..19: note = siRNA sense sequence
  source 1..19: mol_type = other RNA
ggattttagatagatgcct

SEQ ID NO: 47085 - RNA, 19 nt, synthetic construct
  misc_feature 1..19: note = siRNA antisense sequence
  source 1..19: mol_type = other RNA
aggcatctatctaaaatcc

SEQ ID NO: 47086 - RNA, 19 nt, synthetic construct
  misc_feature 1..19: note = siRNA sense sequence
  source 1..19: mol_type = other RNA
cttcactatagggattggg

SEQ ID NO: 47087 - RNA, 19 nt, synthetic construct
  misc_feature 1..19: note = siRNA antisense sequence
  source 1..19: mol_type = other RNA
cccaatccctatagtgaag

SEQ ID NO: 47088 - RNA, 19 nt, synthetic construct
  misc_feature 1..19: note = siRNA sense sequence
  source 1..19: mol_type = other RNA
ttcactatagggattgggt

SEQ ID NO: 47089 - RNA, 19 nt, synthetic construct
  misc_feature 1..19: note = siRNA antisense sequence
  source 1..19: mol_type = other RNA
acccaatccctatagtgaa

SEQ ID NO: 47090 - RNA, 19 nt, synthetic construct
  misc_feature 1..19: note = siRNA sense sequence
  source 1..19: mol_type = other RNA
tcactatagggattgggtg

SEQ ID NO: 47091 - RNA, 19 nt, synthetic construct
  misc_feature 1..19: note = siRNA antisense sequence
  source 1..19: mol_type = other RNA
cacccaatccctatagtga

SEQ ID NO: 47092 - RNA, 19 nt, synthetic construct
  misc_feature 1..19: note = siRNA sense sequence
  source 1..19: mol_type = other RNA
cactatagggattgggtgt

SEQ ID NO: 47093 - RNA, 19 nt, synthetic construct
  misc_feature 1..19: note = siRNA antisense sequence
  source 1..19: mol_type = other RNA
acacccaatccctatagtg

SEQ ID NO: 47094 - RNA, 19 nt, synthetic construct
  misc_feature 1..19: note = siRNA sense sequence
  source 1..19: mol_type = other RNA
actatagggattgggtgtt

SEQ ID NO: 47095 - RNA, 19 nt, synthetic construct
  misc_feature 1..19: note = siRNA antisense sequence
  source 1..19: mol_type = other RNA
aacacccaatccctatagt

SEQ ID NO: 47096 - RNA, 19 nt, synthetic construct
  misc_feature 1..19: note = siRNA sense sequence
  source 1..19: mol_type = other RNA
ctatagggattgggtgttt

SEQ ID NO: 47097 - RNA, 19 nt, synthetic construct
  misc_feature 1..19: note = siRNA antisense sequence
  source 1..19: mol_type = other RNA
aaacacccaatccctatag

SEQ ID NO: 47098 - RNA, 19 nt, synthetic construct
  misc_feature 1..19: note = siRNA sense sequence
  source 1..19: mol_type = other RNA
tatagggattgggtgtttt

SEQ ID NO: 47099 - RNA, 19 nt, synthetic construct
  misc_feature 1..19: note = siRNA antisense sequence
  source 1..19: mol_type = other RNA
aaaacacccaatccctata

SEQ ID NO: 47100 - RNA, 19 nt, synthetic construct
  misc_feature 1..19: note = siRNA sense sequence
  source 1..19: mol_type = other RNA
tagggattgggtgttttca

SEQ ID NO: 47101 - RNA, 19 nt, synthetic construct
  misc_feature 1..19: note = siRNA antisense sequence
  source 1..19: mol_type = other RNA
tgaaaacacccaatcccta

SEQ ID NO: 47102 - RNA, 19 nt, synthetic construct
  misc_feature 1..19: note = siRNA sense sequence
  source 1..19: mol_type = other RNA
agggattgggtgttttcaa

SEQ ID NO: 47103 - RNA, 19 nt, synthetic construct
  misc_feature 1..19: note = siRNA antisense sequence
  source 1..19: mol_type = other RNA
ttgaaaacacccaatccct

SEQ ID NO: 47104 - RNA, 19 nt, synthetic construct
  misc_feature 1..19: note = siRNA sense sequence
  source 1..19: mol_type = other RNA
gggattgggtgttttcaac

SEQ ID NO: 47105 - RNA, 19 nt, synthetic construct
  misc_feature 1..19: note = siRNA antisense sequence
  source 1..19: mol_type = other RNA
gttgaaaacacccaatccc

SEQ ID NO: 47106 - RNA, 19 nt, synthetic construct
  misc_feature 1..19: note = siRNA sense sequence
  source 1..19: mol_type = other RNA
ggattgggtgttttcaact

SEQ ID NO: 47107 - RNA, 19 nt, synthetic construct
  misc_feature 1..19: note = siRNA antisense sequence
  source 1..19: mol_type = other RNA
agttgaaaacacccaatcc

SEQ ID NO: 47108 - RNA, 19 nt, synthetic construct
  misc_feature 1..19: note = siRNA sense sequence
  source 1..19: mol_type = other RNA
gtgttttcaactcagtttc

SEQ ID NO: 47109 - RNA, 19 nt, synthetic construct
  misc_feature 1..19: note = siRNA antisense sequence
  source 1..19: mol_type = other RNA
gaaactgagttgaaaacac

SEQ ID NO: 47110 - RNA, 19 nt, synthetic construct
  misc_feature 1..19: note = siRNA sense sequence
  source 1..19: mol_type = other RNA
tgttttcaactcagtttcc

SEQ ID NO: 47111 - RNA, 19 nt, synthetic construct
  misc_feature 1..19: note = siRNA antisense sequence
  source 1..19: mol_type = other RNA
ggaaactgagttgaaaaca

SEQ ID NO: 47112 - RNA, 19 nt, synthetic construct
  misc_feature 1..19: note = siRNA sense sequence
  source 1..19: mol_type = other RNA
aagcataaggacataattg

SEQ ID NO: 47113 - RNA, 19 nt, synthetic construct
  misc_feature 1..19: note = siRNA antisense sequence
  source 1..19: mol_type = other RNA
caattatgtccttatgctt

SEQ ID NO: 47114 - RNA, 19 nt, synthetic construct
  misc_feature 1..19: note = siRNA sense sequence
  source 1..19: mol_type = other RNA
agcataaggacataattgc

SEQ ID NO: 47115 - RNA, 19 nt, synthetic construct
  misc_feature 1..19: note = siRNA antisense sequence
  source 1..19: mol_type = other RNA
gcaattatgtccttatgct

SEQ ID NO: 47116 - RNA, 19 nt, synthetic construct
  misc_feature 1..19: note = siRNA sense sequence
  source 1..19: mol_type = other RNA
gcataaggacataattgct

SEQ ID NO: 47117 - RNA, 19 nt, synthetic construct
  misc_feature 1..19: note = siRNA antisense sequence
  source 1..19: mol_type = other RNA
agcaattatgtccttatgc

SEQ ID NO: 47118 - RNA, 19 nt, synthetic construct
  misc_feature 1..19: note = siRNA sense sequence
  source 1..19: mol_type = other RNA
cataaggacataattgctc

SEQ ID NO: 47119 - RNA, 19 nt, synthetic construct
  misc_feature 1..19: note = siRNA antisense sequence
  source 1..19: mol_type = other RNA
gagcaattatgtccttatg

SEQ ID NO: 47120 - RNA, 19 nt, synthetic construct
  misc_feature 1..19: note = siRNA sense sequence
  source 1..19: mol_type = other RNA
ataaggacataattgctcc

SEQ ID NO: 47121 - RNA, 19 nt, synthetic construct
  misc_feature 1..19: note = siRNA antisense sequence
  source 1..19: mol_type = other RNA
ggagcaattatgtccttat

SEQ ID NO: 47122 - RNA, 19 nt, synthetic construct
  misc_feature 1..19: note = siRNA sense sequence
  source 1..19: mol_type = other RNA
taaggacataattgctcca

SEQ ID NO: 47123 - RNA, 19 nt, synthetic construct
  misc_feature 1..19: note = siRNA antisense sequence
  source 1..19: mol_type = other RNA
tggagcaattatgtcctta

SEQ ID NO: 47124 - RNA, 19 nt, synthetic construct
  misc_feature 1..19: note = siRNA sense sequence
  source 1..19: mol_type = other RNA
aaggacataattgctccaa

SEQ ID NO: 47125 - RNA, 19 nt, synthetic construct
  misc_feature 1..19: note = siRNA antisense sequence
  source 1..19: mol_type = other RNA
ttggagcaattatgtcctt

SEQ ID NO: 47126 - RNA, 19 nt, synthetic construct
  misc_feature 1..19: note = siRNA sense sequence
  source 1..19: mol_type = other RNA
aggacataattgctccaac

SEQ ID NO: 47127 - RNA, 19 nt, synthetic construct
  misc_feature 1..19: note = siRNA antisense sequence
  source 1..19: mol_type = other RNA
gttggagcaattatgtcct

SEQ ID NO: 47128 - RNA, 19 nt, synthetic construct
  misc_feature 1..19: note = siRNA sense sequence
  source 1..19: mol_type = other RNA
acataaccagtgtactcta

SEQ ID NO: 47129 - RNA, 19 nt, synthetic construct
  misc_feature 1..19: note = siRNA antisense sequence
  source 1..19: mol_type = other RNA
tagagtacactggttatgt

SEQ ID NO: 47130 - RNA, 19 nt, synthetic construct
  misc_feature 1..19: note = siRNA sense sequence
  source 1..19: mol_type = other RNA
ataaccagtgtactctaga

SEQ ID NO: 47131 - RNA, 19 nt, synthetic construct
  misc_feature 1..19: note = siRNA antisense sequence
  source 1..19: mol_type = other RNA
tctagagtacactggttat

SEQ ID NO: 47132 - RNA, 19 nt, synthetic construct
  misc_feature 1..19: note = siRNA sense sequence
  source 1..19: mol_type = other RNA
taaccagtgtactctagag

SEQ ID NO: 47133 - RNA, 19 nt, synthetic construct
  misc_feature 1..19: note = siRNA antisense sequence
  source 1..19: mol_type = other RNA
ctctagagtacactggtta

SEQ ID NO: 47134 - RNA, 19 nt, synthetic construct
  misc_feature 1..19: note = siRNA sense sequence
  source 1..19: mol_type = other RNA
aaccagtgtactctagagg

SEQ ID NO: 47135 - RNA, 19 nt, synthetic construct
  misc_feature 1..19: note = siRNA antisense sequence
  source 1..19: mol_type = other RNA
cctctagagtacactggtt

SEQ ID NO: 47136 - RNA, 19 nt, synthetic construct
  misc_feature 1..19: note = siRNA sense sequence
  source 1..19: mol_type = other RNA
accagtgtactctagaggg

SEQ ID NO: 47137 - RNA, 19 nt, synthetic construct
  misc_feature 1..19: note = siRNA antisense sequence
  source 1..19: mol_type = other RNA
ccctctagagtacactggt

SEQ ID NO: 47138 - RNA, 19 nt, synthetic construct
  misc_feature 1..19: note = siRNA sense sequence
  source 1..19: mol_type = other RNA
ccagtgtactctagagggt

SEQ ID NO: 47139 - RNA, 19 nt, synthetic construct
  misc_feature 1..19: note = siRNA antisense sequence
  source 1..19: mol_type = other RNA
accctctagagtacactgg

SEQ ID NO: 47140 - RNA, 19 nt, synthetic construct
  misc_feature 1..19: note = siRNA sense sequence
  source 1..19: mol_type = other RNA
cagtgtactctagagggta

SEQ ID NO: 47141 - RNA, 19 nt, synthetic construct
  misc_feature 1..19: note = siRNA antisense sequence
  source 1..19: mol_type = other RNA
taccctctagagtacactg

SEQ ID NO: 47142 - RNA, 19 nt, synthetic construct
  misc_feature 1..19: note = siRNA sense sequence
  source 1..19: mol_type = other RNA
agtgtactctagagggtaa

SEQ ID NO: 47143 - RNA, 19 nt, synthetic construct
  misc_feature 1..19: note = siRNA antisense sequence
  source 1..19: mol_type = other RNA
ttaccctctagagtacact

SEQ ID NO: 47144 - RNA, 19 nt, synthetic construct
  misc_feature 1..19: note = siRNA sense sequence
  source 1..19: mol_type = other RNA
gtgtactctagagggtaac

SEQ ID NO: 47145 - RNA, 19 nt, synthetic construct
  misc_feature 1..19: note = siRNA antisense sequence
  source 1..19: mol_type = other RNA
gttaccctctagagtacac

SEQ ID NO: 47146 - RNA, 19 nt, synthetic construct
  misc_feature 1..19: note = siRNA sense sequence
  source 1..19: mol_type = other RNA
gtactctagagggtaactc

SEQ ID NO: 47147 - RNA, 19 nt, synthetic construct
  misc_feature 1..19: note = siRNA antisense sequence
  source 1..19: mol_type = other RNA
gagttaccctctagagtac

SEQ ID NO: 47148 - RNA, 19 nt, synthetic construct
  misc_feature 1..19: note = siRNA sense sequence
  source 1..19: mol_type = other RNA
tactctagagggtaactca

SEQ ID NO: 47149 - RNA, 19 nt, synthetic construct
  misc_feature 1..19: note = siRNA antisense sequence
  source 1..19: mol_type = other RNA
tgagttaccctctagagta

SEQ ID NO: 47150 - RNA, 19 nt, synthetic construct
  misc_feature 1..19: note = siRNA sense sequence
  source 1..19: mol_type = other RNA
actctagagggtaactcaa

SEQ ID NO: 47151 - RNA, 19 nt, synthetic construct
  misc_feature 1..19: note = siRNA antisense sequence
  source 1..19: mol_type = other RNA
ttgagttaccctctagagt

SEQ ID NO: 47152 - RNA, 19 nt, synthetic construct
  misc_feature 1..19: note = siRNA sense sequence
  source 1..19: mol_type = other RNA
ctctagagggtaactcaaa

SEQ ID NO: 47153 - RNA, 19 nt, synthetic construct
  misc_feature 1..19: note = siRNA antisense sequence
  source 1..19: mol_type = other RNA
tttgagttaccctctagag

SEQ ID NO: 47154 - RNA, 19 nt, synthetic construct
  misc_feature 1..19: note = siRNA sense sequence
  source 1..19: mol_type = other RNA
tctagagggtaactcaaag

SEQ ID NO: 47155 - RNA, 19 nt, synthetic construct
  misc_feature 1..19: note = siRNA antisense sequence
  source 1..19: mol_type = other RNA
ctttgagttaccctctaga

SEQ ID NO: 47156 - RNA, 19 nt, synthetic construct
  misc_feature 1..19: note = siRNA sense sequence
  source 1..19: mol_type = other RNA
ctagagggtaactcaaaga

SEQ ID NO: 47157 - RNA, 19 nt, synthetic construct
  misc_feature 1..19: note = siRNA antisense sequence
  source 1..19: mol_type = other RNA
tctttgagttaccctctag

SEQ ID NO: 47158 - RNA, 19 nt, synthetic construct
  misc_feature 1..19: note = siRNA sense sequence
  source 1..19: mol_type = other RNA
tagagggtaactcaaagat

SEQ ID NO: 47159 - RNA, 19 nt, synthetic construct
  misc_feature 1..19: note = siRNA antisense sequence
  source 1..19: mol_type = other RNA
atctttgagttaccctcta

SEQ ID NO: 47160 - RNA, 19 nt, synthetic construct
  misc_feature 1..19: note = siRNA sense sequence
  source 1..19: mol_type = other RNA
agagggtaactcaaagatg

SEQ ID NO: 47161 - RNA, 19 nt, synthetic construct
  misc_feature 1..19: note = siRNA antisense sequence
  source 1..19: mol_type = other RNA
catctttgagttaccctct

SEQ ID NO: 47162 - RNA, 19 nt, synthetic construct
  misc_feature 1..19: note = siRNA sense sequence
  source 1..19: mol_type = other RNA
gagggtaactcaaagatga

SEQ ID NO: 47163 - RNA, 19 nt, synthetic construct
  misc_feature 1..19: note = siRNA antisense sequence
  source 1..19: mol_type = other RNA
tcatctttgagttaccctc

SEQ ID NO: 47164 - RNA, 19 nt, synthetic construct
  misc_feature 1..19: note = siRNA sense sequence
  source 1..19: mol_type = other RNA
agggtaactcaaagatgat

SEQ ID NO: 47165 - RNA, 19 nt, synthetic construct
  misc_feature 1..19: note = siRNA antisense sequence
  source 1..19: mol_type = other RNA
atcatctttgagttaccct

SEQ ID NO: 47166 - RNA, 19 nt, synthetic construct
  misc_feature 1..19: note = siRNA sense sequence
  source 1..19: mol_type = other RNA
gggtaactcaaagatgata

SEQ ID NO: 47167 - RNA, 19 nt, synthetic construct
  misc_feature 1..19: note = siRNA antisense sequence
  source 1..19: mol_type = other RNA
tatcatctttgagttaccc

SEQ ID NO: 47168 - RNA, 19 nt, synthetic construct
  misc_feature 1..19: note = siRNA sense sequence
  source 1..19: mol_type = other RNA
ggtaactcaaagatgataa

SEQ ID NO: 47169 - RNA, 19 nt, synthetic construct
  misc_feature 1..19: note = siRNA antisense sequence
  source 1..19: mol_type = other RNA
ttatcatctttgagttacc

SEQ ID NO: 47170 - RNA, 19 nt, synthetic construct
  misc_feature 1..19: note = siRNA sense sequence
  source 1..19: mol_type = other RNA
attgctttaaatttgggct

SEQ ID NO: 47171 - RNA, 19 nt, synthetic construct
  misc_feature 1..19: note = siRNA antisense sequence
  source 1..19: mol_type = other RNA
agcccaaatttaaagcaat

SEQ ID NO: 47172 - RNA, 19 nt, synthetic construct
  misc_feature 1..19: note = siRNA sense sequence
  source 1..19: mol_type = other RNA
ttgctttaaatttgggctt

SEQ ID NO: 47173 - RNA, 19 nt, synthetic construct
  misc_feature 1..19: note = siRNA antisense sequence
  source 1..19: mol_type = other RNA
aagcccaaatttaaagcaa

SEQ ID NO: 47174 - RNA, 19 nt, synthetic construct
  misc_feature 1..19: note = siRNA sense sequence
  source 1..19: mol_type = other RNA
tgctttaaatttgggcttc

SEQ ID NO: 47175 - RNA, 19 nt, synthetic construct
  misc_feature 1..19: note = siRNA antisense sequence
  source 1..19: mol_type = other RNA
gaagcccaaatttaaagca

SEQ ID NO: 47176 - RNA, 19 nt, synthetic construct
  misc_feature 1..19: note = siRNA sense sequence
  source 1..19: mol_type = other RNA
gctttaaatttgggcttct

SEQ ID NO: 47177 - RNA, 19 nt, synthetic construct
  misc_feature 1..19: note = siRNA antisense sequence
  source 1..19: mol_type = other RNA
agaagcccaaatttaaagc

SEQ ID NO: 47178 - RNA, 19 nt, synthetic construct
  misc_feature 1..19: note = siRNA sense sequence
  source 1..19: mol_type = other RNA
ctttaaatttgggcttctc

SEQ ID NO: 47179 - RNA, 19 nt, synthetic construct
  misc_feature 1..19: note = siRNA antisense sequence
  source 1..19: mol_type = other RNA
gagaagcccaaatttaaag

SEQ ID NO: 47180 - RNA, 19 nt, synthetic construct
  misc_feature 1..19: note = siRNA sense sequence
  source 1..19: mol_type = other RNA
tttaaatttgggcttctct

SEQ ID NO: 47181 - RNA, 19 nt, synthetic construct
  misc_feature 1..19: note = siRNA antisense sequence
  source 1..19: mol_type = other RNA
agagaagcccaaatttaaa

SEQ ID NO: 47182 - RNA, 19 nt, synthetic construct
  misc_feature 1..19: note = siRNA sense sequence
  source 1..19: mol_type = other RNA
aaatttgggcttctcttat

SEQ ID NO: 47183 - RNA, 19 nt, synthetic construct
  misc_feature 1..19: note = siRNA antisense sequence
  source 1..19: mol_type = other RNA
ataagagaagcccaaattt

SEQ ID NO: 47184 - RNA, 19 nt, synthetic construct
  misc_feature 1..19: note = siRNA sense sequence
  source 1..19: mol_type = other RNA
aatttgggcttctcttatt

SEQ ID NO: 47185 - RNA, 19 nt, synthetic construct
  misc_feature 1..19: note = siRNA antisense sequence
  source 1..19: mol_type = other RNA
aataagagaagcccaaatt

SEQ ID NO: 47186 - RNA, 19 nt, synthetic construct
  misc_feature 1..19: note = siRNA sense sequence
  source 1..19: mol_type = other RNA
atttgggcttctcttattt

SEQ ID NO: 47187 - RNA, 19 nt, synthetic construct
  misc_feature 1..19: note = siRNA antisense sequence
  source 1..19: mol_type = other RNA
aaataagagaagcccaaat

SEQ ID NO: 47188 - RNA, 19 nt, synthetic construct
  misc_feature 1..19: note = siRNA sense sequence
  source 1..19: mol_type = other RNA
tttgggcttctcttatttg

SEQ ID NO: 47189 - RNA, 19 nt, synthetic construct
  misc_feature 1..19: note = siRNA antisense sequence
  source 1..19: mol_type = other RNA
caaataagagaagcccaaa

SEQ ID NO: 47190 - RNA, 19 nt, synthetic construct
  misc_feature 1..19: note = siRNA sense sequence
  source 1..19: mol_type = other RNA
ttgggcttctcttatttgt

SEQ ID NO: 47191 - RNA, 19 nt, synthetic construct
  misc_feature 1..19: note = siRNA antisense sequence
  source 1..19: mol_type = other RNA
acaaataagagaagcccaa

SEQ ID NO: 47192 - RNA, 19 nt, synthetic construct
  misc_feature 1..19: note = siRNA sense sequence
  source 1..19: mol_type = other RNA
cacaccagaatatgctttt

SEQ ID NO: 47193 - RNA, 19 nt, synthetic construct
  misc_feature 1..19: note = siRNA antisense sequence
  source 1..19: mol_type = other RNA
aaaagcatattctggtgtg

SEQ ID NO: 47194 - RNA, 19 nt, synthetic construct
  misc_feature 1..19: note = siRNA sense sequence
  source 1..19: mol_type = other RNA
caccagaatatgcttttag

SEQ ID NO: 47195 - RNA, 19 nt, synthetic construct
  misc_feature 1..19: note = siRNA antisense sequence
  source 1..19: mol_type = other RNA
ctaaaagcatattctggtg

SEQ ID NO: 47196 - RNA, 19 nt, synthetic construct
  misc_feature 1..19: note = siRNA sense sequence
  source 1..19: mol_type = other RNA
accagaatatgcttttagt

SEQ ID NO: 47197 - RNA, 19 nt, synthetic construct
  misc_feature 1..19: note = siRNA antisense sequence
  source 1..19: mol_type = other RNA
actaaaagcatattctggt

SEQ ID NO: 47198 - RNA, 19 nt, synthetic construct
  misc_feature 1..19: note = siRNA sense sequence
  source 1..19: mol_type = other RNA
ccagaatatgcttttagtt

SEQ ID NO: 47199 - RNA, 19 nt, synthetic construct
  misc_feature 1..19: note = siRNA antisense sequence
  source 1..19: mol_type = other RNA
aactaaaagcatattctgg

SEQ ID NO: 47200 - RNA, 19 nt, synthetic construct
  misc_feature 1..19: note = siRNA sense sequence
  source 1..19: mol_type = other RNA
gaatatgcttttagtttcc

SEQ ID NO: 47201 - RNA, 19 nt, synthetic construct
  misc_feature 1..19: note = siRNA antisense sequence
  source 1..19: mol_type = other RNA
ggaaactaaaagcatattc

SEQ ID NO: 47202 - RNA, 19 nt, synthetic construct
  misc_feature 1..19: note = siRNA sense sequence
  source 1..19: mol_type = other RNA
ttaagactaaagctttctg

SEQ ID NO: 47203 - RNA, 19 nt, synthetic construct
  misc_feature 1..19: note = siRNA antisense sequence
  source 1..19: mol_type = other RNA
cagaaagctttagtcttaa

SEQ ID NO: 47204 - RNA, 19 nt, synthetic construct
  misc_feature 1..19: note = siRNA sense sequence
  source 1..19: mol_type = other RNA
taagactaaagctttctga

SEQ ID NO: 47205 - RNA, 19 nt, synthetic construct
  misc_feature 1..19: note = siRNA antisense sequence
  source 1..19: mol_type = other RNA
tcagaaagctttagtctta

SEQ ID NO: 47206 - RNA, 19 nt, synthetic construct
  misc_feature 1..19: note = siRNA sense sequence
  source 1..19: mol_type = other RNA
agactaaagctttctgaca

SEQ ID NO: 47207 - RNA, 19 nt, synthetic construct
  misc_feature 1..19: note = siRNA antisense sequence
  source 1..19: mol_type = other RNA
tgtcagaaagctttagtct

SEQ ID NO: 47208 - RNA, 19 nt, synthetic construct
  misc_feature 1..19: note = siRNA sense sequence
  source 1..19: mol_type = other RNA
gactaaagctttctgacat

SEQ ID NO: 47209 - RNA, 19 nt, synthetic construct
  misc_feature 1..19: note = siRNA antisense sequence
  source 1..19: mol_type = other RNA
atgtcagaaagctttagtc

SEQ ID NO: 47210 - RNA, 19 nt, synthetic construct
  misc_feature 1..19: note = siRNA sense sequence
  source 1..19: mol_type = other RNA
tcagtgatttcagcagagg

SEQ ID NO: 47211 - RNA, 19 nt, synthetic construct
  misc_feature 1..19: note = siRNA antisense sequence
  source 1..19: mol_type = other RNA
cctctgctgaaatcactga

SEQ ID NO: 47212 - RNA, 19 nt, synthetic construct
  misc_feature 1..19: note = siRNA sense sequence
  source 1..19: mol_type = other RNA
cagtgatttcagcagagga

SEQ ID NO: 47213 - RNA, 19 nt, synthetic construct
  misc_feature 1..19: note = siRNA antisense sequence
  source 1..19: mol_type = other RNA
tcctctgctgaaatcactg

SEQ ID NO: 47214 - RNA, 19 nt, synthetic construct
  misc_feature 1..19: note = siRNA sense sequence
  source 1..19: mol_type = other RNA
agtgatttcagcagaggag

SEQ ID NO: 47215 - RNA, 19 nt, synthetic construct
  misc_feature 1..19: note = siRNA antisense sequence
  source 1..19: mol_type = other RNA
ctcctctgctgaaatcact

SEQ ID NO: 47216 - RNA, 19 nt, synthetic construct
  misc_feature 1..19: note = siRNA sense sequence
  source 1..19: mol_type = other RNA
tgatttcagcagaggagcc

SEQ ID NO: 47217 - RNA, 19 nt, synthetic construct
  misc_feature 1..19: note = siRNA antisense sequence
  source 1..19: mol_type = other RNA
ggctcctctgctgaaatca

SEQ ID NO: 47218 - RNA, 19 nt, synthetic construct
  misc_feature 1..19: note = siRNA sense sequence
  source 1..19: mol_type = other RNA
gatttcagcagaggagcct

SEQ ID NO: 47219 - RNA, 19 nt, synthetic construct
  misc_feature 1..19: note = siRNA antisense sequence
  source 1..19: mol_type = other RNA
aggctcctctgctgaaatc

SEQ ID NO: 47220 - RNA, 19 nt, synthetic construct
  misc_feature 1..19: note = siRNA sense sequence
  source 1..19: mol_type = other RNA
tcagcagaggagcctggaa

SEQ ID NO: 47221 - RNA, 19 nt, synthetic construct
  misc_feature 1..19: note = siRNA antisense sequence
  source 1..19: mol_type = other RNA
ttccaggctcctctgctga

SEQ ID NO: 47222 - RNA, 19 nt, synthetic construct
  misc_feature 1..19: note = siRNA sense sequence
  source 1..19: mol_type = other RNA
gccttcatgctacttaaga

SEQ ID NO: 47223 - RNA, 19 nt, synthetic construct
  misc_feature 1..19: note = siRNA antisense sequence
  source 1..19: mol_type = other RNA
tcttaagtagcatgaaggc

SEQ ID NO: 47224 - RNA, 19 nt, synthetic construct
  misc_feature 1..19: note = siRNA sense sequence
  source 1..19: mol_type = other RNA
cttcatgctacttaagaat

SEQ ID NO: 47225 - RNA, 19 nt, synthetic construct
  misc_feature 1..19: note = siRNA antisense sequence
  source 1..19: mol_type = other RNA
attcttaagtagcatgaag

SEQ ID NO: 47226 - RNA, 19 nt, synthetic construct
  misc_feature 1..19: note = siRNA sense sequence
  source 1..19: mol_type = other RNA
agaataaggttagactaag

SEQ ID NO: 47227 - RNA, 19 nt, synthetic construct
  misc_feature 1..19: note = siRNA antisense sequence
  source 1..19: mol_type = other RNA
cttagtctaaccttattct

SEQ ID NO: 47228 - RNA, 19 nt, synthetic construct
  misc_feature 1..19: note = siRNA sense sequence
  source 1..19: mol_type = other RNA
gaataaggttagactaaga

SEQ ID NO: 47229 - RNA, 19 nt, synthetic construct
  misc_feature 1..19: note = siRNA antisense sequence
  source 1..19: mol_type = other RNA
tcttagtctaaccttattc

SEQ ID NO: 47230 - RNA, 19 nt, synthetic construct
  misc_feature 1..19: note = siRNA sense sequence
  source 1..19: mol_type = other RNA
aataggatttgctctaaag

SEQ ID NO: 47231 - RNA, 19 nt, synthetic construct
  misc_feature 1..19: note = siRNA antisense sequence
  source 1..19: mol_type = other RNA
ctttagagcaaatcctatt

SEQ ID NO: 47232 - RNA, 19 nt, synthetic construct
  misc_feature 1..19: note = siRNA sense sequence
  source 1..19: mol_type = other RNA
ataggatttgctctaaagc

SEQ ID NO: 47233 - RNA, 19 nt, synthetic construct
  misc_feature 1..19: note = siRNA antisense sequence
  source 1..19: mol_type = other RNA
gctttagagcaaatcctat

SEQ ID NO: 47234 - RNA, 19 nt, synthetic construct
  misc_feature 1..19: note = siRNA sense sequence
  source 1..19: mol_type = other RNA
acagaggcaacttcaccaa

SEQ ID NO: 47235 - RNA, 19 nt, synthetic construct
  misc_feature 1..19: note = siRNA antisense sequence
  source 1..19: mol_type = other RNA
ttggtgaagttgcctctgt

SEQ ID NO: 47236 - RNA, 19 nt, synthetic construct
  misc_feature 1..19: note = siRNA sense sequence
  source 1..19: mol_type = other RNA
acaggcaaagtaggcaatt

SEQ ID NO: 47237 - RNA, 19 nt, synthetic construct
  misc_feature 1..19: note = siRNA antisense sequence
  source 1..19: mol_type = other RNA
aattgcctactttgcctgt

SEQ ID NO: 47238 - RNA, 19 nt, synthetic construct
  misc_feature 1..19: note = siRNA sense sequence
  source 1..19: mol_type = other RNA
caggcaaagtaggcaattg

SEQ ID NO: 47239 - RNA, 19 nt, synthetic construct
  misc_feature 1..19: note = siRNA antisense sequence
  source 1..19: mol_type = other RNA
caattgcctactttgcctg

SEQ ID NO: 47240 - RNA, 19 nt, synthetic construct
  misc_feature 1..19: note = siRNA sense sequence
  source 1..19: mol_type = other RNA
gaaggcaggcttgttgcaa

SEQ ID NO: 47241 - RNA, 19 nt, synthetic construct
  misc_feature 1..19: note = siRNA antisense sequence
  source 1..19: mol_type = other RNA
ttgcaacaagcctgccttc

SEQ ID NO: 47242 - RNA, 19 nt, synthetic construct
  misc_feature 1..19: note = siRNA sense sequence
  source 1..19: mol_type = other RNA
aaggcaggcttgttgcaaa

SEQ ID NO: 47243 - RNA, 19 nt, synthetic construct
  misc_feature 1..19: note = siRNA antisense sequence
  source 1..19: mol_type = other RNA
tttgcaacaagcctgcctt

SEQ ID NO: 47244 - RNA, 19 nt, synthetic construct
  misc_feature 1..19: note = siRNA sense sequence
  source 1..19: mol_type = other RNA
aggcaggcttgttgcaaat

SEQ ID NO: 47245 - RNA, 19 nt, synthetic construct
  misc_feature 1..19: note = siRNA antisense sequence
  source 1..19: mol_type = other RNA
atttgcaacaagcctgcct

SEQ ID NO: 47246 - RNA, 19 nt, synthetic construct
  misc_feature 1..19: note = siRNA sense sequence
  source 1..19: mol_type = other RNA
ggcaggcttgttgcaaatt

SEQ ID NO: 47247 - RNA, 19 nt, synthetic construct
  misc_feature 1..19: note = siRNA antisense sequence
  source 1..19: mol_type = other RNA
aatttgcaacaagcctgcc

SEQ ID NO: 47248 - RNA, 19 nt, synthetic construct
  misc_feature 1..19: note = siRNA sense sequence
  source 1..19: mol_type = other RNA
gcaggcttgttgcaaatta

SEQ ID NO: 47249 - RNA, 19 nt, synthetic construct
  misc_feature 1..19: note = siRNA antisense sequence
  source 1..19: mol_type = other RNA
taatttgcaacaagcctgc

SEQ ID NO: 47250 - RNA, 19 nt, synthetic construct
  misc_feature 1..19: note = siRNA sense sequence
  source 1..19: mol_type = other RNA
caggcttgttgcaaattac

SEQ ID NO: 47251 - RNA, 19 nt, synthetic construct
  misc_feature 1..19: note = siRNA antisense sequence
  source 1..19: mol_type = other RNA
gtaatttgcaacaagcctg

SEQ ID NO: 47252 - RNA, 19 nt, synthetic construct
  misc_feature 1..19: note = siRNA sense sequence
  source 1..19: mol_type = other RNA
aggcttgttgcaaattacc

SEQ ID NO: 47253 - RNA, 19 nt, synthetic construct
  misc_feature 1..19: note = siRNA antisense sequence
  source 1..19: mol_type = other RNA
ggtaatttgcaacaagcct

SEQ ID NO: 47254 - RNA, 19 nt, synthetic construct
  misc_feature 1..19: note = siRNA sense sequence
  source 1..19: mol_type = other RNA
ggcttgttgcaaattacct

SEQ ID NO: 47255 - RNA, 19 nt, synthetic construct
  misc_feature 1..19: note = siRNA antisense sequence
  source 1..19: mol_type = other RNA
aggtaatttgcaacaagcc

SEQ ID NO: 47256 - RNA, 19 nt, synthetic construct
  misc_feature 1..19: note = siRNA sense sequence
  source 1..19: mol_type = other RNA
tgttgcaaattacctccct

SEQ ID NO: 47257 - RNA, 19 nt, synthetic construct
  misc_feature 1..19: note = siRNA antisense sequence
  source 1..19: mol_type = other RNA
agggaggtaatttgcaaca

SEQ ID NO: 47258 - RNA, 19 nt, synthetic construct
  misc_feature 1..19: note = siRNA sense sequence
  source 1..19: mol_type = other RNA
gttgcaaattacctccctt

SEQ ID NO: 47259 - RNA, 19 nt, synthetic construct
  misc_feature 1..19: note = siRNA antisense sequence
  source 1..19: mol_type = other RNA
aagggaggtaatttgcaac

SEQ ID NO: 47260 - RNA, 19 nt, synthetic construct
  misc_feature 1..19: note = siRNA sense sequence
  source 1..19: mol_type = other RNA
ttgcaaattacctccctta

SEQ ID NO: 47261 - RNA, 19 nt, synthetic construct
  misc_feature 1..19: note = siRNA antisense sequence
  source 1..19: mol_type = other RNA
taagggaggtaatttgcaa

SEQ ID NO: 47262 - RNA, 19 nt, synthetic construct
  misc_feature 1..19: note = siRNA sense sequence
  source 1..19: mol_type = other RNA
tgcaaattacctcccttac

SEQ ID NO: 47263 - RNA, 19 nt, synthetic construct
  misc_feature 1..19: note = siRNA antisense sequence
  source 1..19: mol_type = other RNA
gtaagggaggtaatttgca

SEQ ID NO: 47264 - RNA, 19 nt, synthetic construct
  misc_feature 1..19: note = siRNA sense sequence
  source 1..19: mol_type = other RNA
gcaaattacctcccttacc

SEQ ID NO: 47265 - RNA, 19 nt, synthetic construct
  misc_feature 1..19: note = siRNA antisense sequence
  source 1..19: mol_type = other RNA
ggtaagggaggtaatttgc

SEQ ID NO: 47266 - RNA, 19 nt, synthetic construct
  misc_feature 1..19: note = siRNA sense sequence
  source 1..19: mol_type = other RNA
aattacctcccttacccaa

SEQ ID NO: 47267 - RNA, 19 nt, synthetic construct
  misc_feature 1..19: note = siRNA antisense sequence
  source 1..19: mol_type = other RNA
ttgggtaagggaggtaatt

SEQ ID NO: 47268 - RNA, 19 nt, synthetic construct
  misc_feature 1..19: note = siRNA sense sequence
  source 1..19: mol_type = other RNA
attacctcccttacccaag

SEQ ID NO: 47269 - RNA, 19 nt, synthetic construct
  misc_feature 1..19: note = siRNA antisense sequence
  source 1..19: mol_type = other RNA
cttgggtaagggaggtaat

SEQ ID NO: 47270 - RNA, 19 nt, synthetic construct
  misc_feature 1..19: note = siRNA sense sequence
  source 1..19: mol_type = other RNA
ttacctcccttacccaagt

SEQ ID NO: 47271 - RNA, 19 nt, synthetic construct
  misc_feature 1..19: note = siRNA antisense sequence
  source 1..19: mol_type = other RNA
acttgggtaagggaggtaa

SEQ ID NO: 47272 - RNA, 19 nt, synthetic construct
  misc_feature 1..19: note = siRNA sense sequence
  source 1..19: mol_type = other RNA
tacctcccttacccaagta

SEQ ID NO: 47273 - RNA, 19 nt, synthetic construct
  misc_feature 1..19: note = siRNA antisense sequence
  source 1..19: mol_type = other RNA
tacttgggtaagggaggta

SEQ ID NO: 47274 - RNA, 19 nt, synthetic construct
  misc_feature 1..19: note = siRNA sense sequence
  source 1..19: mol_type = other RNA
tacccaagtaatgaatcac

SEQ ID NO: 47275 - RNA, 19 nt, synthetic construct
  misc_feature 1..19: note = siRNA antisense sequence
  source 1..19: mol_type = other RNA
gtgattcattacttgggta

SEQ ID NO: 47276 - RNA, 19 nt, synthetic construct
  misc_feature 1..19: note = siRNA sense sequence
  source 1..19: mol_type = other RNA
acccaagtaatgaatcacc

SEQ ID NO: 47277 - RNA, 19 nt, synthetic construct
  misc_feature 1..19: note = siRNA antisense sequence
  source 1..19: mol_type = other RNA
ggtgattcattacttgggt

SEQ ID NO: 47278 - RNA, 19 nt, synthetic construct
  misc_feature 1..19: note = siRNA sense sequence
  source 1..19: mol_type = other RNA
cccaagtaatgaatcacct

SEQ ID NO: 47279 - RNA, 19 nt, synthetic construct
  misc_feature 1..19: note = siRNA antisense sequence
  source 1..19: mol_type = other RNA
aggtgattcattacttggg

SEQ ID NO: 47280 - RNA, 19 nt, synthetic construct
  misc_feature 1..19: note = siRNA sense sequence
  source 1..19: mol_type = other RNA
agtaatgaatcacctggaa

SEQ ID NO: 47281 - RNA, 19 nt, synthetic construct
  misc_feature 1..19: note = siRNA antisense sequence
  source 1..19: mol_type = other RNA
ttccaggtgattcattact

SEQ ID NO: 47282 - RNA, 19 nt, synthetic construct
  misc_feature 1..19: note = siRNA sense sequence
  source 1..19: mol_type = other RNA
gtaatgaatcacctggaat

SEQ ID NO: 47283 - RNA, 19 nt, synthetic construct
  misc_feature 1..19: note = siRNA antisense sequence
  source 1..19: mol_type = other RNA
attccaggtgattcattac

SEQ ID NO: 47284 - RNA, 19 nt, synthetic construct
  misc_feature 1..19: note = siRNA sense sequence
  source 1..19: mol_type = other RNA
agacattcctttgggcaaa

SEQ ID NO: 47285 - RNA, 19 nt, synthetic construct
  misc_feature 1..19: note = siRNA antisense sequence
  source 1..19: mol_type = other RNA
tttgcccaaaggaatgtct

SEQ ID NO: 47286 - RNA, 19 nt, synthetic construct
  misc_feature 1..19: note = siRNA sense sequence
  source 1..19: mol_type = other RNA
gacattcctttgggcaaat

SEQ ID NO: 47287 - RNA, 19 nt, synthetic construct
  misc_feature 1..19: note = siRNA antisense sequence
  source 1..19: mol_type = other RNA
atttgcccaaaggaatgtc

SEQ ID NO: 47288 - RNA, 19 nt, synthetic construct
  misc_feature 1..19: note = siRNA sense sequence
  source 1..19: mol_type = other RNA
tgggcaaataattttctga

SEQ ID NO: 47289 - RNA, 19 nt, synthetic construct
  misc_feature 1..19: note = siRNA antisense sequence
  source 1..19: mol_type = other RNA
tcagaaaattatttgccca

SEQ ID NO: 47290 - RNA, 19 nt, synthetic construct
  misc_feature 1..19: note = siRNA sense sequence
  source 1..19: mol_type = other RNA
gggcaaataattttctgag

SEQ ID NO: 47291 - RNA, 19 nt, synthetic construct
  misc_feature 1..19: note = siRNA antisense sequence
  source 1..19: mol_type = other RNA
ctcagaaaattatttgccc

SEQ ID NO: 47292 - RNA, 19 nt, synthetic construct
  misc_feature 1..19: note = siRNA sense sequence
  source 1..19: mol_type = other RNA
aataattttctgagtctgg

SEQ ID NO: 47293 - RNA, 19 nt, synthetic construct
  misc_feature 1..19: note = siRNA antisense sequence
  source 1..19: mol_type = other RNA
ccagactcagaaaattatt

SEQ ID NO: 47294 - RNA, 19 nt, synthetic construct
  misc_feature 1..19: note = siRNA sense sequence
  source 1..19: mol_type = other RNA
ataattttctgagtctgga

SEQ ID NO: 47295 - RNA, 19 nt, synthetic construct
  misc_feature 1..19: note = siRNA antisense sequence
  source 1..19: mol_type = other RNA
tccagactcagaaaattat

SEQ ID NO: 47296 - RNA, 19 nt, synthetic construct
  misc_feature 1..19: note = siRNA sense sequence
  source 1..19: mol_type = other RNA
cagattagtttattggttc

SEQ ID NO: 47297 - RNA, 19 nt, synthetic construct
  misc_feature 1..19: note = siRNA antisense sequence
  source 1..19: mol_type = other RNA
gaaccaataaactaatctg

SEQ ID NO: 47298 - RNA, 19 nt, synthetic construct
  misc_feature 1..19: note = siRNA sense sequence
  source 1..19: mol_type = other RNA
gattagtttattggttcac

SEQ ID NO: 47299 - RNA, 19 nt, synthetic construct
  misc_feature 1..19: note = siRNA antisense sequence
  source 1..19: mol_type = other RNA
gtgaaccaataaactaatc

SEQ ID NO: 47300 - RNA, 19 nt, synthetic construct
  misc_feature 1..19: note = siRNA sense sequence
  source 1..19: mol_type = other RNA
tagtttattggttcacatc

SEQ ID NO: 47301 - RNA, 19 nt, synthetic construct
  misc_feature 1..19: note = siRNA antisense sequence
  source 1..19: mol_type = other RNA
gatgtgaaccaataaacta

SEQ ID NO: 47302 - RNA, 19 nt, synthetic construct
  misc_feature 1..19: note = siRNA sense sequence
  source 1..19: mol_type = other RNA
agtttattggttcacatca

SEQ ID NO: 47303 - RNA, 19 nt, synthetic construct
  misc_feature 1..19: note = siRNA antisense sequence
  source 1..19: mol_type = other RNA
tgatgtgaaccaataaact

SEQ ID NO: 47304 - RNA, 19 nt, synthetic construct
  misc_feature 1..19: note = siRNA sense sequence
  source 1..19: mol_type = other RNA
gtttattggttcacatcaa

SEQ ID NO: 47305 - RNA, 19 nt, synthetic construct
  misc_feature 1..19: note = siRNA antisense sequence
  source 1..19: mol_type = other RNA
ttgatgtgaaccaataaac

SEQ ID NO: 47306 - RNA, 19 nt, synthetic construct
  misc_feature 1..19: note = siRNA sense sequence
  source 1..19: mol_type = other RNA
tttattggttcacatcaac

SEQ ID NO: 47307 - RNA, 19 nt, synthetic construct
  misc_feature 1..19: note = siRNA antisense sequence
  source 1..19: mol_type = other RNA
gttgatgtgaaccaataaa

SEQ ID NO: 47308 - RNA, 19 nt, synthetic construct
  misc_feature 1..19: note = siRNA sense sequence
  source 1..19: mol_type = other RNA
gttcacatcaacctttaaa

SEQ ID NO: 47309 - RNA, 19 nt, synthetic construct
  misc_feature 1..19: note = siRNA antisense sequence
  source 1..19: mol_type = other RNA
tttaaaggttgatgtgaac

SEQ ID NO: 47310 - RNA, 19 nt, synthetic construct
  misc_feature 1..19: note = siRNA sense sequence
  source 1..19: mol_type = other RNA
ttcacatcaacctttaaag

SEQ ID NO: 47311 - RNA, 19 nt, synthetic construct
  misc_feature 1..19: note = siRNA antisense sequence
  source 1..19: mol_type = other RNA
ctttaaaggttgatgtgaa

SEQ ID NO: 47312 - RNA, 19 nt, synthetic construct
  misc_feature 1..19: note = siRNA sense sequence
  source 1..19: mol_type = other RNA
tcacatcaacctttaaagg

SEQ ID NO: 47313 - RNA, 19 nt, synthetic construct
  misc_feature 1..19: note = siRNA antisense sequence
  source 1..19: mol_type = other RNA
cctttaaaggttgatgtga

SEQ ID NO: 47314 - RNA, 19 nt, synthetic construct
  misc_feature 1..19: note = siRNA sense sequence
  source 1..19: mol_type = other RNA
cacatcaacctttaaaggg

SEQ ID NO: 47315 - RNA, 19 nt, synthetic construct
  misc_feature 1..19: note = siRNA antisense sequence
  source 1..19: mol_type = other RNA
ccctttaaaggttgatgtg

SEQ ID NO: 47316 - RNA, 19 nt, synthetic construct
  misc_feature 1..19: note = siRNA sense sequence
  source 1..19: mol_type = other RNA
gaggcaggtgggaagagga

SEQ ID NO: 47317 - RNA, 19 nt, synthetic construct
  misc_feature 1..19: note = siRNA antisense sequence
  source 1..19: mol_type = other RNA
tcctcttcccacctgcctc

SEQ ID NO: 47318 - RNA, 19 nt, synthetic construct
  misc_feature 1..19: note = siRNA sense sequence
  source 1..19: mol_type = other RNA
tgggaagaggaagaatatg

SEQ ID NO: 47319 - RNA, 19 nt, synthetic construct
  misc_feature 1..19: note = siRNA antisense sequence
  source 1..19: mol_type = other RNA
catattcttcctcttccca

SEQ ID NO: 47320 - RNA, 19 nt, synthetic construct
  misc_feature 1..19: note = siRNA sense sequence
  source 1..19: mol_type = other RNA
aggaagaatatggagcaag

SEQ ID NO: 47321 - RNA, 19 nt, synthetic construct
  misc_feature 1..19: note = siRNA antisense sequence
  source 1..19: mol_type = other RNA
cttgctccatattcttcct

SEQ ID NO: 47322 - RNA, 19 nt, synthetic construct
  misc_feature 1..19: note = siRNA sense sequence
  source 1..19: mol_type = other RNA
ggaagaatatggagcaagg

SEQ ID NO: 47323 - RNA, 19 nt, synthetic construct
  misc_feature 1..19: note = siRNA antisense sequence
  source 1..19: mol_type = other RNA
ccttgctccatattcttcc

SEQ ID NO: 47324 - RNA, 19 nt, synthetic construct
  misc_feature 1..19: note = siRNA sense sequence
  source 1..19: mol_type = other RNA
gaagaatatggagcaaggg

SEQ ID NO: 47325 - RNA, 19 nt, synthetic construct
  misc_feature 1..19: note = siRNA antisense sequence
  source 1..19: mol_type = other RNA
cccttgctccatattcttc

SEQ ID NO: 47326 - RNA, 19 nt, synthetic construct
  misc_feature 1..19: note = siRNA sense sequence
  source 1..19: mol_type = other RNA
ctcctgtatttcactgcat

SEQ ID NO: 47327 - RNA, 19 nt, synthetic construct
  misc_feature 1..19: note = siRNA antisense sequence
  source 1..19: mol_type = other RNA
atgcagtgaaatacaggag

SEQ ID NO: 47328 - RNA, 19 nt, synthetic construct
  misc_feature 1..19: note = siRNA sense sequence
  source 1..19: mol_type = other RNA
tcctgtatttcactgcatg

SEQ ID NO: 47329 - RNA, 19 nt, synthetic construct
  misc_feature 1..19: note = siRNA antisense sequence
  source 1..19: mol_type = other RNA
catgcagtgaaatacagga

SEQ ID NO: 47330 - RNA, 19 nt, synthetic construct
  misc_feature 1..19: note = siRNA sense sequence
  source 1..19: mol_type = other RNA
cctgtatttcactgcatga

SEQ ID NO: 47331 - RNA, 19 nt, synthetic construct
  misc_feature 1..19: note = siRNA antisense sequence
  source 1..19: mol_type = other RNA
tcatgcagtgaaatacagg

SEQ ID NO: 47332 - RNA, 19 nt, synthetic construct
  misc_feature 1..19: note = siRNA sense sequence
  source 1..19: mol_type = other RNA
cagttagctgcctgcgtta

SEQ ID NO: 47333 - RNA, 19 nt, synthetic construct
  misc_feature 1..19: note = siRNA antisense sequence
  source 1..19: mol_type = other RNA
taacgcaggcagctaactg

SEQ ID NO: 47334 - RNA, 19 nt, synthetic construct
  misc_feature 1..19: note = siRNA sense sequence
  source 1..19: mol_type = other RNA
agttagctgcctgcgttat

SEQ ID NO: 47335 - RNA, 19 nt, synthetic construct
  misc_feature 1..19: note = siRNA antisense sequence
  source 1..19: mol_type = other RNA
ataacgcaggcagctaact

SEQ ID NO: 47336 - RNA, 19 nt, synthetic construct
  misc_feature 1..19: note = siRNA sense sequence
  source 1..19: mol_type = other RNA
gttagctgcctgcgttatc

SEQ ID NO: 47337 - RNA, 19 nt, synthetic construct
  misc_feature 1..19: note = siRNA antisense sequence
  source 1..19: mol_type = other RNA
gataacgcaggcagctaac

SEQ ID NO: 47338 - RNA, 19 nt, synthetic construct
  misc_feature 1..19: note = siRNA sense sequence
  source 1..19: mol_type = other RNA
ttagctgcctgcgttatcc

SEQ ID NO: 47339 - RNA, 19 nt, synthetic construct
  misc_feature 1..19: note = siRNA antisense sequence
  source 1..19: mol_type = other RNA
ggataacgcaggcagctaa

SEQ ID NO: 47340 - RNA, 19 nt, synthetic construct
  misc_feature 1..19: note = siRNA sense sequence
  source 1..19: mol_type = other RNA
ctgcctgcgttatccaatc

SEQ ID NO: 47341 - RNA, 19 nt, synthetic construct
  misc_feature 1..19: note = siRNA antisense sequence
  source 1..19: mol_type = other RNA
gattggataacgcaggcag

SEQ ID NO: 47342 - RNA, 19 nt, synthetic construct
  misc_feature 1..19: note = siRNA sense sequence
  source 1..19: mol_type = other RNA
tgcctgcgttatccaatct

SEQ ID NO: 47343 - RNA, 19 nt, synthetic construct
  misc_feature 1..19: note = siRNA antisense sequence
  source 1..19: mol_type = other RNA
agattggataacgcaggca

SEQ ID NO: 47344 - RNA, 19 nt, synthetic construct
  misc_feature 1..19: note = siRNA sense sequence
  source 1..19: mol_type = other RNA
gcctgcgttatccaatctg

SEQ ID NO: 47345 - RNA, 19 nt, synthetic construct
  misc_feature 1..19: note = siRNA antisense sequence
  source 1..19: mol_type = other RNA
cagattggataacgcaggc

SEQ ID NO: 47346 - RNA, 19 nt, synthetic construct
  misc_feature 1..19: note = siRNA sense sequence
  source 1..19: mol_type = other RNA
cctgcgttatccaatctgt

SEQ ID NO: 47347 - RNA, 19 nt, synthetic construct
  misc_feature 1..19: note = siRNA antisense sequence
  source 1..19: mol_type = other RNA
acagattggataacgcagg

SEQ ID NO: 47348 - RNA, 19 nt, synthetic construct
  misc_feature 1..19: note = siRNA sense sequence
  source 1..19: mol_type = other RNA
ctgcgttatccaatctgtg

SEQ ID NO: 47349 - RNA, 19 nt, synthetic construct
  misc_feature 1..19: note = siRNA antisense sequence
  source 1..19: mol_type = other RNA
cacagattggataacgcag

SEQ ID NO: 47350 - RNA, 19 nt, synthetic construct
  misc_feature 1..19: note = siRNA sense sequence
  source 1..19: mol_type = other RNA
tgcgttatccaatctgtgg

SEQ ID NO: 47351 - RNA, 19 nt, synthetic construct
  misc_feature 1..19: note = siRNA antisense sequence
  source 1..19: mol_type = other RNA
ccacagattggataacgca

SEQ ID NO: 47352 - RNA, 19 nt, synthetic construct
  misc_feature 1..19: note = siRNA sense sequence
  source 1..19: mol_type = other RNA
ccaatctgtggactaaagg

SEQ ID NO: 47353 - RNA, 19 nt, synthetic construct
  misc_feature 1..19: note = siRNA antisense sequence
  source 1..19: mol_type = other RNA
cctttagtccacagattgg

SEQ ID NO: 47354 - RNA, 19 nt, synthetic construct
  misc_feature 1..19: note = siRNA sense sequence
  source 1..19: mol_type = other RNA
caatctgtggactaaaggg

SEQ ID NO: 47355 - RNA, 19 nt, synthetic construct
  misc_feature 1..19: note = siRNA antisense sequence
  source 1..19: mol_type = other RNA
ccctttagtccacagattg

SEQ ID NO: 47356 - RNA, 19 nt, synthetic construct
  misc_feature 1..19: note = siRNA sense sequence
  source 1..19: mol_type = other RNA
ctgtggactaaagggaatg

SEQ ID NO: 47357 - RNA, 19 nt, synthetic construct
  misc_feature 1..19: note = siRNA antisense sequence
  source 1..19: mol_type = other RNA
cattccctttagtccacag

SEQ ID NO: 47358 - RNA, 19 nt, synthetic construct
  misc_feature 1..19: note = siRNA sense sequence
  source 1..19: mol_type = other RNA
aaaggaggaaggcagtagg

SEQ ID NO: 47359 - RNA, 19 nt, synthetic construct
  misc_feature 1..19: note = siRNA antisense sequence
  source 1..19: mol_type = other RNA
cctactgccttcctccttt

SEQ ID NO: 47360 - RNA, 19 nt, synthetic construct
  misc_feature 1..19: note = siRNA sense sequence
  source 1..19: mol_type = other RNA
aaggtggagttgggaaggg

SEQ ID NO: 47361 - RNA, 19 nt, synthetic construct
  misc_feature 1..19: note = siRNA antisense sequence
  source 1..19: mol_type = other RNA
cccttcccaactccacctt

SEQ ID NO: 47362 - RNA, 19 nt, synthetic construct
  misc_feature 1..19: note = siRNA sense sequence
  source 1..19: mol_type = other RNA
aggtggagttgggaagggc

SEQ ID NO: 47363 - RNA, 19 nt, synthetic construct
  misc_feature 1..19: note = siRNA antisense sequence
  source 1..19: mol_type = other RNA
gcccttcccaactccacct

SEQ ID NO: 47364 - RNA, 19 nt, synthetic construct
  misc_feature 1..19: note = siRNA sense sequence
  source 1..19: mol_type = other RNA
tgggaagggctgatttggg

SEQ ID NO: 47365 - RNA, 19 nt, synthetic construct
  misc_feature 1..19: note = siRNA antisense sequence
  source 1..19: mol_type = other RNA
cccaaatcagcccttccca

SEQ ID NO: 47366 - RNA, 19 nt, synthetic construct
  misc_feature 1..19: note = siRNA sense sequence
  source 1..19: mol_type = other RNA
gggaagggctgatttggga

SEQ ID NO: 47367 - RNA, 19 nt, synthetic construct
  misc_feature 1..19: note = siRNA antisense sequence
  source 1..19: mol_type = other RNA
tcccaaatcagcccttccc

SEQ ID NO: 47368 - RNA, 19 nt, synthetic construct
  misc_feature 1..19: note = siRNA sense sequence
  source 1..19: mol_type = other RNA
aaatgaggctgcagcaagg

SEQ ID NO: 47369 - RNA, 19 nt, synthetic construct
  misc_feature 1..19: note = siRNA antisense sequence
  source 1..19: mol_type = other RNA
ccttgctgcagcctcattt

SEQ ID NO: 47370 - RNA, 19 nt, synthetic construct
  misc_feature 1..19: note = siRNA sense sequence
  source 1..19: mol_type = other RNA
aatgaggctgcagcaaggt

SEQ ID NO: 47371 - RNA, 19 nt, synthetic construct
  misc_feature 1..19: note = siRNA antisense sequence
  source 1..19: mol_type = other RNA
accttgctgcagcctcatt

SEQ ID NO: 47372 - RNA, 19 nt, synthetic construct
  misc_feature 1..19: note = siRNA sense sequence
  source 1..19: mol_type = other RNA
atgaggctgcagcaaggtt

SEQ ID NO: 47373 - RNA, 19 nt, synthetic construct
  misc_feature 1..19: note = siRNA antisense sequence
  source 1..19: mol_type = other RNA
aaccttgctgcagcctcat

SEQ ID NO: 47374 - RNA, 19 nt, synthetic construct
  misc_feature 1..19: note = siRNA sense sequence
  source 1..19: mol_type = other RNA
tgaggctgcagcaaggtta

SEQ ID NO: 47375 - RNA, 19 nt, synthetic construct
  misc_feature 1..19: note = siRNA antisense sequence
  source 1..19: mol_type = other RNA
taaccttgctgcagcctca

SEQ ID NO: 47376 - RNA, 19 nt, synthetic construct
  misc_feature 1..19: note = siRNA sense sequence
  source 1..19: mol_type = other RNA
gaggctgcagcaaggttag

SEQ ID NO: 47377 - RNA, 19 nt, synthetic construct
  misc_feature 1..19: note = siRNA antisense sequence
  source 1..19: mol_type = other RNA
ctaaccttgctgcagcctc

SEQ ID NO: 47378 - RNA, 19 nt, synthetic construct
  misc_feature 1..19: note = siRNA sense sequence
  source 1..19: mol_type = other RNA
ggctgcagcaaggttagac

SEQ ID NO: 47379 - RNA, 19 nt, synthetic construct
  misc_feature 1..19: note = siRNA antisense sequence
  source 1..19: mol_type = other RNA
gtctaaccttgctgcagcc

SEQ ID NO: 47380 - RNA, 19 nt, synthetic construct
  misc_feature 1..19: note = siRNA sense sequence
  source 1..19: mol_type = other RNA
gctgcagcaaggttagaca

SEQ ID NO: 47381 - RNA, 19 nt, synthetic construct
  misc_feature 1..19: note = siRNA antisense sequence
  source 1..19: mol_type = other RNA
tgtctaaccttgctgcagc

SEQ ID NO: 47382 - RNA, 19 nt, synthetic construct
  misc_feature 1..19: note = siRNA sense sequence
  source 1..19: mol_type = other RNA
caaagctcactgctcaagt

SEQ ID NO: 47383 - RNA, 19 nt, synthetic construct
  misc_feature 1..19: note = siRNA antisense sequence
  source 1..19: mol_type = other RNA
acttgagcagtgagctttg

SEQ ID NO: 47384 - RNA, 19 nt, synthetic construct
  misc_feature 1..19: note = siRNA sense sequence
  source 1..19: mol_type = other RNA
gtgtgtaaccctgcaggct

SEQ ID NO: 47385 - RNA, 19 nt, synthetic construct
  misc_feature 1..19: note = siRNA antisense sequence
  source 1..19: mol_type = other RNA
agcctgcagggttacacac

SEQ ID NO: 47386 - RNA, 19 nt, synthetic construct
  misc_feature 1..19: note = siRNA sense sequence
  source 1..19: mol_type = other RNA
tgtgtaaccctgcaggcta

SEQ ID NO: 47387 - RNA, 19 nt, synthetic construct
  misc_feature 1..19: note = siRNA antisense sequence
  source 1..19: mol_type = other RNA
tagcctgcagggttacaca

SEQ ID NO: 47388 - RNA, 19 nt, synthetic construct
  misc_feature 1..19: note = siRNA sense sequence
  source 1..19: mol_type = other RNA
gtgtaaccctgcaggctac

SEQ ID NO: 47389 - RNA, 19 nt, synthetic construct
  misc_feature 1..19: note = siRNA antisense sequence
  source 1..19: mol_type = other RNA
gtagcctgcagggttacac

SEQ ID NO: 47390 - RNA, 19 nt, synthetic construct
  misc_feature 1..19: note = siRNA sense sequence
  source 1..19: mol_type = other RNA
accctgcaggctacataac

SEQ ID NO: 47391 - RNA, 19 nt, synthetic construct
  misc_feature 1..19: note = siRNA antisense sequence
  source 1..19: mol_type = other RNA
gttatgtagcctgcagggt

SEQ ID NO: 47392 - RNA, 19 nt, synthetic construct
  misc_feature 1..19: note = siRNA sense sequence
  source 1..19: mol_type = other RNA
ccctgcaggctacataacc

SEQ ID NO: 47393 - RNA, 19 nt, synthetic construct
  misc_feature 1..19: note = siRNA antisense sequence
  source 1..19: mol_type = other RNA
ggttatgtagcctgcaggg

SEQ ID NO: 47394 - RNA, 19 nt, synthetic construct
  misc_feature 1..19: note = siRNA sense sequence
  source 1..19: mol_type = other RNA
aggctacataacctgatta

SEQ ID NO: 47395 - RNA, 19 nt, synthetic construct
  misc_feature 1..19: note = siRNA antisense sequence
  source 1..19: mol_type = other RNA
taatcaggttatgtagcct

SEQ ID NO: 47396 - RNA, 19 nt, synthetic construct
  misc_feature 1..19: note = siRNA sense sequence
  source 1..19: mol_type = other RNA
cctcttctttcctcacagc

SEQ ID NO: 47397 - RNA, 19 nt, synthetic construct
  misc_feature 1..19: note = siRNA antisense sequence
  source 1..19: mol_type = other RNA
gctgtgaggaaagaagagg

SEQ ID NO: 47398 - RNA, 19 nt, synthetic construct
  misc_feature 1..19: note = siRNA sense sequence
  source 1..19: mol_type = other RNA
ttcctcacagccctggcca

SEQ ID NO: 47399 - RNA, 19 nt, synthetic construct
  misc_feature 1..19: note = siRNA antisense sequence
  source 1..19: mol_type = other RNA
tggccagggctgtgaggaa

SEQ ID NO: 47400 - RNA, 19 nt, synthetic construct
  misc_feature 1..19: note = siRNA sense sequence
  source 1..19: mol_type = other RNA
ctcactgcctttctttcca

SEQ ID NO: 47401 - RNA, 19 nt, synthetic construct
  misc_feature 1..19: note = siRNA antisense sequence
  source 1..19: mol_type = other RNA
tggaaagaaaggcagtgag

SEQ ID NO: 47402 - RNA, 19 nt, synthetic construct
  misc_feature 1..19: note = siRNA sense sequence
  source 1..19: mol_type = other RNA
tcactgcctttctttccat

SEQ ID NO: 47403 - RNA, 19 nt, synthetic construct
  misc_feature 1..19: note = siRNA antisense sequence
  source 1..19: mol_type = other RNA
atggaaagaaaggcagtga

SEQ ID NO: 47404 - RNA, 19 nt, synthetic construct
  misc_feature 1..19: note = siRNA sense sequence
  source 1..19: mol_type = other RNA
cactgcctttctttccatt

SEQ ID NO: 47405 - RNA, 19 nt, synthetic construct
  misc_feature 1..19: note = siRNA antisense sequence
  source 1..19: mol_type = other RNA
aatggaaagaaaggcagtg

SEQ ID NO: 47406 - RNA, 19 nt, synthetic construct
  misc_feature 1..19: note = siRNA sense sequence
  source 1..19: mol_type = other RNA
actgcctttctttccattc

SEQ ID NO: 47407 - RNA, 19 nt, synthetic construct
  misc_feature 1..19: note = siRNA antisense sequence
  source 1..19: mol_type = other RNA
gaatggaaagaaaggcagt

SEQ ID NO: 47408 - RNA, 19 nt, synthetic construct
  misc_feature 1..19: note = siRNA sense sequence
  source 1..19: mol_type = other RNA
ctttctttccattcttagg

SEQ ID NO: 47409 - RNA, 19 nt, synthetic construct
  misc_feature 1..19: note = siRNA antisense sequence
  source 1..19: mol_type = other RNA
cctaagaatggaaagaaag

SEQ ID NO: 47410 - RNA, 19 nt, synthetic construct
  misc_feature 1..19: note = siRNA sense sequence
  source 1..19: mol_type = other RNA
tctttccattcttagggta

SEQ ID NO: 47411 - RNA, 19 nt, synthetic construct
  misc_feature 1..19: note = siRNA antisense sequence
  source 1..19: mol_type = other RNA
taccctaagaatggaaaga

SEQ ID NO: 47412 - RNA, 19 nt, synthetic construct
  misc_feature 1..19: note = siRNA sense sequence
  source 1..19: mol_type = other RNA
ctttccattcttagggtag

SEQ ID NO: 47413 - RNA, 19 nt, synthetic construct
  misc_feature 1..19: note = siRNA antisense sequence
  source 1..19: mol_type = other RNA
ctaccctaagaatggaaag

SEQ ID NO: 47414 - RNA, 19 nt, synthetic construct
  misc_feature 1..19: note = siRNA sense sequence
  source 1..19: mol_type = other RNA
tttccattcttagggtaga

SEQ ID NO: 47415 - RNA, 19 nt, synthetic construct
  misc_feature 1..19: note = siRNA antisense sequence
  source 1..19: mol_type = other RNA
tctaccctaagaatggaaa

SEQ ID NO: 47416 - RNA, 19 nt, synthetic construct
  misc_feature 1..19: note = siRNA sense sequence
  source 1..19: mol_type = other RNA
ttccattcttagggtagat

SEQ ID NO: 47417 - RNA, 19 nt, synthetic construct
  misc_feature 1..19: note = siRNA antisense sequence
  source 1..19: mol_type = other RNA
atctaccctaagaatggaa

SEQ ID NO: 47418 - RNA, 19 nt, synthetic construct
  misc_feature 1..19: note = siRNA sense sequence
  source 1..19: mol_type = other RNA
tccattcttagggtagatc

SEQ ID NO: 47419 - RNA, 19 nt, synthetic construct
  misc_feature 1..19: note = siRNA antisense sequence
  source 1..19: mol_type = other RNA
gatctaccctaagaatgga

SEQ ID NO: 47420 - RNA, 19 nt, synthetic construct
  misc_feature 1..19: note = siRNA sense sequence
  source 1..19: mol_type = other RNA
cattcttagggtagatcta

SEQ ID NO: 47421 - RNA, 19 nt, synthetic construct
  misc_feature 1..19: note = siRNA antisense sequence
  source 1..19: mol_type = other RNA
tagatctaccctaagaatg

SEQ ID NO: 47422 - RNA, 19 nt, synthetic construct
  misc_feature 1..19: note = siRNA sense sequence
  source 1..19: mol_type = other RNA
attcttagggtagatctat

SEQ ID NO: 47423 - RNA, 19 nt, synthetic construct
  misc_feature 1..19: note = siRNA antisense sequence
  source 1..19: mol_type = other RNA
atagatctaccctaagaat

SEQ ID NO: 47424 - RNA, 19 nt, synthetic construct
  misc_feature 1..19: note = siRNA sense sequence
  source 1..19: mol_type = other RNA
ttcttagggtagatctatc

SEQ ID NO: 47425 - RNA, 19 nt, synthetic construct
  misc_feature 1..19: note = siRNA antisense sequence
  source 1..19: mol_type = other RNA
gatagatctaccctaagaa

SEQ ID NO: 47426 - RNA, 19 nt, synthetic construct
  misc_feature 1..19: note = siRNA sense sequence
  source 1..19: mol_type = other RNA
tcttagggtagatctatct

SEQ ID NO: 47427 - RNA, 19 nt, synthetic construct
  misc_feature 1..19: note = siRNA antisense sequence
  source 1..19: mol_type = other RNA
agatagatctaccctaaga

SEQ ID NO: 47428 - RNA, 19 nt, synthetic construct
  misc_feature 1..19: note = siRNA sense sequence
  source 1..19: mol_type = other RNA
cttagggtagatctatctc

SEQ ID NO: 47429 - RNA, 19 nt, synthetic construct
  misc_feature 1..19: note = siRNA antisense sequence
  source 1..19: mol_type = other RNA
gagatagatctaccctaag

SEQ ID NO: 47430 - RNA, 19 nt, synthetic construct
  misc_feature 1..19: note = siRNA sense sequence
  source 1..19: mol_type = other RNA
ttagggtagatctatctct

SEQ ID NO: 47431 - RNA, 19 nt, synthetic construct
  misc_feature 1..19: note = siRNA antisense sequence
  source 1..19: mol_type = other RNA
agagatagatctaccctaa

SEQ ID NO: 47432 - RNA, 19 nt, synthetic construct
  misc_feature 1..19: note = siRNA sense sequence
  source 1..19: mol_type = other RNA
tagggtagatctatctctt

SEQ ID NO: 47433 - RNA, 19 nt, synthetic construct
  misc_feature 1..19: note = siRNA antisense sequence
  source 1..19: mol_type = other RNA
aagagatagatctacccta

SEQ ID NO: 47434 - RNA, 19 nt, synthetic construct
  misc_feature 1..19: note = siRNA sense sequence
  source 1..19: mol_type = other RNA
agggtagatctatctcttt

SEQ ID NO: 47435 - RNA, 19 nt, synthetic construct
  misc_feature 1..19: note = siRNA antisense sequence
  source 1..19: mol_type = other RNA
aaagagatagatctaccct

SEQ ID NO: 47436 - RNA, 19 nt, synthetic construct
  misc_feature 1..19: note = siRNA sense sequence
  source 1..19: mol_type = other RNA
gggtagatctatctctttc

SEQ ID NO: 47437 - RNA, 19 nt, synthetic construct
  misc_feature 1..19: note = siRNA antisense sequence
  source 1..19: mol_type = other RNA
gaaagagatagatctaccc

SEQ ID NO: 47438 - RNA, 19 nt, synthetic construct
  misc_feature 1..19: note = siRNA sense sequence
  source 1..19: mol_type = other RNA
gatctatctctttcccatc

SEQ ID NO: 47439 - RNA, 19 nt, synthetic construct
  misc_feature 1..19: note = siRNA antisense sequence
  source 1..19: mol_type = other RNA
gatgggaaagagatagatc

SEQ ID NO: 47440 - RNA, 19 nt, synthetic construct
  misc_feature 1..19: note = siRNA sense sequence
  source 1..19: mol_type = other RNA
ctatctctttcccatcctg

SEQ ID NO: 47441 - RNA, 19 nt, synthetic construct
  misc_feature 1..19: note = siRNA antisense sequence
  source 1..19: mol_type = other RNA
caggatgggaaagagatag

SEQ ID NO: 47442 - RNA, 19 nt, synthetic construct
  misc_feature 1..19: note = siRNA sense sequence
  source 1..19: mol_type = other RNA
ctctttcccatcctggtct

SEQ ID NO: 47443 - RNA, 19 nt, synthetic construct
  misc_feature 1..19: note = siRNA antisense sequence
  source 1..19: mol_type = other RNA
agaccaggatgggaaagag

SEQ ID NO: 47444 - RNA, 19 nt, synthetic construct
  misc_feature 1..19: note = siRNA sense sequence
  source 1..19: mol_type = other RNA
ctttcccatcctggtcttc

SEQ ID NO: 47445 - RNA, 19 nt, synthetic construct
  misc_feature 1..19: note = siRNA antisense sequence
  source 1..19: mol_type = other RNA
gaagaccaggatgggaaag

SEQ ID NO: 47446 - RNA, 19 nt, synthetic construct
  misc_feature 1..19: note = siRNA sense sequence
  source 1..19: mol_type = other RNA
tttcccatcctggtcttct

SEQ ID NO: 47447 - RNA, 19 nt, synthetic construct
  misc_feature 1..19: note = siRNA antisense sequence
  source 1..19: mol_type = other RNA
agaagaccaggatgggaaa

SEQ ID NO: 47448 - RNA, 19 nt, synthetic construct
  misc_feature 1..19: note = siRNA sense sequence
  source 1..19: mol_type = other RNA
ttcccatcctggtcttctt

SEQ ID NO: 47449 - RNA, 19 nt, synthetic construct
  misc_feature 1..19: note = siRNA antisense sequence
  source 1..19: mol_type = other RNA
aagaagaccaggatgggaa

SEQ ID NO: 47450 - RNA, 19 nt, synthetic construct
  misc_feature 1..19: note = siRNA sense sequence
  source 1..19: mol_type = other RNA
tcccatcctggtcttcttc

SEQ ID NO: 47451 - RNA, 19 nt, synthetic construct
  misc_feature 1..19: note = siRNA antisense sequence
  source 1..19: mol_type = other RNA
gaagaagaccaggatggga

SEQ ID NO: 47452 - RNA, 19 nt, synthetic construct
  misc_feature 1..19: note = siRNA sense sequence
  source 1..19: mol_type = other RNA
tcctggtcttcttcacata

SEQ ID NO: 47453 - RNA, 19 nt, synthetic construct
  misc_feature 1..19: note = siRNA antisense sequence
  source 1..19: mol_type = other RNA
tatgtgaagaagaccagga

SEQ ID NO: 47454 - RNA, 19 nt, synthetic construct
  misc_feature 1..19: note = siRNA sense sequence
  source 1..19: mol_type = other RNA
cctggtcttcttcacatac

SEQ ID NO: 47455 - RNA, 19 nt, synthetic construct
  misc_feature 1..19: note = siRNA antisense sequence
  source 1..19: mol_type = other RNA
gtatgtgaagaagaccagg

SEQ ID NO: 47456 - RNA, 19 nt, synthetic construct
  misc_feature 1..19: note = siRNA sense sequence
  source 1..19: mol_type = other RNA
atggacgctctgcccttct

SEQ ID NO: 47457 - RNA, 19 nt, synthetic construct
  misc_feature 1..19: note = siRNA antisense sequence
  source 1..19: mol_type = other RNA
agaagggcagagcgtccat

SEQ ID NO: 47458 - RNA, 19 nt, synthetic construct
  misc_feature 1..19: note = siRNA sense sequence
  source 1..19: mol_type = other RNA
tggacgctctgcccttcta

SEQ ID NO: 47459 - RNA, 19 nt, synthetic construct
  misc_feature 1..19: note = siRNA antisense sequence
  source 1..19: mol_type = other RNA
tagaagggcagagcgtcca

SEQ ID NO: 47460 - RNA, 19 nt, synthetic construct
  misc_feature 1..19: note = siRNA sense sequence
  source 1..19: mol_type = other RNA
ggacgctctgcccttctag

SEQ ID NO: 47461 - RNA, 19 nt, synthetic construct
  misc_feature 1..19: note = siRNA antisense sequence
  source 1..19: mol_type = other RNA
ctagaagggcagagcgtcc

SEQ ID NO: 47462 - RNA, 19 nt, synthetic construct
  misc_feature 1..19: note = siRNA sense sequence
  source 1..19: mol_type = other RNA
gacgctctgcccttctagc

SEQ ID NO: 47463 - RNA, 19 nt, synthetic construct
  misc_feature 1..19: note = siRNA antisense sequence
  source 1..19: mol_type = other RNA
gctagaagggcagagcgtc

SEQ ID NO: 47464 - RNA, 19 nt, synthetic construct
  misc_feature 1..19: note = siRNA sense sequence
  source 1..19: mol_type = other RNA
acgctctgcccttctagca

SEQ ID NO: 47465 - RNA, 19 nt, synthetic construct
  misc_feature 1..19: note = siRNA antisense sequence
  source 1..19: mol_type = other RNA
tgctagaagggcagagcgt

SEQ ID NO: 47466 - RNA, 19 nt, synthetic construct
  misc_feature 1..19: note = siRNA sense sequence
  source 1..19: mol_type = other RNA
cgctctgcccttctagcac

SEQ ID NO: 47467 - RNA, 19 nt, synthetic construct
  misc_feature 1..19: note = siRNA antisense sequence
  source 1..19: mol_type = other RNA
gtgctagaagggcagagcg

SEQ ID NO: 47468 - RNA, 19 nt, synthetic construct
  misc_feature 1..19: note = siRNA sense sequence
  source 1..19: mol_type = other RNA
gcccttctagcactcactc

SEQ ID NO: 47469 - RNA, 19 nt, synthetic construct
  misc_feature 1..19: note = siRNA antisense sequence
  source 1..19: mol_type = other RNA
gagtgagtgctagaagggc

SEQ ID NO: 47470 - RNA, 19 nt, synthetic construct
  misc_feature 1..19: note = siRNA sense sequence
  source 1..19: mol_type = other RNA
cccttctagcactcactct

SEQ ID NO: 47471 - RNA, 19 nt, synthetic construct
  misc_feature 1..19: note = siRNA antisense sequence
  source 1..19: mol_type = other RNA
agagtgagtgctagaaggg

SEQ ID NO: 47472 - RNA, 19 nt, synthetic construct
  misc_feature 1..19: note = siRNA sense sequence
  source 1..19: mol_type = other RNA
ccttctagcactcactctt

SEQ ID NO: 47473 - RNA, 19 nt, synthetic construct
  misc_feature 1..19: note = siRNA antisense sequence
  source 1..19: mol_type = other RNA
aagagtgagtgctagaagg

SEQ ID NO: 47474 - RNA, 19 nt, synthetic construct
  misc_feature 1..19: note = siRNA sense sequence
  source 1..19: mol_type = other RNA
ctagcactcactcttgaag

SEQ ID NO: 47475 - RNA, 19 nt, synthetic construct
  misc_feature 1..19: note = siRNA antisense sequence
  source 1..19: mol_type = other RNA
cttcaagagtgagtgctag

SEQ ID NO: 47476 - RNA, 19 nt, synthetic construct
  misc_feature 1..19: note = siRNA sense sequence
  source 1..19: mol_type = other RNA
tagcactcactcttgaagt

SEQ ID NO: 47477 - RNA, 19 nt, synthetic construct
  misc_feature 1..19: note = siRNA antisense sequence
  source 1..19: mol_type = other RNA
acttcaagagtgagtgcta

SEQ ID NO: 47478 - RNA, 19 nt, synthetic construct
  misc_feature 1..19: note = siRNA sense sequence
  source 1..19: mol_type = other RNA
agcactcactcttgaagtc

SEQ ID NO: 47479 - RNA, 19 nt, synthetic construct
  misc_feature 1..19: note = siRNA antisense sequence
  source 1..19: mol_type = other RNA
gacttcaagagtgagtgct

SEQ ID NO: 47480 - RNA, 19 nt, synthetic construct
  misc_feature 1..19: note = siRNA sense sequence
  source 1..19: mol_type = other RNA
gcactcactcttgaagtct

SEQ ID NO: 47481 - RNA, 19 nt, synthetic construct
  misc_feature 1..19: note = siRNA antisense sequence
  source 1..19: mol_type = other RNA
agacttcaagagtgagtgc

SEQ ID NO: 47482 - RNA, 19 nt, synthetic construct
  misc_feature 1..19: note = siRNA sense sequence
  source 1..19: mol_type = other RNA
cactcactcttgaagtctc

SEQ ID NO: 47483 - RNA, 19 nt, synthetic construct
  misc_feature 1..19: note = siRNA antisense sequence
  source 1..19: mol_type = other RNA
gagacttcaagagtgagtg

SEQ ID NO: 47484 - RNA, 19 nt, synthetic construct
  misc_feature 1..19: note = siRNA sense sequence
  source 1..19: mol_type = other RNA
actcactcttgaagtctca

SEQ ID NO: 47485 - RNA, 19 nt, synthetic construct
  misc_feature 1..19: note = siRNA antisense sequence
  source 1..19: mol_type = other RNA
tgagacttcaagagtgagt

SEQ ID NO: 47486 - RNA, 19 nt, synthetic construct
  misc_feature 1..19: note = siRNA sense sequence
  source 1..19: mol_type = other RNA
ctcactcttgaagtctcag

SEQ ID NO: 47487 - RNA, 19 nt, synthetic construct
  misc_feature 1..19: note = siRNA antisense sequence
  source 1..19: mol_type = other RNA
ctgagacttcaagagtgag

SEQ ID NO: 47488 - RNA, 19 nt, synthetic construct
  misc_feature 1..19: note = siRNA sense sequence
  source 1..19: mol_type = other RNA
cccattttcagtctggcct

SEQ ID NO: 47489 - RNA, 19 nt, synthetic construct
  misc_feature 1..19: note = siRNA antisense sequence
  source 1..19: mol_type = other RNA
aggccagactgaaaatggg

SEQ ID NO: 47490 - RNA, 19 nt, synthetic construct
  misc_feature 1..19: note = siRNA sense sequence
  source 1..19: mol_type = other RNA
ccattttcagtctggcctc

SEQ ID NO: 47491 - RNA, 19 nt, synthetic construct
  misc_feature 1..19: note = siRNA antisense sequence
  source 1..19: mol_type = other RNA
gaggccagactgaaaatgg

SEQ ID NO: 47492 - RNA, 19 nt, synthetic construct
  misc_feature 1..19: note = siRNA sense sequence
  source 1..19: mol_type = other RNA
ttcagtctggcctctagat

SEQ ID NO: 47493 - RNA, 19 nt, synthetic construct
  misc_feature 1..19: note = siRNA antisense sequence
  source 1..19: mol_type = other RNA
atctagaggccagactgaa

SEQ ID NO: 47494 - RNA, 19 nt, synthetic construct
  misc_feature 1..19: note = siRNA sense sequence
  source 1..19: mol_type = other RNA
tcagtctggcctctagatt

SEQ ID NO: 47495 - RNA, 19 nt, synthetic construct
  misc_feature 1..19: note = siRNA antisense sequence
  source 1..19: mol_type = other RNA
aatctagaggccagactga

SEQ ID NO: 47496 - RNA, 19 nt, synthetic construct
  misc_feature 1..19: note = siRNA sense sequence
  source 1..19: mol_type = other RNA
cagtctggcctctagatta

SEQ ID NO: 47497 - RNA, 19 nt, synthetic construct
  misc_feature 1..19: note = siRNA antisense sequence
  source 1..19: mol_type = other RNA
taatctagaggccagactg

SEQ ID NO: 47498 - RNA, 19 nt, synthetic construct
  misc_feature 1..19: note = siRNA sense sequence
  source 1..19: mol_type = other RNA
agtctggcctctagattat

SEQ ID NO: 47499 - RNA, 19 nt, synthetic construct
  misc_feature 1..19: note = siRNA antisense sequence
  source 1..19: mol_type = other RNA
ataatctagaggccagact

SEQ ID NO: 47500 - RNA, 19 nt, synthetic construct
  misc_feature 1..19: note = siRNA sense sequence
  source 1..19: mol_type = other RNA
ctctagattatattggctg

SEQ ID NO: 47501 - RNA, 19 nt, synthetic construct
  misc_feature 1..19: note = siRNA antisense sequence
  source 1..19: mol_type = other RNA
cagccaatataatctagag

SEQ ID NO: 47502 - RNA, 19 nt, synthetic construct
  misc_feature 1..19: note = siRNA sense sequence
  source 1..19: mol_type = other RNA
tctagattatattggctga

SEQ ID NO: 47503 - RNA, 19 nt, synthetic construct
  misc_feature 1..19: note = siRNA antisense sequence
  source 1..19: mol_type = other RNA
tcagccaatataatctaga

SEQ ID NO: 47504 - RNA, 19 nt, synthetic construct
  misc_feature 1..19: note = siRNA sense sequence
  source 1..19: mol_type = other RNA
gattatattggctgattag

SEQ ID NO: 47505 - RNA, 19 nt, synthetic construct
  misc_feature 1..19: note = siRNA antisense sequence
  source 1..19: mol_type = other RNA
ctaatcagccaatataatc

SEQ ID NO: 47506 - RNA, 19 nt, synthetic construct
  misc_feature 1..19: note = siRNA sense sequence
  source 1..19: mol_type = other RNA
attatattggctgattagg

SEQ ID NO: 47507 - RNA, 19 nt, synthetic construct
  misc_feature 1..19: note = siRNA antisense sequence
  source 1..19: mol_type = other RNA
cctaatcagccaatataat

SEQ ID NO: 47508 - RNA, 19 nt, synthetic construct
  misc_feature 1..19: note = siRNA sense sequence
  source 1..19: mol_type = other RNA
ttatattggctgattaggg

SEQ ID NO: 47509 - RNA, 19 nt, synthetic construct
  misc_feature 1..19: note = siRNA antisense sequence
  source 1..19: mol_type = other RNA
ccctaatcagccaatataa

SEQ ID NO: 47510 - RNA, 19 nt, synthetic construct
  misc_feature 1..19: note = siRNA sense sequence
  source 1..19: mol_type = other RNA
tatattggctgattaggga

SEQ ID NO: 47511 - RNA, 19 nt, synthetic construct
  misc_feature 1..19: note = siRNA antisense sequence
  source 1..19: mol_type = other RNA
tccctaatcagccaatata

SEQ ID NO: 47512 - RNA, 19 nt, synthetic construct
  misc_feature 1..19: note = siRNA sense sequence
  source 1..19: mol_type = other RNA
ttggctgattagggatttt

SEQ ID NO: 47513 - RNA, 19 nt, synthetic construct
  misc_feature 1..19: note = siRNA antisense sequence
  source 1..19: mol_type = other RNA
aaaatccctaatcagccaa

SEQ ID NO: 47514 - RNA, 19 nt, synthetic construct
  misc_feature 1..19: note = siRNA sense sequence
  source 1..19: mol_type = other RNA
tggctgattagggattttc

SEQ ID NO: 47515 - RNA, 19 nt, synthetic construct
  misc_feature 1..19: note = siRNA antisense sequence
  source 1..19: mol_type = other RNA
gaaaatccctaatcagcca

SEQ ID NO: 47516 - RNA, 19 nt, synthetic construct
  misc_feature 1..19: note = siRNA sense sequence
  source 1..19: mol_type = other RNA
ggctgattagggattttcc

SEQ ID NO: 47517 - RNA, 19 nt, synthetic construct
  misc_feature 1..19: note = siRNA antisense sequence
  source 1..19: mol_type = other RNA
ggaaaatccctaatcagcc

SEQ ID NO: 47518 - RNA, 19 nt, synthetic construct
  misc_feature 1..19: note = siRNA sense sequence
  source 1..19: mol_type = other RNA
ggattttcccatacagtcc

SEQ ID NO: 47519 - RNA, 19 nt, synthetic construct
  misc_feature 1..19: note = siRNA antisense sequence
  source 1..19: mol_type = other RNA
ggactgtatgggaaaatcc

SEQ ID NO: 47520 - RNA, 19 nt, synthetic construct
  misc_feature 1..19: note = siRNA sense sequence
  source 1..19: mol_type = other RNA
gattttcccatacagtcct

SEQ ID NO: 47521 - RNA, 19 nt, synthetic construct
  misc_feature 1..19: note = siRNA antisense sequence
  source 1..19: mol_type = other RNA
aggactgtatgggaaaatc

SEQ ID NO: 47522 - RNA, 19 nt, synthetic construct
  misc_feature 1..19: note = siRNA sense sequence
  source 1..19: mol_type = other RNA
attttcccatacagtcctt

SEQ ID NO: 47523 - RNA, 19 nt, synthetic construct
  misc_feature 1..19: note = siRNA antisense sequence
  source 1..19: mol_type = other RNA
aaggactgtatgggaaaat

SEQ ID NO: 47524 - RNA, 19 nt, synthetic construct
  misc_feature 1..19: note = siRNA sense sequence
  source 1..19: mol_type = other RNA
ttttcccatacagtccttt

SEQ ID NO: 47525 - RNA, 19 nt, synthetic construct
  misc_feature 1..19: note = siRNA antisense sequence
  source 1..19: mol_type = other RNA
aaaggactgtatgggaaaa

SEQ ID NO: 47526 - RNA, 19 nt, synthetic construct
  misc_feature 1..19: note = siRNA sense sequence
  source 1..19: mol_type = other RNA
cccatacagtcctttccac

SEQ ID NO: 47527 - RNA, 19 nt, synthetic construct
  misc_feature 1..19: note = siRNA antisense sequence
  source 1..19: mol_type = other RNA
gtggaaaggactgtatggg

SEQ ID NO: 47528 - RNA, 19 nt, synthetic construct
  misc_feature 1..19: note = siRNA sense sequence
  source 1..19: mol_type = other RNA
ccatacagtcctttccaca

SEQ ID NO: 47529 - RNA, 19 nt, synthetic construct
  misc_feature 1..19: note = siRNA antisense sequence
  source 1..19: mol_type = other RNA
tgtggaaaggactgtatgg

SEQ ID NO: 47530 - RNA, 19 nt, synthetic construct
  misc_feature 1..19: note = siRNA sense sequence
  source 1..19: mol_type = other RNA
acagtcctttccacagttt

SEQ ID NO: 47531 - RNA, 19 nt, synthetic construct
  misc_feature 1..19: note = siRNA antisense sequence
  source 1..19: mol_type = other RNA
aaactgtggaaaggactgt

SEQ ID NO: 47532 - RNA, 19 nt, synthetic construct
  misc_feature 1..19: note = siRNA sense sequence
  source 1..19: mol_type = other RNA
cagtcctttccacagtttg

SEQ ID NO: 47533 - RNA, 19 nt, synthetic construct
  misc_feature 1..19: note = siRNA antisense sequence
  source 1..19: mol_type = other RNA
caaactgtggaaaggactg

SEQ ID NO: 47534 - RNA, 19 nt, synthetic construct
  misc_feature 1..19: note = siRNA sense sequence
  source 1..19: mol_type = other RNA
agtcctttccacagtttgc

SEQ ID NO: 47535 - RNA, 19 nt, synthetic construct
  misc_feature 1..19: note = siRNA antisense sequence
  source 1..19: mol_type = other RNA
gcaaactgtggaaaggact

SEQ ID NO: 47536 - RNA, 19 nt, synthetic construct
  misc_feature 1..19: note = siRNA sense sequence
  source 1..19: mol_type = other RNA
gtcctttccacagtttgca

SEQ ID NO: 47537 - RNA, 19 nt, synthetic construct
  misc_feature 1..19: note = siRNA antisense sequence
  source 1..19: mol_type = other RNA
tgcaaactgtggaaaggac

SEQ ID NO: 47538 - RNA, 19 nt, synthetic construct
  misc_feature 1..19: note = siRNA sense sequence
  source 1..19: mol_type = other RNA
tcctttccacagtttgcaa

SEQ ID NO: 47539 - RNA, 19 nt, synthetic construct
  misc_feature 1..19: note = siRNA antisense sequence
  source 1..19: mol_type = other RNA
ttgcaaactgtggaaagga

SEQ ID NO: 47540 - RNA, 19 nt, synthetic construct
  misc_feature 1..19: note = siRNA sense sequence
  source 1..19: mol_type = other RNA
tccacagtttgcaattgtt

SEQ ID NO: 47541 - RNA, 19 nt, synthetic construct
  misc_feature 1..19: note = siRNA antisense sequence
  source 1..19: mol_type = other RNA
aacaattgcaaactgtgga

SEQ ID NO: 47542 - RNA, 19 nt, synthetic construct
  misc_feature 1..19: note = siRNA sense sequence
  source 1..19: mol_type = other RNA
ccacagtttgcaattgttc

SEQ ID NO: 47543 - RNA, 19 nt, synthetic construct
  misc_feature 1..19: note = siRNA antisense sequence
  source 1..19: mol_type = other RNA
gaacaattgcaaactgtgg

SEQ ID NO: 47544 - RNA, 19 nt, synthetic construct
  misc_feature 1..19: note = siRNA sense sequence
  source 1..19: mol_type = other RNA
cacagtttgcaattgttca

SEQ ID NO: 47545 - RNA, 19 nt, synthetic construct
  misc_feature 1..19: note = siRNA antisense sequence
  source 1..19: mol_type = other RNA
tgaacaattgcaaactgtg

SEQ ID NO: 47546 - RNA, 19 nt, synthetic construct
  misc_feature 1..19: note = siRNA sense sequence
  source 1..19: mol_type = other RNA
acagtttgcaattgttcat

SEQ ID NO: 47547 - RNA, 19 nt, synthetic construct
  misc_feature 1..19: note = siRNA antisense sequence
  source 1..19: mol_type = other RNA
atgaacaattgcaaactgt

SEQ ID NO: 47548 - RNA, 19 nt, synthetic construct
  misc_feature 1..19: note = siRNA sense sequence
  source 1..19: mol_type = other RNA
cagtttgcaattgttcatg

SEQ ID NO: 47549 - RNA, 19 nt, synthetic construct
  misc_feature 1..19: note = siRNA antisense sequence
  source 1..19: mol_type = other RNA
catgaacaattgcaaactg

SEQ ID NO: 47550 - RNA, 19 nt, synthetic construct
  misc_feature 1..19: note = siRNA sense sequence
  source 1..19: mol_type = other RNA
gtttgcaattgttcatgta

SEQ ID NO: 47551 - RNA, 19 nt, synthetic construct
  misc_feature 1..19: note = siRNA antisense sequence
  source 1..19: mol_type = other RNA
tacatgaacaattgcaaac

SEQ ID NO: 47552 - RNA, 19 nt, synthetic construct
  misc_feature 1..19: note = siRNA sense sequence
  source 1..19: mol_type = other RNA
gcaattgttcatgtatttg

SEQ ID NO: 47553 - RNA, 19 nt, synthetic construct
  misc_feature 1..19: note = siRNA antisense sequence
  source 1..19: mol_type = other RNA
caaatacatgaacaattgc

SEQ ID NO: 47554 - RNA, 19 nt, synthetic construct
  misc_feature 1..19: note = siRNA sense sequence
  source 1..19: mol_type = other RNA
tcacgtgtttaatctctct

SEQ ID NO: 47555 - RNA, 19 nt, synthetic construct
  misc_feature 1..19: note = siRNA antisense sequence
  source 1..19: mol_type = other RNA
agagagattaaacacgtga

SEQ ID NO: 47556 - RNA, 19 nt, synthetic construct
  misc_feature 1..19: note = siRNA sense sequence
  source 1..19: mol_type = other RNA
cacgtgtttaatctctctc

SEQ ID NO: 47557 - RNA, 19 nt, synthetic construct
  misc_feature 1..19: note = siRNA antisense sequence
  source 1..19: mol_type = other RNA
gagagagattaaacacgtg

SEQ ID NO: 47558 - RNA, 19 nt, synthetic construct
  misc_feature 1..19: note = siRNA sense sequence
  source 1..19: mol_type = other RNA
acgtgtttaatctctctct

SEQ ID NO: 47559 - RNA, 19 nt, synthetic construct
  misc_feature 1..19: note = siRNA antisense sequence
  source 1..19: mol_type = other RNA
agagagagattaaacacgt

SEQ ID NO: 47560 - RNA, 19 nt, synthetic construct
  misc_feature 1..19: note = siRNA sense sequence
  source 1..19: mol_type = other RNA
cgtgtttaatctctctctc

SEQ ID NO: 47561 - RNA, 19 nt, synthetic construct
  misc_feature 1..19: note = siRNA antisense sequence
  source 1..19: mol_type = other RNA
gagagagagattaaacacg

SEQ ID NO: 47562 - RNA, 19 nt, synthetic construct
  misc_feature 1..19: note = siRNA sense sequence
  source 1..19: mol_type = other RNA
tttaatctctctctccttc

SEQ ID NO: 47563 - RNA, 19 nt, synthetic construct
  misc_feature 1..19: note = siRNA antisense sequence
  source 1..19: mol_type = other RNA
gaaggagagagagattaaa

SEQ ID NO: 47564 - RNA, 19 nt, synthetic construct
  misc_feature 1..19: note = siRNA sense sequence
  source 1..19: mol_type = other RNA
tctctctctccttctagct

SEQ ID NO: 47565 - RNA, 19 nt, synthetic construct
  misc_feature 1..19: note = siRNA antisense sequence
  source 1..19: mol_type = other RNA
agctagaaggagagagaga

SEQ ID NO: 47566 - RNA, 19 nt, synthetic construct
  misc_feature 1..19: note = siRNA sense sequence
  source 1..19: mol_type = other RNA
tgtttcatattctacccac

SEQ ID NO: 47567 - RNA, 19 nt, synthetic construct
  misc_feature 1..19: note = siRNA antisense sequence
  source 1..19: mol_type = other RNA
gtgggtagaatatgaaaca

SEQ ID NO: 47568 - RNA, 19 nt, synthetic construct
  misc_feature 1..19: note = siRNA sense sequence
  source 1..19: mol_type = other RNA
tcatattctacccaccaag

SEQ ID NO: 47569 - RNA, 19 nt, synthetic construct
  misc_feature 1..19: note = siRNA antisense sequence
  source 1..19: mol_type = other RNA
cttggtgggtagaatatga

SEQ ID NO: 47570 - RNA, 19 nt, synthetic construct
  misc_feature 1..19: note = siRNA sense sequence
  source 1..19: mol_type = other RNA
attctacccaccaaggcct

SEQ ID NO: 47571 - RNA, 19 nt, synthetic construct
  misc_feature 1..19: note = siRNA antisense sequence
  source 1..19: mol_type = other RNA
aggccttggtgggtagaat

SEQ ID NO: 47572 - RNA, 19 nt, synthetic construct
  misc_feature 1..19: note = siRNA sense sequence
  source 1..19: mol_type = other RNA
ttctacccaccaaggccta

SEQ ID NO: 47573 - RNA, 19 nt, synthetic construct
  misc_feature 1..19: note = siRNA antisense sequence
  source 1..19: mol_type = other RNA
taggccttggtgggtagaa

SEQ ID NO: 47574 - RNA, 19 nt, synthetic construct
  misc_feature 1..19: note = siRNA sense sequence
  source 1..19: mol_type = other RNA
tacccaccaaggcctacca

SEQ ID NO: 47575 - RNA, 19 nt, synthetic construct
  misc_feature 1..19: note = siRNA antisense sequence
  source 1..19: mol_type = other RNA
tggtaggccttggtgggta

SEQ ID NO: 47576 - RNA, 19 nt, synthetic construct
  misc_feature 1..19: note = siRNA sense sequence
  source 1..19: mol_type = other RNA
acccaccaaggcctaccag

SEQ ID NO: 47577 - RNA, 19 nt, synthetic construct
  misc_feature 1..19: note = siRNA antisense sequence
  source 1..19: mol_type = other RNA
ctggtaggccttggtgggt

SEQ ID NO: 47578 - RNA, 19 nt, synthetic construct
  misc_feature 1..19: note = siRNA sense sequence
  source 1..19: mol_type = other RNA
cccaccaaggcctaccaga

SEQ ID NO: 47579 - RNA, 19 nt, synthetic construct
  misc_feature 1..19: note = siRNA antisense sequence
  source 1..19: mol_type = other RNA
tctggtaggccttggtggg

SEQ ID NO: 47580 - RNA, 19 nt, synthetic construct
  misc_feature 1..19: note = siRNA sense sequence
  source 1..19: mol_type = other RNA
ccaaggcctaccagagtta

SEQ ID NO: 47581 - RNA, 19 nt, synthetic construct
  misc_feature 1..19: note = siRNA antisense sequence
  source 1..19: mol_type = other RNA
taactctggtaggccttgg

SEQ ID NO: 47582 - RNA, 19 nt, synthetic construct
  misc_feature 1..19: note = siRNA sense sequence
  source 1..19: mol_type = other RNA
caaggcctaccagagttac

SEQ ID NO: 47583 - RNA, 19 nt, synthetic construct
  misc_feature 1..19: note = siRNA antisense sequence
  source 1..19: mol_type = other RNA
gtaactctggtaggccttg

SEQ ID NO: 47584 - RNA, 19 nt, synthetic construct
  misc_feature 1..19: note = siRNA sense sequence
  source 1..19: mol_type = other RNA
aaggcctaccagagttact

SEQ ID NO: 47585 - RNA, 19 nt, synthetic construct
  misc_feature 1..19: note = siRNA antisense sequence
  source 1..19: mol_type = other RNA
agtaactctggtaggcctt

SEQ ID NO: 47586 - RNA, 19 nt, synthetic construct
  misc_feature 1..19: note = siRNA sense sequence
  source 1..19: mol_type = other RNA
aggcctaccagagttactc

SEQ ID NO: 47587 - RNA, 19 nt, synthetic construct
  misc_feature 1..19: note = siRNA antisense sequence
  source 1..19: mol_type = other RNA
gagtaactctggtaggcct

SEQ ID NO: 47588 - RNA, 19 nt, synthetic construct
  misc_feature 1..19: note = siRNA sense sequence
  source 1..19: mol_type = other RNA
tactctgtaaaatctgttg

SEQ ID NO: 47589 - RNA, 19 nt, synthetic construct
  misc_feature 1..19: note = siRNA antisense sequence
  source 1..19: mol_type = other RNA
caacagattttacagagta

SEQ ID NO: 47590 - RNA, 19 nt, synthetic construct
  misc_feature 1..19: note = siRNA sense sequence
  source 1..19: mol_type = other RNA
tgcttttgttctttggact

SEQ ID NO: 47591 - RNA, 19 nt, synthetic construct
  misc_feature 1..19: note = siRNA antisense sequence
  source 1..19: mol_type = other RNA
agtccaaagaacaaaagca

SEQ ID NO: 47592 - RNA, 19 nt, synthetic construct
  misc_feature 1..19: note = siRNA sense sequence
  source 1..19: mol_type = other RNA
gcttttgttctttggacta

SEQ ID NO: 47593 - RNA, 19 nt, synthetic construct
  misc_feature 1..19: note = siRNA antisense sequence
  source 1..19: mol_type = other RNA
tagtccaaagaacaaaagc

SEQ ID NO: 47594 - RNA, 19 nt, synthetic construct
  misc_feature 1..19: note = siRNA sense sequence
  source 1..19: mol_type = other RNA
cttttgttctttggactac

SEQ ID NO: 47595 - RNA, 19 nt, synthetic construct
  misc_feature 1..19: note = siRNA antisense sequence
  source 1..19: mol_type = other RNA
gtagtccaaagaacaaaag

SEQ ID NO: 47596 - RNA, 19 nt, synthetic construct
  misc_feature 1..19: note = siRNA sense sequence
  source 1..19: mol_type = other RNA
acagtcacagaatggctat

SEQ ID NO: 47597 - RNA, 19 nt, synthetic construct
  misc_feature 1..19: note = siRNA antisense sequence
  source 1..19: mol_type = other RNA
atagccattctgtgactgt

SEQ ID NO: 47598 - RNA, 19 nt, synthetic construct
  misc_feature 1..19: note = siRNA sense sequence
  source 1..19: mol_type = other RNA
aatagaagcatttgtgtac

SEQ ID NO: 47599 - RNA, 19 nt, synthetic construct
  misc_feature 1..19: note = siRNA antisense sequence
  source 1..19: mol_type = other RNA
gtacacaaatgcttctatt

SEQ ID NO: 47600 - RNA, 19 nt, synthetic construct
  misc_feature 1..19: note = siRNA sense sequence
  source 1..19: mol_type = other RNA
gaagcatttgtgtactgat

SEQ ID NO: 47601 - RNA, 19 nt, synthetic construct
  misc_feature 1..19: note = siRNA antisense sequence
  source 1..19: mol_type = other RNA
atcagtacacaaatgcttc

SEQ ID NO: 47602 - RNA, 19 nt, synthetic construct
  misc_feature 1..19: note = siRNA sense sequence
  source 1..19: mol_type = other RNA
catttgtgtactgataggt

SEQ ID NO: 47603 - RNA, 19 nt, synthetic construct
  misc_feature 1..19: note = siRNA antisense sequence
  source 1..19: mol_type = other RNA
acctatcagtacacaaatg

SEQ ID NO: 47604 - RNA, 19 nt, synthetic construct
  misc_feature 1..19: note = siRNA sense sequence
  source 1..19: mol_type = other RNA
atttgtgtactgataggtt

SEQ ID NO: 47605 - RNA, 19 nt, synthetic construct
  misc_feature 1..19: note = siRNA antisense sequence
  source 1..19: mol_type = other RNA
aacctatcagtacacaaat

SEQ ID NO: 47606 - RNA, 19 nt, synthetic construct
  misc_feature 1..19: note = siRNA sense sequence
  source 1..19: mol_type = other RNA
tttgtgtactgataggttt

SEQ ID NO: 47607 - RNA, 19 nt, synthetic construct
  misc_feature 1..19: note = siRNA antisense sequence
  source 1..19: mol_type = other RNA
aaacctatcagtacacaaa

SEQ ID NO: 47608 - RNA, 19 nt, synthetic construct
  misc_feature 1..19: note = siRNA sense sequence
  source 1..19: mol_type = other RNA
tgtactgataggtttgcaa

SEQ ID NO: 47609 - RNA, 19 nt, synthetic construct
  misc_feature 1..19: note = siRNA antisense sequence
  source 1..19: mol_type = other RNA
ttgcaaacctatcagtaca

SEQ ID NO: 47610 - RNA, 19 nt, synthetic construct
  misc_feature 1..19: note = siRNA sense sequence
  source 1..19: mol_type = other RNA
gtactgataggtttgcaaa

SEQ ID NO: 47611 - RNA, 19 nt, synthetic construct
  misc_feature 1..19: note = siRNA antisense sequence
  source 1..19: mol_type = other RNA
tttgcaaacctatcagtac

SEQ ID NO: 47612 - RNA, 19 nt, synthetic construct
  misc_feature 1..19: note = siRNA sense sequence
  source 1..19: mol_type = other RNA
ttatatctgattcacatgg

SEQ ID NO: 47613 - RNA, 19 nt, synthetic construct
  misc_feature 1..19: note = siRNA antisense sequence
  source 1..19: mol_type = other RNA
ccatgtgaatcagatataa

SEQ ID NO: 47614 - RNA, 19 nt, synthetic construct
  misc_feature 1..19: note = siRNA sense sequence
  source 1..19: mol_type = other RNA
atctgattcacatggttaa

SEQ ID NO: 47615 - RNA, 19 nt, synthetic construct
  misc_feature 1..19: note = siRNA antisense sequence
  source 1..19: mol_type = other RNA
ttaaccatgtgaatcagat

SEQ ID NO: 47616 - RNA, 19 nt, synthetic construct
  misc_feature 1..19: note = siRNA sense sequence
  source 1..19: mol_type = other RNA
tctgattcacatggttaac

SEQ ID NO: 47617 - RNA, 19 nt, synthetic construct
  misc_feature 1..19: note = siRNA antisense sequence
  source 1..19: mol_type = other RNA
gttaaccatgtgaatcaga

SEQ ID NO: 47618 - RNA, 19 nt, synthetic construct
  misc_feature 1..19: note = siRNA sense sequence
  source 1..19: mol_type = other RNA
ctgattcacatggttaacc

SEQ ID NO: 47619 - RNA, 19 nt, synthetic construct
  misc_feature 1..19: note = siRNA antisense sequence
  source 1..19: mol_type = other RNA
ggttaaccatgtgaatcag

SEQ ID NO: 47620 - RNA, 19 nt, synthetic construct
  misc_feature 1..19: note = siRNA sense sequence
  source 1..19: mol_type = other RNA
tttggattgacgtataact

SEQ ID NO: 47621 - RNA, 19 nt, synthetic construct
  misc_feature 1..19: note = siRNA antisense sequence
  source 1..19: mol_type = other RNA
agttatacgtcaatccaaa

SEQ ID NO: 47622 - RNA, 19 nt, synthetic construct
  misc_feature 1..19: note = siRNA sense sequence
  source 1..19: mol_type = other RNA
ttggattgacgtataactc

SEQ ID NO: 47623 - RNA, 19 nt, synthetic construct
  misc_feature 1..19: note = siRNA antisense sequence
  source 1..19: mol_type = other RNA
gagttatacgtcaatccaa

SEQ ID NO: 47624 - RNA, 19 nt, synthetic construct
  misc_feature 1..19: note = siRNA sense sequence
  source 1..19: mol_type = other RNA
tggattgacgtataactca

SEQ ID NO: 47625 - RNA, 19 nt, synthetic construct
  misc_feature 1..19: note = siRNA antisense sequence
  source 1..19: mol_type = other RNA
tgagttatacgtcaatcca

SEQ ID NO: 47626 - RNA, 19 nt, synthetic construct
  misc_feature 1..19: note = siRNA sense sequence
  source 1..19: mol_type = other RNA
ggattgacgtataactcac

SEQ ID NO: 47627 - RNA, 19 nt, synthetic construct
  misc_feature 1..19: note = siRNA antisense sequence
  source 1..19: mol_type = other RNA
gtgagttatacgtcaatcc

SEQ ID NO: 47628 - RNA, 19 nt, synthetic construct
  misc_feature 1..19: note = siRNA sense sequence
  source 1..19: mol_type = other RNA
gattgacgtataactcaca

SEQ ID NO: 47629 - RNA, 19 nt, synthetic construct
  misc_feature 1..19: note = siRNA antisense sequence
  source 1..19: mol_type = other RNA
tgtgagttatacgtcaatc

SEQ ID NO: 47630 - RNA, 19 nt, synthetic construct
  misc_feature 1..19: note = siRNA sense sequence
  source 1..19: mol_type = other RNA
attgacgtataactcacag

SEQ ID NO: 47631 - RNA, 19 nt, synthetic construct
  misc_feature 1..19: note = siRNA antisense sequence
  source 1..19: mol_type = other RNA
ctgtgagttatacgtcaat

SEQ ID NO: 47632 - RNA, 19 nt, synthetic construct
  misc_feature 1..19: note = siRNA sense sequence
  source 1..19: mol_type = other RNA
ttgacgtataactcacagt

SEQ ID NO: 47633 - RNA, 19 nt, synthetic construct
  misc_feature 1..19: note = siRNA antisense sequence
  source 1..19: mol_type = other RNA
actgtgagttatacgtcaa

SEQ ID NO: 47634 - RNA, 19 nt, synthetic construct
  misc_feature 1..19: note = siRNA sense sequence
  source 1..19: mol_type = other RNA
tgacgtataactcacagtg

SEQ ID NO: 47635 - RNA, 19 nt, synthetic construct
  misc_feature 1..19: note = siRNA antisense sequence
  source 1..19: mol_type = other RNA
cactgtgagttatacgtca

SEQ ID NO: 47636 - RNA, 19 nt, synthetic construct
  misc_feature 1..19: note = siRNA sense sequence
  source 1..19: mol_type = other RNA
gacgtataactcacagtgg

SEQ ID NO: 47637 - RNA, 19 nt, synthetic construct
  misc_feature 1..19: note = siRNA antisense sequence
  source 1..19: mol_type = other RNA
ccactgtgagttatacgtc

SEQ ID NO: 47638 - RNA, 19 nt, synthetic construct
  misc_feature 1..19: note = siRNA sense sequence
  source 1..19: mol_type = other RNA
tataactcacagtggcttg

SEQ ID NO: 47639 - RNA, 19 nt, synthetic construct
  misc_feature 1..19: note = siRNA antisense sequence
  source 1..19: mol_type = other RNA
caagccactgtgagttata

SEQ ID NO: 47640 - RNA, 19 nt, synthetic construct
  misc_feature 1..19: note = siRNA sense sequence
  source 1..19: mol_type = other RNA
ataactcacagtggcttgg

SEQ ID NO: 47641 - RNA, 19 nt, synthetic construct
  misc_feature 1..19: note = siRNA antisense sequence
  source 1..19: mol_type = other RNA
ccaagccactgtgagttat

SEQ ID NO: 47642 - RNA, 19 nt, synthetic construct
  misc_feature 1..19: note = siRNA sense sequence
  source 1..19: mol_type = other RNA
taactcacagtggcttggt

SEQ ID NO: 47643 - RNA, 19 nt, synthetic construct
  misc_feature 1..19: note = siRNA antisense sequence
  source 1..19: mol_type = other RNA
accaagccactgtgagtta

SEQ ID NO: 47644 - RNA, 19 nt, synthetic construct
  misc_feature 1..19: note = siRNA sense sequence
  source 1..19: mol_type = other RNA
aactcacagtggcttggta

SEQ ID NO: 47645 - RNA, 19 nt, synthetic construct
  misc_feature 1..19: note = siRNA antisense sequence
  source 1..19: mol_type = other RNA
taccaagccactgtgagtt

SEQ ID NO: 47646 - RNA, 19 nt, synthetic construct
  misc_feature 1..19: note = siRNA sense sequence
  source 1..19: mol_type = other RNA
actcacagtggcttggtat

SEQ ID NO: 47647 - RNA, 19 nt, synthetic construct
  misc_feature 1..19: note = siRNA antisense sequence
  source 1..19: mol_type = other RNA
ataccaagccactgtgagt

SEQ ID NO: 47648 - RNA, 19 nt, synthetic construct
  misc_feature 1..19: note = siRNA sense sequence
  source 1..19: mol_type = other RNA
ctcacagtggcttggtatt

SEQ ID NO: 47649 - RNA, 19 nt, synthetic construct
  misc_feature 1..19: note = siRNA antisense sequence
  source 1..19: mol_type = other RNA
aataccaagccactgtgag

SEQ ID NO: 47650 - RNA, 19 nt, synthetic construct
  misc_feature 1..19: note = siRNA sense sequence
  source 1..19: mol_type = other RNA
tcacagtggcttggtattt

SEQ ID NO: 47651 - RNA, 19 nt, synthetic construct
  misc_feature 1..19: note = siRNA antisense sequence
  source 1..19: mol_type = other RNA
aaataccaagccactgtga

SEQ ID NO: 47652 - RNA, 19 nt, synthetic construct
  misc_feature 1..19: note = siRNA sense sequence
  source 1..19: mol_type = other RNA
cacagtggcttggtatttc

SEQ ID NO: 47653 - RNA, 19 nt, synthetic construct
  misc_feature 1..19: note = siRNA antisense sequence
  source 1..19: mol_type = other RNA
gaaataccaagccactgtg

SEQ ID NO: 47654 - RNA, 19 nt, synthetic construct
  misc_feature 1..19: note = siRNA sense sequence
  source 1..19: mol_type = other RNA
gtggcttggtatttcaggt

SEQ ID NO: 47655 - RNA, 19 nt, synthetic construct
  misc_feature 1..19: note = siRNA antisense sequence
  source 1..19: mol_type = other RNA
acctgaaataccaagccac

SEQ ID NO: 47656 - RNA, 19 nt, synthetic construct
  misc_feature 1..19: note = siRNA sense sequence
  source 1..19: mol_type = other RNA
cttggtatttcaggttgga

SEQ ID NO: 47657 - RNA, 19 nt, synthetic construct
  misc_feature 1..19: note = siRNA antisense sequence
  source 1..19: mol_type = other RNA
tccaacctgaaataccaag

SEQ ID NO: 47658 - RNA, 19 nt, synthetic construct
  misc_feature 1..19: note = siRNA sense sequence
  source 1..19: mol_type = other RNA
ttggtatttcaggttggaa

SEQ ID NO: 47659 - RNA, 19 nt, synthetic construct
  misc_feature 1..19: note = siRNA antisense sequence
  source 1..19: mol_type = other RNA
ttccaacctgaaataccaa

SEQ ID NO: 47660 - RNA, 19 nt, synthetic construct
  misc_feature 1..19: note = siRNA sense sequence
  source 1..19: mol_type = other RNA
tggtatttcaggttggaat

SEQ ID NO: 47661 - RNA, 19 nt, synthetic construct
  misc_feature 1..19: note = siRNA antisense sequence
  source 1..19: mol_type = other RNA
attccaacctgaaatacca

SEQ ID NO: 47662 - RNA, 19 nt, synthetic construct
  misc_feature 1..19: note = siRNA sense sequence
  source 1..19: mol_type = other RNA
ggtatttcaggttggaatt

SEQ ID NO: 47663 - RNA, 19 nt, synthetic construct
  misc_feature 1..19: note = siRNA antisense sequence
  source 1..19: mol_type = other RNA
aattccaacctgaaatacc

SEQ ID NO: 47664 - RNA, 19 nt, synthetic construct
  misc_feature 1..19: note = siRNA sense sequence
  source 1..19: mol_type = other RNA
gtatttcaggttggaattg

SEQ ID NO: 47665 - RNA, 19 nt, synthetic construct
  misc_feature 1..19: note = siRNA antisense sequence
  source 1..19: mol_type = other RNA
caattccaacctgaaatac

SEQ ID NO: 47666 - RNA, 19 nt, synthetic construct
  misc_feature 1..19: note = siRNA sense sequence
  source 1..19: mol_type = other RNA
atttcaggttggaattgta

SEQ ID NO: 47667 - RNA, 19 nt, synthetic construct
  misc_feature 1..19: note = siRNA antisense sequence
  source 1..19: mol_type = other RNA
tacaattccaacctgaaat

SEQ ID NO: 47668 - RNA, 19 nt, synthetic construct
  misc_feature 1..19: note = siRNA sense sequence
  source 1..19: mol_type = other RNA
tttcaggttggaattgtac

SEQ ID NO: 47669 - RNA, 19 nt, synthetic construct
  misc_feature 1..19: note = siRNA antisense sequence
  source 1..19: mol_type = other RNA
gtacaattccaacctgaaa

SEQ ID NO: 47670 - RNA, 19 nt, synthetic construct
  misc_feature 1..19: note = siRNA sense sequence
  source 1..19: mol_type = other RNA
acctcaataagtattcttc

SEQ ID NO: 47671 - RNA, 19 nt, synthetic construct
  misc_feature 1..19: note = siRNA antisense sequence
  source 1..19: mol_type = other RNA
gaagaatacttattgaggt

SEQ ID NO: 47672 - RNA, 19 nt, synthetic construct
  misc_feature 1..19: note = siRNA sense sequence
  source 1..19: mol_type = other RNA
caataagtattcttccacc

SEQ ID NO: 47673 - RNA, 19 nt, synthetic construct
  misc_feature 1..19: note = siRNA antisense sequence
  source 1..19: mol_type = other RNA
ggtggaagaatacttattg

SEQ ID NO: 47674 - RNA, 19 nt, synthetic construct
  misc_feature 1..19: note = siRNA sense sequence
  source 1..19: mol_type = other RNA
aataagtattcttccaccg

SEQ ID NO: 47675 - RNA, 19 nt, synthetic construct
  misc_feature 1..19: note = siRNA antisense sequence
  source 1..19: mol_type = other RNA
cggtggaagaatacttatt

SEQ ID NO: 47676 - RNA, 19 nt, synthetic construct
  misc_feature 1..19: note = siRNA sense sequence
  source 1..19: mol_type = other RNA
ataagtattcttccaccga

SEQ ID NO: 47677 - RNA, 19 nt, synthetic construct
  misc_feature 1..19: note = siRNA antisense sequence
  source 1..19: mol_type = other RNA
tcggtggaagaatacttat

SEQ ID NO: 47678 - RNA, 19 nt, synthetic construct
  misc_feature 1..19: note = siRNA sense sequence
  source 1..19: mol_type = other RNA
taagtattcttccaccgaa

SEQ ID NO: 47679 - RNA, 19 nt, synthetic construct
  misc_feature 1..19: note = siRNA antisense sequence
  source 1..19: mol_type = other RNA
ttcggtggaagaatactta

SEQ ID NO: 47680 - RNA, 19 nt, synthetic construct
  misc_feature 1..19: note = siRNA sense sequence
  source 1..19: mol_type = other RNA
ttccaccgaagaggtactt

SEQ ID NO: 47681 - RNA, 19 nt, synthetic construct
  misc_feature 1..19: note = siRNA antisense sequence
  source 1..19: mol_type = other RNA
aagtacctcttcggtggaa

SEQ ID NO: 47682 - RNA, 19 nt, synthetic construct
  misc_feature 1..19: note = siRNA sense sequence
  source 1..19: mol_type = other RNA
tccaccgaagaggtacttg

SEQ ID NO: 47683 - RNA, 19 nt, synthetic construct
  misc_feature 1..19: note = siRNA antisense sequence
  source 1..19: mol_type = other RNA
caagtacctcttcggtgga

SEQ ID NO: 47684 - RNA, 19 nt, synthetic construct
  misc_feature 1..19: note = siRNA sense sequence
  source 1..19: mol_type = other RNA
ccaccgaagaggtacttgt

SEQ ID NO: 47685 - RNA, 19 nt, synthetic construct
  misc_feature 1..19: note = siRNA antisense sequence
  source 1..19: mol_type = other RNA
acaagtacctcttcggtgg

SEQ ID NO: 47686 - RNA, 19 nt, synthetic construct
  misc_feature 1..19: note = siRNA sense sequence
  source 1..19: mol_type = other RNA
caccgaagaggtacttgtt

SEQ ID NO: 47687 - RNA, 19 nt, synthetic construct
  misc_feature 1..19: note = siRNA antisense sequence
  source 1..19: mol_type = other RNA
aacaagtacctcttcggtg

SEQ ID NO: 47688 - RNA, 19 nt, synthetic construct
  misc_feature 1..19: note = siRNA sense sequence
  source 1..19: mol_type = other RNA
gaagaggtacttgttgcag

SEQ ID NO: 47689 - RNA, 19 nt, synthetic construct
  misc_feature 1..19: note = siRNA antisense sequence
  source 1..19: mol_type = other RNA
ctgcaacaagtacctcttc

SEQ ID NO: 47690 - RNA, 19 nt, synthetic construct
  misc_feature 1..19: note = siRNA sense sequence
  source 1..19: mol_type = other RNA
aagaggtacttgttgcagc

SEQ ID NO: 47691 - RNA, 19 nt, synthetic construct
  misc_feature 1..19: note = siRNA antisense sequence
  source 1..19: mol_type = other RNA
gctgcaacaagtacctctt

SEQ ID NO: 47692 - RNA, 19 nt, synthetic construct
  misc_feature 1..19: note = siRNA sense sequence
  source 1..19: mol_type = other RNA
agaggtacttgttgcagca

SEQ ID NO: 47693 - RNA, 19 nt, synthetic construct
  misc_feature 1..19: note = siRNA antisense sequence
  source 1..19: mol_type = other RNA
tgctgcaacaagtacctct

SEQ ID NO: 47694 - RNA, 19 nt, synthetic construct
  misc_feature 1..19: note = siRNA sense sequence
  source 1..19: mol_type = other RNA
gaggtacttgttgcagcaa

SEQ ID NO: 47695 - RNA, 19 nt, synthetic construct
  misc_feature 1..19: note = siRNA antisense sequence
  source 1..19: mol_type = other RNA
ttgctgcaacaagtacctc

SEQ ID NO: 47696 - RNA, 19 nt, synthetic construct
  misc_feature 1..19: note = siRNA sense sequence
  source 1..19: mol_type = other RNA
aggtacttgttgcagcaaa

SEQ ID NO: 47697 - RNA, 19 nt, synthetic construct
  misc_feature 1..19: note = siRNA antisense sequence
  source 1..19: mol_type = other RNA
tttgctgcaacaagtacct

SEQ ID NO: 47698 - RNA, 19 nt, synthetic construct
  misc_feature 1..19: note = siRNA sense sequence
  source 1..19: mol_type = other RNA
ggtacttgttgcagcaaag

SEQ ID NO: 47699 - RNA, 19 nt, synthetic construct
  misc_feature 1..19: note = siRNA antisense sequence
  source 1..19: mol_type = other RNA
ctttgctgcaacaagtacc

SEQ ID NO: 47700 - RNA, 19 nt, synthetic construct
  misc_feature 1..19: note = siRNA sense sequence
  source 1..19: mol_type = other RNA
gtacttgttgcagcaaaga

SEQ ID NO: 47701 - RNA, 19 nt, synthetic construct
  misc_feature 1..19: note = siRNA antisense sequence
  source 1..19: mol_type = other RNA
tctttgctgcaacaagtac

SEQ ID NO: 47702 - RNA, 19 nt, synthetic construct
  misc_feature 1..19: note = siRNA sense sequence
  source 1..19: mol_type = other RNA
cgccagactatgacagctc

SEQ ID NO: 47703 - RNA, 19 nt, synthetic construct
  misc_feature 1..19: note = siRNA antisense sequence
  source 1..19: mol_type = other RNA
gagctgtcatagtctggcg

SEQ ID NO: 47704 - RNA, 19 nt, synthetic construct
  misc_feature 1..19: note = siRNA sense sequence
  source 1..19: mol_type = other RNA
gccagactatgacagctct

SEQ ID NO: 47705 - RNA, 19 nt, synthetic construct
  misc_feature 1..19: note = siRNA antisense sequence
  source 1..19: mol_type = other RNA
agagctgtcatagtctggc

SEQ ID NO: 47706 - RNA, 19 nt, synthetic construct
  misc_feature 1..19: note = siRNA sense sequence
  source 1..19: mol_type = other RNA
ccagactatgacagctctt

SEQ ID NO: 47707 - RNA, 19 nt, synthetic construct
  misc_feature 1..19: note = siRNA antisense sequence
  source 1..19: mol_type = other RNA
aagagctgtcatagtctgg

SEQ ID NO: 47708 - RNA, 19 nt, synthetic construct
  misc_feature 1..19: note = siRNA sense sequence
  source 1..19: mol_type = other RNA
actatgacagctcttggaa

SEQ ID NO: 47709 - RNA, 19 nt, synthetic construct
  misc_feature 1..19: note = siRNA antisense sequence
  source 1..19: mol_type = other RNA
ttccaagagctgtcatagt

SEQ ID NO: 47710 - RNA, 19 nt, synthetic construct
  misc_feature 1..19: note = siRNA sense sequence
  source 1..19: mol_type = other RNA
ctatgacagctcttggaat

SEQ ID NO: 47711 - RNA, 19 nt, synthetic construct
  misc_feature 1..19: note = siRNA antisense sequence
  source 1..19: mol_type = other RNA
attccaagagctgtcatag

SEQ ID NO: 47712 - RNA, 19 nt, synthetic construct
  misc_feature 1..19: note = siRNA sense sequence
  source 1..19: mol_type = other RNA
tatgacagctcttggaata

SEQ ID NO: 47713 - RNA, 19 nt, synthetic construct
  misc_feature 1..19: note = siRNA antisense sequence
  source 1..19: mol_type = other RNA
tattccaagagctgtcata

SEQ ID NO: 47714 - RNA, 19 nt, synthetic construct
  misc_feature 1..19: note = siRNA sense sequence
  source 1..19: mol_type = other RNA
acagctcttggaatagaca

SEQ ID NO: 47715 - RNA, 19 nt, synthetic construct
  misc_feature 1..19: note = siRNA antisense sequence
  source 1..19: mol_type = other RNA
tgtctattccaagagctgt

SEQ ID NO: 47716 - RNA, 19 nt, synthetic construct
  misc_feature 1..19: note = siRNA sense sequence
  source 1..19: mol_type = other RNA
cagctcttggaatagacac

SEQ ID NO: 47717 - RNA, 19 nt, synthetic construct
  misc_feature 1..19: note = siRNA antisense sequence
  source 1..19: mol_type = other RNA
gtgtctattccaagagctg

SEQ ID NO: 47718 - RNA, 19 nt, synthetic construct
  misc_feature 1..19: note = siRNA sense sequence
  source 1..19: mol_type = other RNA
acagcaaggtatatggata

SEQ ID NO: 47719 - RNA, 19 nt, synthetic construct
  misc_feature 1..19: note = siRNA antisense sequence
  source 1..19: mol_type = other RNA
tatccatataccttgctgt

SEQ ID NO: 47720 - RNA, 19 nt, synthetic construct
  misc_feature 1..19: note = siRNA sense sequence
  source 1..19: mol_type = other RNA
cagcaaggtatatggataa

SEQ ID NO: 47721 - RNA, 19 nt, synthetic construct
  misc_feature 1..19: note = siRNA antisense sequence
  source 1..19: mol_type = other RNA
ttatccatataccttgctg

SEQ ID NO: 47722 - RNA, 19 nt, synthetic construct
  misc_feature 1..19: note = siRNA sense sequence
  source 1..19: mol_type = other RNA
agcaaggtatatggataaa

SEQ ID NO: 47723 - RNA, 19 nt, synthetic construct
  misc_feature 1..19: note = siRNA antisense sequence
  source 1..19: mol_type = other RNA
tttatccatataccttgct

SEQ ID NO: 47724 - RNA, 19 nt, synthetic construct
  misc_feature 1..19: note = siRNA sense sequence
  source 1..19: mol_type = other RNA
gcaaggtatatggataaaa

SEQ ID NO: 47725 - RNA, 19 nt, synthetic construct
  misc_feature 1..19: note = siRNA antisense sequence
  source 1..19: mol_type = other RNA
ttttatccatataccttgc

SEQ ID NO: 47726 - RNA, 19 nt, synthetic construct
  misc_feature 1..19: note = siRNA sense sequence
  source 1..19: mol_type = other RNA
ctaaagtaaaagactgcaa

SEQ ID NO: 47727 - RNA, 19 nt, synthetic construct
  misc_feature 1..19: note = siRNA antisense sequence
  source 1..19: mol_type = other RNA
ttgcagtcttttactttag

SEQ ID NO: 47728 - RNA, 19 nt, synthetic construct
  misc_feature 1..19: note = siRNA sense sequence
  source 1..19: mol_type = other RNA
taactgctcatgatttagc

SEQ ID NO: 47729 - RNA, 19 nt, synthetic construct
  misc_feature 1..19: note = siRNA antisense sequence
  source 1..19: mol_type = other RNA
gctaaatcatgagcagtta

SEQ ID NO: 47730 - RNA, 19 nt, synthetic construct
  misc_feature 1..19: note = siRNA sense sequence
  source 1..19: mol_type = other RNA
aactgctcatgatttagcc

SEQ ID NO: 47731 - RNA, 19 nt, synthetic construct
  misc_feature 1..19: note = siRNA antisense sequence
  source 1..19: mol_type = other RNA
ggctaaatcatgagcagtt

SEQ ID NO: 47732 - RNA, 19 nt, synthetic construct
  misc_feature 1..19: note = siRNA sense sequence
  source 1..19: mol_type = other RNA
actgctcatgatttagcct

SEQ ID NO: 47733 - RNA, 19 nt, synthetic construct
  misc_feature 1..19: note = siRNA antisense sequence
  source 1..19: mol_type = other RNA
aggctaaatcatgagcagt

SEQ ID NO: 47734 - RNA, 19 nt, synthetic construct
  misc_feature 1..19: note = siRNA sense sequence
  source 1..19: mol_type = other RNA
ctgctcatgatttagcctt

SEQ ID NO: 47735 - RNA, 19 nt, synthetic construct
  misc_feature 1..19: note = siRNA antisense sequence
  source 1..19: mol_type = other RNA
aaggctaaatcatgagcag

SEQ ID NO: 47736 - RNA, 19 nt, synthetic construct
  misc_feature 1..19: note = siRNA sense sequence
  source 1..19: mol_type = other RNA
tgctcatgatttagccttt

SEQ ID NO: 47737 - RNA, 19 nt, synthetic construct
  misc_feature 1..19: note = siRNA antisense sequence
  source 1..19: mol_type = other RNA
aaaggctaaatcatgagca

SEQ ID NO: 47738 - RNA, 19 nt, synthetic construct
  misc_feature 1..19: note = siRNA sense sequence
  source 1..19: mol_type = other RNA
gctcatgatttagcctttt

SEQ ID NO: 47739 - RNA, 19 nt, synthetic construct
  misc_feature 1..19: note = siRNA antisense sequence
  source 1..19: mol_type = other RNA
aaaaggctaaatcatgagc

SEQ ID NO: 47740 - RNA, 19 nt, synthetic construct
  misc_feature 1..19: note = siRNA sense sequence
  source 1..19: mol_type = other RNA
ctcatgatttagccttttg

SEQ ID NO: 47741 - RNA, 19 nt, synthetic construct
  misc_feature 1..19: note = siRNA antisense sequence
  source 1..19: mol_type = other RNA
caaaaggctaaatcatgag

SEQ ID NO: 47742 - RNA, 19 nt, synthetic construct
  misc_feature 1..19: note = siRNA sense sequence
  source 1..19: mol_type = other RNA
tcatgatttagccttttgg

SEQ ID NO: 47743 - RNA, 19 nt, synthetic construct
  misc_feature 1..19: note = siRNA antisense sequence
  source 1..19: mol_type = other RNA
ccaaaaggctaaatcatga

SEQ ID NO: 47744 - RNA, 19 nt, synthetic construct
  misc_feature 1..19: note = siRNA sense sequence
  source 1..19: mol_type = other RNA
catgatttagccttttggc

SEQ ID NO: 47745 - RNA, 19 nt, synthetic construct
  misc_feature 1..19: note = siRNA antisense sequence
  source 1..19: mol_type = other RNA
gccaaaaggctaaatcatg

SEQ ID NO: 47746 - RNA, 19 nt, synthetic construct
  misc_feature 1..19: note = siRNA sense sequence
  source 1..19: mol_type = other RNA
atgatttagccttttggca

SEQ ID NO: 47747 - RNA, 19 nt, synthetic construct
  misc_feature 1..19: note = siRNA antisense sequence
  source 1..19: mol_type = other RNA
tgccaaaaggctaaatcat

SEQ ID NO: 47748 - RNA, 19 nt, synthetic construct
  misc_feature 1..19: note = siRNA sense sequence
  source 1..19: mol_type = other RNA
tgatttagccttttggcat

SEQ ID NO: 47749 - RNA, 19 nt, synthetic construct
  misc_feature 1..19: note = siRNA antisense sequence
  source 1..19: mol_type = other RNA
atgccaaaaggctaaatca

SEQ ID NO: 47750 - RNA, 19 nt, synthetic construct
  misc_feature 1..19: note = siRNA sense sequence
  source 1..19: mol_type = other RNA
gatttagccttttggcata

SEQ ID NO: 47751 - RNA, 19 nt, synthetic construct
  misc_feature 1..19: note = siRNA antisense sequence
  source 1..19: mol_type = other RNA
tatgccaaaaggctaaatc

SEQ ID NO: 47752 - RNA, 19 nt, synthetic construct
  misc_feature 1..19: note = siRNA sense sequence
  source 1..19: mol_type = other RNA
atttagccttttggcatat

SEQ ID NO: 47753 - RNA, 19 nt, synthetic construct
  misc_feature 1..19: note = siRNA antisense sequence
  source 1..19: mol_type = other RNA
atatgccaaaaggctaaat

SEQ ID NO: 47754 - RNA, 19 nt, synthetic construct
  misc_feature 1..19: note = siRNA sense sequence
  source 1..19: mol_type = other RNA
agccttttggcatatcaat

SEQ ID NO: 47755 - RNA, 19 nt, synthetic construct
  misc_feature 1..19: note = siRNA antisense sequence
  source 1..19: mol_type = other RNA
attgatatgccaaaaggct

SEQ ID NO: 47756 - RNA, 19 nt, synthetic construct
  misc_feature 1..19: note = siRNA sense sequence
  source 1..19: mol_type = other RNA
gccttttggcatatcaatt

SEQ ID NO: 47757 - RNA, 19 nt, synthetic construct
  misc_feature 1..19: note = siRNA antisense sequence
  source 1..19: mol_type = other RNA
aattgatatgccaaaaggc

SEQ ID NO: 47758 - RNA, 19 nt, synthetic construct
  misc_feature 1..19: note = siRNA sense sequence
  source 1..19: mol_type = other RNA
ccttttggcatatcaattg

SEQ ID NO: 47759 - RNA, 19 nt, synthetic construct
  misc_feature 1..19: note = siRNA antisense sequence
  source 1..19: mol_type = other RNA
caattgatatgccaaaagg

SEQ ID NO: 47760 - RNA, 19 nt, synthetic construct
  misc_feature 1..19: note = siRNA sense sequence
  source 1..19: mol_type = other RNA
cttttggcatatcaattga

SEQ ID NO: 47761 - RNA, 19 nt, synthetic construct
  misc_feature 1..19: note = siRNA antisense sequence
  source 1..19: mol_type = other RNA
tcaattgatatgccaaaag

SEQ ID NO: 47762 - RNA, 19 nt, synthetic construct
  misc_feature 1..19: note = siRNA sense sequence
  source 1..19: mol_type = other RNA
gatcagatgtttgtatgac

SEQ ID NO: 47763 - RNA, 19 nt, synthetic construct
  misc_feature 1..19: note = siRNA antisense sequence
  source 1..19: mol_type = other RNA
gtcatacaaacatctgatc

SEQ ID NO: 47764 - RNA, 19 nt, synthetic construct
  misc_feature 1..19: note = siRNA sense sequence
  source 1..19: mol_type = other RNA
atcagatgtttgtatgaca

SEQ ID NO: 47765 - RNA, 19 nt, synthetic construct
  misc_feature 1..19: note = siRNA antisense sequence
  source 1..19: mol_type = other RNA
tgtcatacaaacatctgat

SEQ ID NO: 47766 - RNA, 19 nt, synthetic construct
  misc_feature 1..19: note = siRNA sense sequence
  source 1..19: mol_type = other RNA
caatctcaccatccttctt

SEQ ID NO: 47767 - RNA, 19 nt, synthetic construct
  misc_feature 1..19: note = siRNA antisense sequence
  source 1..19: mol_type = other RNA
aagaaggatggtgagattg

SEQ ID NO: 47768 - RNA, 19 nt, synthetic construct
  misc_feature 1..19: note = siRNA sense sequence
  source 1..19: mol_type = other RNA
aatctcaccatccttctta

SEQ ID NO: 47769 - RNA, 19 nt, synthetic construct
  misc_feature 1..19: note = siRNA antisense sequence
  source 1..19: mol_type = other RNA
taagaaggatggtgagatt

SEQ ID NO: 47770 - RNA, 19 nt, synthetic construct
  misc_feature 1..19: note = siRNA sense sequence
  source 1..19: mol_type = other RNA
atctcaccatccttcttat

SEQ ID NO: 47771 - RNA, 19 nt, synthetic construct
  misc_feature 1..19: note = siRNA antisense sequence
  source 1..19: mol_type = other RNA
ataagaaggatggtgagat

SEQ ID NO: 47772 - RNA, 19 nt, synthetic construct
  misc_feature 1..19: note = siRNA sense sequence
  source 1..19: mol_type = other RNA
tctcaccatccttcttatc

SEQ ID NO: 47773 - RNA, 19 nt, synthetic construct
  misc_feature 1..19: note = siRNA antisense sequence
  source 1..19: mol_type = other RNA
gataagaaggatggtgaga

SEQ ID NO: 47774 - RNA, 19 nt, synthetic construct
  misc_feature 1..19: note = siRNA sense sequence
  source 1..19: mol_type = other RNA
ctcaccatccttcttatcc

SEQ ID NO: 47775 - RNA, 19 nt, synthetic construct
  misc_feature 1..19: note = siRNA antisense sequence
  source 1..19: mol_type = other RNA
ggataagaaggatggtgag

SEQ ID NO: 47776 - RNA, 19 nt, synthetic construct
  misc_feature 1..19: note = siRNA sense sequence
  source 1..19: mol_type = other RNA
tcaccatccttcttatcct

SEQ ID NO: 47777 - RNA, 19 nt, synthetic construct
  misc_feature 1..19: note = siRNA antisense sequence
  source 1..19: mol_type = other RNA
aggataagaaggatggtga

SEQ ID NO: 47778 - RNA, 19 nt, synthetic construct
  misc_feature 1..19: note = siRNA sense sequence
  source 1..19: mol_type = other RNA
caccatccttcttatcctt

SEQ ID NO: 47779 - RNA, 19 nt, synthetic construct
  misc_feature 1..19: note = siRNA antisense sequence
  source 1..19: mol_type = other RNA
aaggataagaaggatggtg

SEQ ID NO: 47780 - RNA, 19 nt, synthetic construct
  misc_feature 1..19: note = siRNA sense sequence
  source 1..19: mol_type = other RNA
accatccttcttatccttc

SEQ ID NO: 47781 - RNA, 19 nt, synthetic construct
  misc_feature 1..19: note = siRNA antisense sequence
  source 1..19: mol_type = other RNA
gaaggataagaaggatggt

SEQ ID NO: 47782 - RNA, 19 nt, synthetic construct
  misc_feature 1..19: note = siRNA sense sequence
  source 1..19: mol_type = other RNA
ccatccttcttatccttct

SEQ ID NO: 47783 - RNA, 19 nt, synthetic construct
  misc_feature 1..19: note = siRNA antisense sequence
  source 1..19: mol_type = other RNA
agaaggataagaaggatgg

SEQ ID NO: 47784 - RNA, 19 nt, synthetic construct
  misc_feature 1..19: note = siRNA sense sequence
  source 1..19: mol_type = other RNA
catccttcttatccttctc

SEQ ID NO: 47785 - RNA, 19 nt, synthetic construct
  misc_feature 1..19: note = siRNA antisense sequence
  source 1..19: mol_type = other RNA
gagaaggataagaaggatg

SEQ ID NO: 47786 - RNA, 19 nt, synthetic construct
  misc_feature 1..19: note = siRNA sense sequence
  source 1..19: mol_type = other RNA
caagggtttaattgataga

SEQ ID NO: 47787 - RNA, 19 nt, synthetic construct
  misc_feature 1..19: note = siRNA antisense sequence
  source 1..19: mol_type = other RNA
tctatcaattaaacccttg

SEQ ID NO: 47788 - RNA, 19 nt, synthetic construct
  misc_feature 1..19: note = siRNA sense sequence
  source 1..19: mol_type = other RNA
aagggtttaattgatagag

SEQ ID NO: 47789 - RNA, 19 nt, synthetic construct
  misc_feature 1..19: note = siRNA antisense sequence
  source 1..19: mol_type = other RNA
ctctatcaattaaaccctt

SEQ ID NO: 47790 - RNA, 19 nt, synthetic construct
  misc_feature 1..19: note = siRNA sense sequence
  source 1..19: mol_type = other RNA
tcactgcatctatattttc

SEQ ID NO: 47791 - RNA, 19 nt, synthetic construct
  misc_feature 1..19: note = siRNA antisense sequence
  source 1..19: mol_type = other RNA
gaaaatatagatgcagtga

SEQ ID NO: 47792 - RNA, 19 nt, synthetic construct
  misc_feature 1..19: note = siRNA sense sequence
  source 1..19: mol_type = other RNA
ctgcatctatattttcatg

SEQ ID NO: 47793 - RNA, 19 nt, synthetic construct
  misc_feature 1..19: note = siRNA antisense sequence
  source 1..19: mol_type = other RNA
catgaaaatatagatgcag

SEQ ID NO: 47794 - RNA, 19 nt, synthetic construct
  misc_feature 1..19: note = siRNA sense sequence
  source 1..19: mol_type = other RNA
attttcatgttcttgggta

SEQ ID NO: 47795 - RNA, 19 nt, synthetic construct
  misc_feature 1..19: note = siRNA antisense sequence
  source 1..19: mol_type = other RNA
tacccaagaacatgaaaat

SEQ ID NO: 47796 - RNA, 19 nt, synthetic construct
  misc_feature 1..19: note = siRNA sense sequence
  source 1..19: mol_type = other RNA
ttttcatgttcttgggtac

SEQ ID NO: 47797 - RNA, 19 nt, synthetic construct
  misc_feature 1..19: note = siRNA antisense sequence
  source 1..19: mol_type = other RNA
gtacccaagaacatgaaaa

SEQ ID NO: 47798 - RNA, 19 nt, synthetic construct
  misc_feature 1..19: note = siRNA sense sequence
  source 1..19: mol_type = other RNA
tttcatgttcttgggtact

SEQ ID NO: 47799 - RNA, 19 nt, synthetic construct
  misc_feature 1..19: note = siRNA antisense sequence
  source 1..19: mol_type = other RNA
agtacccaagaacatgaaa

SEQ ID NO: 47800 - RNA, 19 nt, synthetic construct
  misc_feature 1..19: note = siRNA sense sequence
  source 1..19: mol_type = other RNA
ttcatgttcttgggtacta

SEQ ID NO: 47801 - RNA, 19 nt, synthetic construct
  misc_feature 1..19: note = siRNA antisense sequence
  source 1..19: mol_type = other RNA
tagtacccaagaacatgaa

SEQ ID NO: 47802 - RNA, 19 nt, synthetic construct
  misc_feature 1..19: note = siRNA sense sequence
  source 1..19: mol_type = other RNA
tcatgttcttgggtactaa

SEQ ID NO: 47803 - RNA, 19 nt, synthetic construct
  misc_feature 1..19: note = siRNA antisense sequence
  source 1..19: mol_type = other RNA
ttagtacccaagaacatga

SEQ ID NO: 47804 - RNA, 19 nt, synthetic construct
  misc_feature 1..19: note = siRNA sense sequence
  source 1..19: mol_type = other RNA
catgttcttgggtactaag

SEQ ID NO: 47805 - RNA, 19 nt, synthetic construct
  misc_feature 1..19: note = siRNA antisense sequence
  source 1..19: mol_type = other RNA
cttagtacccaagaacatg

SEQ ID NO: 47806 - RNA, 19 nt, synthetic construct
  misc_feature 1..19: note = siRNA sense sequence
  source 1..19: mol_type = other RNA
tgttttcaacttctaagag

SEQ ID NO: 47807 - RNA, 19 nt, synthetic construct
  misc_feature 1..19: note = siRNA antisense sequence
  source 1..19: mol_type = other RNA
ctcttagaagttgaaaaca

SEQ ID NO: 47808 - RNA, 19 nt, synthetic construct
  misc_feature 1..19: note = siRNA sense sequence
  source 1..19: mol_type = other RNA
gttttcaacttctaagagt

SEQ ID NO: 47809 - RNA, 19 nt, synthetic construct
  misc_feature 1..19: note = siRNA antisense sequence
  source 1..19: mol_type = other RNA
actcttagaagttgaaaac

SEQ ID NO: 47810 - RNA, 19 nt, synthetic construct
  misc_feature 1..19: note = siRNA sense sequence
  source 1..19: mol_type = other RNA
ttttcaacttctaagagtc

SEQ ID NO: 47811 - RNA, 19 nt, synthetic construct
  misc_feature 1..19: note = siRNA antisense sequence
  source 1..19: mol_type = other RNA
gactcttagaagttgaaaa

SEQ ID NO: 47812 - RNA, 19 nt, synthetic construct
  misc_feature 1..19: note = siRNA sense sequence
  source 1..19: mol_type = other RNA
tttcaacttctaagagtct

SEQ ID NO: 47813 - RNA, 19 nt, synthetic construct
  misc_feature 1..19: note = siRNA antisense sequence
  source 1..19: mol_type = other RNA
agactcttagaagttgaaa

SEQ ID NO: 47814 - RNA, 19 nt, synthetic construct
  misc_feature 1..19: note = siRNA sense sequence
  source 1..19: mol_type = other RNA
ttcaacttctaagagtctc

SEQ ID NO: 47815 - RNA, 19 nt, synthetic construct
  misc_feature 1..19: note = siRNA antisense sequence
  source 1..19: mol_type = other RNA
gagactcttagaagttgaa

SEQ ID NO: 47816 - RNA, 19 nt, synthetic construct
  misc_feature 1..19: note = siRNA sense sequence
  source 1..19: mol_type = other RNA
tcaacttctaagagtctca

SEQ ID NO: 47817 - RNA, 19 nt, synthetic construct
  misc_feature 1..19: note = siRNA antisense sequence
  source 1..19: mol_type = other RNA
tgagactcttagaagttga

SEQ ID NO: 47818 - RNA, 19 nt, synthetic construct
  misc_feature 1..19: note = siRNA sense sequence
  source 1..19: mol_type = other RNA
caacttctaagagtctcaa

SEQ ID NO: 47819 - RNA, 19 nt, synthetic construct
  misc_feature 1..19: note = siRNA antisense sequence
  source 1..19: mol_type = other RNA
ttgagactcttagaagttg

SEQ ID NO: 47820 - RNA, 19 nt, synthetic construct
  misc_feature 1..19: note = siRNA sense sequence
  source 1..19: mol_type = other RNA
aacttctaagagtctcaat

SEQ ID NO: 47821 - RNA, 19 nt, synthetic construct
  misc_feature 1..19: note = siRNA antisense sequence
  source 1..19: mol_type = other RNA
attgagactcttagaagtt

SEQ ID NO: 47822 - RNA, 19 nt, synthetic construct
  misc_feature 1..19: note = siRNA sense sequence
  source 1..19: mol_type = other RNA
acttctaagagtctcaatc

SEQ ID NO: 47823 - RNA, 19 nt, synthetic construct
  misc_feature 1..19: note = siRNA antisense sequence
  source 1..19: mol_type = other RNA
gattgagactcttagaagt

SEQ ID NO: 47824 - RNA, 19 nt, synthetic construct
  misc_feature 1..19: note = siRNA sense sequence
  source 1..19: mol_type = other RNA
cttctaagagtctcaatct

SEQ ID NO: 47825 - RNA, 19 nt, synthetic construct
  misc_feature 1..19: note = siRNA antisense sequence
  source 1..19: mol_type = other RNA
agattgagactcttagaag

SEQ ID NO: 47826 - RNA, 19 nt, synthetic construct
  misc_feature 1..19: note = siRNA sense sequence
  source 1..19: mol_type = other RNA
ttctaagagtctcaatcta

SEQ ID NO: 47827 - RNA, 19 nt, synthetic construct
  misc_feature 1..19: note = siRNA antisense sequence
  source 1..19: mol_type = other RNA
tagattgagactcttagaa

SEQ ID NO: 47828 - RNA, 19 nt, synthetic construct
  misc_feature 1..19: note = siRNA sense sequence
  source 1..19: mol_type = other RNA
tctaagagtctcaatctaa

SEQ ID NO: 47829 - RNA, 19 nt, synthetic construct
  misc_feature 1..19: note = siRNA antisense sequence
  source 1..19: mol_type = other RNA
ttagattgagactcttaga

SEQ ID NO: 47830 - RNA, 19 nt, synthetic construct
  misc_feature 1..19: note = siRNA sense sequence
  source 1..19: mol_type = other RNA
ctaagagtctcaatctaaa

SEQ ID NO: 47831 - RNA, 19 nt, synthetic construct
  misc_feature 1..19: note = siRNA antisense sequence
  source 1..19: mol_type = other RNA
tttagattgagactcttag

SEQ ID NO: 47832 - RNA, 19 nt, synthetic construct
  misc_feature 1..19: note = siRNA sense sequence
  source 1..19: mol_type = other RNA
aagagtctcaatctaaaag

SEQ ID NO: 47833 - RNA, 19 nt, synthetic construct
  misc_feature 1..19: note = siRNA antisense sequence
  source 1..19: mol_type = other RNA
cttttagattgagactctt

SEQ ID NO: 47834 - RNA, 19 nt, synthetic construct
  misc_feature 1..19: note = siRNA sense sequence
  source 1..19: mol_type = other RNA
gagtctcaatctaaaagaa

SEQ ID NO: 47835 - RNA, 19 nt, synthetic construct
  misc_feature 1..19: note = siRNA antisense sequence
  source 1..19: mol_type = other RNA
ttcttttagattgagactc

SEQ ID NO: 47836 - RNA, 19 nt, synthetic construct
  misc_feature 1..19: note = siRNA sense sequence
  source 1..19: mol_type = other RNA
taggtctacctctactcaa

SEQ ID NO: 47837 - RNA, 19 nt, synthetic construct
  misc_feature 1..19: note = siRNA antisense sequence
  source 1..19: mol_type = other RNA
ttgagtagaggtagaccta

SEQ ID NO: 47838 - RNA, 19 nt, synthetic construct
  misc_feature 1..19: note = siRNA sense sequence
  source 1..19: mol_type = other RNA
aggtctacctctactcaat

SEQ ID NO: 47839 - RNA, 19 nt, synthetic construct
  misc_feature 1..19: note = siRNA antisense sequence
  source 1..19: mol_type = other RNA
attgagtagaggtagacct

SEQ ID NO: 47840 - RNA, 19 nt, synthetic construct
  misc_feature 1..19: note = siRNA sense sequence
  source 1..19: mol_type = other RNA
ggtctacctctactcaata

SEQ ID NO: 47841 - RNA, 19 nt, synthetic construct
  misc_feature 1..19: note = siRNA antisense sequence
  source 1..19: mol_type = other RNA
tattgagtagaggtagacc

SEQ ID NO: 47842 - RNA, 19 nt, synthetic construct
  misc_feature 1..19: note = siRNA sense sequence
  source 1..19: mol_type = other RNA
gtctacctctactcaatat

SEQ ID NO: 47843 - RNA, 19 nt, synthetic construct
  misc_feature 1..19: note = siRNA antisense sequence
  source 1..19: mol_type = other RNA
atattgagtagaggtagac

SEQ ID NO: 47844 - RNA, 19 nt, synthetic construct
  misc_feature 1..19: note = siRNA sense sequence
  source 1..19: mol_type = other RNA
tctacctctactcaatata

SEQ ID NO: 47845 - RNA, 19 nt, synthetic construct
  misc_feature 1..19: note = siRNA antisense sequence
  source 1..19: mol_type = other RNA
tatattgagtagaggtaga

SEQ ID NO: 47846 - RNA, 19 nt, synthetic construct
  misc_feature 1..19: note = siRNA sense sequence
  source 1..19: mol_type = other RNA
ttctagaatgtccatgtat

SEQ ID NO: 47847 - RNA, 19 nt, synthetic construct
  misc_feature 1..19: note = siRNA antisense sequence
  source 1..19: mol_type = other RNA
atacatggacattctagaa

SEQ ID NO: 47848 - RNA, 19 nt, synthetic construct
  misc_feature 1..19: note = siRNA sense sequence
  source 1..19: mol_type = other RNA
tctagaatgtccatgtatt

SEQ ID NO: 47849 - RNA, 19 nt, synthetic construct
  misc_feature 1..19: note = siRNA antisense sequence
  source 1..19: mol_type = other RNA
aatacatggacattctaga

SEQ ID NO: 47850 - RNA, 19 nt, synthetic construct
  misc_feature 1..19: note = siRNA sense sequence
  source 1..19: mol_type = other RNA
ctagaatgtccatgtattt

SEQ ID NO: 47851 - RNA, 19 nt, synthetic construct
  misc_feature 1..19: note = siRNA antisense sequence
  source 1..19: mol_type = other RNA
aaatacatggacattctag

SEQ ID NO: 47852 - RNA, 19 nt, synthetic construct
  misc_feature 1..19: note = siRNA sense sequence
  source 1..19: mol_type = other RNA
gaatgtccatgtattttca

SEQ ID NO: 47853 - RNA, 19 nt, synthetic construct
  misc_feature 1..19: note = siRNA antisense sequence
  source 1..19: mol_type = other RNA
tgaaaatacatggacattc

SEQ ID NO: 47854 - RNA, 19 nt, synthetic construct
  misc_feature 1..19: note = siRNA sense sequence
  source 1..19: mol_type = other RNA
atgtccatgtattttcagt

SEQ ID NO: 47855 - RNA, 19 nt, synthetic construct
  misc_feature 1..19: note = siRNA antisense sequence
  source 1..19: mol_type = other RNA
actgaaaatacatggacat

SEQ ID NO: 47856 - RNA, 19 nt, synthetic construct
  misc_feature 1..19: note = siRNA sense sequence
  source 1..19: mol_type = other RNA
tgtccatgtattttcagta

SEQ ID NO: 47857 - RNA, 19 nt, synthetic construct
  misc_feature 1..19: note = siRNA antisense sequence
  source 1..19: mol_type = other RNA
tactgaaaatacatggaca

SEQ ID NO: 47858 - RNA, 19 nt, synthetic construct
  misc_feature 1..19: note = siRNA sense sequence
  source 1..19: mol_type = other RNA
gtccatgtattttcagtac

SEQ ID NO: 47859 - RNA, 19 nt, synthetic construct
  misc_feature 1..19: note = siRNA antisense sequence
  source 1..19: mol_type = other RNA
gtactgaaaatacatggac

SEQ ID NO: 47860 - RNA, 19 nt, synthetic construct
  misc_feature 1..19: note = siRNA sense sequence
  source 1..19: mol_type = other RNA
tccatgtattttcagtact

SEQ ID NO: 47861 - RNA, 19 nt, synthetic construct
  misc_feature 1..19: note = siRNA antisense sequence
  source 1..19: mol_type = other RNA
agtactgaaaatacatgga

SEQ ID NO: 47862 - RNA, 19 nt, synthetic construct
  misc_feature 1..19: note = siRNA sense sequence
  source 1..19: mol_type = other RNA
ccatgtattttcagtactt

SEQ ID NO: 47863 - RNA, 19 nt, synthetic construct
  misc_feature 1..19: note = siRNA antisense sequence
  source 1..19: mol_type = other RNA
aagtactgaaaatacatgg

SEQ ID NO: 47864 - RNA, 19 nt, synthetic construct
  misc_feature 1..19: note = siRNA sense sequence
  source 1..19: mol_type = other RNA
catgtattttcagtacttg

SEQ ID NO: 47865 - RNA, 19 nt, synthetic construct
  misc_feature 1..19: note = siRNA antisense sequence
  source 1..19: mol_type = other RNA
caagtactgaaaatacatg

SEQ ID NO: 47866 - RNA, 19 nt, synthetic construct
  misc_feature 1..19: note = siRNA sense sequence
  source 1..19: mol_type = other RNA
tttcagtacttgatttacc

SEQ ID NO: 47867 - RNA, 19 nt, synthetic construct
  misc_feature 1..19: note = siRNA antisense sequence
  source 1..19: mol_type = other RNA
ggtaaatcaagtactgaaa

SEQ ID NO: 47868 - RNA, 19 nt, synthetic construct
  misc_feature 1..19: note = siRNA sense sequence
  source 1..19: mol_type = other RNA
ttcagtacttgatttaccg

SEQ ID NO: 47869 - RNA, 19 nt, synthetic construct
  misc_feature 1..19: note = siRNA antisense sequence
  source 1..19: mol_type = other RNA
cggtaaatcaagtactgaa

SEQ ID NO: 47870 - RNA, 19 nt, synthetic construct
  misc_feature 1..19: note = siRNA sense sequence
  source 1..19: mol_type = other RNA
tcagtacttgatttaccgt

SEQ ID NO: 47871 - RNA, 19 nt, synthetic construct
  misc_feature 1..19: note = siRNA antisense sequence
  source 1..19: mol_type = other RNA
acggtaaatcaagtactga

SEQ ID NO: 47872 - RNA, 19 nt, synthetic construct
  misc_feature 1..19: note = siRNA sense sequence
  source 1..19: mol_type = other RNA
cagtacttgatttaccgtt

SEQ ID NO: 47873 - RNA, 19 nt, synthetic construct
  misc_feature 1..19: note = siRNA antisense sequence
  source 1..19: mol_type = other RNA
aacggtaaatcaagtactg

SEQ ID NO: 47874 - RNA, 19 nt, synthetic construct
  misc_feature 1..19: note = siRNA sense sequence
  source 1..19: mol_type = other RNA
agtacttgatttaccgtta

SEQ ID NO: 47875 - RNA, 19 nt, synthetic construct
  misc_feature 1..19: note = siRNA antisense sequence
  source 1..19: mol_type = other RNA
taacggtaaatcaagtact

SEQ ID NO: 47876 - RNA, 19 nt, synthetic construct
  misc_feature 1..19: note = siRNA sense sequence
  source 1..19: mol_type = other RNA
gtacttgatttaccgttat

SEQ ID NO: 47877 - RNA, 19 nt, synthetic construct
  misc_feature 1..19: note = siRNA antisense sequence
  source 1..19: mol_type = other RNA
ataacggtaaatcaagtac

SEQ ID NO: 47878 - RNA, 19 nt, synthetic construct
  misc_feature 1..19: note = siRNA sense sequence
  source 1..19: mol_type = other RNA
tacttgatttaccgttatc

SEQ ID NO: 47879 - RNA, 19 nt, synthetic construct
  misc_feature 1..19: note = siRNA antisense sequence
  source 1..19: mol_type = other RNA
gataacggtaaatcaagta

SEQ ID NO: 47880 - RNA, 19 nt, synthetic construct
  misc_feature 1..19: note = siRNA sense sequence
  source 1..19: mol_type = other RNA
acttgatttaccgttatcg

SEQ ID NO: 47881 - RNA, 19 nt, synthetic construct
  misc_feature 1..19: note = siRNA antisense sequence
  source 1..19: mol_type = other RNA
cgataacggtaaatcaagt

SEQ ID NO: 47882 - RNA, 19 nt, synthetic construct
  misc_feature 1..19: note = siRNA sense sequence
  source 1..19: mol_type = other RNA
cttgatttaccgttatcga

SEQ ID NO: 47883 - RNA, 19 nt, synthetic construct
  misc_feature 1..19: note = siRNA antisense sequence
  source 1..19: mol_type = other RNA
tcgataacggtaaatcaag

SEQ ID NO: 47884 - RNA, 19 nt, synthetic construct
  misc_feature 1..19: note = siRNA sense sequence
  source 1..19: mol_type = other RNA
ttgatttaccgttatcgaa

SEQ ID NO: 47885 - RNA, 19 nt, synthetic construct
  misc_feature 1..19: note = siRNA antisense sequence
  source 1..19: mol_type = other RNA
ttcgataacggtaaatcaa

SEQ ID NO: 47886 - RNA, 19 nt, synthetic construct
  misc_feature 1..19: note = siRNA sense sequence
  source 1..19: mol_type = other RNA
tgatttaccgttatcgaag

SEQ ID NO: 47887 - RNA, 19 nt, synthetic construct
  misc_feature 1..19: note = siRNA antisense sequence
  source 1..19: mol_type = other RNA
cttcgataacggtaaatca

SEQ ID NO: 47888 - RNA, 19 nt, synthetic construct
  misc_feature 1..19: note = siRNA sense sequence
  source 1..19: mol_type = other RNA
gatttaccgttatcgaagc

SEQ ID NO: 47889 - RNA, 19 nt, synthetic construct
  misc_feature 1..19: note = siRNA antisense sequence
  source 1..19: mol_type = other RNA
gcttcgataacggtaaatc

SEQ ID NO: 47890 - RNA, 19 nt, synthetic construct
  misc_feature 1..19: note = siRNA sense sequence
  source 1..19: mol_type = other RNA
atttaccgttatcgaagct

SEQ ID NO: 47891 - RNA, 19 nt, synthetic construct
  misc_feature 1..19: note = siRNA antisense sequence
  source 1..19: mol_type = other RNA
agcttcgataacggtaaat

SEQ ID NO: 47892 - RNA, 19 nt, synthetic construct
  misc_feature 1..19: note = siRNA sense sequence
  source 1..19: mol_type = other RNA
tttaccgttatcgaagcta

SEQ ID NO: 47893 - RNA, 19 nt, synthetic construct
  misc_feature 1..19: note = siRNA antisense sequence
  source 1..19: mol_type = other RNA
tagcttcgataacggtaaa

SEQ ID NO: 47894 - RNA, 19 nt, synthetic construct
  misc_feature 1..19: note = siRNA sense sequence
  source 1..19: mol_type = other RNA
ttaccgttatcgaagctac

SEQ ID NO: 47895 - RNA, 19 nt, synthetic construct
  misc_feature 1..19: note = siRNA antisense sequence
  source 1..19: mol_type = other RNA
gtagcttcgataacggtaa

SEQ ID NO: 47896 - RNA, 19 nt, synthetic construct
  misc_feature 1..19: note = siRNA sense sequence
  source 1..19: mol_type = other RNA
taccgttatcgaagctact

SEQ ID NO: 47897 - RNA, 19 nt, synthetic construct
  misc_feature 1..19: note = siRNA antisense sequence
  source 1..19: mol_type = other RNA
agtagcttcgataacggta

SEQ ID NO: 47898 - RNA, 19 nt, synthetic construct
  misc_feature 1..19: note = siRNA sense sequence
  source 1..19: mol_type = other RNA
accgttatcgaagctacta

SEQ ID NO: 47899 - RNA, 19 nt, synthetic construct
  misc_feature 1..19: note = siRNA antisense sequence
  source 1..19: mol_type = other RNA
tagtagcttcgataacggt

SEQ ID NO: 47900 - RNA, 19 nt, synthetic construct
  misc_feature 1..19: note = siRNA sense sequence
  source 1..19: mol_type = other RNA
tatcatttgtaatcctctc

SEQ ID NO: 47901 - RNA, 19 nt, synthetic construct
  misc_feature 1..19: note = siRNA antisense sequence
  source 1..19: mol_type = other RNA
gagaggattacaaatgata

SEQ ID NO: 47902 - RNA, 19 nt, synthetic construct
  misc_feature 1..19: note = siRNA sense sequence
  source 1..19: mol_type = other RNA
atcatttgtaatcctctct

SEQ ID NO: 47903 - RNA, 19 nt, synthetic construct
  misc_feature 1..19: note = siRNA antisense sequence
  source 1..19: mol_type = other RNA
agagaggattacaaatgat

SEQ ID NO: 47904 - RNA, 19 nt, synthetic construct
  misc_feature 1..19: note = siRNA sense sequence
  source 1..19: mol_type = other RNA
tcatttgtaatcctctctc

SEQ ID NO: 47905 - RNA, 19 nt, synthetic construct
  misc_feature 1..19: note = siRNA antisense sequence
  source 1..19: mol_type = other RNA
gagagaggattacaaatga

SEQ ID NO: 47906 - RNA, 19 nt, synthetic construct
  misc_feature 1..19: note = siRNA sense sequence
  source 1..19: mol_type = other RNA
ttgtaatcctctctccttt

SEQ ID NO: 47907 - RNA, 19 nt, synthetic construct
  misc_feature 1..19: note = siRNA antisense sequence
  source 1..19: mol_type = other RNA
aaaggagagaggattacaa

SEQ ID NO: 47908 - RNA, 19 nt, synthetic construct
  misc_feature 1..19: note = siRNA sense sequence
  source 1..19: mol_type = other RNA
tgtaatcctctctcctttt

SEQ ID NO: 47909 - RNA, 19 nt, synthetic construct
  misc_feature 1..19: note = siRNA antisense sequence
  source 1..19: mol_type = other RNA
aaaaggagagaggattaca

SEQ ID NO: 47910 - RNA, 19 nt, synthetic construct
  misc_feature 1..19: note = siRNA sense sequence
  source 1..19: mol_type = other RNA
ttactttctttagattccc

SEQ ID NO: 47911 - RNA, 19 nt, synthetic construct
  misc_feature 1..19: note = siRNA antisense sequence
  source 1..19: mol_type = other RNA
gggaatctaaagaaagtaa

SEQ ID NO: 47912 - RNA, 19 nt, synthetic construct
  misc_feature 1..19: note = siRNA sense sequence
  source 1..19: mol_type = other RNA
tactttctttagattccct

SEQ ID NO: 47913 - RNA, 19 nt, synthetic construct
  misc_feature 1..19: note = siRNA antisense sequence
  source 1..19: mol_type = other RNA
agggaatctaaagaaagta

SEQ ID NO: 47914 - RNA, 19 nt, synthetic construct
  misc_feature 1..19: note = siRNA sense sequence
  source 1..19: mol_type = other RNA
ctttctttagattccctcc

SEQ ID NO: 47915 - RNA, 19 nt, synthetic construct
  misc_feature 1..19: note = siRNA antisense sequence
  source 1..19: mol_type = other RNA
ggagggaatctaaagaaag

SEQ ID NO: 47916 - RNA, 19 nt, synthetic construct
  misc_feature 1..19: note = siRNA sense sequence
  source 1..19: mol_type = other RNA
ctttagattccctccaatt

SEQ ID NO: 47917 - RNA, 19 nt, synthetic construct
  misc_feature 1..19: note = siRNA antisense sequence
  source 1..19: mol_type = other RNA
aattggagggaatctaaag

SEQ ID NO: 47918 - RNA, 19 nt, synthetic construct
  misc_feature 1..19: note = siRNA sense sequence
  source 1..19: mol_type = other RNA
tttagattccctccaattt

SEQ ID NO: 47919 - RNA, 19 nt, synthetic construct
  misc_feature 1..19: note = siRNA antisense sequence
  source 1..19: mol_type = other RNA
aaattggagggaatctaaa

SEQ ID NO: 47920 - RNA, 19 nt, synthetic construct
  misc_feature 1..19: note = siRNA sense sequence
  source 1..19: mol_type = other RNA
ttagattccctccaattta

SEQ ID NO: 47921 - RNA, 19 nt, synthetic construct
  misc_feature 1..19: note = siRNA antisense sequence
  source 1..19: mol_type = other RNA
taaattggagggaatctaa

SEQ ID NO: 47922 - RNA, 19 nt, synthetic construct
  misc_feature 1..19: note = siRNA sense sequence
  source 1..19: mol_type = other RNA
tagattccctccaatttac

SEQ ID NO: 47923 - RNA, 19 nt, synthetic construct
  misc_feature 1..19: note = siRNA antisense sequence
  source 1..19: mol_type = other RNA
gtaaattggagggaatcta

SEQ ID NO: 47924 - RNA, 19 nt, synthetic construct
  misc_feature 1..19: note = siRNA sense sequence
  source 1..19: mol_type = other RNA
ttcttccatctgcagtttt

SEQ ID NO: 47925 - RNA, 19 nt, synthetic construct
  misc_feature 1..19: note = siRNA antisense sequence
  source 1..19: mol_type = other RNA
aaaactgcagatggaagaa

SEQ ID NO: 47926 - RNA, 19 nt, synthetic construct
  misc_feature 1..19: note = siRNA sense sequence
  source 1..19: mol_type = other RNA
tcttccatctgcagttttc

SEQ ID NO: 47927 - RNA, 19 nt, synthetic construct
  misc_feature 1..19: note = siRNA antisense sequence
  source 1..19: mol_type = other RNA
gaaaactgcagatggaaga

SEQ ID NO: 47928 - RNA, 19 nt, synthetic construct
  misc_feature 1..19: note = siRNA sense sequence
  source 1..19: mol_type = other RNA
tgcagttttccttatggtg

SEQ ID NO: 47929 - RNA, 19 nt, synthetic construct
  misc_feature 1..19: note = siRNA antisense sequence
  source 1..19: mol_type = other RNA
caccataaggaaaactgca

SEQ ID NO: 47930 - RNA, 19 nt, synthetic construct
  misc_feature 1..19: note = siRNA sense sequence
  source 1..19: mol_type = other RNA
gcagttttccttatggtga

SEQ ID NO: 47931 - RNA, 19 nt, synthetic construct
  misc_feature 1..19: note = siRNA antisense sequence
  source 1..19: mol_type = other RNA
tcaccataaggaaaactgc

SEQ ID NO: 47932 - RNA, 19 nt, synthetic construct
  misc_feature 1..19: note = siRNA sense sequence
  source 1..19: mol_type = other RNA
cagttttccttatggtgaa

SEQ ID NO: 47933 - RNA, 19 nt, synthetic construct
  misc_feature 1..19: note = siRNA antisense sequence
  source 1..19: mol_type = other RNA
ttcaccataaggaaaactg

SEQ ID NO: 47934 - RNA, 19 nt, synthetic construct
  misc_feature 1..19: note = siRNA sense sequence
  source 1..19: mol_type = other RNA
taactcagtctgtggttga

SEQ ID NO: 47935 - RNA, 19 nt, synthetic construct
  misc_feature 1..19: note = siRNA antisense sequence
  source 1..19: mol_type = other RNA
tcaaccacagactgagtta

SEQ ID NO: 47936 - RNA, 19 nt, synthetic construct
  misc_feature 1..19: note = siRNA sense sequence
  source 1..19: mol_type = other RNA
aactcagtctgtggttgaa

SEQ ID NO: 47937 - RNA, 19 nt, synthetic construct
  misc_feature 1..19: note = siRNA antisense sequence
  source 1..19: mol_type = other RNA
ttcaaccacagactgagtt

SEQ ID NO: 47938 - RNA, 19 nt, synthetic construct
  misc_feature 1..19: note = siRNA sense sequence
  source 1..19: mol_type = other RNA
actcagtctgtggttgaat

SEQ ID NO: 47939 - RNA, 19 nt, synthetic construct
  misc_feature 1..19: note = siRNA antisense sequence
  source 1..19: mol_type = other RNA
attcaaccacagactgagt

SEQ ID NO: 47940 - RNA, 19 nt, synthetic construct
  misc_feature 1..19: note = siRNA sense sequence
  source 1..19: mol_type = other RNA
ctcagtctgtggttgaatt

SEQ ID NO: 47941 - RNA, 19 nt, synthetic construct
  misc_feature 1..19: note = siRNA antisense sequence
  source 1..19: mol_type = other RNA
aattcaaccacagactgag

SEQ ID NO: 47942 - RNA, 19 nt, synthetic construct
  misc_feature 1..19: note = siRNA sense sequence
  source 1..19: mol_type = other RNA
ctgtggttgaatttcattt

SEQ ID NO: 47943 - RNA, 19 nt, synthetic construct
  misc_feature 1..19: note = siRNA antisense sequence
  source 1..19: mol_type = other RNA
aaatgaaattcaaccacag

SEQ ID NO: 47944 - RNA, 19 nt, synthetic construct
  misc_feature 1..19: note = siRNA sense sequence
  source 1..19: mol_type = other RNA
tttcctgtgtgttctctta

SEQ ID NO: 47945 - RNA, 19 nt, synthetic construct
  misc_feature 1..19: note = siRNA antisense sequence
  source 1..19: mol_type = other RNA
taagagaacacacaggaaa

SEQ ID NO: 47946 - RNA, 19 nt, synthetic construct
  misc_feature 1..19: note = siRNA sense sequence
  source 1..19: mol_type = other RNA
ttcctgtgtgttctcttat

SEQ ID NO: 47947 - RNA, 19 nt, synthetic construct
  misc_feature 1..19: note = siRNA antisense sequence
  source 1..19: mol_type = other RNA
ataagagaacacacaggaa

SEQ ID NO: 47948 - RNA, 19 nt, synthetic construct
  misc_feature 1..19: note = siRNA sense sequence
  source 1..19: mol_type = other RNA
tcctgtgtgttctcttatc

SEQ ID NO: 47949 - RNA, 19 nt, synthetic construct
  misc_feature 1..19: note = siRNA antisense sequence
  source 1..19: mol_type = other RNA
gataagagaacacacagga

SEQ ID NO: 47950 - RNA, 19 nt, synthetic construct
  misc_feature 1..19: note = siRNA sense sequence
  source 1..19: mol_type = other RNA
cctgtgtgttctcttatct

SEQ ID NO: 47951 - RNA, 19 nt, synthetic construct
  misc_feature 1..19: note = siRNA antisense sequence
  source 1..19: mol_type = other RNA
agataagagaacacacagg

SEQ ID NO: 47952 - RNA, 19 nt, synthetic construct
  misc_feature 1..19: note = siRNA sense sequence
  source 1..19: mol_type = other RNA
ctgtgtgttctcttatctc

SEQ ID NO: 47953 - RNA, 19 nt, synthetic construct
  misc_feature 1..19: note = siRNA antisense sequence
  source 1..19: mol_type = other RNA
gagataagagaacacacag

SEQ ID NO: 47954 - RNA, 19 nt, synthetic construct
  misc_feature 1..19: note = siRNA sense sequence
  source 1..19: mol_type = other RNA
tgtgtgttctcttatctca

SEQ ID NO: 47955 - RNA, 19 nt, synthetic construct
  misc_feature 1..19: note = siRNA antisense sequence
  source 1..19: mol_type = other RNA
tgagataagagaacacaca

SEQ ID NO: 47956 - RNA, 19 nt, synthetic construct
  misc_feature 1..19: note = siRNA sense sequence
  source 1..19: mol_type = other RNA
gtgtgttctcttatctcat

SEQ ID NO: 47957 - RNA, 19 nt, synthetic construct
  misc_feature 1..19: note = siRNA antisense sequence
  source 1..19: mol_type = other RNA
atgagataagagaacacac

SEQ ID NO: 47958 - RNA, 19 nt, synthetic construct
  misc_feature 1..19: note = siRNA sense sequence
  source 1..19: mol_type = other RNA
tgtgttctcttatctcatt

SEQ ID NO: 47959 - RNA, 19 nt, synthetic construct
  misc_feature 1..19: note = siRNA antisense sequence
  source 1..19: mol_type = other RNA
aatgagataagagaacaca

SEQ ID NO: 47960 - RNA, 19 nt, synthetic construct
  misc_feature 1..19: note = siRNA sense sequence
  source 1..19: mol_type = other RNA
gtgttctcttatctcattc

SEQ ID NO: 47961 - RNA, 19 nt, synthetic construct
  misc_feature 1..19: note = siRNA antisense sequence
  source 1..19: mol_type = other RNA
gaatgagataagagaacac

SEQ ID NO: 47962 - RNA, 19 nt, synthetic construct
  misc_feature 1..19: note = siRNA sense sequence
  source 1..19: mol_type = other RNA
tgttctcttatctcattca

SEQ ID NO: 47963 - RNA, 19 nt, synthetic construct
  misc_feature 1..19: note = siRNA antisense sequence
  source 1..19: mol_type = other RNA
tgaatgagataagagaaca

SEQ ID NO: 47964 - RNA, 19 nt, synthetic construct
  misc_feature 1..19: note = siRNA sense sequence
  source 1..19: mol_type = other RNA
gttctcttatctcattcat

SEQ ID NO: 47965 - RNA, 19 nt, synthetic construct
  misc_feature 1..19: note = siRNA antisense sequence
  source 1..19: mol_type = other RNA
atgaatgagataagagaac

SEQ ID NO: 47966 - RNA, 19 nt, synthetic construct
  misc_feature 1..19: note = siRNA sense sequence
  source 1..19: mol_type = other RNA
gaatccttctgttaaatgt

SEQ ID NO: 47967 - RNA, 19 nt, synthetic construct
  misc_feature 1..19: note = siRNA antisense sequence
  source 1..19: mol_type = other RNA
acatttaacagaaggattc

SEQ ID NO: 47968 - RNA, 19 nt, synthetic construct
  misc_feature 1..19: note = siRNA sense sequence
  source 1..19: mol_type = other RNA
aatccttctgttaaatgtc

SEQ ID NO: 47969 - RNA, 19 nt, synthetic construct
  misc_feature 1..19: note = siRNA antisense sequence
  source 1..19: mol_type = other RNA
gacatttaacagaaggatt

SEQ ID NO: 47970 - RNA, 19 nt, synthetic construct
  misc_feature 1..19: note = siRNA sense sequence
  source 1..19: mol_type = other RNA
atccttctgttaaatgtct

SEQ ID NO: 47971 - RNA, 19 nt, synthetic construct
  misc_feature 1..19: note = siRNA antisense sequence
  source 1..19: mol_type = other RNA
agacatttaacagaaggat

SEQ ID NO: 47972 - RNA, 19 nt, synthetic construct
  misc_feature 1..19: note = siRNA sense sequence
  source 1..19: mol_type = other RNA
ccttctgttaaatgtcttc

SEQ ID NO: 47973 - RNA, 19 nt, synthetic construct
  misc_feature 1..19: note = siRNA antisense sequence
  source 1..19: mol_type = other RNA
gaagacatttaacagaagg

SEQ ID NO: 47974 - RNA, 19 nt, synthetic construct
  misc_feature 1..19: note = siRNA sense sequence
  source 1..19: mol_type = other RNA
ctgttaaatgtcttcaact

SEQ ID NO: 47975 - RNA, 19 nt, synthetic construct
  misc_feature 1..19: note = siRNA antisense sequence
  source 1..19: mol_type = other RNA
agttgaagacatttaacag

SEQ ID NO: 47976 - RNA, 19 nt, synthetic construct
  misc_feature 1..19: note = siRNA sense sequence
  source 1..19: mol_type = other RNA
taaatgtcttcaacttctg

SEQ ID NO: 47977 - RNA, 19 nt, synthetic construct
  misc_feature 1..19: note = siRNA antisense sequence
  source 1..19: mol_type = other RNA
cagaagttgaagacattta

SEQ ID NO: 47978 - RNA, 19 nt, synthetic construct
  misc_feature 1..19: note = siRNA sense sequence
  source 1..19: mol_type = other RNA
aaatgtcttcaacttctga

SEQ ID NO: 47979 - RNA, 19 nt, synthetic construct
  misc_feature 1..19: note = siRNA antisense sequence
  source 1..19: mol_type = other RNA
tcagaagttgaagacattt

SEQ ID NO: 47980 - RNA, 19 nt, synthetic construct
  misc_feature 1..19: note = siRNA sense sequence
  source 1..19: mol_type = other RNA
aactcttgccttaggtgga

SEQ ID NO: 47981 - RNA, 19 nt, synthetic construct
  misc_feature 1..19: note = siRNA antisense sequence
  source 1..19: mol_type = other RNA
tccacctaaggcaagagtt

SEQ ID NO: 47982 - RNA, 19 nt, synthetic construct
  misc_feature 1..19: note = siRNA sense sequence
  source 1..19: mol_type = other RNA
actcttgccttaggtggaa

SEQ ID NO: 47983 - RNA, 19 nt, synthetic construct
  misc_feature 1..19: note = siRNA antisense sequence
  source 1..19: mol_type = other RNA
ttccacctaaggcaagagt

SEQ ID NO: 47984 - RNA, 19 nt, synthetic construct
  misc_feature 1..19: note = siRNA sense sequence
  source 1..19: mol_type = other RNA
aaagctaattacccatgct

SEQ ID NO: 47985 - RNA, 19 nt, synthetic construct
  misc_feature 1..19: note = siRNA antisense sequence
  source 1..19: mol_type = other RNA
agcatgggtaattagcttt

SEQ ID NO: 47986 - RNA, 19 nt, synthetic construct
  misc_feature 1..19: note = siRNA sense sequence
  source 1..19: mol_type = other RNA
tcacttcatctgcctgcta

SEQ ID NO: 47987 - RNA, 19 nt, synthetic construct
  misc_feature 1..19: note = siRNA antisense sequence
  source 1..19: mol_type = other RNA
tagcaggcagatgaagtga

SEQ ID NO: 47988 - RNA, 19 nt, synthetic construct
  misc_feature 1..19: note = siRNA sense sequence
  source 1..19: mol_type = other RNA
acttcatctgcctgctaag

SEQ ID NO: 47989 - RNA, 19 nt, synthetic construct
  misc_feature 1..19: note = siRNA antisense sequence
  source 1..19: mol_type = other RNA
cttagcaggcagatgaagt

SEQ ID NO: 47990 - RNA, 19 nt, synthetic construct
  misc_feature 1..19: note = siRNA sense sequence
  source 1..19: mol_type = other RNA
cttcatctgcctgctaaga

SEQ ID NO: 47991 - RNA, 19 nt, synthetic construct
  misc_feature 1..19: note = siRNA antisense sequence
  source 1..19: mol_type = other RNA
tcttagcaggcagatgaag

SEQ ID NO: 47992 - RNA, 19 nt, synthetic construct
  misc_feature 1..19: note = siRNA sense sequence
  source 1..19: mol_type = other RNA
tctgcctgctaagatgact

SEQ ID NO: 47993 - RNA, 19 nt, synthetic construct
  misc_feature 1..19: note = siRNA antisense sequence
  source 1..19: mol_type = other RNA
agtcatcttagcaggcaga

SEQ ID NO: 47994 - RNA, 19 nt, synthetic construct
  misc_feature 1..19: note = siRNA sense sequence
  source 1..19: mol_type = other RNA
ctgcctgctaagatgactg

SEQ ID NO: 47995 - RNA, 19 nt, synthetic construct
  misc_feature 1..19: note = siRNA antisense sequence
  source 1..19: mol_type = other RNA
cagtcatcttagcaggcag

SEQ ID NO: 47996 - RNA, 19 nt, synthetic construct
  misc_feature 1..19: note = siRNA sense sequence
  source 1..19: mol_type = other RNA
tgcctgctaagatgactgt

SEQ ID NO: 47997 - RNA, 19 nt, synthetic construct
  misc_feature 1..19: note = siRNA antisense sequence
  source 1..19: mol_type = other RNA
acagtcatcttagcaggca

SEQ ID NO: 47998 - RNA, 19 nt, synthetic construct
  misc_feature 1..19: note = siRNA sense sequence
  source 1..19: mol_type = other RNA
gactgttttaagaaggtta

SEQ ID NO: 47999 - RNA, 19 nt, synthetic construct
  misc_feature 1..19: note = siRNA antisense sequence
  source 1..19: mol_type = other RNA
taaccttcttaaaacagtc

SEQ ID NO: 48000 - RNA, 19 nt, synthetic construct
  misc_feature 1..19: note = siRNA sense sequence
  source 1..19: mol_type = other RNA
aagttaataatgatcctgc

SEQ ID NO: 48001 - RNA, 19 nt, synthetic construct
  misc_feature 1..19: note = siRNA antisense sequence
  source 1..19: mol_type = other RNA
gcaggatcattattaactt

SEQ ID NO: 48002 - RNA, 19 nt, synthetic construct
  misc_feature 1..19: note = siRNA sense sequence
  source 1..19: mol_type = other RNA
agttaataatgatcctgca

SEQ ID NO: 48003 - RNA, 19 nt, synthetic construct
  misc_feature 1..19: note = siRNA antisense sequence
  source 1..19: mol_type = other RNA
tgcaggatcattattaact

SEQ ID NO: 48004 - RNA, 19 nt, synthetic construct
  misc_feature 1..19: note = siRNA sense sequence
  source 1..19: mol_type = other RNA
gttaataatgatcctgcaa

SEQ ID NO: 48005 - RNA, 19 nt, synthetic construct
  misc_feature 1..19: note = siRNA antisense sequence
  source 1..19: mol_type = other RNA
ttgcaggatcattattaac

SEQ ID NO: 48006 - RNA, 19 nt, synthetic construct
  misc_feature 1..19: note = siRNA sense sequence
  source 1..19: mol_type = other RNA
taataatgatcctgcaaag

SEQ ID NO: 48007 - RNA, 19 nt, synthetic construct
  misc_feature 1..19: note = siRNA antisense sequence
  source 1..19: mol_type = other RNA
ctttgcaggatcattatta

SEQ ID NO: 48008 - RNA, 19 nt, synthetic construct
  misc_feature 1..19: note = siRNA sense sequence
  source 1..19: mol_type = other RNA
ataatgatcctgcaaagaa

SEQ ID NO: 48009 - RNA, 19 nt, synthetic construct
  misc_feature 1..19: note = siRNA antisense sequence
  source 1..19: mol_type = other RNA
ttctttgcaggatcattat

SEQ ID NO: 48010 - RNA, 19 nt, synthetic construct
  misc_feature 1..19: note = siRNA sense sequence
  source 1..19: mol_type = other RNA
taatgatcctgcaaagaat

SEQ ID NO: 48011 - RNA, 19 nt, synthetic construct
  misc_feature 1..19: note = siRNA antisense sequence
  source 1..19: mol_type = other RNA
attctttgcaggatcatta

SEQ ID NO: 48012 - RNA, 19 nt, synthetic construct
  misc_feature 1..19: note = siRNA sense sequence
  source 1..19: mol_type = other RNA
aatgatcctgcaaagaatg

SEQ ID NO: 48013 - RNA, 19 nt, synthetic construct
  misc_feature 1..19: note = siRNA antisense sequence
  source 1..19: mol_type = other RNA
cattctttgcaggatcatt

SEQ ID NO: 48014 - RNA, 19 nt, synthetic construct
  misc_feature 1..19: note = siRNA sense sequence
  source 1..19: mol_type = other RNA
atgatcctgcaaagaatgg

SEQ ID NO: 48015 - RNA, 19 nt, synthetic construct
  misc_feature 1..19: note = siRNA antisense sequence
  source 1..19: mol_type = other RNA
ccattctttgcaggatcat

SEQ ID NO: 48016 - RNA, 19 nt, synthetic construct
  misc_feature 1..19: note = siRNA sense sequence
  source 1..19: mol_type = other RNA
tgatcctgcaaagaatgga

SEQ ID NO: 48017 - RNA, 19 nt, synthetic construct
  misc_feature 1..19: note = siRNA antisense sequence
  source 1..19: mol_type = other RNA
tccattctttgcaggatca

SEQ ID NO: 48018 - RNA, 19 nt, synthetic construct
  misc_feature 1..19: note = siRNA sense sequence
  source 1..19: mol_type = other RNA
tcctgcaaagaatggattg

SEQ ID NO: 48019 - RNA, 19 nt, synthetic construct
  misc_feature 1..19: note = siRNA antisense sequence
  source 1..19: mol_type = other RNA
caatccattctttgcagga

SEQ ID NO: 48020 - RNA, 19 nt, synthetic construct
  misc_feature 1..19: note = siRNA sense sequence
  source 1..19: mol_type = other RNA
cctgcaaagaatggattgg

SEQ ID NO: 48021 - RNA, 19 nt, synthetic construct
  misc_feature 1..19: note = siRNA antisense sequence
  source 1..19: mol_type = other RNA
ccaatccattctttgcagg

SEQ ID NO: 48022 - RNA, 19 nt, synthetic construct
  misc_feature 1..19: note = siRNA sense sequence
  source 1..19: mol_type = other RNA
tgcaaagaatggattggat

SEQ ID NO: 48023 - RNA, 19 nt, synthetic construct
  misc_feature 1..19: note = siRNA antisense sequence
  source 1..19: mol_type = other RNA
atccaatccattctttgca

SEQ ID NO: 48024 - RNA, 19 nt, synthetic construct
  misc_feature 1..19: note = siRNA sense sequence
  source 1..19: mol_type = other RNA
gcaaagaatggattggata

SEQ ID NO: 48025 - RNA, 19 nt, synthetic construct
  misc_feature 1..19: note = siRNA antisense sequence
  source 1..19: mol_type = other RNA
tatccaatccattctttgc

SEQ ID NO: 48026 - RNA, 19 nt, synthetic construct
  misc_feature 1..19: note = siRNA sense sequence
  source 1..19: mol_type = other RNA
caaagaatggattggatat

SEQ ID NO: 48027 - RNA, 19 nt, synthetic construct
  misc_feature 1..19: note = siRNA antisense sequence
  source 1..19: mol_type = other RNA
atatccaatccattctttg

SEQ ID NO: 48028 - RNA, 19 nt, synthetic construct
  misc_feature 1..19: note = siRNA sense sequence
  source 1..19: mol_type = other RNA
tttcatgtacagcttttgc

SEQ ID NO: 48029 - RNA, 19 nt, synthetic construct
  misc_feature 1..19: note = siRNA antisense sequence
  source 1..19: mol_type = other RNA
gcaaaagctgtacatgaaa

SEQ ID NO: 48030 - RNA, 19 nt, synthetic construct
  misc_feature 1..19: note = siRNA sense sequence
  source 1..19: mol_type = other RNA
ttcatgtacagcttttgcc

SEQ ID NO: 48031 - RNA, 19 nt, synthetic construct
  misc_feature 1..19: note = siRNA antisense sequence
  source 1..19: mol_type = other RNA
ggcaaaagctgtacatgaa

SEQ ID NO: 48032 - RNA, 19 nt, synthetic construct
  misc_feature 1..19: note = siRNA sense sequence
  source 1..19: mol_type = other RNA
tcatgtacagcttttgcct

SEQ ID NO: 48033 - RNA, 19 nt, synthetic construct
  misc_feature 1..19: note = siRNA antisense sequence
  source 1..19: mol_type = other RNA
aggcaaaagctgtacatga

SEQ ID NO: 48034 - RNA, 19 nt, synthetic construct
  misc_feature 1..19: note = siRNA sense sequence
  source 1..19: mol_type = other RNA
gtacagcttttgcctcatg

SEQ ID NO: 48035 - RNA, 19 nt, synthetic construct
  misc_feature 1..19: note = siRNA antisense sequence
  source 1..19: mol_type = other RNA
catgaggcaaaagctgtac

SEQ ID NO: 48036 - RNA, 19 nt, synthetic construct
  misc_feature 1..19: note = siRNA sense sequence
  source 1..19: mol_type = other RNA
cttttgcctcatgaatatt

SEQ ID NO: 48037 - RNA, 19 nt, synthetic construct
  misc_feature 1..19: note = siRNA antisense sequence
  source 1..19: mol_type = other RNA
aatattcatgaggcaaaag

SEQ ID NO: 48038 - RNA, 19 nt, synthetic construct
  misc_feature 1..19: note = siRNA sense sequence
  source 1..19: mol_type = other RNA
tttgcctcatgaatattag

SEQ ID NO: 48039 - RNA, 19 nt, synthetic construct
  misc_feature 1..19: note = siRNA antisense sequence
  source 1..19: mol_type = other RNA
ctaatattcatgaggcaaa

SEQ ID NO: 48040 - RNA, 19 nt, synthetic construct
  misc_feature 1..19: note = siRNA sense sequence
  source 1..19: mol_type = other RNA
ttgcctcatgaatattaga

SEQ ID NO: 48041 - RNA, 19 nt, synthetic construct
  misc_feature 1..19: note = siRNA antisense sequence
  source 1..19: mol_type = other RNA
tctaatattcatgaggcaa

SEQ ID NO: 48042 - RNA, 19 nt, synthetic construct
  misc_feature 1..19: note = siRNA sense sequence
  source 1..19: mol_type = other RNA
tgcctcatgaatattagaa

SEQ ID NO: 48043 - RNA, 19 nt, synthetic construct
  misc_feature 1..19: note = siRNA antisense sequence
  source 1..19: mol_type = other RNA
ttctaatattcatgaggca

SEQ ID NO: 48044 - RNA, 19 nt, synthetic construct
  misc_feature 1..19: note = siRNA sense sequence
  source 1..19: mol_type = other RNA
tcatctggctctagttata

SEQ ID NO: 48045 - RNA, 19 nt, synthetic construct
  misc_feature 1..19: note = siRNA antisense sequence
  source 1..19: mol_type = other RNA
tataactagagccagatga

SEQ ID NO: 48046 - RNA, 19 nt, synthetic construct
  misc_feature 1..19: note = siRNA sense sequence
  source 1..19: mol_type = other RNA
ctggctctagttatatggg

SEQ ID NO: 48047 - RNA, 19 nt, synthetic construct
  misc_feature 1..19: note = siRNA antisense sequence
  source 1..19: mol_type = other RNA
cccatataactagagccag

SEQ ID NO: 48048 - RNA, 19 nt, synthetic construct
  misc_feature 1..19: note = siRNA sense sequence
  source 1..19: mol_type = other RNA
agatggaggtaattggaca

SEQ ID NO: 48049 - RNA, 19 nt, synthetic construct
  misc_feature 1..19: note = siRNA antisense sequence
  source 1..19: mol_type = other RNA
tgtccaattacctccatct

SEQ ID NO: 48050 - RNA, 19 nt, synthetic construct
  misc_feature 1..19: note = siRNA sense sequence
  source 1..19: mol_type = other RNA
gatggaggtaattggacat

SEQ ID NO: 48051 - RNA, 19 nt, synthetic construct
  misc_feature 1..19: note = siRNA antisense sequence
  source 1..19: mol_type = other RNA
atgtccaattacctccatc

SEQ ID NO: 48052 - RNA, 19 nt, synthetic construct
  misc_feature 1..19: note = siRNA sense sequence
  source 1..19: mol_type = other RNA
atggaggtaattggacatt

SEQ ID NO: 48053 - RNA, 19 nt, synthetic construct
  misc_feature 1..19: note = siRNA antisense sequence
  source 1..19: mol_type = other RNA
aatgtccaattacctccat

SEQ ID NO: 48054 - RNA, 19 nt, synthetic construct
  misc_feature 1..19: note = siRNA sense sequence
  source 1..19: mol_type = other RNA
tggaggtaattggacattt

SEQ ID NO: 48055 - RNA, 19 nt, synthetic construct
  misc_feature 1..19: note = siRNA antisense sequence
  source 1..19: mol_type = other RNA
aaatgtccaattacctcca

SEQ ID NO: 48056 - RNA, 19 nt, synthetic construct
  misc_feature 1..19: note = siRNA sense sequence
  source 1..19: mol_type = other RNA
ggaggtaattggacattta

SEQ ID NO: 48057 - RNA, 19 nt, synthetic construct
  misc_feature 1..19: note = siRNA antisense sequence
  source 1..19: mol_type = other RNA
taaatgtccaattacctcc

SEQ ID NO: 48058 - RNA, 19 nt, synthetic construct
  misc_feature 1..19: note = siRNA sense sequence
  source 1..19: mol_type = other RNA
taattggacatttacctac

SEQ ID NO: 48059 - RNA, 19 nt, synthetic construct
  misc_feature 1..19: note = siRNA antisense sequence
  source 1..19: mol_type = other RNA
gtaggtaaatgtccaatta

SEQ ID NO: 48060 - RNA, 19 nt, synthetic construct
  misc_feature 1..19: note = siRNA sense sequence
  source 1..19: mol_type = other RNA
aattggacatttacctacc

SEQ ID NO: 48061 - RNA, 19 nt, synthetic construct
  misc_feature 1..19: note = siRNA antisense sequence
  source 1..19: mol_type = other RNA
ggtaggtaaatgtccaatt

SEQ ID NO: 48062 - RNA, 19 nt, synthetic construct
  misc_feature 1..19: note = siRNA sense sequence
  source 1..19: mol_type = other RNA
ggacatttacctacctatt

SEQ ID NO: 48063 - RNA, 19 nt, synthetic construct
  misc_feature 1..19: note = siRNA antisense sequence
  source 1..19: mol_type = other RNA
aataggtaggtaaatgtcc

SEQ ID NO: 48064 - RNA, 19 nt, synthetic construct
  misc_feature 1..19: note = siRNA sense sequence
  source 1..19: mol_type = other RNA
gacatttacctacctattg

SEQ ID NO: 48065 - RNA, 19 nt, synthetic construct
  misc_feature 1..19: note = siRNA antisense sequence
  source 1..19: mol_type = other RNA
caataggtaggtaaatgtc

SEQ ID NO: 48066 - RNA, 19 nt, synthetic construct
  misc_feature 1..19: note = siRNA sense sequence
  source 1..19: mol_type = other RNA
tttacctacctattggatc

SEQ ID NO: 48067 - RNA, 19 nt, synthetic construct
  misc_feature 1..19: note = siRNA antisense sequence
  source 1..19: mol_type = other RNA
gatccaataggtaggtaaa

SEQ ID NO: 48068 - RNA, 19 nt, synthetic construct
  misc_feature 1..19: note = siRNA sense sequence
  source 1..19: mol_type = other RNA
ttacctacctattggatca

SEQ ID NO: 48069 - RNA, 19 nt, synthetic construct
  misc_feature 1..19: note = siRNA antisense sequence
  source 1..19: mol_type = other RNA
tgatccaataggtaggtaa

SEQ ID NO: 48070 - RNA, 19 nt, synthetic construct
  misc_feature 1..19: note = siRNA sense sequence
  source 1..19: mol_type = other RNA
tacctacctattggatcac

SEQ ID NO: 48071 - RNA, 19 nt, synthetic construct
  misc_feature 1..19: note = siRNA antisense sequence
  source 1..19: mol_type = other RNA
gtgatccaataggtaggta

SEQ ID NO: 48072 - RNA, 19 nt, synthetic construct
  misc_feature 1..19: note = siRNA sense sequence
  source 1..19: mol_type = other RNA
acctacctattggatcacc

SEQ ID NO: 48073 - RNA, 19 nt, synthetic construct
  misc_feature 1..19: note = siRNA antisense sequence
  source 1..19: mol_type = other RNA
ggtgatccaataggtaggt

SEQ ID NO: 48074 - RNA, 19 nt, synthetic construct
  misc_feature 1..19: note = siRNA sense sequence
  source 1..19: mol_type = other RNA
cctacctattggatcacct

SEQ ID NO: 48075 - RNA, 19 nt, synthetic construct
  misc_feature 1..19: note = siRNA antisense sequence
  source 1..19: mol_type = other RNA
aggtgatccaataggtagg

SEQ ID NO: 48076 - RNA, 19 nt, synthetic construct
  misc_feature 1..19: note = siRNA sense sequence
  source 1..19: mol_type = other RNA
ctacctattggatcaccta

SEQ ID NO: 48077 - RNA, 19 nt, synthetic construct
  misc_feature 1..19: note = siRNA antisense sequence
  source 1..19: mol_type = other RNA
taggtgatccaataggtag

SEQ ID NO: 48078 - RNA, 19 nt, synthetic construct
  misc_feature 1..19: note = siRNA sense sequence
  source 1..19: mol_type = other RNA
tacctattggatcacctat

SEQ ID NO: 48079 - RNA, 19 nt, synthetic construct
  misc_feature 1..19: note = siRNA antisense sequence
  source 1..19: mol_type = other RNA
ataggtgatccaataggta

SEQ ID NO: 48080 - RNA, 19 nt, synthetic construct
  misc_feature 1..19: note = siRNA sense sequence
  source 1..19: mol_type = other RNA
acctattggatcacctatt

SEQ ID NO: 48081 - RNA, 19 nt, synthetic construct
  misc_feature 1..19: note = siRNA antisense sequence
  source 1..19: mol_type = other RNA
aataggtgatccaataggt

SEQ ID NO: 48082 - RNA, 19 nt, synthetic construct
  misc_feature 1..19: note = siRNA sense sequence
  source 1..19: mol_type = other RNA
cctattggatcacctattg

SEQ ID NO: 48083 - RNA, 19 nt, synthetic construct
  misc_feature 1..19: note = siRNA antisense sequence
  source 1..19: mol_type = other RNA
caataggtgatccaatagg

SEQ ID NO: 48084 - RNA, 19 nt, synthetic construct
  misc_feature 1..19: note = siRNA sense sequence
  source 1..19: mol_type = other RNA
atcacctattggatcacca

SEQ ID NO: 48085 - RNA, 19 nt, synthetic construct
  misc_feature 1..19: note = siRNA antisense sequence
  source 1..19: mol_type = other RNA
tggtgatccaataggtgat

SEQ ID NO: 48086 - RNA, 19 nt, synthetic construct
  misc_feature 1..19: note = siRNA sense sequence
  source 1..19: mol_type = other RNA
caaagagtgcacatgttta

SEQ ID NO: 48087 - RNA, 19 nt, synthetic construct
  misc_feature 1..19: note = siRNA antisense sequence
  source 1..19: mol_type = other RNA
taaacatgtgcactctttg

SEQ ID NO: 48088 - RNA, 19 nt, synthetic construct
  misc_feature 1..19: note = siRNA sense sequence
  source 1..19: mol_type = other RNA
aaagagtgcacatgtttag

SEQ ID NO: 48089 - RNA, 19 nt, synthetic construct
  misc_feature 1..19: note = siRNA antisense sequence
  source 1..19: mol_type = other RNA
ctaaacatgtgcactcttt

SEQ ID NO: 48090 - RNA, 19 nt, synthetic construct
  misc_feature 1..19: note = siRNA sense sequence
  source 1..19: mol_type = other RNA
aagagtgcacatgtttagg

SEQ ID NO: 48091 - RNA, 19 nt, synthetic construct
  misc_feature 1..19: note = siRNA antisense sequence
  source 1..19: mol_type = other RNA
cctaaacatgtgcactctt

SEQ ID NO: 48092 - RNA, 19 nt, synthetic construct
  misc_feature 1..19: note = siRNA sense sequence
  source 1..19: mol_type = other RNA
agagtgcacatgtttaggt

SEQ ID NO: 48093 - RNA, 19 nt, synthetic construct
  misc_feature 1..19: note = siRNA antisense sequence
  source 1..19: mol_type = other RNA
acctaaacatgtgcactct

SEQ ID NO: 48094 - RNA, 19 nt, synthetic construct
  misc_feature 1..19: note = siRNA sense sequence
  source 1..19: mol_type = other RNA
gagtgcacatgtttaggtg

SEQ ID NO: 48095 - RNA, 19 nt, synthetic construct
  misc_feature 1..19: note = siRNA antisense sequence
  source 1..19: mol_type = other RNA
cacctaaacatgtgcactc

SEQ ID NO: 48096 - RNA, 19 nt, synthetic construct
  misc_feature 1..19: note = siRNA sense sequence
  source 1..19: mol_type = other RNA
agtgcacatgtttaggtgt

SEQ ID NO: 48097 - RNA, 19 nt, synthetic construct
  misc_feature 1..19: note = siRNA antisense sequence
  source 1..19: mol_type = other RNA
acacctaaacatgtgcact

SEQ ID NO: 48098 - RNA, 19 nt, synthetic construct
  misc_feature 1..19: note = siRNA sense sequence
  source 1..19: mol_type = other RNA
gtgcacatgtttaggtgta

SEQ ID NO: 48099 - RNA, 19 nt, synthetic construct
  misc_feature 1..19: note = siRNA antisense sequence
  source 1..19: mol_type = other RNA
tacacctaaacatgtgcac

SEQ ID NO: 48100 - RNA, 19 nt, synthetic construct
  misc_feature 1..19: note = siRNA sense sequence
  source 1..19: mol_type = other RNA
tgcacatgtttaggtgtac

SEQ ID NO: 48101 - RNA, 19 nt, synthetic construct
  misc_feature 1..19: note = siRNA antisense sequence
  source 1..19: mol_type = other RNA
gtacacctaaacatgtgca

SEQ ID NO: 48102 - RNA, 19 nt, synthetic construct
  misc_feature 1..19: note = siRNA sense sequence
  source 1..19: mol_type = other RNA
gcacatgtttaggtgtacc

SEQ ID NO: 48103 - RNA, 19 nt, synthetic construct
  misc_feature 1..19: note = siRNA antisense sequence
  source 1..19: mol_type = other RNA
ggtacacctaaacatgtgc

SEQ ID NO: 48104 - RNA, 19 nt, synthetic construct
  misc_feature 1..19: note = siRNA sense sequence
  source 1..19: mol_type = other RNA
atcaattaaatgtgactgc

SEQ ID NO: 48105 - RNA, 19 nt, synthetic construct
  misc_feature 1..19: note = siRNA antisense sequence
  source 1..19: mol_type = other RNA
gcagtcacatttaattgat

SEQ ID NO: 48106 - RNA, 19 nt, synthetic construct
  misc_feature 1..19: note = siRNA sense sequence
  source 1..19: mol_type = other RNA
tcaattaaatgtgactgca

SEQ ID NO: 48107 - RNA, 19 nt, synthetic construct
  misc_feature 1..19: note = siRNA antisense sequence
  source 1..19: mol_type = other RNA
tgcagtcacatttaattga

SEQ ID NO: 48108 - RNA, 19 nt, synthetic construct
  misc_feature 1..19: note = siRNA sense sequence
  source 1..19: mol_type = other RNA
agtaagtcaaagtgttctt

SEQ ID NO: 48109 - RNA, 19 nt, synthetic construct
  misc_feature 1..19: note = siRNA antisense sequence
  source 1..19: mol_type = other RNA
aagaacactttgacttact

SEQ ID NO: 48110 - RNA, 19 nt, synthetic construct
  misc_feature 1..19: note = siRNA sense sequence
  source 1..19: mol_type = other RNA
acctctgagcctgtaggga

SEQ ID NO: 48111 - RNA, 19 nt, synthetic construct
  misc_feature 1..19: note = siRNA antisense sequence
  source 1..19: mol_type = other RNA
tccctacaggctcagaggt

SEQ ID NO: 48112 - RNA, 19 nt, synthetic construct
  misc_feature 1..19: note = siRNA sense sequence
  source 1..19: mol_type = other RNA
aaatattctggctgctttt

SEQ ID NO: 48113 - RNA, 19 nt, synthetic construct
  misc_feature 1..19: note = siRNA antisense sequence
  source 1..19: mol_type = other RNA
aaaagcagccagaatattt

SEQ ID NO: 48114 - RNA, 19 nt, synthetic construct
  misc_feature 1..19: note = siRNA sense sequence
  source 1..19: mol_type = other RNA
aatattctggctgcttttg

SEQ ID NO: 48115 - RNA, 19 nt, synthetic construct
  misc_feature 1..19: note = siRNA antisense sequence
  source 1..19: mol_type = other RNA
caaaagcagccagaatatt

SEQ ID NO: 48116 - RNA, 19 nt, synthetic construct
  misc_feature 1..19: note = siRNA sense sequence
  source 1..19: mol_type = other RNA
atattctggctgcttttgc

SEQ ID NO: 48117 - RNA, 19 nt, synthetic construct
  misc_feature 1..19: note = siRNA antisense sequence
  source 1..19: mol_type = other RNA
gcaaaagcagccagaatat

SEQ ID NO: 48118 - RNA, 19 nt, synthetic construct
  misc_feature 1..19: note = siRNA sense sequence
  source 1..19: mol_type = other RNA
tattctggctgcttttgct

SEQ ID NO: 48119 - RNA, 19 nt, synthetic construct
  misc_feature 1..19: note = siRNA antisense sequence
  source 1..19: mol_type = other RNA
agcaaaagcagccagaata

SEQ ID NO: 48120 - RNA, 19 nt, synthetic construct
  misc_feature 1..19: note = siRNA sense sequence
  source 1..19: mol_type = other RNA
attctggctgcttttgctt

SEQ ID NO: 48121 - RNA, 19 nt, synthetic construct
  misc_feature 1..19: note = siRNA antisense sequence
  source 1..19: mol_type = other RNA
aagcaaaagcagccagaat

SEQ ID NO: 48122 - RNA, 19 nt, synthetic construct
  misc_feature 1..19: note = siRNA sense sequence
  source 1..19: mol_type = other RNA
tggctgcttttgcttctgc

SEQ ID NO: 48123 - RNA, 19 nt, synthetic construct
  misc_feature 1..19: note = siRNA antisense sequence
  source 1..19: mol_type = other RNA
gcagaagcaaaagcagcca

SEQ ID NO: 48124 - RNA, 19 nt, synthetic construct
  misc_feature 1..19: note = siRNA sense sequence
  source 1..19: mol_type = other RNA
ggctgcttttgcttctgca

SEQ ID NO: 48125 - RNA, 19 nt, synthetic construct
  misc_feature 1..19: note = siRNA antisense sequence
  source 1..19: mol_type = other RNA
tgcagaagcaaaagcagcc

SEQ ID NO: 48126 - RNA, 19 nt, synthetic construct
  misc_feature 1..19: note = siRNA sense sequence
  source 1..19: mol_type = other RNA
gctgcttttgcttctgcat

SEQ ID NO: 48127 - RNA, 19 nt, synthetic construct
  misc_feature 1..19: note = siRNA antisense sequence
  source 1..19: mol_type = other RNA
atgcagaagcaaaagcagc

SEQ ID NO: 48128 - RNA, 19 nt, synthetic construct
  misc_feature 1..19: note = siRNA sense sequence
  source 1..19: mol_type = other RNA
ctgcttttgcttctgcata

SEQ ID NO: 48129 - RNA, 19 nt, synthetic construct
  misc_feature 1..19: note = siRNA antisense sequence
  source 1..19: mol_type = other RNA
tatgcagaagcaaaagcag

SEQ ID NO: 48130 - RNA, 19 nt, synthetic construct
  misc_feature 1..19: note = siRNA sense sequence
  source 1..19: mol_type = other RNA
tgcttttgcttctgcataa

SEQ ID NO: 48131 - RNA, 19 nt, synthetic construct
  misc_feature 1..19: note = siRNA antisense sequence
  source 1..19: mol_type = other RNA
ttatgcagaagcaaaagca

SEQ ID NO: 48132 - RNA, 19 nt, synthetic construct
  misc_feature 1..19: note = siRNA sense sequence
  source 1..19: mol_type = other RNA
cttttgcttctgcataaat

SEQ ID NO: 48133 - RNA, 19 nt, synthetic construct
  misc_feature 1..19: note = siRNA antisense sequence
  source 1..19: mol_type = other RNA
atttatgcagaagcaaaag

SEQ ID NO: 48134 - RNA, 19 nt, synthetic construct
  misc_feature 1..19: note = siRNA sense sequence
  source 1..19: mol_type = other RNA
tttgcttctgcataaatac

SEQ ID NO: 48135 - RNA, 19 nt, synthetic construct
  misc_feature 1..19: note = siRNA antisense sequence
  source 1..19: mol_type = other RNA
gtatttatgcagaagcaaa

SEQ ID NO: 48136 - RNA, 19 nt, synthetic construct
  misc_feature 1..19: note = siRNA sense sequence
  source 1..19: mol_type = other RNA
ttgcttctgcataaatacg

SEQ ID NO: 48137 - RNA, 19 nt, synthetic construct
  misc_feature 1..19: note = siRNA antisense sequence
  source 1..19: mol_type = other RNA
cgtatttatgcagaagcaa

SEQ ID NO: 48138 - RNA, 19 nt, synthetic construct
  misc_feature 1..19: note = siRNA sense sequence
  source 1..19: mol_type = other RNA
tgcttctgcataaatacgg

SEQ ID NO: 48139 - RNA, 19 nt, synthetic construct
  misc_feature 1..19: note = siRNA antisense sequence
  source 1..19: mol_type = other RNA
ccgtatttatgcagaagca

SEQ ID NO: 48140 - RNA, 19 nt, synthetic construct
  misc_feature 1..19: note = siRNA sense sequence
  source 1..19: mol_type = other RNA
gcttctgcataaatacggc

SEQ ID NO: 48141 - RNA, 19 nt, synthetic construct
  misc_feature 1..19: note = siRNA antisense sequence
  source 1..19: mol_type = other RNA
gccgtatttatgcagaagc

SEQ ID NO: 48142 - RNA, 19 nt, synthetic construct
  misc_feature 1..19: note = siRNA sense sequence
  source 1..19: mol_type = other RNA
cttctgcataaatacggct

SEQ ID NO: 48143 - RNA, 19 nt, synthetic construct
  misc_feature 1..19: note = siRNA antisense sequence
  source 1..19: mol_type = other RNA
agccgtatttatgcagaag

SEQ ID NO: 48144 - RNA, 19 nt, synthetic construct
  misc_feature 1..19: note = siRNA sense sequence
  source 1..19: mol_type = other RNA
ttctgcataaatacggctc

SEQ ID NO: 48145 - RNA, 19 nt, synthetic construct
  misc_feature 1..19: note = siRNA antisense sequence
  source 1..19: mol_type = other RNA
gagccgtatttatgcagaa

SEQ ID NO: 48146 - RNA, 19 nt, synthetic construct
  misc_feature 1..19: note = siRNA sense sequence
  source 1..19: mol_type = other RNA
tctgcataaatacggctct

SEQ ID NO: 48147 - RNA, 19 nt, synthetic construct
  misc_feature 1..19: note = siRNA antisense sequence
  source 1..19: mol_type = other RNA
agagccgtatttatgcaga

SEQ ID NO: 48148 - RNA, 19 nt, synthetic construct
  misc_feature 1..19: note = siRNA sense sequence
  source 1..19: mol_type = other RNA
ctgcataaatacggctcta

SEQ ID NO: 48149 - RNA, 19 nt, synthetic construct
  misc_feature 1..19: note = siRNA antisense sequence
  source 1..19: mol_type = other RNA
tagagccgtatttatgcag

SEQ ID NO: 48150 - RNA, 19 nt, synthetic construct
  misc_feature 1..19: note = siRNA sense sequence
  source 1..19: mol_type = other RNA
tgcataaatacggctctaa

SEQ ID NO: 48151 - RNA, 19 nt, synthetic construct
  misc_feature 1..19: note = siRNA antisense sequence
  source 1..19: mol_type = other RNA
ttagagccgtatttatgca

SEQ ID NO: 48152 - RNA, 19 nt, synthetic construct
  misc_feature 1..19: note = siRNA sense sequence
  source 1..19: mol_type = other RNA
gcataaatacggctctaaa

SEQ ID NO: 48153 - RNA, 19 nt, synthetic construct
  misc_feature 1..19: note = siRNA antisense sequence
  source 1..19: mol_type = other RNA
tttagagccgtatttatgc

SEQ ID NO: 48154 - RNA, 19 nt, synthetic construct
  misc_feature 1..19: note = siRNA sense sequence
  source 1..19: mol_type = other RNA
cataaatacggctctaaat

SEQ ID NO: 48155 - RNA, 19 nt, synthetic construct
  misc_feature 1..19: note = siRNA antisense sequence
  source 1..19: mol_type = other RNA
atttagagccgtatttatg

SEQ ID NO: 48156 - RNA, 19 nt, synthetic construct
  misc_feature 1..19: note = siRNA sense sequence
  source 1..19: mol_type = other RNA
taaatacggctctaaatac

SEQ ID NO: 48157 - RNA, 19 nt, synthetic construct
  misc_feature 1..19: note = siRNA antisense sequence
  source 1..19: mol_type = other RNA
gtatttagagccgtattta

SEQ ID NO: 48158 - RNA, 19 nt, synthetic construct
  misc_feature 1..19: note = siRNA sense sequence
  source 1..19: mol_type = other RNA
aaatacggctctaaatacc

SEQ ID NO: 48159 - RNA, 19 nt, synthetic construct
  misc_feature 1..19: note = siRNA antisense sequence
  source 1..19: mol_type = other RNA
ggtatttagagccgtattt

SEQ ID NO: 48160 - RNA, 19 nt, synthetic construct
  misc_feature 1..19: note = siRNA sense sequence
  source 1..19: mol_type = other RNA
aatacggctctaaatacca

SEQ ID NO: 48161 - RNA, 19 nt, synthetic construct
  misc_feature 1..19: note = siRNA antisense sequence
  source 1..19: mol_type = other RNA
tggtatttagagccgtatt

SEQ ID NO: 48162 - RNA, 19 nt, synthetic construct
  misc_feature 1..19: note = siRNA sense sequence
  source 1..19: mol_type = other RNA
atacggctctaaataccat

SEQ ID NO: 48163 - RNA, 19 nt, synthetic construct
  misc_feature 1..19: note = siRNA antisense sequence
  source 1..19: mol_type = other RNA
atggtatttagagccgtat

SEQ ID NO: 48164 - RNA, 19 nt, synthetic construct
  misc_feature 1..19: note = siRNA sense sequence
  source 1..19: mol_type = other RNA
tacggctctaaataccatg

SEQ ID NO: 48165 - RNA, 19 nt, synthetic construct
  misc_feature 1..19: note = siRNA antisense sequence
  source 1..19: mol_type = other RNA
catggtatttagagccgta

SEQ ID NO: 48166 - RNA, 19 nt, synthetic construct
  misc_feature 1..19: note = siRNA sense sequence
  source 1..19: mol_type = other RNA
acggctctaaataccatgt

SEQ ID NO: 48167 - RNA, 19 nt, synthetic construct
  misc_feature 1..19: note = siRNA antisense sequence
  source 1..19: mol_type = other RNA
acatggtatttagagccgt

SEQ ID NO: 48168 - RNA, 19 nt, synthetic construct
  misc_feature 1..19: note = siRNA sense sequence
  source 1..19: mol_type = other RNA
cggctctaaataccatgtc

SEQ ID NO: 48169 - RNA, 19 nt, synthetic construct
  misc_feature 1..19: note = siRNA antisense sequence
  source 1..19: mol_type = other RNA
gacatggtatttagagccg

SEQ ID NO: 48170 - RNA, 19 nt, synthetic construct
  misc_feature 1..19: note = siRNA sense sequence
  source 1..19: mol_type = other RNA
ggctctaaataccatgtcc

SEQ ID NO: 48171 - RNA, 19 nt, synthetic construct
  misc_feature 1..19: note = siRNA antisense sequence
  source 1..19: mol_type = other RNA
ggacatggtatttagagcc

SEQ ID NO: 48172 - RNA, 19 nt, synthetic construct
  misc_feature 1..19: note = siRNA sense sequence
  source 1..19: mol_type = other RNA
gctctaaataccatgtccc

SEQ ID NO: 48173 - RNA, 19 nt, synthetic construct
  misc_feature 1..19: note = siRNA antisense sequence
  source 1..19: mol_type = other RNA
gggacatggtatttagagc

SEQ ID NO: 48174 - RNA, 19 nt, synthetic construct
  misc_feature 1..19: note = siRNA sense sequence
  source 1..19: mol_type = other RNA
ctctaaataccatgtccct

SEQ ID NO: 48175 - RNA, 19 nt, synthetic construct
  misc_feature 1..19: note = siRNA antisense sequence
  source 1..19: mol_type = other RNA
agggacatggtatttagag

SEQ ID NO: 48176 - RNA, 19 nt, synthetic construct
  misc_feature 1..19: note = siRNA sense sequence
  source 1..19: mol_type = other RNA
tctaaataccatgtcccta

SEQ ID NO: 48177 - RNA, 19 nt, synthetic construct
  misc_feature 1..19: note = siRNA antisense sequence
  source 1..19: mol_type = other RNA
tagggacatggtatttaga

SEQ ID NO: 48178 - RNA, 19 nt, synthetic construct
  misc_feature 1..19: note = siRNA sense sequence
  source 1..19: mol_type = other RNA
ctaaataccatgtccctat

SEQ ID NO: 48179 - RNA, 19 nt, synthetic construct
  misc_feature 1..19: note = siRNA antisense sequence
  source 1..19: mol_type = other RNA
atagggacatggtatttag

SEQ ID NO: 48180 - RNA, 19 nt, synthetic construct
  misc_feature 1..19: note = siRNA sense sequence
  source 1..19: mol_type = other RNA
taaataccatgtccctatg

SEQ ID NO: 48181 - RNA, 19 nt, synthetic construct
  misc_feature 1..19: note = siRNA antisense sequence
  source 1..19: mol_type = other RNA
catagggacatggtattta

SEQ ID NO: 48182 - RNA, 19 nt, synthetic construct
  misc_feature 1..19: note = siRNA sense sequence
  source 1..19: mol_type = other RNA
taccatgtccctatgtgtt

SEQ ID NO: 48183 - RNA, 19 nt, synthetic construct
  misc_feature 1..19: note = siRNA antisense sequence
  source 1..19: mol_type = other RNA
aacacatagggacatggta

SEQ ID NO: 48184 - RNA, 19 nt, synthetic construct
  misc_feature 1..19: note = siRNA sense sequence
  source 1..19: mol_type = other RNA
accatgtccctatgtgttt

SEQ ID NO: 48185 - RNA, 19 nt, synthetic construct
  misc_feature 1..19: note = siRNA antisense sequence
  source 1..19: mol_type = other RNA
aaacacatagggacatggt

SEQ ID NO: 48186 - RNA, 19 nt, synthetic construct
  misc_feature 1..19: note = siRNA sense sequence
  source 1..19: mol_type = other RNA
ccatgtccctatgtgtttt

SEQ ID NO: 48187 - RNA, 19 nt, synthetic construct
  misc_feature 1..19: note = siRNA antisense sequence
  source 1..19: mol_type = other RNA
aaaacacatagggacatgg

SEQ ID NO: 48188 - RNA, 19 nt, synthetic construct
  misc_feature 1..19: note = siRNA sense sequence
  source 1..19: mol_type = other RNA
ctcctacattaattacctt

SEQ ID NO: 48189 - RNA, 19 nt, synthetic construct
  misc_feature 1..19: note = siRNA antisense sequence
  source 1..19: mol_type = other RNA
aaggtaattaatgtaggag

SEQ ID NO: 48190 - RNA, 19 nt, synthetic construct
  misc_feature 1..19: note = siRNA sense sequence
  source 1..19: mol_type = other RNA
taccttttcatgtttaagc

SEQ ID NO: 48191 - RNA, 19 nt, synthetic construct
  misc_feature 1..19: note = siRNA antisense sequence
  source 1..19: mol_type = other RNA
gcttaaacatgaaaaggta

SEQ ID NO: 48192 - RNA, 19 nt, synthetic construct
  misc_feature 1..19: note = siRNA sense sequence
  source 1..19: mol_type = other RNA
accttttcatgtttaagca

SEQ ID NO: 48193 - RNA, 19 nt, synthetic construct
  misc_feature 1..19: note = siRNA antisense sequence
  source 1..19: mol_type = other RNA
tgcttaaacatgaaaaggt

SEQ ID NO: 48194 - RNA, 19 nt, synthetic construct
  misc_feature 1..19: note = siRNA sense sequence
  source 1..19: mol_type = other RNA
ccttttcatgtttaagcac

SEQ ID NO: 48195 - RNA, 19 nt, synthetic construct
  misc_feature 1..19: note = siRNA antisense sequence
  source 1..19: mol_type = other RNA
gtgcttaaacatgaaaagg

SEQ ID NO: 48196 - RNA, 19 nt, synthetic construct
  misc_feature 1..19: note = siRNA sense sequence
  source 1..19: mol_type = other RNA
cctttcaggcagaagttgc

SEQ ID NO: 48197 - RNA, 19 nt, synthetic construct
  misc_feature 1..19: note = siRNA antisense sequence
  source 1..19: mol_type = other RNA
gcaacttctgcctgaaagg

SEQ ID NO: 48198 - RNA, 19 nt, synthetic construct
  misc_feature 1..19: note = siRNA sense sequence
  source 1..19: mol_type = other RNA
tttcaggcagaagttgcaa

SEQ ID NO: 48199 - RNA, 19 nt, synthetic construct
  misc_feature 1..19: note = siRNA antisense sequence
  source 1..19: mol_type = other RNA
ttgcaacttctgcctgaaa

SEQ ID NO: 48200 - RNA, 19 nt, synthetic construct
  misc_feature 1..19: note = siRNA sense sequence
  source 1..19: mol_type = other RNA
cttcttcctatcccaaatt

SEQ ID NO: 48201 - RNA, 19 nt, synthetic construct
  misc_feature 1..19: note = siRNA antisense sequence
  source 1..19: mol_type = other RNA
aatttgggataggaagaag

SEQ ID NO: 48202 - RNA, 19 nt, synthetic construct
  misc_feature 1..19: note = siRNA sense sequence
  source 1..19: mol_type = other RNA
ttcttcctatcccaaattt

SEQ ID NO: 48203 - RNA, 19 nt, synthetic construct
  misc_feature 1..19: note = siRNA antisense sequence
  source 1..19: mol_type = other RNA
aaatttgggataggaagaa

SEQ ID NO: 48204 - RNA, 19 nt, synthetic construct
  misc_feature 1..19: note = siRNA sense sequence
  source 1..19: mol_type = other RNA
cagtatttaatcatgaggc

SEQ ID NO: 48205 - RNA, 19 nt, synthetic construct
  misc_feature 1..19: note = siRNA antisense sequence
  source 1..19: mol_type = other RNA
gcctcatgattaaatactg

SEQ ID NO: 48206 - RNA, 19 nt, synthetic construct
  misc_feature 1..19: note = siRNA sense sequence
  source 1..19: mol_type = other RNA
agtatttaatcatgaggcc

SEQ ID NO: 48207 - RNA, 19 nt, synthetic construct
  misc_feature 1..19: note = siRNA antisense sequence
  source 1..19: mol_type = other RNA
ggcctcatgattaaatact

SEQ ID NO: 48208 - RNA, 19 nt, synthetic construct
  misc_feature 1..19: note = siRNA sense sequence
  source 1..19: mol_type = other RNA
gtatttaatcatgaggcct

SEQ ID NO: 48209 - RNA, 19 nt, synthetic construct
  misc_feature 1..19: note = siRNA antisense sequence
  source 1..19: mol_type = other RNA
aggcctcatgattaaatac

SEQ ID NO: 48210 - RNA, 19 nt, synthetic construct
  misc_feature 1..19: note = siRNA sense sequence
  source 1..19: mol_type = other RNA
tatttaatcatgaggcctg

SEQ ID NO: 48211 - RNA, 19 nt, synthetic construct
  misc_feature 1..19: note = siRNA antisense sequence
  source 1..19: mol_type = other RNA
caggcctcatgattaaata

SEQ ID NO: 48212 - RNA, 19 nt, synthetic construct
  misc_feature 1..19: note = siRNA sense sequence
  source 1..19: mol_type = other RNA
atttaatcatgaggcctgg

SEQ ID NO: 48213 - RNA, 19 nt, synthetic construct
  misc_feature 1..19: note = siRNA antisense sequence
  source 1..19: mol_type = other RNA
ccaggcctcatgattaaat

SEQ ID NO: 48214 - RNA, 19 nt, synthetic construct
  misc_feature 1..19: note = siRNA sense sequence
  source 1..19: mol_type = other RNA
tttaatcatgaggcctgga

SEQ ID NO: 48215 - RNA, 19 nt, synthetic construct
  misc_feature 1..19: note = siRNA antisense sequence
  source 1..19: mol_type = other RNA
tccaggcctcatgattaaa

SEQ ID NO: 48216 - RNA, 19 nt, synthetic construct
  misc_feature 1..19: note = siRNA sense sequence
  source 1..19: mol_type = other RNA
atcatgaggcctggattct

SEQ ID NO: 48217 - RNA, 19 nt, synthetic construct
  misc_feature 1..19: note = siRNA antisense sequence
  source 1..19: mol_type = other RNA
agaatccaggcctcatgat

SEQ ID NO: 48218 - RNA, 19 nt, synthetic construct
  misc_feature 1..19: note = siRNA sense sequence
  source 1..19: mol_type = other RNA
tcatgaggcctggattctc

SEQ ID NO: 48219 - RNA, 19 nt, synthetic construct
  misc_feature 1..19: note = siRNA antisense sequence
  source 1..19: mol_type = other RNA
gagaatccaggcctcatga

SEQ ID NO: 48220 - RNA, 19 nt, synthetic construct
  misc_feature 1..19: note = siRNA sense sequence
  source 1..19: mol_type = other RNA
catgaggcctggattctcc

SEQ ID NO: 48221 - RNA, 19 nt, synthetic construct
  misc_feature 1..19: note = siRNA antisense sequence
  source 1..19: mol_type = other RNA
ggagaatccaggcctcatg

SEQ ID NO: 48222 - RNA, 19 nt, synthetic construct
  misc_feature 1..19: note = siRNA sense sequence
  source 1..19: mol_type = other RNA
atgaggcctggattctcct

SEQ ID NO: 48223 - RNA, 19 nt, synthetic construct
  misc_feature 1..19: note = siRNA antisense sequence
  source 1..19: mol_type = other RNA
aggagaatccaggcctcat

SEQ ID NO: 48224 - RNA, 19 nt, synthetic construct
  misc_feature 1..19: note = siRNA sense sequence
  source 1..19: mol_type = other RNA
tgaggcctggattctcctg

SEQ ID NO: 48225 - RNA, 19 nt, synthetic construct
  misc_feature 1..19: note = siRNA antisense sequence
  source 1..19: mol_type = other RNA
caggagaatccaggcctca

SEQ ID NO: 48226 - RNA, 19 nt, synthetic construct
  misc_feature 1..19: note = siRNA sense sequence
  source 1..19: mol_type = other RNA
gaggcctggattctcctgt

SEQ ID NO: 48227 - RNA, 19 nt, synthetic construct
  misc_feature 1..19: note = siRNA antisense sequence
  source 1..19: mol_type = other RNA
acaggagaatccaggcctc

SEQ ID NO: 48228 - RNA, 19 nt, synthetic construct
  misc_feature 1..19: note = siRNA sense sequence
  source 1..19: mol_type = other RNA
aggcctggattctcctgtc

SEQ ID NO: 48229 - RNA, 19 nt, synthetic construct
  misc_feature 1..19: note = siRNA antisense sequence
  source 1..19: mol_type = other RNA
gacaggagaatccaggcct

SEQ ID NO: 48230 - RNA, 19 nt, synthetic construct
  misc_feature 1..19: note = siRNA sense sequence
  source 1..19: mol_type = other RNA
ggcctggattctcctgtct

SEQ ID NO: 48231 - RNA, 19 nt, synthetic construct
  misc_feature 1..19: note = siRNA antisense sequence
  source 1..19: mol_type = other RNA
agacaggagaatccaggcc

SEQ ID NO: 48232 - RNA, 19 nt, synthetic construct
  misc_feature 1..19: note = siRNA sense sequence
  source 1..19: mol_type = other RNA
gcctggattctcctgtctt

SEQ ID NO: 48233 - RNA, 19 nt, synthetic construct
  misc_feature 1..19: note = siRNA antisense sequence
  source 1..19: mol_type = other RNA
aagacaggagaatccaggc

SEQ ID NO: 48234 - RNA, 19 nt, synthetic construct
  misc_feature 1..19: note = siRNA sense sequence
  source 1..19: mol_type = other RNA
cctggattctcctgtcttg

SEQ ID NO: 48235 - RNA, 19 nt, synthetic construct
  misc_feature 1..19: note = siRNA antisense sequence
  source 1..19: mol_type = other RNA
caagacaggagaatccagg

SEQ ID NO: 48236 - RNA, 19 nt, synthetic construct
  misc_feature 1..19: note = siRNA sense sequence
  source 1..19: mol_type = other RNA
ctggattctcctgtcttga

SEQ ID NO: 48237 - RNA, 19 nt, synthetic construct
  misc_feature 1..19: note = siRNA antisense sequence
  source 1..19: mol_type = other RNA
tcaagacaggagaatccag

SEQ ID NO: 48238 - RNA, 19 nt, synthetic construct
  misc_feature 1..19: note = siRNA sense sequence
  source 1..19: mol_type = other RNA
tggattctcctgtcttgaa

SEQ ID NO: 48239 - RNA, 19 nt, synthetic construct
  misc_feature 1..19: note = siRNA antisense sequence
  source 1..19: mol_type = other RNA
ttcaagacaggagaatcca

SEQ ID NO: 48240 - RNA, 19 nt, synthetic construct
  misc_feature 1..19: note = siRNA sense sequence
  source 1..19: mol_type = other RNA
ggattctcctgtcttgaag

SEQ ID NO: 48241 - RNA, 19 nt, synthetic construct
  misc_feature 1..19: note = siRNA antisense sequence
  source 1..19: mol_type = other RNA
cttcaagacaggagaatcc

SEQ ID NO: 48242 - RNA, 19 nt, synthetic construct
  misc_feature 1..19: note = siRNA sense sequence
  source 1..19: mol_type = other RNA
gattctcctgtcttgaaga

SEQ ID NO: 48243 - RNA, 19 nt, synthetic construct
  misc_feature 1..19: note = siRNA antisense sequence
  source 1..19: mol_type = other RNA
tcttcaagacaggagaatc

SEQ ID NO: 48244 - RNA, 19 nt, synthetic construct
  misc_feature 1..19: note = siRNA sense sequence
  source 1..19: mol_type = other RNA
gggacactcttgatatatt

SEQ ID NO: 48245 - RNA, 19 nt, synthetic construct
  misc_feature 1..19: note = siRNA antisense sequence
  source 1..19: mol_type = other RNA
aatatatcaagagtgtccc

SEQ ID NO: 48246 - RNA, 19 nt, synthetic construct
  misc_feature 1..19: note = siRNA sense sequence
  source 1..19: mol_type = other RNA
aaagtcaatgcttagtgcc

SEQ ID NO: 48247 - RNA, 19 nt, synthetic construct
  misc_feature 1..19: note = siRNA antisense sequence
  source 1..19: mol_type = other RNA
ggcactaagcattgacttt

SEQ ID NO: 48248 - RNA, 19 nt, synthetic construct
  misc_feature 1..19: note = siRNA sense sequence
  source 1..19: mol_type = other RNA
aagtcaatgcttagtgcca

SEQ ID NO: 48249 - RNA, 19 nt, synthetic construct
  misc_feature 1..19: note = siRNA antisense sequence
  source 1..19: mol_type = other RNA
tggcactaagcattgactt

SEQ ID NO: 48250 - RNA, 19 nt, synthetic construct
  misc_feature 1..19: note = siRNA sense sequence
  source 1..19: mol_type = other RNA
aaaggacactggatactgg

SEQ ID NO: 48251 - RNA, 19 nt, synthetic construct
  misc_feature 1..19: note = siRNA antisense sequence
  source 1..19: mol_type = other RNA
ccagtatccagtgtccttt

SEQ ID NO: 48252 - RNA, 19 nt, synthetic construct
  misc_feature 1..19: note = siRNA sense sequence
  source 1..19: mol_type = other RNA
aaggacactggatactggt

SEQ ID NO: 48253 - RNA, 19 nt, synthetic construct
  misc_feature 1..19: note = siRNA antisense sequence
  source 1..19: mol_type = other RNA
accagtatccagtgtcctt

SEQ ID NO: 48254 - RNA, 19 nt, synthetic construct
  misc_feature 1..19: note = siRNA sense sequence
  source 1..19: mol_type = other RNA
ggacactggatactggtac

SEQ ID NO: 48255 - RNA, 19 nt, synthetic construct
  misc_feature 1..19: note = siRNA antisense sequence
  source 1..19: mol_type = other RNA
gtaccagtatccagtgtcc

SEQ ID NO: 48256 - RNA, 19 nt, synthetic construct
  misc_feature 1..19: note = siRNA sense sequence
  source 1..19: mol_type = other RNA
gacactggatactggtact

SEQ ID NO: 48257 - RNA, 19 nt, synthetic construct
  misc_feature 1..19: note = siRNA antisense sequence
  source 1..19: mol_type = other RNA
agtaccagtatccagtgtc

SEQ ID NO: 48258 - RNA, 19 nt, synthetic construct
  misc_feature 1..19: note = siRNA sense sequence
  source 1..19: mol_type = other RNA
actggatactggtactttg

SEQ ID NO: 48259 - RNA, 19 nt, synthetic construct
  misc_feature 1..19: note = siRNA antisense sequence
  source 1..19: mol_type = other RNA
caaagtaccagtatccagt

SEQ ID NO: 48260 - RNA, 19 nt, synthetic construct
  misc_feature 1..19: note = siRNA sense sequence
  source 1..19: mol_type = other RNA
ctggatactggtactttga

SEQ ID NO: 48261 - RNA, 19 nt, synthetic construct
  misc_feature 1..19: note = siRNA antisense sequence
  source 1..19: mol_type = other RNA
tcaaagtaccagtatccag

SEQ ID NO: 48262 - RNA, 19 nt, synthetic construct
  misc_feature 1..19: note = siRNA sense sequence
  source 1..19: mol_type = other RNA
atactggtactttgaggac

SEQ ID NO: 48263 - RNA, 19 nt, synthetic construct
  misc_feature 1..19: note = siRNA antisense sequence
  source 1..19: mol_type = other RNA
gtcctcaaagtaccagtat

SEQ ID NO: 48264 - RNA, 19 nt, synthetic construct
  misc_feature 1..19: note = siRNA sense sequence
  source 1..19: mol_type = other RNA
tactggtactttgaggaca

SEQ ID NO: 48265 - RNA, 19 nt, synthetic construct
  misc_feature 1..19: note = siRNA antisense sequence
  source 1..19: mol_type = other RNA
tgtcctcaaagtaccagta

SEQ ID NO: 48266 - RNA, 19 nt, synthetic construct
  misc_feature 1..19: note = siRNA sense sequence
  source 1..19: mol_type = other RNA
aaaggtgtactcaggagtt

SEQ ID NO: 48267 - RNA, 19 nt, synthetic construct
  misc_feature 1..19: note = siRNA antisense sequence
  source 1..19: mol_type = other RNA
aactcctgagtacaccttt

SEQ ID NO: 48268 - RNA, 19 nt, synthetic construct
  misc_feature 1..19: note = siRNA sense sequence
  source 1..19: mol_type = other RNA
aaggtgtactcaggagttc

SEQ ID NO: 48269 - RNA, 19 nt, synthetic construct
  misc_feature 1..19: note = siRNA antisense sequence
  source 1..19: mol_type = other RNA
gaactcctgagtacacctt

SEQ ID NO: 48270 - RNA, 19 nt, synthetic construct
  misc_feature 1..19: note = siRNA sense sequence
  source 1..19: mol_type = other RNA
aggtgtactcaggagttct

SEQ ID NO: 48271 - RNA, 19 nt, synthetic construct
  misc_feature 1..19: note = siRNA antisense sequence
  source 1..19: mol_type = other RNA
agaactcctgagtacacct

SEQ ID NO: 48272 - RNA, 19 nt, synthetic construct
  misc_feature 1..19: note = siRNA sense sequence
  source 1..19: mol_type = other RNA
ggtgtactcaggagttctg

SEQ ID NO: 48273 - RNA, 19 nt, synthetic construct
  misc_feature 1..19: note = siRNA antisense sequence
  source 1..19: mol_type = other RNA
cagaactcctgagtacacc

SEQ ID NO: 48274 - RNA, 19 nt, synthetic construct
  misc_feature 1..19: note = siRNA sense sequence
  source 1..19: mol_type = other RNA
gtgtactcaggagttctgt

SEQ ID NO: 48275 - RNA, 19 nt, synthetic construct
  misc_feature 1..19: note = siRNA antisense sequence
  source 1..19: mol_type = other RNA
acagaactcctgagtacac

SEQ ID NO: 48276 - RNA, 19 nt, synthetic construct
  misc_feature 1..19: note = siRNA sense sequence
  source 1..19: mol_type = other RNA
tgtactcaggagttctgtc

SEQ ID NO: 48277 - RNA, 19 nt, synthetic construct
  misc_feature 1..19: note = siRNA antisense sequence
  source 1..19: mol_type = other RNA
gacagaactcctgagtaca

SEQ ID NO: 48278 - RNA, 19 nt, synthetic construct
  misc_feature 1..19: note = siRNA sense sequence
  source 1..19: mol_type = other RNA
gtactcaggagttctgtca

SEQ ID NO: 48279 - RNA, 19 nt, synthetic construct
  misc_feature 1..19: note = siRNA antisense sequence
  source 1..19: mol_type = other RNA
tgacagaactcctgagtac

SEQ ID NO: 48280 - RNA, 19 nt, synthetic construct
  misc_feature 1..19: note = siRNA sense sequence
  source 1..19: mol_type = other RNA
tactcaggagttctgtcaa

SEQ ID NO: 48281 - RNA, 19 nt, synthetic construct
  misc_feature 1..19: note = siRNA antisense sequence
  source 1..19: mol_type = other RNA
ttgacagaactcctgagta

SEQ ID NO: 48282 - RNA, 19 nt, synthetic construct
  misc_feature 1..19: note = siRNA sense sequence
  source 1..19: mol_type = other RNA
actcaggagttctgtcaat

SEQ ID NO: 48283 - RNA, 19 nt, synthetic construct
  misc_feature 1..19: note = siRNA antisense sequence
  source 1..19: mol_type = other RNA
attgacagaactcctgagt

SEQ ID NO: 48284 - RNA, 19 nt, synthetic construct
  misc_feature 1..19: note = siRNA sense sequence
  source 1..19: mol_type = other RNA
ctcaggagttctgtcaatg

SEQ ID NO: 48285 - RNA, 19 nt, synthetic construct
  misc_feature 1..19: note = siRNA antisense sequence
  source 1..19: mol_type = other RNA
cattgacagaactcctgag

SEQ ID NO: 48286 - RNA, 19 nt, synthetic construct
  misc_feature 1..19: note = siRNA sense sequence
  source 1..19: mol_type = other RNA
tcaggagttctgtcaatgt

SEQ ID NO: 48287 - RNA, 19 nt, synthetic construct
  misc_feature 1..19: note = siRNA antisense sequence
  source 1..19: mol_type = other RNA
acattgacagaactcctga

SEQ ID NO: 48288 - RNA, 19 nt, synthetic construct
  misc_feature 1..19: note = siRNA sense sequence
  source 1..19: mol_type = other RNA
caggagttctgtcaatgtc

SEQ ID NO: 48289 - RNA, 19 nt, synthetic construct
  misc_feature 1..19: note = siRNA antisense sequence
  source 1..19: mol_type = other RNA
gacattgacagaactcctg

SEQ ID NO: 48290 - RNA, 19 nt, synthetic construct
  misc_feature 1..19: note = siRNA sense sequence
  source 1..19: mol_type = other RNA
aggagttctgtcaatgtct

SEQ ID NO: 48291 - RNA, 19 nt, synthetic construct
  misc_feature 1..19: note = siRNA antisense sequence
  source 1..19: mol_type = other RNA
agacattgacagaactcct

SEQ ID NO: 48292 - RNA, 19 nt, synthetic construct
  misc_feature 1..19: note = siRNA sense sequence
  source 1..19: mol_type = other RNA
gttctgtcaatgtctaatc

SEQ ID NO: 48293 - RNA, 19 nt, synthetic construct
  misc_feature 1..19: note = siRNA antisense sequence
  source 1..19: mol_type = other RNA
gattagacattgacagaac

SEQ ID NO: 48294 - RNA, 19 nt, synthetic construct
  misc_feature 1..19: note = siRNA sense sequence
  source 1..19: mol_type = other RNA
ttctgtcaatgtctaatct

SEQ ID NO: 48295 - RNA, 19 nt, synthetic construct
  misc_feature 1..19: note = siRNA antisense sequence
  source 1..19: mol_type = other RNA
agattagacattgacagaa

SEQ ID NO: 48296 - RNA, 19 nt, synthetic construct
  misc_feature 1..19: note = siRNA sense sequence
  source 1..19: mol_type = other RNA
tctgtcaatgtctaatctt

SEQ ID NO: 48297 - RNA, 19 nt, synthetic construct
  misc_feature 1..19: note = siRNA antisense sequence
  source 1..19: mol_type = other RNA
aagattagacattgacaga

SEQ ID NO: 48298 - RNA, 19 nt, synthetic construct
  misc_feature 1..19: note = siRNA sense sequence
  source 1..19: mol_type = other RNA
ctgtcaatgtctaatcttc

SEQ ID NO: 48299 - RNA, 19 nt, synthetic construct
  misc_feature 1..19: note = siRNA antisense sequence
  source 1..19: mol_type = other RNA
gaagattagacattgacag

SEQ ID NO: 48300 - RNA, 19 nt, synthetic construct
  misc_feature 1..19: note = siRNA sense sequence
  source 1..19: mol_type = other RNA
ttacataaagccagccctg

SEQ ID NO: 48301 - RNA, 19 nt, synthetic construct
  misc_feature 1..19: note = siRNA antisense sequence
  source 1..19: mol_type = other RNA
cagggctggctttatgtaa

SEQ ID NO: 48302 - RNA, 19 nt, synthetic construct
  misc_feature 1..19: note = siRNA sense sequence
  source 1..19: mol_type = other RNA
aagccagccctgagtttag

SEQ ID NO: 48303 - RNA, 19 nt, synthetic construct
  misc_feature 1..19: note = siRNA antisense sequence
  source 1..19: mol_type = other RNA
ctaaactcagggctggctt

SEQ ID NO: 48304 - RNA, 19 nt, synthetic construct
  misc_feature 1..19: note = siRNA sense sequence
  source 1..19: mol_type = other RNA
agccagccctgagtttaga

SEQ ID NO: 48305 - RNA, 19 nt, synthetic construct
  misc_feature 1..19: note = siRNA antisense sequence
  source 1..19: mol_type = other RNA
tctaaactcagggctggct

SEQ ID NO: 48306 - RNA, 19 nt, synthetic construct
  misc_feature 1..19: note = siRNA sense sequence
  source 1..19: mol_type = other RNA
gccagccctgagtttagaa

SEQ ID NO: 48307 - RNA, 19 nt, synthetic construct
  misc_feature 1..19: note = siRNA antisense sequence
  source 1..19: mol_type = other RNA
ttctaaactcagggctggc

SEQ ID NO: 48308 - RNA, 19 nt, synthetic construct
  misc_feature 1..19: note = siRNA sense sequence
  source 1..19: mol_type = other RNA
taatcatctccttcagctg

SEQ ID NO: 48309 - RNA, 19 nt, synthetic construct
  misc_feature 1..19: note = siRNA antisense sequence
  source 1..19: mol_type = other RNA
cagctgaaggagatgatta

SEQ ID NO: 48310 - RNA, 19 nt, synthetic construct
  misc_feature 1..19: note = siRNA sense sequence
  source 1..19: mol_type = other RNA
tccttcagctgatgttcat

SEQ ID NO: 48311 - RNA, 19 nt, synthetic construct
  misc_feature 1..19: note = siRNA antisense sequence
  source 1..19: mol_type = other RNA
atgaacatcagctgaagga

SEQ ID NO: 48312 - RNA, 19 nt, synthetic construct
  misc_feature 1..19: note = siRNA sense sequence
  source 1..19: mol_type = other RNA
ccttcagctgatgttcatt

SEQ ID NO: 48313 - RNA, 19 nt, synthetic construct
  misc_feature 1..19: note = siRNA antisense sequence
  source 1..19: mol_type = other RNA
aatgaacatcagctgaagg

SEQ ID NO: 48314 - RNA, 19 nt, synthetic construct
  misc_feature 1..19: note = siRNA sense sequence
  source 1..19: mol_type = other RNA
cttcagctgatgttcattc

SEQ ID NO: 48315 - RNA, 19 nt, synthetic construct
  misc_feature 1..19: note = siRNA antisense sequence
  source 1..19: mol_type = other RNA
gaatgaacatcagctgaag

SEQ ID NO: 48316 - RNA, 19 nt, synthetic construct
  misc_feature 1..19: note = siRNA sense sequence
  source 1..19: mol_type = other RNA
ttcagctgatgttcattca

SEQ ID NO: 48317 - RNA, 19 nt, synthetic construct
  misc_feature 1..19: note = siRNA antisense sequence
  source 1..19: mol_type = other RNA
tgaatgaacatcagctgaa

SEQ ID NO: 48318 - RNA, 19 nt, synthetic construct
  misc_feature 1..19: note = siRNA sense sequence
  source 1..19: mol_type = other RNA
cagctgatgttcattcaat

SEQ ID NO: 48319 - RNA, 19 nt, synthetic construct
  misc_feature 1..19: note = siRNA antisense sequence
  source 1..19: mol_type = other RNA
attgaatgaacatcagctg

SEQ ID NO: 48320 - RNA, 19 nt, synthetic construct
  misc_feature 1..19: note = siRNA sense sequence
  source 1..19: mol_type = other RNA
gaattaggaagttttagtg

SEQ ID NO: 48321 - RNA, 19 nt, synthetic construct
  misc_feature 1..19: note = siRNA antisense sequence
  source 1..19: mol_type = other RNA
cactaaaacttcctaattc

SEQ ID NO: 48322 - RNA, 19 nt, synthetic construct
  misc_feature 1..19: note = siRNA sense sequence
  source 1..19: mol_type = other RNA
caaagatctgttaaagact

SEQ ID NO: 48323 - RNA, 19 nt, synthetic construct
  misc_feature 1..19: note = siRNA antisense sequence
  source 1..19: mol_type = other RNA
agtctttaacagatctttg

SEQ ID NO: 48324 - RNA, 19 nt, synthetic construct
  misc_feature 1..19: note = siRNA sense sequence
  source 1..19: mol_type = other RNA
gttttcacctttgtttgta

SEQ ID NO: 48325 - RNA, 19 nt, synthetic construct
  misc_feature 1..19: note = siRNA antisense sequence
  source 1..19: mol_type = other RNA
tacaaacaaaggtgaaaac

SEQ ID NO: 48326 - RNA, 19 nt, synthetic construct
  misc_feature 1..19: note = siRNA sense sequence
  source 1..19: mol_type = other RNA
cacctttgtttgtatactt

SEQ ID NO: 48327 - RNA, 19 nt, synthetic construct
  misc_feature 1..19: note = siRNA antisense sequence
  source 1..19: mol_type = other RNA
aagtatacaaacaaaggtg

SEQ ID NO: 48328 - RNA, 19 nt, synthetic construct
  misc_feature 1..19: note = siRNA sense sequence
  source 1..19: mol_type = other RNA
ccagcactttgggagtctg

SEQ ID NO: 48329 - RNA, 19 nt, synthetic construct
  misc_feature 1..19: note = siRNA antisense sequence
  source 1..19: mol_type = other RNA
cagactcccaaagtgctgg

SEQ ID NO: 48330 - RNA, 19 nt, synthetic construct
  misc_feature 1..19: note = siRNA sense sequence
  source 1..19: mol_type = other RNA
cagcactttgggagtctga

SEQ ID NO: 48331 - RNA, 19 nt, synthetic construct
  misc_feature 1..19: note = siRNA antisense sequence
  source 1..19: mol_type = other RNA
tcagactcccaaagtgctg

SEQ ID NO: 48332 - RNA, 19 nt, synthetic construct
  misc_feature 1..19: note = siRNA sense sequence
  source 1..19: mol_type = other RNA
cggctggatcacctgaggt

SEQ ID NO: 48333 - RNA, 19 nt, synthetic construct
  misc_feature 1..19: note = siRNA antisense sequence
  source 1..19: mol_type = other RNA
acctcaggtgatccagccg

SEQ ID NO: 48334 - RNA, 19 nt, synthetic construct
  misc_feature 1..19: note = siRNA sense sequence
  source 1..19: mol_type = other RNA
ggctggatcacctgaggtc

SEQ ID NO: 48335 - RNA, 19 nt, synthetic construct
  misc_feature 1..19: note = siRNA antisense sequence
  source 1..19: mol_type = other RNA
gacctcaggtgatccagcc

SEQ ID NO: 48336 - RNA, 19 nt, synthetic construct
  misc_feature 1..19: note = siRNA sense sequence
  source 1..19: mol_type = other RNA
ctgaggtcaggagttcgag

SEQ ID NO: 48337 - RNA, 19 nt, synthetic construct
  misc_feature 1..19: note = siRNA antisense sequence
  source 1..19: mol_type = other RNA
ctcgaactcctgacctcag

SEQ ID NO: 48338 - RNA, 19 nt, synthetic construct
  misc_feature 1..19: note = siRNA sense sequence
  source 1..19: mol_type = other RNA
gcgcctgtaatcccagcta

SEQ ID NO: 48339 - RNA, 19 nt, synthetic construct
  misc_feature 1..19: note = siRNA antisense sequence
  source 1..19: mol_type = other RNA
tagctgggattacaggcgc

SEQ ID NO: 48340 - RNA, 19 nt, synthetic construct
  misc_feature 1..19: note = siRNA sense sequence
  source 1..19: mol_type = other RNA
cgcctgtaatcccagctac

SEQ ID NO: 48341 - RNA, 19 nt, synthetic construct
  misc_feature 1..19: note = siRNA antisense sequence
  source 1..19: mol_type = other RNA
gtagctgggattacaggcg

SEQ ID NO: 48342 - RNA, 19 nt, synthetic construct
  misc_feature 1..19: note = siRNA sense sequence
  source 1..19: mol_type = other RNA
gcctgtaatcccagctact

SEQ ID NO: 48343 - RNA, 19 nt, synthetic construct
  misc_feature 1..19: note = siRNA antisense sequence
  source 1..19: mol_type = other RNA
agtagctgggattacaggc

SEQ ID NO: 48344 - RNA, 19 nt, synthetic construct
  misc_feature 1..19: note = siRNA sense sequence
  source 1..19: mol_type = other RNA
cctgtaatcccagctactc

SEQ ID NO: 48345 - RNA, 19 nt, synthetic construct
  misc_feature 1..19: note = siRNA antisense sequence
  source 1..19: mol_type = other RNA
gagtagctgggattacagg

SEQ ID NO: 48346 - RNA, 19 nt, synthetic construct
  misc_feature 1..19: note = siRNA sense sequence
  source 1..19: mol_type = other RNA
ctgtaatcccagctactca

SEQ ID NO: 48347 - RNA, 19 nt, synthetic construct
  misc_feature 1..19: note = siRNA antisense sequence
  source 1..19: mol_type = other RNA
tgagtagctgggattacag

SEQ ID NO: 48348 - RNA, 19 nt, synthetic construct
  misc_feature 1..19: note = siRNA sense sequence
  source 1..19: mol_type = other RNA
tcccagctactcaggaggc

SEQ ID NO: 48349 - RNA, 19 nt, synthetic construct
  misc_feature 1..19: note = siRNA antisense sequence
  source 1..19: mol_type = other RNA
gcctcctgagtagctggga

SEQ ID NO: 48350 - RNA, 19 nt, synthetic construct
  misc_feature 1..19: note = siRNA sense sequence
  source 1..19: mol_type = other RNA
cccagctactcaggaggct

SEQ ID NO: 48351 - RNA, 19 nt, synthetic construct
  misc_feature 1..19: note = siRNA antisense sequence
  source 1..19: mol_type = other RNA
agcctcctgagtagctggg

SEQ ID NO: 48352 - RNA, 19 nt, synthetic construct
  misc_feature 1..19: note = siRNA sense sequence
  source 1..19: mol_type = other RNA
gaggttgcagtgagccaag

SEQ ID NO: 48353 - RNA, 19 nt, synthetic construct
  misc_feature 1..19: note = siRNA antisense sequence
  source 1..19: mol_type = other RNA
cttggctcactgcaacctc

SEQ ID NO: 48354 - RNA, 19 nt, synthetic construct
  misc_feature 1..19: note = siRNA sense sequence
  source 1..19: mol_type = other RNA
aggttgcagtgagccaaga

SEQ ID NO: 48355 - RNA, 19 nt, synthetic construct
  misc_feature 1..19: note = siRNA antisense sequence
  source 1..19: mol_type = other RNA
tcttggctcactgcaacct

SEQ ID NO: 48356 - RNA, 19 nt, synthetic construct
  misc_feature 1..19: note = siRNA sense sequence
  source 1..19: mol_type = other RNA
ggttgcagtgagccaagat

SEQ ID NO: 48357 - RNA, 19 nt, synthetic construct
  misc_feature 1..19: note = siRNA antisense sequence
  source 1..19: mol_type = other RNA
atcttggctcactgcaacc

SEQ ID NO: 48358 - RNA, 19 nt, synthetic construct
  misc_feature 1..19: note = siRNA sense sequence
  source 1..19: mol_type = other RNA
gttgcagtgagccaagatc

SEQ ID NO: 48359 - RNA, 19 nt, synthetic construct
  misc_feature 1..19: note = siRNA antisense sequence
  source 1..19: mol_type = other RNA
gatcttggctcactgcaac

SEQ ID NO: 48360 - RNA, 19 nt, synthetic construct
  misc_feature 1..19: note = siRNA sense sequence
  source 1..19: mol_type = other RNA
ttgcagtgagccaagatcg

SEQ ID NO: 48361 - RNA, 19 nt, synthetic construct
  misc_feature 1..19: note = siRNA antisense sequence
  source 1..19: mol_type = other RNA
cgatcttggctcactgcaa

SEQ ID NO: 48362 - RNA, 19 nt, synthetic construct
  misc_feature 1..19: note = siRNA sense sequence
  source 1..19: mol_type = other RNA
tgcagtgagccaagatcgt

SEQ ID NO: 48363 - RNA, 19 nt, synthetic construct
  misc_feature 1..19: note = siRNA antisense sequence
  source 1..19: mol_type = other RNA
acgatcttggctcactgca

SEQ ID NO: 48364 - RNA, 19 nt, synthetic construct
  misc_feature 1..19: note = siRNA sense sequence
  source 1..19: mol_type = other RNA
gcagtgagccaagatcgtg

SEQ ID NO: 48365 - RNA, 19 nt, synthetic construct
  misc_feature 1..19: note = siRNA antisense sequence
  source 1..19: mol_type = other RNA
cacgatcttggctcactgc

SEQ ID NO: 48366 - RNA, 19 nt, synthetic construct
  misc_feature 1..19: note = siRNA sense sequence
  source 1..19: mol_type = other RNA
cagtgagccaagatcgtgc

SEQ ID NO: 48367 - RNA, 19 nt, synthetic construct
  misc_feature 1..19: note = siRNA antisense sequence
  source 1..19: mol_type = other RNA
gcacgatcttggctcactg

SEQ ID NO: 48368 - RNA, 19 nt, synthetic construct
  misc_feature 1..19: note = siRNA sense sequence
  source 1..19: mol_type = other RNA
agtgagccaagatcgtgcc

SEQ ID NO: 48369 - RNA, 19 nt, synthetic construct
  misc_feature 1..19: note = siRNA antisense sequence
  source 1..19: mol_type = other RNA
ggcacgatcttggctcact

SEQ ID NO: 48370 - RNA, 19 nt, synthetic construct
  misc_feature 1..19: note = siRNA sense sequence
  source 1..19: mol_type = other RNA
gtgagccaagatcgtgcca

SEQ ID NO: 48371 - RNA, 19 nt, synthetic construct
  misc_feature 1..19: note = siRNA antisense sequence
  source 1..19: mol_type = other RNA
tggcacgatcttggctcac

SEQ ID NO: 48372 - RNA, 19 nt, synthetic construct
  misc_feature 1..19: note = siRNA sense sequence
  source 1..19: mol_type = other RNA
tgagccaagatcgtgccac

SEQ ID NO: 48373 - RNA, 19 nt, synthetic construct
  misc_feature 1..19: note = siRNA antisense sequence
  source 1..19: mol_type = other RNA
gtggcacgatcttggctca

SEQ ID NO: 48374 - RNA, 19 nt, synthetic construct
  misc_feature 1..19: note = siRNA sense sequence
  source 1..19: mol_type = other RNA
gagccaagatcgtgccact

SEQ ID NO: 48375 - RNA, 19 nt, synthetic construct
  misc_feature 1..19: note = siRNA antisense sequence
  source 1..19: mol_type = other RNA
agtggcacgatcttggctc

SEQ ID NO: 48376 - RNA, 19 nt, synthetic construct
  misc_feature 1..19: note = siRNA sense sequence
  source 1..19: mol_type = other RNA
gttaaagattgtaaggaag

SEQ ID NO: 48377 - RNA, 19 nt, synthetic construct
  misc_feature 1..19: note = siRNA antisense sequence
  source 1..19: mol_type = other RNA
cttccttacaatctttaac

SEQ ID NO: 48378 - RNA, 19 nt, synthetic construct
  misc_feature 1..19: note = siRNA sense sequence
  source 1..19: mol_type = other RNA
taaagattgtaaggaagac

SEQ ID NO: 48379 - RNA, 19 nt, synthetic construct
  misc_feature 1..19: note = siRNA antisense sequence
  source 1..19: mol_type = other RNA
gtcttccttacaatcttta

SEQ ID NO: 48380 - RNA, 19 nt, synthetic construct
  misc_feature 1..19: note = siRNA sense sequence
  source 1..19: mol_type = other RNA
aaagattgtaaggaagaca

SEQ ID NO: 48381 - RNA, 19 nt, synthetic construct
  misc_feature 1..19: note = siRNA antisense sequence
  source 1..19: mol_type = other RNA
tgtcttccttacaatcttt

SEQ ID NO: 48382 - RNA, 19 nt, synthetic construct
  misc_feature 1..19: note = siRNA sense sequence
  source 1..19: mol_type = other RNA
ttgtaaggaagacatcact

SEQ ID NO: 48383 - RNA, 19 nt, synthetic construct
  misc_feature 1..19: note = siRNA antisense sequence
  source 1..19: mol_type = other RNA
agtgatgtcttccttacaa

SEQ ID NO: 48384 - RNA, 19 nt, synthetic construct
  misc_feature 1..19: note = siRNA sense sequence
  source 1..19: mol_type = other RNA
tgtaaggaagacatcactc

SEQ ID NO: 48385 - RNA, 19 nt, synthetic construct
  misc_feature 1..19: note = siRNA antisense sequence
  source 1..19: mol_type = other RNA
gagtgatgtcttccttaca

SEQ ID NO: 48386 - RNA, 19 nt, synthetic construct
  misc_feature 1..19: note = siRNA sense sequence
  source 1..19: mol_type = other RNA
aggaagacatcactcaaga

SEQ ID NO: 48387 - RNA, 19 nt, synthetic construct
  misc_feature 1..19: note = siRNA antisense sequence
  source 1..19: mol_type = other RNA
tcttgagtgatgtcttcct

SEQ ID NO: 48388 - RNA, 19 nt, synthetic construct
  misc_feature 1..19: note = siRNA sense sequence
  source 1..19: mol_type = other RNA
ggaagacatcactcaagag

SEQ ID NO: 48389 - RNA, 19 nt, synthetic construct
  misc_feature 1..19: note = siRNA antisense sequence
  source 1..19: mol_type = other RNA
ctcttgagtgatgtcttcc

SEQ ID NO: 48390 - RNA, 19 nt, synthetic construct
  misc_feature 1..19: note = siRNA sense sequence
  source 1..19: mol_type = other RNA
gaagacatcactcaagagg

SEQ ID NO: 48391 - RNA, 19 nt, synthetic construct
  misc_feature 1..19: note = siRNA antisense sequence
  source 1..19: mol_type = other RNA
cctcttgagtgatgtcttc

SEQ ID NO: 48392 - RNA, 19 nt, synthetic construct
  misc_feature 1..19: note = siRNA sense sequence
  source 1..19: mol_type = other RNA
aagacatcactcaagagga

SEQ ID NO: 48393 - RNA, 19 nt, synthetic construct
  misc_feature 1..19: note = siRNA antisense sequence
  source 1..19: mol_type = other RNA
tcctcttgagtgatgtctt

SEQ ID NO: 48394 - RNA, 19 nt, synthetic construct
  misc_feature 1..19: note = siRNA sense sequence
  source 1..19: mol_type = other RNA
tttatgatgaaggtattgc

SEQ ID NO: 48395 - RNA, 19 nt, synthetic construct
  misc_feature 1..19: note = siRNA antisense sequence
  source 1..19: mol_type = other RNA
gcaataccttcatcataaa

SEQ ID NO: 48396 - RNA, 19 nt, synthetic construct
  misc_feature 1..19: note = siRNA sense sequence
  source 1..19: mol_type = other RNA
ttatgatgaaggtattgca

SEQ ID NO: 48397 - RNA, 19 nt, synthetic construct
  misc_feature 1..19: note = siRNA antisense sequence
  source 1..19: mol_type = other RNA
tgcaataccttcatcataa

SEQ ID NO: 48398 - RNA, 19 nt, synthetic construct
  misc_feature 1..19: note = siRNA sense sequence
  source 1..19: mol_type = other RNA
tatgatgaaggtattgcag

SEQ ID NO: 48399 - RNA, 19 nt, synthetic construct
  misc_feature 1..19: note = siRNA antisense sequence
  source 1..19: mol_type = other RNA
ctgcaataccttcatcata

SEQ ID NO: 48400 - RNA, 19 nt, synthetic construct
  misc_feature 1..19: note = siRNA sense sequence
  source 1..19: mol_type = other RNA
atgaaggtattgcagtaag

SEQ ID NO: 48401 - RNA, 19 nt, synthetic construct
  misc_feature 1..19: note = siRNA antisense sequence
  source 1..19: mol_type = other RNA
cttactgcaataccttcat

SEQ ID NO: 48402 - RNA, 19 nt, synthetic construct
  misc_feature 1..19: note = siRNA sense sequence
  source 1..19: mol_type = other RNA
tgaaggtattgcagtaagg

SEQ ID NO: 48403 - RNA, 19 nt, synthetic construct
  misc_feature 1..19: note = siRNA antisense sequence
  source 1..19: mol_type = other RNA
ccttactgcaataccttca

SEQ ID NO: 48404 - RNA, 19 nt, synthetic construct
  misc_feature 1..19: note = siRNA sense sequence
  source 1..19: mol_type = other RNA
gaaggtattgcagtaagga

SEQ ID NO: 48405 - RNA, 19 nt, synthetic construct
  misc_feature 1..19: note = siRNA antisense sequence
  source 1..19: mol_type = other RNA
tccttactgcaataccttc

SEQ ID NO: 48406 - RNA, 19 nt, synthetic construct
  misc_feature 1..19: note = siRNA sense sequence
  source 1..19: mol_type = other RNA
aaggtattgcagtaaggaa

SEQ ID NO: 48407 - RNA, 19 nt, synthetic construct
  misc_feature 1..19: note = siRNA antisense sequence
  source 1..19: mol_type = other RNA
ttccttactgcaatacctt

SEQ ID NO: 48408 - RNA, 19 nt, synthetic construct
  misc_feature 1..19: note = siRNA sense sequence
  source 1..19: mol_type = other RNA
aggtattgcagtaaggaag

SEQ ID NO: 48409 - RNA, 19 nt, synthetic construct
  misc_feature 1..19: note = siRNA antisense sequence
  source 1..19: mol_type = other RNA
cttccttactgcaatacct

SEQ ID NO: 48410 - RNA, 19 nt, synthetic construct
  misc_feature 1..19: note = siRNA sense sequence
  source 1..19: mol_type = other RNA
ggtattgcagtaaggaaga

SEQ ID NO: 48411 - RNA, 19 nt, synthetic construct
  misc_feature 1..19: note = siRNA antisense sequence
  source 1..19: mol_type = other RNA
tcttccttactgcaatacc

SEQ ID NO: 48412 - RNA, 19 nt, synthetic construct
  misc_feature 1..19: note = siRNA sense sequence
  source 1..19: mol_type = other RNA
gtattgcagtaaggaagag

SEQ ID NO: 48413 - RNA, 19 nt, synthetic construct
  misc_feature 1..19: note = siRNA antisense sequence
  source 1..19: mol_type = other RNA
ctcttccttactgcaatac

SEQ ID NO: 48414 - RNA, 19 nt, synthetic construct
  misc_feature 1..19: note = siRNA sense sequence
  source 1..19: mol_type = other RNA
gggctcagctttgactaca

SEQ ID NO: 48415 - RNA, 19 nt, synthetic construct
  misc_feature 1..19: note = siRNA antisense sequence
  source 1..19: mol_type = other RNA
tgtagtcaaagctgagccc

SEQ ID NO: 48416 - RNA, 19 nt, synthetic construct
  misc_feature 1..19: note = siRNA sense sequence
  source 1..19: mol_type = other RNA
ggctcagctttgactacag

SEQ ID NO: 48417 - RNA, 19 nt, synthetic construct
  misc_feature 1..19: note = siRNA antisense sequence
  source 1..19: mol_type = other RNA
ctgtagtcaaagctgagcc

SEQ ID NO: 48418 - RNA, 19 nt, synthetic construct
  misc_feature 1..19: note = siRNA sense sequence
  source 1..19: mol_type = other RNA
gctcagctttgactacagt

SEQ ID NO: 48419 - RNA, 19 nt, synthetic construct
  misc_feature 1..19: note = siRNA antisense sequence
  source 1..19: mol_type = other RNA
actgtagtcaaagctgagc

SEQ ID NO: 48420 - RNA, 19 nt, synthetic construct
  misc_feature 1..19: note = siRNA sense sequence
  source 1..19: mol_type = other RNA
ctcagctttgactacagtg

SEQ ID NO: 48421 - RNA, 19 nt, synthetic construct
  misc_feature 1..19: note = siRNA antisense sequence
  source 1..19: mol_type = other RNA
cactgtagtcaaagctgag

SEQ ID NO: 48422 - RNA, 19 nt, synthetic construct
  misc_feature 1..19: note = siRNA sense sequence
  source 1..19: mol_type = other RNA
gctttgactacagtgagga

SEQ ID NO: 48423 - RNA, 19 nt, synthetic construct
  misc_feature 1..19: note = siRNA antisense sequence
  source 1..19: mol_type = other RNA
tcctcactgtagtcaaagc

SEQ ID NO: 48424 - RNA, 19 nt, synthetic construct
  misc_feature 1..19: note = siRNA sense sequence
  source 1..19: mol_type = other RNA
ctttgactacagtgaggac

SEQ ID NO: 48425 - RNA, 19 nt, synthetic construct
  misc_feature 1..19: note = siRNA antisense sequence
  source 1..19: mol_type = other RNA
gtcctcactgtagtcaaag

SEQ ID NO: 48426 - RNA, 19 nt, synthetic construct
  misc_feature 1..19: note = siRNA sense sequence
  source 1..19: mol_type = other RNA
tttgactacagtgaggaca

SEQ ID NO: 48427 - RNA, 19 nt, synthetic construct
  misc_feature 1..19: note = siRNA antisense sequence
  source 1..19: mol_type = other RNA
tgtcctcactgtagtcaaa

SEQ ID NO: 48428 - RNA, 19 nt, synthetic construct
  misc_feature 1..19: note = siRNA sense sequence
  source 1..19: mol_type = other RNA
acagggcagggattggcag

SEQ ID NO: 48429 - RNA, 19 nt, synthetic construct
  misc_feature 1..19: note = siRNA antisense sequence
  source 1..19: mol_type = other RNA
ctgccaatccctgccctgt

SEQ ID NO: 48430 - RNA, 19 nt, synthetic construct
  misc_feature 1..19: note = siRNA sense sequence
  source 1..19: mol_type = other RNA
cagggcagggattggcagt

SEQ ID NO: 48431 - RNA, 19 nt, synthetic construct
  misc_feature 1..19: note = siRNA antisense sequence
  source 1..19: mol_type = other RNA
actgccaatccctgccctg

SEQ ID NO: 48432 - RNA, 19 nt, synthetic construct
  misc_feature 1..19: note = siRNA sense sequence
  source 1..19: mol_type = other RNA
agggcagggattggcagta

SEQ ID NO: 48433 - RNA, 19 nt, synthetic construct
  misc_feature 1..19: note = siRNA antisense sequence
  source 1..19: mol_type = other RNA
tactgccaatccctgccct

SEQ ID NO: 48434 - RNA, 19 nt, synthetic construct
  misc_feature 1..19: note = siRNA sense sequence
  source 1..19: mol_type = other RNA
ggcagggattggcagtaac

SEQ ID NO: 48435 - RNA, 19 nt, synthetic construct
  misc_feature 1..19: note = siRNA antisense sequence
  source 1..19: mol_type = other RNA
gttactgccaatccctgcc

SEQ ID NO: 48436 - RNA, 19 nt, synthetic construct
  misc_feature 1..19: note = siRNA sense sequence
  source 1..19: mol_type = other RNA
attcttgctagactggctc

SEQ ID NO: 48437 - RNA, 19 nt, synthetic construct
  misc_feature 1..19: note = siRNA antisense sequence
  source 1..19: mol_type = other RNA
gagccagtctagcaagaat

SEQ ID NO: 48438 - RNA, 19 nt, synthetic construct
  misc_feature 1..19: note = siRNA sense sequence
  source 1..19: mol_type = other RNA
ttcttgctagactggctca

SEQ ID NO: 48439 - RNA, 19 nt, synthetic construct
  misc_feature 1..19: note = siRNA antisense sequence
  source 1..19: mol_type = other RNA
tgagccagtctagcaagaa

SEQ ID NO: 48440 - RNA, 19 nt, synthetic construct
  misc_feature 1..19: note = siRNA sense sequence
  source 1..19: mol_type = other RNA
tcttgctagactggctcaa

SEQ ID NO: 48441 - RNA, 19 nt, synthetic construct
  misc_feature 1..19: note = siRNA antisense sequence
  source 1..19: mol_type = other RNA
ttgagccagtctagcaaga

SEQ ID NO: 48442 - RNA, 19 nt, synthetic construct
  misc_feature 1..19: note = siRNA sense sequence
  source 1..19: mol_type = other RNA
cttgctagactggctcaac

SEQ ID NO: 48443 - RNA, 19 nt, synthetic construct
  misc_feature 1..19: note = siRNA antisense sequence
  source 1..19: mol_type = other RNA
gttgagccagtctagcaag

SEQ ID NO: 48444 - RNA, 19 nt, synthetic construct
  misc_feature 1..19: note = siRNA sense sequence
  source 1..19: mol_type = other RNA
cttgctgaaggcagataaa

SEQ ID NO: 48445 - RNA, 19 nt, synthetic construct
  misc_feature 1..19: note = siRNA antisense sequence
  source 1..19: mol_type = other RNA
tttatctgccttcagcaag

SEQ ID NO: 48446 - RNA, 19 nt, synthetic construct
  misc_feature 1..19: note = siRNA sense sequence
  source 1..19: mol_type = other RNA
ttgctgaaggcagataaat

SEQ ID NO: 48447 - RNA, 19 nt, synthetic construct
  misc_feature 1..19: note = siRNA antisense sequence
  source 1..19: mol_type = other RNA
atttatctgccttcagcaa

SEQ ID NO: 48448 - RNA, 19 nt, synthetic construct
  misc_feature 1..19: note = siRNA sense sequence
  source 1..19: mol_type = other RNA
acacttgacatgtcacttc

SEQ ID NO: 48449 - RNA, 19 nt, synthetic construct
  misc_feature 1..19: note = siRNA antisense sequence
  source 1..19: mol_type = other RNA
gaagtgacatgtcaagtgt

SEQ ID NO: 48450 - RNA, 19 nt, synthetic construct
  misc_feature 1..19: note = siRNA sense sequence
  source 1..19: mol_type = other RNA
cacttgacatgtcacttct

SEQ ID NO: 48451 - RNA, 19 nt, synthetic construct
  misc_feature 1..19: note = siRNA antisense sequence
  source 1..19: mol_type = other RNA
agaagtgacatgtcaagtg

SEQ ID NO: 48452 - RNA, 19 nt, synthetic construct
  misc_feature 1..19: note = siRNA sense sequence
  source 1..19: mol_type = other RNA
acttgacatgtcacttctg

SEQ ID NO: 48453 - RNA, 19 nt, synthetic construct
  misc_feature 1..19: note = siRNA antisense sequence
  source 1..19: mol_type = other RNA
cagaagtgacatgtcaagt

SEQ ID NO: 48454 - RNA, 19 nt, synthetic construct
  misc_feature 1..19: note = siRNA sense sequence
  source 1..19: mol_type = other RNA
cttgacatgtcacttctga

SEQ ID NO: 48455 - RNA, 19 nt, synthetic construct
  misc_feature 1..19: note = siRNA antisense sequence
  source 1..19: mol_type = other RNA
tcagaagtgacatgtcaag

SEQ ID NO: 48456 - RNA, 19 nt, synthetic construct
  misc_feature 1..19: note = siRNA sense sequence
  source 1..19: mol_type = other RNA
ttgacatgtcacttctgat

SEQ ID NO: 48457 - RNA, 19 nt, synthetic construct
  misc_feature 1..19: note = siRNA antisense sequence
  source 1..19: mol_type = other RNA
atcagaagtgacatgtcaa

SEQ ID NO: 48458 - RNA, 19 nt, synthetic construct
  misc_feature 1..19: note = siRNA sense sequence
  source 1..19: mol_type = other RNA
tgacatgtcacttctgatg

SEQ ID NO: 48459 - RNA, 19 nt, synthetic construct
  misc_feature 1..19: note = siRNA antisense sequence
  source 1..19: mol_type = other RNA
catcagaagtgacatgtca

SEQ ID NO: 48460 - RNA, 19 nt, synthetic construct
  misc_feature 1..19: note = siRNA sense sequence
  source 1..19: mol_type = other RNA
gacatgtcacttctgatgc

SEQ ID NO: 48461 - RNA, 19 nt, synthetic construct
  misc_feature 1..19: note = siRNA antisense sequence
  source 1..19: mol_type = other RNA
gcatcagaagtgacatgtc

SEQ ID NO: 48462 - RNA, 19 nt, synthetic construct
  misc_feature 1..19: note = siRNA sense sequence
  source 1..19: mol_type = other RNA
acatgtcacttctgatgcc

SEQ ID NO: 48463 - RNA, 19 nt, synthetic construct
  misc_feature 1..19: note = siRNA antisense sequence
  source 1..19: mol_type = other RNA
ggcatcagaagtgacatgt

SEQ ID NO: 48464 - RNA, 19 nt, synthetic construct
  misc_feature 1..19: note = siRNA sense sequence
  source 1..19: mol_type = other RNA
catgtcacttctgatgcca

SEQ ID NO: 48465 - RNA, 19 nt, synthetic construct
  misc_feature 1..19: note = siRNA antisense sequence
  source 1..19: mol_type = other RNA
tggcatcagaagtgacatg

SEQ ID NO: 48466 - RNA, 19 nt, synthetic construct
  misc_feature 1..19: note = siRNA sense sequence
  source 1..19: mol_type = other RNA
ttcccacatcgaccagtta

SEQ ID NO: 48467 - RNA, 19 nt, synthetic construct
  misc_feature 1..19: note = siRNA antisense sequence
  source 1..19: mol_type = other RNA
taactggtcgatgtgggaa

SEQ ID NO: 48468 - RNA, 19 nt, synthetic construct
  misc_feature 1..19: note = siRNA sense sequence
  source 1..19: mol_type = other RNA
tcccacatcgaccagttat

SEQ ID NO: 48469 - RNA, 19 nt, synthetic construct
  misc_feature 1..19: note = siRNA antisense sequence
  source 1..19: mol_type = other RNA
ataactggtcgatgtggga

SEQ ID NO: 48470 - RNA, 19 nt, synthetic construct
  misc_feature 1..19: note = siRNA sense sequence
  source 1..19: mol_type = other RNA
cccacatcgaccagttatc

SEQ ID NO: 48471 - RNA, 19 nt, synthetic construct
  misc_feature 1..19: note = siRNA antisense sequence
  source 1..19: mol_type = other RNA
gataactggtcgatgtggg

SEQ ID NO: 48472 - RNA, 19 nt, synthetic construct
  misc_feature 1..19: note = siRNA sense sequence
  source 1..19: mol_type = other RNA
ccacatcgaccagttatct

SEQ ID NO: 48473 - RNA, 19 nt, synthetic construct
  misc_feature 1..19: note = siRNA antisense sequence
  source 1..19: mol_type = other RNA
agataactggtcgatgtgg

SEQ ID NO: 48474 - RNA, 19 nt, synthetic construct
  misc_feature 1..19: note = siRNA sense sequence
  source 1..19: mol_type = other RNA
cacatcgaccagttatctg

SEQ ID NO: 48475 - RNA, 19 nt, synthetic construct
  misc_feature 1..19: note = siRNA antisense sequence
  source 1..19: mol_type = other RNA
cagataactggtcgatgtg

SEQ ID NO: 48476 - RNA, 19 nt, synthetic construct
  misc_feature 1..19: note = siRNA sense sequence
  source 1..19: mol_type = other RNA
acatcgaccagttatctga

SEQ ID NO: 48477 - RNA, 19 nt, synthetic construct
  misc_feature 1..19: note = siRNA antisense sequence
  source 1..19: mol_type = other RNA
tcagataactggtcgatgt

SEQ ID NO: 48478 - RNA, 19 nt, synthetic construct
  misc_feature 1..19: note = siRNA sense sequence
  source 1..19: mol_type = other RNA
catcgaccagttatctgac

SEQ ID NO: 48479 - RNA, 19 nt, synthetic construct
  misc_feature 1..19: note = siRNA antisense sequence
  source 1..19: mol_type = other RNA
gtcagataactggtcgatg

SEQ ID NO: 48480 - RNA, 19 nt, synthetic construct
  misc_feature 1..19: note = siRNA sense sequence
  source 1..19: mol_type = other RNA
atcgaccagttatctgaca

SEQ ID NO: 48481 - RNA, 19 nt, synthetic construct
  misc_feature 1..19: note = siRNA antisense sequence
  source 1..19: mol_type = other RNA
tgtcagataactggtcgat

SEQ ID NO: 48482 - RNA, 19 nt, synthetic construct
  misc_feature 1..19: note = siRNA sense sequence
  source 1..19: mol_type = other RNA
tcgaccagttatctgacat

SEQ ID NO: 48483 - RNA, 19 nt, synthetic construct
  misc_feature 1..19: note = siRNA antisense sequence
  source 1..19: mol_type = other RNA
atgtcagataactggtcga

SEQ ID NO: 48484 - RNA, 19 nt, synthetic construct
  misc_feature 1..19: note = siRNA sense sequence
  source 1..19: mol_type = other RNA
ggctcagtccttcaagaat

SEQ ID NO: 48485 - RNA, 19 nt, synthetic construct
  misc_feature 1..19: note = siRNA antisense sequence
  source 1..19: mol_type = other RNA
attcttgaaggactgagcc

SEQ ID NO: 48486 - RNA, 19 nt, synthetic construct
  misc_feature 1..19: note = siRNA sense sequence
  source 1..19: mol_type = other RNA
gctcagtccttcaagaatt

SEQ ID NO: 48487 - RNA, 19 nt, synthetic construct
  misc_feature 1..19: note = siRNA antisense sequence
  source 1..19: mol_type = other RNA
aattcttgaaggactgagc

SEQ ID NO: 48488 - RNA, 19 nt, synthetic construct
  misc_feature 1..19: note = siRNA sense sequence
  source 1..19: mol_type = other RNA
ctcagtccttcaagaattc

SEQ ID NO: 48489 - RNA, 19 nt, synthetic construct
  misc_feature 1..19: note = siRNA antisense sequence
  source 1..19: mol_type = other RNA
gaattcttgaaggactgag

SEQ ID NO: 48490 - RNA, 19 nt, synthetic construct
  misc_feature 1..19: note = siRNA sense sequence
  source 1..19: mol_type = other RNA
tcagtccttcaagaattca

SEQ ID NO: 48491 - RNA, 19 nt, synthetic construct
  misc_feature 1..19: note = siRNA antisense sequence
  source 1..19: mol_type = other RNA
tgaattcttgaaggactga

SEQ ID NO: 48492 - RNA, 19 nt, synthetic construct
  misc_feature 1..19: note = siRNA sense sequence
  source 1..19: mol_type = other RNA
cagtccttcaagaattcat

SEQ ID NO: 48493 - RNA, 19 nt, synthetic construct
  misc_feature 1..19: note = siRNA antisense sequence
  source 1..19: mol_type = other RNA
atgaattcttgaaggactg

SEQ ID NO: 48494 - RNA, 19 nt, synthetic construct
  misc_feature 1..19: note = siRNA sense sequence
  source 1..19: mol_type = other RNA
agtccttcaagaattcatt

SEQ ID NO: 48495 - RNA, 19 nt, synthetic construct
  misc_feature 1..19: note = siRNA antisense sequence
  source 1..19: mol_type = other RNA
aatgaattcttgaaggact

SEQ ID NO: 48496 - RNA, 19 nt, synthetic construct
  misc_feature 1..19: note = siRNA sense sequence
  source 1..19: mol_type = other RNA
gtccttcaagaattcattc

SEQ ID NO: 48497 - RNA, 19 nt, synthetic construct
  misc_feature 1..19: note = siRNA antisense sequence
  source 1..19: mol_type = other RNA
gaatgaattcttgaaggac

SEQ ID NO: 48498 - RNA, 19 nt, synthetic construct
  misc_feature 1..19: note = siRNA sense sequence
  source 1..19: mol_type = other RNA
attcattccaatttagagc

SEQ ID NO: 48499 - RNA, 19 nt, synthetic construct
  misc_feature 1..19: note = siRNA antisense sequence
  source 1..19: mol_type = other RNA
gctctaaattggaatgaat

SEQ ID NO: 48500 - RNA, 19 nt, synthetic construct
  misc_feature 1..19: note = siRNA sense sequence
  source 1..19: mol_type = other RNA
ccaatttagagccagtagg

SEQ ID NO: 48501 - RNA, 19 nt, synthetic construct
  misc_feature 1..19: note = siRNA antisense sequence
  source 1..19: mol_type = other RNA
cctactggctctaaattgg

SEQ ID NO: 48502 - RNA, 19 nt, synthetic construct
  misc_feature 1..19: note = siRNA sense sequence
  source 1..19: mol_type = other RNA
caatttagagccagtaggt

SEQ ID NO: 48503 - RNA, 19 nt, synthetic construct
  misc_feature 1..19: note = siRNA antisense sequence
  source 1..19: mol_type = other RNA
acctactggctctaaattg

SEQ ID NO: 48504 - RNA, 19 nt, synthetic construct
  misc_feature 1..19: note = siRNA sense sequence
  source 1..19: mol_type = other RNA
aatttagagccagtaggtt

SEQ ID NO: 48505 - RNA, 19 nt, synthetic construct
  misc_feature 1..19: note = siRNA antisense sequence
  source 1..19: mol_type = other RNA
aacctactggctctaaatt

SEQ ID NO: 48506 - RNA, 19 nt, synthetic construct
  misc_feature 1..19: note = siRNA sense sequence
  source 1..19: mol_type = other RNA
agagccagtaggtttccag

SEQ ID NO: 48507 - RNA, 19 nt, synthetic construct
  misc_feature 1..19: note = siRNA antisense sequence
  source 1..19: mol_type = other RNA
ctggaaacctactggctct

SEQ ID NO: 48508 - RNA, 19 nt, synthetic construct
  misc_feature 1..19: note = siRNA sense sequence
  source 1..19: mol_type = other RNA
gagccagtaggtttccagg

SEQ ID NO: 48509 - RNA, 19 nt, synthetic construct
  misc_feature 1..19: note = siRNA antisense sequence
  source 1..19: mol_type = other RNA
cctggaaacctactggctc

SEQ ID NO: 48510 - RNA, 19 nt, synthetic construct
  misc_feature 1..19: note = siRNA sense sequence
  source 1..19: mol_type = other RNA
agccagtaggtttccaggt

SEQ ID NO: 48511 - RNA, 19 nt, synthetic construct
  misc_feature 1..19: note = siRNA antisense sequence
  source 1..19: mol_type = other RNA
acctggaaacctactggct

SEQ ID NO: 48512 - RNA, 19 nt, synthetic construct
  misc_feature 1..19: note = siRNA sense sequence
  source 1..19: mol_type = other RNA
gccagtaggtttccaggta

SEQ ID NO: 48513 - RNA, 19 nt, synthetic construct
  misc_feature 1..19: note = siRNA antisense sequence
  source 1..19: mol_type = other RNA
tacctggaaacctactggc

SEQ ID NO: 48514 - RNA, 19 nt, synthetic construct
  misc_feature 1..19: note = siRNA sense sequence
  source 1..19: mol_type = other RNA
ccagtaggtttccaggtac

SEQ ID NO: 48515 - RNA, 19 nt, synthetic construct
  misc_feature 1..19: note = siRNA antisense sequence
  source 1..19: mol_type = other RNA
gtacctggaaacctactgg

SEQ ID NO: 48516 - RNA, 19 nt, synthetic construct
  misc_feature 1..19: note = siRNA sense sequence
  source 1..19: mol_type = other RNA
cagtaggtttccaggtacc

SEQ ID NO: 48517 - RNA, 19 nt, synthetic construct
  misc_feature 1..19: note = siRNA antisense sequence
  source 1..19: mol_type = other RNA
ggtacctggaaacctactg

SEQ ID NO: 48518 - RNA, 19 nt, synthetic construct
  misc_feature 1..19: note = siRNA sense sequence
  source 1..19: mol_type = other RNA
taggtttccaggtacccac

SEQ ID NO: 48519 - RNA, 19 nt, synthetic construct
  misc_feature 1..19: note = siRNA antisense sequence
  source 1..19: mol_type = other RNA
gtgggtacctggaaaccta

SEQ ID NO: 48520 - RNA, 19 nt, synthetic construct
  misc_feature 1..19: note = siRNA sense sequence
  source 1..19: mol_type = other RNA
aggtttccaggtacccacg

SEQ ID NO: 48521 - RNA, 19 nt, synthetic construct
  misc_feature 1..19: note = siRNA antisense sequence
  source 1..19: mol_type = other RNA
cgtgggtacctggaaacct

SEQ ID NO: 48522 - RNA, 19 nt, synthetic construct
  misc_feature 1..19: note = siRNA sense sequence
  source 1..19: mol_type = other RNA
ggtttccaggtacccacga

SEQ ID NO: 48523 - RNA, 19 nt, synthetic construct
  misc_feature 1..19: note = siRNA antisense sequence
  source 1..19: mol_type = other RNA
tcgtgggtacctggaaacc

SEQ ID NO: 48524 - RNA, 19 nt, synthetic construct
  misc_feature 1..19: note = siRNA sense sequence
  source 1..19: mol_type = other RNA
gtttccaggtacccacgat

SEQ ID NO: 48525 - RNA, 19 nt, synthetic construct
  misc_feature 1..19: note = siRNA antisense sequence
  source 1..19: mol_type = other RNA
atcgtgggtacctggaaac

SEQ ID NO: 48526 - RNA, 19 nt, synthetic construct
  misc_feature 1..19: note = siRNA sense sequence
  source 1..19: mol_type = other RNA
tttccaggtacccacgatt

SEQ ID NO: 48527 - RNA, 19 nt, synthetic construct
  misc_feature 1..19: note = siRNA antisense sequence
  source 1..19: mol_type = other RNA
aatcgtgggtacctggaaa

SEQ ID NO: 48528 - RNA, 19 nt, synthetic construct
  misc_feature 1..19: note = siRNA sense sequence
  source 1..19: mol_type = other RNA
ttccaggtacccacgattt

SEQ ID NO: 48529 - RNA, 19 nt, synthetic construct
  misc_feature 1..19: note = siRNA antisense sequence
  source 1..19: mol_type = other RNA
aaatcgtgggtacctggaa

SEQ ID NO: 48530 - RNA, 19 nt, synthetic construct
  misc_feature 1..19: note = siRNA sense sequence
  source 1..19: mol_type = other RNA
tccaggtacccacgatttg

SEQ ID NO: 48531 - RNA, 19 nt, synthetic construct
  misc_feature 1..19: note = siRNA antisense sequence
  source 1..19: mol_type = other RNA
caaatcgtgggtacctgga

SEQ ID NO: 48532 - RNA, 19 nt, synthetic construct
  misc_feature 1..19: note = siRNA sense sequence
  source 1..19: mol_type = other RNA
ccaggtacccacgatttgt

SEQ ID NO: 48533 - RNA, 19 nt, synthetic construct
  misc_feature 1..19: note = siRNA antisense sequence
  source 1..19: mol_type = other RNA
acaaatcgtgggtacctgg

SEQ ID NO: 48534 - RNA, 19 nt, synthetic construct
  misc_feature 1..19: note = siRNA sense sequence
  source 1..19: mol_type = other RNA
caggtacccacgatttgtc

SEQ ID NO: 48535 - RNA, 19 nt, synthetic construct
  misc_feature 1..19: note = siRNA antisense sequence
  source 1..19: mol_type = other RNA
gacaaatcgtgggtacctg

SEQ ID NO: 48536 - RNA, 19 nt, synthetic construct
  misc_feature 1..19: note = siRNA sense sequence
  source 1..19: mol_type = other RNA
aggtacccacgatttgtcc

SEQ ID NO: 48537 - RNA, 19 nt, synthetic construct
  misc_feature 1..19: note = siRNA antisense sequence
  source 1..19: mol_type = other RNA
ggacaaatcgtgggtacct

SEQ ID NO: 48538 - RNA, 19 nt, synthetic construct
  misc_feature 1..19: note = siRNA sense sequence
  source 1..19: mol_type = other RNA
ggtacccacgatttgtcca

SEQ ID NO: 48539 - RNA, 19 nt, synthetic construct
  misc_feature 1..19: note = siRNA antisense sequence
  source 1..19: mol_type = other RNA
tggacaaatcgtgggtacc

SEQ ID NO: 48540 - RNA, 19 nt, synthetic construct
  misc_feature 1..19: note = siRNA sense sequence
  source 1..19: mol_type = other RNA
gtacccacgatttgtccaa

SEQ ID NO: 48541 - RNA, 19 nt, synthetic construct
  misc_feature 1..19: note = siRNA antisense sequence
  source 1..19: mol_type = other RNA
ttggacaaatcgtgggtac

SEQ ID NO: 48542 - RNA, 19 nt, synthetic construct
  misc_feature 1..19: note = siRNA sense sequence
  source 1..19: mol_type = other RNA
tacccacgatttgtccaac

SEQ ID NO: 48543 - RNA, 19 nt, synthetic construct
  misc_feature 1..19: note = siRNA antisense sequence
  source 1..19: mol_type = other RNA
gttggacaaatcgtgggta

SEQ ID NO: 48544 - RNA, 19 nt, synthetic construct
  misc_feature 1..19: note = siRNA sense sequence
  source 1..19: mol_type = other RNA
acccacgatttgtccaacg

SEQ ID NO: 48545 - RNA, 19 nt, synthetic construct
  misc_feature 1..19: note = siRNA antisense sequence
  source 1..19: mol_type = other RNA
cgttggacaaatcgtgggt

SEQ ID NO: 48546 - RNA, 19 nt, synthetic construct
  misc_feature 1..19: note = siRNA sense sequence
  source 1..19: mol_type = other RNA
cccacgatttgtccaacgt

SEQ ID NO: 48547 - RNA, 19 nt, synthetic construct
  misc_feature 1..19: note = siRNA antisense sequence
  source 1..19: mol_type = other RNA
acgttggacaaatcgtggg

SEQ ID NO: 48548 - RNA, 19 nt, synthetic construct
  misc_feature 1..19: note = siRNA sense sequence
  source 1..19: mol_type = other RNA
acgatttgtccaacgtggc

SEQ ID NO: 48549 - RNA, 19 nt, synthetic construct
  misc_feature 1..19: note = siRNA antisense sequence
  source 1..19: mol_type = other RNA
gccacgttggacaaatcgt

SEQ ID NO: 48550 - RNA, 19 nt, synthetic construct
  misc_feature 1..19: note = siRNA sense sequence
  source 1..19: mol_type = other RNA
cgatttgtccaacgtggct

SEQ ID NO: 48551 - RNA, 19 nt, synthetic construct
  misc_feature 1..19: note = siRNA antisense sequence
  source 1..19: mol_type = other RNA
agccacgttggacaaatcg

SEQ ID NO: 48552 - RNA, 19 nt, synthetic construct
  misc_feature 1..19: note = siRNA sense sequence
  source 1..19: mol_type = other RNA
gatttgtccaacgtggcta

SEQ ID NO: 48553 - RNA, 19 nt, synthetic construct
  misc_feature 1..19: note = siRNA antisense sequence
  source 1..19: mol_type = other RNA
tagccacgttggacaaatc

SEQ ID NO: 48554 - RNA, 19 nt, synthetic construct
  misc_feature 1..19: note = siRNA sense sequence
  source 1..19: mol_type = other RNA
atttgtccaacgtggctac

SEQ ID NO: 48555 - RNA, 19 nt, synthetic construct
  misc_feature 1..19: note = siRNA antisense sequence
  source 1..19: mol_type = other RNA
gtagccacgttggacaaat

SEQ ID NO: 48556 - RNA, 19 nt, synthetic construct
  misc_feature 1..19: note = siRNA sense sequence
  source 1..19: mol_type = other RNA
ttgggtttgattatatgct

SEQ ID NO: 48557 - RNA, 19 nt, synthetic construct
  misc_feature 1..19: note = siRNA antisense sequence
  source 1..19: mol_type = other RNA
agcatataatcaaacccaa

SEQ ID NO: 48558 - RNA, 19 nt, synthetic construct
  misc_feature 1..19: note = siRNA sense sequence
  source 1..19: mol_type = other RNA
tgggtttgattatatgcta

SEQ ID NO: 48559 - RNA, 19 nt, synthetic construct
  misc_feature 1..19: note = siRNA antisense sequence
  source 1..19: mol_type = other RNA
tagcatataatcaaaccca

SEQ ID NO: 48560 - RNA, 19 nt, synthetic construct
  misc_feature 1..19: note = siRNA sense sequence
  source 1..19: mol_type = other RNA
gggtttgattatatgctag

SEQ ID NO: 48561 - RNA, 19 nt, synthetic construct
  misc_feature 1..19: note = siRNA antisense sequence
  source 1..19: mol_type = other RNA
ctagcatataatcaaaccc

SEQ ID NO: 48562 - RNA, 19 nt, synthetic construct
  misc_feature 1..19: note = siRNA sense sequence
  source 1..19: mol_type = other RNA
ttgattatatgctagagtg

SEQ ID NO: 48563 - RNA, 19 nt, synthetic construct
  misc_feature 1..19: note = siRNA antisense sequence
  source 1..19: mol_type = other RNA
cactctagcatataatcaa

SEQ ID NO: 48564 - RNA, 19 nt, synthetic construct
  misc_feature 1..19: note = siRNA sense sequence
  source 1..19: mol_type = other RNA
tgattatatgctagagtgg

SEQ ID NO: 48565 - RNA, 19 nt, synthetic construct
  misc_feature 1..19: note = siRNA antisense sequence
  source 1..19: mol_type = other RNA
ccactctagcatataatca

SEQ ID NO: 48566 - RNA, 19 nt, synthetic construct
  misc_feature 1..19: note = siRNA sense sequence
  source 1..19: mol_type = other RNA
gattatatgctagagtgga

SEQ ID NO: 48567 - RNA, 19 nt, synthetic construct
  misc_feature 1..19: note = siRNA antisense sequence
  source 1..19: mol_type = other RNA
tccactctagcatataatc

SEQ ID NO: 48568 - RNA, 19 nt, synthetic construct
  misc_feature 1..19: note = siRNA sense sequence
  source 1..19: mol_type = other RNA
attatatgctagagtggat

SEQ ID NO: 48569 - RNA, 19 nt, synthetic construct
  misc_feature 1..19: note = siRNA antisense sequence
  source 1..19: mol_type = other RNA
atccactctagcatataat

SEQ ID NO: 48570 - RNA, 19 nt, synthetic construct
  misc_feature 1..19: note = siRNA sense sequence
  source 1..19: mol_type = other RNA
ttatatgctagagtggatc

SEQ ID NO: 48571 - RNA, 19 nt, synthetic construct
  misc_feature 1..19: note = siRNA antisense sequence
  source 1..19: mol_type = other RNA
gatccactctagcatataa

SEQ ID NO: 48572 - RNA, 19 nt, synthetic construct
  misc_feature 1..19: note = siRNA sense sequence
  source 1..19: mol_type = other RNA
tatatgctagagtggatca

SEQ ID NO: 48573 - RNA, 19 nt, synthetic construct
  misc_feature 1..19: note = siRNA antisense sequence
  source 1..19: mol_type = other RNA
tgatccactctagcatata

SEQ ID NO: 48574 - RNA, 19 nt, synthetic construct
  misc_feature 1..19: note = siRNA sense sequence
  source 1..19: mol_type = other RNA
atatgctagagtggatcac

SEQ ID NO: 48575 - RNA, 19 nt, synthetic construct
  misc_feature 1..19: note = siRNA antisense sequence
  source 1..19: mol_type = other RNA
gtgatccactctagcatat

SEQ ID NO: 48576 - RNA, 19 nt, synthetic construct
  misc_feature 1..19: note = siRNA sense sequence
  source 1..19: mol_type = other RNA
tatgctagagtggatcaca

SEQ ID NO: 48577 - RNA, 19 nt, synthetic construct
  misc_feature 1..19: note = siRNA antisense sequence
  source 1..19: mol_type = other RNA
tgtgatccactctagcata

SEQ ID NO: 48578 - RNA, 19 nt, synthetic construct
  misc_feature 1..19: note = siRNA sense sequence
  source 1..19: mol_type = other RNA
atgctagagtggatcacag

SEQ ID NO: 48579 - RNA, 19 nt, synthetic construct
  misc_feature 1..19: note = siRNA antisense sequence
  source 1..19: mol_type = other RNA
ctgtgatccactctagcat

SEQ ID NO: 48580 - RNA, 19 nt, synthetic construct
  misc_feature 1..19: note = siRNA sense sequence
  source 1..19: mol_type = other RNA
agatatgtagtgcaagcta

SEQ ID NO: 48581 - RNA, 19 nt, synthetic construct
  misc_feature 1..19: note = siRNA antisense sequence
  source 1..19: mol_type = other RNA
tagcttgcactacatatct

SEQ ID NO: 48582 - RNA, 19 nt, synthetic construct
  misc_feature 1..19: note = siRNA sense sequence
  source 1..19: mol_type = other RNA
gatatgtagtgcaagctat

SEQ ID NO: 48583 - RNA, 19 nt, synthetic construct
  misc_feature 1..19: note = siRNA antisense sequence
  source 1..19: mol_type = other RNA
atagcttgcactacatatc

SEQ ID NO: 48584 - RNA, 19 nt, synthetic construct
  misc_feature 1..19: note = siRNA sense sequence
  source 1..19: mol_type = other RNA
atatgtagtgcaagctatg

SEQ ID NO: 48585 - RNA, 19 nt, synthetic construct
  misc_feature 1..19: note = siRNA antisense sequence
  source 1..19: mol_type = other RNA
catagcttgcactacatat

SEQ ID NO: 48586 - RNA, 19 nt, synthetic construct
  misc_feature 1..19: note = siRNA sense sequence
  source 1..19: mol_type = other RNA
gtagtgcaagctatgaggg

SEQ ID NO: 48587 - RNA, 19 nt, synthetic construct
  misc_feature 1..19: note = siRNA antisense sequence
  source 1..19: mol_type = other RNA
ccctcatagcttgcactac

SEQ ID NO: 48588 - RNA, 19 nt, synthetic construct
  misc_feature 1..19: note = siRNA sense sequence
  source 1..19: mol_type = other RNA
tagtgcaagctatgaggga

SEQ ID NO: 48589 - RNA, 19 nt, synthetic construct
  misc_feature 1..19: note = siRNA antisense sequence
  source 1..19: mol_type = other RNA
tccctcatagcttgcacta

SEQ ID NO: 48590 - RNA, 19 nt, synthetic construct
  misc_feature 1..19: note = siRNA sense sequence
  source 1..19: mol_type = other RNA
agtgcaagctatgagggaa

SEQ ID NO: 48591 - RNA, 19 nt, synthetic construct
  misc_feature 1..19: note = siRNA antisense sequence
  source 1..19: mol_type = other RNA
ttccctcatagcttgcact

SEQ ID NO: 48592 - RNA, 19 nt, synthetic construct
  misc_feature 1..19: note = siRNA sense sequence
  source 1..19: mol_type = other RNA
cattccctctcatggtgta

SEQ ID NO: 48593 - RNA, 19 nt, synthetic construct
  misc_feature 1..19: note = siRNA antisense sequence
  source 1..19: mol_type = other RNA
tacaccatgagagggaatg

SEQ ID NO: 48594 - RNA, 19 nt, synthetic construct
  misc_feature 1..19: note = siRNA sense sequence
  source 1..19: mol_type = other RNA
attccctctcatggtgtac

SEQ ID NO: 48595 - RNA, 19 nt, synthetic construct
  misc_feature 1..19: note = siRNA antisense sequence
  source 1..19: mol_type = other RNA
gtacaccatgagagggaat

SEQ ID NO: 48596 - RNA, 19 nt, synthetic construct
  misc_feature 1..19: note = siRNA sense sequence
  source 1..19: mol_type = other RNA
ttccctctcatggtgtacc

SEQ ID NO: 48597 - RNA, 19 nt, synthetic construct
  misc_feature 1..19: note = siRNA antisense sequence
  source 1..19: mol_type = other RNA
ggtacaccatgagagggaa

SEQ ID NO: 48598 - RNA, 19 nt, synthetic construct
  misc_feature 1..19: note = siRNA sense sequence
  source 1..19: mol_type = other RNA
tccctctcatggtgtacct

SEQ ID NO: 48599 - RNA, 19 nt, synthetic construct
  misc_feature 1..19: note = siRNA antisense sequence
  source 1..19: mol_type = other RNA
aggtacaccatgagaggga

SEQ ID NO: 48600 - RNA, 19 nt, synthetic construct
  misc_feature 1..19: note = siRNA sense sequence
  source 1..19: mol_type = other RNA
tcatggtgtacctccttcc

SEQ ID NO: 48601 - RNA, 19 nt, synthetic construct
  misc_feature 1..19: note = siRNA antisense sequence
  source 1..19: mol_type = other RNA
ggaaggaggtacaccatga

SEQ ID NO: 48602 - RNA, 19 nt, synthetic construct
  misc_feature 1..19: note = siRNA sense sequence
  source 1..19: mol_type = other RNA
catggtgtacctccttcca

SEQ ID NO: 48603 - RNA, 19 nt, synthetic construct
  misc_feature 1..19: note = siRNA antisense sequence
  source 1..19: mol_type = other RNA
tggaaggaggtacaccatg

SEQ ID NO: 48604 - RNA, 19 nt, synthetic construct
  misc_feature 1..19: note = siRNA sense sequence
  source 1..19: mol_type = other RNA
atggtgtacctccttccac

SEQ ID NO: 48605 - RNA, 19 nt, synthetic construct
  misc_feature 1..19: note = siRNA antisense sequence
  source 1..19: mol_type = other RNA
gtggaaggaggtacaccat

SEQ ID NO: 48606 - RNA, 19 nt, synthetic construct
  misc_feature 1..19: note = siRNA sense sequence
  source 1..19: mol_type = other RNA
acctccttccacctgttca

SEQ ID NO: 48607 - RNA, 19 nt, synthetic construct
  misc_feature 1..19: note = siRNA antisense sequence
  source 1..19: mol_type = other RNA
tgaacaggtggaaggaggt

SEQ ID NO: 48608 - RNA, 19 nt, synthetic construct
  misc_feature 1..19: note = siRNA sense sequence
  source 1..19: mol_type = other RNA
cctccttccacctgttcag

SEQ ID NO: 48609 - RNA, 19 nt, synthetic construct
  misc_feature 1..19: note = siRNA antisense sequence
  source 1..19: mol_type = other RNA
ctgaacaggtggaaggagg

SEQ ID NO: 48610 - RNA, 19 nt, synthetic construct
  misc_feature 1..19: note = siRNA sense sequence
  source 1..19: mol_type = other RNA
aaagttttacagaggcttg

SEQ ID NO: 48611 - RNA, 19 nt, synthetic construct
  misc_feature 1..19: note = siRNA antisense sequence
  source 1..19: mol_type = other RNA
caagcctctgtaaaacttt

SEQ ID NO: 48612 - RNA, 19 nt, synthetic construct
  misc_feature 1..19: note = siRNA sense sequence
  source 1..19: mol_type = other RNA
aagttttacagaggcttga

SEQ ID NO: 48613 - RNA, 19 nt, synthetic construct
  misc_feature 1..19: note = siRNA antisense sequence
  source 1..19: mol_type = other RNA
tcaagcctctgtaaaactt

SEQ ID NO: 48614 - RNA, 19 nt, synthetic construct
  misc_feature 1..19: note = siRNA sense sequence
  source 1..19: mol_type = other RNA
agttttacagaggcttgat

SEQ ID NO: 48615 - RNA, 19 nt, synthetic construct
  misc_feature 1..19: note = siRNA antisense sequence
  source 1..19: mol_type = other RNA
atcaagcctctgtaaaact

SEQ ID NO: 48616 - RNA, 19 nt, synthetic construct
  misc_feature 1..19: note = siRNA sense sequence
  source 1..19: mol_type = other RNA
gttttacagaggcttgatc

SEQ ID NO: 48617 - RNA, 19 nt, synthetic construct
  misc_feature 1..19: note = siRNA antisense sequence
  source 1..19: mol_type = other RNA
gatcaagcctctgtaaaac

SEQ ID NO: 48618 - RNA, 19 nt, synthetic construct
  misc_feature 1..19: note = siRNA sense sequence
  source 1..19: mol_type = other RNA
ttttacagaggcttgatca

SEQ ID NO: 48619 - RNA, 19 nt, synthetic construct
  misc_feature 1..19: note = siRNA antisense sequence
  source 1..19: mol_type = other RNA
tgatcaagcctctgtaaaa

SEQ ID NO: 48620 - RNA, 19 nt, synthetic construct
  misc_feature 1..19: note = siRNA sense sequence
  source 1..19: mol_type = other RNA
tttacagaggcttgatcac

SEQ ID NO: 48621 - RNA, 19 nt, synthetic construct
  misc_feature 1..19: note = siRNA antisense sequence
  source 1..19: mol_type = other RNA
gtgatcaagcctctgtaaa

SEQ ID NO: 48622 - RNA, 19 nt, synthetic construct
  misc_feature 1..19: note = siRNA sense sequence
  source 1..19: mol_type = other RNA
tacagaggcttgatcacag

SEQ ID NO: 48623 - RNA, 19 nt, synthetic construct
  misc_feature 1..19: note = siRNA antisense sequence
  source 1..19: mol_type = other RNA
ctgtgatcaagcctctgta

SEQ ID NO: 48624 - RNA, 19 nt, synthetic construct
  misc_feature 1..19: note = siRNA sense sequence
  source 1..19: mol_type = other RNA
tattaactgattctctagc

SEQ ID NO: 48625 - RNA, 19 nt, synthetic construct
  misc_feature 1..19: note = siRNA antisense sequence
  source 1..19: mol_type = other RNA
gctagagaatcagttaata

SEQ ID NO: 48626 - RNA, 19 nt, synthetic construct
  misc_feature 1..19: note = siRNA sense sequence
  source 1..19: mol_type = other RNA
attaactgattctctagcc

SEQ ID NO: 48627 - RNA, 19 nt, synthetic construct
  misc_feature 1..19: note = siRNA antisense sequence
  source 1..19: mol_type = other RNA
ggctagagaatcagttaat

SEQ ID NO: 48628 - RNA, 19 nt, synthetic construct
  misc_feature 1..19: note = siRNA sense sequence
  source 1..19: mol_type = other RNA
ttaactgattctctagccc

SEQ ID NO: 48629 - RNA, 19 nt, synthetic construct
  misc_feature 1..19: note = siRNA antisense sequence
  source 1..19: mol_type = other RNA
gggctagagaatcagttaa

SEQ ID NO: 48630 - RNA, 19 nt, synthetic construct
  misc_feature 1..19: note = siRNA sense sequence
  source 1..19: mol_type = other RNA
aacgtttcaagcttctgat

SEQ ID NO: 48631 - RNA, 19 nt, synthetic construct
  misc_feature 1..19: note = siRNA antisense sequence
  source 1..19: mol_type = other RNA
atcagaagcttgaaacgtt

SEQ ID NO: 48632 - RNA, 19 nt, synthetic construct
  misc_feature 1..19: note = siRNA sense sequence
  source 1..19: mol_type = other RNA
tttcaagcttctgatcatg

SEQ ID NO: 48633 - RNA, 19 nt, synthetic construct
  misc_feature 1..19: note = siRNA antisense sequence
  source 1..19: mol_type = other RNA
catgatcagaagcttgaaa

SEQ ID NO: 48634 - RNA, 19 nt, synthetic construct
  misc_feature 1..19: note = siRNA sense sequence
  source 1..19: mol_type = other RNA
ttcaagcttctgatcatgg

SEQ ID NO: 48635 - RNA, 19 nt, synthetic construct
  misc_feature 1..19: note = siRNA antisense sequence
  source 1..19: mol_type = other RNA
ccatgatcagaagcttgaa

SEQ ID NO: 48636 - RNA, 19 nt, synthetic construct
  misc_feature 1..19: note = siRNA sense sequence
  source 1..19: mol_type = other RNA
tcaagcttctgatcatggc

SEQ ID NO: 48637 - RNA, 19 nt, synthetic construct
  misc_feature 1..19: note = siRNA antisense sequence
  source 1..19: mol_type = other RNA
gccatgatcagaagcttga

SEQ ID NO: 48638 - RNA, 19 nt, synthetic construct
  misc_feature 1..19: note = siRNA sense sequence
  source 1..19: mol_type = other RNA
agcttctgatcatggcctg

SEQ ID NO: 48639 - RNA, 19 nt, synthetic construct
  misc_feature 1..19: note = siRNA antisense sequence
  source 1..19: mol_type = other RNA
caggccatgatcagaagct

SEQ ID NO: 48640 - RNA, 19 nt, synthetic construct
  misc_feature 1..19: note = siRNA sense sequence
  source 1..19: mol_type = other RNA
ctgatcatggcctggtcct

SEQ ID NO: 48641 - RNA, 19 nt, synthetic construct
  misc_feature 1..19: note = siRNA antisense sequence
  source 1..19: mol_type = other RNA
aggaccaggccatgatcag

SEQ ID NO: 48642 - RNA, 19 nt, synthetic construct
  misc_feature 1..19: note = siRNA sense sequence
  source 1..19: mol_type = other RNA
tgatcatggcctggtcctt

SEQ ID NO: 48643 - RNA, 19 nt, synthetic construct
  misc_feature 1..19: note = siRNA antisense sequence
  source 1..19: mol_type = other RNA
aaggaccaggccatgatca

SEQ ID NO: 48644 - RNA, 19 nt, synthetic construct
  misc_feature 1..19: note = siRNA sense sequence
  source 1..19: mol_type = other RNA
gatcatggcctggtccttc

SEQ ID NO: 48645 - RNA, 19 nt, synthetic construct
  misc_feature 1..19: note = siRNA antisense sequence
  source 1..19: mol_type = other RNA
gaaggaccaggccatgatc

SEQ ID NO: 48646 - RNA, 19 nt, synthetic construct
  misc_feature 1..19: note = siRNA sense sequence
  source 1..19: mol_type = other RNA
atcatggcctggtccttct

SEQ ID NO: 48647 - RNA, 19 nt, synthetic construct
  misc_feature 1..19: note = siRNA antisense sequence
  source 1..19: mol_type = other RNA
agaaggaccaggccatgat

SEQ ID NO: 48648 - RNA, 19 nt, synthetic construct
  misc_feature 1..19: note = siRNA sense sequence
  source 1..19: mol_type = other RNA
tcatggcctggtccttcta

SEQ ID NO: 48649 - RNA, 19 nt, synthetic construct
  misc_feature 1..19: note = siRNA antisense sequence
  source 1..19: mol_type = other RNA
tagaaggaccaggccatga

SEQ ID NO: 48650 - RNA, 19 nt, synthetic construct
  misc_feature 1..19: note = siRNA sense sequence
  source 1..19: mol_type = other RNA
catggcctggtccttctag

SEQ ID NO: 48651 - RNA, 19 nt, synthetic construct
  misc_feature 1..19: note = siRNA antisense sequence
  source 1..19: mol_type = other RNA
ctagaaggaccaggccatg

SEQ ID NO: 48652 - RNA, 19 nt, synthetic construct
  misc_feature 1..19: note = siRNA sense sequence
  source 1..19: mol_type = other RNA
tccttctagtgatcagctc

SEQ ID NO: 48653 - RNA, 19 nt, synthetic construct
  misc_feature 1..19: note = siRNA antisense sequence
  source 1..19: mol_type = other RNA
gagctgatcactagaagga

SEQ ID NO: 48654 - RNA, 19 nt, synthetic construct
  misc_feature 1..19: note = siRNA sense sequence
  source 1..19: mol_type = other RNA
ccttctagtgatcagctcc

SEQ ID NO: 48655 - RNA, 19 nt, synthetic construct
  misc_feature 1..19: note = siRNA antisense sequence
  source 1..19: mol_type = other RNA
ggagctgatcactagaagg

SEQ ID NO: 48656 - RNA, 19 nt, synthetic construct
  misc_feature 1..19: note = siRNA sense sequence
  source 1..19: mol_type = other RNA
cttctagtgatcagctccc

SEQ ID NO: 48657 - RNA, 19 nt, synthetic construct
  misc_feature 1..19: note = siRNA antisense sequence
  source 1..19: mol_type = other RNA
gggagctgatcactagaag

SEQ ID NO: 48658 - RNA, 19 nt, synthetic construct
  misc_feature 1..19: note = siRNA sense sequence
  source 1..19: mol_type = other RNA
tagtgatcagctcccattt

SEQ ID NO: 48659 - RNA, 19 nt, synthetic construct
  misc_feature 1..19: note = siRNA antisense sequence
  source 1..19: mol_type = other RNA
aaatgggagctgatcacta

SEQ ID NO: 48660 - RNA, 19 nt, synthetic construct
  misc_feature 1..19: note = siRNA sense sequence
  source 1..19: mol_type = other RNA
agtgatcagctcccattta

SEQ ID NO: 48661 - RNA, 19 nt, synthetic construct
  misc_feature 1..19: note = siRNA antisense sequence
  source 1..19: mol_type = other RNA
taaatgggagctgatcact

SEQ ID NO: 48662 - RNA, 19 nt, synthetic construct
  misc_feature 1..19: note = siRNA sense sequence
  source 1..19: mol_type = other RNA
gtgatcagctcccatttag

SEQ ID NO: 48663 - RNA, 19 nt, synthetic construct
  misc_feature 1..19: note = siRNA antisense sequence
  source 1..19: mol_type = other RNA
ctaaatgggagctgatcac

SEQ ID NO: 48664 - RNA, 19 nt, synthetic construct
  misc_feature 1..19: note = siRNA sense sequence
  source 1..19: mol_type = other RNA
gatcagctcccatttagga

SEQ ID NO: 48665 - RNA, 19 nt, synthetic construct
  misc_feature 1..19: note = siRNA antisense sequence
  source 1..19: mol_type = other RNA
tcctaaatgggagctgatc

SEQ ID NO: 48666 - RNA, 19 nt, synthetic construct
  misc_feature 1..19: note = siRNA sense sequence
  source 1..19: mol_type = other RNA
ccaccaagagttacttcat

SEQ ID NO: 48667 - RNA, 19 nt, synthetic construct
  misc_feature 1..19: note = siRNA antisense sequence
  source 1..19: mol_type = other RNA
atgaagtaactcttggtgg

SEQ ID NO: 48668 - RNA, 19 nt, synthetic construct
  misc_feature 1..19: note = siRNA sense sequence
  source 1..19: mol_type = other RNA
caccaagagttacttcatt

SEQ ID NO: 48669 - RNA, 19 nt, synthetic construct
  misc_feature 1..19: note = siRNA antisense sequence
  source 1..19: mol_type = other RNA
aatgaagtaactcttggtg

SEQ ID NO: 48670 - RNA, 19 nt, synthetic construct
  misc_feature 1..19: note = siRNA sense sequence
  source 1..19: mol_type = other RNA
accaagagttacttcatta

SEQ ID NO: 48671 - RNA, 19 nt, synthetic construct
  misc_feature 1..19: note = siRNA antisense sequence
  source 1..19: mol_type = other RNA
taatgaagtaactcttggt

SEQ ID NO: 48672 - RNA, 19 nt, synthetic construct
  misc_feature 1..19: note = siRNA sense sequence
  source 1..19: mol_type = other RNA
ccaagagttacttcattag

SEQ ID NO: 48673 - RNA, 19 nt, synthetic construct
  misc_feature 1..19: note = siRNA antisense sequence
  source 1..19: mol_type = other RNA
ctaatgaagtaactcttgg

SEQ ID NO: 48674 - RNA, 19 nt, synthetic construct
  misc_feature 1..19: note = siRNA sense sequence
  source 1..19: mol_type = other RNA
caagagttacttcattaga

SEQ ID NO: 48675 - RNA, 19 nt, synthetic construct
  misc_feature 1..19: note = siRNA antisense sequence
  source 1..19: mol_type = other RNA
tctaatgaagtaactcttg

SEQ ID NO: 48676 - RNA, 19 nt, synthetic construct
  misc_feature 1..19: note = siRNA sense sequence
  source 1..19: mol_type = other RNA
aacccaggttaaagaccat

SEQ ID NO: 48677 - RNA, 19 nt, synthetic construct
  misc_feature 1..19: note = siRNA antisense sequence
  source 1..19: mol_type = other RNA
atggtctttaacctgggtt

SEQ ID NO: 48678 - RNA, 19 nt, synthetic construct
  misc_feature 1..19: note = siRNA sense sequence
  source 1..19: mol_type = other RNA
acccaggttaaagaccata

SEQ ID NO: 48679 - RNA, 19 nt, synthetic construct
  misc_feature 1..19: note = siRNA antisense sequence
  source 1..19: mol_type = other RNA
tatggtctttaacctgggt

SEQ ID NO: 48680 - RNA, 19 nt, synthetic construct
  misc_feature 1..19: note = siRNA sense sequence
  source 1..19: mol_type = other RNA
cccaggttaaagaccatat

SEQ ID NO: 48681 - RNA, 19 nt, synthetic construct
  misc_feature 1..19: note = siRNA antisense sequence
  source 1..19: mol_type = other RNA
atatggtctttaacctggg

SEQ ID NO: 48682 - RNA, 19 nt, synthetic construct
  misc_feature 1..19: note = siRNA sense sequence
  source 1..19: mol_type = other RNA
ccaggttaaagaccatata

SEQ ID NO: 48683 - RNA, 19 nt, synthetic construct
  misc_feature 1..19: note = siRNA antisense sequence
  source 1..19: mol_type = other RNA
tatatggtctttaacctgg

SEQ ID NO: 48684 - RNA, 19 nt, synthetic construct
  misc_feature 1..19: note = siRNA sense sequence
  source 1..19: mol_type = other RNA
caggttaaagaccatatat

SEQ ID NO: 48685 - RNA, 19 nt, synthetic construct
  misc_feature 1..19: note = siRNA antisense sequence
  source 1..19: mol_type = other RNA
atatatggtctttaacctg

SEQ ID NO: 48686 - RNA, 19 nt, synthetic construct
  misc_feature 1..19: note = siRNA sense sequence
  source 1..19: mol_type = other RNA
caaaagatacacctctcac

SEQ ID NO: 48687 - RNA, 19 nt, synthetic construct
  misc_feature 1..19: note = siRNA antisense sequence
  source 1..19: mol_type = other RNA
gtgagaggtgtatcttttg

SEQ ID NO: 48688 - RNA, 19 nt, synthetic construct
  misc_feature 1..19: note = siRNA sense sequence
  source 1..19: mol_type = other RNA
aaaagatacacctctcacc

SEQ ID NO: 48689 - RNA, 19 nt, synthetic construct
  misc_feature 1..19: note = siRNA antisense sequence
  source 1..19: mol_type = other RNA
ggtgagaggtgtatctttt

SEQ ID NO: 48690 - RNA, 19 nt, synthetic construct
  misc_feature 1..19: note = siRNA sense sequence
  source 1..19: mol_type = other RNA
aaagatacacctctcacca

SEQ ID NO: 48691 - RNA, 19 nt, synthetic construct
  misc_feature 1..19: note = siRNA antisense sequence
  source 1..19: mol_type = other RNA
tggtgagaggtgtatcttt

SEQ ID NO: 48692 - RNA, 19 nt, synthetic construct
  misc_feature 1..19: note = siRNA sense sequence
  source 1..19: mol_type = other RNA
aagatacacctctcaccag

SEQ ID NO: 48693 - RNA, 19 nt, synthetic construct
  misc_feature 1..19: note = siRNA antisense sequence
  source 1..19: mol_type = other RNA
ctggtgagaggtgtatctt

SEQ ID NO: 48694 - RNA, 19 nt, synthetic construct
  misc_feature 1..19: note = siRNA sense sequence
  source 1..19: mol_type = other RNA
agatacacctctcaccagt

SEQ ID NO: 48695 - RNA, 19 nt, synthetic construct
  misc_feature 1..19: note = siRNA antisense sequence
  source 1..19: mol_type = other RNA
actggtgagaggtgtatct

SEQ ID NO: 48696 - RNA, 19 nt, synthetic construct
  misc_feature 1..19: note = siRNA sense sequence
  source 1..19: mol_type = other RNA
gatacacctctcaccagta

SEQ ID NO: 48697 - RNA, 19 nt, synthetic construct
  misc_feature 1..19: note = siRNA antisense sequence
  source 1..19: mol_type = other RNA
tactggtgagaggtgtatc

SEQ ID NO: 48698 - RNA, 19 nt, synthetic construct
  misc_feature 1..19: note = siRNA sense sequence
  source 1..19: mol_type = other RNA
acctctcaccagtattgct

SEQ ID NO: 48699 - RNA, 19 nt, synthetic construct
  misc_feature 1..19: note = siRNA antisense sequence
  source 1..19: mol_type = other RNA
agcaatactggtgagaggt

SEQ ID NO: 48700 - RNA, 19 nt, synthetic construct
  misc_feature 1..19: note = siRNA sense sequence
  source 1..19: mol_type = other RNA
cctctcaccagtattgctc

SEQ ID NO: 48701 - RNA, 19 nt, synthetic construct
  misc_feature 1..19: note = siRNA antisense sequence
  source 1..19: mol_type = other RNA
gagcaatactggtgagagg

SEQ ID NO: 48702 - RNA, 19 nt, synthetic construct
  misc_feature 1..19: note = siRNA sense sequence
  source 1..19: mol_type = other RNA
ctctcaccagtattgctca

SEQ ID NO: 48703 - RNA, 19 nt, synthetic construct
  misc_feature 1..19: note = siRNA antisense sequence
  source 1..19: mol_type = other RNA
tgagcaatactggtgagag

SEQ ID NO: 48704 - RNA, 19 nt, synthetic construct
  misc_feature 1..19: note = siRNA sense sequence
  source 1..19: mol_type = other RNA
tctcaccagtattgctcag

SEQ ID NO: 48705 - RNA, 19 nt, synthetic construct
  misc_feature 1..19: note = siRNA antisense sequence
  source 1..19: mol_type = other RNA
ctgagcaatactggtgaga

SEQ ID NO: 48706 - RNA, 19 nt, synthetic construct
  misc_feature 1..19: note = siRNA sense sequence
  source 1..19: mol_type = other RNA
ctcaccagtattgctcagg

SEQ ID NO: 48707 - RNA, 19 nt, synthetic construct
  misc_feature 1..19: note = siRNA antisense sequence
  source 1..19: mol_type = other RNA
cctgagcaatactggtgag

SEQ ID NO: 48708 - RNA, 19 nt, synthetic construct
  misc_feature 1..19: note = siRNA sense sequence
  source 1..19: mol_type = other RNA
cagtattgctcaggaagtt

SEQ ID NO: 48709 - RNA, 19 nt, synthetic construct
  misc_feature 1..19: note = siRNA antisense sequence
  source 1..19: mol_type = other RNA
aacttcctgagcaatactg

SEQ ID NO: 48710 - RNA, 19 nt, synthetic construct
  misc_feature 1..19: note = siRNA sense sequence
  source 1..19: mol_type = other RNA
agtattgctcaggaagtta

SEQ ID NO: 48711 - RNA, 19 nt, synthetic construct
  misc_feature 1..19: note = siRNA antisense sequence
  source 1..19: mol_type = other RNA
taacttcctgagcaatact

SEQ ID NO: 48712 - RNA, 19 nt, synthetic construct
  misc_feature 1..19: note = siRNA sense sequence
  source 1..19: mol_type = other RNA
gtattgctcaggaagttat

SEQ ID NO: 48713 - RNA, 19 nt, synthetic construct
  misc_feature 1..19: note = siRNA antisense sequence
  source 1..19: mol_type = other RNA
ataacttcctgagcaatac

SEQ ID NO: 48714 - RNA, 19 nt, synthetic construct
  misc_feature 1..19: note = siRNA sense sequence
  source 1..19: mol_type = other RNA
tattgctcaggaagttatg

SEQ ID NO: 48715 - RNA, 19 nt, synthetic construct
  misc_feature 1..19: note = siRNA antisense sequence
  source 1..19: mol_type = other RNA
cataacttcctgagcaata

SEQ ID NO: 48716 - RNA, 19 nt, synthetic construct
  misc_feature 1..19: note = siRNA sense sequence
  source 1..19: mol_type = other RNA
attgctcaggaagttatga

SEQ ID NO: 48717 - RNA, 19 nt, synthetic construct
  misc_feature 1..19: note = siRNA antisense sequence
  source 1..19: mol_type = other RNA
tcataacttcctgagcaat

SEQ ID NO: 48718 - RNA, 19 nt, synthetic construct
  misc_feature 1..19: note = siRNA sense sequence
  source 1..19: mol_type = other RNA
aaccataagaagttcggaa

SEQ ID NO: 48719 - RNA, 19 nt, synthetic construct
  misc_feature 1..19: note = siRNA antisense sequence
  source 1..19: mol_type = other RNA
ttccgaacttcttatggtt

SEQ ID NO: 48720 - RNA, 19 nt, synthetic construct
  misc_feature 1..19: note = siRNA sense sequence
  source 1..19: mol_type = other RNA
aaagatccattttagcagt

SEQ ID NO: 48721 - RNA, 19 nt, synthetic construct
  misc_feature 1..19: note = siRNA antisense sequence
  source 1..19: mol_type = other RNA
actgctaaaatggatcttt

SEQ ID NO: 48722 - RNA, 19 nt, synthetic construct
  misc_feature 1..19: note = siRNA sense sequence
  source 1..19: mol_type = other RNA
atccattttagcagtgtga

SEQ ID NO: 48723 - RNA, 19 nt, synthetic construct
  misc_feature 1..19: note = siRNA antisense sequence
  source 1..19: mol_type = other RNA
tcacactgctaaaatggat

SEQ ID NO: 48724 - RNA, 19 nt, synthetic construct
  misc_feature 1..19: note = siRNA sense sequence
  source 1..19: mol_type = other RNA
ttttagcagtgtgagcaat

SEQ ID NO: 48725 - RNA, 19 nt, synthetic construct
  misc_feature 1..19: note = siRNA antisense sequence
  source 1..19: mol_type = other RNA
attgctcacactgctaaaa

SEQ ID NO: 48726 - RNA, 19 nt, synthetic construct
  misc_feature 1..19: note = siRNA sense sequence
  source 1..19: mol_type = other RNA
tttagcagtgtgagcaatg

SEQ ID NO: 48727 - RNA, 19 nt, synthetic construct
  misc_feature 1..19: note = siRNA antisense sequence
  source 1..19: mol_type = other RNA
cattgctcacactgctaaa

SEQ ID NO: 48728 - RNA, 19 nt, synthetic construct
  misc_feature 1..19: note = siRNA sense sequence
  source 1..19: mol_type = other RNA
ttagcagtgtgagcaatgg

SEQ ID NO: 48729 - RNA, 19 nt, synthetic construct
  misc_feature 1..19: note = siRNA antisense sequence
  source 1..19: mol_type = other RNA
ccattgctcacactgctaa

SEQ ID NO: 48730 - RNA, 19 nt, synthetic construct
  misc_feature 1..19: note = siRNA sense sequence
  source 1..19: mol_type = other RNA
tagcagtgtgagcaatggg

SEQ ID NO: 48731 - RNA, 19 nt, synthetic construct
  misc_feature 1..19: note = siRNA antisense sequence
  source 1..19: mol_type = other RNA
cccattgctcacactgcta

SEQ ID NO: 48732 - RNA, 19 nt, synthetic construct
  misc_feature 1..19: note = siRNA sense sequence
  source 1..19: mol_type = other RNA
agcagtgtgagcaatgggc

SEQ ID NO: 48733 - RNA, 19 nt, synthetic construct
  misc_feature 1..19: note = siRNA antisense sequence
  source 1..19: mol_type = other RNA
gcccattgctcacactgct

SEQ ID NO: 48734 - RNA, 19 nt, synthetic construct
  misc_feature 1..19: note = siRNA sense sequence
  source 1..19: mol_type = other RNA
gcagtgtgagcaatgggct

SEQ ID NO: 48735 - RNA, 19 nt, synthetic construct
  misc_feature 1..19: note = siRNA antisense sequence
  source 1..19: mol_type = other RNA
agcccattgctcacactgc

SEQ ID NO: 48736 - RNA, 19 nt, synthetic construct
  misc_feature 1..19: note = siRNA sense sequence
  source 1..19: mol_type = other RNA
cagtgtgagcaatgggctt

SEQ ID NO: 48737 - RNA, 19 nt, synthetic construct
  misc_feature 1..19: note = siRNA antisense sequence
  source 1..19: mol_type = other RNA
aagcccattgctcacactg

SEQ ID NO: 48738 - RNA, 19 nt, synthetic construct
  misc_feature 1..19: note = siRNA sense sequence
  source 1..19: mol_type = other RNA
gtgtgagcaatgggctttt

SEQ ID NO: 48739 - RNA, 19 nt, synthetic construct
  misc_feature 1..19: note = siRNA antisense sequence
  source 1..19: mol_type = other RNA
aaaagcccattgctcacac

SEQ ID NO: 48740 - RNA, 19 nt, synthetic construct
  misc_feature 1..19: note = siRNA sense sequence
  source 1..19: mol_type = other RNA
tgtgagcaatgggctttta

SEQ ID NO: 48741 - RNA, 19 nt, synthetic construct
  misc_feature 1..19: note = siRNA antisense sequence
  source 1..19: mol_type = other RNA
taaaagcccattgctcaca

SEQ ID NO: 48742 - RNA, 19 nt, synthetic construct
  misc_feature 1..19: note = siRNA sense sequence
  source 1..19: mol_type = other RNA
gagctgaatgcaaaatcaa

SEQ ID NO: 48743 - RNA, 19 nt, synthetic construct
  misc_feature 1..19: note = siRNA antisense sequence
  source 1..19: mol_type = other RNA
ttgattttgcattcagctc

SEQ ID NO: 48744 - RNA, 19 nt, synthetic construct
  misc_feature 1..19: note = siRNA sense sequence
  source 1..19: mol_type = other RNA
agctgaatgcaaaatcaaa

SEQ ID NO: 48745 - RNA, 19 nt, synthetic construct
  misc_feature 1..19: note = siRNA antisense sequence
  source 1..19: mol_type = other RNA
tttgattttgcattcagct

SEQ ID NO: 48746 - RNA, 19 nt, synthetic construct
  misc_feature 1..19: note = siRNA sense sequence
  source 1..19: mol_type = other RNA
gctgaatgcaaaatcaaat

SEQ ID NO: 48747 - RNA, 19 nt, synthetic construct
  misc_feature 1..19: note = siRNA antisense sequence
  source 1..19: mol_type = other RNA
atttgattttgcattcagc

SEQ ID NO: 48748 - RNA, 19 nt, synthetic construct
  misc_feature 1..19: note = siRNA sense sequence
  source 1..19: mol_type = other RNA
aaatgacttgattggctat

SEQ ID NO: 48749 - RNA, 19 nt, synthetic construct
  misc_feature 1..19: note = siRNA antisense sequence
  source 1..19: mol_type = other RNA
atagccaatcaagtcattt

SEQ ID NO: 48750 - RNA, 19 nt, synthetic construct
  misc_feature 1..19: note = siRNA sense sequence
  source 1..19: mol_type = other RNA
aatgacttgattggctata

SEQ ID NO: 48751 - RNA, 19 nt, synthetic construct
  misc_feature 1..19: note = siRNA antisense sequence
  source 1..19: mol_type = other RNA
tatagccaatcaagtcatt

SEQ ID NO: 48752 - RNA, 19 nt, synthetic construct
  misc_feature 1..19: note = siRNA sense sequence
  source 1..19: mol_type = other RNA
atgacttgattggctatag

SEQ ID NO: 48753 - RNA, 19 nt, synthetic construct
  misc_feature 1..19: note = siRNA antisense sequence
  source 1..19: mol_type = other RNA
ctatagccaatcaagtcat

SEQ ID NO: 48754 - RNA, 19 nt, synthetic construct
  misc_feature 1..19: note = siRNA sense sequence
  source 1..19: mol_type = other RNA
tgacttgattggctatagc

SEQ ID NO: 48755 - RNA, 19 nt, synthetic construct
  misc_feature 1..19: note = siRNA antisense sequence
  source 1..19: mol_type = other RNA
gctatagccaatcaagtca

SEQ ID NO: 48756 - RNA, 19 nt, synthetic construct
  misc_feature 1..19: note = siRNA sense sequence
  source 1..19: mol_type = other RNA
ctatagctaggcatttacc

SEQ ID NO: 48757 - RNA, 19 nt, synthetic construct
  misc_feature 1..19: note = siRNA antisense sequence
  source 1..19: mol_type = other RNA
ggtaaatgcctagctatag

SEQ ID NO: 48758 - RNA, 19 nt, synthetic construct
  misc_feature 1..19: note = siRNA sense sequence
  source 1..19: mol_type = other RNA
agctaggcatttaccttat

SEQ ID NO: 48759 - RNA, 19 nt, synthetic construct
  misc_feature 1..19: note = siRNA antisense sequence
  source 1..19: mol_type = other RNA
ataaggtaaatgcctagct

SEQ ID NO: 48760 - RNA, 19 nt, synthetic construct
  misc_feature 1..19: note = siRNA sense sequence
  source 1..19: mol_type = other RNA
ggcatttaccttatttggg

SEQ ID NO: 48761 - RNA, 19 nt, synthetic construct
  misc_feature 1..19: note = siRNA antisense sequence
  source 1..19: mol_type = other RNA
cccaaataaggtaaatgcc

SEQ ID NO: 48762 - RNA, 19 nt, synthetic construct
  misc_feature 1..19: note = siRNA sense sequence
  source 1..19: mol_type = other RNA
gcatttaccttatttgggt

SEQ ID NO: 48763 - RNA, 19 nt, synthetic construct
  misc_feature 1..19: note = siRNA antisense sequence
  source 1..19: mol_type = other RNA
acccaaataaggtaaatgc

SEQ ID NO: 48764 - RNA, 19 nt, synthetic construct
  misc_feature 1..19: note = siRNA sense sequence
  source 1..19: mol_type = other RNA
tgggtatgatctggtggaa

SEQ ID NO: 48765 - RNA, 19 nt, synthetic construct
  misc_feature 1..19: note = siRNA antisense sequence
  source 1..19: mol_type = other RNA
ttccaccagatcataccca

SEQ ID NO: 48766 - RNA, 19 nt, synthetic construct
  misc_feature 1..19: note = siRNA sense sequence
  source 1..19: mol_type = other RNA
ggttacttgccaggttctg

SEQ ID NO: 48767 - RNA, 19 nt, synthetic construct
  misc_feature 1..19: note = siRNA antisense sequence
  source 1..19: mol_type = other RNA
cagaacctggcaagtaacc

SEQ ID NO: 48768 - RNA, 19 nt, synthetic construct
  misc_feature 1..19: note = siRNA sense sequence
  source 1..19: mol_type = other RNA
gttacttgccaggttctga

SEQ ID NO: 48769 - RNA, 19 nt, synthetic construct
  misc_feature 1..19: note = siRNA antisense sequence
  source 1..19: mol_type = other RNA
tcagaacctggcaagtaac

SEQ ID NO: 48770 - RNA, 19 nt, synthetic construct
  misc_feature 1..19: note = siRNA sense sequence
  source 1..19: mol_type = other RNA
ttacttgccaggttctgat

SEQ ID NO: 48771 - RNA, 19 nt, synthetic construct
  misc_feature 1..19: note = siRNA antisense sequence
  source 1..19: mol_type = other RNA
atcagaacctggcaagtaa

SEQ ID NO: 48772 - RNA, 19 nt, synthetic construct
  misc_feature 1..19: note = siRNA sense sequence
  source 1..19: mol_type = other RNA
tacttgccaggttctgatt

SEQ ID NO: 48773 - RNA, 19 nt, synthetic construct
  misc_feature 1..19: note = siRNA antisense sequence
  source 1..19: mol_type = other RNA
aatcagaacctggcaagta

SEQ ID NO: 48774 - RNA, 19 nt, synthetic construct
  misc_feature 1..19: note = siRNA sense sequence
  source 1..19: mol_type = other RNA
agaagttagttgcagtttc

SEQ ID NO: 48775 - RNA, 19 nt, synthetic construct
  misc_feature 1..19: note = siRNA antisense sequence
  source 1..19: mol_type = other RNA
gaaactgcaactaacttct

SEQ ID NO: 48776 - RNA, 19 nt, synthetic construct
  misc_feature 1..19: note = siRNA sense sequence
  source 1..19: mol_type = other RNA
gaagttagttgcagtttct

SEQ ID NO: 48777 - RNA, 19 nt, synthetic construct
  misc_feature 1..19: note = siRNA antisense sequence
  source 1..19: mol_type = other RNA
agaaactgcaactaacttc

SEQ ID NO: 48778 - RNA, 19 nt, synthetic construct
  misc_feature 1..19: note = siRNA sense sequence
  source 1..19: mol_type = other RNA
aagttagttgcagtttcta

SEQ ID NO: 48779 - RNA, 19 nt, synthetic construct
  misc_feature 1..19: note = siRNA antisense sequence
  source 1..19: mol_type = other RNA
tagaaactgcaactaactt

SEQ ID NO: 48780 - RNA, 19 nt, synthetic construct
  misc_feature 1..19: note = siRNA sense sequence
  source 1..19: mol_type = other RNA
tagttgcagtttctaattg

SEQ ID NO: 48781 - RNA, 19 nt, synthetic construct
  misc_feature 1..19: note = siRNA antisense sequence
  source 1..19: mol_type = other RNA
caattagaaactgcaacta

SEQ ID NO: 48782 - RNA, 19 nt, synthetic construct
  misc_feature 1..19: note = siRNA sense sequence
  source 1..19: mol_type = other RNA
agttgcagtttctaattgg

SEQ ID NO: 48783 - RNA, 19 nt, synthetic construct
  misc_feature 1..19: note = siRNA antisense sequence
  source 1..19: mol_type = other RNA
ccaattagaaactgcaact

SEQ ID NO: 48784 - RNA, 19 nt, synthetic construct
  misc_feature 1..19: note = siRNA sense sequence
  source 1..19: mol_type = other RNA
tgcagtttctaattggtaa

SEQ ID NO: 48785 - RNA, 19 nt, synthetic construct
  misc_feature 1..19: note = siRNA antisense sequence
  source 1..19: mol_type = other RNA
ttaccaattagaaactgca

SEQ ID NO: 48786 - RNA, 19 nt, synthetic construct
  misc_feature 1..19: note = siRNA sense sequence
  source 1..19: mol_type = other RNA
gcagtttctaattggtaat

SEQ ID NO: 48787 - RNA, 19 nt, synthetic construct
  misc_feature 1..19: note = siRNA antisense sequence
  source 1..19: mol_type = other RNA
attaccaattagaaactgc

SEQ ID NO: 48788 - RNA, 19 nt, synthetic construct
  misc_feature 1..19: note = siRNA sense sequence
  source 1..19: mol_type = other RNA
cagtttctaattggtaatg

SEQ ID NO: 48789 - RNA, 19 nt, synthetic construct
  misc_feature 1..19: note = siRNA antisense sequence
  source 1..19: mol_type = other RNA
cattaccaattagaaactg

SEQ ID NO: 48790 - RNA, 19 nt, synthetic construct
  misc_feature 1..19: note = siRNA sense sequence
  source 1..19: mol_type = other RNA
gtttacattgaattggact

SEQ ID NO: 48791 - RNA, 19 nt, synthetic construct
  misc_feature 1..19: note = siRNA antisense sequence
  source 1..19: mol_type = other RNA
agtccaattcaatgtaaac

SEQ ID NO: 48792 - RNA, 19 nt, synthetic construct
  misc_feature 1..19: note = siRNA sense sequence
  source 1..19: mol_type = other RNA
tacattgaattggactttg

SEQ ID NO: 48793 - RNA, 19 nt, synthetic construct
  misc_feature 1..19: note = siRNA antisense sequence
  source 1..19: mol_type = other RNA
caaagtccaattcaatgta

SEQ ID NO: 48794 - RNA, 19 nt, synthetic construct
  misc_feature 1..19: note = siRNA sense sequence
  source 1..19: mol_type = other RNA
acattgaattggactttgg

SEQ ID NO: 48795 - RNA, 19 nt, synthetic construct
  misc_feature 1..19: note = siRNA antisense sequence
  source 1..19: mol_type = other RNA
ccaaagtccaattcaatgt

SEQ ID NO: 48796 - RNA, 19 nt, synthetic construct
  misc_feature 1..19: note = siRNA sense sequence
  source 1..19: mol_type = other RNA
cattgaattggactttggt

SEQ ID NO: 48797 - RNA, 19 nt, synthetic construct
  misc_feature 1..19: note = siRNA antisense sequence
  source 1..19: mol_type = other RNA
accaaagtccaattcaatg

SEQ ID NO: 48798 - RNA, 19 nt, synthetic construct
  misc_feature 1..19: note = siRNA sense sequence
  source 1..19: mol_type = other RNA
ttgaattggactttggttt

SEQ ID NO: 48799 - RNA, 19 nt, synthetic construct
  misc_feature 1..19: note = siRNA antisense sequence
  source 1..19: mol_type = other RNA
aaaccaaagtccaattcaa

SEQ ID NO: 48800 - RNA, 19 nt, synthetic construct
  misc_feature 1..19: note = siRNA sense sequence
  source 1..19: mol_type = other RNA
tggactttggtttgattat

SEQ ID NO: 48801 - RNA, 19 nt, synthetic construct
  misc_feature 1..19: note = siRNA antisense sequence
  source 1..19: mol_type = other RNA
ataatcaaaccaaagtcca

SEQ ID NO: 48802 - RNA, 19 nt, synthetic construct
  misc_feature 1..19: note = siRNA sense sequence
  source 1..19: mol_type = other RNA
acatacggcactggagctg

SEQ ID NO: 48803 - RNA, 19 nt, synthetic construct
  misc_feature 1..19: note = siRNA antisense sequence
  source 1..19: mol_type = other RNA
cagctccagtgccgtatgt

SEQ ID NO: 48804 - RNA, 19 nt, synthetic construct
  misc_feature 1..19: note = siRNA sense sequence
  source 1..19: mol_type = other RNA
catacggcactggagctgt

SEQ ID NO: 48805 - RNA, 19 nt, synthetic construct
  misc_feature 1..19: note = siRNA antisense sequence
  source 1..19: mol_type = other RNA
acagctccagtgccgtatg

SEQ ID NO: 48806 - RNA, 19 nt, synthetic construct
  misc_feature 1..19: note = siRNA sense sequence
  source 1..19: mol_type = other RNA
atacggcactggagctgtc

SEQ ID NO: 48807 - RNA, 19 nt, synthetic construct
  misc_feature 1..19: note = siRNA antisense sequence
  source 1..19: mol_type = other RNA
gacagctccagtgccgtat

SEQ ID NO: 48808 - RNA, 19 nt, synthetic construct
  misc_feature 1..19: note = siRNA sense sequence
  source 1..19: mol_type = other RNA
tacggcactggagctgtct

SEQ ID NO: 48809 - RNA, 19 nt, synthetic construct
  misc_feature 1..19: note = siRNA antisense sequence
  source 1..19: mol_type = other RNA
agacagctccagtgccgta

SEQ ID NO: 48810 - RNA, 19 nt, synthetic construct
  misc_feature 1..19: note = siRNA sense sequence
  source 1..19: mol_type = other RNA
acggcactggagctgtctc

SEQ ID NO: 48811 - RNA, 19 nt, synthetic construct
  misc_feature 1..19: note = siRNA antisense sequence
  source 1..19: mol_type = other RNA
gagacagctccagtgccgt

SEQ ID NO: 48812 - RNA, 19 nt, synthetic construct
  misc_feature 1..19: note = siRNA sense sequence
  source 1..19: mol_type = other RNA
cggcactggagctgtctca

SEQ ID NO: 48813 - RNA, 19 nt, synthetic construct
  misc_feature 1..19: note = siRNA antisense sequence
  source 1..19: mol_type = other RNA
tgagacagctccagtgccg

SEQ ID NO: 48814 - RNA, 19 nt, synthetic construct
  misc_feature 1..19: note = siRNA sense sequence
  source 1..19: mol_type = other RNA
ctgtctcagcctaattgcc

SEQ ID NO: 48815 - RNA, 19 nt, synthetic construct
  misc_feature 1..19: note = siRNA antisense sequence
  source 1..19: mol_type = other RNA
ggcaattaggctgagacag

SEQ ID NO: 48816 - RNA, 19 nt, synthetic construct
  misc_feature 1..19: note = siRNA sense sequence
  source 1..19: mol_type = other RNA
tgtctcagcctaattgcct

SEQ ID NO: 48817 - RNA, 19 nt, synthetic construct
  misc_feature 1..19: note = siRNA antisense sequence
  source 1..19: mol_type = other RNA
aggcaattaggctgagaca

SEQ ID NO: 48818 - RNA, 19 nt, synthetic construct
  misc_feature 1..19: note = siRNA sense sequence
  source 1..19: mol_type = other RNA
gtctcagcctaattgccta

SEQ ID NO: 48819 - RNA, 19 nt, synthetic construct
  misc_feature 1..19: note = siRNA antisense sequence
  source 1..19: mol_type = other RNA
taggcaattaggctgagac

SEQ ID NO: 48820 - RNA, 19 nt, synthetic construct
  misc_feature 1..19: note = siRNA sense sequence
  source 1..19: mol_type = other RNA
tctcagcctaattgcctat

SEQ ID NO: 48821 - RNA, 19 nt, synthetic construct
  misc_feature 1..19: note = siRNA antisense sequence
  source 1..19: mol_type = other RNA
ataggcaattaggctgaga

SEQ ID NO: 48822 - RNA, 19 nt, synthetic construct
  misc_feature 1..19: note = siRNA sense sequence
  source 1..19: mol_type = other RNA
ctcagcctaattgcctata

SEQ ID NO: 48823 - RNA, 19 nt, synthetic construct
  misc_feature 1..19: note = siRNA antisense sequence
  source 1..19: mol_type = other RNA
tataggcaattaggctgag

SEQ ID NO: 48824 - RNA, 19 nt, synthetic construct
  misc_feature 1..19: note = siRNA sense sequence
  source 1..19: mol_type = other RNA
tcagcctaattgcctataa

SEQ ID NO: 48825 - RNA, 19 nt, synthetic construct
  misc_feature 1..19: note = siRNA antisense sequence
  source 1..19: mol_type = other RNA
ttataggcaattaggctga

SEQ ID NO: 48826 - RNA, 19 nt, synthetic construct
  misc_feature 1..19: note = siRNA sense sequence
  source 1..19: mol_type = other RNA
cagcctaattgcctataaa

SEQ ID NO: 48827 - RNA, 19 nt, synthetic construct
  misc_feature 1..19: note = siRNA antisense sequence
  source 1..19: mol_type = other RNA
tttataggcaattaggctg

SEQ ID NO: 48828 - RNA, 19 nt, synthetic construct
  misc_feature 1..19: note = siRNA sense sequence
  source 1..19: mol_type = other RNA
agcctaattgcctataaat

SEQ ID NO: 48829 - RNA, 19 nt, synthetic construct
  misc_feature 1..19: note = siRNA antisense sequence
  source 1..19: mol_type = other RNA
atttataggcaattaggct

SEQ ID NO: 48830 - RNA, 19 nt, synthetic construct
  misc_feature 1..19: note = siRNA sense sequence
  source 1..19: mol_type = other RNA
gaggaatgtgatcagatac

SEQ ID NO: 48831 - RNA, 19 nt, synthetic construct
  misc_feature 1..19: note = siRNA antisense sequence
  source 1..19: mol_type = other RNA
gtatctgatcacattcctc

SEQ ID NO: 48832 - RNA, 19 nt, synthetic construct
  misc_feature 1..19: note = siRNA sense sequence
  source 1..19: mol_type = other RNA
gaatgtgatcagataccaa

SEQ ID NO: 48833 - RNA, 19 nt, synthetic construct
  misc_feature 1..19: note = siRNA antisense sequence
  source 1..19: mol_type = other RNA
ttggtatctgatcacattc

SEQ ID NO: 48834 - RNA, 19 nt, synthetic construct
  misc_feature 1..19: note = siRNA sense sequence
  source 1..19: mol_type = other RNA
tcagataccaaggatgagg

SEQ ID NO: 48835 - RNA, 19 nt, synthetic construct
  misc_feature 1..19: note = siRNA antisense sequence
  source 1..19: mol_type = other RNA
cctcatccttggtatctga

SEQ ID NO: 48836 - RNA, 19 nt, synthetic construct
  misc_feature 1..19: note = siRNA sense sequence
  source 1..19: mol_type = other RNA
cagataccaaggatgaggg

SEQ ID NO: 48837 - RNA, 19 nt, synthetic construct
  misc_feature 1..19: note = siRNA antisense sequence
  source 1..19: mol_type = other RNA
ccctcatccttggtatctg

SEQ ID NO: 48838 - RNA, 19 nt, synthetic construct
  misc_feature 1..19: note = siRNA sense sequence
  source 1..19: mol_type = other RNA
agataccaaggatgaggga

SEQ ID NO: 48839 - RNA, 19 nt, synthetic construct
  misc_feature 1..19: note = siRNA antisense sequence
  source 1..19: mol_type = other RNA
tccctcatccttggtatct

SEQ ID NO: 48840 - RNA, 19 nt, synthetic construct
  misc_feature 1..19: note = siRNA sense sequence
  source 1..19: mol_type = other RNA
accaaggatgagggatttc

SEQ ID NO: 48841 - RNA, 19 nt, synthetic construct
  misc_feature 1..19: note = siRNA antisense sequence
  source 1..19: mol_type = other RNA
gaaatccctcatccttggt

SEQ ID NO: 48842 - RNA, 19 nt, synthetic construct
  misc_feature 1..19: note = siRNA sense sequence
  source 1..19: mol_type = other RNA
ccaaggatgagggatttcc

SEQ ID NO: 48843 - RNA, 19 nt, synthetic construct
  misc_feature 1..19: note = siRNA antisense sequence
  source 1..19: mol_type = other RNA
ggaaatccctcatccttgg

SEQ ID NO: 48844 - RNA, 19 nt, synthetic construct
  misc_feature 1..19: note = siRNA sense sequence
  source 1..19: mol_type = other RNA
caaggatgagggatttcca

SEQ ID NO: 48845 - RNA, 19 nt, synthetic construct
  misc_feature 1..19: note = siRNA antisense sequence
  source 1..19: mol_type = other RNA
tggaaatccctcatccttg

SEQ ID NO: 48846 - RNA, 19 nt, synthetic construct
  misc_feature 1..19: note = siRNA sense sequence
  source 1..19: mol_type = other RNA
aaggatgagggatttccac

SEQ ID NO: 48847 - RNA, 19 nt, synthetic construct
  misc_feature 1..19: note = siRNA antisense sequence
  source 1..19: mol_type = other RNA
gtggaaatccctcatcctt

SEQ ID NO: 48848 - RNA, 19 nt, synthetic construct
  misc_feature 1..19: note = siRNA sense sequence
  source 1..19: mol_type = other RNA
aggatgagggatttccact

SEQ ID NO: 48849 - RNA, 19 nt, synthetic construct
  misc_feature 1..19: note = siRNA antisense sequence
  source 1..19: mol_type = other RNA
agtggaaatccctcatcct

SEQ ID NO: 48850 - RNA, 19 nt, synthetic construct
  misc_feature 1..19: note = siRNA sense sequence
  source 1..19: mol_type = other RNA
ggatgagggatttccacta

SEQ ID NO: 48851 - RNA, 19 nt, synthetic construct
  misc_feature 1..19: note = siRNA antisense sequence
  source 1..19: mol_type = other RNA
tagtggaaatccctcatcc

SEQ ID NO: 48852 - RNA, 19 nt, synthetic construct
  misc_feature 1..19: note = siRNA sense sequence
  source 1..19: mol_type = other RNA
gatgagggatttccactaa

SEQ ID NO: 48853 - RNA, 19 nt, synthetic construct
  misc_feature 1..19: note = siRNA antisense sequence
  source 1..19: mol_type = other RNA
ttagtggaaatccctcatc

SEQ ID NO: 48854 - RNA, 19 nt, synthetic construct
  misc_feature 1..19: note = siRNA sense sequence
  source 1..19: mol_type = other RNA
atgagggatttccactaaa

SEQ ID NO: 48855 - RNA, 19 nt, synthetic construct
  misc_feature 1..19: note = siRNA antisense sequence
  source 1..19: mol_type = other RNA
tttagtggaaatccctcat

SEQ ID NO: 48856 - RNA, 19 nt, synthetic construct
  misc_feature 1..19: note = siRNA sense sequence
  source 1..19: mol_type = other RNA
tccactaaattgattaagc

SEQ ID NO: 48857 - RNA, 19 nt, synthetic construct
  misc_feature 1..19: note = siRNA antisense sequence
  source 1..19: mol_type = other RNA
gcttaatcaatttagtgga

SEQ ID NO: 48858 - RNA, 19 nt, synthetic construct
  misc_feature 1..19: note = siRNA sense sequence
  source 1..19: mol_type = other RNA
ccactaaattgattaagcc

SEQ ID NO: 48859 - RNA, 19 nt, synthetic construct
  misc_feature 1..19: note = siRNA antisense sequence
  source 1..19: mol_type = other RNA
ggcttaatcaatttagtgg

SEQ ID NO: 48860 - RNA, 19 nt, synthetic construct
  misc_feature 1..19: note = siRNA sense sequence
  source 1..19: mol_type = other RNA
cactaaattgattaagcca

SEQ ID NO: 48861 - RNA, 19 nt, synthetic construct
  misc_feature 1..19: note = siRNA antisense sequence
  source 1..19: mol_type = other RNA
tggcttaatcaatttagtg

SEQ ID NO: 48862 - RNA, 19 nt, synthetic construct
  misc_feature 1..19: note = siRNA sense sequence
  source 1..19: mol_type = other RNA
aattgattaagccagattc

SEQ ID NO: 48863 - RNA, 19 nt, synthetic construct
  misc_feature 1..19: note = siRNA antisense sequence
  source 1..19: mol_type = other RNA
gaatctggcttaatcaatt

SEQ ID NO: 48864 - RNA, 19 nt, synthetic construct
  misc_feature 1..19: note = siRNA sense sequence
  source 1..19: mol_type = other RNA
attgattaagccagattct

SEQ ID NO: 48865 - RNA, 19 nt, synthetic construct
  misc_feature 1..19: note = siRNA antisense sequence
  source 1..19: mol_type = other RNA
agaatctggcttaatcaat

SEQ ID NO: 48866 - RNA, 19 nt, synthetic construct
  misc_feature 1..19: note = siRNA sense sequence
  source 1..19: mol_type = other RNA
ttgattaagccagattctt

SEQ ID NO: 48867 - RNA, 19 nt, synthetic construct
  misc_feature 1..19: note = siRNA antisense sequence
  source 1..19: mol_type = other RNA
aagaatctggcttaatcaa

SEQ ID NO: 48868 - RNA, 19 nt, synthetic construct
  misc_feature 1..19: note = siRNA sense sequence
  source 1..19: mol_type = other RNA
tgattaagccagattcttg

SEQ ID NO: 48869 - RNA, 19 nt, synthetic construct
  misc_feature 1..19: note = siRNA antisense sequence
  source 1..19: mol_type = other RNA
caagaatctggcttaatca

SEQ ID NO: 48870 - RNA, 19 nt, synthetic construct
  misc_feature 1..19: note = siRNA sense sequence
  source 1..19: mol_type = other RNA
gattaagccagattcttgc

SEQ ID NO: 48871 - RNA, 19 nt, synthetic construct
  misc_feature 1..19: note = siRNA antisense sequence
  source 1..19: mol_type = other RNA
gcaagaatctggcttaatc

SEQ ID NO: 48872 - RNA, 19 nt, synthetic construct
  misc_feature 1..19: note = siRNA sense sequence
  source 1..19: mol_type = other RNA
attaagccagattcttgct

SEQ ID NO: 48873 - RNA, 19 nt, synthetic construct
  misc_feature 1..19: note = siRNA antisense sequence
  source 1..19: mol_type = other RNA
agcaagaatctggcttaat

SEQ ID NO: 48874 - RNA, 19 nt, synthetic construct
  misc_feature 1..19: note = siRNA sense sequence
  source 1..19: mol_type = other RNA
agccagattcttgcttaaa

SEQ ID NO: 48875 - RNA, 19 nt, synthetic construct
  misc_feature 1..19: note = siRNA antisense sequence
  source 1..19: mol_type = other RNA
tttaagcaagaatctggct

SEQ ID NO: 48876 - RNA, 19 nt, synthetic construct
  misc_feature 1..19: note = siRNA sense sequence
  source 1..19: mol_type = other RNA
cagagcccagtctagaaga

SEQ ID NO: 48877 - RNA, 19 nt, synthetic construct
  misc_feature 1..19: note = siRNA antisense sequence
  source 1..19: mol_type = other RNA
tcttctagactgggctctg

SEQ ID NO: 48878 - RNA, 19 nt, synthetic construct
  misc_feature 1..19: note = siRNA sense sequence
  source 1..19: mol_type = other RNA
agagcccagtctagaagaa

SEQ ID NO: 48879 - RNA, 19 nt, synthetic construct
  misc_feature 1..19: note = siRNA antisense sequence
  source 1..19: mol_type = other RNA
ttcttctagactgggctct

SEQ ID NO: 48880 - RNA, 19 nt, synthetic construct
  misc_feature 1..19: note = siRNA sense sequence
  source 1..19: mol_type = other RNA
agcccagtctagaagaaga

SEQ ID NO: 48881 - RNA, 19 nt, synthetic construct
  misc_feature 1..19: note = siRNA antisense sequence
  source 1..19: mol_type = other RNA
tcttcttctagactgggct

SEQ ID NO: 48882 - RNA, 19 nt, synthetic construct
  misc_feature 1..19: note = siRNA sense sequence
  source 1..19: mol_type = other RNA
gcccagtctagaagaagat

SEQ ID NO: 48883 - RNA, 19 nt, synthetic construct
  misc_feature 1..19: note = siRNA antisense sequence
  source 1..19: mol_type = other RNA
atcttcttctagactgggc

SEQ ID NO: 48884 - RNA, 19 nt, synthetic construct
  misc_feature 1..19: note = siRNA sense sequence
  source 1..19: mol_type = other RNA
cccagtctagaagaagatg

SEQ ID NO: 48885 - RNA, 19 nt, synthetic construct
  misc_feature 1..19: note = siRNA antisense sequence
  source 1..19: mol_type = other RNA
catcttcttctagactggg

SEQ ID NO: 48886 - RNA, 19 nt, synthetic construct
  misc_feature 1..19: note = siRNA sense sequence
  source 1..19: mol_type = other RNA
ccagtctagaagaagatgt

SEQ ID NO: 48887 - RNA, 19 nt, synthetic construct
  misc_feature 1..19: note = siRNA antisense sequence
  source 1..19: mol_type = other RNA
acatcttcttctagactgg

SEQ ID NO: 48888 - RNA, 19 nt, synthetic construct
  misc_feature 1..19: note = siRNA sense sequence
  source 1..19: mol_type = other RNA
cagtctagaagaagatgta

SEQ ID NO: 48889 - RNA, 19 nt, synthetic construct
  misc_feature 1..19: note = siRNA antisense sequence
  source 1..19: mol_type = other RNA
tacatcttcttctagactg

SEQ ID NO: 48890 - RNA, 19 nt, synthetic construct
  misc_feature 1..19: note = siRNA sense sequence
  source 1..19: mol_type = other RNA
agtctagaagaagatgtaa

SEQ ID NO: 48891 - RNA, 19 nt, synthetic construct
  misc_feature 1..19: note = siRNA antisense sequence
  source 1..19: mol_type = other RNA
ttacatcttcttctagact

SEQ ID NO: 48892 - RNA, 19 nt, synthetic construct
  misc_feature 1..19: note = siRNA sense sequence
  source 1..19: mol_type = other RNA
gtctagaagaagatgtaaa

SEQ ID NO: 48893 - RNA, 19 nt, synthetic construct
  misc_feature 1..19: note = siRNA antisense sequence
  source 1..19: mol_type = other RNA
tttacatcttcttctagac

SEQ ID NO: 48894 - RNA, 19 nt, synthetic construct
  misc_feature 1..19: note = siRNA sense sequence
  source 1..19: mol_type = other RNA
tctagaagaagatgtaaag

SEQ ID NO: 48895 - RNA, 19 nt, synthetic construct
  misc_feature 1..19: note = siRNA antisense sequence
  source 1..19: mol_type = other RNA
ctttacatcttcttctaga

SEQ ID NO: 48896 - RNA, 19 nt, synthetic construct
  misc_feature 1..19: note = siRNA sense sequence
  source 1..19: mol_type = other RNA
ctagaagaagatgtaaagg

SEQ ID NO: 48897 - RNA, 19 nt, synthetic construct
  misc_feature 1..19: note = siRNA antisense sequence
  source 1..19: mol_type = other RNA
cctttacatcttcttctag

SEQ ID NO: 48898 - RNA, 19 nt, synthetic construct
  misc_feature 1..19: note = siRNA sense sequence
  source 1..19: mol_type = other RNA
tagaagaagatgtaaagga

SEQ ID NO: 48899 - RNA, 19 nt, synthetic construct
  misc_feature 1..19: note = siRNA antisense sequence
  source 1..19: mol_type = other RNA
tcctttacatcttcttcta

SEQ ID NO: 48900 - RNA, 19 nt, synthetic construct
  misc_feature 1..19: note = siRNA sense sequence
  source 1..19: mol_type = other RNA
agaagaagatgtaaaggag

SEQ ID NO: 48901 - RNA, 19 nt, synthetic construct
  misc_feature 1..19: note = siRNA antisense sequence
  source 1..19: mol_type = other RNA
ctcctttacatcttcttct

SEQ ID NO: 48902 - RNA, 19 nt, synthetic construct
  misc_feature 1..19: note = siRNA sense sequence
  source 1..19: mol_type = other RNA
gaagaagatgtaaaggagc

SEQ ID NO: 48903 - RNA, 19 nt, synthetic construct
  misc_feature 1..19: note = siRNA antisense sequence
  source 1..19: mol_type = other RNA
gctcctttacatcttcttc

SEQ ID NO: 48904 - RNA, 19 nt, synthetic construct
  misc_feature 1..19: note = siRNA sense sequence
  source 1..19: mol_type = other RNA
aagaagatgtaaaggagcc

SEQ ID NO: 48905 - RNA, 19 nt, synthetic construct
  misc_feature 1..19: note = siRNA antisense sequence
  source 1..19: mol_type = other RNA
ggctcctttacatcttctt

SEQ ID NO: 48906 - RNA, 19 nt, synthetic construct
  misc_feature 1..19: note = siRNA sense sequence
  source 1..19: mol_type = other RNA
gatgtaaaggagcctgact

SEQ ID NO: 48907 - RNA, 19 nt, synthetic construct
  misc_feature 1..19: note = siRNA antisense sequence
  source 1..19: mol_type = other RNA
agtcaggctcctttacatc

SEQ ID NO: 48908 - RNA, 19 nt, synthetic construct
  misc_feature 1..19: note = siRNA sense sequence
  source 1..19: mol_type = other RNA
agagggtctttgtcaagta

SEQ ID NO: 48909 - RNA, 19 nt, synthetic construct
  misc_feature 1..19: note = siRNA antisense sequence
  source 1..19: mol_type = other RNA
tacttgacaaagaccctct

SEQ ID NO: 48910 - RNA, 19 nt, synthetic construct
  misc_feature 1..19: note = siRNA sense sequence
  source 1..19: mol_type = other RNA
gagggtctttgtcaagtat

SEQ ID NO: 48911 - RNA, 19 nt, synthetic construct
  misc_feature 1..19: note = siRNA antisense sequence
  source 1..19: mol_type = other RNA
atacttgacaaagaccctc

SEQ ID NO: 48912 - RNA, 19 nt, synthetic construct
  misc_feature 1..19: note = siRNA sense sequence
  source 1..19: mol_type = other RNA
agggtctttgtcaagtata

SEQ ID NO: 48913 - RNA, 19 nt, synthetic construct
  misc_feature 1..19: note = siRNA antisense sequence
  source 1..19: mol_type = other RNA
tatacttgacaaagaccct

SEQ ID NO: 48914 - RNA, 19 nt, synthetic construct
  misc_feature 1..19: note = siRNA sense sequence
  source 1..19: mol_type = other RNA
gggtctttgtcaagtatag

SEQ ID NO: 48915 - RNA, 19 nt, synthetic construct
  misc_feature 1..19: note = siRNA antisense sequence
  source 1..19: mol_type = other RNA
ctatacttgacaaagaccc

SEQ ID NO: 48916 - RNA, 19 nt, synthetic construct
  misc_feature 1..19: note = siRNA sense sequence
  source 1..19: mol_type = other RNA
ggtctttgtcaagtataga

SEQ ID NO: 48917 - RNA, 19 nt, synthetic construct
  misc_feature 1..19: note = siRNA antisense sequence
  source 1..19: mol_type = other RNA
tctatacttgacaaagacc

SEQ ID NO: 48918 - RNA, 19 nt, synthetic construct
  misc_feature 1..19: note = siRNA sense sequence
  source 1..19: mol_type = other RNA
gtctttgtcaagtatagag

SEQ ID NO: 48919 - RNA, 19 nt, synthetic construct
  misc_feature 1..19: note = siRNA antisense sequence
  source 1..19: mol_type = other RNA
ctctatacttgacaaagac

SEQ ID NO: 48920 - RNA, 19 nt, synthetic construct
  misc_feature 1..19: note = siRNA sense sequence
  source 1..19: mol_type = other RNA
tctttgtcaagtatagagg

SEQ ID NO: 48921 - RNA, 19 nt, synthetic construct
  misc_feature 1..19: note = siRNA antisense sequence
  source 1..19: mol_type = other RNA
cctctatacttgacaaaga

SEQ ID NO: 48922 - RNA, 19 nt, synthetic construct
  misc_feature 1..19: note = siRNA sense sequence
  source 1..19: mol_type = other RNA
ctttgtcaagtatagaggg

SEQ ID NO: 48923 - RNA, 19 nt, synthetic construct
  misc_feature 1..19: note = siRNA antisense sequence
  source 1..19: mol_type = other RNA
ccctctatacttgacaaag

SEQ ID NO: 48924 - RNA, 19 nt, synthetic construct
  misc_feature 1..19: note = siRNA sense sequence
  source 1..19: mol_type = other RNA
tttgtcaagtatagagggc

SEQ ID NO: 48925 - RNA, 19 nt, synthetic construct
  misc_feature 1..19: note = siRNA antisense sequence
  source 1..19: mol_type = other RNA
gccctctatacttgacaaa

SEQ ID NO: 48926 - RNA, 19 nt, synthetic construct
  misc_feature 1..19: note = siRNA sense sequence
  source 1..19: mol_type = other RNA
gtcatatttgctttaagtc

SEQ ID NO: 48927 - RNA, 19 nt, synthetic construct
  misc_feature 1..19: note = siRNA antisense sequence
  source 1..19: mol_type = other RNA
gacttaaagcaaatatgac

SEQ ID NO: 48928 - RNA, 19 nt, synthetic construct
  misc_feature 1..19: note = siRNA sense sequence
  source 1..19: mol_type = other RNA
tcatatttgctttaagtcc

SEQ ID NO: 48929 - RNA, 19 nt, synthetic construct
  misc_feature 1..19: note = siRNA antisense sequence
  source 1..19: mol_type = other RNA
ggacttaaagcaaatatga

SEQ ID NO: 48930 - RNA, 19 nt, synthetic construct
  misc_feature 1..19: note = siRNA sense sequence
  source 1..19: mol_type = other RNA
catatttgctttaagtcct

SEQ ID NO: 48931 - RNA, 19 nt, synthetic construct
  misc_feature 1..19: note = siRNA antisense sequence
  source 1..19: mol_type = other RNA
aggacttaaagcaaatatg

SEQ ID NO: 48932 - RNA, 19 nt, synthetic construct
  misc_feature 1..19: note = siRNA sense sequence
  source 1..19: mol_type = other RNA
tatttgctttaagtccttc

SEQ ID NO: 48933 - RNA, 19 nt, synthetic construct
  misc_feature 1..19: note = siRNA antisense sequence
  source 1..19: mol_type = other RNA
gaaggacttaaagcaaata

SEQ ID NO: 48934 - RNA, 19 nt, synthetic construct
  misc_feature 1..19: note = siRNA sense sequence
  source 1..19: mol_type = other RNA
atttgctttaagtccttcg

SEQ ID NO: 48935 - RNA, 19 nt, synthetic construct
  misc_feature 1..19: note = siRNA antisense sequence
  source 1..19: mol_type = other RNA
cgaaggacttaaagcaaat

SEQ ID NO: 48936 - RNA, 19 nt, synthetic construct
  misc_feature 1..19: note = siRNA sense sequence
  source 1..19: mol_type = other RNA
tttgctttaagtccttcga

SEQ ID NO: 48937 - RNA, 19 nt, synthetic construct
  misc_feature 1..19: note = siRNA antisense sequence
  source 1..19: mol_type = other RNA
tcgaaggacttaaagcaaa

SEQ ID NO: 48938 - RNA, 19 nt, synthetic construct
  misc_feature 1..19: note = siRNA sense sequence
  source 1..19: mol_type = other RNA
ttgctttaagtccttcgaa

SEQ ID NO: 48939 - RNA, 19 nt, synthetic construct
  misc_feature 1..19: note = siRNA antisense sequence
  source 1..19: mol_type = other RNA
ttcgaaggacttaaagcaa

SEQ ID NO: 48940 - RNA, 19 nt, synthetic construct
  misc_feature 1..19: note = siRNA sense sequence
  source 1..19: mol_type = other RNA
ccatttcaccagaatcctc

SEQ ID NO: 48941 - RNA, 19 nt, synthetic construct
  misc_feature 1..19: note = siRNA antisense sequence
  source 1..19: mol_type = other RNA
gaggattctggtgaaatgg

SEQ ID NO: 48942 - RNA, 19 nt, synthetic construct
  misc_feature 1..19: note = siRNA sense sequence
  source 1..19: mol_type = other RNA
catttcaccagaatcctct

SEQ ID NO: 48943 - RNA, 19 nt, synthetic construct
  misc_feature 1..19: note = siRNA antisense sequence
  source 1..19: mol_type = other RNA
agaggattctggtgaaatg

SEQ ID NO: 48944 - RNA, 19 nt, synthetic construct
  misc_feature 1..19: note = siRNA sense sequence
  source 1..19: mol_type = other RNA
atttcaccagaatcctctc

SEQ ID NO: 48945 - RNA, 19 nt, synthetic construct
  misc_feature 1..19: note = siRNA antisense sequence
  source 1..19: mol_type = other RNA
gagaggattctggtgaaat

SEQ ID NO: 48946 - RNA, 19 nt, synthetic construct
  misc_feature 1..19: note = siRNA sense sequence
  source 1..19: mol_type = other RNA
tttcaccagaatcctctct

SEQ ID NO: 48947 - RNA, 19 nt, synthetic construct
  misc_feature 1..19: note = siRNA antisense sequence
  source 1..19: mol_type = other RNA
agagaggattctggtgaaa

SEQ ID NO: 48948 - RNA, 19 nt, synthetic construct
  misc_feature 1..19: note = siRNA sense sequence
  source 1..19: mol_type = other RNA
ttcaccagaatcctctctt

SEQ ID NO: 48949 - RNA, 19 nt, synthetic construct
  misc_feature 1..19: note = siRNA antisense sequence
  source 1..19: mol_type = other RNA
aagagaggattctggtgaa

SEQ ID NO: 48950 - RNA, 19 nt, synthetic construct
  misc_feature 1..19: note = siRNA sense sequence
  source 1..19: mol_type = other RNA
aatcctctcttcctgctta

SEQ ID NO: 48951 - RNA, 19 nt, synthetic construct
  misc_feature 1..19: note = siRNA antisense sequence
  source 1..19: mol_type = other RNA
taagcaggaagagaggatt

SEQ ID NO: 48952 - RNA, 19 nt, synthetic construct
  misc_feature 1..19: note = siRNA sense sequence
  source 1..19: mol_type = other RNA
ggtatatttagtgtgtatc

SEQ ID NO: 48953 - RNA, 19 nt, synthetic construct
  misc_feature 1..19: note = siRNA antisense sequence
  source 1..19: mol_type = other RNA
gatacacactaaatatacc

SEQ ID NO: 48954 - RNA, 19 nt, synthetic construct
  misc_feature 1..19: note = siRNA sense sequence
  source 1..19: mol_type = other RNA
atttagtgtgtatctgttg

SEQ ID NO: 48955 - RNA, 19 nt, synthetic construct
  misc_feature 1..19: note = siRNA antisense sequence
  source 1..19: mol_type = other RNA
caacagatacacactaaat

SEQ ID NO: 48956 - RNA, 19 nt, synthetic construct
  misc_feature 1..19: note = siRNA sense sequence
  source 1..19: mol_type = other RNA
tttagtgtgtatctgttgt

SEQ ID NO: 48957 - RNA, 19 nt, synthetic construct
  misc_feature 1..19: note = siRNA antisense sequence
  source 1..19: mol_type = other RNA
acaacagatacacactaaa

SEQ ID NO: 48958 - RNA, 19 nt, synthetic construct
  misc_feature 1..19: note = siRNA sense sequence
  source 1..19: mol_type = other RNA
ttagtgtgtatctgttgtg

SEQ ID NO: 48959 - RNA, 19 nt, synthetic construct
  misc_feature 1..19: note = siRNA antisense sequence
  source 1..19: mol_type = other RNA
cacaacagatacacactaa

SEQ ID NO: 48960 - RNA, 19 nt, synthetic construct
  misc_feature 1..19: note = siRNA sense sequence
  source 1..19: mol_type = other RNA
tagtgtgtatctgttgtgc

SEQ ID NO: 48961 - RNA, 19 nt, synthetic construct
  misc_feature 1..19: note = siRNA antisense sequence
  source 1..19: mol_type = other RNA
gcacaacagatacacacta

SEQ ID NO: 48962 - RNA, 19 nt, synthetic construct
  misc_feature 1..19: note = siRNA sense sequence
  source 1..19: mol_type = other RNA
gtgtgtatctgttgtgcaa

SEQ ID NO: 48963 - RNA, 19 nt, synthetic construct
  misc_feature 1..19: note = siRNA antisense sequence
  source 1..19: mol_type = other RNA
ttgcacaacagatacacac

SEQ ID NO: 48964 - RNA, 19 nt, synthetic construct
  misc_feature 1..19: note = siRNA sense sequence
  source 1..19: mol_type = other RNA
tgtgtatctgttgtgcaaa

SEQ ID NO: 48965 - RNA, 19 nt, synthetic construct
  misc_feature 1..19: note = siRNA antisense sequence
  source 1..19: mol_type = other RNA
tttgcacaacagatacaca

SEQ ID NO: 48966 - RNA, 19 nt, synthetic construct
  misc_feature 1..19: note = siRNA sense sequence
  source 1..19: mol_type = other RNA
aactctttggaatgttagc

SEQ ID NO: 48967 - RNA, 19 nt, synthetic construct
  misc_feature 1..19: note = siRNA antisense sequence
  source 1..19: mol_type = other RNA
gctaacattccaaagagtt

SEQ ID NO: 48968 - RNA, 19 nt, synthetic construct
  misc_feature 1..19: note = siRNA sense sequence
  source 1..19: mol_type = other RNA
actctttggaatgttagct

SEQ ID NO: 48969 - RNA, 19 nt, synthetic construct
  misc_feature 1..19: note = siRNA antisense sequence
  source 1..19: mol_type = other RNA
agctaacattccaaagagt

SEQ ID NO: 48970 - RNA, 19 nt, synthetic construct
  misc_feature 1..19: note = siRNA sense sequence
  source 1..19: mol_type = other RNA
ctctttggaatgttagctt

SEQ ID NO: 48971 - RNA, 19 nt, synthetic construct
  misc_feature 1..19: note = siRNA antisense sequence
  source 1..19: mol_type = other RNA
aagctaacattccaaagag

SEQ ID NO: 48972 - RNA, 19 nt, synthetic construct
  misc_feature 1..19: note = siRNA sense sequence
  source 1..19: mol_type = other RNA
tctttggaatgttagctta

SEQ ID NO: 48973 - RNA, 19 nt, synthetic construct
  misc_feature 1..19: note = siRNA antisense sequence
  source 1..19: mol_type = other RNA
taagctaacattccaaaga

SEQ ID NO: 48974 - RNA, 19 nt, synthetic construct
  misc_feature 1..19: note = siRNA sense sequence
  source 1..19: mol_type = other RNA
tttggaatgttagcttaag

SEQ ID NO: 48975 - RNA, 19 nt, synthetic construct
  misc_feature 1..19: note = siRNA antisense sequence
  source 1..19: mol_type = other RNA
cttaagctaacattccaaa

SEQ ID NO: 48976 - RNA, 19 nt, synthetic construct
  misc_feature 1..19: note = siRNA sense sequence
  source 1..19: mol_type = other RNA
ttggaatgttagcttaaga

SEQ ID NO: 48977 - RNA, 19 nt, synthetic construct
  misc_feature 1..19: note = siRNA antisense sequence
  source 1..19: mol_type = other RNA
tcttaagctaacattccaa

SEQ ID NO: 48978 - RNA, 19 nt, synthetic construct
  misc_feature 1..19: note = siRNA sense sequence
  source 1..19: mol_type = other RNA
aatgttagcttaagacagg

SEQ ID NO: 48979 - RNA, 19 nt, synthetic construct
  misc_feature 1..19: note = siRNA antisense sequence
  source 1..19: mol_type = other RNA
cctgtcttaagctaacatt

SEQ ID NO: 48980 - RNA, 19 nt, synthetic construct
  misc_feature 1..19: note = siRNA sense sequence
  source 1..19: mol_type = other RNA
tgttagcttaagacaggcg

SEQ ID NO: 48981 - RNA, 19 nt, synthetic construct
  misc_feature 1..19: note = siRNA antisense sequence
  source 1..19: mol_type = other RNA
cgcctgtcttaagctaaca

SEQ ID NO: 48982 - RNA, 19 nt, synthetic construct
  misc_feature 1..19: note = siRNA sense sequence
  source 1..19: mol_type = other RNA
gttagcttaagacaggcgt

SEQ ID NO: 48983 - RNA, 19 nt, synthetic construct
  misc_feature 1..19: note = siRNA antisense sequence
  source 1..19: mol_type = other RNA
acgcctgtcttaagctaac

SEQ ID NO: 48984 - RNA, 19 nt, synthetic construct
  misc_feature 1..19: note = siRNA sense sequence
  source 1..19: mol_type = other RNA
ttagcttaagacaggcgtt

SEQ ID NO: 48985 - RNA, 19 nt, synthetic construct
  misc_feature 1..19: note = siRNA antisense sequence
  source 1..19: mol_type = other RNA
aacgcctgtcttaagctaa

SEQ ID NO: 48986 - RNA, 19 nt, synthetic construct
  misc_feature 1..19: note = siRNA sense sequence
  source 1..19: mol_type = other RNA
tagcttaagacaggcgttt

SEQ ID NO: 48987 - RNA, 19 nt, synthetic construct
  misc_feature 1..19: note = siRNA antisense sequence
  source 1..19: mol_type = other RNA
aaacgcctgtcttaagcta

SEQ ID NO: 48988 - RNA, 19 nt, synthetic construct
  misc_feature 1..19: note = siRNA sense sequence
  source 1..19: mol_type = other RNA
agcttaagacaggcgtttc

SEQ ID NO: 48989 - RNA, 19 nt, synthetic construct
  misc_feature 1..19: note = siRNA antisense sequence
  source 1..19: mol_type = other RNA
gaaacgcctgtcttaagct

SEQ ID NO: 48990 - RNA, 19 nt, synthetic construct
  misc_feature 1..19: note = siRNA sense sequence
  source 1..19: mol_type = other RNA
gcttaagacaggcgtttcc

SEQ ID NO: 48991 - RNA, 19 nt, synthetic construct
  misc_feature 1..19: note = siRNA antisense sequence
  source 1..19: mol_type = other RNA
ggaaacgcctgtcttaagc

SEQ ID NO: 48992 - RNA, 19 nt, synthetic construct
  misc_feature 1..19: note = siRNA sense sequence
  source 1..19: mol_type = other RNA
aagacaggcgtttccttgg

SEQ ID NO: 48993 - RNA, 19 nt, synthetic construct
  misc_feature 1..19: note = siRNA antisense sequence
  source 1..19: mol_type = other RNA
ccaaggaaacgcctgtctt

SEQ ID NO: 48994 - RNA, 19 nt, synthetic construct
  misc_feature 1..19: note = siRNA sense sequence
  source 1..19: mol_type = other RNA
agacaggcgtttccttggc

SEQ ID NO: 48995 - RNA, 19 nt, synthetic construct
  misc_feature 1..19: note = siRNA antisense sequence
  source 1..19: mol_type = other RNA
gccaaggaaacgcctgtct

SEQ ID NO: 48996 - RNA, 19 nt, synthetic construct
  misc_feature 1..19: note = siRNA sense sequence
  source 1..19: mol_type = other RNA
gacaggcgtttccttggca

SEQ ID NO: 48997 - RNA, 19 nt, synthetic construct
  misc_feature 1..19: note = siRNA antisense sequence
  source 1..19: mol_type = other RNA
tgccaaggaaacgcctgtc

SEQ ID NO: 48998 - RNA, 19 nt, synthetic construct
  misc_feature 1..19: note = siRNA sense sequence
  source 1..19: mol_type = other RNA
acaggcgtttccttggcaa

SEQ ID NO: 48999 - RNA, 19 nt, synthetic construct
  misc_feature 1..19: note = siRNA antisense sequence
  source 1..19: mol_type = other RNA
ttgccaaggaaacgcctgt

SEQ ID NO: 49000 - RNA, 19 nt, synthetic construct
  misc_feature 1..19: note = siRNA sense sequence
  source 1..19: mol_type = other RNA
caggcgtttccttggcaaa

SEQ ID NO: 49001 - RNA, 19 nt, synthetic construct
  misc_feature 1..19: note = siRNA antisense sequence
  source 1..19: mol_type = other RNA
tttgccaaggaaacgcctg

SEQ ID NO: 49002 - RNA, 19 nt, synthetic construct
  misc_feature 1..19: note = siRNA sense sequence
  source 1..19: mol_type = other RNA
aggcgtttccttggcaaat

SEQ ID NO: 49003 - RNA, 19 nt, synthetic construct
  misc_feature 1..19: note = siRNA antisense sequence
  source 1..19: mol_type = other RNA
atttgccaaggaaacgcct

SEQ ID NO: 49004 - RNA, 19 nt, synthetic construct
  misc_feature 1..19: note = siRNA sense sequence
  source 1..19: mol_type = other RNA
ggcgtttccttggcaaatc

SEQ ID NO: 49005 - RNA, 19 nt, synthetic construct
  misc_feature 1..19: note = siRNA antisense sequence
  source 1..19: mol_type = other RNA
gatttgccaaggaaacgcc

SEQ ID NO: 49006 - RNA, 19 nt, synthetic construct
  misc_feature 1..19: note = siRNA sense sequence
  source 1..19: mol_type = other RNA
gcgtttccttggcaaatct

SEQ ID NO: 49007 - RNA, 19 nt, synthetic construct
  misc_feature 1..19: note = siRNA antisense sequence
  source 1..19: mol_type = other RNA
agatttgccaaggaaacgc

SEQ ID NO: 49008 - RNA, 19 nt, synthetic construct
  misc_feature 1..19: note = siRNA sense sequence
  source 1..19: mol_type = other RNA
cgtttccttggcaaatcta

SEQ ID NO: 49009 - RNA, 19 nt, synthetic construct
  misc_feature 1..19: note = siRNA antisense sequence
  source 1..19: mol_type = other RNA
tagatttgccaaggaaacg

SEQ ID NO: 49010 - RNA, 19 nt, synthetic construct
  misc_feature 1..19: note = siRNA sense sequence
  source 1..19: mol_type = other RNA
gtttccttggcaaatctat

SEQ ID NO: 49011 - RNA, 19 nt, synthetic construct
  misc_feature 1..19: note = siRNA antisense sequence
  source 1..19: mol_type = other RNA
atagatttgccaaggaaac

SEQ ID NO: 49012 - RNA, 19 nt, synthetic construct
  misc_feature 1..19: note = siRNA sense sequence
  source 1..19: mol_type = other RNA
tttccttggcaaatctatc

SEQ ID NO: 49013 - RNA, 19 nt, synthetic construct
  misc_feature 1..19: note = siRNA antisense sequence
  source 1..19: mol_type = other RNA
gatagatttgccaaggaaa

SEQ ID NO: 49014 - RNA, 19 nt, synthetic construct
  misc_feature 1..19: note = siRNA sense sequence
  source 1..19: mol_type = other RNA
ttccttggcaaatctatcc

SEQ ID NO: 49015 - RNA, 19 nt, synthetic construct
  misc_feature 1..19: note = siRNA antisense sequence
  source 1..19: mol_type = other RNA
ggatagatttgccaaggaa

SEQ ID NO: 49016 - RNA, 19 nt, synthetic construct
  misc_feature 1..19: note = siRNA sense sequence
  source 1..19: mol_type = other RNA
tccttggcaaatctatccc

SEQ ID NO: 49017 - RNA, 19 nt, synthetic construct
  misc_feature 1..19: note = siRNA antisense sequence
  source 1..19: mol_type = other RNA
gggatagatttgccaagga

SEQ ID NO: 49018 - RNA, 19 nt, synthetic construct
  misc_feature 1..19: note = siRNA sense sequence
  source 1..19: mol_type = other RNA
tggcaaatctatcccaaat

SEQ ID NO: 49019 - RNA, 19 nt, synthetic construct
  misc_feature 1..19: note = siRNA antisense sequence
  source 1..19: mol_type = other RNA
atttgggatagatttgcca

SEQ ID NO: 49020 - RNA, 19 nt, synthetic construct
  misc_feature 1..19: note = siRNA sense sequence
  source 1..19: mol_type = other RNA
caaccaaatatctaaatgg

SEQ ID NO: 49021 - RNA, 19 nt, synthetic construct
  misc_feature 1..19: note = siRNA antisense sequence
  source 1..19: mol_type = other RNA
ccatttagatatttggttg

SEQ ID NO: 49022 - RNA, 19 nt, synthetic construct
  misc_feature 1..19: note = siRNA sense sequence
  source 1..19: mol_type = other RNA
accaaatatctaaatggac

SEQ ID NO: 49023 - RNA, 19 nt, synthetic construct
  misc_feature 1..19: note = siRNA antisense sequence
  source 1..19: mol_type = other RNA
gtccatttagatatttggt

SEQ ID NO: 49024 - RNA, 19 nt, synthetic construct
  misc_feature 1..19: note = siRNA sense sequence
  source 1..19: mol_type = other RNA
caatgattgctgtactttg

SEQ ID NO: 49025 - RNA, 19 nt, synthetic construct
  misc_feature 1..19: note = siRNA antisense sequence
  source 1..19: mol_type = other RNA
caaagtacagcaatcattg

SEQ ID NO: 49026 - RNA, 19 nt, synthetic construct
  misc_feature 1..19: note = siRNA sense sequence
  source 1..19: mol_type = other RNA
aatgattgctgtactttgt

SEQ ID NO: 49027 - RNA, 19 nt, synthetic construct
  misc_feature 1..19: note = siRNA antisense sequence
  source 1..19: mol_type = other RNA
acaaagtacagcaatcatt

SEQ ID NO: 49028 - RNA, 19 nt, synthetic construct
  misc_feature 1..19: note = siRNA sense sequence
  source 1..19: mol_type = other RNA
atgattgctgtactttgta

SEQ ID NO: 49029 - RNA, 19 nt, synthetic construct
  misc_feature 1..19: note = siRNA antisense sequence
  source 1..19: mol_type = other RNA
tacaaagtacagcaatcat

SEQ ID NO: 49030 - RNA, 19 nt, synthetic construct
  misc_feature 1..19: note = siRNA sense sequence
  source 1..19: mol_type = other RNA
aaaaggtttgagtaaaagg

SEQ ID NO: 49031 - RNA, 19 nt, synthetic construct
  misc_feature 1..19: note = siRNA antisense sequence
  source 1..19: mol_type = other RNA
ccttttactcaaacctttt

SEQ ID NO: 49032 - RNA, 19 nt, synthetic construct
  misc_feature 1..19: note = siRNA sense sequence
  source 1..19: mol_type = other RNA
aaaggtttgagtaaaagga

SEQ ID NO: 49033 - RNA, 19 nt, synthetic construct
  misc_feature 1..19: note = siRNA antisense sequence
  source 1..19: mol_type = other RNA
tccttttactcaaaccttt

SEQ ID NO: 49034 - RNA, 19 nt, synthetic construct
  misc_feature 1..19: note = siRNA sense sequence
  source 1..19: mol_type = other RNA
aaggtttgagtaaaaggaa

SEQ ID NO: 49035 - RNA, 19 nt, synthetic construct
  misc_feature 1..19: note = siRNA antisense sequence
  source 1..19: mol_type = other RNA
ttccttttactcaaacctt

SEQ ID NO: 49036 - RNA, 19 nt, synthetic construct
  misc_feature 1..19: note = siRNA sense sequence
  source 1..19: mol_type = other RNA
attttccatttccctgtct

SEQ ID NO: 49037 - RNA, 19 nt, synthetic construct
  misc_feature 1..19: note = siRNA antisense sequence
  source 1..19: mol_type = other RNA
agacagggaaatggaaaat

SEQ ID NO: 49038 - RNA, 19 nt, synthetic construct
  misc_feature 1..19: note = siRNA sense sequence
  source 1..19: mol_type = other RNA
tctgtttctttccataagt

SEQ ID NO: 49039 - RNA, 19 nt, synthetic construct
  misc_feature 1..19: note = siRNA antisense sequence
  source 1..19: mol_type = other RNA
acttatggaaagaaacaga

SEQ ID NO: 49040 - RNA, 19 nt, synthetic construct
  misc_feature 1..19: note = siRNA sense sequence
  source 1..19: mol_type = other RNA
ctgtttctttccataagtg

SEQ ID NO: 49041 - RNA, 19 nt, synthetic construct
  misc_feature 1..19: note = siRNA antisense sequence
  source 1..19: mol_type = other RNA
cacttatggaaagaaacag

SEQ ID NO: 49042 - RNA, 19 nt, synthetic construct
  misc_feature 1..19: note = siRNA sense sequence
  source 1..19: mol_type = other RNA
tgtttctttccataagtgc

SEQ ID NO: 49043 - RNA, 19 nt, synthetic construct
  misc_feature 1..19: note = siRNA antisense sequence
  source 1..19: mol_type = other RNA
gcacttatggaaagaaaca

SEQ ID NO: 49044 - RNA, 19 nt, synthetic construct
  misc_feature 1..19: note = siRNA sense sequence
  source 1..19: mol_type = other RNA
gtttctttccataagtgct

SEQ ID NO: 49045 - RNA, 19 nt, synthetic construct
  misc_feature 1..19: note = siRNA antisense sequence
  source 1..19: mol_type = other RNA
agcacttatggaaagaaac

SEQ ID NO: 49046 - RNA, 19 nt, synthetic construct
  misc_feature 1..19: note = siRNA sense sequence
  source 1..19: mol_type = other RNA
ctttccataagtgctgttc

SEQ ID NO: 49047 - RNA, 19 nt, synthetic construct
  misc_feature 1..19: note = siRNA antisense sequence
  source 1..19: mol_type = other RNA
gaacagcacttatggaaag

SEQ ID NO: 49048 - RNA, 19 nt, synthetic construct
  misc_feature 1..19: note = siRNA sense sequence
  source 1..19: mol_type = other RNA
tttccataagtgctgttca

SEQ ID NO: 49049 - RNA, 19 nt, synthetic construct
  misc_feature 1..19: note = siRNA antisense sequence
  source 1..19: mol_type = other RNA
tgaacagcacttatggaaa

SEQ ID NO: 49050 - RNA, 19 nt, synthetic construct
  misc_feature 1..19: note = siRNA sense sequence
  source 1..19: mol_type = other RNA
ttccataagtgctgttcaa

SEQ ID NO: 49051 - RNA, 19 nt, synthetic construct
  misc_feature 1..19: note = siRNA antisense sequence
  source 1..19: mol_type = other RNA
ttgaacagcacttatggaa

SEQ ID NO: 49052 - RNA, 19 nt, synthetic construct
  misc_feature 1..19: note = siRNA sense sequence
  source 1..19: mol_type = other RNA
tccataagtgctgttcaat

SEQ ID NO: 49053 - RNA, 19 nt, synthetic construct
  misc_feature 1..19: note = siRNA antisense sequence
  source 1..19: mol_type = other RNA
attgaacagcacttatgga

SEQ ID NO: 49054 - RNA, 19 nt, synthetic construct
  misc_feature 1..19: note = siRNA sense sequence
  source 1..19: mol_type = other RNA
ccataagtgctgttcaatt

SEQ ID NO: 49055 - RNA, 19 nt, synthetic construct
  misc_feature 1..19: note = siRNA antisense sequence
  source 1..19: mol_type = other RNA
aattgaacagcacttatgg

SEQ ID NO: 49056 - RNA, 19 nt, synthetic construct
  misc_feature 1..19: note = siRNA sense sequence
  source 1..19: mol_type = other RNA
cataagtgctgttcaatta

SEQ ID NO: 49057 - RNA, 19 nt, synthetic construct
  misc_feature 1..19: note = siRNA antisense sequence
  source 1..19: mol_type = other RNA
taattgaacagcacttatg

SEQ ID NO: 49058 - RNA, 19 nt, synthetic construct
  misc_feature 1..19: note = siRNA sense sequence
  source 1..19: mol_type = other RNA
tgtctcgctctgtcgccca

SEQ ID NO: 49059 - RNA, 19 nt, synthetic construct
  misc_feature 1..19: note = siRNA antisense sequence
  source 1..19: mol_type = other RNA
tgggcgacagagcgagaca

SEQ ID NO: 49060 - RNA, 19 nt, synthetic construct
  misc_feature 1..19: note = siRNA sense sequence
  source 1..19: mol_type = other RNA
tctgtcgcccaggctggaa

SEQ ID NO: 49061 - RNA, 19 nt, synthetic construct
  misc_feature 1..19: note = siRNA antisense sequence
  source 1..19: mol_type = other RNA
ttccagcctgggcgacaga

SEQ ID NO: 49062 - RNA, 19 nt, synthetic construct
  misc_feature 1..19: note = siRNA sense sequence
  source 1..19: mol_type = other RNA
ctgtcgcccaggctggaat

SEQ ID NO: 49063 - RNA, 19 nt, synthetic construct
  misc_feature 1..19: note = siRNA antisense sequence
  source 1..19: mol_type = other RNA
attccagcctgggcgacag

SEQ ID NO: 49064 - RNA, 19 nt, synthetic construct
  misc_feature 1..19: note = siRNA sense sequence
  source 1..19: mol_type = other RNA
tgtcgcccaggctggaatg

SEQ ID NO: 49065 - RNA, 19 nt, synthetic construct
  misc_feature 1..19: note = siRNA antisense sequence
  source 1..19: mol_type = other RNA
cattccagcctgggcgaca

SEQ ID NO: 49066 - RNA, 19 nt, synthetic construct
  misc_feature 1..19: note = siRNA sense sequence
  source 1..19: mol_type = other RNA
ccgggttcacgccattctc

SEQ ID NO: 49067 - RNA, 19 nt, synthetic construct
  misc_feature 1..19: note = siRNA antisense sequence
  source 1..19: mol_type = other RNA
gagaatggcgtgaacccgg

SEQ ID NO: 49068 - RNA, 19 nt, synthetic construct
  misc_feature 1..19: note = siRNA sense sequence
  source 1..19: mol_type = other RNA
cgggttcacgccattctcc

SEQ ID NO: 49069 - RNA, 19 nt, synthetic construct
  misc_feature 1..19: note = siRNA antisense sequence
  source 1..19: mol_type = other RNA
ggagaatggcgtgaacccg

SEQ ID NO: 49070 - RNA, 19 nt, synthetic construct
  misc_feature 1..19: note = siRNA sense sequence
  source 1..19: mol_type = other RNA
gggttcacgccattctcct

SEQ ID NO: 49071 - RNA, 19 nt, synthetic construct
  misc_feature 1..19: note = siRNA antisense sequence
  source 1..19: mol_type = other RNA
aggagaatggcgtgaaccc

SEQ ID NO: 49072 - RNA, 19 nt, synthetic construct
  misc_feature 1..19: note = siRNA sense sequence
  source 1..19: mol_type = other RNA
ggttcacgccattctcctg

SEQ ID NO: 49073 - RNA, 19 nt, synthetic construct
  misc_feature 1..19: note = siRNA antisense sequence
  source 1..19: mol_type = other RNA
caggagaatggcgtgaacc

SEQ ID NO: 49074 - RNA, 19 nt, synthetic construct
  misc_feature 1..19: note = siRNA sense sequence
  source 1..19: mol_type = other RNA
gttcacgccattctcctgc

SEQ ID NO: 49075 - RNA, 19 nt, synthetic construct
  misc_feature 1..19: note = siRNA antisense sequence
  source 1..19: mol_type = other RNA
gcaggagaatggcgtgaac

SEQ ID NO: 49076 - RNA, 19 nt, synthetic construct
  misc_feature 1..19: note = siRNA sense sequence
  source 1..19: mol_type = other RNA
ttcacgccattctcctgcc

SEQ ID NO: 49077 - RNA, 19 nt, synthetic construct
  misc_feature 1..19: note = siRNA antisense sequence
  source 1..19: mol_type = other RNA
ggcaggagaatggcgtgaa

SEQ ID NO: 49078 - RNA, 19 nt, synthetic construct
  misc_feature 1..19: note = siRNA sense sequence
  source 1..19: mol_type = other RNA
tcacgccattctcctgcct

SEQ ID NO: 49079 - RNA, 19 nt, synthetic construct
  misc_feature 1..19: note = siRNA antisense sequence
  source 1..19: mol_type = other RNA
aggcaggagaatggcgtga

SEQ ID NO: 49080 - RNA, 19 nt, synthetic construct
  misc_feature 1..19: note = siRNA sense sequence
  source 1..19: mol_type = other RNA
tagctgggactacaggcgc

SEQ ID NO: 49081 - RNA, 19 nt, synthetic construct
  misc_feature 1..19: note = siRNA antisense sequence
  source 1..19: mol_type = other RNA
gcgcctgtagtcccagcta

SEQ ID NO: 49082 - RNA, 19 nt, synthetic construct
  misc_feature 1..19: note = siRNA sense sequence
  source 1..19: mol_type = other RNA
caccttcttagccaggata

SEQ ID NO: 49083 - RNA, 19 nt, synthetic construct
  misc_feature 1..19: note = siRNA antisense sequence
  source 1..19: mol_type = other RNA
tatcctggctaagaaggtg

SEQ ID NO: 49084 - RNA, 19 nt, synthetic construct
  misc_feature 1..19: note = siRNA sense sequence
  source 1..19: mol_type = other RNA
accttcttagccaggatag

SEQ ID NO: 49085 - RNA, 19 nt, synthetic construct
  misc_feature 1..19: note = siRNA antisense sequence
  source 1..19: mol_type = other RNA
ctatcctggctaagaaggt

SEQ ID NO: 49086 - RNA, 19 nt, synthetic construct
  misc_feature 1..19: note = siRNA sense sequence
  source 1..19: mol_type = other RNA
tgacctcgtgatctgcccg

SEQ ID NO: 49087 - RNA, 19 nt, synthetic construct
  misc_feature 1..19: note = siRNA antisense sequence
  source 1..19: mol_type = other RNA
cgggcagatcacgaggtca

SEQ ID NO: 49088 - RNA, 19 nt, synthetic construct
  misc_feature 1..19: note = siRNA sense sequence
  source 1..19: mol_type = other RNA
ttttgcagttaggttatag

SEQ ID NO: 49089 - RNA, 19 nt, synthetic construct
  misc_feature 1..19: note = siRNA antisense sequence
  source 1..19: mol_type = other RNA
ctataacctaactgcaaaa

SEQ ID NO: 49090 - RNA, 19 nt, synthetic construct
  misc_feature 1..19: note = siRNA sense sequence
  source 1..19: mol_type = other RNA
tttgcagttaggttatagc

SEQ ID NO: 49091 - RNA, 19 nt, synthetic construct
  misc_feature 1..19: note = siRNA antisense sequence
  source 1..19: mol_type = other RNA
gctataacctaactgcaaa

SEQ ID NO: 49092 - RNA, 19 nt, synthetic construct
  misc_feature 1..19: note = siRNA sense sequence
  source 1..19: mol_type = other RNA
ttgcagttaggttatagca

SEQ ID NO: 49093 - RNA, 19 nt, synthetic construct
  misc_feature 1..19: note = siRNA antisense sequence
  source 1..19: mol_type = other RNA
tgctataacctaactgcaa

SEQ ID NO: 49094 - RNA, 19 nt, synthetic construct
  misc_feature 1..19: note = siRNA sense sequence
  source 1..19: mol_type = other RNA
tgcagttaggttatagcat

SEQ ID NO: 49095 - RNA, 19 nt, synthetic construct
  misc_feature 1..19: note = siRNA antisense sequence
  source 1..19: mol_type = other RNA
atgctataacctaactgca

SEQ ID NO: 49096 - RNA, 19 nt, synthetic construct
  misc_feature 1..19: note = siRNA sense sequence
  source 1..19: mol_type = other RNA
gcagttaggttatagcatt

SEQ ID NO: 49097 - RNA, 19 nt, synthetic construct
  misc_feature 1..19: note = siRNA antisense sequence
  source 1..19: mol_type = other RNA
aatgctataacctaactgc

SEQ ID NO: 49098 - RNA, 19 nt, synthetic construct
  misc_feature 1..19: note = siRNA sense sequence
  source 1..19: mol_type = other RNA
cagttaggttatagcattt

SEQ ID NO: 49099 - RNA, 19 nt, synthetic construct
  misc_feature 1..19: note = siRNA antisense sequence
  source 1..19: mol_type = other RNA
aaatgctataacctaactg

SEQ ID NO: 49100 - RNA, 19 nt, synthetic construct
  misc_feature 1..19: note = siRNA sense sequence
  source 1..19: mol_type = other RNA
tcctctccattgccatctt

SEQ ID NO: 49101 - RNA, 19 nt, synthetic construct
  misc_feature 1..19: note = siRNA antisense sequence
  source 1..19: mol_type = other RNA
aagatggcaatggagagga

SEQ ID NO: 49102 - RNA, 19 nt, synthetic construct
  misc_feature 1..19: note = siRNA sense sequence
  source 1..19: mol_type = other RNA
cctctccattgccatcttc

SEQ ID NO: 49103 - RNA, 19 nt, synthetic construct
  misc_feature 1..19: note = siRNA antisense sequence
  source 1..19: mol_type = other RNA
gaagatggcaatggagagg

SEQ ID NO: 49104 - RNA, 19 nt, synthetic construct
  misc_feature 1..19: note = siRNA sense sequence
  source 1..19: mol_type = other RNA
ctctccattgccatcttct

SEQ ID NO: 49105 - RNA, 19 nt, synthetic construct
  misc_feature 1..19: note = siRNA antisense sequence
  source 1..19: mol_type = other RNA
agaagatggcaatggagag

SEQ ID NO: 49106 - RNA, 19 nt, synthetic construct
  misc_feature 1..19: note = siRNA sense sequence
  source 1..19: mol_type = other RNA
tctccattgccatcttctc

SEQ ID NO: 49107 - RNA, 19 nt, synthetic construct
  misc_feature 1..19: note = siRNA antisense sequence
  source 1..19: mol_type = other RNA
gagaagatggcaatggaga

SEQ ID NO: 49108 - RNA, 19 nt, synthetic construct
  misc_feature 1..19: note = siRNA sense sequence
  source 1..19: mol_type = other RNA
ctccattgccatcttctcc

SEQ ID NO: 49109 - RNA, 19 nt, synthetic construct
  misc_feature 1..19: note = siRNA antisense sequence
  source 1..19: mol_type = other RNA
ggagaagatggcaatggag

SEQ ID NO: 49110 - RNA, 19 nt, synthetic construct
  misc_feature 1..19: note = siRNA sense sequence
  source 1..19: mol_type = other RNA
tccattgccatcttctccc

SEQ ID NO: 49111 - RNA, 19 nt, synthetic construct
  misc_feature 1..19: note = siRNA antisense sequence
  source 1..19: mol_type = other RNA
gggagaagatggcaatgga

SEQ ID NO: 49112 - RNA, 19 nt, synthetic construct
  misc_feature 1..19: note = siRNA sense sequence
  source 1..19: mol_type = other RNA
ttgccatcttctcccatcc

SEQ ID NO: 49113 - RNA, 19 nt, synthetic construct
  misc_feature 1..19: note = siRNA antisense sequence
  source 1..19: mol_type = other RNA
ggatgggagaagatggcaa

SEQ ID NO: 49114 - RNA, 19 nt, synthetic construct
  misc_feature 1..19: note = siRNA sense sequence
  source 1..19: mol_type = other RNA
tgccatcttctcccatcct

SEQ ID NO: 49115 - RNA, 19 nt, synthetic construct
  misc_feature 1..19: note = siRNA antisense sequence
  source 1..19: mol_type = other RNA
aggatgggagaagatggca

SEQ ID NO: 49116 - RNA, 19 nt, synthetic construct
  misc_feature 1..19: note = siRNA sense sequence
  source 1..19: mol_type = other RNA
gccatcttctcccatcctg

SEQ ID NO: 49117 - RNA, 19 nt, synthetic construct
  misc_feature 1..19: note = siRNA antisense sequence
  source 1..19: mol_type = other RNA
caggatgggagaagatggc

SEQ ID NO: 49118 - RNA, 19 nt, synthetic construct
  misc_feature 1..19: note = siRNA sense sequence
  source 1..19: mol_type = other RNA
tcttctcccatcctgctct

SEQ ID NO: 49119 - RNA, 19 nt, synthetic construct
  misc_feature 1..19: note = siRNA antisense sequence
  source 1..19: mol_type = other RNA
agagcaggatgggagaaga

SEQ ID NO: 49120 - RNA, 19 nt, synthetic construct
  misc_feature 1..19: note = siRNA sense sequence
  source 1..19: mol_type = other RNA
gctctcagcagcctgtgtg

SEQ ID NO: 49121 - RNA, 19 nt, synthetic construct
  misc_feature 1..19: note = siRNA antisense sequence
  source 1..19: mol_type = other RNA
cacacaggctgctgagagc

SEQ ID NO: 49122 - RNA, 19 nt, synthetic construct
  misc_feature 1..19: note = siRNA sense sequence
  source 1..19: mol_type = other RNA
ctctcagcagcctgtgtgc

SEQ ID NO: 49123 - RNA, 19 nt, synthetic construct
  misc_feature 1..19: note = siRNA antisense sequence
  source 1..19: mol_type = other RNA
gcacacaggctgctgagag

SEQ ID NO: 49124 - RNA, 19 nt, synthetic construct
  misc_feature 1..19: note = siRNA sense sequence
  source 1..19: mol_type = other RNA
tgactactccatggactca

SEQ ID NO: 49125 - RNA, 19 nt, synthetic construct
  misc_feature 1..19: note = siRNA antisense sequence
  source 1..19: mol_type = other RNA
tgagtccatggagtagtca

SEQ ID NO: 49126 - RNA, 19 nt, synthetic construct
  misc_feature 1..19: note = siRNA sense sequence
  source 1..19: mol_type = other RNA
accatctgcagtctattac

SEQ ID NO: 49127 - RNA, 19 nt, synthetic construct
  misc_feature 1..19: note = siRNA antisense sequence
  source 1..19: mol_type = other RNA
gtaatagactgcagatggt

SEQ ID NO: 49128 - RNA, 19 nt, synthetic construct
  misc_feature 1..19: note = siRNA sense sequence
  source 1..19: mol_type = other RNA
ccatctgcagtctattact

SEQ ID NO: 49129 - RNA, 19 nt, synthetic construct
  misc_feature 1..19: note = siRNA antisense sequence
  source 1..19: mol_type = other RNA
agtaatagactgcagatgg

SEQ ID NO: 49130 - RNA, 19 nt, synthetic construct
  misc_feature 1..19: note = siRNA sense sequence
  source 1..19: mol_type = other RNA
catctgcagtctattactc

SEQ ID NO: 49131 - RNA, 19 nt, synthetic construct
  misc_feature 1..19: note = siRNA antisense sequence
  source 1..19: mol_type = other RNA
gagtaatagactgcagatg

SEQ ID NO: 49132 - RNA, 19 nt, synthetic construct
  misc_feature 1..19: note = siRNA sense sequence
  source 1..19: mol_type = other RNA
atctgcagtctattactcc

SEQ ID NO: 49133 - RNA, 19 nt, synthetic construct
  misc_feature 1..19: note = siRNA antisense sequence
  source 1..19: mol_type = other RNA
ggagtaatagactgcagat

SEQ ID NO: 49134 - RNA, 19 nt, synthetic construct
  misc_feature 1..19: note = siRNA sense sequence
  source 1..19: mol_type = other RNA
tctgcagtctattactccc

SEQ ID NO: 49135 - RNA, 19 nt, synthetic construct
  misc_feature 1..19: note = siRNA antisense sequence
  source 1..19: mol_type = other RNA
gggagtaatagactgcaga

SEQ ID NO: 49136 - RNA, 19 nt, synthetic construct
  misc_feature 1..19: note = siRNA sense sequence
  source 1..19: mol_type = other RNA
cagtctattactcccatgt

SEQ ID NO: 49137 - RNA, 19 nt, synthetic construct
  misc_feature 1..19: note = siRNA antisense sequence
  source 1..19: mol_type = other RNA
acatgggagtaatagactg

SEQ ID NO: 49138 - RNA, 19 nt, synthetic construct
  misc_feature 1..19: note = siRNA sense sequence
  source 1..19: mol_type = other RNA
agtctattactcccatgtg

SEQ ID NO: 49139 - RNA, 19 nt, synthetic construct
  misc_feature 1..19: note = siRNA antisense sequence
  source 1..19: mol_type = other RNA
cacatgggagtaatagact

SEQ ID NO: 49140 - RNA, 19 nt, synthetic construct
  misc_feature 1..19: note = siRNA sense sequence
  source 1..19: mol_type = other RNA
aaagactgcagatgtccct

SEQ ID NO: 49141 - RNA, 19 nt, synthetic construct
  misc_feature 1..19: note = siRNA antisense sequence
  source 1..19: mol_type = other RNA
agggacatctgcagtcttt

SEQ ID NO: 49142 - RNA, 19 nt, synthetic construct
  misc_feature 1..19: note = siRNA sense sequence
  source 1..19: mol_type = other RNA
aagactgcagatgtcccta

SEQ ID NO: 49143 - RNA, 19 nt, synthetic construct
  misc_feature 1..19: note = siRNA antisense sequence
  source 1..19: mol_type = other RNA
tagggacatctgcagtctt

SEQ ID NO: 49144 - RNA, 19 nt, synthetic construct
  misc_feature 1..19: note = siRNA sense sequence
  source 1..19: mol_type = other RNA
agactgcagatgtccctat

SEQ ID NO: 49145 - RNA, 19 nt, synthetic construct
  misc_feature 1..19: note = siRNA antisense sequence
  source 1..19: mol_type = other RNA
atagggacatctgcagtct

SEQ ID NO: 49146 - RNA, 19 nt, synthetic construct
  misc_feature 1..19: note = siRNA sense sequence
  source 1..19: mol_type = other RNA
gactgcagatgtccctatc

SEQ ID NO: 49147 - RNA, 19 nt, synthetic construct
  misc_feature 1..19: note = siRNA antisense sequence
  source 1..19: mol_type = other RNA
gatagggacatctgcagtc

SEQ ID NO: 49148 - RNA, 19 nt, synthetic construct
  misc_feature 1..19: note = siRNA sense sequence
  source 1..19: mol_type = other RNA
actgcagatgtccctatcc

SEQ ID NO: 49149 - RNA, 19 nt, synthetic construct
  misc_feature 1..19: note = siRNA antisense sequence
  source 1..19: mol_type = other RNA
ggatagggacatctgcagt

SEQ ID NO: 49150 - RNA, 19 nt, synthetic construct
  misc_feature 1..19: note = siRNA sense sequence
  source 1..19: mol_type = other RNA
ctgcagatgtccctatccc

SEQ ID NO: 49151 - RNA, 19 nt, synthetic construct
  misc_feature 1..19: note = siRNA antisense sequence
  source 1..19: mol_type = other RNA
gggatagggacatctgcag

SEQ ID NO: 49152 - RNA, 19 nt, synthetic construct
  misc_feature 1..19: note = siRNA sense sequence
  source 1..19: mol_type = other RNA
cccaggacactctcaagca

SEQ ID NO: 49153 - RNA, 19 nt, synthetic construct
  misc_feature 1..19: note = siRNA antisense sequence
  source 1..19: mol_type = other RNA
tgcttgagagtgtcctggg

SEQ ID NO: 49154 - RNA, 19 nt, synthetic construct
  misc_feature 1..19: note = siRNA sense sequence
  source 1..19: mol_type = other RNA
ccaggacactctcaagcac

SEQ ID NO: 49155 - RNA, 19 nt, synthetic construct
  misc_feature 1..19: note = siRNA antisense sequence
  source 1..19: mol_type = other RNA
gtgcttgagagtgtcctgg

SEQ ID NO: 49156 - RNA, 19 nt, synthetic construct
  misc_feature 1..19: note = siRNA sense sequence
  source 1..19: mol_type = other RNA
cactctcaagcactcacag

SEQ ID NO: 49157 - RNA, 19 nt, synthetic construct
  misc_feature 1..19: note = siRNA antisense sequence
  source 1..19: mol_type = other RNA
ctgtgagtgcttgagagtg

SEQ ID NO: 49158 - RNA, 19 nt, synthetic construct
  misc_feature 1..19: note = siRNA sense sequence
  source 1..19: mol_type = other RNA
actctcaagcactcacagc

SEQ ID NO: 49159 - RNA, 19 nt, synthetic construct
  misc_feature 1..19: note = siRNA antisense sequence
  source 1..19: mol_type = other RNA
gctgtgagtgcttgagagt

SEQ ID NO: 49160 - RNA, 19 nt, synthetic construct
  misc_feature 1..19: note = siRNA sense sequence
  source 1..19: mol_type = other RNA
ctaatactctgttctctct

SEQ ID NO: 49161 - RNA, 19 nt, synthetic construct
  misc_feature 1..19: note = siRNA antisense sequence
  source 1..19: mol_type = other RNA
agagagaacagagtattag

SEQ ID NO: 49162 - RNA, 19 nt, synthetic construct
  misc_feature 1..19: note = siRNA sense sequence
  source 1..19: mol_type = other RNA
aaatgtcagagtagctgtg

SEQ ID NO: 49163 - RNA, 19 nt, synthetic construct
  misc_feature 1..19: note = siRNA antisense sequence
  source 1..19: mol_type = other RNA
cacagctactctgacattt

SEQ ID NO: 49164 - RNA, 19 nt, synthetic construct
  misc_feature 1..19: note = siRNA sense sequence
  source 1..19: mol_type = other RNA
aatgtcagagtagctgtgg

SEQ ID NO: 49165 - RNA, 19 nt, synthetic construct
  misc_feature 1..19: note = siRNA antisense sequence
  source 1..19: mol_type = other RNA
ccacagctactctgacatt

SEQ ID NO: 49166 - RNA, 19 nt, synthetic construct
  misc_feature 1..19: note = siRNA sense sequence
  source 1..19: mol_type = other RNA
atgtcagagtagctgtggg

SEQ ID NO: 49167 - RNA, 19 nt, synthetic construct
  misc_feature 1..19: note = siRNA antisense sequence
  source 1..19: mol_type = other RNA
cccacagctactctgacat

SEQ ID NO: 49168 - RNA, 19 nt, synthetic construct
  misc_feature 1..19: note = siRNA sense sequence
  source 1..19: mol_type = other RNA
aaaagtttctgctagacgc

SEQ ID NO: 49169 - RNA, 19 nt, synthetic construct
  misc_feature 1..19: note = siRNA antisense sequence
  source 1..19: mol_type = other RNA
gcgtctagcagaaactttt

SEQ ID NO: 49170 - RNA, 19 nt, synthetic construct
  misc_feature 1..19: note = siRNA sense sequence
  source 1..19: mol_type = other RNA
aaagtttctgctagacgca

SEQ ID NO: 49171 - RNA, 19 nt, synthetic construct
  misc_feature 1..19: note = siRNA antisense sequence
  source 1..19: mol_type = other RNA
tgcgtctagcagaaacttt

SEQ ID NO: 49172 - RNA, 19 nt, synthetic construct
  misc_feature 1..19: note = siRNA sense sequence
  source 1..19: mol_type = other RNA
aaaagaggcctgttaaatg

SEQ ID NO: 49173 - RNA, 19 nt, synthetic construct
  misc_feature 1..19: note = siRNA antisense sequence
  source 1..19: mol_type = other RNA
catttaacaggcctctttt

SEQ ID NO: 49174 - RNA, 19 nt, synthetic construct
  misc_feature 1..19: note = siRNA sense sequence
  source 1..19: mol_type = other RNA
gtgtttacagatctggcct

SEQ ID NO: 49175 - RNA, 19 nt, synthetic construct
  misc_feature 1..19: note = siRNA antisense sequence
  source 1..19: mol_type = other RNA
aggccagatctgtaaacac

SEQ ID NO: 49176 - RNA, 19 nt, synthetic construct
  misc_feature 1..19: note = siRNA sense sequence
  source 1..19: mol_type = other RNA
tgtttacagatctggcctt

SEQ ID NO: 49177 - RNA, 19 nt, synthetic construct
  misc_feature 1..19: note = siRNA antisense sequence
  source 1..19: mol_type = other RNA
aaggccagatctgtaaaca

SEQ ID NO: 49178 - RNA, 19 nt, synthetic construct
  misc_feature 1..19: note = siRNA sense sequence
  source 1..19: mol_type = other RNA
gtttacagatctggccttc

SEQ ID NO: 49179 - RNA, 19 nt, synthetic construct
  misc_feature 1..19: note = siRNA antisense sequence
  source 1..19: mol_type = other RNA
gaaggccagatctgtaaac

SEQ ID NO: 49180 - RNA, 19 nt, synthetic construct
  misc_feature 1..19: note = siRNA sense sequence
  source 1..19: mol_type = other RNA
tttacagatctggccttct

SEQ ID NO: 49181 - RNA, 19 nt, synthetic construct
  misc_feature 1..19: note = siRNA antisense sequence
  source 1..19: mol_type = other RNA
agaaggccagatctgtaaa

SEQ ID NO: 49182 - RNA, 19 nt, synthetic construct
  misc_feature 1..19: note = siRNA sense sequence
  source 1..19: mol_type = other RNA
ctggccttctctgaccatg

SEQ ID NO: 49183 - RNA, 19 nt, synthetic construct
  misc_feature 1..19: note = siRNA antisense sequence
  source 1..19: mol_type = other RNA
catggtcagagaaggccag

SEQ ID NO: 49184 - RNA, 19 nt, synthetic construct
  misc_feature 1..19: note = siRNA sense sequence
  source 1..19: mol_type = other RNA
ccttctctgaccatgatgt

SEQ ID NO: 49185 - RNA, 19 nt, synthetic construct
  misc_feature 1..19: note = siRNA antisense sequence
  source 1..19: mol_type = other RNA
acatcatggtcagagaagg

SEQ ID NO: 49186 - RNA, 19 nt, synthetic construct
  misc_feature 1..19: note = siRNA sense sequence
  source 1..19: mol_type = other RNA
cttctctgaccatgatgta

SEQ ID NO: 49187 - RNA, 19 nt, synthetic construct
  misc_feature 1..19: note = siRNA antisense sequence
  source 1..19: mol_type = other RNA
tacatcatggtcagagaag

SEQ ID NO: 49188 - RNA, 19 nt, synthetic construct
  misc_feature 1..19: note = siRNA sense sequence
  source 1..19: mol_type = other RNA
ctctgaccatgatgtatgc

SEQ ID NO: 49189 - RNA, 19 nt, synthetic construct
  misc_feature 1..19: note = siRNA antisense sequence
  source 1..19: mol_type = other RNA
gcatacatcatggtcagag

SEQ ID NO: 49190 - RNA, 19 nt, synthetic construct
  misc_feature 1..19: note = siRNA sense sequence
  source 1..19: mol_type = other RNA
tctgaccatgatgtatgcc

SEQ ID NO: 49191 - RNA, 19 nt, synthetic construct
  misc_feature 1..19: note = siRNA antisense sequence
  source 1..19: mol_type = other RNA
ggcatacatcatggtcaga

SEQ ID NO: 49192 - RNA, 19 nt, synthetic construct
  misc_feature 1..19: note = siRNA sense sequence
  source 1..19: mol_type = other RNA
ctgaccatgatgtatgcct

SEQ ID NO: 49193 - RNA, 19 nt, synthetic construct
  misc_feature 1..19: note = siRNA antisense sequence
  source 1..19: mol_type = other RNA
aggcatacatcatggtcag

SEQ ID NO: 49194 - RNA, 19 nt, synthetic construct
  misc_feature 1..19: note = siRNA sense sequence
  source 1..19: mol_type = other RNA
ccatgatgtatgcctcagt

SEQ ID NO: 49195 - RNA, 19 nt, synthetic construct
  misc_feature 1..19: note = siRNA antisense sequence
  source 1..19: mol_type = other RNA
actgaggcatacatcatgg

SEQ ID NO: 49196 - RNA, 19 nt, synthetic construct
  misc_feature 1..19: note = siRNA sense sequence
  source 1..19: mol_type = other RNA
catgatgtatgcctcagtc

SEQ ID NO: 49197 - RNA, 19 nt, synthetic construct
  misc_feature 1..19: note = siRNA antisense sequence
  source 1..19: mol_type = other RNA
gactgaggcatacatcatg

SEQ ID NO: 49198 - RNA, 19 nt, synthetic construct
  misc_feature 1..19: note = siRNA sense sequence
  source 1..19: mol_type = other RNA
atgatgtatgcctcagtca

SEQ ID NO: 49199 - RNA, 19 nt, synthetic construct
  misc_feature 1..19: note = siRNA antisense sequence
  source 1..19: mol_type = other RNA
tgactgaggcatacatcat

SEQ ID NO: 49200 - RNA, 19 nt, synthetic construct
  misc_feature 1..19: note = siRNA sense sequence
  source 1..19: mol_type = other RNA
atgcctcagtcacaccctc

SEQ ID NO: 49201 - RNA, 19 nt, synthetic construct
  misc_feature 1..19: note = siRNA antisense sequence
  source 1..19: mol_type = other RNA
gagggtgtgactgaggcat

SEQ ID NO: 49202 - RNA, 19 nt, synthetic construct
  misc_feature 1..19: note = siRNA sense sequence
  source 1..19: mol_type = other RNA
tgcctcagtcacaccctcc

SEQ ID NO: 49203 - RNA, 19 nt, synthetic construct
  misc_feature 1..19: note = siRNA antisense sequence
  source 1..19: mol_type = other RNA
ggagggtgtgactgaggca

SEQ ID NO: 49204 - RNA, 19 nt, synthetic construct
  misc_feature 1..19: note = siRNA sense sequence
  source 1..19: mol_type = other RNA
ctcagtcacaccctccctt

SEQ ID NO: 49205 - RNA, 19 nt, synthetic construct
  misc_feature 1..19: note = siRNA antisense sequence
  source 1..19: mol_type = other RNA
aagggagggtgtgactgag

SEQ ID NO: 49206 - RNA, 19 nt, synthetic construct
  misc_feature 1..19: note = siRNA sense sequence
  source 1..19: mol_type = other RNA
tcagtcacaccctcccttt

SEQ ID NO: 49207 - RNA, 19 nt, synthetic construct
  misc_feature 1..19: note = siRNA antisense sequence
  source 1..19: mol_type = other RNA
aaagggagggtgtgactga

SEQ ID NO: 49208 - RNA, 19 nt, synthetic construct
  misc_feature 1..19: note = siRNA sense sequence
  source 1..19: mol_type = other RNA
cagtcacaccctccctttg

SEQ ID NO: 49209 - RNA, 19 nt, synthetic construct
  misc_feature 1..19: note = siRNA antisense sequence
  source 1..19: mol_type = other RNA
caaagggagggtgtgactg

SEQ ID NO: 49210 - RNA, 19 nt, synthetic construct
  misc_feature 1..19: note = siRNA sense sequence
  source 1..19: mol_type = other RNA
agtcacaccctccctttga

SEQ ID NO: 49211 - RNA, 19 nt, synthetic construct
  misc_feature 1..19: note = siRNA antisense sequence
  source 1..19: mol_type = other RNA
tcaaagggagggtgtgact

SEQ ID NO: 49212 - RNA, 19 nt, synthetic construct
  misc_feature 1..19: note = siRNA sense sequence
  source 1..19: mol_type = other RNA
gtcacaccctccctttgaa

SEQ ID NO: 49213 - RNA, 19 nt, synthetic construct
  misc_feature 1..19: note = siRNA antisense sequence
  source 1..19: mol_type = other RNA
ttcaaagggagggtgtgac

SEQ ID NO: 49214 - RNA, 19 nt, synthetic construct
  misc_feature 1..19: note = siRNA sense sequence
  source 1..19: mol_type = other RNA
ttatatataggatgtgtgg

SEQ ID NO: 49215 - RNA, 19 nt, synthetic construct
  misc_feature 1..19: note = siRNA antisense sequence
  source 1..19: mol_type = other RNA
ccacacatcctatatataa

SEQ ID NO: 49216 - RNA, 19 nt, synthetic construct
  misc_feature 1..19: note = siRNA sense sequence
  source 1..19: mol_type = other RNA
agacctctccatcatctga

SEQ ID NO: 49217 - RNA, 19 nt, synthetic construct
  misc_feature 1..19: note = siRNA antisense sequence
  source 1..19: mol_type = other RNA
tcagatgatggagaggtct

SEQ ID NO: 49218 - RNA, 19 nt, synthetic construct
  misc_feature 1..19: note = siRNA sense sequence
  source 1..19: mol_type = other RNA
gacctctccatcatctgaa

SEQ ID NO: 49219 - RNA, 19 nt, synthetic construct
  misc_feature 1..19: note = siRNA antisense sequence
  source 1..19: mol_type = other RNA
ttcagatgatggagaggtc

SEQ ID NO: 49220 - RNA, 19 nt, synthetic construct
  misc_feature 1..19: note = siRNA sense sequence
  source 1..19: mol_type = other RNA
ctcattatgcctcccaact

SEQ ID NO: 49221 - RNA, 19 nt, synthetic construct
  misc_feature 1..19: note = siRNA antisense sequence
  source 1..19: mol_type = other RNA
agttgggaggcataatgag

SEQ ID NO: 49222 - RNA, 19 nt, synthetic construct
  misc_feature 1..19: note = siRNA sense sequence
  source 1..19: mol_type = other RNA
atgcctcccaacttgaatg

SEQ ID NO: 49223 - RNA, 19 nt, synthetic construct
  misc_feature 1..19: note = siRNA antisense sequence
  source 1..19: mol_type = other RNA
cattcaagttgggaggcat

SEQ ID NO: 49224 - RNA, 19 nt, synthetic construct
  misc_feature 1..19: note = siRNA sense sequence
  source 1..19: mol_type = other RNA
ctcccaacttgaatgatgg

SEQ ID NO: 49225 - RNA, 19 nt, synthetic construct
  misc_feature 1..19: note = siRNA antisense sequence
  source 1..19: mol_type = other RNA
ccatcattcaagttgggag

SEQ ID NO: 49226 - RNA, 19 nt, synthetic construct
  misc_feature 1..19: note = siRNA sense sequence
  source 1..19: mol_type = other RNA
ccaacttgaatgatgggca

SEQ ID NO: 49227 - RNA, 19 nt, synthetic construct
  misc_feature 1..19: note = siRNA antisense sequence
  source 1..19: mol_type = other RNA
tgcccatcattcaagttgg

SEQ ID NO: 49228 - RNA, 19 nt, synthetic construct
  misc_feature 1..19: note = siRNA sense sequence
  source 1..19: mol_type = other RNA
caacttgaatgatgggcat

SEQ ID NO: 49229 - RNA, 19 nt, synthetic construct
  misc_feature 1..19: note = siRNA antisense sequence
  source 1..19: mol_type = other RNA
atgcccatcattcaagttg

SEQ ID NO: 49230 - RNA, 19 nt, synthetic construct
  misc_feature 1..19: note = siRNA sense sequence
  source 1..19: mol_type = other RNA
atgatgggcattgatgcta

SEQ ID NO: 49231 - RNA, 19 nt, synthetic construct
  misc_feature 1..19: note = siRNA antisense sequence
  source 1..19: mol_type = other RNA
tagcatcaatgcccatcat

SEQ ID NO: 49232 - RNA, 19 nt, synthetic construct
  misc_feature 1..19: note = siRNA sense sequence
  source 1..19: mol_type = other RNA
tgatgggcattgatgctaa

SEQ ID NO: 49233 - RNA, 19 nt, synthetic construct
  misc_feature 1..19: note = siRNA antisense sequence
  source 1..19: mol_type = other RNA
ttagcatcaatgcccatca

SEQ ID NO: 49234 - RNA, 19 nt, synthetic construct
  misc_feature 1..19: note = siRNA sense sequence
  source 1..19: mol_type = other RNA
gatgggcattgatgctaat

SEQ ID NO: 49235 - RNA, 19 nt, synthetic construct
  misc_feature 1..19: note = siRNA antisense sequence
  source 1..19: mol_type = other RNA
attagcatcaatgcccatc

SEQ ID NO: 49236 - RNA, 19 nt, synthetic construct
  misc_feature 1..19: note = siRNA sense sequence
  source 1..19: mol_type = other RNA
atgggcattgatgctaatt

SEQ ID NO: 49237 - RNA, 19 nt, synthetic construct
  misc_feature 1..19: note = siRNA antisense sequence
  source 1..19: mol_type = other RNA
aattagcatcaatgcccat

SEQ ID NO: 49238 - RNA, 19 nt, synthetic construct
  misc_feature 1..19: note = siRNA sense sequence
  source 1..19: mol_type = other RNA
tgggcattgatgctaattt

SEQ ID NO: 49239 - RNA, 19 nt, synthetic construct
  misc_feature 1..19: note = siRNA antisense sequence
  source 1..19: mol_type = other RNA
aaattagcatcaatgccca

SEQ ID NO: 49240 - RNA, 19 nt, synthetic construct
  misc_feature 1..19: note = siRNA sense sequence
  source 1..19: mol_type = other RNA
gggcattgatgctaatttt

SEQ ID NO: 49241 - RNA, 19 nt, synthetic construct
  misc_feature 1..19: note = siRNA antisense sequence
  source 1..19: mol_type = other RNA
aaaattagcatcaatgccc

SEQ ID NO: 49242 - RNA, 19 nt, synthetic construct
  misc_feature 1..19: note = siRNA sense sequence
  source 1..19: mol_type = other RNA
ggcattgatgctaattttg

SEQ ID NO: 49243 - RNA, 19 nt, synthetic construct
  misc_feature 1..19: note = siRNA antisense sequence
  source 1..19: mol_type = other RNA
caaaattagcatcaatgcc

SEQ ID NO: 49244 - RNA, 19 nt, synthetic construct
  misc_feature 1..19: note = siRNA sense sequence
  source 1..19: mol_type = other RNA
gcattgatgctaattttgg

SEQ ID NO: 49245 - RNA, 19 nt, synthetic construct
  misc_feature 1..19: note = siRNA antisense sequence
  source 1..19: mol_type = other RNA
ccaaaattagcatcaatgc

SEQ ID NO: 49246 - RNA, 19 nt, synthetic construct
  misc_feature 1..19: note = siRNA sense sequence
  source 1..19: mol_type = other RNA
cattgatgctaattttgga

SEQ ID NO: 49247 - RNA, 19 nt, synthetic construct
  misc_feature 1..19: note = siRNA antisense sequence
  source 1..19: mol_type = other RNA
tccaaaattagcatcaatg

SEQ ID NO: 49248 - RNA, 19 nt, synthetic construct
  misc_feature 1..19: note = siRNA sense sequence
  source 1..19: mol_type = other RNA
tgatgctaattttggaggg

SEQ ID NO: 49249 - RNA, 19 nt, synthetic construct
  misc_feature 1..19: note = siRNA antisense sequence
  source 1..19: mol_type = other RNA
ccctccaaaattagcatca

SEQ ID NO: 49250 - RNA, 19 nt, synthetic construct
  misc_feature 1..19: note = siRNA sense sequence
  source 1..19: mol_type = other RNA
gatgctaattttggaggga

SEQ ID NO: 49251 - RNA, 19 nt, synthetic construct
  misc_feature 1..19: note = siRNA antisense sequence
  source 1..19: mol_type = other RNA
tccctccaaaattagcatc

SEQ ID NO: 49252 - RNA, 19 nt, synthetic construct
  misc_feature 1..19: note = siRNA sense sequence
  source 1..19: mol_type = other RNA
tgctaattttggagggaag

SEQ ID NO: 49253 - RNA, 19 nt, synthetic construct
  misc_feature 1..19: note = siRNA antisense sequence
  source 1..19: mol_type = other RNA
cttccctccaaaattagca

SEQ ID NO: 49254 - RNA, 19 nt, synthetic construct
  misc_feature 1..19: note = siRNA sense sequence
  source 1..19: mol_type = other RNA
ctaattttggagggaagca

SEQ ID NO: 49255 - RNA, 19 nt, synthetic construct
  misc_feature 1..19: note = siRNA antisense sequence
  source 1..19: mol_type = other RNA
tgcttccctccaaaattag

SEQ ID NO: 49256 - RNA, 19 nt, synthetic construct
  misc_feature 1..19: note = siRNA sense sequence
  source 1..19: mol_type = other RNA
taattttggagggaagcac

SEQ ID NO: 49257 - RNA, 19 nt, synthetic construct
  misc_feature 1..19: note = siRNA antisense sequence
  source 1..19: mol_type = other RNA
gtgcttccctccaaaatta

SEQ ID NO: 49258 - RNA, 19 nt, synthetic construct
  misc_feature 1..19: note = siRNA sense sequence
  source 1..19: mol_type = other RNA
ttggagggaagcaccaggc

SEQ ID NO: 49259 - RNA, 19 nt, synthetic construct
  misc_feature 1..19: note = siRNA antisense sequence
  source 1..19: mol_type = other RNA
gcctggtgcttccctccaa

SEQ ID NO: 49260 - RNA, 19 nt, synthetic construct
  misc_feature 1..19: note = siRNA sense sequence
  source 1..19: mol_type = other RNA
tggagggaagcaccaggct

SEQ ID NO: 49261 - RNA, 19 nt, synthetic construct
  misc_feature 1..19: note = siRNA antisense sequence
  source 1..19: mol_type = other RNA
agcctggtgcttccctcca

SEQ ID NO: 49262 - RNA, 19 nt, synthetic construct
  misc_feature 1..19: note = siRNA sense sequence
  source 1..19: mol_type = other RNA
ggagggaagcaccaggcta

SEQ ID NO: 49263 - RNA, 19 nt, synthetic construct
  misc_feature 1..19: note = siRNA antisense sequence
  source 1..19: mol_type = other RNA
tagcctggtgcttccctcc

SEQ ID NO: 49264 - RNA, 19 nt, synthetic construct
  misc_feature 1..19: note = siRNA sense sequence
  source 1..19: mol_type = other RNA
gagggaagcaccaggctac

SEQ ID NO: 49265 - RNA, 19 nt, synthetic construct
  misc_feature 1..19: note = siRNA antisense sequence
  source 1..19: mol_type = other RNA
gtagcctggtgcttccctc

SEQ ID NO: 49266 - RNA, 19 nt, synthetic construct
  misc_feature 1..19: note = siRNA sense sequence
  source 1..19: mol_type = other RNA
agggaagcaccaggctacc

SEQ ID NO: 49267 - RNA, 19 nt, synthetic construct
  misc_feature 1..19: note = siRNA antisense sequence
  source 1..19: mol_type = other RNA
ggtagcctggtgcttccct

SEQ ID NO: 49268 - RNA, 19 nt, synthetic construct
  misc_feature 1..19: note = siRNA sense sequence
  source 1..19: mol_type = other RNA
aagcaccaggctacctaga

SEQ ID NO: 49269 - RNA, 19 nt, synthetic construct
  misc_feature 1..19: note = siRNA antisense sequence
  source 1..19: mol_type = other RNA
tctaggtagcctggtgctt

SEQ ID NO: 49270 - RNA, 19 nt, synthetic construct
  misc_feature 1..19: note = siRNA sense sequence
  source 1..19: mol_type = other RNA
agcaccaggctacctagag

SEQ ID NO: 49271 - RNA, 19 nt, synthetic construct
  misc_feature 1..19: note = siRNA antisense sequence
  source 1..19: mol_type = other RNA
ctctaggtagcctggtgct

SEQ ID NO: 49272 - RNA, 19 nt, synthetic construct
  misc_feature 1..19: note = siRNA sense sequence
  source 1..19: mol_type = other RNA
gcaccaggctacctagagt

SEQ ID NO: 49273 - RNA, 19 nt, synthetic construct
  misc_feature 1..19: note = siRNA antisense sequence
  source 1..19: mol_type = other RNA
actctaggtagcctggtgc

SEQ ID NO: 49274 - RNA, 19 nt, synthetic construct
  misc_feature 1..19: note = siRNA sense sequence
  source 1..19: mol_type = other RNA
caccaggctacctagagta

SEQ ID NO: 49275 - RNA, 19 nt, synthetic construct
  misc_feature 1..19: note = siRNA antisense sequence
  source 1..19: mol_type = other RNA
tactctaggtagcctggtg

SEQ ID NO: 49276 - RNA, 19 nt, synthetic construct
  misc_feature 1..19: note = siRNA sense sequence
  source 1..19: mol_type = other RNA
tacctagagtagtcagtgt

SEQ ID NO: 49277 - RNA, 19 nt, synthetic construct
  misc_feature 1..19: note = siRNA antisense sequence
  source 1..19: mol_type = other RNA
acactgactactctaggta

SEQ ID NO: 49278 - RNA, 19 nt, synthetic construct
  misc_feature 1..19: note = siRNA sense sequence
  source 1..19: mol_type = other RNA
tttgtctattgtaaagtgg

SEQ ID NO: 49279 - RNA, 19 nt, synthetic construct
  misc_feature 1..19: note = siRNA antisense sequence
  source 1..19: mol_type = other RNA
ccactttacaatagacaaa

SEQ ID NO: 49280 - RNA, 19 nt, synthetic construct
  misc_feature 1..19: note = siRNA sense sequence
  source 1..19: mol_type = other RNA
ttgtctattgtaaagtggt

SEQ ID NO: 49281 - RNA, 19 nt, synthetic construct
  misc_feature 1..19: note = siRNA antisense sequence
  source 1..19: mol_type = other RNA
accactttacaatagacaa

SEQ ID NO: 49282 - RNA, 19 nt, synthetic construct
  misc_feature 1..19: note = siRNA sense sequence
  source 1..19: mol_type = other RNA
tgtctattgtaaagtggtg

SEQ ID NO: 49283 - RNA, 19 nt, synthetic construct
  misc_feature 1..19: note = siRNA antisense sequence
  source 1..19: mol_type = other RNA
caccactttacaatagaca

SEQ ID NO: 49284 - RNA, 19 nt, synthetic construct
  misc_feature 1..19: note = siRNA sense sequence
  source 1..19: mol_type = other RNA
gtctattgtaaagtggtgt

SEQ ID NO: 49285 - RNA, 19 nt, synthetic construct
  misc_feature 1..19: note = siRNA antisense sequence
  source 1..19: mol_type = other RNA
acaccactttacaatagac

SEQ ID NO: 49286 - RNA, 19 nt, synthetic construct
  misc_feature 1..19: note = siRNA sense sequence
  source 1..19: mol_type = other RNA
tctattgtaaagtggtgtc

SEQ ID NO: 49287 - RNA, 19 nt, synthetic construct
  misc_feature 1..19: note = siRNA antisense sequence
  source 1..19: mol_type = other RNA
gacaccactttacaataga

SEQ ID NO: 49288 - RNA, 19 nt, synthetic construct
  misc_feature 1..19: note = siRNA sense sequence
  source 1..19: mol_type = other RNA
ctattgtaaagtggtgtct

SEQ ID NO: 49289 - RNA, 19 nt, synthetic construct
  misc_feature 1..19: note = siRNA antisense sequence
  source 1..19: mol_type = other RNA
agacaccactttacaatag

SEQ ID NO: 49290 - RNA, 19 nt, synthetic construct
  misc_feature 1..19: note = siRNA sense sequence
  source 1..19: mol_type = other RNA
gtaaagtggtgtcttatca

SEQ ID NO: 49291 - RNA, 19 nt, synthetic construct
  misc_feature 1..19: note = siRNA antisense sequence
  source 1..19: mol_type = other RNA
tgataagacaccactttac

SEQ ID NO: 49292 - RNA, 19 nt, synthetic construct
  misc_feature 1..19: note = siRNA sense sequence
  source 1..19: mol_type = other RNA
taaagtggtgtcttatcaa

SEQ ID NO: 49293 - RNA, 19 nt, synthetic construct
  misc_feature 1..19: note = siRNA antisense sequence
  source 1..19: mol_type = other RNA
ttgataagacaccacttta

SEQ ID NO: 49294 - RNA, 19 nt, synthetic construct
  misc_feature 1..19: note = siRNA sense sequence
  source 1..19: mol_type = other RNA
aaagtggtgtcttatcaac

SEQ ID NO: 49295 - RNA, 19 nt, synthetic construct
  misc_feature 1..19: note = siRNA antisense sequence
  source 1..19: mol_type = other RNA
gttgataagacaccacttt

SEQ ID NO: 49296 - RNA, 19 nt, synthetic construct
  misc_feature 1..19: note = siRNA sense sequence
  source 1..19: mol_type = other RNA
gtgtcttatcaacctctct

SEQ ID NO: 49297 - RNA, 19 nt, synthetic construct
  misc_feature 1..19: note = siRNA antisense sequence
  source 1..19: mol_type = other RNA
agagaggttgataagacac

SEQ ID NO: 49298 - RNA, 19 nt, synthetic construct
  misc_feature 1..19: note = siRNA sense sequence
  source 1..19: mol_type = other RNA
tgtcttatcaacctctctt

SEQ ID NO: 49299 - RNA, 19 nt, synthetic construct
  misc_feature 1..19: note = siRNA antisense sequence
  source 1..19: mol_type = other RNA
aagagaggttgataagaca

SEQ ID NO: 49300 - RNA, 19 nt, synthetic construct
  misc_feature 1..19: note = siRNA sense sequence
  source 1..19: mol_type = other RNA
gtcttatcaacctctcttt

SEQ ID NO: 49301 - RNA, 19 nt, synthetic construct
  misc_feature 1..19: note = siRNA antisense sequence
  source 1..19: mol_type = other RNA
aaagagaggttgataagac

SEQ ID NO: 49302 - RNA, 19 nt, synthetic construct
  misc_feature 1..19: note = siRNA sense sequence
  source 1..19: mol_type = other RNA
tcttatcaacctctctttt

SEQ ID NO: 49303 - RNA, 19 nt, synthetic construct
  misc_feature 1..19: note = siRNA antisense sequence
  source 1..19: mol_type = other RNA
aaaagagaggttgataaga

SEQ ID NO: 49304 - RNA, 19 nt, synthetic construct
  misc_feature 1..19: note = siRNA sense sequence
  source 1..19: mol_type = other RNA
cttatcaacctctcttttg

SEQ ID NO: 49305 - RNA, 19 nt, synthetic construct
  misc_feature 1..19: note = siRNA antisense sequence
  source 1..19: mol_type = other RNA
caaaagagaggttgataag

SEQ ID NO: 49306 - RNA, 19 nt, synthetic construct
  misc_feature 1..19: note = siRNA sense sequence
  source 1..19: mol_type = other RNA
ttatcaacctctcttttgt

SEQ ID NO: 49307 - RNA, 19 nt, synthetic construct
  misc_feature 1..19: note = siRNA antisense sequence
  source 1..19: mol_type = other RNA
acaaaagagaggttgataa

SEQ ID NO: 49308 - RNA, 19 nt, synthetic construct
  misc_feature 1..19: note = siRNA sense sequence
  source 1..19: mol_type = other RNA
ctcttttgtttgtgattac

SEQ ID NO: 49309 - RNA, 19 nt, synthetic construct
  misc_feature 1..19: note = siRNA antisense sequence
  source 1..19: mol_type = other RNA
gtaatcacaaacaaaagag

SEQ ID NO: 49310 - RNA, 19 nt, synthetic construct
  misc_feature 1..19: note = siRNA sense sequence
  source 1..19: mol_type = other RNA
aaaggaggcattcacggaa

SEQ ID NO: 49311 - RNA, 19 nt, synthetic construct
  misc_feature 1..19: note = siRNA antisense sequence
  source 1..19: mol_type = other RNA
ttccgtgaatgcctccttt

SEQ ID NO: 49312 - RNA, 19 nt, synthetic construct
  misc_feature 1..19: note = siRNA sense sequence
  source 1..19: mol_type = other RNA
aaggaggcattcacggaag

SEQ ID NO: 49313 - RNA, 19 nt, synthetic construct
  misc_feature 1..19: note = siRNA antisense sequence
  source 1..19: mol_type = other RNA
cttccgtgaatgcctcctt

SEQ ID NO: 49314 - RNA, 19 nt, synthetic construct
  misc_feature 1..19: note = siRNA sense sequence
  source 1..19: mol_type = other RNA
aggaggcattcacggaagc

SEQ ID NO: 49315 - RNA, 19 nt, synthetic construct
  misc_feature 1..19: note = siRNA antisense sequence
  source 1..19: mol_type = other RNA
gcttccgtgaatgcctcct

SEQ ID NO: 49316 - RNA, 19 nt, synthetic construct
  misc_feature 1..19: note = siRNA sense sequence
  source 1..19: mol_type = other RNA
ggaggcattcacggaagcc

SEQ ID NO: 49317 - RNA, 19 nt, synthetic construct
  misc_feature 1..19: note = siRNA antisense sequence
  source 1..19: mol_type = other RNA
ggcttccgtgaatgcctcc

SEQ ID NO: 49318 - RNA, 19 nt, synthetic construct
  misc_feature 1..19: note = siRNA sense sequence
  source 1..19: mol_type = other RNA
gggtgcccgaagaggagtt

SEQ ID NO: 49319 - RNA, 19 nt, synthetic construct
  misc_feature 1..19: note = siRNA antisense sequence
  source 1..19: mol_type = other RNA
aactcctcttcgggcaccc

SEQ ID NO: 49320 - RNA, 19 nt, synthetic construct
  misc_feature 1..19: note = siRNA sense sequence
  source 1..19: mol_type = other RNA
ggtgcccgaagaggagtta

SEQ ID NO: 49321 - RNA, 19 nt, synthetic construct
  misc_feature 1..19: note = siRNA antisense sequence
  source 1..19: mol_type = other RNA
taactcctcttcgggcacc

SEQ ID NO: 49322 - RNA, 19 nt, synthetic construct
  misc_feature 1..19: note = siRNA sense sequence
  source 1..19: mol_type = other RNA
gtgcccgaagaggagttaa

SEQ ID NO: 49323 - RNA, 19 nt, synthetic construct
  misc_feature 1..19: note = siRNA antisense sequence
  source 1..19: mol_type = other RNA
ttaactcctcttcgggcac

SEQ ID NO: 49324 - RNA, 19 nt, synthetic construct
  misc_feature 1..19: note = siRNA sense sequence
  source 1..19: mol_type = other RNA
tgcccgaagaggagttaaa

SEQ ID NO: 49325 - RNA, 19 nt, synthetic construct
  misc_feature 1..19: note = siRNA antisense sequence
  source 1..19: mol_type = other RNA
tttaactcctcttcgggca

SEQ ID NO: 49326 - RNA, 19 nt, synthetic construct
  misc_feature 1..19: note = siRNA sense sequence
  source 1..19: mol_type = other RNA
gcccgaagaggagttaaaa

SEQ ID NO: 49327 - RNA, 19 nt, synthetic construct
  misc_feature 1..19: note = siRNA antisense sequence
  source 1..19: mol_type = other RNA
ttttaactcctcttcgggc

SEQ ID NO: 49328 - RNA, 19 nt, synthetic construct
  misc_feature 1..19: note = siRNA sense sequence
  source 1..19: mol_type = other RNA
tcatggttattgtgacaga

SEQ ID NO: 49329 - RNA, 19 nt, synthetic construct
  misc_feature 1..19: note = siRNA antisense sequence
  source 1..19: mol_type = other RNA
tctgtcacaataaccatga

SEQ ID NO: 49330 - RNA, 19 nt, synthetic construct
  misc_feature 1..19: note = siRNA sense sequence
  source 1..19: mol_type = other RNA
catggttattgtgacagat

SEQ ID NO: 49331 - RNA, 19 nt, synthetic construct
  misc_feature 1..19: note = siRNA antisense sequence
  source 1..19: mol_type = other RNA
atctgtcacaataaccatg

SEQ ID NO: 49332 - RNA, 19 nt, synthetic construct
  misc_feature 1..19: note = siRNA sense sequence
  source 1..19: mol_type = other RNA
atggttattgtgacagatg

SEQ ID NO: 49333 - RNA, 19 nt, synthetic construct
  misc_feature 1..19: note = siRNA antisense sequence
  source 1..19: mol_type = other RNA
catctgtcacaataaccat

SEQ ID NO: 49334 - RNA, 19 nt, synthetic construct
  misc_feature 1..19: note = siRNA sense sequence
  source 1..19: mol_type = other RNA
tggttattgtgacagatgg

SEQ ID NO: 49335 - RNA, 19 nt, synthetic construct
  misc_feature 1..19: note = siRNA antisense sequence
  source 1..19: mol_type = other RNA
ccatctgtcacaataacca

SEQ ID NO: 49336 - RNA, 19 nt, synthetic construct
  misc_feature 1..19: note = siRNA sense sequence
  source 1..19: mol_type = other RNA
ggttattgtgacagatgga

SEQ ID NO: 49337 - RNA, 19 nt, synthetic construct
  misc_feature 1..19: note = siRNA antisense sequence
  source 1..19: mol_type = other RNA
tccatctgtcacaataacc

SEQ ID NO: 49338 - RNA, 19 nt, synthetic construct
  misc_feature 1..19: note = siRNA sense sequence
  source 1..19: mol_type = other RNA
caatcatcgactgaagaag

SEQ ID NO: 49339 - RNA, 19 nt, synthetic construct
  misc_feature 1..19: note = siRNA antisense sequence
  source 1..19: mol_type = other RNA
cttcttcagtcgatgattg

SEQ ID NO: 49340 - RNA, 19 nt, synthetic construct
  misc_feature 1..19: note = siRNA sense sequence
  source 1..19: mol_type = other RNA
cgactgaagaaggtcatcc

SEQ ID NO: 49341 - RNA, 19 nt, synthetic construct
  misc_feature 1..19: note = siRNA antisense sequence
  source 1..19: mol_type = other RNA
ggatgaccttcttcagtcg

SEQ ID NO: 49342 - RNA, 19 nt, synthetic construct
  misc_feature 1..19: note = siRNA sense sequence
  source 1..19: mol_type = other RNA
gactgaagaaggtcatcca

SEQ ID NO: 49343 - RNA, 19 nt, synthetic construct
  misc_feature 1..19: note = siRNA antisense sequence
  source 1..19: mol_type = other RNA
tggatgaccttcttcagtc

SEQ ID NO: 49344 - RNA, 19 nt, synthetic construct
  misc_feature 1..19: note = siRNA sense sequence
  source 1..19: mol_type = other RNA
actgaagaaggtcatccaa

SEQ ID NO: 49345 - RNA, 19 nt, synthetic construct
  misc_feature 1..19: note = siRNA antisense sequence
  source 1..19: mol_type = other RNA
ttggatgaccttcttcagt

SEQ ID NO: 49346 - RNA, 19 nt, synthetic construct
  misc_feature 1..19: note = siRNA sense sequence
  source 1..19: mol_type = other RNA
ctgaagaaggtcatccaag

SEQ ID NO: 49347 - RNA, 19 nt, synthetic construct
  misc_feature 1..19: note = siRNA antisense sequence
  source 1..19: mol_type = other RNA
cttggatgaccttcttcag

SEQ ID NO: 49348 - RNA, 19 nt, synthetic construct
  misc_feature 1..19: note = siRNA sense sequence
  source 1..19: mol_type = other RNA
tgaagaaggtcatccaaga

SEQ ID NO: 49349 - RNA, 19 nt, synthetic construct
  misc_feature 1..19: note = siRNA antisense sequence
  source 1..19: mol_type = other RNA
tcttggatgaccttcttca

SEQ ID NO: 49350 - RNA, 19 nt, synthetic construct
  misc_feature 1..19: note = siRNA sense sequence
  source 1..19: mol_type = other RNA
tcatccaagactgtgaaga

SEQ ID NO: 49351 - RNA, 19 nt, synthetic construct
  misc_feature 1..19: note = siRNA antisense sequence
  source 1..19: mol_type = other RNA
tcttcacagtcttggatga

SEQ ID NO: 49352 - RNA, 19 nt, synthetic construct
  misc_feature 1..19: note = siRNA sense sequence
  source 1..19: mol_type = other RNA
atccaagactgtgaagatg

SEQ ID NO: 49353 - RNA, 19 nt, synthetic construct
  misc_feature 1..19: note = siRNA antisense sequence
  source 1..19: mol_type = other RNA
catcttcacagtcttggat

SEQ ID NO: 49354 - RNA, 19 nt, synthetic construct
  misc_feature 1..19: note = siRNA sense sequence
  source 1..19: mol_type = other RNA
tccaagactgtgaagatga

SEQ ID NO: 49355 - RNA, 19 nt, synthetic construct
  misc_feature 1..19: note = siRNA antisense sequence
  source 1..19: mol_type = other RNA
tcatcttcacagtcttgga

SEQ ID NO: 49356 - RNA, 19 nt, synthetic construct
  misc_feature 1..19: note = siRNA sense sequence
  source 1..19: mol_type = other RNA
ccaagactgtgaagatgaa

SEQ ID NO: 49357 - RNA, 19 nt, synthetic construct
  misc_feature 1..19: note = siRNA antisense sequence
  source 1..19: mol_type = other RNA
ttcatcttcacagtcttgg

SEQ ID NO: 49358 - RNA, 19 nt, synthetic construct
  misc_feature 1..19: note = siRNA sense sequence
  source 1..19: mol_type = other RNA
acattcaacggttttccat

SEQ ID NO: 49359 - RNA, 19 nt, synthetic construct
  misc_feature 1..19: note = siRNA antisense sequence
  source 1..19: mol_type = other RNA
atggaaaaccgttgaatgt

SEQ ID NO: 49360 - RNA, 19 nt, synthetic construct
  misc_feature 1..19: note = siRNA sense sequence
  source 1..19: mol_type = other RNA
cattcaacggttttccata

SEQ ID NO: 49361 - RNA, 19 nt, synthetic construct
  misc_feature 1..19: note = siRNA antisense sequence
  source 1..19: mol_type = other RNA
tatggaaaaccgttgaatg

SEQ ID NO: 49362 - RNA, 19 nt, synthetic construct
  misc_feature 1..19: note = siRNA sense sequence
  source 1..19: mol_type = other RNA
attcaacggttttccatag

SEQ ID NO: 49363 - RNA, 19 nt, synthetic construct
  misc_feature 1..19: note = siRNA antisense sequence
  source 1..19: mol_type = other RNA
ctatggaaaaccgttgaat

SEQ ID NO: 49364 - RNA, 19 nt, synthetic construct
  misc_feature 1..19: note = siRNA sense sequence
  source 1..19: mol_type = other RNA
ggttttccatagctgtaag

SEQ ID NO: 49365 - RNA, 19 nt, synthetic construct
  misc_feature 1..19: note = siRNA antisense sequence
  source 1..19: mol_type = other RNA
cttacagctatggaaaacc

SEQ ID NO: 49366 - RNA, 19 nt, synthetic construct
  misc_feature 1..19: note = siRNA sense sequence
  source 1..19: mol_type = other RNA
gttttccatagctgtaagt

SEQ ID NO: 49367 - RNA, 19 nt, synthetic construct
  misc_feature 1..19: note = siRNA antisense sequence
  source 1..19: mol_type = other RNA
acttacagctatggaaaac

SEQ ID NO: 49368 - RNA, 19 nt, synthetic construct
  misc_feature 1..19: note = siRNA sense sequence
  source 1..19: mol_type = other RNA
ttttccatagctgtaagtg

SEQ ID NO: 49369 - RNA, 19 nt, synthetic construct
  misc_feature 1..19: note = siRNA antisense sequence
  source 1..19: mol_type = other RNA
cacttacagctatggaaaa

SEQ ID NO: 49370 - RNA, 19 nt, synthetic construct
  misc_feature 1..19: note = siRNA sense sequence
  source 1..19: mol_type = other RNA
ttccatagctgtaagtgtg

SEQ ID NO: 49371 - RNA, 19 nt, synthetic construct
  misc_feature 1..19: note = siRNA antisense sequence
  source 1..19: mol_type = other RNA
cacacttacagctatggaa

SEQ ID NO: 49372 - RNA, 19 nt, synthetic construct
  misc_feature 1..19: note = siRNA sense sequence
  source 1..19: mol_type = other RNA
atagctgtaagtgtgttgc

SEQ ID NO: 49373 - RNA, 19 nt, synthetic construct
  misc_feature 1..19: note = siRNA antisense sequence
  source 1..19: mol_type = other RNA
gcaacacacttacagctat

SEQ ID NO: 49374 - RNA, 19 nt, synthetic construct
  misc_feature 1..19: note = siRNA sense sequence
  source 1..19: mol_type = other RNA
tagctgtaagtgtgttgcc

SEQ ID NO: 49375 - RNA, 19 nt, synthetic construct
  misc_feature 1..19: note = siRNA antisense sequence
  source 1..19: mol_type = other RNA
ggcaacacacttacagcta

SEQ ID NO: 49376 - RNA, 19 nt, synthetic construct
  misc_feature 1..19: note = siRNA sense sequence
  source 1..19: mol_type = other RNA
agctgtaagtgtgttgccg

SEQ ID NO: 49377 - RNA, 19 nt, synthetic construct
  misc_feature 1..19: note = siRNA antisense sequence
  source 1..19: mol_type = other RNA
cggcaacacacttacagct

SEQ ID NO: 49378 - RNA, 19 nt, synthetic construct
  misc_feature 1..19: note = siRNA sense sequence
  source 1..19: mol_type = other RNA
gctgtaagtgtgttgccgg

SEQ ID NO: 49379 - RNA, 19 nt, synthetic construct
  misc_feature 1..19: note = siRNA antisense sequence
  source 1..19: mol_type = other RNA
ccggcaacacacttacagc

SEQ ID NO: 49380 - RNA, 19 nt, synthetic construct
  misc_feature 1..19: note = siRNA sense sequence
  source 1..19: mol_type = other RNA
ctgtaagtgtgttgccgga

SEQ ID NO: 49381 - RNA, 19 nt, synthetic construct
  misc_feature 1..19: note = siRNA antisense sequence
  source 1..19: mol_type = other RNA
tccggcaacacacttacag

SEQ ID NO: 49382 - RNA, 19 nt, synthetic construct
  misc_feature 1..19: note = siRNA sense sequence
  source 1..19: mol_type = other RNA
tgtaagtgtgttgccggag

SEQ ID NO: 49383 - RNA, 19 nt, synthetic construct
  misc_feature 1..19: note = siRNA antisense sequence
  source 1..19: mol_type = other RNA
ctccggcaacacacttaca

SEQ ID NO: 49384 - RNA, 19 nt, synthetic construct
  misc_feature 1..19: note = siRNA sense sequence
  source 1..19: mol_type = other RNA
gaagagctgtgtgcatatt

SEQ ID NO: 49385 - RNA, 19 nt, synthetic construct
  misc_feature 1..19: note = siRNA antisense sequence
  source 1..19: mol_type = other RNA
aatatgcacacagctcttc

SEQ ID NO: 49386 - RNA, 19 nt, synthetic construct
  misc_feature 1..19: note = siRNA sense sequence
  source 1..19: mol_type = other RNA
gctgtgtgcatattgggta

SEQ ID NO: 49387 - RNA, 19 nt, synthetic construct
  misc_feature 1..19: note = siRNA antisense sequence
  source 1..19: mol_type = other RNA
tacccaatatgcacacagc

SEQ ID NO: 49388 - RNA, 19 nt, synthetic construct
  misc_feature 1..19: note = siRNA sense sequence
  source 1..19: mol_type = other RNA
ctgtgtgcatattgggtaa

SEQ ID NO: 49389 - RNA, 19 nt, synthetic construct
  misc_feature 1..19: note = siRNA antisense sequence
  source 1..19: mol_type = other RNA
ttacccaatatgcacacag

SEQ ID NO: 49390 - RNA, 19 nt, synthetic construct
  misc_feature 1..19: note = siRNA sense sequence
  source 1..19: mol_type = other RNA
tgtgtgcatattgggtaat

SEQ ID NO: 49391 - RNA, 19 nt, synthetic construct
  misc_feature 1..19: note = siRNA antisense sequence
  source 1..19: mol_type = other RNA
attacccaatatgcacaca

SEQ ID NO: 49392 - RNA, 19 nt, synthetic construct
  misc_feature 1..19: note = siRNA sense sequence
  source 1..19: mol_type = other RNA
gtgtgcatattgggtaatt

SEQ ID NO: 49393 - RNA, 19 nt, synthetic construct
  misc_feature 1..19: note = siRNA antisense sequence
  source 1..19: mol_type = other RNA
aattacccaatatgcacac

SEQ ID NO: 49394 - RNA, 19 nt, synthetic construct
  misc_feature 1..19: note = siRNA sense sequence
  source 1..19: mol_type = other RNA
gtgcatattgggtaatttt

SEQ ID NO: 49395 - RNA, 19 nt, synthetic construct
  misc_feature 1..19: note = siRNA antisense sequence
  source 1..19: mol_type = other RNA
aaaattacccaatatgcac

SEQ ID NO: 49396 - RNA, 19 nt, synthetic construct
  misc_feature 1..19: note = siRNA sense sequence
  source 1..19: mol_type = other RNA
gtctccatttgaaggtaag

SEQ ID NO: 49397 - RNA, 19 nt, synthetic construct
  misc_feature 1..19: note = siRNA antisense sequence
  source 1..19: mol_type = other RNA
cttaccttcaaatggagac

SEQ ID NO: 49398 - RNA, 19 nt, synthetic construct
  misc_feature 1..19: note = siRNA sense sequence
  source 1..19: mol_type = other RNA
tctccatttgaaggtaagc

SEQ ID NO: 49399 - RNA, 19 nt, synthetic construct
  misc_feature 1..19: note = siRNA antisense sequence
  source 1..19: mol_type = other RNA
gcttaccttcaaatggaga

SEQ ID NO: 49400 - RNA, 19 nt, synthetic construct
  misc_feature 1..19: note = siRNA sense sequence
  source 1..19: mol_type = other RNA
ctccatttgaaggtaagcc

SEQ ID NO: 49401 - RNA, 19 nt, synthetic construct
  misc_feature 1..19: note = siRNA antisense sequence
  source 1..19: mol_type = other RNA
ggcttaccttcaaatggag

SEQ ID NO: 49402 - RNA, 19 nt, synthetic construct
  misc_feature 1..19: note = siRNA sense sequence
  source 1..19: mol_type = other RNA
aggtaagccctgggaggac

SEQ ID NO: 49403 - RNA, 19 nt, synthetic construct
  misc_feature 1..19: note = siRNA antisense sequence
  source 1..19: mol_type = other RNA
gtcctcccagggcttacct

SEQ ID NO: 49404 - RNA, 19 nt, synthetic construct
  misc_feature 1..19: note = siRNA sense sequence
  source 1..19: mol_type = other RNA
ggtaagccctgggaggaca

SEQ ID NO: 49405 - RNA, 19 nt, synthetic construct
  misc_feature 1..19: note = siRNA antisense sequence
  source 1..19: mol_type = other RNA
tgtcctcccagggcttacc

SEQ ID NO: 49406 - RNA, 19 nt, synthetic construct
  misc_feature 1..19: note = siRNA sense sequence
  source 1..19: mol_type = other RNA
gtaagccctgggaggacag

SEQ ID NO: 49407 - RNA, 19 nt, synthetic construct
  misc_feature 1..19: note = siRNA antisense sequence
  source 1..19: mol_type = other RNA
ctgtcctcccagggcttac

SEQ ID NO: 49408 - RNA, 19 nt, synthetic construct
  misc_feature 1..19: note = siRNA sense sequence
  source 1..19: mol_type = other RNA
taagccctgggaggacaga

SEQ ID NO: 49409 - RNA, 19 nt, synthetic construct
  misc_feature 1..19: note = siRNA antisense sequence
  source 1..19: mol_type = other RNA
tctgtcctcccagggctta

SEQ ID NO: 49410 - RNA, 19 nt, synthetic construct
  misc_feature 1..19: note = siRNA sense sequence
  source 1..19: mol_type = other RNA
aagccctgggaggacagac

SEQ ID NO: 49411 - RNA, 19 nt, synthetic construct
  misc_feature 1..19: note = siRNA antisense sequence
  source 1..19: mol_type = other RNA
gtctgtcctcccagggctt

SEQ ID NO: 49412 - RNA, 19 nt, synthetic construct
  misc_feature 1..19: note = siRNA sense sequence
  source 1..19: mol_type = other RNA
agccctgggaggacagact

SEQ ID NO: 49413 - RNA, 19 nt, synthetic construct
  misc_feature 1..19: note = siRNA antisense sequence
  source 1..19: mol_type = other RNA
agtctgtcctcccagggct

SEQ ID NO: 49414 - RNA, 19 nt, synthetic construct
  misc_feature 1..19: note = siRNA sense sequence
  source 1..19: mol_type = other RNA
gccctgggaggacagactt

SEQ ID NO: 49415 - RNA, 19 nt, synthetic construct
  misc_feature 1..19: note = siRNA antisense sequence
  source 1..19: mol_type = other RNA
aagtctgtcctcccagggc

SEQ ID NO: 49416 - RNA, 19 nt, synthetic construct
  misc_feature 1..19: note = siRNA sense sequence
  source 1..19: mol_type = other RNA
tgggaggacagacttggat

SEQ ID NO: 49417 - RNA, 19 nt, synthetic construct
  misc_feature 1..19: note = siRNA antisense sequence
  source 1..19: mol_type = other RNA
atccaagtctgtcctccca

SEQ ID NO: 49418 - RNA, 19 nt, synthetic construct
  misc_feature 1..19: note = siRNA sense sequence
  source 1..19: mol_type = other RNA
gggaggacagacttggatc

SEQ ID NO: 49419 - RNA, 19 nt, synthetic construct
  misc_feature 1..19: note = siRNA antisense sequence
  source 1..19: mol_type = other RNA
gatccaagtctgtcctccc

SEQ ID NO: 49420 - RNA, 19 nt, synthetic construct
  misc_feature 1..19: note = siRNA sense sequence
  source 1..19: mol_type = other RNA
ggaggacagacttggatct

SEQ ID NO: 49421 - RNA, 19 nt, synthetic construct
  misc_feature 1..19: note = siRNA antisense sequence
  source 1..19: mol_type = other RNA
agatccaagtctgtcctcc

SEQ ID NO: 49422 - RNA, 19 nt, synthetic construct
  misc_feature 1..19: note = siRNA sense sequence
  source 1..19: mol_type = other RNA
gaggacagacttggatctt

SEQ ID NO: 49423 - RNA, 19 nt, synthetic construct
  misc_feature 1..19: note = siRNA antisense sequence
  source 1..19: mol_type = other RNA
aagatccaagtctgtcctc

SEQ ID NO: 49424 - RNA, 19 nt, synthetic construct
  misc_feature 1..19: note = siRNA sense sequence
  source 1..19: mol_type = other RNA
aggacagacttggatcttg

SEQ ID NO: 49425 - RNA, 19 nt, synthetic construct
  misc_feature 1..19: note = siRNA antisense sequence
  source 1..19: mol_type = other RNA
caagatccaagtctgtcct

SEQ ID NO: 49426 - RNA, 19 nt, synthetic construct
  misc_feature 1..19: note = siRNA sense sequence
  source 1..19: mol_type = other RNA
ggacagacttggatcttgc

SEQ ID NO: 49427 - RNA, 19 nt, synthetic construct
  misc_feature 1..19: note = siRNA antisense sequence
  source 1..19: mol_type = other RNA
gcaagatccaagtctgtcc

SEQ ID NO: 49428 - RNA, 19 nt, synthetic construct
  misc_feature 1..19: note = siRNA sense sequence
  source 1..19: mol_type = other RNA
gacagacttggatcttgct

SEQ ID NO: 49429 - RNA, 19 nt, synthetic construct
  misc_feature 1..19: note = siRNA antisense sequence
  source 1..19: mol_type = other RNA
agcaagatccaagtctgtc

SEQ ID NO: 49430 - RNA, 19 nt, synthetic construct
  misc_feature 1..19: note = siRNA sense sequence
  source 1..19: mol_type = other RNA
acagacttggatcttgctc

SEQ ID NO: 49431 - RNA, 19 nt, synthetic construct
  misc_feature 1..19: note = siRNA antisense sequence
  source 1..19: mol_type = other RNA
gagcaagatccaagtctgt

SEQ ID NO: 49432 - RNA, 19 nt, synthetic construct
  misc_feature 1..19: note = siRNA sense sequence
  source 1..19: mol_type = other RNA
cagacttggatcttgctcc

SEQ ID NO: 49433 - RNA, 19 nt, synthetic construct
  misc_feature 1..19: note = siRNA antisense sequence
  source 1..19: mol_type = other RNA
ggagcaagatccaagtctg

SEQ ID NO: 49434 - RNA, 19 nt, synthetic construct
  misc_feature 1..19: note = siRNA sense sequence
  source 1..19: mol_type = other RNA
agacttggatcttgctccc

SEQ ID NO: 49435 - RNA, 19 nt, synthetic construct
  misc_feature 1..19: note = siRNA antisense sequence
  source 1..19: mol_type = other RNA
gggagcaagatccaagtct

SEQ ID NO: 49436 - RNA, 19 nt, synthetic construct
  misc_feature 1..19: note = siRNA sense sequence
  source 1..19: mol_type = other RNA
gacttggatcttgctccct

SEQ ID NO: 49437 - RNA, 19 nt, synthetic construct
  misc_feature 1..19: note = siRNA antisense sequence
  source 1..19: mol_type = other RNA
agggagcaagatccaagtc

SEQ ID NO: 49438 - RNA, 19 nt, synthetic construct
  misc_feature 1..19: note = siRNA sense sequence
  source 1..19: mol_type = other RNA
acttggatcttgctccctc

SEQ ID NO: 49439 - RNA, 19 nt, synthetic construct
  misc_feature 1..19: note = siRNA antisense sequence
  source 1..19: mol_type = other RNA
gagggagcaagatccaagt

SEQ ID NO: 49440 - RNA, 19 nt, synthetic construct
  misc_feature 1..19: note = siRNA sense sequence
  source 1..19: mol_type = other RNA
cttggatcttgctccctct

SEQ ID NO: 49441 - RNA, 19 nt, synthetic construct
  misc_feature 1..19: note = siRNA antisense sequence
  source 1..19: mol_type = other RNA
agagggagcaagatccaag

SEQ ID NO: 49442 - RNA, 19 nt, synthetic construct
  misc_feature 1..19: note = siRNA sense sequence
  source 1..19: mol_type = other RNA
ttggatcttgctccctctg

SEQ ID NO: 49443 - RNA, 19 nt, synthetic construct
  misc_feature 1..19: note = siRNA antisense sequence
  source 1..19: mol_type = other RNA
cagagggagcaagatccaa

SEQ ID NO: 49444 - RNA, 19 nt, synthetic construct
  misc_feature 1..19: note = siRNA sense sequence
  source 1..19: mol_type = other RNA
tggatcttgctccctctgg

SEQ ID NO: 49445 - RNA, 19 nt, synthetic construct
  misc_feature 1..19: note = siRNA antisense sequence
  source 1..19: mol_type = other RNA
ccagagggagcaagatcca

SEQ ID NO: 49446 - RNA, 19 nt, synthetic construct
  misc_feature 1..19: note = siRNA sense sequence
  source 1..19: mol_type = other RNA
ggatcttgctccctctggg

SEQ ID NO: 49447 - RNA, 19 nt, synthetic construct
  misc_feature 1..19: note = siRNA antisense sequence
  source 1..19: mol_type = other RNA
cccagagggagcaagatcc

SEQ ID NO: 49448 - RNA, 19 nt, synthetic construct
  misc_feature 1..19: note = siRNA sense sequence
  source 1..19: mol_type = other RNA
gatcttgctccctctgggt

SEQ ID NO: 49449 - RNA, 19 nt, synthetic construct
  misc_feature 1..19: note = siRNA antisense sequence
  source 1..19: mol_type = other RNA
acccagagggagcaagatc

SEQ ID NO: 49450 - RNA, 19 nt, synthetic construct
  misc_feature 1..19: note = siRNA sense sequence
  source 1..19: mol_type = other RNA
atcttgctccctctgggtc

SEQ ID NO: 49451 - RNA, 19 nt, synthetic construct
  misc_feature 1..19: note = siRNA antisense sequence
  source 1..19: mol_type = other RNA
gacccagagggagcaagat

SEQ ID NO: 49452 - RNA, 19 nt, synthetic construct
  misc_feature 1..19: note = siRNA sense sequence
  source 1..19: mol_type = other RNA
tgctccctctgggtcctta

SEQ ID NO: 49453 - RNA, 19 nt, synthetic construct
  misc_feature 1..19: note = siRNA antisense sequence
  source 1..19: mol_type = other RNA
taaggacccagagggagca

SEQ ID NO: 49454 - RNA, 19 nt, synthetic construct
  misc_feature 1..19: note = siRNA sense sequence
  source 1..19: mol_type = other RNA
gctccctctgggtccttag

SEQ ID NO: 49455 - RNA, 19 nt, synthetic construct
  misc_feature 1..19: note = siRNA antisense sequence
  source 1..19: mol_type = other RNA
ctaaggacccagagggagc

SEQ ID NO: 49456 - RNA, 19 nt, synthetic construct
  misc_feature 1..19: note = siRNA sense sequence
  source 1..19: mol_type = other RNA
ctccctctgggtccttagt

SEQ ID NO: 49457 - RNA, 19 nt, synthetic construct
  misc_feature 1..19: note = siRNA antisense sequence
  source 1..19: mol_type = other RNA
actaaggacccagagggag

SEQ ID NO: 49458 - RNA, 19 nt, synthetic construct
  misc_feature 1..19: note = siRNA sense sequence
  source 1..19: mol_type = other RNA
tccctctgggtccttagta

SEQ ID NO: 49459 - RNA, 19 nt, synthetic construct
  misc_feature 1..19: note = siRNA antisense sequence
  source 1..19: mol_type = other RNA
tactaaggacccagaggga

SEQ ID NO: 49460 - RNA, 19 nt, synthetic construct
  misc_feature 1..19: note = siRNA sense sequence
  source 1..19: mol_type = other RNA
ccctctgggtccttagtac

SEQ ID NO: 49461 - RNA, 19 nt, synthetic construct
  misc_feature 1..19: note = siRNA antisense sequence
  source 1..19: mol_type = other RNA
gtactaaggacccagaggg

SEQ ID NO: 49462 - RNA, 19 nt, synthetic construct
  misc_feature 1..19: note = siRNA sense sequence
  source 1..19: mol_type = other RNA
cctctgggtccttagtacc

SEQ ID NO: 49463 - RNA, 19 nt, synthetic construct
  misc_feature 1..19: note = siRNA antisense sequence
  source 1..19: mol_type = other RNA
ggtactaaggacccagagg

SEQ ID NO: 49464 - RNA, 19 nt, synthetic construct
  misc_feature 1..19: note = siRNA sense sequence
  source 1..19: mol_type = other RNA
ggtccttagtacccagcac

SEQ ID NO: 49465 - RNA, 19 nt, synthetic construct
  misc_feature 1..19: note = siRNA antisense sequence
  source 1..19: mol_type = other RNA
gtgctgggtactaaggacc

SEQ ID NO: 49466 - RNA, 19 nt, synthetic construct
  misc_feature 1..19: note = siRNA sense sequence
  source 1..19: mol_type = other RNA
aaaggaaggaaggaaggaa

SEQ ID NO: 49467 - RNA, 19 nt, synthetic construct
  misc_feature 1..19: note = siRNA antisense sequence
  source 1..19: mol_type = other RNA
ttccttccttccttccttt

SEQ ID NO: 49468 - RNA, 19 nt, synthetic construct
  misc_feature 1..19: note = siRNA sense sequence
  source 1..19: mol_type = other RNA
aaggaaggaaggaaggaag

SEQ ID NO: 49469 - RNA, 19 nt, synthetic construct
  misc_feature 1..19: note = siRNA antisense sequence
  source 1..19: mol_type = other RNA
cttccttccttccttcctt

SEQ ID NO: 49470 - RNA, 19 nt, synthetic construct
  misc_feature 1..19: note = siRNA sense sequence
  source 1..19: mol_type = other RNA
aggaaggaaggaaggaaga

SEQ ID NO: 49471 - RNA, 19 nt, synthetic construct
  misc_feature 1..19: note = siRNA antisense sequence
  source 1..19: mol_type = other RNA
tcttccttccttccttcct

SEQ ID NO: 49472 - RNA, 19 nt, synthetic construct
  misc_feature 1..19: note = siRNA sense sequence
  source 1..19: mol_type = other RNA
ggaaggaaggaaggaagaa

SEQ ID NO: 49473 - RNA, 19 nt, synthetic construct
  misc_feature 1..19: note = siRNA antisense sequence
  source 1..19: mol_type = other RNA
ttcttccttccttccttcc

SEQ ID NO: 49474 - RNA, 19 nt, synthetic construct
  misc_feature 1..19: note = siRNA sense sequence
  source 1..19: mol_type = other RNA
acataagaaggaaggaagg

SEQ ID NO: 49475 - RNA, 19 nt, synthetic construct
  misc_feature 1..19: note = siRNA antisense sequence
  source 1..19: mol_type = other RNA
ccttccttccttcttatgt

SEQ ID NO: 49476 - RNA, 19 nt, synthetic construct
  misc_feature 1..19: note = siRNA sense sequence
  source 1..19: mol_type = other RNA
cataagaaggaaggaaggg

SEQ ID NO: 49477 - RNA, 19 nt, synthetic construct
  misc_feature 1..19: note = siRNA antisense sequence
  source 1..19: mol_type = other RNA
cccttccttccttcttatg

SEQ ID NO: 49478 - RNA, 19 nt, synthetic construct
  misc_feature 1..19: note = siRNA sense sequence
  source 1..19: mol_type = other RNA
ataagaaggaaggaagggt

SEQ ID NO: 49479 - RNA, 19 nt, synthetic construct
  misc_feature 1..19: note = siRNA antisense sequence
  source 1..19: mol_type = other RNA
acccttccttccttcttat

SEQ ID NO: 49480 - RNA, 19 nt, synthetic construct
  misc_feature 1..19: note = siRNA sense sequence
  source 1..19: mol_type = other RNA
aatgcctttgcctttaaat

SEQ ID NO: 49481 - RNA, 19 nt, synthetic construct
  misc_feature 1..19: note = siRNA antisense sequence
  source 1..19: mol_type = other RNA
atttaaaggcaaaggcatt

SEQ ID NO: 49482 - RNA, 19 nt, synthetic construct
  misc_feature 1..19: note = siRNA sense sequence
  source 1..19: mol_type = other RNA
atgcctttgcctttaaata

SEQ ID NO: 49483 - RNA, 19 nt, synthetic construct
  misc_feature 1..19: note = siRNA antisense sequence
  source 1..19: mol_type = other RNA
tatttaaaggcaaaggcat

SEQ ID NO: 49484 - RNA, 19 nt, synthetic construct
  misc_feature 1..19: note = siRNA sense sequence
  source 1..19: mol_type = other RNA
caagagcagtggccattgg

SEQ ID NO: 49485 - RNA, 19 nt, synthetic construct
  misc_feature 1..19: note = siRNA antisense sequence
  source 1..19: mol_type = other RNA
ccaatggccactgctcttg

SEQ ID NO: 49486 - RNA, 19 nt, synthetic construct
  misc_feature 1..19: note = siRNA sense sequence
  source 1..19: mol_type = other RNA
aagagcagtggccattggg

SEQ ID NO: 49487 - RNA, 19 nt, synthetic construct
  misc_feature 1..19: note = siRNA antisense sequence
  source 1..19: mol_type = other RNA
cccaatggccactgctctt

SEQ ID NO: 49488 - RNA, 19 nt, synthetic construct
  misc_feature 1..19: note = siRNA sense sequence
  source 1..19: mol_type = other RNA
agagcagtggccattgggc

SEQ ID NO: 49489 - RNA, 19 nt, synthetic construct
  misc_feature 1..19: note = siRNA antisense sequence
  source 1..19: mol_type = other RNA
gcccaatggccactgctct

SEQ ID NO: 49490 - RNA, 19 nt, synthetic construct
  misc_feature 1..19: note = siRNA sense sequence
  source 1..19: mol_type = other RNA
gagcagtggccattgggct

SEQ ID NO: 49491 - RNA, 19 nt, synthetic construct
  misc_feature 1..19: note = siRNA antisense sequence
  source 1..19: mol_type = other RNA
agcccaatggccactgctc

SEQ ID NO: 49492 - RNA, 19 nt, synthetic construct
  misc_feature 1..19: note = siRNA sense sequence
  source 1..19: mol_type = other RNA
agcagtggccattgggctt

SEQ ID NO: 49493 - RNA, 19 nt, synthetic construct
  misc_feature 1..19: note = siRNA antisense sequence
  source 1..19: mol_type = other RNA
aagcccaatggccactgct

SEQ ID NO: 49494 - RNA, 19 nt, synthetic construct
  misc_feature 1..19: note = siRNA sense sequence
  source 1..19: mol_type = other RNA
gcagtggccattgggcttc

SEQ ID NO: 49495 - RNA, 19 nt, synthetic construct
  misc_feature 1..19: note = siRNA antisense sequence
  source 1..19: mol_type = other RNA
gaagcccaatggccactgc

SEQ ID NO: 49496 - RNA, 19 nt, synthetic construct
  misc_feature 1..19: note = siRNA sense sequence
  source 1..19: mol_type = other RNA
cagtggccattgggcttcc

SEQ ID NO: 49497 - RNA, 19 nt, synthetic construct
  misc_feature 1..19: note = siRNA antisense sequence
  source 1..19: mol_type = other RNA
ggaagcccaatggccactg

SEQ ID NO: 49498 - RNA, 19 nt, synthetic construct
  misc_feature 1..19: note = siRNA sense sequence
  source 1..19: mol_type = other RNA
agtggccattgggcttccc

SEQ ID NO: 49499 - RNA, 19 nt, synthetic construct
  misc_feature 1..19: note = siRNA antisense sequence
  source 1..19: mol_type = other RNA
gggaagcccaatggccact

SEQ ID NO: 49500 - RNA, 19 nt, synthetic construct
  misc_feature 1..19: note = siRNA sense sequence
  source 1..19: mol_type = other RNA
gccattgggcttcccttcc

SEQ ID NO: 49501 - RNA, 19 nt, synthetic construct
  misc_feature 1..19: note = siRNA antisense sequence
  source 1..19: mol_type = other RNA
ggaagggaagcccaatggc

SEQ ID NO: 49502 - RNA, 19 nt, synthetic construct
  misc_feature 1..19: note = siRNA sense sequence
  source 1..19: mol_type = other RNA
ccattgggcttcccttccc

SEQ ID NO: 49503 - RNA, 19 nt, synthetic construct
  misc_feature 1..19: note = siRNA antisense sequence
  source 1..19: mol_type = other RNA
gggaagggaagcccaatgg

SEQ ID NO: 49504 - RNA, 19 nt, synthetic construct
  misc_feature 1..19: note = siRNA sense sequence
  source 1..19: mol_type = other RNA
cccgtctgagcaattttcg

SEQ ID NO: 49505 - RNA, 19 nt, synthetic construct
  misc_feature 1..19: note = siRNA antisense sequence
  source 1..19: mol_type = other RNA
cgaaaattgctcagacggg

SEQ ID NO: 49506 - RNA, 19 nt, synthetic construct
  misc_feature 1..19: note = siRNA sense sequence
  source 1..19: mol_type = other RNA
ccgtctgagcaattttcga

SEQ ID NO: 49507 - RNA, 19 nt, synthetic construct
  misc_feature 1..19: note = siRNA antisense sequence
  source 1..19: mol_type = other RNA
tcgaaaattgctcagacgg

SEQ ID NO: 49508 - RNA, 19 nt, synthetic construct
  misc_feature 1..19: note = siRNA sense sequence
  source 1..19: mol_type = other RNA
cgtctgagcaattttcgac

SEQ ID NO: 49509 - RNA, 19 nt, synthetic construct
  misc_feature 1..19: note = siRNA antisense sequence
  source 1..19: mol_type = other RNA
gtcgaaaattgctcagacg

SEQ ID NO: 49510 - RNA, 19 nt, synthetic construct
  misc_feature 1..19: note = siRNA sense sequence
  source 1..19: mol_type = other RNA
gtctgagcaattttcgact

SEQ ID NO: 49511 - RNA, 19 nt, synthetic construct
  misc_feature 1..19: note = siRNA antisense sequence
  source 1..19: mol_type = other RNA
agtcgaaaattgctcagac

SEQ ID NO: 49512 - RNA, 19 nt, synthetic construct
  misc_feature 1..19: note = siRNA sense sequence
  source 1..19: mol_type = other RNA
aaagtgccagttgtctctg

SEQ ID NO: 49513 - RNA, 19 nt, synthetic construct
  misc_feature 1..19: note = siRNA antisense sequence
  source 1..19: mol_type = other RNA
cagagacaactggcacttt

SEQ ID NO: 49514 - RNA, 19 nt, synthetic construct
  misc_feature 1..19: note = siRNA sense sequence
  source 1..19: mol_type = other RNA
aagtgccagttgtctctgt

SEQ ID NO: 49515 - RNA, 19 nt, synthetic construct
  misc_feature 1..19: note = siRNA antisense sequence
  source 1..19: mol_type = other RNA
acagagacaactggcactt

SEQ ID NO: 49516 - RNA, 19 nt, synthetic construct
  misc_feature 1..19: note = siRNA sense sequence
  source 1..19: mol_type = other RNA
agtgccagttgtctctgtt

SEQ ID NO: 49517 - RNA, 19 nt, synthetic construct
  misc_feature 1..19: note = siRNA antisense sequence
  source 1..19: mol_type = other RNA
aacagagacaactggcact

SEQ ID NO: 49518 - RNA, 19 nt, synthetic construct
  misc_feature 1..19: note = siRNA sense sequence
  source 1..19: mol_type = other RNA
gtgccagttgtctctgttt

SEQ ID NO: 49519 - RNA, 19 nt, synthetic construct
  misc_feature 1..19: note = siRNA antisense sequence
  source 1..19: mol_type = other RNA
aaacagagacaactggcac

SEQ ID NO: 49520 - RNA, 19 nt, synthetic construct
  misc_feature 1..19: note = siRNA sense sequence
  source 1..19: mol_type = other RNA
tgccagttgtctctgttta

SEQ ID NO: 49521 - RNA, 19 nt, synthetic construct
  misc_feature 1..19: note = siRNA antisense sequence
  source 1..19: mol_type = other RNA
taaacagagacaactggca

SEQ ID NO: 49522 - RNA, 19 nt, synthetic construct
  misc_feature 1..19: note = siRNA sense sequence
  source 1..19: mol_type = other RNA
gccagttgtctctgtttaa

SEQ ID NO: 49523 - RNA, 19 nt, synthetic construct
  misc_feature 1..19: note = siRNA antisense sequence
  source 1..19: mol_type = other RNA
ttaaacagagacaactggc

SEQ ID NO: 49524 - RNA, 19 nt, synthetic construct
  misc_feature 1..19: note = siRNA sense sequence
  source 1..19: mol_type = other RNA
cagttgtctctgtttaaat

SEQ ID NO: 49525 - RNA, 19 nt, synthetic construct
  misc_feature 1..19: note = siRNA antisense sequence
  source 1..19: mol_type = other RNA
atttaaacagagacaactg

SEQ ID NO: 49526 - RNA, 19 nt, synthetic construct
  misc_feature 1..19: note = siRNA sense sequence
  source 1..19: mol_type = other RNA
caacttctgacgtttgaca

SEQ ID NO: 49527 - RNA, 19 nt, synthetic construct
  misc_feature 1..19: note = siRNA antisense sequence
  source 1..19: mol_type = other RNA
tgtcaaacgtcagaagttg

SEQ ID NO: 49528 - RNA, 19 nt, synthetic construct
  misc_feature 1..19: note = siRNA sense sequence
  source 1..19: mol_type = other RNA
aacttctgacgtttgacac

SEQ ID NO: 49529 - RNA, 19 nt, synthetic construct
  misc_feature 1..19: note = siRNA antisense sequence
  source 1..19: mol_type = other RNA
gtgtcaaacgtcagaagtt

SEQ ID NO: 49530 - RNA, 19 nt, synthetic construct
  misc_feature 1..19: note = siRNA sense sequence
  source 1..19: mol_type = other RNA
acttctgacgtttgacact

SEQ ID NO: 49531 - RNA, 19 nt, synthetic construct
  misc_feature 1..19: note = siRNA antisense sequence
  source 1..19: mol_type = other RNA
agtgtcaaacgtcagaagt

SEQ ID NO: 49532 - RNA, 19 nt, synthetic construct
  misc_feature 1..19: note = siRNA sense sequence
  source 1..19: mol_type = other RNA
cttctgacgtttgacactt

SEQ ID NO: 49533 - RNA, 19 nt, synthetic construct
  misc_feature 1..19: note = siRNA antisense sequence
  source 1..19: mol_type = other RNA
aagtgtcaaacgtcagaag

SEQ ID NO: 49534 - RNA, 19 nt, synthetic construct
  misc_feature 1..19: note = siRNA sense sequence
  source 1..19: mol_type = other RNA
ttctgacgtttgacacttg

SEQ ID NO: 49535 - RNA, 19 nt, synthetic construct
  misc_feature 1..19: note = siRNA antisense sequence
  source 1..19: mol_type = other RNA
caagtgtcaaacgtcagaa

SEQ ID NO: 49536 - RNA, 19 nt, synthetic construct
  misc_feature 1..19: note = siRNA sense sequence
  source 1..19: mol_type = other RNA
tctgacgtttgacacttgc

SEQ ID NO: 49537 - RNA, 19 nt, synthetic construct
  misc_feature 1..19: note = siRNA antisense sequence
  source 1..19: mol_type = other RNA
gcaagtgtcaaacgtcaga

SEQ ID NO: 49538 - RNA, 19 nt, synthetic construct
  misc_feature 1..19: note = siRNA sense sequence
  source 1..19: mol_type = other RNA
ctgacgtttgacacttgct

SEQ ID NO: 49539 - RNA, 19 nt, synthetic construct
  misc_feature 1..19: note = siRNA antisense sequence
  source 1..19: mol_type = other RNA
agcaagtgtcaaacgtcag

SEQ ID NO: 49540 - RNA, 19 nt, synthetic construct
  misc_feature 1..19: note = siRNA sense sequence
  source 1..19: mol_type = other RNA
tgacgtttgacacttgctt

SEQ ID NO: 49541 - RNA, 19 nt, synthetic construct
  misc_feature 1..19: note = siRNA antisense sequence
  source 1..19: mol_type = other RNA
aagcaagtgtcaaacgtca

SEQ ID NO: 49542 - RNA, 19 nt, synthetic construct
  misc_feature 1..19: note = siRNA sense sequence
  source 1..19: mol_type = other RNA
gacgtttgacacttgcttt

SEQ ID NO: 49543 - RNA, 19 nt, synthetic construct
  misc_feature 1..19: note = siRNA antisense sequence
  source 1..19: mol_type = other RNA
aaagcaagtgtcaaacgtc

SEQ ID NO: 49544 - RNA, 19 nt, synthetic construct
  misc_feature 1..19: note = siRNA sense sequence
  source 1..19: mol_type = other RNA
acgtttgacacttgctttt

SEQ ID NO: 49545 - RNA, 19 nt, synthetic construct
  misc_feature 1..19: note = siRNA antisense sequence
  source 1..19: mol_type = other RNA
aaaagcaagtgtcaaacgt

SEQ ID NO: 49546 - RNA, 19 nt, synthetic construct
  misc_feature 1..19: note = siRNA sense sequence
  source 1..19: mol_type = other RNA
gtttgacacttgcttttca

SEQ ID NO: 49547 - RNA, 19 nt, synthetic construct
  misc_feature 1..19: note = siRNA antisense sequence
  source 1..19: mol_type = other RNA
tgaaaagcaagtgtcaaac

SEQ ID NO: 49548 - RNA, 19 nt, synthetic construct
  misc_feature 1..19: note = siRNA sense sequence
  source 1..19: mol_type = other RNA
ttgacacttgcttttcagc

SEQ ID NO: 49549 - RNA, 19 nt, synthetic construct
  misc_feature 1..19: note = siRNA antisense sequence
  source 1..19: mol_type = other RNA
gctgaaaagcaagtgtcaa

SEQ ID NO: 49550 - RNA, 19 nt, synthetic construct
  misc_feature 1..19: note = siRNA sense sequence
  source 1..19: mol_type = other RNA
tgacacttgcttttcagcg

SEQ ID NO: 49551 - RNA, 19 nt, synthetic construct
  misc_feature 1..19: note = siRNA antisense sequence
  source 1..19: mol_type = other RNA
cgctgaaaagcaagtgtca

SEQ ID NO: 49552 - RNA, 19 nt, synthetic construct
  misc_feature 1..19: note = siRNA sense sequence
  source 1..19: mol_type = other RNA
gacacttgcttttcagcga

SEQ ID NO: 49553 - RNA, 19 nt, synthetic construct
  misc_feature 1..19: note = siRNA antisense sequence
  source 1..19: mol_type = other RNA
tcgctgaaaagcaagtgtc

SEQ ID NO: 49554 - RNA, 19 nt, synthetic construct
  misc_feature 1..19: note = siRNA sense sequence
  source 1..19: mol_type = other RNA
acacttgcttttcagcgaa

SEQ ID NO: 49555 - RNA, 19 nt, synthetic construct
  misc_feature 1..19: note = siRNA antisense sequence
  source 1..19: mol_type = other RNA
ttcgctgaaaagcaagtgt

SEQ ID NO: 49556 - RNA, 19 nt, synthetic construct
  misc_feature 1..19: note = siRNA sense sequence
  source 1..19: mol_type = other RNA
cacttgcttttcagcgaag

SEQ ID NO: 49557 - RNA, 19 nt, synthetic construct
  misc_feature 1..19: note = siRNA antisense sequence
  source 1..19: mol_type = other RNA
cttcgctgaaaagcaagtg

SEQ ID NO: 49558 - RNA, 19 nt, synthetic construct
  misc_feature 1..19: note = siRNA sense sequence
  source 1..19: mol_type = other RNA
cttgcttttcagcgaagta

SEQ ID NO: 49559 - RNA, 19 nt, synthetic construct
  misc_feature 1..19: note = siRNA antisense sequence
  source 1..19: mol_type = other RNA
tacttcgctgaaaagcaag

SEQ ID NO: 49560 - RNA, 19 nt, synthetic construct
  misc_feature 1..19: note = siRNA sense sequence
  source 1..19: mol_type = other RNA
ttgcttttcagcgaagtag

SEQ ID NO: 49561 - RNA, 19 nt, synthetic construct
  misc_feature 1..19: note = siRNA antisense sequence
  source 1..19: mol_type = other RNA
ctacttcgctgaaaagcaa

SEQ ID NO: 49562 - RNA, 19 nt, synthetic construct
  misc_feature 1..19: note = siRNA sense sequence
  source 1..19: mol_type = other RNA
tgcttttcagcgaagtaga

SEQ ID NO: 49563 - RNA, 19 nt, synthetic construct
  misc_feature 1..19: note = siRNA antisense sequence
  source 1..19: mol_type = other RNA
tctacttcgctgaaaagca

SEQ ID NO: 49564 - RNA, 19 nt, synthetic construct
  misc_feature 1..19: note = siRNA sense sequence
  source 1..19: mol_type = other RNA
gcttttcagcgaagtagac

SEQ ID NO: 49565 - RNA, 19 nt, synthetic construct
  misc_feature 1..19: note = siRNA antisense sequence
  source 1..19: mol_type = other RNA
gtctacttcgctgaaaagc

SEQ ID NO: 49566 - RNA, 19 nt, synthetic construct
  misc_feature 1..19: note = siRNA sense sequence
  source 1..19: mol_type = other RNA
cttttcagcgaagtagaca

SEQ ID NO: 49567 - RNA, 19 nt, synthetic construct
  misc_feature 1..19: note = siRNA antisense sequence
  source 1..19: mol_type = other RNA
tgtctacttcgctgaaaag

SEQ ID NO: 49568 - RNA, 19 nt, synthetic construct
  misc_feature 1..19: note = siRNA sense sequence
  source 1..19: mol_type = other RNA
ttttcagcgaagtagacag

SEQ ID NO: 49569 - RNA, 19 nt, synthetic construct
  misc_feature 1..19: note = siRNA antisense sequence
  source 1..19: mol_type = other RNA
ctgtctacttcgctgaaaa

SEQ ID NO: 49570 - RNA, 19 nt, synthetic construct
  misc_feature 1..19: note = siRNA sense sequence
  source 1..19: mol_type = other RNA
tttcagcgaagtagacagg

SEQ ID NO: 49571 - RNA, 19 nt, synthetic construct
  misc_feature 1..19: note = siRNA antisense sequence
  source 1..19: mol_type = other RNA
cctgtctacttcgctgaaa

SEQ ID NO: 49572 - RNA, 19 nt, synthetic construct
  misc_feature 1..19: note = siRNA sense sequence
  source 1..19: mol_type = other RNA
ttcagcgaagtagacagga

SEQ ID NO: 49573 - RNA, 19 nt, synthetic construct
  misc_feature 1..19: note = siRNA antisense sequence
  source 1..19: mol_type = other RNA
tcctgtctacttcgctgaa

SEQ ID NO: 49574 - RNA, 19 nt, synthetic construct
  misc_feature 1..19: note = siRNA sense sequence
  source 1..19: mol_type = other RNA
tcagcgaagtagacaggaa

SEQ ID NO: 49575 - RNA, 19 nt, synthetic construct
  misc_feature 1..19: note = siRNA antisense sequence
  source 1..19: mol_type = other RNA
ttcctgtctacttcgctga

SEQ ID NO: 49576 - RNA, 19 nt, synthetic construct
  misc_feature 1..19: note = siRNA sense sequence
  source 1..19: mol_type = other RNA
cagcgaagtagacaggaat

SEQ ID NO: 49577 - RNA, 19 nt, synthetic construct
  misc_feature 1..19: note = siRNA antisense sequence
  source 1..19: mol_type = other RNA
attcctgtctacttcgctg

SEQ ID NO: 49578 - RNA, 19 nt, synthetic construct
  misc_feature 1..19: note = siRNA sense sequence
  source 1..19: mol_type = other RNA
agcgaagtagacaggaatt

SEQ ID NO: 49579 - RNA, 19 nt, synthetic construct
  misc_feature 1..19: note = siRNA antisense sequence
  source 1..19: mol_type = other RNA
aattcctgtctacttcgct

SEQ ID NO: 49580 - RNA, 19 nt, synthetic construct
  misc_feature 1..19: note = siRNA sense sequence
  source 1..19: mol_type = other RNA
gcgaagtagacaggaattg

SEQ ID NO: 49581 - RNA, 19 nt, synthetic construct
  misc_feature 1..19: note = siRNA antisense sequence
  source 1..19: mol_type = other RNA
caattcctgtctacttcgc

SEQ ID NO: 49582 - RNA, 19 nt, synthetic construct
  misc_feature 1..19: note = siRNA sense sequence
  source 1..19: mol_type = other RNA
cgaagtagacaggaattga

SEQ ID NO: 49583 - RNA, 19 nt, synthetic construct
  misc_feature 1..19: note = siRNA antisense sequence
  source 1..19: mol_type = other RNA
tcaattcctgtctacttcg

SEQ ID NO: 49584 - RNA, 19 nt, synthetic construct
  misc_feature 1..19: note = siRNA sense sequence
  source 1..19: mol_type = other RNA
gaagtagacaggaattgaa

SEQ ID NO: 49585 - RNA, 19 nt, synthetic construct
  misc_feature 1..19: note = siRNA antisense sequence
  source 1..19: mol_type = other RNA
ttcaattcctgtctacttc

SEQ ID NO: 49586 - RNA, 19 nt, synthetic construct
  misc_feature 1..19: note = siRNA sense sequence
  source 1..19: mol_type = other RNA
aagtagacaggaattgaat

SEQ ID NO: 49587 - RNA, 19 nt, synthetic construct
  misc_feature 1..19: note = siRNA antisense sequence
  source 1..19: mol_type = other RNA
attcaattcctgtctactt

SEQ ID NO: 49588 - RNA, 19 nt, synthetic construct
  misc_feature 1..19: note = siRNA sense sequence
  source 1..19: mol_type = other RNA
agtagacaggaattgaatt

SEQ ID NO: 49589 - RNA, 19 nt, synthetic construct
  misc_feature 1..19: note = siRNA antisense sequence
  source 1..19: mol_type = other RNA
aattcaattcctgtctact

SEQ ID NO: 49590 - RNA, 19 nt, synthetic construct
  misc_feature 1..19: note = siRNA sense sequence
  source 1..19: mol_type = other RNA
tctgatgcaatttataagc

SEQ ID NO: 49591 - RNA, 19 nt, synthetic construct
  misc_feature 1..19: note = siRNA antisense sequence
  source 1..19: mol_type = other RNA
gcttataaattgcatcaga

SEQ ID NO: 49592 - RNA, 19 nt, synthetic construct
  misc_feature 1..19: note = siRNA sense sequence
  source 1..19: mol_type = other RNA
atttataagctcctggtat

SEQ ID NO: 49593 - RNA, 19 nt, synthetic construct
  misc_feature 1..19: note = siRNA antisense sequence
  source 1..19: mol_type = other RNA
ataccaggagcttataaat

SEQ ID NO: 49594 - RNA, 19 nt, synthetic construct
  misc_feature 1..19: note = siRNA sense sequence
  source 1..19: mol_type = other RNA
ataagctcctggtatagac

SEQ ID NO: 49595 - RNA, 19 nt, synthetic construct
  misc_feature 1..19: note = siRNA antisense sequence
  source 1..19: mol_type = other RNA
gtctataccaggagcttat

SEQ ID NO: 49596 - RNA, 19 nt, synthetic construct
  misc_feature 1..19: note = siRNA sense sequence
  source 1..19: mol_type = other RNA
taagctcctggtatagacc

SEQ ID NO: 49597 - RNA, 19 nt, synthetic construct
  misc_feature 1..19: note = siRNA antisense sequence
  source 1..19: mol_type = other RNA
ggtctataccaggagctta

SEQ ID NO: 49598 - RNA, 19 nt, synthetic construct
  misc_feature 1..19: note = siRNA sense sequence
  source 1..19: mol_type = other RNA
aagctcctggtatagacct

SEQ ID NO: 49599 - RNA, 19 nt, synthetic construct
  misc_feature 1..19: note = siRNA antisense sequence
  source 1..19: mol_type = other RNA
aggtctataccaggagctt

SEQ ID NO: 49600 - RNA, 19 nt, synthetic construct
  misc_feature 1..19: note = siRNA sense sequence
  source 1..19: mol_type = other RNA
agctcctggtatagacctt

SEQ ID NO: 49601 - RNA, 19 nt, synthetic construct
  misc_feature 1..19: note = siRNA antisense sequence
  source 1..19: mol_type = other RNA
aaggtctataccaggagct

SEQ ID NO: 49602 - RNA, 19 nt, synthetic construct
  misc_feature 1..19: note = siRNA sense sequence
  source 1..19: mol_type = other RNA
gctcctggtatagaccttt

SEQ ID NO: 49603 - RNA, 19 nt, synthetic construct
  misc_feature 1..19: note = siRNA antisense sequence
  source 1..19: mol_type = other RNA
aaaggtctataccaggagc

SEQ ID NO: 49604 - RNA, 19 nt, synthetic construct
  misc_feature 1..19: note = siRNA sense sequence
  source 1..19: mol_type = other RNA
ctggtatagacctttcgac

SEQ ID NO: 49605 - RNA, 19 nt, synthetic construct
  misc_feature 1..19: note = siRNA antisense sequence
  source 1..19: mol_type = other RNA
gtcgaaaggtctataccag

SEQ ID NO: 49606 - RNA, 19 nt, synthetic construct
  misc_feature 1..19: note = siRNA sense sequence
  source 1..19: mol_type = other RNA
tatagacctttcgacctaa

SEQ ID NO: 49607 - RNA, 19 nt, synthetic construct
  misc_feature 1..19: note = siRNA antisense sequence
  source 1..19: mol_type = other RNA
ttaggtcgaaaggtctata

SEQ ID NO: 49608 - RNA, 19 nt, synthetic construct
  misc_feature 1..19: note = siRNA sense sequence
  source 1..19: mol_type = other RNA
atagacctttcgacctaaa

SEQ ID NO: 49609 - RNA, 19 nt, synthetic construct
  misc_feature 1..19: note = siRNA antisense sequence
  source 1..19: mol_type = other RNA
tttaggtcgaaaggtctat

SEQ ID NO: 49610 - RNA, 19 nt, synthetic construct
  misc_feature 1..19: note = siRNA sense sequence
  source 1..19: mol_type = other RNA
tagacctttcgacctaaaa

SEQ ID NO: 49611 - RNA, 19 nt, synthetic construct
  misc_feature 1..19: note = siRNA antisense sequence
  source 1..19: mol_type = other RNA
ttttaggtcgaaaggtcta

SEQ ID NO: 49612 - RNA, 19 nt, synthetic construct
  misc_feature 1..19: note = siRNA sense sequence
  source 1..19: mol_type = other RNA
agacctttcgacctaaaat

SEQ ID NO: 49613 - RNA, 19 nt, synthetic construct
  misc_feature 1..19: note = siRNA antisense sequence
  source 1..19: mol_type = other RNA
attttaggtcgaaaggtct

SEQ ID NO: 49614 - RNA, 19 nt, synthetic construct
  misc_feature 1..19: note = siRNA sense sequence
  source 1..19: mol_type = other RNA
gacctttcgacctaaaatg

SEQ ID NO: 49615 - RNA, 19 nt, synthetic construct
  misc_feature 1..19: note = siRNA antisense sequence
  source 1..19: mol_type = other RNA
cattttaggtcgaaaggtc

SEQ ID NO: 49616 - RNA, 19 nt, synthetic construct
  misc_feature 1..19: note = siRNA sense sequence
  source 1..19: mol_type = other RNA
acctttcgacctaaaatgt

SEQ ID NO: 49617 - RNA, 19 nt, synthetic construct
  misc_feature 1..19: note = siRNA antisense sequence
  source 1..19: mol_type = other RNA
acattttaggtcgaaaggt

SEQ ID NO: 49618 - RNA, 19 nt, synthetic construct
  misc_feature 1..19: note = siRNA sense sequence
  source 1..19: mol_type = other RNA
cctttcgacctaaaatgta

SEQ ID NO: 49619 - RNA, 19 nt, synthetic construct
  misc_feature 1..19: note = siRNA antisense sequence
  source 1..19: mol_type = other RNA
tacattttaggtcgaaagg

SEQ ID NO: 49620 - RNA, 19 nt, synthetic construct
  misc_feature 1..19: note = siRNA sense sequence
  source 1..19: mol_type = other RNA
ctttcgacctaaaatgtag

SEQ ID NO: 49621 - RNA, 19 nt, synthetic construct
  misc_feature 1..19: note = siRNA antisense sequence
  source 1..19: mol_type = other RNA
ctacattttaggtcgaaag

SEQ ID NO: 49622 - RNA, 19 nt, synthetic construct
  misc_feature 1..19: note = siRNA sense sequence
  source 1..19: mol_type = other RNA
tttcgacctaaaatgtaga

SEQ ID NO: 49623 - RNA, 19 nt, synthetic construct
  misc_feature 1..19: note = siRNA antisense sequence
  source 1..19: mol_type = other RNA
tctacattttaggtcgaaa

SEQ ID NO: 49624 - RNA, 19 nt, synthetic construct
  misc_feature 1..19: note = siRNA sense sequence
  source 1..19: mol_type = other RNA
ttcgacctaaaatgtagac

SEQ ID NO: 49625 - RNA, 19 nt, synthetic construct
  misc_feature 1..19: note = siRNA antisense sequence
  source 1..19: mol_type = other RNA
gtctacattttaggtcgaa

SEQ ID NO: 49626 - RNA, 19 nt, synthetic construct
  misc_feature 1..19: note = siRNA sense sequence
  source 1..19: mol_type = other RNA
tcgacctaaaatgtagaca

SEQ ID NO: 49627 - RNA, 19 nt, synthetic construct
  misc_feature 1..19: note = siRNA antisense sequence
  source 1..19: mol_type = other RNA
tgtctacattttaggtcga

SEQ ID NO: 49628 - RNA, 19 nt, synthetic construct
  misc_feature 1..19: note = siRNA sense sequence
  source 1..19: mol_type = other RNA
attacttcagagctagctc

SEQ ID NO: 49629 - RNA, 19 nt, synthetic construct
  misc_feature 1..19: note = siRNA antisense sequence
  source 1..19: mol_type = other RNA
gagctagctctgaagtaat

SEQ ID NO: 49630 - RNA, 19 nt, synthetic construct
  misc_feature 1..19: note = siRNA sense sequence
  source 1..19: mol_type = other RNA
gagctagctctagttttaa

SEQ ID NO: 49631 - RNA, 19 nt, synthetic construct
  misc_feature 1..19: note = siRNA antisense sequence
  source 1..19: mol_type = other RNA
ttaaaactagagctagctc

SEQ ID NO: 49632 - RNA, 19 nt, synthetic construct
  misc_feature 1..19: note = siRNA sense sequence
  source 1..19: mol_type = other RNA
agctagctctagttttaac

SEQ ID NO: 49633 - RNA, 19 nt, synthetic construct
  misc_feature 1..19: note = siRNA antisense sequence
  source 1..19: mol_type = other RNA
gttaaaactagagctagct

SEQ ID NO: 49634 - RNA, 19 nt, synthetic construct
  misc_feature 1..19: note = siRNA sense sequence
  source 1..19: mol_type = other RNA
agttcttctcagacattag

SEQ ID NO: 49635 - RNA, 19 nt, synthetic construct
  misc_feature 1..19: note = siRNA antisense sequence
  source 1..19: mol_type = other RNA
ctaatgtctgagaagaact

SEQ ID NO: 49636 - RNA, 19 nt, synthetic construct
  misc_feature 1..19: note = siRNA sense sequence
  source 1..19: mol_type = other RNA
gttcttctcagacattagt

SEQ ID NO: 49637 - RNA, 19 nt, synthetic construct
  misc_feature 1..19: note = siRNA antisense sequence
  source 1..19: mol_type = other RNA
actaatgtctgagaagaac

SEQ ID NO: 49638 - RNA, 19 nt, synthetic construct
  misc_feature 1..19: note = siRNA sense sequence
  source 1..19: mol_type = other RNA
cttctcagacattagtgca

SEQ ID NO: 49639 - RNA, 19 nt, synthetic construct
  misc_feature 1..19: note = siRNA antisense sequence
  source 1..19: mol_type = other RNA
tgcactaatgtctgagaag

SEQ ID NO: 49640 - RNA, 19 nt, synthetic construct
  misc_feature 1..19: note = siRNA sense sequence
  source 1..19: mol_type = other RNA
agacattagtgcattactc

SEQ ID NO: 49641 - RNA, 19 nt, synthetic construct
  misc_feature 1..19: note = siRNA antisense sequence
  source 1..19: mol_type = other RNA
gagtaatgcactaatgtct

SEQ ID NO: 49642 - RNA, 19 nt, synthetic construct
  misc_feature 1..19: note = siRNA sense sequence
  source 1..19: mol_type = other RNA
gacattagtgcattactcc

SEQ ID NO: 49643 - RNA, 19 nt, synthetic construct
  misc_feature 1..19: note = siRNA antisense sequence
  source 1..19: mol_type = other RNA
ggagtaatgcactaatgtc

SEQ ID NO: 49644 - RNA, 19 nt, synthetic construct
  misc_feature 1..19: note = siRNA sense sequence
  source 1..19: mol_type = other RNA
acattagtgcattactcct

SEQ ID NO: 49645 - RNA, 19 nt, synthetic construct
  misc_feature 1..19: note = siRNA antisense sequence
  source 1..19: mol_type = other RNA
aggagtaatgcactaatgt

SEQ ID NO: 49646 - RNA, 19 nt, synthetic construct
  misc_feature 1..19: note = siRNA sense sequence
  source 1..19: mol_type = other RNA
cattagtgcattactcctg

SEQ ID NO: 49647 - RNA, 19 nt, synthetic construct
  misc_feature 1..19: note = siRNA antisense sequence
  source 1..19: mol_type = other RNA
caggagtaatgcactaatg

SEQ ID NO: 49648 - RNA, 19 nt, synthetic construct
  misc_feature 1..19: note = siRNA sense sequence
  source 1..19: mol_type = other RNA
attagtgcattactcctgt

SEQ ID NO: 49649 - RNA, 19 nt, synthetic construct
  misc_feature 1..19: note = siRNA antisense sequence
  source 1..19: mol_type = other RNA
acaggagtaatgcactaat

SEQ ID NO: 49650 - RNA, 19 nt, synthetic construct
  misc_feature 1..19: note = siRNA sense sequence
  source 1..19: mol_type = other RNA
ttagtgcattactcctgta

SEQ ID NO: 49651 - RNA, 19 nt, synthetic construct
  misc_feature 1..19: note = siRNA antisense sequence
  source 1..19: mol_type = other RNA
tacaggagtaatgcactaa

SEQ ID NO: 49652 - RNA, 19 nt, synthetic construct
  misc_feature 1..19: note = siRNA sense sequence
  source 1..19: mol_type = other RNA
tactcctgtaacctcatta

SEQ ID NO: 49653 - RNA, 19 nt, synthetic construct
  misc_feature 1..19: note = siRNA antisense sequence
  source 1..19: mol_type = other RNA
taatgaggttacaggagta

SEQ ID NO: 49654 - RNA, 19 nt, synthetic construct
  misc_feature 1..19: note = siRNA sense sequence
  source 1..19: mol_type = other RNA
actcctgtaacctcattat

SEQ ID NO: 49655 - RNA, 19 nt, synthetic construct
  misc_feature 1..19: note = siRNA antisense sequence
  source 1..19: mol_type = other RNA
ataatgaggttacaggagt

SEQ ID NO: 49656 - RNA, 19 nt, synthetic construct
  misc_feature 1..19: note = siRNA sense sequence
  source 1..19: mol_type = other RNA
ctcctgtaacctcattatt

SEQ ID NO: 49657 - RNA, 19 nt, synthetic construct
  misc_feature 1..19: note = siRNA antisense sequence
  source 1..19: mol_type = other RNA
aataatgaggttacaggag

SEQ ID NO: 49658 - RNA, 19 nt, synthetic construct
  misc_feature 1..19: note = siRNA sense sequence
  source 1..19: mol_type = other RNA
tcctgtaacctcattattc

SEQ ID NO: 49659 - RNA, 19 nt, synthetic construct
  misc_feature 1..19: note = siRNA antisense sequence
  source 1..19: mol_type = other RNA
gaataatgaggttacagga

SEQ ID NO: 49660 - RNA, 19 nt, synthetic construct
  misc_feature 1..19: note = siRNA sense sequence
  source 1..19: mol_type = other RNA
cctgtaacctcattattcc

SEQ ID NO: 49661 - RNA, 19 nt, synthetic construct
  misc_feature 1..19: note = siRNA antisense sequence
  source 1..19: mol_type = other RNA
ggaataatgaggttacagg

SEQ ID NO: 49662 - RNA, 19 nt, synthetic construct
  misc_feature 1..19: note = siRNA sense sequence
  source 1..19: mol_type = other RNA
ctgtaacctcattattcct

SEQ ID NO: 49663 - RNA, 19 nt, synthetic construct
  misc_feature 1..19: note = siRNA antisense sequence
  source 1..19: mol_type = other RNA
aggaataatgaggttacag

SEQ ID NO: 49664 - RNA, 19 nt, synthetic construct
  misc_feature 1..19: note = siRNA sense sequence
  source 1..19: mol_type = other RNA
aaagaggcaagggcaccca

SEQ ID NO: 49665 - RNA, 19 nt, synthetic construct
  misc_feature 1..19: note = siRNA antisense sequence
  source 1..19: mol_type = other RNA
tgggtgcccttgcctcttt

SEQ ID NO: 49666 - RNA, 19 nt, synthetic construct
  misc_feature 1..19: note = siRNA sense sequence
  source 1..19: mol_type = other RNA
aagaggcaagggcacccag

SEQ ID NO: 49667 - RNA, 19 nt, synthetic construct
  misc_feature 1..19: note = siRNA antisense sequence
  source 1..19: mol_type = other RNA
ctgggtgcccttgcctctt

SEQ ID NO: 49668 - RNA, 19 nt, synthetic construct
  misc_feature 1..19: note = siRNA sense sequence
  source 1..19: mol_type = other RNA
agaggcaagggcacccagt

SEQ ID NO: 49669 - RNA, 19 nt, synthetic construct
  misc_feature 1..19: note = siRNA antisense sequence
  source 1..19: mol_type = other RNA
actgggtgcccttgcctct

SEQ ID NO: 49670 - RNA, 19 nt, synthetic construct
  misc_feature 1..19: note = siRNA sense sequence
  source 1..19: mol_type = other RNA
ccagtgacttgggtggtcc

SEQ ID NO: 49671 - RNA, 19 nt, synthetic construct
  misc_feature 1..19: note = siRNA antisense sequence
  source 1..19: mol_type = other RNA
ggaccacccaagtcactgg

SEQ ID NO: 49672 - RNA, 19 nt, synthetic construct
  misc_feature 1..19: note = siRNA sense sequence
  source 1..19: mol_type = other RNA
gggcaaagtggcttaaagt

SEQ ID NO: 49673 - RNA, 19 nt, synthetic construct
  misc_feature 1..19: note = siRNA antisense sequence
  source 1..19: mol_type = other RNA
actttaagccactttgccc

SEQ ID NO: 49674 - RNA, 19 nt, synthetic construct
  misc_feature 1..19: note = siRNA sense sequence
  source 1..19: mol_type = other RNA
ggcaaagtggcttaaagtc

SEQ ID NO: 49675 - RNA, 19 nt, synthetic construct
  misc_feature 1..19: note = siRNA antisense sequence
  source 1..19: mol_type = other RNA
gactttaagccactttgcc

SEQ ID NO: 49676 - RNA, 19 nt, synthetic construct
  misc_feature 1..19: note = siRNA sense sequence
  source 1..19: mol_type = other RNA
gcaaagtggcttaaagtcc

SEQ ID NO: 49677 - RNA, 19 nt, synthetic construct
  misc_feature 1..19: note = siRNA antisense sequence
  source 1..19: mol_type = other RNA
ggactttaagccactttgc

SEQ ID NO: 49678 - RNA, 19 nt, synthetic construct
  misc_feature 1..19: note = siRNA sense sequence
  source 1..19: mol_type = other RNA
caaagtggcttaaagtcct

SEQ ID NO: 49679 - RNA, 19 nt, synthetic construct
  misc_feature 1..19: note = siRNA antisense sequence
  source 1..19: mol_type = other RNA
aggactttaagccactttg

SEQ ID NO: 49680 - RNA, 19 nt, synthetic construct
  misc_feature 1..19: note = siRNA sense sequence
  source 1..19: mol_type = other RNA
aaagtggcttaaagtcctc

SEQ ID NO: 49681 - RNA, 19 nt, synthetic construct
  misc_feature 1..19: note = siRNA antisense sequence
  source 1..19: mol_type = other RNA
gaggactttaagccacttt

SEQ ID NO: 49682 - RNA, 19 nt, synthetic construct
  misc_feature 1..19: note = siRNA sense sequence
  source 1..19: mol_type = other RNA
aagtggcttaaagtcctct

SEQ ID NO: 49683 - RNA, 19 nt, synthetic construct
  misc_feature 1..19: note = siRNA antisense sequence
  source 1..19: mol_type = other RNA
agaggactttaagccactt

SEQ ID NO: 49684 - RNA, 19 nt, synthetic construct
  misc_feature 1..19: note = siRNA sense sequence
  source 1..19: mol_type = other RNA
agtggcttaaagtcctctg

SEQ ID NO: 49685 - RNA, 19 nt, synthetic construct
  misc_feature 1..19: note = siRNA antisense sequence
  source 1..19: mol_type = other RNA
cagaggactttaagccact

SEQ ID NO: 49686 - RNA, 19 nt, synthetic construct
  misc_feature 1..19: note = siRNA sense sequence
  source 1..19: mol_type = other RNA
gtggcttaaagtcctctga

SEQ ID NO: 49687 - RNA, 19 nt, synthetic construct
  misc_feature 1..19: note = siRNA antisense sequence
  source 1..19: mol_type = other RNA
tcagaggactttaagccac

SEQ ID NO: 49688 - RNA, 19 nt, synthetic construct
  misc_feature 1..19: note = siRNA sense sequence
  source 1..19: mol_type = other RNA
tggcttaaagtcctctgat

SEQ ID NO: 49689 - RNA, 19 nt, synthetic construct
  misc_feature 1..19: note = siRNA antisense sequence
  source 1..19: mol_type = other RNA
atcagaggactttaagcca

SEQ ID NO: 49690 - RNA, 19 nt, synthetic construct
  misc_feature 1..19: note = siRNA sense sequence
  source 1..19: mol_type = other RNA
ggcttaaagtcctctgatg

SEQ ID NO: 49691 - RNA, 19 nt, synthetic construct
  misc_feature 1..19: note = siRNA antisense sequence
  source 1..19: mol_type = other RNA
catcagaggactttaagcc

SEQ ID NO: 49692 - RNA, 19 nt, synthetic construct
  misc_feature 1..19: note = siRNA sense sequence
  source 1..19: mol_type = other RNA
gcttaaagtcctctgatga

SEQ ID NO: 49693 - RNA, 19 nt, synthetic construct
  misc_feature 1..19: note = siRNA antisense sequence
  source 1..19: mol_type = other RNA
tcatcagaggactttaagc

SEQ ID NO: 49694 - RNA, 19 nt, synthetic construct
  misc_feature 1..19: note = siRNA sense sequence
  source 1..19: mol_type = other RNA
cttaaagtcctctgatgag

SEQ ID NO: 49695 - RNA, 19 nt, synthetic construct
  misc_feature 1..19: note = siRNA antisense sequence
  source 1..19: mol_type = other RNA
ctcatcagaggactttaag

SEQ ID NO: 49696 - RNA, 19 nt, synthetic construct
  misc_feature 1..19: note = siRNA sense sequence
  source 1..19: mol_type = other RNA
acgtgtggtatttcctctg

SEQ ID NO: 49697 - RNA, 19 nt, synthetic construct
  misc_feature 1..19: note = siRNA antisense sequence
  source 1..19: mol_type = other RNA
cagaggaaataccacacgt

SEQ ID NO: 49698 - RNA, 19 nt, synthetic construct
  misc_feature 1..19: note = siRNA sense sequence
  source 1..19: mol_type = other RNA
cgtgtggtatttcctctgg

SEQ ID NO: 49699 - RNA, 19 nt, synthetic construct
  misc_feature 1..19: note = siRNA antisense sequence
  source 1..19: mol_type = other RNA
ccagaggaaataccacacg

SEQ ID NO: 49700 - RNA, 19 nt, synthetic construct
  misc_feature 1..19: note = siRNA sense sequence
  source 1..19: mol_type = other RNA
gtgtggtatttcctctggg

SEQ ID NO: 49701 - RNA, 19 nt, synthetic construct
  misc_feature 1..19: note = siRNA antisense sequence
  source 1..19: mol_type = other RNA
cccagaggaaataccacac

SEQ ID NO: 49702 - RNA, 19 nt, synthetic construct
  misc_feature 1..19: note = siRNA sense sequence
  source 1..19: mol_type = other RNA
tgtggtatttcctctggga

SEQ ID NO: 49703 - RNA, 19 nt, synthetic construct
  misc_feature 1..19: note = siRNA antisense sequence
  source 1..19: mol_type = other RNA
tcccagaggaaataccaca

SEQ ID NO: 49704 - RNA, 19 nt, synthetic construct
  misc_feature 1..19: note = siRNA sense sequence
  source 1..19: mol_type = other RNA
gtggtatttcctctgggat

SEQ ID NO: 49705 - RNA, 19 nt, synthetic construct
  misc_feature 1..19: note = siRNA antisense sequence
  source 1..19: mol_type = other RNA
atcccagaggaaataccac

SEQ ID NO: 49706 - RNA, 19 nt, synthetic construct
  misc_feature 1..19: note = siRNA sense sequence
  source 1..19: mol_type = other RNA
tggtatttcctctgggatg

SEQ ID NO: 49707 - RNA, 19 nt, synthetic construct
  misc_feature 1..19: note = siRNA antisense sequence
  source 1..19: mol_type = other RNA
catcccagaggaaatacca

SEQ ID NO: 49708 - RNA, 19 nt, synthetic construct
  misc_feature 1..19: note = siRNA sense sequence
  source 1..19: mol_type = other RNA
ggtatttcctctgggatgg

SEQ ID NO: 49709 - RNA, 19 nt, synthetic construct
  misc_feature 1..19: note = siRNA antisense sequence
  source 1..19: mol_type = other RNA
ccatcccagaggaaatacc

SEQ ID NO: 49710 - RNA, 19 nt, synthetic construct
  misc_feature 1..19: note = siRNA sense sequence
  source 1..19: mol_type = other RNA
gtatttcctctgggatggt

SEQ ID NO: 49711 - RNA, 19 nt, synthetic construct
  misc_feature 1..19: note = siRNA antisense sequence
  source 1..19: mol_type = other RNA
accatcccagaggaaatac

SEQ ID NO: 49712 - RNA, 19 nt, synthetic construct
  misc_feature 1..19: note = siRNA sense sequence
  source 1..19: mol_type = other RNA
tatttcctctgggatggtc

SEQ ID NO: 49713 - RNA, 19 nt, synthetic construct
  misc_feature 1..19: note = siRNA antisense sequence
  source 1..19: mol_type = other RNA
gaccatcccagaggaaata

SEQ ID NO: 49714 - RNA, 19 nt, synthetic construct
  misc_feature 1..19: note = siRNA sense sequence
  source 1..19: mol_type = other RNA
atttcctctgggatggtca

SEQ ID NO: 49715 - RNA, 19 nt, synthetic construct
  misc_feature 1..19: note = siRNA antisense sequence
  source 1..19: mol_type = other RNA
tgaccatcccagaggaaat

SEQ ID NO: 49716 - RNA, 19 nt, synthetic construct
  misc_feature 1..19: note = siRNA sense sequence
  source 1..19: mol_type = other RNA
tttcctctgggatggtcac

SEQ ID NO: 49717 - RNA, 19 nt, synthetic construct
  misc_feature 1..19: note = siRNA antisense sequence
  source 1..19: mol_type = other RNA
gtgaccatcccagaggaaa

SEQ ID NO: 49718 - RNA, 19 nt, synthetic construct
  misc_feature 1..19: note = siRNA sense sequence
  source 1..19: mol_type = other RNA
ttcctctgggatggtcact

SEQ ID NO: 49719 - RNA, 19 nt, synthetic construct
  misc_feature 1..19: note = siRNA antisense sequence
  source 1..19: mol_type = other RNA
agtgaccatcccagaggaa

SEQ ID NO: 49720 - RNA, 19 nt, synthetic construct
  misc_feature 1..19: note = siRNA sense sequence
  source 1..19: mol_type = other RNA
ctctgggatggtcactgat

SEQ ID NO: 49721 - RNA, 19 nt, synthetic construct
  misc_feature 1..19: note = siRNA antisense sequence
  source 1..19: mol_type = other RNA
atcagtgaccatcccagag

SEQ ID NO: 49722 - RNA, 19 nt, synthetic construct
  misc_feature 1..19: note = siRNA sense sequence
  source 1..19: mol_type = other RNA
ctgccttctctctagtaag

SEQ ID NO: 49723 - RNA, 19 nt, synthetic construct
  misc_feature 1..19: note = siRNA antisense sequence
  source 1..19: mol_type = other RNA
cttactagagagaaggcag

SEQ ID NO: 49724 - RNA, 19 nt, synthetic construct
  misc_feature 1..19: note = siRNA sense sequence
  source 1..19: mol_type = other RNA
gccactgcactgccttcaa

SEQ ID NO: 49725 - RNA, 19 nt, synthetic construct
  misc_feature 1..19: note = siRNA antisense sequence
  source 1..19: mol_type = other RNA
ttgaaggcagtgcagtggc

SEQ ID NO: 49726 - RNA, 19 nt, synthetic construct
  misc_feature 1..19: note = siRNA sense sequence
  source 1..19: mol_type = other RNA
ccactgcactgccttcaag

SEQ ID NO: 49727 - RNA, 19 nt, synthetic construct
  misc_feature 1..19: note = siRNA antisense sequence
  source 1..19: mol_type = other RNA
cttgaaggcagtgcagtgg

SEQ ID NO: 49728 - RNA, 19 nt, synthetic construct
  misc_feature 1..19: note = siRNA sense sequence
  source 1..19: mol_type = other RNA
cactgcactgccttcaaga

SEQ ID NO: 49729 - RNA, 19 nt, synthetic construct
  misc_feature 1..19: note = siRNA antisense sequence
  source 1..19: mol_type = other RNA
tcttgaaggcagtgcagtg

SEQ ID NO: 49730 - RNA, 19 nt, synthetic construct
  misc_feature 1..19: note = siRNA sense sequence
  source 1..19: mol_type = other RNA
gcactgccttcaagactca

SEQ ID NO: 49731 - RNA, 19 nt, synthetic construct
  misc_feature 1..19: note = siRNA antisense sequence
  source 1..19: mol_type = other RNA
tgagtcttgaaggcagtgc

SEQ ID NO: 49732 - RNA, 19 nt, synthetic construct
  misc_feature 1..19: note = siRNA sense sequence
  source 1..19: mol_type = other RNA
cactgccttcaagactcac

SEQ ID NO: 49733 - RNA, 19 nt, synthetic construct
  misc_feature 1..19: note = siRNA antisense sequence
  source 1..19: mol_type = other RNA
gtgagtcttgaaggcagtg

SEQ ID NO: 49734 - RNA, 19 nt, synthetic construct
  misc_feature 1..19: note = siRNA sense sequence
  source 1..19: mol_type = other RNA
actgccttcaagactcact

SEQ ID NO: 49735 - RNA, 19 nt, synthetic construct
  misc_feature 1..19: note = siRNA antisense sequence
  source 1..19: mol_type = other RNA
agtgagtcttgaaggcagt

SEQ ID NO: 49736 - RNA, 19 nt, synthetic construct
  misc_feature 1..19: note = siRNA sense sequence
  source 1..19: mol_type = other RNA
ctgccttcaagactcactt

SEQ ID NO: 49737 - RNA, 19 nt, synthetic construct
  misc_feature 1..19: note = siRNA antisense sequence
  source 1..19: mol_type = other RNA
aagtgagtcttgaaggcag

SEQ ID NO: 49738 - RNA, 19 nt, synthetic construct
  misc_feature 1..19: note = siRNA sense sequence
  source 1..19: mol_type = other RNA
caagactcactttctcaca

SEQ ID NO: 49739 - RNA, 19 nt, synthetic construct
  misc_feature 1..19: note = siRNA antisense sequence
  source 1..19: mol_type = other RNA
tgtgagaaagtgagtcttg

SEQ ID NO: 49740 - RNA, 19 nt, synthetic construct
  misc_feature 1..19: note = siRNA sense sequence
  source 1..19: mol_type = other RNA
aatggagtctcgctctgtc

SEQ ID NO: 49741 - RNA, 19 nt, synthetic construct
  misc_feature 1..19: note = siRNA antisense sequence
  source 1..19: mol_type = other RNA
gacagagcgagactccatt

SEQ ID NO: 49742 - RNA, 19 nt, synthetic construct
  misc_feature 1..19: note = siRNA sense sequence
  source 1..19: mol_type = other RNA
atggagtctcgctctgtca

SEQ ID NO: 49743 - RNA, 19 nt, synthetic construct
  misc_feature 1..19: note = siRNA antisense sequence
  source 1..19: mol_type = other RNA
tgacagagcgagactccat

SEQ ID NO: 49744 - RNA, 19 nt, synthetic construct
  misc_feature 1..19: note = siRNA sense sequence
  source 1..19: mol_type = other RNA
agtctcgctctgtcaccca

SEQ ID NO: 49745 - RNA, 19 nt, synthetic construct
  misc_feature 1..19: note = siRNA antisense sequence
  source 1..19: mol_type = other RNA
tgggtgacagagcgagact

SEQ ID NO: 49746 - RNA, 19 nt, synthetic construct
  misc_feature 1..19: note = siRNA sense sequence
  source 1..19: mol_type = other RNA
gtctcgctctgtcacccag

SEQ ID NO: 49747 - RNA, 19 nt, synthetic construct
  misc_feature 1..19: note = siRNA antisense sequence
  source 1..19: mol_type = other RNA
ctgggtgacagagcgagac

SEQ ID NO: 49748 - RNA, 19 nt, synthetic construct
  misc_feature 1..19: note = siRNA sense sequence
  source 1..19: mol_type = other RNA
tctcgctctgtcacccagg

SEQ ID NO: 49749 - RNA, 19 nt, synthetic construct
  misc_feature 1..19: note = siRNA antisense sequence
  source 1..19: mol_type = other RNA
cctgggtgacagagcgaga

SEQ ID NO: 49750 - RNA, 19 nt, synthetic construct
  misc_feature 1..19: note = siRNA sense sequence
  source 1..19: mol_type = other RNA
tcgctctgtcacccaggct

SEQ ID NO: 49751 - RNA, 19 nt, synthetic construct
  misc_feature 1..19: note = siRNA antisense sequence
  source 1..19: mol_type = other RNA
agcctgggtgacagagcga

SEQ ID NO: 49752 - RNA, 19 nt, synthetic construct
  misc_feature 1..19: note = siRNA sense sequence
  source 1..19: mol_type = other RNA
ctctgtcacccaggctgga

SEQ ID NO: 49753 - RNA, 19 nt, synthetic construct
  misc_feature 1..19: note = siRNA antisense sequence
  source 1..19: mol_type = other RNA
tccagcctgggtgacagag

SEQ ID NO: 49754 - RNA, 19 nt, synthetic construct
  misc_feature 1..19: note = siRNA sense sequence
  source 1..19: mol_type = other RNA
tctgtcacccaggctggag

SEQ ID NO: 49755 - RNA, 19 nt, synthetic construct
  misc_feature 1..19: note = siRNA antisense sequence
  source 1..19: mol_type = other RNA
ctccagcctgggtgacaga

SEQ ID NO: 49756 - RNA, 19 nt, synthetic construct
  misc_feature 1..19: note = siRNA sense sequence
  source 1..19: mol_type = other RNA
cacccaggctggagtgaag

SEQ ID NO: 49757 - RNA, 19 nt, synthetic construct
  misc_feature 1..19: note = siRNA antisense sequence
  source 1..19: mol_type = other RNA
cttcactccagcctgggtg

SEQ ID NO: 49758 - RNA, 19 nt, synthetic construct
  misc_feature 1..19: note = siRNA sense sequence
  source 1..19: mol_type = other RNA
acccaggctggagtgaagt

SEQ ID NO: 49759 - RNA, 19 nt, synthetic construct
  misc_feature 1..19: note = siRNA antisense sequence
  source 1..19: mol_type = other RNA
acttcactccagcctgggt

SEQ ID NO: 49760 - RNA, 19 nt, synthetic construct
  misc_feature 1..19: note = siRNA sense sequence
  source 1..19: mol_type = other RNA
cccaggctggagtgaagtg

SEQ ID NO: 49761 - RNA, 19 nt, synthetic construct
  misc_feature 1..19: note = siRNA antisense sequence
  source 1..19: mol_type = other RNA
cacttcactccagcctggg

SEQ ID NO: 49762 - RNA, 19 nt, synthetic construct
  misc_feature 1..19: note = siRNA sense sequence
  source 1..19: mol_type = other RNA
cgatctcggctcactgcaa

SEQ ID NO: 49763 - RNA, 19 nt, synthetic construct
  misc_feature 1..19: note = siRNA antisense sequence
  source 1..19: mol_type = other RNA
ttgcagtgagccgagatcg

SEQ ID NO: 49764 - RNA, 19 nt, synthetic construct
  misc_feature 1..19: note = siRNA sense sequence
  source 1..19: mol_type = other RNA
gatctcggctcactgcaac

SEQ ID NO: 49765 - RNA, 19 nt, synthetic construct
  misc_feature 1..19: note = siRNA antisense sequence
  source 1..19: mol_type = other RNA
gttgcagtgagccgagatc

SEQ ID NO: 49766 - RNA, 19 nt, synthetic construct
  misc_feature 1..19: note = siRNA sense sequence
  source 1..19: mol_type = other RNA
atctcggctcactgcaacc

SEQ ID NO: 49767 - RNA, 19 nt, synthetic construct
  misc_feature 1..19: note = siRNA antisense sequence
  source 1..19: mol_type = other RNA
ggttgcagtgagccgagat

SEQ ID NO: 49768 - RNA, 19 nt, synthetic construct
  misc_feature 1..19: note = siRNA sense sequence
  source 1..19: mol_type = other RNA
tctcggctcactgcaacct

SEQ ID NO: 49769 - RNA, 19 nt, synthetic construct
  misc_feature 1..19: note = siRNA antisense sequence
  source 1..19: mol_type = other RNA
aggttgcagtgagccgaga

SEQ ID NO: 49770 - RNA, 19 nt, synthetic construct
  misc_feature 1..19: note = siRNA sense sequence
  source 1..19: mol_type = other RNA
caggatcaagcaattctcc

SEQ ID NO: 49771 - RNA, 19 nt, synthetic construct
  misc_feature 1..19: note = siRNA antisense sequence
  source 1..19: mol_type = other RNA
ggagaattgcttgatcctg

SEQ ID NO: 49772 - RNA, 19 nt, synthetic construct
  misc_feature 1..19: note = siRNA sense sequence
  source 1..19: mol_type = other RNA
ggatcaagcaattctcctg

SEQ ID NO: 49773 - RNA, 19 nt, synthetic construct
  misc_feature 1..19: note = siRNA antisense sequence
  source 1..19: mol_type = other RNA
caggagaattgcttgatcc

SEQ ID NO: 49774 - RNA, 19 nt, synthetic construct
  misc_feature 1..19: note = siRNA sense sequence
  source 1..19: mol_type = other RNA
gatcaagcaattctcctgc

SEQ ID NO: 49775 - RNA, 19 nt, synthetic construct
  misc_feature 1..19: note = siRNA antisense sequence
  source 1..19: mol_type = other RNA
gcaggagaattgcttgatc

SEQ ID NO: 49776 - RNA, 19 nt, synthetic construct
  misc_feature 1..19: note = siRNA sense sequence
  source 1..19: mol_type = other RNA
atcaagcaattctcctgcc

SEQ ID NO: 49777 - RNA, 19 nt, synthetic construct
  misc_feature 1..19: note = siRNA antisense sequence
  source 1..19: mol_type = other RNA
ggcaggagaattgcttgat

SEQ ID NO: 49778 - RNA, 19 nt, synthetic construct
  misc_feature 1..19: note = siRNA sense sequence
  source 1..19: mol_type = other RNA
tcaagcaattctcctgcct

SEQ ID NO: 49779 - RNA, 19 nt, synthetic construct
  misc_feature 1..19: note = siRNA antisense sequence
  source 1..19: mol_type = other RNA
aggcaggagaattgcttga

SEQ ID NO: 49780 - RNA, 19 nt, synthetic construct
  misc_feature 1..19: note = siRNA sense sequence
  source 1..19: mol_type = other RNA
ctgcctcagcctcccaagt

SEQ ID NO: 49781 - RNA, 19 nt, synthetic construct
  misc_feature 1..19: note = siRNA antisense sequence
  source 1..19: mol_type = other RNA
acttgggaggctgaggcag

SEQ ID NO: 49782 - RNA, 19 nt, synthetic construct
  misc_feature 1..19: note = siRNA sense sequence
  source 1..19: mol_type = other RNA
tgcctcagcctcccaagta

SEQ ID NO: 49783 - RNA, 19 nt, synthetic construct
  misc_feature 1..19: note = siRNA antisense sequence
  source 1..19: mol_type = other RNA
tacttgggaggctgaggca

SEQ ID NO: 49784 - RNA, 19 nt, synthetic construct
  misc_feature 1..19: note = siRNA sense sequence
  source 1..19: mol_type = other RNA
gcctcagcctcccaagtag

SEQ ID NO: 49785 - RNA, 19 nt, synthetic construct
  misc_feature 1..19: note = siRNA antisense sequence
  source 1..19: mol_type = other RNA
ctacttgggaggctgaggc

SEQ ID NO: 49786 - RNA, 19 nt, synthetic construct
  misc_feature 1..19: note = siRNA sense sequence
  source 1..19: mol_type = other RNA
cctcagcctcccaagtagc

SEQ ID NO: 49787 - RNA, 19 nt, synthetic construct
  misc_feature 1..19: note = siRNA antisense sequence
  source 1..19: mol_type = other RNA
gctacttgggaggctgagg

SEQ ID NO: 49788 - RNA, 19 nt, synthetic construct
  misc_feature 1..19: note = siRNA sense sequence
  source 1..19: mol_type = other RNA
ctcagcctcccaagtagct

SEQ ID NO: 49789 - RNA, 19 nt, synthetic construct
  misc_feature 1..19: note = siRNA antisense sequence
  source 1..19: mol_type = other RNA
agctacttgggaggctgag

SEQ ID NO: 49790 - RNA, 19 nt, synthetic construct
  misc_feature 1..19: note = siRNA sense sequence
  source 1..19: mol_type = other RNA
ccaagtagctgggaccaca

SEQ ID NO: 49791 - RNA, 19 nt, synthetic construct
  misc_feature 1..19: note = siRNA antisense sequence
  source 1..19: mol_type = other RNA
tgtggtcccagctacttgg

SEQ ID NO: 49792 - RNA, 19 nt, synthetic construct
  misc_feature 1..19: note = siRNA sense sequence
  source 1..19: mol_type = other RNA
gggatccacctgccttgac

SEQ ID NO: 49793 - RNA, 19 nt, synthetic construct
  misc_feature 1..19: note = siRNA antisense sequence
  source 1..19: mol_type = other RNA
gtcaaggcaggtggatccc

SEQ ID NO: 49794 - RNA, 19 nt, synthetic construct
  misc_feature 1..19: note = siRNA sense sequence
  source 1..19: mol_type = other RNA
ggatccacctgccttgacc

SEQ ID NO: 49795 - RNA, 19 nt, synthetic construct
  misc_feature 1..19: note = siRNA antisense sequence
  source 1..19: mol_type = other RNA
ggtcaaggcaggtggatcc

SEQ ID NO: 49796 - RNA, 19 nt, synthetic construct
  misc_feature 1..19: note = siRNA sense sequence
  source 1..19: mol_type = other RNA
ccttgacctcccaaagtgc

SEQ ID NO: 49797 - RNA, 19 nt, synthetic construct
  misc_feature 1..19: note = siRNA antisense sequence
  source 1..19: mol_type = other RNA
gcactttgggaggtcaagg

SEQ ID NO: 49798 - RNA, 19 nt, synthetic construct
  misc_feature 1..19: note = siRNA sense sequence
  source 1..19: mol_type = other RNA
cttgacctcccaaagtgct

SEQ ID NO: 49799 - RNA, 19 nt, synthetic construct
  misc_feature 1..19: note = siRNA antisense sequence
  source 1..19: mol_type = other RNA
agcactttgggaggtcaag

SEQ ID NO: 49800 - RNA, 19 nt, synthetic construct
  misc_feature 1..19: note = siRNA sense sequence
  source 1..19: mol_type = other RNA
ccaaagtgctgggattaca

SEQ ID NO: 49801 - RNA, 19 nt, synthetic construct
  misc_feature 1..19: note = siRNA antisense sequence
  source 1..19: mol_type = other RNA
tgtaatcccagcactttgg

SEQ ID NO: 49802 - RNA, 19 nt, synthetic construct
  misc_feature 1..19: note = siRNA sense sequence
  source 1..19: mol_type = other RNA
caaagtgctgggattacag

SEQ ID NO: 49803 - RNA, 19 nt, synthetic construct
  misc_feature 1..19: note = siRNA antisense sequence
  source 1..19: mol_type = other RNA
ctgtaatcccagcactttg

SEQ ID NO: 49804 - RNA, 19 nt, synthetic construct
  misc_feature 1..19: note = siRNA sense sequence
  source 1..19: mol_type = other RNA
gtgctgggattacaggcgt

SEQ ID NO: 49805 - RNA, 19 nt, synthetic construct
  misc_feature 1..19: note = siRNA antisense sequence
  source 1..19: mol_type = other RNA
acgcctgtaatcccagcac

SEQ ID NO: 49806 - RNA, 19 nt, synthetic construct
  misc_feature 1..19: note = siRNA sense sequence
  source 1..19: mol_type = other RNA
tgctgggattacaggcgtg

SEQ ID NO: 49807 - RNA, 19 nt, synthetic construct
  misc_feature 1..19: note = siRNA antisense sequence
  source 1..19: mol_type = other RNA
cacgcctgtaatcccagca

SEQ ID NO: 49808 - RNA, 19 nt, synthetic construct
  misc_feature 1..19: note = siRNA sense sequence
  source 1..19: mol_type = other RNA
gctgggattacaggcgtga

SEQ ID NO: 49809 - RNA, 19 nt, synthetic construct
  misc_feature 1..19: note = siRNA antisense sequence
  source 1..19: mol_type = other RNA
tcacgcctgtaatcccagc

SEQ ID NO: 49810 - RNA, 19 nt, synthetic construct
  misc_feature 1..19: note = siRNA sense sequence
  source 1..19: mol_type = other RNA
ctgggattacaggcgtgag

SEQ ID NO: 49811 - RNA, 19 nt, synthetic construct
  misc_feature 1..19: note = siRNA antisense sequence
  source 1..19: mol_type = other RNA
ctcacgcctgtaatcccag

SEQ ID NO: 49812 - RNA, 19 nt, synthetic construct
  misc_feature 1..19: note = siRNA sense sequence
  source 1..19: mol_type = other RNA
tgggattacaggcgtgagc

SEQ ID NO: 49813 - RNA, 19 nt, synthetic construct
  misc_feature 1..19: note = siRNA antisense sequence
  source 1..19: mol_type = other RNA
gctcacgcctgtaatccca

SEQ ID NO: 49814 - RNA, 19 nt, synthetic construct
  misc_feature 1..19: note = siRNA sense sequence
  source 1..19: mol_type = other RNA
attacaggcgtgagccacc

SEQ ID NO: 49815 - RNA, 19 nt, synthetic construct
  misc_feature 1..19: note = siRNA antisense sequence
  source 1..19: mol_type = other RNA
ggtggctcacgcctgtaat

SEQ ID NO: 49816 - RNA, 19 nt, synthetic construct
  misc_feature 1..19: note = siRNA sense sequence
  source 1..19: mol_type = other RNA
ttacaggcgtgagccaccg

SEQ ID NO: 49817 - RNA, 19 nt, synthetic construct
  misc_feature 1..19: note = siRNA antisense sequence
  source 1..19: mol_type = other RNA
cggtggctcacgcctgtaa

SEQ ID NO: 49818 - RNA, 19 nt, synthetic construct
  misc_feature 1..19: note = siRNA sense sequence
  source 1..19: mol_type = other RNA
caagtctttcgtagattat

SEQ ID NO: 49819 - RNA, 19 nt, synthetic construct
  misc_feature 1..19: note = siRNA antisense sequence
  source 1..19: mol_type = other RNA
ataatctacgaaagacttg

SEQ ID NO: 49820 - RNA, 19 nt, synthetic construct
  misc_feature 1..19: note = siRNA sense sequence
  source 1..19: mol_type = other RNA
atctgtatccttcttaatc

SEQ ID NO: 49821 - RNA, 19 nt, synthetic construct
  misc_feature 1..19: note = siRNA antisense sequence
  source 1..19: mol_type = other RNA
gattaagaaggatacagat

SEQ ID NO: 49822 - RNA, 19 nt, synthetic construct
  misc_feature 1..19: note = siRNA sense sequence
  source 1..19: mol_type = other RNA
tctgtatccttcttaatca

SEQ ID NO: 49823 - RNA, 19 nt, synthetic construct
  misc_feature 1..19: note = siRNA antisense sequence
  source 1..19: mol_type = other RNA
tgattaagaaggatacaga

SEQ ID NO: 49824 - RNA, 19 nt, synthetic construct
  misc_feature 1..19: note = siRNA sense sequence
  source 1..19: mol_type = other RNA
ctgtatccttcttaatcaa

SEQ ID NO: 49825 - RNA, 19 nt, synthetic construct
  misc_feature 1..19: note = siRNA antisense sequence
  source 1..19: mol_type = other RNA
ttgattaagaaggatacag

SEQ ID NO: 49826 - RNA, 19 nt, synthetic construct
  misc_feature 1..19: note = siRNA sense sequence
  source 1..19: mol_type = other RNA
ctaccattctaaatctaac

SEQ ID NO: 49827 - RNA, 19 nt, synthetic construct
  misc_feature 1..19: note = siRNA antisense sequence
  source 1..19: mol_type = other RNA
gttagatttagaatggtag

SEQ ID NO: 49828 - RNA, 19 nt, synthetic construct
  misc_feature 1..19: note = siRNA sense sequence
  source 1..19: mol_type = other RNA
ggcagccctcaagcccatt

SEQ ID NO: 49829 - RNA, 19 nt, synthetic construct
  misc_feature 1..19: note = siRNA antisense sequence
  source 1..19: mol_type = other RNA
aatgggcttgagggctgcc

SEQ ID NO: 49830 - RNA, 19 nt, synthetic construct
  misc_feature 1..19: note = siRNA sense sequence
  source 1..19: mol_type = other RNA
gcagccctcaagcccattg

SEQ ID NO: 49831 - RNA, 19 nt, synthetic construct
  misc_feature 1..19: note = siRNA antisense sequence
  source 1..19: mol_type = other RNA
caatgggcttgagggctgc

SEQ ID NO: 49832 - RNA, 19 nt, synthetic construct
  misc_feature 1..19: note = siRNA sense sequence
  source 1..19: mol_type = other RNA
cagccctcaagcccattgc

SEQ ID NO: 49833 - RNA, 19 nt, synthetic construct
  misc_feature 1..19: note = siRNA antisense sequence
  source 1..19: mol_type = other RNA
gcaatgggcttgagggctg

SEQ ID NO: 49834 - RNA, 19 nt, synthetic construct
  misc_feature 1..19: note = siRNA sense sequence
  source 1..19: mol_type = other RNA
agccctcaagcccattgcc

SEQ ID NO: 49835 - RNA, 19 nt, synthetic construct
  misc_feature 1..19: note = siRNA antisense sequence
  source 1..19: mol_type = other RNA
ggcaatgggcttgagggct

SEQ ID NO: 49836 - RNA, 19 nt, synthetic construct
  misc_feature 1..19: note = siRNA sense sequence
  source 1..19: mol_type = other RNA
ccctcaagcccattgccct

SEQ ID NO: 49837 - RNA, 19 nt, synthetic construct
  misc_feature 1..19: note = siRNA antisense sequence
  source 1..19: mol_type = other RNA
agggcaatgggcttgaggg

SEQ ID NO: 49838 - RNA, 19 nt, synthetic construct
  misc_feature 1..19: note = siRNA sense sequence
  source 1..19: mol_type = other RNA
cctcaagcccattgccctt

SEQ ID NO: 49839 - RNA, 19 nt, synthetic construct
  misc_feature 1..19: note = siRNA antisense sequence
  source 1..19: mol_type = other RNA
aagggcaatgggcttgagg

SEQ ID NO: 49840 - RNA, 19 nt, synthetic construct
  misc_feature 1..19: note = siRNA sense sequence
  source 1..19: mol_type = other RNA
aagcccattgcccttgtgc

SEQ ID NO: 49841 - RNA, 19 nt, synthetic construct
  misc_feature 1..19: note = siRNA antisense sequence
  source 1..19: mol_type = other RNA
gcacaagggcaatgggctt

SEQ ID NO: 49842 - RNA, 19 nt, synthetic construct
  misc_feature 1..19: note = siRNA sense sequence
  source 1..19: mol_type = other RNA
agcccattgcccttgtgcc

SEQ ID NO: 49843 - RNA, 19 nt, synthetic construct
  misc_feature 1..19: note = siRNA antisense sequence
  source 1..19: mol_type = other RNA
ggcacaagggcaatgggct

SEQ ID NO: 49844 - RNA, 19 nt, synthetic construct
  misc_feature 1..19: note = siRNA sense sequence
  source 1..19: mol_type = other RNA
cccattgcccttgtgccca

SEQ ID NO: 49845 - RNA, 19 nt, synthetic construct
  misc_feature 1..19: note = siRNA antisense sequence
  source 1..19: mol_type = other RNA
tgggcacaagggcaatggg

SEQ ID NO: 49846 - RNA, 19 nt, synthetic construct
  misc_feature 1..19: note = siRNA sense sequence
  source 1..19: mol_type = other RNA
ccattgcccttgtgcccac

SEQ ID NO: 49847 - RNA, 19 nt, synthetic construct
  misc_feature 1..19: note = siRNA antisense sequence
  source 1..19: mol_type = other RNA
gtgggcacaagggcaatgg

SEQ ID NO: 49848 - RNA, 19 nt, synthetic construct
  misc_feature 1..19: note = siRNA sense sequence
  source 1..19: mol_type = other RNA
cattgcccttgtgcccact

SEQ ID NO: 49849 - RNA, 19 nt, synthetic construct
  misc_feature 1..19: note = siRNA antisense sequence
  source 1..19: mol_type = other RNA
agtgggcacaagggcaatg

SEQ ID NO: 49850 - RNA, 19 nt, synthetic construct
  misc_feature 1..19: note = siRNA sense sequence
  source 1..19: mol_type = other RNA
attgcccttgtgcccacta

SEQ ID NO: 49851 - RNA, 19 nt, synthetic construct
  misc_feature 1..19: note = siRNA antisense sequence
  source 1..19: mol_type = other RNA
tagtgggcacaagggcaat

SEQ ID NO: 49852 - RNA, 19 nt, synthetic construct
  misc_feature 1..19: note = siRNA sense sequence
  source 1..19: mol_type = other RNA
ttgcccttgtgcccactat

SEQ ID NO: 49853 - RNA, 19 nt, synthetic construct
  misc_feature 1..19: note = siRNA antisense sequence
  source 1..19: mol_type = other RNA
atagtgggcacaagggcaa

SEQ ID NO: 49854 - RNA, 19 nt, synthetic construct
  misc_feature 1..19: note = siRNA sense sequence
  source 1..19: mol_type = other RNA
tgcccttgtgcccactatc

SEQ ID NO: 49855 - RNA, 19 nt, synthetic construct
  misc_feature 1..19: note = siRNA antisense sequence
  source 1..19: mol_type = other RNA
gatagtgggcacaagggca

SEQ ID NO: 49856 - RNA, 19 nt, synthetic construct
  misc_feature 1..19: note = siRNA sense sequence
  source 1..19: mol_type = other RNA
gcccttgtgcccactatcc

SEQ ID NO: 49857 - RNA, 19 nt, synthetic construct
  misc_feature 1..19: note = siRNA antisense sequence
  source 1..19: mol_type = other RNA
ggatagtgggcacaagggc

SEQ ID NO: 49858 - RNA, 19 nt, synthetic construct
  misc_feature 1..19: note = siRNA sense sequence
  source 1..19: mol_type = other RNA
ccactatcctcccaggcca

SEQ ID NO: 49859 - RNA, 19 nt, synthetic construct
  misc_feature 1..19: note = siRNA antisense sequence
  source 1..19: mol_type = other RNA
tggcctgggaggatagtgg

SEQ ID NO: 49860 - RNA, 19 nt, synthetic construct
  misc_feature 1..19: note = siRNA sense sequence
  source 1..19: mol_type = other RNA
cactatcctcccaggccac

SEQ ID NO: 49861 - RNA, 19 nt, synthetic construct
  misc_feature 1..19: note = siRNA antisense sequence
  source 1..19: mol_type = other RNA
gtggcctgggaggatagtg

SEQ ID NO: 49862 - RNA, 19 nt, synthetic construct
  misc_feature 1..19: note = siRNA sense sequence
  source 1..19: mol_type = other RNA
actatcctcccaggccaca

SEQ ID NO: 49863 - RNA, 19 nt, synthetic construct
  misc_feature 1..19: note = siRNA antisense sequence
  source 1..19: mol_type = other RNA
tgtggcctgggaggatagt

SEQ ID NO: 49864 - RNA, 19 nt, synthetic construct
  misc_feature 1..19: note = siRNA sense sequence
  source 1..19: mol_type = other RNA
tggtcggaagggtgcttga

SEQ ID NO: 49865 - RNA, 19 nt, synthetic construct
  misc_feature 1..19: note = siRNA antisense sequence
  source 1..19: mol_type = other RNA
tcaagcacccttccgacca

SEQ ID NO: 49866 - RNA, 19 nt, synthetic construct
  misc_feature 1..19: note = siRNA sense sequence
  source 1..19: mol_type = other RNA
ggtcggaagggtgcttgag

SEQ ID NO: 49867 - RNA, 19 nt, synthetic construct
  misc_feature 1..19: note = siRNA antisense sequence
  source 1..19: mol_type = other RNA
ctcaagcacccttccgacc

SEQ ID NO: 49868 - RNA, 19 nt, synthetic construct
  misc_feature 1..19: note = siRNA sense sequence
  source 1..19: mol_type = other RNA
gtcggaagggtgcttgagg

SEQ ID NO: 49869 - RNA, 19 nt, synthetic construct
  misc_feature 1..19: note = siRNA antisense sequence
  source 1..19: mol_type = other RNA
cctcaagcacccttccgac

SEQ ID NO: 49870 - RNA, 19 nt, synthetic construct
  misc_feature 1..19: note = siRNA sense sequence
  source 1..19: mol_type = other RNA
tcggaagggtgcttgaggt

SEQ ID NO: 49871 - RNA, 19 nt, synthetic construct
  misc_feature 1..19: note = siRNA antisense sequence
  source 1..19: mol_type = other RNA
acctcaagcacccttccga

SEQ ID NO: 49872 - RNA, 19 nt, synthetic construct
  misc_feature 1..19: note = siRNA sense sequence
  source 1..19: mol_type = other RNA
cggaagggtgcttgaggtc

SEQ ID NO: 49873 - RNA, 19 nt, synthetic construct
  misc_feature 1..19: note = siRNA antisense sequence
  source 1..19: mol_type = other RNA
gacctcaagcacccttccg

SEQ ID NO: 49874 - RNA, 19 nt, synthetic construct
  misc_feature 1..19: note = siRNA sense sequence
  source 1..19: mol_type = other RNA
aagggtgcttgaggtctgt

SEQ ID NO: 49875 - RNA, 19 nt, synthetic construct
  misc_feature 1..19: note = siRNA antisense sequence
  source 1..19: mol_type = other RNA
acagacctcaagcaccctt

SEQ ID NO: 49876 - RNA, 19 nt, synthetic construct
  misc_feature 1..19: note = siRNA sense sequence
  source 1..19: mol_type = other RNA
agggtgcttgaggtctgtt

SEQ ID NO: 49877 - RNA, 19 nt, synthetic construct
  misc_feature 1..19: note = siRNA antisense sequence
  source 1..19: mol_type = other RNA
aacagacctcaagcaccct

SEQ ID NO: 49878 - RNA, 19 nt, synthetic construct
  misc_feature 1..19: note = siRNA sense sequence
  source 1..19: mol_type = other RNA
gggtgcttgaggtctgttt

SEQ ID NO: 49879 - RNA, 19 nt, synthetic construct
  misc_feature 1..19: note = siRNA antisense sequence
  source 1..19: mol_type = other RNA
aaacagacctcaagcaccc

SEQ ID NO: 49880 - RNA, 19 nt, synthetic construct
  misc_feature 1..19: note = siRNA sense sequence
  source 1..19: mol_type = other RNA
ggtgcttgaggtctgtttt

SEQ ID NO: 49881 - RNA, 19 nt, synthetic construct
  misc_feature 1..19: note = siRNA antisense sequence
  source 1..19: mol_type = other RNA
aaaacagacctcaagcacc

SEQ ID NO: 49882 - RNA, 19 nt, synthetic construct
  misc_feature 1..19: note = siRNA sense sequence
  source 1..19: mol_type = other RNA
gtgcttgaggtctgttttg

SEQ ID NO: 49883 - RNA, 19 nt, synthetic construct
  misc_feature 1..19: note = siRNA antisense sequence
  source 1..19: mol_type = other RNA
caaaacagacctcaagcac

SEQ ID NO: 49884 - RNA, 19 nt, synthetic construct
  misc_feature 1..19: note = siRNA sense sequence
  source 1..19: mol_type = other RNA
gcttgaggtctgttttgta

SEQ ID NO: 49885 - RNA, 19 nt, synthetic construct
  misc_feature 1..19: note = siRNA antisense sequence
  source 1..19: mol_type = other RNA
tacaaaacagacctcaagc

SEQ ID NO: 49886 - RNA, 19 nt, synthetic construct
  misc_feature 1..19: note = siRNA sense sequence
  source 1..19: mol_type = other RNA
cttgaggtctgttttgtaa

SEQ ID NO: 49887 - RNA, 19 nt, synthetic construct
  misc_feature 1..19: note = siRNA antisense sequence
  source 1..19: mol_type = other RNA
ttacaaaacagacctcaag

SEQ ID NO: 49888 - RNA, 19 nt, synthetic construct
  misc_feature 1..19: note = siRNA sense sequence
  source 1..19: mol_type = other RNA
ttgaggtctgttttgtaac

SEQ ID NO: 49889 - RNA, 19 nt, synthetic construct
  misc_feature 1..19: note = siRNA antisense sequence
  source 1..19: mol_type = other RNA
gttacaaaacagacctcaa

SEQ ID NO: 49890 - RNA, 19 nt, synthetic construct
  misc_feature 1..19: note = siRNA sense sequence
  source 1..19: mol_type = other RNA
acaggactttgaaggcagc

SEQ ID NO: 49891 - RNA, 19 nt, synthetic construct
  misc_feature 1..19: note = siRNA antisense sequence
  source 1..19: mol_type = other RNA
gctgccttcaaagtcctgt

SEQ ID NO: 49892 - RNA, 19 nt, synthetic construct
  misc_feature 1..19: note = siRNA sense sequence
  source 1..19: mol_type = other RNA
caggactttgaaggcagca

SEQ ID NO: 49893 - RNA, 19 nt, synthetic construct
  misc_feature 1..19: note = siRNA antisense sequence
  source 1..19: mol_type = other RNA
tgctgccttcaaagtcctg

SEQ ID NO: 49894 - RNA, 19 nt, synthetic construct
  misc_feature 1..19: note = siRNA sense sequence
  source 1..19: mol_type = other RNA
ctttgaaggcagcaccatg

SEQ ID NO: 49895 - RNA, 19 nt, synthetic construct
  misc_feature 1..19: note = siRNA antisense sequence
  source 1..19: mol_type = other RNA
catggtgctgccttcaaag

SEQ ID NO: 49896 - RNA, 19 nt, synthetic construct
  misc_feature 1..19: note = siRNA sense sequence
  source 1..19: mol_type = other RNA
tttgaaggcagcaccatgg

SEQ ID NO: 49897 - RNA, 19 nt, synthetic construct
  misc_feature 1..19: note = siRNA antisense sequence
  source 1..19: mol_type = other RNA
ccatggtgctgccttcaaa

SEQ ID NO: 49898 - RNA, 19 nt, synthetic construct
  misc_feature 1..19: note = siRNA sense sequence
  source 1..19: mol_type = other RNA
ttgaaggcagcaccatgga

SEQ ID NO: 49899 - RNA, 19 nt, synthetic construct
  misc_feature 1..19: note = siRNA antisense sequence
  source 1..19: mol_type = other RNA
tccatggtgctgccttcaa

SEQ ID NO: 49900 - RNA, 19 nt, synthetic construct
  misc_feature 1..19: note = siRNA sense sequence
  source 1..19: mol_type = other RNA
aggcagcaccatggagctc

SEQ ID NO: 49901 - RNA, 19 nt, synthetic construct
  misc_feature 1..19: note = siRNA antisense sequence
  source 1..19: mol_type = other RNA
gagctccatggtgctgcct

SEQ ID NO: 49902 - RNA, 19 nt, synthetic construct
  misc_feature 1..19: note = siRNA sense sequence
  source 1..19: mol_type = other RNA
ggcagcaccatggagctct

SEQ ID NO: 49903 - RNA, 19 nt, synthetic construct
  misc_feature 1..19: note = siRNA antisense sequence
  source 1..19: mol_type = other RNA
agagctccatggtgctgcc

SEQ ID NO: 49904 - RNA, 19 nt, synthetic construct
  misc_feature 1..19: note = siRNA sense sequence
  source 1..19: mol_type = other RNA
gcagcaccatggagctctt

SEQ ID NO: 49905 - RNA, 19 nt, synthetic construct
  misc_feature 1..19: note = siRNA antisense sequence
  source 1..19: mol_type = other RNA
aagagctccatggtgctgc

SEQ ID NO: 49906 - RNA, 19 nt, synthetic construct
  misc_feature 1..19: note = siRNA sense sequence
  source 1..19: mol_type = other RNA
cagcaccatggagctcttc

SEQ ID NO: 49907 - RNA, 19 nt, synthetic construct
  misc_feature 1..19: note = siRNA antisense sequence
  source 1..19: mol_type = other RNA
gaagagctccatggtgctg

SEQ ID NO: 49908 - RNA, 19 nt, synthetic construct
  misc_feature 1..19: note = siRNA sense sequence
  source 1..19: mol_type = other RNA
agcaccatggagctcttcg

SEQ ID NO: 49909 - RNA, 19 nt, synthetic construct
  misc_feature 1..19: note = siRNA antisense sequence
  source 1..19: mol_type = other RNA
cgaagagctccatggtgct

SEQ ID NO: 49910 - RNA, 19 nt, synthetic construct
  misc_feature 1..19: note = siRNA sense sequence
  source 1..19: mol_type = other RNA
gcaccatggagctcttcgt

SEQ ID NO: 49911 - RNA, 19 nt, synthetic construct
  misc_feature 1..19: note = siRNA antisense sequence
  source 1..19: mol_type = other RNA
acgaagagctccatggtgc

SEQ ID NO: 49912 - RNA, 19 nt, synthetic construct
  misc_feature 1..19: note = siRNA sense sequence
  source 1..19: mol_type = other RNA
accatggagctcttcgttt

SEQ ID NO: 49913 - RNA, 19 nt, synthetic construct
  misc_feature 1..19: note = siRNA antisense sequence
  source 1..19: mol_type = other RNA
aaacgaagagctccatggt

SEQ ID NO: 49914 - RNA, 19 nt, synthetic construct
  misc_feature 1..19: note = siRNA sense sequence
  source 1..19: mol_type = other RNA
ccatggagctcttcgtttt

SEQ ID NO: 49915 - RNA, 19 nt, synthetic construct
  misc_feature 1..19: note = siRNA antisense sequence
  source 1..19: mol_type = other RNA
aaaacgaagagctccatgg

SEQ ID NO: 49916 - RNA, 19 nt, synthetic construct
  misc_feature 1..19: note = siRNA sense sequence
  source 1..19: mol_type = other RNA
aaattcctgtaccttcatg

SEQ ID NO: 49917 - RNA, 19 nt, synthetic construct
  misc_feature 1..19: note = siRNA antisense sequence
  source 1..19: mol_type = other RNA
catgaaggtacaggaattt

SEQ ID NO: 49918 - RNA, 19 nt, synthetic construct
  misc_feature 1..19: note = siRNA sense sequence
  source 1..19: mol_type = other RNA
aattcctgtaccttcatgg

SEQ ID NO: 49919 - RNA, 19 nt, synthetic construct
  misc_feature 1..19: note = siRNA antisense sequence
  source 1..19: mol_type = other RNA
ccatgaaggtacaggaatt

SEQ ID NO: 49920 - RNA, 19 nt, synthetic construct
  misc_feature 1..19: note = siRNA sense sequence
  source 1..19: mol_type = other RNA
attcctgtaccttcatggt

SEQ ID NO: 49921 - RNA, 19 nt, synthetic construct
  misc_feature 1..19: note = siRNA antisense sequence
  source 1..19: mol_type = other RNA
accatgaaggtacaggaat

SEQ ID NO: 49922 - RNA, 19 nt, synthetic construct
  misc_feature 1..19: note = siRNA sense sequence
  source 1..19: mol_type = other RNA
ttcctgtaccttcatggtc

SEQ ID NO: 49923 - RNA, 19 nt, synthetic construct
  misc_feature 1..19: note = siRNA antisense sequence
  source 1..19: mol_type = other RNA
gaccatgaaggtacaggaa

SEQ ID NO: 49924 - RNA, 19 nt, synthetic construct
  misc_feature 1..19: note = siRNA sense sequence
  source 1..19: mol_type = other RNA
tcctgtaccttcatggtca

SEQ ID NO: 49925 - RNA, 19 nt, synthetic construct
  misc_feature 1..19: note = siRNA antisense sequence
  source 1..19: mol_type = other RNA
tgaccatgaaggtacagga

SEQ ID NO: 49926 - RNA, 19 nt, synthetic construct
  misc_feature 1..19: note = siRNA sense sequence
  source 1..19: mol_type = other RNA
cctgtaccttcatggtcac

SEQ ID NO: 49927 - RNA, 19 nt, synthetic construct
  misc_feature 1..19: note = siRNA antisense sequence
  source 1..19: mol_type = other RNA
gtgaccatgaaggtacagg

SEQ ID NO: 49928 - RNA, 19 nt, synthetic construct
  misc_feature 1..19: note = siRNA sense sequence
  source 1..19: mol_type = other RNA
ctgtaccttcatggtcact

SEQ ID NO: 49929 - RNA, 19 nt, synthetic construct
  misc_feature 1..19: note = siRNA antisense sequence
  source 1..19: mol_type = other RNA
agtgaccatgaaggtacag

SEQ ID NO: 49930 - RNA, 19 nt, synthetic construct
  misc_feature 1..19: note = siRNA sense sequence
  source 1..19: mol_type = other RNA
tgtaccttcatggtcactg

SEQ ID NO: 49931 - RNA, 19 nt, synthetic construct
  misc_feature 1..19: note = siRNA antisense sequence
  source 1..19: mol_type = other RNA
cagtgaccatgaaggtaca

SEQ ID NO: 49932 - RNA, 19 nt, synthetic construct
  misc_feature 1..19: note = siRNA sense sequence
  source 1..19: mol_type = other RNA
ttcatggtcactggaggcc

SEQ ID NO: 49933 - RNA, 19 nt, synthetic construct
  misc_feature 1..19: note = siRNA antisense sequence
  source 1..19: mol_type = other RNA
ggcctccagtgaccatgaa

SEQ ID NO: 49934 - RNA, 19 nt, synthetic construct
  misc_feature 1..19: note = siRNA sense sequence
  source 1..19: mol_type = other RNA
tcatggtcactggaggcca

SEQ ID NO: 49935 - RNA, 19 nt, synthetic construct
  misc_feature 1..19: note = siRNA antisense sequence
  source 1..19: mol_type = other RNA
tggcctccagtgaccatga

SEQ ID NO: 49936 - RNA, 19 nt, synthetic construct
  misc_feature 1..19: note = siRNA sense sequence
  source 1..19: mol_type = other RNA
catggtcactggaggccaa

SEQ ID NO: 49937 - RNA, 19 nt, synthetic construct
  misc_feature 1..19: note = siRNA antisense sequence
  source 1..19: mol_type = other RNA
ttggcctccagtgaccatg

SEQ ID NO: 49938 - RNA, 19 nt, synthetic construct
  misc_feature 1..19: note = siRNA sense sequence
  source 1..19: mol_type = other RNA
ccttcttcttagaggattt

SEQ ID NO: 49939 - RNA, 19 nt, synthetic construct
  misc_feature 1..19: note = siRNA antisense sequence
  source 1..19: mol_type = other RNA
aaatcctctaagaagaagg

SEQ ID NO: 49940 - RNA, 19 nt, synthetic construct
  misc_feature 1..19: note = siRNA sense sequence
  source 1..19: mol_type = other RNA
cttcttcttagaggatttg

SEQ ID NO: 49941 - RNA, 19 nt, synthetic construct
  misc_feature 1..19: note = siRNA antisense sequence
  source 1..19: mol_type = other RNA
caaatcctctaagaagaag

SEQ ID NO: 49942 - RNA, 19 nt, synthetic construct
  misc_feature 1..19: note = siRNA sense sequence
  source 1..19: mol_type = other RNA
tcttcttagaggatttgga

SEQ ID NO: 49943 - RNA, 19 nt, synthetic construct
  misc_feature 1..19: note = siRNA antisense sequence
  source 1..19: mol_type = other RNA
tccaaatcctctaagaaga

SEQ ID NO: 49944 - RNA, 19 nt, synthetic construct
  misc_feature 1..19: note = siRNA sense sequence
  source 1..19: mol_type = other RNA
cttcttagaggatttggat

SEQ ID NO: 49945 - RNA, 19 nt, synthetic construct
  misc_feature 1..19: note = siRNA antisense sequence
  source 1..19: mol_type = other RNA
atccaaatcctctaagaag

SEQ ID NO: 49946 - RNA, 19 nt, synthetic construct
  misc_feature 1..19: note = siRNA sense sequence
  source 1..19: mol_type = other RNA
ttcttagaggatttggata

SEQ ID NO: 49947 - RNA, 19 nt, synthetic construct
  misc_feature 1..19: note = siRNA antisense sequence
  source 1..19: mol_type = other RNA
tatccaaatcctctaagaa

SEQ ID NO: 49948 - RNA, 19 nt, synthetic construct
  misc_feature 1..19: note = siRNA sense sequence
  source 1..19: mol_type = other RNA
tcttagaggatttggatat

SEQ ID NO: 49949 - RNA, 19 nt, synthetic construct
  misc_feature 1..19: note = siRNA antisense sequence
  source 1..19: mol_type = other RNA
atatccaaatcctctaaga

SEQ ID NO: 49950 - RNA, 19 nt, synthetic construct
  misc_feature 1..19: note = siRNA sense sequence
  source 1..19: mol_type = other RNA
ttagaggatttggatattc

SEQ ID NO: 49951 - RNA, 19 nt, synthetic construct
  misc_feature 1..19: note = siRNA antisense sequence
  source 1..19: mol_type = other RNA
gaatatccaaatcctctaa

SEQ ID NO: 49952 - RNA, 19 nt, synthetic construct
  misc_feature 1..19: note = siRNA sense sequence
  source 1..19: mol_type = other RNA
tagaggatttggatattct

SEQ ID NO: 49953 - RNA, 19 nt, synthetic construct
  misc_feature 1..19: note = siRNA antisense sequence
  source 1..19: mol_type = other RNA
agaatatccaaatcctcta

SEQ ID NO: 49954 - RNA, 19 nt, synthetic construct
  misc_feature 1..19: note = siRNA sense sequence
  source 1..19: mol_type = other RNA
aatcaagcaatagcaaagg

SEQ ID NO: 49955 - RNA, 19 nt, synthetic construct
  misc_feature 1..19: note = siRNA antisense sequence
  source 1..19: mol_type = other RNA
cctttgctattgcttgatt

SEQ ID NO: 49956 - RNA, 19 nt, synthetic construct
  misc_feature 1..19: note = siRNA sense sequence
  source 1..19: mol_type = other RNA
tcaagcaatagcaaagggc

SEQ ID NO: 49957 - RNA, 19 nt, synthetic construct
  misc_feature 1..19: note = siRNA antisense sequence
  source 1..19: mol_type = other RNA
gccctttgctattgcttga

SEQ ID NO: 49958 - RNA, 19 nt, synthetic construct
  misc_feature 1..19: note = siRNA sense sequence
  source 1..19: mol_type = other RNA
gcaatagcaaagggctcag

SEQ ID NO: 49959 - RNA, 19 nt, synthetic construct
  misc_feature 1..19: note = siRNA antisense sequence
  source 1..19: mol_type = other RNA
ctgagccctttgctattgc

SEQ ID NO: 49960 - RNA, 19 nt, synthetic construct
  misc_feature 1..19: note = siRNA sense sequence
  source 1..19: mol_type = other RNA
caatagcaaagggctcagt

SEQ ID NO: 49961 - RNA, 19 nt, synthetic construct
  misc_feature 1..19: note = siRNA antisense sequence
  source 1..19: mol_type = other RNA
actgagccctttgctattg

SEQ ID NO: 49962 - RNA, 19 nt, synthetic construct
  misc_feature 1..19: note = siRNA sense sequence
  source 1..19: mol_type = other RNA
aatagcaaagggctcagtg

SEQ ID NO: 49963 - RNA, 19 nt, synthetic construct
  misc_feature 1..19: note = siRNA antisense sequence
  source 1..19: mol_type = other RNA
cactgagccctttgctatt

SEQ ID NO: 49964 - RNA, 19 nt, synthetic construct
  misc_feature 1..19: note = siRNA sense sequence
  source 1..19: mol_type = other RNA
atagcaaagggctcagtgt

SEQ ID NO: 49965 - RNA, 19 nt, synthetic construct
  misc_feature 1..19: note = siRNA antisense sequence
  source 1..19: mol_type = other RNA
acactgagccctttgctat

SEQ ID NO: 49966 - RNA, 19 nt, synthetic construct
  misc_feature 1..19: note = siRNA sense sequence
  source 1..19: mol_type = other RNA
tagcaaagggctcagtgtc

SEQ ID NO: 49967 - RNA, 19 nt, synthetic construct
  misc_feature 1..19: note = siRNA antisense sequence
  source 1..19: mol_type = other RNA
gacactgagccctttgcta

SEQ ID NO: 49968 - RNA, 19 nt, synthetic construct
  misc_feature 1..19: note = siRNA sense sequence
  source 1..19: mol_type = other RNA
agcaaagggctcagtgtct

SEQ ID NO: 49969 - RNA, 19 nt, synthetic construct
  misc_feature 1..19: note = siRNA antisense sequence
  source 1..19: mol_type = other RNA
agacactgagccctttgct

SEQ ID NO: 49970 - RNA, 19 nt, synthetic construct
  misc_feature 1..19: note = siRNA sense sequence
  source 1..19: mol_type = other RNA
gcaaagggctcagtgtctt

SEQ ID NO: 49971 - RNA, 19 nt, synthetic construct
  misc_feature 1..19: note = siRNA antisense sequence
  source 1..19: mol_type = other RNA
aagacactgagccctttgc

SEQ ID NO: 49972 - RNA, 19 nt, synthetic construct
  misc_feature 1..19: note = siRNA sense sequence
  source 1..19: mol_type = other RNA
gctcagtgtctttccttta

SEQ ID NO: 49973 - RNA, 19 nt, synthetic construct
  misc_feature 1..19: note = siRNA antisense sequence
  source 1..19: mol_type = other RNA
taaaggaaagacactgagc

SEQ ID NO: 49974 - RNA, 19 nt, synthetic construct
  misc_feature 1..19: note = siRNA sense sequence
  source 1..19: mol_type = other RNA
ttttggattccaggagcat

SEQ ID NO: 49975 - RNA, 19 nt, synthetic construct
  misc_feature 1..19: note = siRNA antisense sequence
  source 1..19: mol_type = other RNA
atgctcctggaatccaaaa

SEQ ID NO: 49976 - RNA, 19 nt, synthetic construct
  misc_feature 1..19: note = siRNA sense sequence
  source 1..19: mol_type = other RNA
tttggattccaggagcata

SEQ ID NO: 49977 - RNA, 19 nt, synthetic construct
  misc_feature 1..19: note = siRNA antisense sequence
  source 1..19: mol_type = other RNA
tatgctcctggaatccaaa

SEQ ID NO: 49978 - RNA, 19 nt, synthetic construct
  misc_feature 1..19: note = siRNA sense sequence
  source 1..19: mol_type = other RNA
ttggattccaggagcatag

SEQ ID NO: 49979 - RNA, 19 nt, synthetic construct
  misc_feature 1..19: note = siRNA antisense sequence
  source 1..19: mol_type = other RNA
ctatgctcctggaatccaa

SEQ ID NO: 49980 - RNA, 19 nt, synthetic construct
  misc_feature 1..19: note = siRNA sense sequence
  source 1..19: mol_type = other RNA
attccaggagcatagcctt

SEQ ID NO: 49981 - RNA, 19 nt, synthetic construct
  misc_feature 1..19: note = siRNA antisense sequence
  source 1..19: mol_type = other RNA
aaggctatgctcctggaat

SEQ ID NO: 49982 - RNA, 19 nt, synthetic construct
  misc_feature 1..19: note = siRNA sense sequence
  source 1..19: mol_type = other RNA
ttccaggagcatagccttg

SEQ ID NO: 49983 - RNA, 19 nt, synthetic construct
  misc_feature 1..19: note = siRNA antisense sequence
  source 1..19: mol_type = other RNA
caaggctatgctcctggaa

SEQ ID NO: 49984 - RNA, 19 nt, synthetic construct
  misc_feature 1..19: note = siRNA sense sequence
  source 1..19: mol_type = other RNA
tccaggagcatagccttga

SEQ ID NO: 49985 - RNA, 19 nt, synthetic construct
  misc_feature 1..19: note = siRNA antisense sequence
  source 1..19: mol_type = other RNA
tcaaggctatgctcctgga

SEQ ID NO: 49986 - RNA, 19 nt, synthetic construct
  misc_feature 1..19: note = siRNA sense sequence
  source 1..19: mol_type = other RNA
ccaggagcatagccttgaa

SEQ ID NO: 49987 - RNA, 19 nt, synthetic construct
  misc_feature 1..19: note = siRNA antisense sequence
  source 1..19: mol_type = other RNA
ttcaaggctatgctcctgg

SEQ ID NO: 49988 - RNA, 19 nt, synthetic construct
  misc_feature 1..19: note = siRNA sense sequence
  source 1..19: mol_type = other RNA
caggagcatagccttgaat

SEQ ID NO: 49989 - RNA, 19 nt, synthetic construct
  misc_feature 1..19: note = siRNA antisense sequence
  source 1..19: mol_type = other RNA
attcaaggctatgctcctg

SEQ ID NO: 49990 - RNA, 19 nt, synthetic construct
  misc_feature 1..19: note = siRNA sense sequence
  source 1..19: mol_type = other RNA
aggagcatagccttgaatt

SEQ ID NO: 49991 - RNA, 19 nt, synthetic construct
  misc_feature 1..19: note = siRNA antisense sequence
  source 1..19: mol_type = other RNA
aattcaaggctatgctcct

SEQ ID NO: 49992 - RNA, 19 nt, synthetic construct
  misc_feature 1..19: note = siRNA sense sequence
  source 1..19: mol_type = other RNA
ggagcatagccttgaatta

SEQ ID NO: 49993 - RNA, 19 nt, synthetic construct
  misc_feature 1..19: note = siRNA antisense sequence
  source 1..19: mol_type = other RNA
taattcaaggctatgctcc

SEQ ID NO: 49994 - RNA, 19 nt, synthetic construct
  misc_feature 1..19: note = siRNA sense sequence
  source 1..19: mol_type = other RNA
gagcatagccttgaattaa

SEQ ID NO: 49995 - RNA, 19 nt, synthetic construct
  misc_feature 1..19: note = siRNA antisense sequence
  source 1..19: mol_type = other RNA
ttaattcaaggctatgctc

SEQ ID NO: 49996 - RNA, 19 nt, synthetic construct
  misc_feature 1..19: note = siRNA sense sequence
  source 1..19: mol_type = other RNA
agcatagccttgaattaat

SEQ ID NO: 49997 - RNA, 19 nt, synthetic construct
  misc_feature 1..19: note = siRNA antisense sequence
  source 1..19: mol_type = other RNA
attaattcaaggctatgct

SEQ ID NO: 49998 - RNA, 19 nt, synthetic construct
  misc_feature 1..19: note = siRNA sense sequence
  source 1..19: mol_type = other RNA
gcatagccttgaattaatc

SEQ ID NO: 49999 - RNA, 19 nt, synthetic construct
  misc_feature 1..19: note = siRNA antisense sequence
  source 1..19: mol_type = other RNA
gattaattcaaggctatgc

SEQ ID NO: 50000 - RNA, 19 nt, synthetic construct
  misc_feature 1..19: note = siRNA sense sequence
  source 1..19: mol_type = other RNA
catagccttgaattaatcc

SEQ ID NO: 50001 - RNA, 19 nt, synthetic construct
  misc_feature 1..19: note = siRNA antisense sequence
  source 1..19: mol_type = other RNA
ggattaattcaaggctatg

SEQ ID NO: 50002 - RNA, 19 nt, synthetic construct
  misc_feature 1..19: note = siRNA sense sequence
  source 1..19: mol_type = other RNA
atagccttgaattaatccg

SEQ ID NO: 50003 - RNA, 19 nt, synthetic construct
  misc_feature 1..19: note = siRNA antisense sequence
  source 1..19: mol_type = other RNA
cggattaattcaaggctat

SEQ ID NO: 50004 - RNA, 19 nt, synthetic construct
  misc_feature 1..19: note = siRNA sense sequence
  source 1..19: mol_type = other RNA
tagccttgaattaatccga

SEQ ID NO: 50005 - RNA, 19 nt, synthetic construct
  misc_feature 1..19: note = siRNA antisense sequence
  source 1..19: mol_type = other RNA
tcggattaattcaaggcta

SEQ ID NO: 50006 - RNA, 19 nt, synthetic construct
  misc_feature 1..19: note = siRNA sense sequence
  source 1..19: mol_type = other RNA
agccttgaattaatccgat

SEQ ID NO: 50007 - RNA, 19 nt, synthetic construct
  misc_feature 1..19: note = siRNA antisense sequence
  source 1..19: mol_type = other RNA
atcggattaattcaaggct

SEQ ID NO: 50008 - RNA, 19 nt, synthetic construct
  misc_feature 1..19: note = siRNA sense sequence
  source 1..19: mol_type = other RNA
gccttgaattaatccgatc

SEQ ID NO: 50009 - RNA, 19 nt, synthetic construct
  misc_feature 1..19: note = siRNA antisense sequence
  source 1..19: mol_type = other RNA
gatcggattaattcaaggc

SEQ ID NO: 50010 - RNA, 19 nt, synthetic construct
  misc_feature 1..19: note = siRNA sense sequence
  source 1..19: mol_type = other RNA
ccttgaattaatccgatcc

SEQ ID NO: 50011 - RNA, 19 nt, synthetic construct
  misc_feature 1..19: note = siRNA antisense sequence
  source 1..19: mol_type = other RNA
ggatcggattaattcaagg

SEQ ID NO: 50012 - RNA, 19 nt, synthetic construct
  misc_feature 1..19: note = siRNA sense sequence
  source 1..19: mol_type = other RNA
cttgaattaatccgatcct

SEQ ID NO: 50013 - RNA, 19 nt, synthetic construct
  misc_feature 1..19: note = siRNA antisense sequence
  source 1..19: mol_type = other RNA
aggatcggattaattcaag

SEQ ID NO: 50014 - RNA, 19 nt, synthetic construct
  misc_feature 1..19: note = siRNA sense sequence
  source 1..19: mol_type = other RNA
ttgaattaatccgatcctt

SEQ ID NO: 50015 - RNA, 19 nt, synthetic construct
  misc_feature 1..19: note = siRNA antisense sequence
  source 1..19: mol_type = other RNA
aaggatcggattaattcaa

SEQ ID NO: 50016 - RNA, 19 nt, synthetic construct
  misc_feature 1..19: note = siRNA sense sequence
  source 1..19: mol_type = other RNA
tgaattaatccgatccttg

SEQ ID NO: 50017 - RNA, 19 nt, synthetic construct
  misc_feature 1..19: note = siRNA antisense sequence
  source 1..19: mol_type = other RNA
caaggatcggattaattca

SEQ ID NO: 50018 - RNA, 19 nt, synthetic construct
  misc_feature 1..19: note = siRNA sense sequence
  source 1..19: mol_type = other RNA
ttaatccgatccttgcttc

SEQ ID NO: 50019 - RNA, 19 nt, synthetic construct
  misc_feature 1..19: note = siRNA antisense sequence
  source 1..19: mol_type = other RNA
gaagcaaggatcggattaa

SEQ ID NO: 50020 - RNA, 19 nt, synthetic construct
  misc_feature 1..19: note = siRNA sense sequence
  source 1..19: mol_type = other RNA
taatccgatccttgcttcg

SEQ ID NO: 50021 - RNA, 19 nt, synthetic construct
  misc_feature 1..19: note = siRNA antisense sequence
  source 1..19: mol_type = other RNA
cgaagcaaggatcggatta

SEQ ID NO: 50022 - RNA, 19 nt, synthetic construct
  misc_feature 1..19: note = siRNA sense sequence
  source 1..19: mol_type = other RNA
aatccgatccttgcttcgt

SEQ ID NO: 50023 - RNA, 19 nt, synthetic construct
  misc_feature 1..19: note = siRNA antisense sequence
  source 1..19: mol_type = other RNA
acgaagcaaggatcggatt

SEQ ID NO: 50024 - RNA, 19 nt, synthetic construct
  misc_feature 1..19: note = siRNA sense sequence
  source 1..19: mol_type = other RNA
atccgatccttgcttcgtt

SEQ ID NO: 50025 - RNA, 19 nt, synthetic construct
  misc_feature 1..19: note = siRNA antisense sequence
  source 1..19: mol_type = other RNA
aacgaagcaaggatcggat

SEQ ID NO: 50026 - RNA, 19 nt, synthetic construct
  misc_feature 1..19: note = siRNA sense sequence
  source 1..19: mol_type = other RNA
tccgatccttgcttcgttc

SEQ ID NO: 50027 - RNA, 19 nt, synthetic construct
  misc_feature 1..19: note = siRNA antisense sequence
  source 1..19: mol_type = other RNA
gaacgaagcaaggatcgga

SEQ ID NO: 50028 - RNA, 19 nt, synthetic construct
  misc_feature 1..19: note = siRNA sense sequence
  source 1..19: mol_type = other RNA
ccgatccttgcttcgttca

SEQ ID NO: 50029 - RNA, 19 nt, synthetic construct
  misc_feature 1..19: note = siRNA antisense sequence
  source 1..19: mol_type = other RNA
tgaacgaagcaaggatcgg

SEQ ID NO: 50030 - RNA, 19 nt, synthetic construct
  misc_feature 1..19: note = siRNA sense sequence
  source 1..19: mol_type = other RNA
cgatccttgcttcgttcag

SEQ ID NO: 50031 - RNA, 19 nt, synthetic construct
  misc_feature 1..19: note = siRNA antisense sequence
  source 1..19: mol_type = other RNA
ctgaacgaagcaaggatcg

SEQ ID NO: 50032 - RNA, 19 nt, synthetic construct
  misc_feature 1..19: note = siRNA sense sequence
  source 1..19: mol_type = other RNA
gatccttgcttcgttcagg

SEQ ID NO: 50033 - RNA, 19 nt, synthetic construct
  misc_feature 1..19: note = siRNA antisense sequence
  source 1..19: mol_type = other RNA
cctgaacgaagcaaggatc

SEQ ID NO: 50034 - RNA, 19 nt, synthetic construct
  misc_feature 1..19: note = siRNA sense sequence
  source 1..19: mol_type = other RNA
atccttgcttcgttcaggc

SEQ ID NO: 50035 - RNA, 19 nt, synthetic construct
  misc_feature 1..19: note = siRNA antisense sequence
  source 1..19: mol_type = other RNA
gcctgaacgaagcaaggat

SEQ ID NO: 50036 - RNA, 19 nt, synthetic construct
  misc_feature 1..19: note = siRNA sense sequence
  source 1..19: mol_type = other RNA
tccttgcttcgttcaggcc

SEQ ID NO: 50037 - RNA, 19 nt, synthetic construct
  misc_feature 1..19: note = siRNA antisense sequence
  source 1..19: mol_type = other RNA
ggcctgaacgaagcaagga

SEQ ID NO: 50038 - RNA, 19 nt, synthetic construct
  misc_feature 1..19: note = siRNA sense sequence
  source 1..19: mol_type = other RNA
ccttgcttcgttcaggcca

SEQ ID NO: 50039 - RNA, 19 nt, synthetic construct
  misc_feature 1..19: note = siRNA antisense sequence
  source 1..19: mol_type = other RNA
tggcctgaacgaagcaagg

SEQ ID NO: 50040 - RNA, 19 nt, synthetic construct
  misc_feature 1..19: note = siRNA sense sequence
  source 1..19: mol_type = other RNA
cttgcttcgttcaggccaa

SEQ ID NO: 50041 - RNA, 19 nt, synthetic construct
  misc_feature 1..19: note = siRNA antisense sequence
  source 1..19: mol_type = other RNA
ttggcctgaacgaagcaag

SEQ ID NO: 50042 - RNA, 19 nt, synthetic construct
  misc_feature 1..19: note = siRNA sense sequence
  source 1..19: mol_type = other RNA
ttgcttcgttcaggccaaa

SEQ ID NO: 50043 - RNA, 19 nt, synthetic construct
  misc_feature 1..19: note = siRNA antisense sequence
  source 1..19: mol_type = other RNA
tttggcctgaacgaagcaa

SEQ ID NO: 50044 - RNA, 19 nt, synthetic construct
  misc_feature 1..19: note = siRNA sense sequence
  source 1..19: mol_type = other RNA
tgcttcgttcaggccaaat

SEQ ID NO: 50045 - RNA, 19 nt, synthetic construct
  misc_feature 1..19: note = siRNA antisense sequence
  source 1..19: mol_type = other RNA
atttggcctgaacgaagca

SEQ ID NO: 50046 - RNA, 19 nt, synthetic construct
  misc_feature 1..19: note = siRNA sense sequence
  source 1..19: mol_type = other RNA
gcttcgttcaggccaaatt

SEQ ID NO: 50047 - RNA, 19 nt, synthetic construct
  misc_feature 1..19: note = siRNA antisense sequence
  source 1..19: mol_type = other RNA
aatttggcctgaacgaagc

SEQ ID NO: 50048 - RNA, 19 nt, synthetic construct
  misc_feature 1..19: note = siRNA sense sequence
  source 1..19: mol_type = other RNA
cttcgttcaggccaaattg

SEQ ID NO: 50049 - RNA, 19 nt, synthetic construct
  misc_feature 1..19: note = siRNA antisense sequence
  source 1..19: mol_type = other RNA
caatttggcctgaacgaag

SEQ ID NO: 50050 - RNA, 19 nt, synthetic construct
  misc_feature 1..19: note = siRNA sense sequence
  source 1..19: mol_type = other RNA
ttcgttcaggccaaattgt

SEQ ID NO: 50051 - RNA, 19 nt, synthetic construct
  misc_feature 1..19: note = siRNA antisense sequence
  source 1..19: mol_type = other RNA
acaatttggcctgaacgaa

SEQ ID NO: 50052 - RNA, 19 nt, synthetic construct
  misc_feature 1..19: note = siRNA sense sequence
  source 1..19: mol_type = other RNA
tcgttcaggccaaattgta

SEQ ID NO: 50053 - RNA, 19 nt, synthetic construct
  misc_feature 1..19: note = siRNA antisense sequence
  source 1..19: mol_type = other RNA
tacaatttggcctgaacga

SEQ ID NO: 50054 - RNA, 19 nt, synthetic construct
  misc_feature 1..19: note = siRNA sense sequence
  source 1..19: mol_type = other RNA
cgttcaggccaaattgtaa

SEQ ID NO: 50055 - RNA, 19 nt, synthetic construct
  misc_feature 1..19: note = siRNA antisense sequence
  source 1..19: mol_type = other RNA
ttacaatttggcctgaacg

SEQ ID NO: 50056 - RNA, 19 nt, synthetic construct
  misc_feature 1..19: note = siRNA sense sequence
  source 1..19: mol_type = other RNA
gttcaggccaaattgtaat

SEQ ID NO: 50057 - RNA, 19 nt, synthetic construct
  misc_feature 1..19: note = siRNA antisense sequence
  source 1..19: mol_type = other RNA
attacaatttggcctgaac

SEQ ID NO: 50058 - RNA, 19 nt, synthetic construct
  misc_feature 1..19: note = siRNA sense sequence
  source 1..19: mol_type = other RNA
ttcaggccaaattgtaatc

SEQ ID NO: 50059 - RNA, 19 nt, synthetic construct
  misc_feature 1..19: note = siRNA antisense sequence
  source 1..19: mol_type = other RNA
gattacaatttggcctgaa

SEQ ID NO: 50060 - RNA, 19 nt, synthetic construct
  misc_feature 1..19: note = siRNA sense sequence
  source 1..19: mol_type = other RNA
caggccaaattgtaatcat

SEQ ID NO: 50061 - RNA, 19 nt, synthetic construct
  misc_feature 1..19: note = siRNA antisense sequence
  source 1..19: mol_type = other RNA
atgattacaatttggcctg

SEQ ID NO: 50062 - RNA, 19 nt, synthetic construct
  misc_feature 1..19: note = siRNA sense sequence
  source 1..19: mol_type = other RNA
aggccaaattgtaatcatt

SEQ ID NO: 50063 - RNA, 19 nt, synthetic construct
  misc_feature 1..19: note = siRNA antisense sequence
  source 1..19: mol_type = other RNA
aatgattacaatttggcct

SEQ ID NO: 50064 - RNA, 19 nt, synthetic construct
  misc_feature 1..19: note = siRNA sense sequence
  source 1..19: mol_type = other RNA
attataagcatccatggac

SEQ ID NO: 50065 - RNA, 19 nt, synthetic construct
  misc_feature 1..19: note = siRNA antisense sequence
  source 1..19: mol_type = other RNA
gtccatggatgcttataat

SEQ ID NO: 50066 - RNA, 19 nt, synthetic construct
  misc_feature 1..19: note = siRNA sense sequence
  source 1..19: mol_type = other RNA
ttataagcatccatggacc

SEQ ID NO: 50067 - RNA, 19 nt, synthetic construct
  misc_feature 1..19: note = siRNA antisense sequence
  source 1..19: mol_type = other RNA
ggtccatggatgcttataa

SEQ ID NO: 50068 - RNA, 19 nt, synthetic construct
  misc_feature 1..19: note = siRNA sense sequence
  source 1..19: mol_type = other RNA
tataagcatccatggacct

SEQ ID NO: 50069 - RNA, 19 nt, synthetic construct
  misc_feature 1..19: note = siRNA antisense sequence
  source 1..19: mol_type = other RNA
aggtccatggatgcttata

SEQ ID NO: 50070 - RNA, 19 nt, synthetic construct
  misc_feature 1..19: note = siRNA sense sequence
  source 1..19: mol_type = other RNA
ataagcatccatggaccta

SEQ ID NO: 50071 - RNA, 19 nt, synthetic construct
  misc_feature 1..19: note = siRNA antisense sequence
  source 1..19: mol_type = other RNA
taggtccatggatgcttat

SEQ ID NO: 50072 - RNA, 19 nt, synthetic construct
  misc_feature 1..19: note = siRNA sense sequence
  source 1..19: mol_type = other RNA
taagcatccatggacctac

SEQ ID NO: 50073 - RNA, 19 nt, synthetic construct
  misc_feature 1..19: note = siRNA antisense sequence
  source 1..19: mol_type = other RNA
gtaggtccatggatgctta

SEQ ID NO: 50074 - RNA, 19 nt, synthetic construct
  misc_feature 1..19: note = siRNA sense sequence
  source 1..19: mol_type = other RNA
aagcatccatggacctacc

SEQ ID NO: 50075 - RNA, 19 nt, synthetic construct
  misc_feature 1..19: note = siRNA antisense sequence
  source 1..19: mol_type = other RNA
ggtaggtccatggatgctt

SEQ ID NO: 50076 - RNA, 19 nt, synthetic construct
  misc_feature 1..19: note = siRNA sense sequence
  source 1..19: mol_type = other RNA
agcatccatggacctacca

SEQ ID NO: 50077 - RNA, 19 nt, synthetic construct
  misc_feature 1..19: note = siRNA antisense sequence
  source 1..19: mol_type = other RNA
tggtaggtccatggatgct

SEQ ID NO: 50078 - RNA, 19 nt, synthetic construct
  misc_feature 1..19: note = siRNA sense sequence
  source 1..19: mol_type = other RNA
gcatccatggacctaccac

SEQ ID NO: 50079 - RNA, 19 nt, synthetic construct
  misc_feature 1..19: note = siRNA antisense sequence
  source 1..19: mol_type = other RNA
gtggtaggtccatggatgc

SEQ ID NO: 50080 - RNA, 19 nt, synthetic construct
  misc_feature 1..19: note = siRNA sense sequence
  source 1..19: mol_type = other RNA
catggacctaccacccaaa

SEQ ID NO: 50081 - RNA, 19 nt, synthetic construct
  misc_feature 1..19: note = siRNA antisense sequence
  source 1..19: mol_type = other RNA
tttgggtggtaggtccatg

SEQ ID NO: 50082 - RNA, 19 nt, synthetic construct
  misc_feature 1..19: note = siRNA sense sequence
  source 1..19: mol_type = other RNA
atggacctaccacccaaat

SEQ ID NO: 50083 - RNA, 19 nt, synthetic construct
  misc_feature 1..19: note = siRNA antisense sequence
  source 1..19: mol_type = other RNA
atttgggtggtaggtccat

SEQ ID NO: 50084 - RNA, 19 nt, synthetic construct
  misc_feature 1..19: note = siRNA sense sequence
  source 1..19: mol_type = other RNA
ctacatctgagcacattta

SEQ ID NO: 50085 - RNA, 19 nt, synthetic construct
  misc_feature 1..19: note = siRNA antisense sequence
  source 1..19: mol_type = other RNA
taaatgtgctcagatgtag

SEQ ID NO: 50086 - RNA, 19 nt, synthetic construct
  misc_feature 1..19: note = siRNA sense sequence
  source 1..19: mol_type = other RNA
tacatctgagcacatttac

SEQ ID NO: 50087 - RNA, 19 nt, synthetic construct
  misc_feature 1..19: note = siRNA antisense sequence
  source 1..19: mol_type = other RNA
gtaaatgtgctcagatgta

SEQ ID NO: 50088 - RNA, 19 nt, synthetic construct
  misc_feature 1..19: note = siRNA sense sequence
  source 1..19: mol_type = other RNA
acatctgagcacatttacc

SEQ ID NO: 50089 - RNA, 19 nt, synthetic construct
  misc_feature 1..19: note = siRNA antisense sequence
  source 1..19: mol_type = other RNA
ggtaaatgtgctcagatgt

SEQ ID NO: 50090 - RNA, 19 nt, synthetic construct
  misc_feature 1..19: note = siRNA sense sequence
  source 1..19: mol_type = other RNA
catctgagcacatttacca

SEQ ID NO: 50091 - RNA, 19 nt, synthetic construct
  misc_feature 1..19: note = siRNA antisense sequence
  source 1..19: mol_type = other RNA
tggtaaatgtgctcagatg

SEQ ID NO: 50092 - RNA, 19 nt, synthetic construct
  misc_feature 1..19: note = siRNA sense sequence
  source 1..19: mol_type = other RNA
atctgagcacatttaccac

SEQ ID NO: 50093 - RNA, 19 nt, synthetic construct
  misc_feature 1..19: note = siRNA antisense sequence
  source 1..19: mol_type = other RNA
gtggtaaatgtgctcagat

SEQ ID NO: 50094 - RNA, 19 nt, synthetic construct
  misc_feature 1..19: note = siRNA sense sequence
  source 1..19: mol_type = other RNA
cttcctccacctgggtaac

SEQ ID NO: 50095 - RNA, 19 nt, synthetic construct
  misc_feature 1..19: note = siRNA antisense sequence
  source 1..19: mol_type = other RNA
gttacccaggtggaggaag

SEQ ID NO: 50096 - RNA, 19 nt, synthetic construct
  misc_feature 1..19: note = siRNA sense sequence
  source 1..19: mol_type = other RNA
cctgggtaaccatcagtcc

SEQ ID NO: 50097 - RNA, 19 nt, synthetic construct
  misc_feature 1..19: note = siRNA antisense sequence
  source 1..19: mol_type = other RNA
ggactgatggttacccagg

SEQ ID NO: 50098 - RNA, 19 nt, synthetic construct
  misc_feature 1..19: note = siRNA sense sequence
  source 1..19: mol_type = other RNA
ctgggtaaccatcagtcca

SEQ ID NO: 50099 - RNA, 19 nt, synthetic construct
  misc_feature 1..19: note = siRNA antisense sequence
  source 1..19: mol_type = other RNA
tggactgatggttacccag

SEQ ID NO: 50100 - RNA, 19 nt, synthetic construct
  misc_feature 1..19: note = siRNA sense sequence
  source 1..19: mol_type = other RNA
accatcagtccactttcta

SEQ ID NO: 50101 - RNA, 19 nt, synthetic construct
  misc_feature 1..19: note = siRNA antisense sequence
  source 1..19: mol_type = other RNA
tagaaagtggactgatggt

SEQ ID NO: 50102 - RNA, 19 nt, synthetic construct
  misc_feature 1..19: note = siRNA sense sequence
  source 1..19: mol_type = other RNA
ccatcagtccactttctac

SEQ ID NO: 50103 - RNA, 19 nt, synthetic construct
  misc_feature 1..19: note = siRNA antisense sequence
  source 1..19: mol_type = other RNA
gtagaaagtggactgatgg

SEQ ID NO: 50104 - RNA, 19 nt, synthetic construct
  misc_feature 1..19: note = siRNA sense sequence
  source 1..19: mol_type = other RNA
catcagtccactttctaca

SEQ ID NO: 50105 - RNA, 19 nt, synthetic construct
  misc_feature 1..19: note = siRNA antisense sequence
  source 1..19: mol_type = other RNA
tgtagaaagtggactgatg

SEQ ID NO: 50106 - RNA, 19 nt, synthetic construct
  misc_feature 1..19: note = siRNA sense sequence
  source 1..19: mol_type = other RNA
ataatatttaggcacccat

SEQ ID NO: 50107 - RNA, 19 nt, synthetic construct
  misc_feature 1..19: note = siRNA antisense sequence
  source 1..19: mol_type = other RNA
atgggtgcctaaatattat

SEQ ID NO: 50108 - RNA, 19 nt, synthetic construct
  misc_feature 1..19: note = siRNA sense sequence
  source 1..19: mol_type = other RNA
taatatttaggcacccata

SEQ ID NO: 50109 - RNA, 19 nt, synthetic construct
  misc_feature 1..19: note = siRNA antisense sequence
  source 1..19: mol_type = other RNA
tatgggtgcctaaatatta

SEQ ID NO: 50110 - RNA, 19 nt, synthetic construct
  misc_feature 1..19: note = siRNA sense sequence
  source 1..19: mol_type = other RNA
aatatttaggcacccatac

SEQ ID NO: 50111 - RNA, 19 nt, synthetic construct
  misc_feature 1..19: note = siRNA antisense sequence
  source 1..19: mol_type = other RNA
gtatgggtgcctaaatatt

SEQ ID NO: 50112 - RNA, 19 nt, synthetic construct
  misc_feature 1..19: note = siRNA sense sequence
  source 1..19: mol_type = other RNA
tttaggcacccatacatat

SEQ ID NO: 50113 - RNA, 19 nt, synthetic construct
  misc_feature 1..19: note = siRNA antisense sequence
  source 1..19: mol_type = other RNA
atatgtatgggtgcctaaa

SEQ ID NO: 50114 - RNA, 19 nt, synthetic construct
  misc_feature 1..19: note = siRNA sense sequence
  source 1..19: mol_type = other RNA
cacccatacatatccaaaa

SEQ ID NO: 50115 - RNA, 19 nt, synthetic construct
  misc_feature 1..19: note = siRNA antisense sequence
  source 1..19: mol_type = other RNA
ttttggatatgtatgggtg

SEQ ID NO: 50116 - RNA, 19 nt, synthetic construct
  misc_feature 1..19: note = siRNA sense sequence
  source 1..19: mol_type = other RNA
aaatgcaaggtttcagtgt

SEQ ID NO: 50117 - RNA, 19 nt, synthetic construct
  misc_feature 1..19: note = siRNA antisense sequence
  source 1..19: mol_type = other RNA
acactgaaaccttgcattt

SEQ ID NO: 50118 - RNA, 19 nt, synthetic construct
  misc_feature 1..19: note = siRNA sense sequence
  source 1..19: mol_type = other RNA
aatgcaaggtttcagtgtg

SEQ ID NO: 50119 - RNA, 19 nt, synthetic construct
  misc_feature 1..19: note = siRNA antisense sequence
  source 1..19: mol_type = other RNA
cacactgaaaccttgcatt

SEQ ID NO: 50120 - RNA, 19 nt, synthetic construct
  misc_feature 1..19: note = siRNA sense sequence
  source 1..19: mol_type = other RNA
atgcaaggtttcagtgtga

SEQ ID NO: 50121 - RNA, 19 nt, synthetic construct
  misc_feature 1..19: note = siRNA antisense sequence
  source 1..19: mol_type = other RNA
tcacactgaaaccttgcat

SEQ ID NO: 50122 - RNA, 19 nt, synthetic construct
  misc_feature 1..19: note = siRNA sense sequence
  source 1..19: mol_type = other RNA
aaagtgtgcacgaagtgaa

SEQ ID NO: 50123 - RNA, 19 nt, synthetic construct
  misc_feature 1..19: note = siRNA antisense sequence
  source 1..19: mol_type = other RNA
ttcacttcgtgcacacttt

SEQ ID NO: 50124 - RNA, 19 nt, synthetic construct
  misc_feature 1..19: note = siRNA sense sequence
  source 1..19: mol_type = other RNA
ttacgtgcacccacataag

SEQ ID NO: 50125 - RNA, 19 nt, synthetic construct
  misc_feature 1..19: note = siRNA antisense sequence
  source 1..19: mol_type = other RNA
cttatgtgggtgcacgtaa

SEQ ID NO: 50126 - RNA, 19 nt, synthetic construct
  misc_feature 1..19: note = siRNA sense sequence
  source 1..19: mol_type = other RNA
tacgtgcacccacataaga

SEQ ID NO: 50127 - RNA, 19 nt, synthetic construct
  misc_feature 1..19: note = siRNA antisense sequence
  source 1..19: mol_type = other RNA
tcttatgtgggtgcacgta

SEQ ID NO: 50128 - RNA, 19 nt, synthetic construct
  misc_feature 1..19: note = siRNA sense sequence
  source 1..19: mol_type = other RNA
tgcacccacataagactta

SEQ ID NO: 50129 - RNA, 19 nt, synthetic construct
  misc_feature 1..19: note = siRNA antisense sequence
  source 1..19: mol_type = other RNA
taagtcttatgtgggtgca

SEQ ID NO: 50130 - RNA, 19 nt, synthetic construct
  misc_feature 1..19: note = siRNA sense sequence
  source 1..19: mol_type = other RNA
gcacccacataagacttaa

SEQ ID NO: 50131 - RNA, 19 nt, synthetic construct
  misc_feature 1..19: note = siRNA antisense sequence
  source 1..19: mol_type = other RNA
ttaagtcttatgtgggtgc

SEQ ID NO: 50132 - RNA, 19 nt, synthetic construct
  misc_feature 1..19: note = siRNA sense sequence
  source 1..19: mol_type = other RNA
cacccacataagacttaat

SEQ ID NO: 50133 - RNA, 19 nt, synthetic construct
  misc_feature 1..19: note = siRNA antisense sequence
  source 1..19: mol_type = other RNA
attaagtcttatgtgggtg

SEQ ID NO: 50134 - RNA, 19 nt, synthetic construct
  misc_feature 1..19: note = siRNA sense sequence
  source 1..19: mol_type = other RNA
acccacataagacttaatc

SEQ ID NO: 50135 - RNA, 19 nt, synthetic construct
  misc_feature 1..19: note = siRNA antisense sequence
  source 1..19: mol_type = other RNA
gattaagtcttatgtgggt

SEQ ID NO: 50136 - RNA, 19 nt, synthetic construct
  misc_feature 1..19: note = siRNA sense sequence
  source 1..19: mol_type = other RNA
ccacataagacttaatcaa

SEQ ID NO: 50137 - RNA, 19 nt, synthetic construct
  misc_feature 1..19: note = siRNA antisense sequence
  source 1..19: mol_type = other RNA
ttgattaagtcttatgtgg

SEQ ID NO: 50138 - RNA, 19 nt, synthetic construct
  misc_feature 1..19: note = siRNA sense sequence
  source 1..19: mol_type = other RNA
cacataagacttaatcaag

SEQ ID NO: 50139 - RNA, 19 nt, synthetic construct
  misc_feature 1..19: note = siRNA antisense sequence
  source 1..19: mol_type = other RNA
cttgattaagtcttatgtg

SEQ ID NO: 50140 - RNA, 19 nt, synthetic construct
  misc_feature 1..19: note = siRNA sense sequence
  source 1..19: mol_type = other RNA
cttaatcaagatatagagc

SEQ ID NO: 50141 - RNA, 19 nt, synthetic construct
  misc_feature 1..19: note = siRNA antisense sequence
  source 1..19: mol_type = other RNA
gctctatatcttgattaag

SEQ ID NO: 50142 - RNA, 19 nt, synthetic construct
  misc_feature 1..19: note = siRNA sense sequence
  source 1..19: mol_type = other RNA
caagatatagagcaatttc

SEQ ID NO: 50143 - RNA, 19 nt, synthetic construct
  misc_feature 1..19: note = siRNA antisense sequence
  source 1..19: mol_type = other RNA
gaaattgctctatatcttg

SEQ ID NO: 50144 - RNA, 19 nt, synthetic construct
  misc_feature 1..19: note = siRNA sense sequence
  source 1..19: mol_type = other RNA
tatagagcaatttcatcac

SEQ ID NO: 50145 - RNA, 19 nt, synthetic construct
  misc_feature 1..19: note = siRNA antisense sequence
  source 1..19: mol_type = other RNA
gtgatgaaattgctctata

SEQ ID NO: 50146 - RNA, 19 nt, synthetic construct
  misc_feature 1..19: note = siRNA sense sequence
  source 1..19: mol_type = other RNA
atagagcaatttcatcact

SEQ ID NO: 50147 - RNA, 19 nt, synthetic construct
  misc_feature 1..19: note = siRNA antisense sequence
  source 1..19: mol_type = other RNA
agtgatgaaattgctctat

SEQ ID NO: 50148 - RNA, 19 nt, synthetic construct
  misc_feature 1..19: note = siRNA sense sequence
  source 1..19: mol_type = other RNA
gatagctgtacatatttac

SEQ ID NO: 50149 - RNA, 19 nt, synthetic construct
  misc_feature 1..19: note = siRNA antisense sequence
  source 1..19: mol_type = other RNA
gtaaatatgtacagctatc

SEQ ID NO: 50150 - RNA, 19 nt, synthetic construct
  misc_feature 1..19: note = siRNA sense sequence
  source 1..19: mol_type = other RNA
tagctgtacatatttacct

SEQ ID NO: 50151 - RNA, 19 nt, synthetic construct
  misc_feature 1..19: note = siRNA antisense sequence
  source 1..19: mol_type = other RNA
aggtaaatatgtacagcta

SEQ ID NO: 50152 - RNA, 19 nt, synthetic construct
  misc_feature 1..19: note = siRNA sense sequence
  source 1..19: mol_type = other RNA
agctgtacatatttacctg

SEQ ID NO: 50153 - RNA, 19 nt, synthetic construct
  misc_feature 1..19: note = siRNA antisense sequence
  source 1..19: mol_type = other RNA
caggtaaatatgtacagct

SEQ ID NO: 50154 - RNA, 19 nt, synthetic construct
  misc_feature 1..19: note = siRNA sense sequence
  source 1..19: mol_type = other RNA
ctgtacatatttacctggt

SEQ ID NO: 50155 - RNA, 19 nt, synthetic construct
  misc_feature 1..19: note = siRNA antisense sequence
  source 1..19: mol_type = other RNA
accaggtaaatatgtacag

SEQ ID NO: 50156 - RNA, 19 nt, synthetic construct
  misc_feature 1..19: note = siRNA sense sequence
  source 1..19: mol_type = other RNA
tgtacatatttacctggta

SEQ ID NO: 50157 - RNA, 19 nt, synthetic construct
  misc_feature 1..19: note = siRNA antisense sequence
  source 1..19: mol_type = other RNA
taccaggtaaatatgtaca

SEQ ID NO: 50158 - RNA, 19 nt, synthetic construct
  misc_feature 1..19: note = siRNA sense sequence
  source 1..19: mol_type = other RNA
tacatatttacctggtaca

SEQ ID NO: 50159 - RNA, 19 nt, synthetic construct
  misc_feature 1..19: note = siRNA antisense sequence
  source 1..19: mol_type = other RNA
tgtaccaggtaaatatgta

SEQ ID NO: 50160 - RNA, 19 nt, synthetic construct
  misc_feature 1..19: note = siRNA sense sequence
  source 1..19: mol_type = other RNA
acatatttacctggtacat

SEQ ID NO: 50161 - RNA, 19 nt, synthetic construct
  misc_feature 1..19: note = siRNA antisense sequence
  source 1..19: mol_type = other RNA
atgtaccaggtaaatatgt

SEQ ID NO: 50162 - RNA, 19 nt, synthetic construct
  misc_feature 1..19: note = siRNA sense sequence
  source 1..19: mol_type = other RNA
catatttacctggtacatg

SEQ ID NO: 50163 - RNA, 19 nt, synthetic construct
  misc_feature 1..19: note = siRNA antisense sequence
  source 1..19: mol_type = other RNA
catgtaccaggtaaatatg

SEQ ID NO: 50164 - RNA, 19 nt, synthetic construct
  misc_feature 1..19: note = siRNA sense sequence
  source 1..19: mol_type = other RNA
atatttacctggtacatgt

SEQ ID NO: 50165 - RNA, 19 nt, synthetic construct
  misc_feature 1..19: note = siRNA antisense sequence
  source 1..19: mol_type = other RNA
acatgtaccaggtaaatat

SEQ ID NO: 50166 - RNA, 19 nt, synthetic construct
  misc_feature 1..19: note = siRNA sense sequence
  source 1..19: mol_type = other RNA
tatttacctggtacatgtg

SEQ ID NO: 50167 - RNA, 19 nt, synthetic construct
  misc_feature 1..19: note = siRNA antisense sequence
  source 1..19: mol_type = other RNA
cacatgtaccaggtaaata

SEQ ID NO: 50168 - RNA, 19 nt, synthetic construct
  misc_feature 1..19: note = siRNA sense sequence
  source 1..19: mol_type = other RNA
gcatacagtggctaatgat

SEQ ID NO: 50169 - RNA, 19 nt, synthetic construct
  misc_feature 1..19: note = siRNA antisense sequence
  source 1..19: mol_type = other RNA
atcattagccactgtatgc

SEQ ID NO: 50170 - RNA, 19 nt, synthetic construct
  misc_feature 1..19: note = siRNA sense sequence
  source 1..19: mol_type = other RNA
catacagtggctaatgatc

SEQ ID NO: 50171 - RNA, 19 nt, synthetic construct
  misc_feature 1..19: note = siRNA antisense sequence
  source 1..19: mol_type = other RNA
gatcattagccactgtatg

SEQ ID NO: 50172 - RNA, 19 nt, synthetic construct
  misc_feature 1..19: note = siRNA sense sequence
  source 1..19: mol_type = other RNA
atacagtggctaatgatca

SEQ ID NO: 50173 - RNA, 19 nt, synthetic construct
  misc_feature 1..19: note = siRNA antisense sequence
  source 1..19: mol_type = other RNA
tgatcattagccactgtat

SEQ ID NO: 50174 - RNA, 19 nt, synthetic construct
  misc_feature 1..19: note = siRNA sense sequence
  source 1..19: mol_type = other RNA
tacagtggctaatgatcaa

SEQ ID NO: 50175 - RNA, 19 nt, synthetic construct
  misc_feature 1..19: note = siRNA antisense sequence
  source 1..19: mol_type = other RNA
ttgatcattagccactgta

SEQ ID NO: 50176 - RNA, 19 nt, synthetic construct
  misc_feature 1..19: note = siRNA sense sequence
  source 1..19: mol_type = other RNA
acagtggctaatgatcaaa

SEQ ID NO: 50177 - RNA, 19 nt, synthetic construct
  misc_feature 1..19: note = siRNA antisense sequence
  source 1..19: mol_type = other RNA
tttgatcattagccactgt

SEQ ID NO: 50178 - RNA, 19 nt, synthetic construct
  misc_feature 1..19: note = siRNA sense sequence
  source 1..19: mol_type = other RNA
cagtggctaatgatcaaat

SEQ ID NO: 50179 - RNA, 19 nt, synthetic construct
  misc_feature 1..19: note = siRNA antisense sequence
  source 1..19: mol_type = other RNA
atttgatcattagccactg

SEQ ID NO: 50180 - RNA, 19 nt, synthetic construct
  misc_feature 1..19: note = siRNA sense sequence
  source 1..19: mol_type = other RNA
agtggctaatgatcaaatc

SEQ ID NO: 50181 - RNA, 19 nt, synthetic construct
  misc_feature 1..19: note = siRNA antisense sequence
  source 1..19: mol_type = other RNA
gatttgatcattagccact

SEQ ID NO: 50182 - RNA, 19 nt, synthetic construct
  misc_feature 1..19: note = siRNA sense sequence
  source 1..19: mol_type = other RNA
gtggctaatgatcaaatct

SEQ ID NO: 50183 - RNA, 19 nt, synthetic construct
  misc_feature 1..19: note = siRNA antisense sequence
  source 1..19: mol_type = other RNA
agatttgatcattagccac

SEQ ID NO: 50184 - RNA, 19 nt, synthetic construct
  misc_feature 1..19: note = siRNA sense sequence
  source 1..19: mol_type = other RNA
tggctaatgatcaaatctg

SEQ ID NO: 50185 - RNA, 19 nt, synthetic construct
  misc_feature 1..19: note = siRNA antisense sequence
  source 1..19: mol_type = other RNA
cagatttgatcattagcca

SEQ ID NO: 50186 - RNA, 19 nt, synthetic construct
  misc_feature 1..19: note = siRNA sense sequence
  source 1..19: mol_type = other RNA
cacctcagacacttatcat

SEQ ID NO: 50187 - RNA, 19 nt, synthetic construct
  misc_feature 1..19: note = siRNA antisense sequence
  source 1..19: mol_type = other RNA
atgataagtgtctgaggtg

SEQ ID NO: 50188 - RNA, 19 nt, synthetic construct
  misc_feature 1..19: note = siRNA sense sequence
  source 1..19: mol_type = other RNA
cctcagacacttatcattt

SEQ ID NO: 50189 - RNA, 19 nt, synthetic construct
  misc_feature 1..19: note = siRNA antisense sequence
  source 1..19: mol_type = other RNA
aaatgataagtgtctgagg

SEQ ID NO: 50190 - RNA, 19 nt, synthetic construct
  misc_feature 1..19: note = siRNA sense sequence
  source 1..19: mol_type = other RNA
ctcagacacttatcatttc

SEQ ID NO: 50191 - RNA, 19 nt, synthetic construct
  misc_feature 1..19: note = siRNA antisense sequence
  source 1..19: mol_type = other RNA
gaaatgataagtgtctgag

SEQ ID NO: 50192 - RNA, 19 nt, synthetic construct
  misc_feature 1..19: note = siRNA sense sequence
  source 1..19: mol_type = other RNA
tatgtttactgtagttgtc

SEQ ID NO: 50193 - RNA, 19 nt, synthetic construct
  misc_feature 1..19: note = siRNA antisense sequence
  source 1..19: mol_type = other RNA
gacaactacagtaaacata

SEQ ID NO: 50194 - RNA, 19 nt, synthetic construct
  misc_feature 1..19: note = siRNA sense sequence
  source 1..19: mol_type = other RNA
atgtttactgtagttgtcc

SEQ ID NO: 50195 - RNA, 19 nt, synthetic construct
  misc_feature 1..19: note = siRNA antisense sequence
  source 1..19: mol_type = other RNA
ggacaactacagtaaacat

SEQ ID NO: 50196 - RNA, 19 nt, synthetic construct
  misc_feature 1..19: note = siRNA sense sequence
  source 1..19: mol_type = other RNA
tgtttactgtagttgtcct

SEQ ID NO: 50197 - RNA, 19 nt, synthetic construct
  misc_feature 1..19: note = siRNA antisense sequence
  source 1..19: mol_type = other RNA
aggacaactacagtaaaca

SEQ ID NO: 50198 - RNA, 19 nt, synthetic construct
  misc_feature 1..19: note = siRNA sense sequence
  source 1..19: mol_type = other RNA
gtttactgtagttgtccta

SEQ ID NO: 50199 - RNA, 19 nt, synthetic construct
  misc_feature 1..19: note = siRNA antisense sequence
  source 1..19: mol_type = other RNA
taggacaactacagtaaac

SEQ ID NO: 50200 - RNA, 19 nt, synthetic construct
  misc_feature 1..19: note = siRNA sense sequence
  source 1..19: mol_type = other RNA
tttactgtagttgtcctat

SEQ ID NO: 50201 - RNA, 19 nt, synthetic construct
  misc_feature 1..19: note = siRNA antisense sequence
  source 1..19: mol_type = other RNA
ataggacaactacagtaaa

SEQ ID NO: 50202 - RNA, 19 nt, synthetic construct
  misc_feature 1..19: note = siRNA sense sequence
  source 1..19: mol_type = other RNA
ttactgtagttgtcctata

SEQ ID NO: 50203 - RNA, 19 nt, synthetic construct
  misc_feature 1..19: note = siRNA antisense sequence
  source 1..19: mol_type = other RNA
tataggacaactacagtaa

SEQ ID NO: 50204 - RNA, 19 nt, synthetic construct
  misc_feature 1..19: note = siRNA sense sequence
  source 1..19: mol_type = other RNA
tactgtagttgtcctatag

SEQ ID NO: 50205 - RNA, 19 nt, synthetic construct
  misc_feature 1..19: note = siRNA antisense sequence
  source 1..19: mol_type = other RNA
ctataggacaactacagta

SEQ ID NO: 50206 - RNA, 19 nt, synthetic construct
  misc_feature 1..19: note = siRNA sense sequence
  source 1..19: mol_type = other RNA
actgtagttgtcctatagt

SEQ ID NO: 50207 - RNA, 19 nt, synthetic construct
  misc_feature 1..19: note = siRNA antisense sequence
  source 1..19: mol_type = other RNA
actataggacaactacagt

SEQ ID NO: 50208 - RNA, 19 nt, synthetic construct
  misc_feature 1..19: note = siRNA sense sequence
  source 1..19: mol_type = other RNA
ctgtagttgtcctatagtg

SEQ ID NO: 50209 - RNA, 19 nt, synthetic construct
  misc_feature 1..19: note = siRNA antisense sequence
  source 1..19: mol_type = other RNA
cactataggacaactacag

SEQ ID NO: 50210 - RNA, 19 nt, synthetic construct
  misc_feature 1..19: note = siRNA sense sequence
  source 1..19: mol_type = other RNA
tgtagttgtcctatagtgc

SEQ ID NO: 50211 - RNA, 19 nt, synthetic construct
  misc_feature 1..19: note = siRNA antisense sequence
  source 1..19: mol_type = other RNA
gcactataggacaactaca

SEQ ID NO: 50212 - RNA, 19 nt, synthetic construct
  misc_feature 1..19: note = siRNA sense sequence
  source 1..19: mol_type = other RNA
gtagttgtcctatagtgct

SEQ ID NO: 50213 - RNA, 19 nt, synthetic construct
  misc_feature 1..19: note = siRNA antisense sequence
  source 1..19: mol_type = other RNA
agcactataggacaactac

SEQ ID NO: 50214 - RNA, 19 nt, synthetic construct
  misc_feature 1..19: note = siRNA sense sequence
  source 1..19: mol_type = other RNA
tagttgtcctatagtgcta

SEQ ID NO: 50215 - RNA, 19 nt, synthetic construct
  misc_feature 1..19: note = siRNA antisense sequence
  source 1..19: mol_type = other RNA
tagcactataggacaacta

SEQ ID NO: 50216 - RNA, 19 nt, synthetic construct
  misc_feature 1..19: note = siRNA sense sequence
  source 1..19: mol_type = other RNA
agttgtcctatagtgctac

SEQ ID NO: 50217 - RNA, 19 nt, synthetic construct
  misc_feature 1..19: note = siRNA antisense sequence
  source 1..19: mol_type = other RNA
gtagcactataggacaact

SEQ ID NO: 50218 - RNA, 19 nt, synthetic construct
  misc_feature 1..19: note = siRNA sense sequence
  source 1..19: mol_type = other RNA
gttgtcctatagtgctact

SEQ ID NO: 50219 - RNA, 19 nt, synthetic construct
  misc_feature 1..19: note = siRNA antisense sequence
  source 1..19: mol_type = other RNA
agtagcactataggacaac

SEQ ID NO: 50220 - RNA, 19 nt, synthetic construct
  misc_feature 1..19: note = siRNA sense sequence
  source 1..19: mol_type = other RNA
taaatccattaactaaccc

SEQ ID NO: 50221 - RNA, 19 nt, synthetic construct
  misc_feature 1..19: note = siRNA antisense sequence
  source 1..19: mol_type = other RNA
gggttagttaatggattta

SEQ ID NO: 50222 - RNA, 19 nt, synthetic construct
  misc_feature 1..19: note = siRNA sense sequence
  source 1..19: mol_type = other RNA
cctcttcatccctgctctt

SEQ ID NO: 50223 - RNA, 19 nt, synthetic construct
  misc_feature 1..19: note = siRNA antisense sequence
  source 1..19: mol_type = other RNA
aagagcagggatgaagagg

SEQ ID NO: 50224 - RNA, 19 nt, synthetic construct
  misc_feature 1..19: note = siRNA sense sequence
  source 1..19: mol_type = other RNA
tactctttccagcctttga

SEQ ID NO: 50225 - RNA, 19 nt, synthetic construct
  misc_feature 1..19: note = siRNA antisense sequence
  source 1..19: mol_type = other RNA
tcaaaggctggaaagagta

SEQ ID NO: 50226 - RNA, 19 nt, synthetic construct
  misc_feature 1..19: note = siRNA sense sequence
  source 1..19: mol_type = other RNA
actctttccagcctttgat

SEQ ID NO: 50227 - RNA, 19 nt, synthetic construct
  misc_feature 1..19: note = siRNA antisense sequence
  source 1..19: mol_type = other RNA
atcaaaggctggaaagagt

SEQ ID NO: 50228 - RNA, 19 nt, synthetic construct
  misc_feature 1..19: note = siRNA sense sequence
  source 1..19: mol_type = other RNA
ctctttccagcctttgata

SEQ ID NO: 50229 - RNA, 19 nt, synthetic construct
  misc_feature 1..19: note = siRNA antisense sequence
  source 1..19: mol_type = other RNA
tatcaaaggctggaaagag

SEQ ID NO: 50230 - RNA, 19 nt, synthetic construct
  misc_feature 1..19: note = siRNA sense sequence
  source 1..19: mol_type = other RNA
aacgtagtgatatttgtcc

SEQ ID NO: 50231 - RNA, 19 nt, synthetic construct
  misc_feature 1..19: note = siRNA antisense sequence
  source 1..19: mol_type = other RNA
ggacaaatatcactacgtt

SEQ ID NO: 50232 - RNA, 19 nt, synthetic construct
  misc_feature 1..19: note = siRNA sense sequence
  source 1..19: mol_type = other RNA
acgtagtgatatttgtcct

SEQ ID NO: 50233 - RNA, 19 nt, synthetic construct
  misc_feature 1..19: note = siRNA antisense sequence
  source 1..19: mol_type = other RNA
aggacaaatatcactacgt

SEQ ID NO: 50234 - RNA, 19 nt, synthetic construct
  misc_feature 1..19: note = siRNA sense sequence
  source 1..19: mol_type = other RNA
cgtagtgatatttgtcctt

SEQ ID NO: 50235 - RNA, 19 nt, synthetic construct
  misc_feature 1..19: note = siRNA antisense sequence
  source 1..19: mol_type = other RNA
aaggacaaatatcactacg

SEQ ID NO: 50236 - RNA, 19 nt, synthetic construct
  misc_feature 1..19: note = siRNA sense sequence
  source 1..19: mol_type = other RNA
ttctgttgtgaagatatac

SEQ ID NO: 50237 - RNA, 19 nt, synthetic construct
  misc_feature 1..19: note = siRNA antisense sequence
  source 1..19: mol_type = other RNA
gtatatcttcacaacagaa

SEQ ID NO: 50238 - RNA, 19 nt, synthetic construct
  misc_feature 1..19: note = siRNA sense sequence
  source 1..19: mol_type = other RNA
tctgttgtgaagatatacc

SEQ ID NO: 50239 - RNA, 19 nt, synthetic construct
  misc_feature 1..19: note = siRNA antisense sequence
  source 1..19: mol_type = other RNA
ggtatatcttcacaacaga

SEQ ID NO: 50240 - RNA, 19 nt, synthetic construct
  misc_feature 1..19: note = siRNA sense sequence
  source 1..19: mol_type = other RNA
ctgttgtgaagatatacca

SEQ ID NO: 50241 - RNA, 19 nt, synthetic construct
  misc_feature 1..19: note = siRNA antisense sequence
  source 1..19: mol_type = other RNA
tggtatatcttcacaacag

SEQ ID NO: 50242 - RNA, 19 nt, synthetic construct
  misc_feature 1..19: note = siRNA sense sequence
  source 1..19: mol_type = other RNA
tgttgtgaagatataccat

SEQ ID NO: 50243 - RNA, 19 nt, synthetic construct
  misc_feature 1..19: note = siRNA antisense sequence
  source 1..19: mol_type = other RNA
atggtatatcttcacaaca

SEQ ID NO: 50244 - RNA, 19 nt, synthetic construct
  misc_feature 1..19: note = siRNA sense sequence
  source 1..19: mol_type = other RNA
gttgtgaagatataccatg

SEQ ID NO: 50245 - RNA, 19 nt, synthetic construct
  misc_feature 1..19: note = siRNA antisense sequence
  source 1..19: mol_type = other RNA
catggtatatcttcacaac

SEQ ID NO: 50246 - RNA, 19 nt, synthetic construct
  misc_feature 1..19: note = siRNA sense sequence
  source 1..19: mol_type = other RNA
gtgaagatataccatgttt

SEQ ID NO: 50247 - RNA, 19 nt, synthetic construct
  misc_feature 1..19: note = siRNA antisense sequence
  source 1..19: mol_type = other RNA
aaacatggtatatcttcac

SEQ ID NO: 50248 - RNA, 19 nt, synthetic construct
  misc_feature 1..19: note = siRNA sense sequence
  source 1..19: mol_type = other RNA
attcatccattgatccata

SEQ ID NO: 50249 - RNA, 19 nt, synthetic construct
  misc_feature 1..19: note = siRNA antisense sequence
  source 1..19: mol_type = other RNA
tatggatcaatggatgaat

SEQ ID NO: 50250 - RNA, 19 nt, synthetic construct
  misc_feature 1..19: note = siRNA sense sequence
  source 1..19: mol_type = other RNA
ttcatccattgatccatac

SEQ ID NO: 50251 - RNA, 19 nt, synthetic construct
  misc_feature 1..19: note = siRNA antisense sequence
  source 1..19: mol_type = other RNA
gtatggatcaatggatgaa

SEQ ID NO: 50252 - RNA, 19 nt, synthetic construct
  misc_feature 1..19: note = siRNA sense sequence
  source 1..19: mol_type = other RNA
tcatccattgatccatact

SEQ ID NO: 50253 - RNA, 19 nt, synthetic construct
  misc_feature 1..19: note = siRNA antisense sequence
  source 1..19: mol_type = other RNA
agtatggatcaatggatga

SEQ ID NO: 50254 - RNA, 19 nt, synthetic construct
  misc_feature 1..19: note = siRNA sense sequence
  source 1..19: mol_type = other RNA
tccattgatccatacttaa

SEQ ID NO: 50255 - RNA, 19 nt, synthetic construct
  misc_feature 1..19: note = siRNA antisense sequence
  source 1..19: mol_type = other RNA
ttaagtatggatcaatgga

SEQ ID NO: 50256 - RNA, 19 nt, synthetic construct
  misc_feature 1..19: note = siRNA sense sequence
  source 1..19: mol_type = other RNA
ccattgatccatacttaag

SEQ ID NO: 50257 - RNA, 19 nt, synthetic construct
  misc_feature 1..19: note = siRNA antisense sequence
  source 1..19: mol_type = other RNA
cttaagtatggatcaatgg

SEQ ID NO: 50258 - RNA, 19 nt, synthetic construct
  misc_feature 1..19: note = siRNA sense sequence
  source 1..19: mol_type = other RNA
cattgatccatacttaagg

SEQ ID NO: 50259 - RNA, 19 nt, synthetic construct
  misc_feature 1..19: note = siRNA antisense sequence
  source 1..19: mol_type = other RNA
ccttaagtatggatcaatg

SEQ ID NO: 50260 - RNA, 19 nt, synthetic construct
  misc_feature 1..19: note = siRNA sense sequence
  source 1..19: mol_type = other RNA
attgatccatacttaaggt

SEQ ID NO: 50261 - RNA, 19 nt, synthetic construct
  misc_feature 1..19: note = siRNA antisense sequence
  source 1..19: mol_type = other RNA
accttaagtatggatcaat

SEQ ID NO: 50262 - RNA, 19 nt, synthetic construct
  misc_feature 1..19: note = siRNA sense sequence
  source 1..19: mol_type = other RNA
ttgatccatacttaaggtt

SEQ ID NO: 50263 - RNA, 19 nt, synthetic construct
  misc_feature 1..19: note = siRNA antisense sequence
  source 1..19: mol_type = other RNA
aaccttaagtatggatcaa

SEQ ID NO: 50264 - RNA, 19 nt, synthetic construct
  misc_feature 1..19: note = siRNA sense sequence
  source 1..19: mol_type = other RNA
tgatccatacttaaggtta

SEQ ID NO: 50265 - RNA, 19 nt, synthetic construct
  misc_feature 1..19: note = siRNA antisense sequence
  source 1..19: mol_type = other RNA
taaccttaagtatggatca

SEQ ID NO: 50266 - RNA, 19 nt, synthetic construct
  misc_feature 1..19: note = siRNA sense sequence
  source 1..19: mol_type = other RNA
gatccatacttaaggttaa

SEQ ID NO: 50267 - RNA, 19 nt, synthetic construct
  misc_feature 1..19: note = siRNA antisense sequence
  source 1..19: mol_type = other RNA
ttaaccttaagtatggatc

SEQ ID NO: 50268 - RNA, 19 nt, synthetic construct
  misc_feature 1..19: note = siRNA sense sequence
  source 1..19: mol_type = other RNA
ccatacttaaggttaattc

SEQ ID NO: 50269 - RNA, 19 nt, synthetic construct
  misc_feature 1..19: note = siRNA antisense sequence
  source 1..19: mol_type = other RNA
gaattaaccttaagtatgg

SEQ ID NO: 50270 - RNA, 19 nt, synthetic construct
  misc_feature 1..19: note = siRNA sense sequence
  source 1..19: mol_type = other RNA
actatttcctttctttggg

SEQ ID NO: 50271 - RNA, 19 nt, synthetic construct
  misc_feature 1..19: note = siRNA antisense sequence
  source 1..19: mol_type = other RNA
cccaaagaaaggaaatagt

SEQ ID NO: 50272 - RNA, 19 nt, synthetic construct
  misc_feature 1..19: note = siRNA sense sequence
  source 1..19: mol_type = other RNA
ctatttcctttctttggga

SEQ ID NO: 50273 - RNA, 19 nt, synthetic construct
  misc_feature 1..19: note = siRNA antisense sequence
  source 1..19: mol_type = other RNA
tcccaaagaaaggaaatag

SEQ ID NO: 50274 - RNA, 19 nt, synthetic construct
  misc_feature 1..19: note = siRNA sense sequence
  source 1..19: mol_type = other RNA
tatttcctttctttgggat

SEQ ID NO: 50275 - RNA, 19 nt, synthetic construct
  misc_feature 1..19: note = siRNA antisense sequence
  source 1..19: mol_type = other RNA
atcccaaagaaaggaaata

SEQ ID NO: 50276 - RNA, 19 nt, synthetic construct
  misc_feature 1..19: note = siRNA sense sequence
  source 1..19: mol_type = other RNA
ctgtagtaaccactgatgt

SEQ ID NO: 50277 - RNA, 19 nt, synthetic construct
  misc_feature 1..19: note = siRNA antisense sequence
  source 1..19: mol_type = other RNA
acatcagtggttactacag

SEQ ID NO: 50278 - RNA, 19 nt, synthetic construct
  misc_feature 1..19: note = siRNA sense sequence
  source 1..19: mol_type = other RNA
tgtagtaaccactgatgtg

SEQ ID NO: 50279 - RNA, 19 nt, synthetic construct
  misc_feature 1..19: note = siRNA antisense sequence
  source 1..19: mol_type = other RNA
cacatcagtggttactaca

SEQ ID NO: 50280 - RNA, 19 nt, synthetic construct
  misc_feature 1..19: note = siRNA sense sequence
  source 1..19: mol_type = other RNA
gtaaccactgatgtgacat

SEQ ID NO: 50281 - RNA, 19 nt, synthetic construct
  misc_feature 1..19: note = siRNA antisense sequence
  source 1..19: mol_type = other RNA
atgtcacatcagtggttac

SEQ ID NO: 50282 - RNA, 19 nt, synthetic construct
  misc_feature 1..19: note = siRNA sense sequence
  source 1..19: mol_type = other RNA
taaccactgatgtgacata

SEQ ID NO: 50283 - RNA, 19 nt, synthetic construct
  misc_feature 1..19: note = siRNA antisense sequence
  source 1..19: mol_type = other RNA
tatgtcacatcagtggtta

SEQ ID NO: 50284 - RNA, 19 nt, synthetic construct
  misc_feature 1..19: note = siRNA sense sequence
  source 1..19: mol_type = other RNA
aaccactgatgtgacatac

SEQ ID NO: 50285 - RNA, 19 nt, synthetic construct
  misc_feature 1..19: note = siRNA antisense sequence
  source 1..19: mol_type = other RNA
gtatgtcacatcagtggtt

SEQ ID NO: 50286 - RNA, 19 nt, synthetic construct
  misc_feature 1..19: note = siRNA sense sequence
  source 1..19: mol_type = other RNA
accactgatgtgacatacc

SEQ ID NO: 50287 - RNA, 19 nt, synthetic construct
  misc_feature 1..19: note = siRNA antisense sequence
  source 1..19: mol_type = other RNA
ggtatgtcacatcagtggt

SEQ ID NO: 50288 - RNA, 19 nt, synthetic construct
  misc_feature 1..19: note = siRNA sense sequence
  source 1..19: mol_type = other RNA
ccactgatgtgacatacca

SEQ ID NO: 50289 - RNA, 19 nt, synthetic construct
  misc_feature 1..19: note = siRNA antisense sequence
  source 1..19: mol_type = other RNA
tggtatgtcacatcagtgg

SEQ ID NO: 50290 - RNA, 19 nt, synthetic construct
  misc_feature 1..19: note = siRNA sense sequence
  source 1..19: mol_type = other RNA
cactgatgtgacataccac

SEQ ID NO: 50291 - RNA, 19 nt, synthetic construct
  misc_feature 1..19: note = siRNA antisense sequence
  source 1..19: mol_type = other RNA
gtggtatgtcacatcagtg

SEQ ID NO: 50292 - RNA, 19 nt, synthetic construct
  misc_feature 1..19: note = siRNA sense sequence
  source 1..19: mol_type = other RNA
gatgtgacataccaccata

SEQ ID NO: 50293 - RNA, 19 nt, synthetic construct
  misc_feature 1..19: note = siRNA antisense sequence
  source 1..19: mol_type = other RNA
tatggtggtatgtcacatc

SEQ ID NO: 50294 - RNA, 19 nt, synthetic construct
  misc_feature 1..19: note = siRNA sense sequence
  source 1..19: mol_type = other RNA
atgtgacataccaccatag

SEQ ID NO: 50295 - RNA, 19 nt, synthetic construct
  misc_feature 1..19: note = siRNA antisense sequence
  source 1..19: mol_type = other RNA
ctatggtggtatgtcacat

SEQ ID NO: 50296 - RNA, 19 nt, synthetic construct
  misc_feature 1..19: note = siRNA sense sequence
  source 1..19: mol_type = other RNA
gacataccaccatagctca

SEQ ID NO: 50297 - RNA, 19 nt, synthetic construct
  misc_feature 1..19: note = siRNA antisense sequence
  source 1..19: mol_type = other RNA
tgagctatggtggtatgtc

SEQ ID NO: 50298 - RNA, 19 nt, synthetic construct
  misc_feature 1..19: note = siRNA sense sequence
  source 1..19: mol_type = other RNA
acataccaccatagctcac

SEQ ID NO: 50299 - RNA, 19 nt, synthetic construct
  misc_feature 1..19: note = siRNA antisense sequence
  source 1..19: mol_type = other RNA
gtgagctatggtggtatgt

SEQ ID NO: 50300 - RNA, 19 nt, synthetic construct
  misc_feature 1..19: note = siRNA sense sequence
  source 1..19: mol_type = other RNA
taccaccatagctcactta

SEQ ID NO: 50301 - RNA, 19 nt, synthetic construct
  misc_feature 1..19: note = siRNA antisense sequence
  source 1..19: mol_type = other RNA
taagtgagctatggtggta

SEQ ID NO: 50302 - RNA, 19 nt, synthetic construct
  misc_feature 1..19: note = siRNA sense sequence
  source 1..19: mol_type = other RNA
accaccatagctcacttag

SEQ ID NO: 50303 - RNA, 19 nt, synthetic construct
  misc_feature 1..19: note = siRNA antisense sequence
  source 1..19: mol_type = other RNA
ctaagtgagctatggtggt

SEQ ID NO: 50304 - RNA, 19 nt, synthetic construct
  misc_feature 1..19: note = siRNA sense sequence
  source 1..19: mol_type = other RNA
ccaccatagctcacttaga

SEQ ID NO: 50305 - RNA, 19 nt, synthetic construct
  misc_feature 1..19: note = siRNA antisense sequence
  source 1..19: mol_type = other RNA
tctaagtgagctatggtgg

SEQ ID NO: 50306 - RNA, 19 nt, synthetic construct
  misc_feature 1..19: note = siRNA sense sequence
  source 1..19: mol_type = other RNA
aactgtatagtatgtactg

SEQ ID NO: 50307 - RNA, 19 nt, synthetic construct
  misc_feature 1..19: note = siRNA antisense sequence
  source 1..19: mol_type = other RNA
cagtacatactatacagtt

SEQ ID NO: 50308 - RNA, 19 nt, synthetic construct
  misc_feature 1..19: note = siRNA sense sequence
  source 1..19: mol_type = other RNA
agtatgtactgtgtgttta

SEQ ID NO: 50309 - RNA, 19 nt, synthetic construct
  misc_feature 1..19: note = siRNA antisense sequence
  source 1..19: mol_type = other RNA
taaacacacagtacatact

SEQ ID NO: 50310 - RNA, 19 nt, synthetic construct
  misc_feature 1..19: note = siRNA sense sequence
  source 1..19: mol_type = other RNA
gtatgtactgtgtgtttag

SEQ ID NO: 50311 - RNA, 19 nt, synthetic construct
  misc_feature 1..19: note = siRNA antisense sequence
  source 1..19: mol_type = other RNA
ctaaacacacagtacatac

SEQ ID NO: 50312 - RNA, 19 nt, synthetic construct
  misc_feature 1..19: note = siRNA sense sequence
  source 1..19: mol_type = other RNA
tatgtactgtgtgtttagc

SEQ ID NO: 50313 - RNA, 19 nt, synthetic construct
  misc_feature 1..19: note = siRNA antisense sequence
  source 1..19: mol_type = other RNA
gctaaacacacagtacata

SEQ ID NO: 50314 - RNA, 19 nt, synthetic construct
  misc_feature 1..19: note = siRNA sense sequence
  source 1..19: mol_type = other RNA
atgtactgtgtgtttagct

SEQ ID NO: 50315 - RNA, 19 nt, synthetic construct
  misc_feature 1..19: note = siRNA antisense sequence
  source 1..19: mol_type = other RNA
agctaaacacacagtacat

SEQ ID NO: 50316 - RNA, 19 nt, synthetic construct
  misc_feature 1..19: note = siRNA sense sequence
  source 1..19: mol_type = other RNA
ctgtgtgtttagcttttca

SEQ ID NO: 50317 - RNA, 19 nt, synthetic construct
  misc_feature 1..19: note = siRNA antisense sequence
  source 1..19: mol_type = other RNA
tgaaaagctaaacacacag

SEQ ID NO: 50318 - RNA, 19 nt, synthetic construct
  misc_feature 1..19: note = siRNA sense sequence
  source 1..19: mol_type = other RNA
tgtgtgtttagcttttcac

SEQ ID NO: 50319 - RNA, 19 nt, synthetic construct
  misc_feature 1..19: note = siRNA antisense sequence
  source 1..19: mol_type = other RNA
gtgaaaagctaaacacaca

SEQ ID NO: 50320 - RNA, 19 nt, synthetic construct
  misc_feature 1..19: note = siRNA sense sequence
  source 1..19: mol_type = other RNA
ttgcttgtgatattttgtg

SEQ ID NO: 50321 - RNA, 19 nt, synthetic construct
  misc_feature 1..19: note = siRNA antisense sequence
  source 1..19: mol_type = other RNA
cacaaaatatcacaagcaa

SEQ ID NO: 50322 - RNA, 19 nt, synthetic construct
  misc_feature 1..19: note = siRNA sense sequence
  source 1..19: mol_type = other RNA
tgcttgtgatattttgtgt

SEQ ID NO: 50323 - RNA, 19 nt, synthetic construct
  misc_feature 1..19: note = siRNA antisense sequence
  source 1..19: mol_type = other RNA
acacaaaatatcacaagca

SEQ ID NO: 50324 - RNA, 19 nt, synthetic construct
  misc_feature 1..19: note = siRNA sense sequence
  source 1..19: mol_type = other RNA
gcttgtgatattttgtgta

SEQ ID NO: 50325 - RNA, 19 nt, synthetic construct
  misc_feature 1..19: note = siRNA antisense sequence
  source 1..19: mol_type = other RNA
tacacaaaatatcacaagc

SEQ ID NO: 50326 - RNA, 19 nt, synthetic construct
  misc_feature 1..19: note = siRNA sense sequence
  source 1..19: mol_type = other RNA
gtgatattttgtgtactgg

SEQ ID NO: 50327 - RNA, 19 nt, synthetic construct
  misc_feature 1..19: note = siRNA antisense sequence
  source 1..19: mol_type = other RNA
ccagtacacaaaatatcac

SEQ ID NO: 50328 - RNA, 19 nt, synthetic construct
  misc_feature 1..19: note = siRNA sense sequence
  source 1..19: mol_type = other RNA
tgatattttgtgtactggg

SEQ ID NO: 50329 - RNA, 19 nt, synthetic construct
  misc_feature 1..19: note = siRNA antisense sequence
  source 1..19: mol_type = other RNA
cccagtacacaaaatatca

SEQ ID NO: 50330 - RNA, 19 nt, synthetic construct
  misc_feature 1..19: note = siRNA sense sequence
  source 1..19: mol_type = other RNA
ctgtttatagacattttgc

SEQ ID NO: 50331 - RNA, 19 nt, synthetic construct
  misc_feature 1..19: note = siRNA antisense sequence
  source 1..19: mol_type = other RNA
gcaaaatgtctataaacag

SEQ ID NO: 50332 - RNA, 19 nt, synthetic construct
  misc_feature 1..19: note = siRNA sense sequence
  source 1..19: mol_type = other RNA
tatagacattttgcttgtg

SEQ ID NO: 50333 - RNA, 19 nt, synthetic construct
  misc_feature 1..19: note = siRNA antisense sequence
  source 1..19: mol_type = other RNA
cacaagcaaaatgtctata

SEQ ID NO: 50334 - RNA, 19 nt, synthetic construct
  misc_feature 1..19: note = siRNA sense sequence
  source 1..19: mol_type = other RNA
atagacattttgcttgtgt

SEQ ID NO: 50335 - RNA, 19 nt, synthetic construct
  misc_feature 1..19: note = siRNA antisense sequence
  source 1..19: mol_type = other RNA
acacaagcaaaatgtctat

SEQ ID NO: 50336 - RNA, 19 nt, synthetic construct
  misc_feature 1..19: note = siRNA sense sequence
  source 1..19: mol_type = other RNA
ttttgcttgtgtccagttt

SEQ ID NO: 50337 - RNA, 19 nt, synthetic construct
  misc_feature 1..19: note = siRNA antisense sequence
  source 1..19: mol_type = other RNA
aaactggacacaagcaaaa

SEQ ID NO: 50338 - RNA, 19 nt, synthetic construct
  misc_feature 1..19: note = siRNA sense sequence
  source 1..19: mol_type = other RNA
tttgcttgtgtccagtttg

SEQ ID NO: 50339 - RNA, 19 nt, synthetic construct
  misc_feature 1..19: note = siRNA antisense sequence
  source 1..19: mol_type = other RNA
caaactggacacaagcaaa

SEQ ID NO: 50340 - RNA, 19 nt, synthetic construct
  misc_feature 1..19: note = siRNA sense sequence
  source 1..19: mol_type = other RNA
ttgcttgtgtccagtttga

SEQ ID NO: 50341 - RNA, 19 nt, synthetic construct
  misc_feature 1..19: note = siRNA antisense sequence
  source 1..19: mol_type = other RNA
tcaaactggacacaagcaa

SEQ ID NO: 50342 - RNA, 19 nt, synthetic construct
  misc_feature 1..19: note = siRNA sense sequence
  source 1..19: mol_type = other RNA
ttgtgtccagtttgagtta

SEQ ID NO: 50343 - RNA, 19 nt, synthetic construct
  misc_feature 1..19: note = siRNA antisense sequence
  source 1..19: mol_type = other RNA
taactcaaactggacacaa

SEQ ID NO: 50344 - RNA, 19 nt, synthetic construct
  misc_feature 1..19: note = siRNA sense sequence
  source 1..19: mol_type = other RNA
tgtgtccagtttgagttat

SEQ ID NO: 50345 - RNA, 19 nt, synthetic construct
  misc_feature 1..19: note = siRNA antisense sequence
  source 1..19: mol_type = other RNA
ataactcaaactggacaca

SEQ ID NO: 50346 - RNA, 19 nt, synthetic construct
  misc_feature 1..19: note = siRNA sense sequence
  source 1..19: mol_type = other RNA
gtgtccagtttgagttatt

SEQ ID NO: 50347 - RNA, 19 nt, synthetic construct
  misc_feature 1..19: note = siRNA antisense sequence
  source 1..19: mol_type = other RNA
aataactcaaactggacac

SEQ ID NO: 50348 - RNA, 19 nt, synthetic construct
  misc_feature 1..19: note = siRNA sense sequence
  source 1..19: mol_type = other RNA
tgtccagtttgagttattg

SEQ ID NO: 50349 - RNA, 19 nt, synthetic construct
  misc_feature 1..19: note = siRNA antisense sequence
  source 1..19: mol_type = other RNA
caataactcaaactggaca

SEQ ID NO: 50350 - RNA, 19 nt, synthetic construct
  misc_feature 1..19: note = siRNA sense sequence
  source 1..19: mol_type = other RNA
aaccaaagtgataatcttc

SEQ ID NO: 50351 - RNA, 19 nt, synthetic construct
  misc_feature 1..19: note = siRNA antisense sequence
  source 1..19: mol_type = other RNA
gaagattatcactttggtt

SEQ ID NO: 50352 - RNA, 19 nt, synthetic construct
  misc_feature 1..19: note = siRNA sense sequence
  source 1..19: mol_type = other RNA
aaagtgataatcttcaggt

SEQ ID NO: 50353 - RNA, 19 nt, synthetic construct
  misc_feature 1..19: note = siRNA antisense sequence
  source 1..19: mol_type = other RNA
acctgaagattatcacttt

SEQ ID NO: 50354 - RNA, 19 nt, synthetic construct
  misc_feature 1..19: note = siRNA sense sequence
  source 1..19: mol_type = other RNA
aagtgataatcttcaggta

SEQ ID NO: 50355 - RNA, 19 nt, synthetic construct
  misc_feature 1..19: note = siRNA antisense sequence
  source 1..19: mol_type = other RNA
tacctgaagattatcactt

SEQ ID NO: 50356 - RNA, 19 nt, synthetic construct
  misc_feature 1..19: note = siRNA sense sequence
  source 1..19: mol_type = other RNA
agtgataatcttcaggtaa

SEQ ID NO: 50357 - RNA, 19 nt, synthetic construct
  misc_feature 1..19: note = siRNA antisense sequence
  source 1..19: mol_type = other RNA
ttacctgaagattatcact

SEQ ID NO: 50358 - RNA, 19 nt, synthetic construct
  misc_feature 1..19: note = siRNA sense sequence
  source 1..19: mol_type = other RNA
gtgataatcttcaggtaac

SEQ ID NO: 50359 - RNA, 19 nt, synthetic construct
  misc_feature 1..19: note = siRNA antisense sequence
  source 1..19: mol_type = other RNA
gttacctgaagattatcac

SEQ ID NO: 50360 - RNA, 19 nt, synthetic construct
  misc_feature 1..19: note = siRNA sense sequence
  source 1..19: mol_type = other RNA
acacttgcaactatggtaa

SEQ ID NO: 50361 - RNA, 19 nt, synthetic construct
  misc_feature 1..19: note = siRNA antisense sequence
  source 1..19: mol_type = other RNA
ttaccatagttgcaagtgt

SEQ ID NO: 50362 - RNA, 19 nt, synthetic construct
  misc_feature 1..19: note = siRNA sense sequence
  source 1..19: mol_type = other RNA
cacttgcaactatggtaaa

SEQ ID NO: 50363 - RNA, 19 nt, synthetic construct
  misc_feature 1..19: note = siRNA antisense sequence
  source 1..19: mol_type = other RNA
tttaccatagttgcaagtg

SEQ ID NO: 50364 - RNA, 19 nt, synthetic construct
  misc_feature 1..19: note = siRNA sense sequence
  source 1..19: mol_type = other RNA
acttgcaactatggtaaaa

SEQ ID NO: 50365 - RNA, 19 nt, synthetic construct
  misc_feature 1..19: note = siRNA antisense sequence
  source 1..19: mol_type = other RNA
ttttaccatagttgcaagt

SEQ ID NO: 50366 - RNA, 19 nt, synthetic construct
  misc_feature 1..19: note = siRNA sense sequence
  source 1..19: mol_type = other RNA
cacctagtgtcctaatata

SEQ ID NO: 50367 - RNA, 19 nt, synthetic construct
  misc_feature 1..19: note = siRNA antisense sequence
  source 1..19: mol_type = other RNA
tatattaggacactaggtg

SEQ ID NO: 50368 - RNA, 19 nt, synthetic construct
  misc_feature 1..19: note = siRNA sense sequence
  source 1..19: mol_type = other RNA
acctagtgtcctaatatac

SEQ ID NO: 50369 - RNA, 19 nt, synthetic construct
  misc_feature 1..19: note = siRNA antisense sequence
  source 1..19: mol_type = other RNA
gtatattaggacactaggt

SEQ ID NO: 50370 - RNA, 19 nt, synthetic construct
  misc_feature 1..19: note = siRNA sense sequence
  source 1..19: mol_type = other RNA
agtgtcctaatatacagaa

SEQ ID NO: 50371 - RNA, 19 nt, synthetic construct
  misc_feature 1..19: note = siRNA antisense sequence
  source 1..19: mol_type = other RNA
ttctgtatattaggacact

SEQ ID NO: 50372 - RNA, 19 nt, synthetic construct
  misc_feature 1..19: note = siRNA sense sequence
  source 1..19: mol_type = other RNA
ttttatgcccatgtactta

SEQ ID NO: 50373 - RNA, 19 nt, synthetic construct
  misc_feature 1..19: note = siRNA antisense sequence
  source 1..19: mol_type = other RNA
taagtacatgggcataaaa

SEQ ID NO: 50374 - RNA, 19 nt, synthetic construct
  misc_feature 1..19: note = siRNA sense sequence
  source 1..19: mol_type = other RNA
tttatgcccatgtacttat

SEQ ID NO: 50375 - RNA, 19 nt, synthetic construct
  misc_feature 1..19: note = siRNA antisense sequence
  source 1..19: mol_type = other RNA
ataagtacatgggcataaa

SEQ ID NO: 50376 - RNA, 19 nt, synthetic construct
  misc_feature 1..19: note = siRNA sense sequence
  source 1..19: mol_type = other RNA
ttatgcccatgtacttatg

SEQ ID NO: 50377 - RNA, 19 nt, synthetic construct
  misc_feature 1..19: note = siRNA antisense sequence
  source 1..19: mol_type = other RNA
cataagtacatgggcataa

SEQ ID NO: 50378 - RNA, 19 nt, synthetic construct
  misc_feature 1..19: note = siRNA sense sequence
  source 1..19: mol_type = other RNA
tatgcccatgtacttatgt

SEQ ID NO: 50379 - RNA, 19 nt, synthetic construct
  misc_feature 1..19: note = siRNA antisense sequence
  source 1..19: mol_type = other RNA
acataagtacatgggcata

SEQ ID NO: 50380 - RNA, 19 nt, synthetic construct
  misc_feature 1..19: note = siRNA sense sequence
  source 1..19: mol_type = other RNA
atgcccatgtacttatgtg

SEQ ID NO: 50381 - RNA, 19 nt, synthetic construct
  misc_feature 1..19: note = siRNA antisense sequence
  source 1..19: mol_type = other RNA
cacataagtacatgggcat

SEQ ID NO: 50382 - RNA, 19 nt, synthetic construct
  misc_feature 1..19: note = siRNA sense sequence
  source 1..19: mol_type = other RNA
caaagctaattagttggac

SEQ ID NO: 50383 - RNA, 19 nt, synthetic construct
  misc_feature 1..19: note = siRNA antisense sequence
  source 1..19: mol_type = other RNA
gtccaactaattagctttg

SEQ ID NO: 50384 - RNA, 19 nt, synthetic construct
  misc_feature 1..19: note = siRNA sense sequence
  source 1..19: mol_type = other RNA
aaagctaattagttggact

SEQ ID NO: 50385 - RNA, 19 nt, synthetic construct
  misc_feature 1..19: note = siRNA antisense sequence
  source 1..19: mol_type = other RNA
agtccaactaattagcttt

SEQ ID NO: 50386 - RNA, 19 nt, synthetic construct
  misc_feature 1..19: note = siRNA sense sequence
  source 1..19: mol_type = other RNA
aagctaattagttggactt

SEQ ID NO: 50387 - RNA, 19 nt, synthetic construct
  misc_feature 1..19: note = siRNA antisense sequence
  source 1..19: mol_type = other RNA
aagtccaactaattagctt

SEQ ID NO: 50388 - RNA, 19 nt, synthetic construct
  misc_feature 1..19: note = siRNA sense sequence
  source 1..19: mol_type = other RNA
agctaattagttggacttc

SEQ ID NO: 50389 - RNA, 19 nt, synthetic construct
  misc_feature 1..19: note = siRNA antisense sequence
  source 1..19: mol_type = other RNA
gaagtccaactaattagct

SEQ ID NO: 50390 - RNA, 19 nt, synthetic construct
  misc_feature 1..19: note = siRNA sense sequence
  source 1..19: mol_type = other RNA
gctaattagttggacttca

SEQ ID NO: 50391 - RNA, 19 nt, synthetic construct
  misc_feature 1..19: note = siRNA antisense sequence
  source 1..19: mol_type = other RNA
tgaagtccaactaattagc

SEQ ID NO: 50392 - RNA, 19 nt, synthetic construct
  misc_feature 1..19: note = siRNA sense sequence
  source 1..19: mol_type = other RNA
ctaattagttggacttcat

SEQ ID NO: 50393 - RNA, 19 nt, synthetic construct
  misc_feature 1..19: note = siRNA antisense sequence
  source 1..19: mol_type = other RNA
atgaagtccaactaattag

SEQ ID NO: 50394 - RNA, 19 nt, synthetic construct
  misc_feature 1..19: note = siRNA sense sequence
  source 1..19: mol_type = other RNA
aacttctactcttcagatg

SEQ ID NO: 50395 - RNA, 19 nt, synthetic construct
  misc_feature 1..19: note = siRNA antisense sequence
  source 1..19: mol_type = other RNA
catctgaagagtagaagtt

SEQ ID NO: 50396 - RNA, 19 nt, synthetic construct
  misc_feature 1..19: note = siRNA sense sequence
  source 1..19: mol_type = other RNA
acttctactcttcagatga

SEQ ID NO: 50397 - RNA, 19 nt, synthetic construct
  misc_feature 1..19: note = siRNA antisense sequence
  source 1..19: mol_type = other RNA
tcatctgaagagtagaagt

SEQ ID NO: 50398 - RNA, 19 nt, synthetic construct
  misc_feature 1..19: note = siRNA sense sequence
  source 1..19: mol_type = other RNA
cttctactcttcagatgac

SEQ ID NO: 50399 - RNA, 19 nt, synthetic construct
  misc_feature 1..19: note = siRNA antisense sequence
  source 1..19: mol_type = other RNA
gtcatctgaagagtagaag

SEQ ID NO: 50400 - RNA, 19 nt, synthetic construct
  misc_feature 1..19: note = siRNA sense sequence
  source 1..19: mol_type = other RNA
ttctactcttcagatgaca

SEQ ID NO: 50401 - RNA, 19 nt, synthetic construct
  misc_feature 1..19: note = siRNA antisense sequence
  source 1..19: mol_type = other RNA
tgtcatctgaagagtagaa

SEQ ID NO: 50402 - RNA, 19 nt, synthetic construct
  misc_feature 1..19: note = siRNA sense sequence
  source 1..19: mol_type = other RNA
ctactcttcagatgacact

SEQ ID NO: 50403 - RNA, 19 nt, synthetic construct
  misc_feature 1..19: note = siRNA antisense sequence
  source 1..19: mol_type = other RNA
agtgtcatctgaagagtag

SEQ ID NO: 50404 - RNA, 19 nt, synthetic construct
  misc_feature 1..19: note = siRNA sense sequence
  source 1..19: mol_type = other RNA
tactcttcagatgacactg

SEQ ID NO: 50405 - RNA, 19 nt, synthetic construct
  misc_feature 1..19: note = siRNA antisense sequence
  source 1..19: mol_type = other RNA
cagtgtcatctgaagagta

SEQ ID NO: 50406 - RNA, 19 nt, synthetic construct
  misc_feature 1..19: note = siRNA sense sequence
  source 1..19: mol_type = other RNA
actcttcagatgacactgt

SEQ ID NO: 50407 - RNA, 19 nt, synthetic construct
  misc_feature 1..19: note = siRNA antisense sequence
  source 1..19: mol_type = other RNA
acagtgtcatctgaagagt

SEQ ID NO: 50408 - RNA, 19 nt, synthetic construct
  misc_feature 1..19: note = siRNA sense sequence
  source 1..19: mol_type = other RNA
caatctacagacgggaaga

SEQ ID NO: 50409 - RNA, 19 nt, synthetic construct
  misc_feature 1..19: note = siRNA antisense sequence
  source 1..19: mol_type = other RNA
tcttcccgtctgtagattg

SEQ ID NO: 50410 - RNA, 19 nt, synthetic construct
  misc_feature 1..19: note = siRNA sense sequence
  source 1..19: mol_type = other RNA
aatctacagacgggaagaa

SEQ ID NO: 50411 - RNA, 19 nt, synthetic construct
  misc_feature 1..19: note = siRNA antisense sequence
  source 1..19: mol_type = other RNA
ttcttcccgtctgtagatt

SEQ ID NO: 50412 - RNA, 19 nt, synthetic construct
  misc_feature 1..19: note = siRNA sense sequence
  source 1..19: mol_type = other RNA
cacataaaggacttgcatc

SEQ ID NO: 50413 - RNA, 19 nt, synthetic construct
  misc_feature 1..19: note = siRNA antisense sequence
  source 1..19: mol_type = other RNA
gatgcaagtcctttatgtg

SEQ ID NO: 50414 - RNA, 19 nt, synthetic construct
  misc_feature 1..19: note = siRNA sense sequence
  source 1..19: mol_type = other RNA
gacttgcatccagactata

SEQ ID NO: 50415 - RNA, 19 nt, synthetic construct
  misc_feature 1..19: note = siRNA antisense sequence
  source 1..19: mol_type = other RNA
tatagtctggatgcaagtc

SEQ ID NO: 50416 - RNA, 19 nt, synthetic construct
  misc_feature 1..19: note = siRNA sense sequence
  source 1..19: mol_type = other RNA
acttgcatccagactatat

SEQ ID NO: 50417 - RNA, 19 nt, synthetic construct
  misc_feature 1..19: note = siRNA antisense sequence
  source 1..19: mol_type = other RNA
atatagtctggatgcaagt

SEQ ID NO: 50418 - RNA, 19 nt, synthetic construct
  misc_feature 1..19: note = siRNA sense sequence
  source 1..19: mol_type = other RNA
ttgcatccagactatatac

SEQ ID NO: 50419 - RNA, 19 nt, synthetic construct
  misc_feature 1..19: note = siRNA antisense sequence
  source 1..19: mol_type = other RNA
gtatatagtctggatgcaa

SEQ ID NO: 50420 - RNA, 19 nt, synthetic construct
  misc_feature 1..19: note = siRNA sense sequence
  source 1..19: mol_type = other RNA
atccagactatatacagaa

SEQ ID NO: 50421 - RNA, 19 nt, synthetic construct
  misc_feature 1..19: note = siRNA antisense sequence
  source 1..19: mol_type = other RNA
ttctgtatatagtctggat

SEQ ID NO: 50422 - RNA, 19 nt, synthetic construct
  misc_feature 1..19: note = siRNA sense sequence
  source 1..19: mol_type = other RNA
tctcgttttcttttaatgg

SEQ ID NO: 50423 - RNA, 19 nt, synthetic construct
  misc_feature 1..19: note = siRNA antisense sequence
  source 1..19: mol_type = other RNA
ccattaaaagaaaacgaga

SEQ ID NO: 50424 - RNA, 19 nt, synthetic construct
  misc_feature 1..19: note = siRNA sense sequence
  source 1..19: mol_type = other RNA
tcgttttcttttaatggga

SEQ ID NO: 50425 - RNA, 19 nt, synthetic construct
  misc_feature 1..19: note = siRNA antisense sequence
  source 1..19: mol_type = other RNA
tcccattaaaagaaaacga

SEQ ID NO: 50426 - RNA, 19 nt, synthetic construct
  misc_feature 1..19: note = siRNA sense sequence
  source 1..19: mol_type = other RNA
cgttttcttttaatgggaa

SEQ ID NO: 50427 - RNA, 19 nt, synthetic construct
  misc_feature 1..19: note = siRNA antisense sequence
  source 1..19: mol_type = other RNA
ttcccattaaaagaaaacg

SEQ ID NO: 50428 - RNA, 19 nt, synthetic construct
  misc_feature 1..19: note = siRNA sense sequence
  source 1..19: mol_type = other RNA
gcaaattaaataagacacc

SEQ ID NO: 50429 - RNA, 19 nt, synthetic construct
  misc_feature 1..19: note = siRNA antisense sequence
  source 1..19: mol_type = other RNA
ggtgtcttatttaatttgc

SEQ ID NO: 50430 - RNA, 19 nt, synthetic construct
  misc_feature 1..19: note = siRNA sense sequence
  source 1..19: mol_type = other RNA
caagtattgacacgcatgc

SEQ ID NO: 50431 - RNA, 19 nt, synthetic construct
  misc_feature 1..19: note = siRNA antisense sequence
  source 1..19: mol_type = other RNA
gcatgcgtgtcaatacttg

SEQ ID NO: 50432 - RNA, 19 nt, synthetic construct
  misc_feature 1..19: note = siRNA sense sequence
  source 1..19: mol_type = other RNA
aagtattgacacgcatgca

SEQ ID NO: 50433 - RNA, 19 nt, synthetic construct
  misc_feature 1..19: note = siRNA antisense sequence
  source 1..19: mol_type = other RNA
tgcatgcgtgtcaatactt

SEQ ID NO: 50434 - RNA, 19 nt, synthetic construct
  misc_feature 1..19: note = siRNA sense sequence
  source 1..19: mol_type = other RNA
agtattgacacgcatgcaa

SEQ ID NO: 50435 - RNA, 19 nt, synthetic construct
  misc_feature 1..19: note = siRNA antisense sequence
  source 1..19: mol_type = other RNA
ttgcatgcgtgtcaatact

SEQ ID NO: 50436 - RNA, 19 nt, synthetic construct
  misc_feature 1..19: note = siRNA sense sequence
  source 1..19: mol_type = other RNA
gtattgacacgcatgcaaa

SEQ ID NO: 50437 - RNA, 19 nt, synthetic construct
  misc_feature 1..19: note = siRNA antisense sequence
  source 1..19: mol_type = other RNA
tttgcatgcgtgtcaatac

SEQ ID NO: 50438 - RNA, 19 nt, synthetic construct
  misc_feature 1..19: note = siRNA sense sequence
  source 1..19: mol_type = other RNA
tattgacacgcatgcaaag

SEQ ID NO: 50439 - RNA, 19 nt, synthetic construct
  misc_feature 1..19: note = siRNA antisense sequence
  source 1..19: mol_type = other RNA
ctttgcatgcgtgtcaata

SEQ ID NO: 50440 - RNA, 19 nt, synthetic construct
  misc_feature 1..19: note = siRNA sense sequence
  source 1..19: mol_type = other RNA
attgacacgcatgcaaagc

SEQ ID NO: 50441 - RNA, 19 nt, synthetic construct
  misc_feature 1..19: note = siRNA antisense sequence
  source 1..19: mol_type = other RNA
gctttgcatgcgtgtcaat

SEQ ID NO: 50442 - RNA, 19 nt, synthetic construct
  misc_feature 1..19: note = siRNA sense sequence
  source 1..19: mol_type = other RNA
ttgacacgcatgcaaagca

SEQ ID NO: 50443 - RNA, 19 nt, synthetic construct
  misc_feature 1..19: note = siRNA antisense sequence
  source 1..19: mol_type = other RNA
tgctttgcatgcgtgtcaa

SEQ ID NO: 50444 - RNA, 19 nt, synthetic construct
  misc_feature 1..19: note = siRNA sense sequence
  source 1..19: mol_type = other RNA
tgacacgcatgcaaagcag

SEQ ID NO: 50445 - RNA, 19 nt, synthetic construct
  misc_feature 1..19: note = siRNA antisense sequence
  source 1..19: mol_type = other RNA
ctgctttgcatgcgtgtca

SEQ ID NO: 50446 - RNA, 19 nt, synthetic construct
  misc_feature 1..19: note = siRNA sense sequence
  source 1..19: mol_type = other RNA
gacacgcatgcaaagcagc

SEQ ID NO: 50447 - RNA, 19 nt, synthetic construct
  misc_feature 1..19: note = siRNA antisense sequence
  source 1..19: mol_type = other RNA
gctgctttgcatgcgtgtc

SEQ ID NO: 50448 - RNA, 19 nt, synthetic construct
  misc_feature 1..19: note = siRNA sense sequence
  source 1..19: mol_type = other RNA
cgcatgcaaagcagctgga

SEQ ID NO: 50449 - RNA, 19 nt, synthetic construct
  misc_feature 1..19: note = siRNA antisense sequence
  source 1..19: mol_type = other RNA
tccagctgctttgcatgcg

SEQ ID NO: 50450 - RNA, 19 nt, synthetic construct
  misc_feature 1..19: note = siRNA sense sequence
  source 1..19: mol_type = other RNA
tgcaaagcagctggatctc

SEQ ID NO: 50451 - RNA, 19 nt, synthetic construct
  misc_feature 1..19: note = siRNA antisense sequence
  source 1..19: mol_type = other RNA
gagatccagctgctttgca

SEQ ID NO: 50452 - RNA, 19 nt, synthetic construct
  misc_feature 1..19: note = siRNA sense sequence
  source 1..19: mol_type = other RNA
gcaaagcagctggatctct

SEQ ID NO: 50453 - RNA, 19 nt, synthetic construct
  misc_feature 1..19: note = siRNA antisense sequence
  source 1..19: mol_type = other RNA
agagatccagctgctttgc

SEQ ID NO: 50454 - RNA, 19 nt, synthetic construct
  misc_feature 1..19: note = siRNA sense sequence
  source 1..19: mol_type = other RNA
caaagcagctggatctctt

SEQ ID NO: 50455 - RNA, 19 nt, synthetic construct
  misc_feature 1..19: note = siRNA antisense sequence
  source 1..19: mol_type = other RNA
aagagatccagctgctttg

SEQ ID NO: 50456 - RNA, 19 nt, synthetic construct
  misc_feature 1..19: note = siRNA sense sequence
  source 1..19: mol_type = other RNA
agcagctggatctcttaga

SEQ ID NO: 50457 - RNA, 19 nt, synthetic construct
  misc_feature 1..19: note = siRNA antisense sequence
  source 1..19: mol_type = other RNA
tctaagagatccagctgct

SEQ ID NO: 50458 - RNA, 19 nt, synthetic construct
  misc_feature 1..19: note = siRNA sense sequence
  source 1..19: mol_type = other RNA
gcagctggatctcttagac

SEQ ID NO: 50459 - RNA, 19 nt, synthetic construct
  misc_feature 1..19: note = siRNA antisense sequence
  source 1..19: mol_type = other RNA
gtctaagagatccagctgc

SEQ ID NO: 50460 - RNA, 19 nt, synthetic construct
  misc_feature 1..19: note = siRNA sense sequence
  source 1..19: mol_type = other RNA
cagctggatctcttagaca

SEQ ID NO: 50461 - RNA, 19 nt, synthetic construct
  misc_feature 1..19: note = siRNA antisense sequence
  source 1..19: mol_type = other RNA
tgtctaagagatccagctg

SEQ ID NO: 50462 - RNA, 19 nt, synthetic construct
  misc_feature 1..19: note = siRNA sense sequence
  source 1..19: mol_type = other RNA
tggatctcttagacatttc

SEQ ID NO: 50463 - RNA, 19 nt, synthetic construct
  misc_feature 1..19: note = siRNA antisense sequence
  source 1..19: mol_type = other RNA
gaaatgtctaagagatcca

SEQ ID NO: 50464 - RNA, 19 nt, synthetic construct
  misc_feature 1..19: note = siRNA sense sequence
  source 1..19: mol_type = other RNA
ggatctcttagacatttct

SEQ ID NO: 50465 - RNA, 19 nt, synthetic construct
  misc_feature 1..19: note = siRNA antisense sequence
  source 1..19: mol_type = other RNA
agaaatgtctaagagatcc

SEQ ID NO: 50466 - RNA, 19 nt, synthetic construct
  misc_feature 1..19: note = siRNA sense sequence
  source 1..19: mol_type = other RNA
gatctcttagacatttctg

SEQ ID NO: 50467 - RNA, 19 nt, synthetic construct
  misc_feature 1..19: note = siRNA antisense sequence
  source 1..19: mol_type = other RNA
cagaaatgtctaagagatc

SEQ ID NO: 50468 - RNA, 19 nt, synthetic construct
  misc_feature 1..19: note = siRNA sense sequence
  source 1..19: mol_type = other RNA
atctcttagacatttctga

SEQ ID NO: 50469 - RNA, 19 nt, synthetic construct
  misc_feature 1..19: note = siRNA antisense sequence
  source 1..19: mol_type = other RNA
tcagaaatgtctaagagat

SEQ ID NO: 50470 - RNA, 19 nt, synthetic construct
  misc_feature 1..19: note = siRNA sense sequence
  source 1..19: mol_type = other RNA
tctcttagacatttctgat

SEQ ID NO: 50471 - RNA, 19 nt, synthetic construct
  misc_feature 1..19: note = siRNA antisense sequence
  source 1..19: mol_type = other RNA
atcagaaatgtctaagaga

SEQ ID NO: 50472 - RNA, 19 nt, synthetic construct
  misc_feature 1..19: note = siRNA sense sequence
  source 1..19: mol_type = other RNA
cttagacatttctgatggg

SEQ ID NO: 50473 - RNA, 19 nt, synthetic construct
  misc_feature 1..19: note = siRNA antisense sequence
  source 1..19: mol_type = other RNA
cccatcagaaatgtctaag

SEQ ID NO: 50474 - RNA, 19 nt, synthetic construct
  misc_feature 1..19: note = siRNA sense sequence
  source 1..19: mol_type = other RNA
ttagacatttctgatggga

SEQ ID NO: 50475 - RNA, 19 nt, synthetic construct
  misc_feature 1..19: note = siRNA antisense sequence
  source 1..19: mol_type = other RNA
tcccatcagaaatgtctaa

SEQ ID NO: 50476 - RNA, 19 nt, synthetic construct
  misc_feature 1..19: note = siRNA sense sequence
  source 1..19: mol_type = other RNA
tagacatttctgatgggaa

SEQ ID NO: 50477 - RNA, 19 nt, synthetic construct
  misc_feature 1..19: note = siRNA antisense sequence
  source 1..19: mol_type = other RNA
ttcccatcagaaatgtcta

SEQ ID NO: 50478 - RNA, 19 nt, synthetic construct
  misc_feature 1..19: note = siRNA sense sequence
  source 1..19: mol_type = other RNA
ttcacttattgtatgaccc

SEQ ID NO: 50479 - RNA, 19 nt, synthetic construct
  misc_feature 1..19: note = siRNA antisense sequence
  source 1..19: mol_type = other RNA
gggtcatacaataagtgaa

SEQ ID NO: 50480 - RNA, 19 nt, synthetic construct
  misc_feature 1..19: note = siRNA sense sequence
  source 1..19: mol_type = other RNA
tcacttattgtatgaccca

SEQ ID NO: 50481 - RNA, 19 nt, synthetic construct
  misc_feature 1..19: note = siRNA antisense sequence
  source 1..19: mol_type = other RNA
tgggtcatacaataagtga

SEQ ID NO: 50482 - RNA, 19 nt, synthetic construct
  misc_feature 1..19: note = siRNA sense sequence
  source 1..19: mol_type = other RNA
tgacccagcactttcattt

SEQ ID NO: 50483 - RNA, 19 nt, synthetic construct
  misc_feature 1..19: note = siRNA antisense sequence
  source 1..19: mol_type = other RNA
aaatgaaagtgctgggtca

SEQ ID NO: 50484 - RNA, 19 nt, synthetic construct
  misc_feature 1..19: note = siRNA sense sequence
  source 1..19: mol_type = other RNA
gacccagcactttcatttc

SEQ ID NO: 50485 - RNA, 19 nt, synthetic construct
  misc_feature 1..19: note = siRNA antisense sequence
  source 1..19: mol_type = other RNA
gaaatgaaagtgctgggtc

SEQ ID NO: 50486 - RNA, 19 nt, synthetic construct
  misc_feature 1..19: note = siRNA sense sequence
  source 1..19: mol_type = other RNA
acccagcactttcatttct

SEQ ID NO: 50487 - RNA, 19 nt, synthetic construct
  misc_feature 1..19: note = siRNA antisense sequence
  source 1..19: mol_type = other RNA
agaaatgaaagtgctgggt

SEQ ID NO: 50488 - RNA, 19 nt, synthetic construct
  misc_feature 1..19: note = siRNA sense sequence
  source 1..19: mol_type = other RNA
ccagcactttcatttctag

SEQ ID NO: 50489 - RNA, 19 nt, synthetic construct
  misc_feature 1..19: note = siRNA antisense sequence
  source 1..19: mol_type = other RNA
ctagaaatgaaagtgctgg

SEQ ID NO: 50490 - RNA, 19 nt, synthetic construct
  misc_feature 1..19: note = siRNA sense sequence
  source 1..19: mol_type = other RNA
tcataatatgttgaagctg

SEQ ID NO: 50491 - RNA, 19 nt, synthetic construct
  misc_feature 1..19: note = siRNA antisense sequence
  source 1..19: mol_type = other RNA
cagcttcaacatattatga

SEQ ID NO: 50492 - RNA, 19 nt, synthetic construct
  misc_feature 1..19: note = siRNA sense sequence
  source 1..19: mol_type = other RNA
cataatatgttgaagctgc

SEQ ID NO: 50493 - RNA, 19 nt, synthetic construct
  misc_feature 1..19: note = siRNA antisense sequence
  source 1..19: mol_type = other RNA
gcagcttcaacatattatg

SEQ ID NO: 50494 - RNA, 19 nt, synthetic construct
  misc_feature 1..19: note = siRNA sense sequence
  source 1..19: mol_type = other RNA
ataatatgttgaagctgca

SEQ ID NO: 50495 - RNA, 19 nt, synthetic construct
  misc_feature 1..19: note = siRNA antisense sequence
  source 1..19: mol_type = other RNA
tgcagcttcaacatattat

SEQ ID NO: 50496 - RNA, 19 nt, synthetic construct
  misc_feature 1..19: note = siRNA sense sequence
  source 1..19: mol_type = other RNA
ctcattaagtaaattgtgg

SEQ ID NO: 50497 - RNA, 19 nt, synthetic construct
  misc_feature 1..19: note = siRNA antisense sequence
  source 1..19: mol_type = other RNA
ccacaatttacttaatgag

SEQ ID NO: 50498 - RNA, 19 nt, synthetic construct
  misc_feature 1..19: note = siRNA sense sequence
  source 1..19: mol_type = other RNA
ttccttaaatctgacattc

SEQ ID NO: 50499 - RNA, 19 nt, synthetic construct
  misc_feature 1..19: note = siRNA antisense sequence
  source 1..19: mol_type = other RNA
gaatgtcagatttaaggaa

SEQ ID NO: 50500 - RNA, 19 nt, synthetic construct
  misc_feature 1..19: note = siRNA sense sequence
  source 1..19: mol_type = other RNA
tccttaaatctgacattct

SEQ ID NO: 50501 - RNA, 19 nt, synthetic construct
  misc_feature 1..19: note = siRNA antisense sequence
  source 1..19: mol_type = other RNA
agaatgtcagatttaagga

SEQ ID NO: 50502 - RNA, 19 nt, synthetic construct
  misc_feature 1..19: note = siRNA sense sequence
  source 1..19: mol_type = other RNA
ccttaaatctgacattctg

SEQ ID NO: 50503 - RNA, 19 nt, synthetic construct
  misc_feature 1..19: note = siRNA antisense sequence
  source 1..19: mol_type = other RNA
cagaatgtcagatttaagg

SEQ ID NO: 50504 - RNA, 19 nt, synthetic construct
  misc_feature 1..19: note = siRNA sense sequence
  source 1..19: mol_type = other RNA
cttaaatctgacattctgg

SEQ ID NO: 50505 - RNA, 19 nt, synthetic construct
  misc_feature 1..19: note = siRNA antisense sequence
  source 1..19: mol_type = other RNA
ccagaatgtcagatttaag

SEQ ID NO: 50506 - RNA, 19 nt, synthetic construct
  misc_feature 1..19: note = siRNA sense sequence
  source 1..19: mol_type = other RNA
ttaaatctgacattctgga

SEQ ID NO: 50507 - RNA, 19 nt, synthetic construct
  misc_feature 1..19: note = siRNA antisense sequence
  source 1..19: mol_type = other RNA
tccagaatgtcagatttaa

SEQ ID NO: 50508 - RNA, 19 nt, synthetic construct
  misc_feature 1..19: note = siRNA sense sequence
  source 1..19: mol_type = other RNA
taaatctgacattctggaa

SEQ ID NO: 50509 - RNA, 19 nt, synthetic construct
  misc_feature 1..19: note = siRNA antisense sequence
  source 1..19: mol_type = other RNA
ttccagaatgtcagattta

SEQ ID NO: 50510 - RNA, 19 nt, synthetic construct
  misc_feature 1..19: note = siRNA sense sequence
  source 1..19: mol_type = other RNA
aaatcaaagctataaggac

SEQ ID NO: 50511 - RNA, 19 nt, synthetic construct
  misc_feature 1..19: note = siRNA antisense sequence
  source 1..19: mol_type = other RNA
gtccttatagctttgattt

SEQ ID NO: 50512 - RNA, 19 nt, synthetic construct
  misc_feature 1..19: note = siRNA sense sequence
  source 1..19: mol_type = other RNA
aatcaaagctataaggaca

SEQ ID NO: 50513 - RNA, 19 nt, synthetic construct
  misc_feature 1..19: note = siRNA antisense sequence
  source 1..19: mol_type = other RNA
tgtccttatagctttgatt

SEQ ID NO: 50514 - RNA, 19 nt, synthetic construct
  misc_feature 1..19: note = siRNA sense sequence
  source 1..19: mol_type = other RNA
atcaaagctataaggacag

SEQ ID NO: 50515 - RNA, 19 nt, synthetic construct
  misc_feature 1..19: note = siRNA antisense sequence
  source 1..19: mol_type = other RNA
ctgtccttatagctttgat

SEQ ID NO: 50516 - RNA, 19 nt, synthetic construct
  misc_feature 1..19: note = siRNA sense sequence
  source 1..19: mol_type = other RNA
caaagctataaggacagat

SEQ ID NO: 50517 - RNA, 19 nt, synthetic construct
  misc_feature 1..19: note = siRNA antisense sequence
  source 1..19: mol_type = other RNA
atctgtccttatagctttg

SEQ ID NO: 50518 - RNA, 19 nt, synthetic construct
  misc_feature 1..19: note = siRNA sense sequence
  source 1..19: mol_type = other RNA
aaagctataaggacagatt

SEQ ID NO: 50519 - RNA, 19 nt, synthetic construct
  misc_feature 1..19: note = siRNA antisense sequence
  source 1..19: mol_type = other RNA
aatctgtccttatagcttt

SEQ ID NO: 50520 - RNA, 19 nt, synthetic construct
  misc_feature 1..19: note = siRNA sense sequence
  source 1..19: mol_type = other RNA
aagctataaggacagatta

SEQ ID NO: 50521 - RNA, 19 nt, synthetic construct
  misc_feature 1..19: note = siRNA antisense sequence
  source 1..19: mol_type = other RNA
taatctgtccttatagctt

SEQ ID NO: 50522 - RNA, 19 nt, synthetic construct
  misc_feature 1..19: note = siRNA sense sequence
  source 1..19: mol_type = other RNA
aaggacagattatttatcg

SEQ ID NO: 50523 - RNA, 19 nt, synthetic construct
  misc_feature 1..19: note = siRNA antisense sequence
  source 1..19: mol_type = other RNA
cgataaataatctgtcctt

SEQ ID NO: 50524 - RNA, 19 nt, synthetic construct
  misc_feature 1..19: note = siRNA sense sequence
  source 1..19: mol_type = other RNA
aggacagattatttatcgg

SEQ ID NO: 50525 - RNA, 19 nt, synthetic construct
  misc_feature 1..19: note = siRNA antisense sequence
  source 1..19: mol_type = other RNA
ccgataaataatctgtcct

SEQ ID NO: 50526 - RNA, 19 nt, synthetic construct
  misc_feature 1..19: note = siRNA sense sequence
  source 1..19: mol_type = other RNA
ggacagattatttatcggt

SEQ ID NO: 50527 - RNA, 19 nt, synthetic construct
  misc_feature 1..19: note = siRNA antisense sequence
  source 1..19: mol_type = other RNA
accgataaataatctgtcc

SEQ ID NO: 50528 - RNA, 19 nt, synthetic construct
  misc_feature 1..19: note = siRNA sense sequence
  source 1..19: mol_type = other RNA
gacagattatttatcggtg

SEQ ID NO: 50529 - RNA, 19 nt, synthetic construct
  misc_feature 1..19: note = siRNA antisense sequence
  source 1..19: mol_type = other RNA
caccgataaataatctgtc

SEQ ID NO: 50530 - RNA, 19 nt, synthetic construct
  misc_feature 1..19: note = siRNA sense sequence
  source 1..19: mol_type = other RNA
acagattatttatcggtgg

SEQ ID NO: 50531 - RNA, 19 nt, synthetic construct
  misc_feature 1..19: note = siRNA antisense sequence
  source 1..19: mol_type = other RNA
ccaccgataaataatctgt

SEQ ID NO: 50532 - RNA, 19 nt, synthetic construct
  misc_feature 1..19: note = siRNA sense sequence
  source 1..19: mol_type = other RNA
cagattatttatcggtggt

SEQ ID NO: 50533 - RNA, 19 nt, synthetic construct
  misc_feature 1..19: note = siRNA antisense sequence
  source 1..19: mol_type = other RNA
accaccgataaataatctg

SEQ ID NO: 50534 - RNA, 19 nt, synthetic construct
  misc_feature 1..19: note = siRNA sense sequence
  source 1..19: mol_type = other RNA
agattatttatcggtggtt

SEQ ID NO: 50535 - RNA, 19 nt, synthetic construct
  misc_feature 1..19: note = siRNA antisense sequence
  source 1..19: mol_type = other RNA
aaccaccgataaataatct

SEQ ID NO: 50536 - RNA, 19 nt, synthetic construct
  misc_feature 1..19: note = siRNA sense sequence
  source 1..19: mol_type = other RNA
gattatttatcggtggttg

SEQ ID NO: 50537 - RNA, 19 nt, synthetic construct
  misc_feature 1..19: note = siRNA antisense sequence
  source 1..19: mol_type = other RNA
caaccaccgataaataatc

SEQ ID NO: 50538 - RNA, 19 nt, synthetic construct
  misc_feature 1..19: note = siRNA sense sequence
  source 1..19: mol_type = other RNA
attatttatcggtggttgc

SEQ ID NO: 50539 - RNA, 19 nt, synthetic construct
  misc_feature 1..19: note = siRNA antisense sequence
  source 1..19: mol_type = other RNA
gcaaccaccgataaataat

SEQ ID NO: 50540 - RNA, 19 nt, synthetic construct
  misc_feature 1..19: note = siRNA sense sequence
  source 1..19: mol_type = other RNA
ttatttatcggtggttgcc

SEQ ID NO: 50541 - RNA, 19 nt, synthetic construct
  misc_feature 1..19: note = siRNA antisense sequence
  source 1..19: mol_type = other RNA
ggcaaccaccgataaataa

SEQ ID NO: 50542 - RNA, 19 nt, synthetic construct
  misc_feature 1..19: note = siRNA sense sequence
  source 1..19: mol_type = other RNA
tatttatcggtggttgcca

SEQ ID NO: 50543 - RNA, 19 nt, synthetic construct
  misc_feature 1..19: note = siRNA antisense sequence
  source 1..19: mol_type = other RNA
tggcaaccaccgataaata

SEQ ID NO: 50544 - RNA, 19 nt, synthetic construct
  misc_feature 1..19: note = siRNA sense sequence
  source 1..19: mol_type = other RNA
atttatcggtggttgccag

SEQ ID NO: 50545 - RNA, 19 nt, synthetic construct
  misc_feature 1..19: note = siRNA antisense sequence
  source 1..19: mol_type = other RNA
ctggcaaccaccgataaat

SEQ ID NO: 50546 - RNA, 19 nt, synthetic construct
  misc_feature 1..19: note = siRNA sense sequence
  source 1..19: mol_type = other RNA
gggaggaagggattgacta

SEQ ID NO: 50547 - RNA, 19 nt, synthetic construct
  misc_feature 1..19: note = siRNA antisense sequence
  source 1..19: mol_type = other RNA
tagtcaatcccttcctccc

SEQ ID NO: 50548 - RNA, 19 nt, synthetic construct
  misc_feature 1..19: note = siRNA sense sequence
  source 1..19: mol_type = other RNA
ggaggaagggattgactat

SEQ ID NO: 50549 - RNA, 19 nt, synthetic construct
  misc_feature 1..19: note = siRNA antisense sequence
  source 1..19: mol_type = other RNA
atagtcaatcccttcctcc

SEQ ID NO: 50550 - RNA, 19 nt, synthetic construct
  misc_feature 1..19: note = siRNA sense sequence
  source 1..19: mol_type = other RNA
ggaagggattgactatagg

SEQ ID NO: 50551 - RNA, 19 nt, synthetic construct
  misc_feature 1..19: note = siRNA antisense sequence
  source 1..19: mol_type = other RNA
cctatagtcaatcccttcc

SEQ ID NO: 50552 - RNA, 19 nt, synthetic construct
  misc_feature 1..19: note = siRNA sense sequence
  source 1..19: mol_type = other RNA
gaagggattgactataggg

SEQ ID NO: 50553 - RNA, 19 nt, synthetic construct
  misc_feature 1..19: note = siRNA antisense sequence
  source 1..19: mol_type = other RNA
ccctatagtcaatcccttc

SEQ ID NO: 50554 - RNA, 19 nt, synthetic construct
  misc_feature 1..19: note = siRNA sense sequence
  source 1..19: mol_type = other RNA
atattctacaccttgatgt

SEQ ID NO: 50555 - RNA, 19 nt, synthetic construct
  misc_feature 1..19: note = siRNA antisense sequence
  source 1..19: mol_type = other RNA
acatcaaggtgtagaatat

SEQ ID NO: 50556 - RNA, 19 nt, synthetic construct
  misc_feature 1..19: note = siRNA sense sequence
  source 1..19: mol_type = other RNA
tattctacaccttgatgtg

SEQ ID NO: 50557 - RNA, 19 nt, synthetic construct
  misc_feature 1..19: note = siRNA antisense sequence
  source 1..19: mol_type = other RNA
cacatcaaggtgtagaata

SEQ ID NO: 50558 - RNA, 19 nt, synthetic construct
  misc_feature 1..19: note = siRNA sense sequence
  source 1..19: mol_type = other RNA
attctacaccttgatgtgg

SEQ ID NO: 50559 - RNA, 19 nt, synthetic construct
  misc_feature 1..19: note = siRNA antisense sequence
  source 1..19: mol_type = other RNA
ccacatcaaggtgtagaat

SEQ ID NO: 50560 - RNA, 19 nt, synthetic construct
  misc_feature 1..19: note = siRNA sense sequence
  source 1..19: mol_type = other RNA
ttctacaccttgatgtggc

SEQ ID NO: 50561 - RNA, 19 nt, synthetic construct
  misc_feature 1..19: note = siRNA antisense sequence
  source 1..19: mol_type = other RNA
gccacatcaaggtgtagaa

SEQ ID NO: 50562 - RNA, 19 nt, synthetic construct
  misc_feature 1..19: note = siRNA sense sequence
  source 1..19: mol_type = other RNA
tctacaccttgatgtggca

SEQ ID NO: 50563 - RNA, 19 nt, synthetic construct
  misc_feature 1..19: note = siRNA antisense sequence
  source 1..19: mol_type = other RNA
tgccacatcaaggtgtaga

SEQ ID NO: 50564 - RNA, 19 nt, synthetic construct
  misc_feature 1..19: note = siRNA sense sequence
  source 1..19: mol_type = other RNA
ctacaccttgatgtggcag

SEQ ID NO: 50565 - RNA, 19 nt, synthetic construct
  misc_feature 1..19: note = siRNA antisense sequence
  source 1..19: mol_type = other RNA
ctgccacatcaaggtgtag

SEQ ID NO: 50566 - RNA, 19 nt, synthetic construct
  misc_feature 1..19: note = siRNA sense sequence
  source 1..19: mol_type = other RNA
acaccttgatgtggcagta

SEQ ID NO: 50567 - RNA, 19 nt, synthetic construct
  misc_feature 1..19: note = siRNA antisense sequence
  source 1..19: mol_type = other RNA
tactgccacatcaaggtgt

SEQ ID NO: 50568 - RNA, 19 nt, synthetic construct
  misc_feature 1..19: note = siRNA sense sequence
  source 1..19: mol_type = other RNA
caccttgatgtggcagtaa

SEQ ID NO: 50569 - RNA, 19 nt, synthetic construct
  misc_feature 1..19: note = siRNA antisense sequence
  source 1..19: mol_type = other RNA
ttactgccacatcaaggtg

SEQ ID NO: 50570 - RNA, 19 nt, synthetic construct
  misc_feature 1..19: note = siRNA sense sequence
  source 1..19: mol_type = other RNA
caactatattggtttgtca

SEQ ID NO: 50571 - RNA, 19 nt, synthetic construct
  misc_feature 1..19: note = siRNA antisense sequence
  source 1..19: mol_type = other RNA
tgacaaaccaatatagttg

SEQ ID NO: 50572 - RNA, 19 nt, synthetic construct
  misc_feature 1..19: note = siRNA sense sequence
  source 1..19: mol_type = other RNA
tatattggtttgtcacact

SEQ ID NO: 50573 - RNA, 19 nt, synthetic construct
  misc_feature 1..19: note = siRNA antisense sequence
  source 1..19: mol_type = other RNA
agtgtgacaaaccaatata

SEQ ID NO: 50574 - RNA, 19 nt, synthetic construct
  misc_feature 1..19: note = siRNA sense sequence
  source 1..19: mol_type = other RNA
atattggtttgtcacactc

SEQ ID NO: 50575 - RNA, 19 nt, synthetic construct
  misc_feature 1..19: note = siRNA antisense sequence
  source 1..19: mol_type = other RNA
gagtgtgacaaaccaatat

SEQ ID NO: 50576 - RNA, 19 nt, synthetic construct
  misc_feature 1..19: note = siRNA sense sequence
  source 1..19: mol_type = other RNA
tggtttgtcacactcatag

SEQ ID NO: 50577 - RNA, 19 nt, synthetic construct
  misc_feature 1..19: note = siRNA antisense sequence
  source 1..19: mol_type = other RNA
ctatgagtgtgacaaacca

SEQ ID NO: 50578 - RNA, 19 nt, synthetic construct
  misc_feature 1..19: note = siRNA sense sequence
  source 1..19: mol_type = other RNA
ggtttgtcacactcataga

SEQ ID NO: 50579 - RNA, 19 nt, synthetic construct
  misc_feature 1..19: note = siRNA antisense sequence
  source 1..19: mol_type = other RNA
tctatgagtgtgacaaacc

SEQ ID NO: 50580 - RNA, 19 nt, synthetic construct
  misc_feature 1..19: note = siRNA sense sequence
  source 1..19: mol_type = other RNA
gtttgtcacactcatagaa

SEQ ID NO: 50581 - RNA, 19 nt, synthetic construct
  misc_feature 1..19: note = siRNA antisense sequence
  source 1..19: mol_type = other RNA
ttctatgagtgtgacaaac

SEQ ID NO: 50582 - RNA, 19 nt, synthetic construct
  misc_feature 1..19: note = siRNA sense sequence
  source 1..19: mol_type = other RNA
tttgtcacactcatagaat

SEQ ID NO: 50583 - RNA, 19 nt, synthetic construct
  misc_feature 1..19: note = siRNA antisense sequence
  source 1..19: mol_type = other RNA
attctatgagtgtgacaaa

SEQ ID NO: 50584 - RNA, 19 nt, synthetic construct
  misc_feature 1..19: note = siRNA sense sequence
  source 1..19: mol_type = other RNA
ttgtcacactcatagaatt

SEQ ID NO: 50585 - RNA, 19 nt, synthetic construct
  misc_feature 1..19: note = siRNA antisense sequence
  source 1..19: mol_type = other RNA
aattctatgagtgtgacaa

SEQ ID NO: 50586 - RNA, 19 nt, synthetic construct
  misc_feature 1..19: note = siRNA sense sequence
  source 1..19: mol_type = other RNA
tgtcacactcatagaattg

SEQ ID NO: 50587 - RNA, 19 nt, synthetic construct
  misc_feature 1..19: note = siRNA antisense sequence
  source 1..19: mol_type = other RNA
caattctatgagtgtgaca

SEQ ID NO: 50588 - RNA, 19 nt, synthetic construct
  misc_feature 1..19: note = siRNA sense sequence
  source 1..19: mol_type = other RNA
gtcacactcatagaattgt

SEQ ID NO: 50589 - RNA, 19 nt, synthetic construct
  misc_feature 1..19: note = siRNA antisense sequence
  source 1..19: mol_type = other RNA
acaattctatgagtgtgac

SEQ ID NO: 50590 - RNA, 19 nt, synthetic construct
  misc_feature 1..19: note = siRNA sense sequence
  source 1..19: mol_type = other RNA
tcacactcatagaattgta

SEQ ID NO: 50591 - RNA, 19 nt, synthetic construct
  misc_feature 1..19: note = siRNA antisense sequence
  source 1..19: mol_type = other RNA
tacaattctatgagtgtga

SEQ ID NO: 50592 - RNA, 19 nt, synthetic construct
  misc_feature 1..19: note = siRNA sense sequence
  source 1..19: mol_type = other RNA
cacactcatagaattgtac

SEQ ID NO: 50593 - RNA, 19 nt, synthetic construct
  misc_feature 1..19: note = siRNA antisense sequence
  source 1..19: mol_type = other RNA
gtacaattctatgagtgtg

SEQ ID NO: 50594 - RNA, 19 nt, synthetic construct
  misc_feature 1..19: note = siRNA sense sequence
  source 1..19: mol_type = other RNA
ctcatagaattgtacatct

SEQ ID NO: 50595 - RNA, 19 nt, synthetic construct
  misc_feature 1..19: note = siRNA antisense sequence
  source 1..19: mol_type = other RNA
agatgtacaattctatgag

SEQ ID NO: 50596 - RNA, 19 nt, synthetic construct
  misc_feature 1..19: note = siRNA sense sequence
  source 1..19: mol_type = other RNA
caatcatatataactcctg

SEQ ID NO: 50597 - RNA, 19 nt, synthetic construct
  misc_feature 1..19: note = siRNA antisense sequence
  source 1..19: mol_type = other RNA
caggagttatatatgattg

SEQ ID NO: 50598 - RNA, 19 nt, synthetic construct
  misc_feature 1..19: note = siRNA sense sequence
  source 1..19: mol_type = other RNA
aatcatatataactcctgc

SEQ ID NO: 50599 - RNA, 19 nt, synthetic construct
  misc_feature 1..19: note = siRNA antisense sequence
  source 1..19: mol_type = other RNA
gcaggagttatatatgatt

SEQ ID NO: 50600 - RNA, 19 nt, synthetic construct
  misc_feature 1..19: note = siRNA sense sequence
  source 1..19: mol_type = other RNA
atcatatataactcctgct

SEQ ID NO: 50601 - RNA, 19 nt, synthetic construct
  misc_feature 1..19: note = siRNA antisense sequence
  source 1..19: mol_type = other RNA
agcaggagttatatatgat

SEQ ID NO: 50602 - RNA, 19 nt, synthetic construct
  misc_feature 1..19: note = siRNA sense sequence
  source 1..19: mol_type = other RNA
tcatatataactcctgctt

SEQ ID NO: 50603 - RNA, 19 nt, synthetic construct
  misc_feature 1..19: note = siRNA antisense sequence
  source 1..19: mol_type = other RNA
aagcaggagttatatatga

SEQ ID NO: 50604 - RNA, 19 nt, synthetic construct
  misc_feature 1..19: note = siRNA sense sequence
  source 1..19: mol_type = other RNA
catatataactcctgcttc

SEQ ID NO: 50605 - RNA, 19 nt, synthetic construct
  misc_feature 1..19: note = siRNA antisense sequence
  source 1..19: mol_type = other RNA
gaagcaggagttatatatg

SEQ ID NO: 50606 - RNA, 19 nt, synthetic construct
  misc_feature 1..19: note = siRNA sense sequence
  source 1..19: mol_type = other RNA
atatataactcctgcttct

SEQ ID NO: 50607 - RNA, 19 nt, synthetic construct
  misc_feature 1..19: note = siRNA antisense sequence
  source 1..19: mol_type = other RNA
agaagcaggagttatatat

SEQ ID NO: 50608 - RNA, 19 nt, synthetic construct
  misc_feature 1..19: note = siRNA sense sequence
  source 1..19: mol_type = other RNA
tatataactcctgcttctc

SEQ ID NO: 50609 - RNA, 19 nt, synthetic construct
  misc_feature 1..19: note = siRNA antisense sequence
  source 1..19: mol_type = other RNA
gagaagcaggagttatata

SEQ ID NO: 50610 - RNA, 19 nt, synthetic construct
  misc_feature 1..19: note = siRNA sense sequence
  source 1..19: mol_type = other RNA
atataactcctgcttctct

SEQ ID NO: 50611 - RNA, 19 nt, synthetic construct
  misc_feature 1..19: note = siRNA antisense sequence
  source 1..19: mol_type = other RNA
agagaagcaggagttatat

SEQ ID NO: 50612 - RNA, 19 nt, synthetic construct
  misc_feature 1..19: note = siRNA sense sequence
  source 1..19: mol_type = other RNA
tataactcctgcttctctc

SEQ ID NO: 50613 - RNA, 19 nt, synthetic construct
  misc_feature 1..19: note = siRNA antisense sequence
  source 1..19: mol_type = other RNA
gagagaagcaggagttata

SEQ ID NO: 50614 - RNA, 19 nt, synthetic construct
  misc_feature 1..19: note = siRNA sense sequence
  source 1..19: mol_type = other RNA
ataactcctgcttctctct

SEQ ID NO: 50615 - RNA, 19 nt, synthetic construct
  misc_feature 1..19: note = siRNA antisense sequence
  source 1..19: mol_type = other RNA
agagagaagcaggagttat

SEQ ID NO: 50616 - RNA, 19 nt, synthetic construct
  misc_feature 1..19: note = siRNA sense sequence
  source 1..19: mol_type = other RNA
taactcctgcttctctctc

SEQ ID NO: 50617 - RNA, 19 nt, synthetic construct
  misc_feature 1..19: note = siRNA antisense sequence
  source 1..19: mol_type = other RNA
gagagagaagcaggagtta

SEQ ID NO: 50618 - RNA, 19 nt, synthetic construct
  misc_feature 1..19: note = siRNA sense sequence
  source 1..19: mol_type = other RNA
ctctctcctcttcataaaa

SEQ ID NO: 50619 - RNA, 19 nt, synthetic construct
  misc_feature 1..19: note = siRNA antisense sequence
  source 1..19: mol_type = other RNA
ttttatgaagaggagagag

SEQ ID NO: 50620 - RNA, 19 nt, synthetic construct
  misc_feature 1..19: note = siRNA sense sequence
  source 1..19: mol_type = other RNA
gtctccagcatttggtttc

SEQ ID NO: 50621 - RNA, 19 nt, synthetic construct
  misc_feature 1..19: note = siRNA antisense sequence
  source 1..19: mol_type = other RNA
gaaaccaaatgctggagac

SEQ ID NO: 50622 - RNA, 19 nt, synthetic construct
  misc_feature 1..19: note = siRNA sense sequence
  source 1..19: mol_type = other RNA
tctccagcatttggtttca

SEQ ID NO: 50623 - RNA, 19 nt, synthetic construct
  misc_feature 1..19: note = siRNA antisense sequence
  source 1..19: mol_type = other RNA
tgaaaccaaatgctggaga

SEQ ID NO: 50624 - RNA, 19 nt, synthetic construct
  misc_feature 1..19: note = siRNA sense sequence
  source 1..19: mol_type = other RNA
ctccagcatttggtttcaa

SEQ ID NO: 50625 - RNA, 19 nt, synthetic construct
  misc_feature 1..19: note = siRNA antisense sequence
  source 1..19: mol_type = other RNA
ttgaaaccaaatgctggag

SEQ ID NO: 50626 - RNA, 19 nt, synthetic construct
  misc_feature 1..19: note = siRNA sense sequence
  source 1..19: mol_type = other RNA
gattgccaatttagattac

SEQ ID NO: 50627 - RNA, 19 nt, synthetic construct
  misc_feature 1..19: note = siRNA antisense sequence
  source 1..19: mol_type = other RNA
gtaatctaaattggcaatc

SEQ ID NO: 50628 - RNA, 19 nt, synthetic construct
  misc_feature 1..19: note = siRNA sense sequence
  source 1..19: mol_type = other RNA
attgccaatttagattacc

SEQ ID NO: 50629 - RNA, 19 nt, synthetic construct
  misc_feature 1..19: note = siRNA antisense sequence
  source 1..19: mol_type = other RNA
ggtaatctaaattggcaat

SEQ ID NO: 50630 - RNA, 19 nt, synthetic construct
  misc_feature 1..19: note = siRNA sense sequence
  source 1..19: mol_type = other RNA
ttgccaatttagattacca

SEQ ID NO: 50631 - RNA, 19 nt, synthetic construct
  misc_feature 1..19: note = siRNA antisense sequence
  source 1..19: mol_type = other RNA
tggtaatctaaattggcaa

SEQ ID NO: 50632 - RNA, 19 nt, synthetic construct
  misc_feature 1..19: note = siRNA sense sequence
  source 1..19: mol_type = other RNA
tgccaatttagattaccac

SEQ ID NO: 50633 - RNA, 19 nt, synthetic construct
  misc_feature 1..19: note = siRNA antisense sequence
  source 1..19: mol_type = other RNA
gtggtaatctaaattggca

SEQ ID NO: 50634 - RNA, 19 nt, synthetic construct
  misc_feature 1..19: note = siRNA sense sequence
  source 1..19: mol_type = other RNA
tttagattaccacttagtc

SEQ ID NO: 50635 - RNA, 19 nt, synthetic construct
  misc_feature 1..19: note = siRNA antisense sequence
  source 1..19: mol_type = other RNA
gactaagtggtaatctaaa

SEQ ID NO: 50636 - RNA, 19 nt, synthetic construct
  misc_feature 1..19: note = siRNA sense sequence
  source 1..19: mol_type = other RNA
ttagattaccacttagtcc

SEQ ID NO: 50637 - RNA, 19 nt, synthetic construct
  misc_feature 1..19: note = siRNA antisense sequence
  source 1..19: mol_type = other RNA
ggactaagtggtaatctaa

SEQ ID NO: 50638 - RNA, 19 nt, synthetic construct
  misc_feature 1..19: note = siRNA sense sequence
  source 1..19: mol_type = other RNA
tagattaccacttagtcca

SEQ ID NO: 50639 - RNA, 19 nt, synthetic construct
  misc_feature 1..19: note = siRNA antisense sequence
  source 1..19: mol_type = other RNA
tggactaagtggtaatcta

SEQ ID NO: 50640 - RNA, 19 nt, synthetic construct
  misc_feature 1..19: note = siRNA sense sequence
  source 1..19: mol_type = other RNA
ttaccacttagtccagtat

SEQ ID NO: 50641 - RNA, 19 nt, synthetic construct
  misc_feature 1..19: note = siRNA antisense sequence
  source 1..19: mol_type = other RNA
atactggactaagtggtaa

SEQ ID NO: 50642 - RNA, 19 nt, synthetic construct
  misc_feature 1..19: note = siRNA sense sequence
  source 1..19: mol_type = other RNA
taccacttagtccagtatg

SEQ ID NO: 50643 - RNA, 19 nt, synthetic construct
  misc_feature 1..19: note = siRNA antisense sequence
  source 1..19: mol_type = other RNA
catactggactaagtggta

SEQ ID NO: 50644 - RNA, 19 nt, synthetic construct
  misc_feature 1..19: note = siRNA sense sequence
  source 1..19: mol_type = other RNA
accacttagtccagtatgt

SEQ ID NO: 50645 - RNA, 19 nt, synthetic construct
  misc_feature 1..19: note = siRNA antisense sequence
  source 1..19: mol_type = other RNA
acatactggactaagtggt

SEQ ID NO: 50646 - RNA, 19 nt, synthetic construct
  misc_feature 1..19: note = siRNA sense sequence
  source 1..19: mol_type = other RNA
ccacttagtccagtatgtg

SEQ ID NO: 50647 - RNA, 19 nt, synthetic construct
  misc_feature 1..19: note = siRNA antisense sequence
  source 1..19: mol_type = other RNA
cacatactggactaagtgg

SEQ ID NO: 50648 - RNA, 19 nt, synthetic construct
  misc_feature 1..19: note = siRNA sense sequence
  source 1..19: mol_type = other RNA
cacttagtccagtatgtgt

SEQ ID NO: 50649 - RNA, 19 nt, synthetic construct
  misc_feature 1..19: note = siRNA antisense sequence
  source 1..19: mol_type = other RNA
acacatactggactaagtg

SEQ ID NO: 50650 - RNA, 19 nt, synthetic construct
  misc_feature 1..19: note = siRNA sense sequence
  source 1..19: mol_type = other RNA
acttagtccagtatgtgtt

SEQ ID NO: 50651 - RNA, 19 nt, synthetic construct
  misc_feature 1..19: note = siRNA antisense sequence
  source 1..19: mol_type = other RNA
aacacatactggactaagt

SEQ ID NO: 50652 - RNA, 19 nt, synthetic construct
  misc_feature 1..19: note = siRNA sense sequence
  source 1..19: mol_type = other RNA
cttagtccagtatgtgttt

SEQ ID NO: 50653 - RNA, 19 nt, synthetic construct
  misc_feature 1..19: note = siRNA antisense sequence
  source 1..19: mol_type = other RNA
aaacacatactggactaag

SEQ ID NO: 50654 - RNA, 19 nt, synthetic construct
  misc_feature 1..19: note = siRNA sense sequence
  source 1..19: mol_type = other RNA
tagtccagtatgtgtttaa

SEQ ID NO: 50655 - RNA, 19 nt, synthetic construct
  misc_feature 1..19: note = siRNA antisense sequence
  source 1..19: mol_type = other RNA
ttaaacacatactggacta

SEQ ID NO: 50656 - RNA, 19 nt, synthetic construct
  misc_feature 1..19: note = siRNA sense sequence
  source 1..19: mol_type = other RNA
tgctggactgtgccttggt

SEQ ID NO: 50657 - RNA, 19 nt, synthetic construct
  misc_feature 1..19: note = siRNA antisense sequence
  source 1..19: mol_type = other RNA
accaaggcacagtccagca

SEQ ID NO: 50658 - RNA, 19 nt, synthetic construct
  misc_feature 1..19: note = siRNA sense sequence
  source 1..19: mol_type = other RNA
gctggactgtgccttggta

SEQ ID NO: 50659 - RNA, 19 nt, synthetic construct
  misc_feature 1..19: note = siRNA antisense sequence
  source 1..19: mol_type = other RNA
taccaaggcacagtccagc

SEQ ID NO: 50660 - RNA, 19 nt, synthetic construct
  misc_feature 1..19: note = siRNA sense sequence
  source 1..19: mol_type = other RNA
ctggactgtgccttggtaa

SEQ ID NO: 50661 - RNA, 19 nt, synthetic construct
  misc_feature 1..19: note = siRNA antisense sequence
  source 1..19: mol_type = other RNA
ttaccaaggcacagtccag

SEQ ID NO: 50662 - RNA, 19 nt, synthetic construct
  misc_feature 1..19: note = siRNA sense sequence
  source 1..19: mol_type = other RNA
tggactgtgccttggtaat

SEQ ID NO: 50663 - RNA, 19 nt, synthetic construct
  misc_feature 1..19: note = siRNA antisense sequence
  source 1..19: mol_type = other RNA
attaccaaggcacagtcca

SEQ ID NO: 50664 - RNA, 19 nt, synthetic construct
  misc_feature 1..19: note = siRNA sense sequence
  source 1..19: mol_type = other RNA
ggactgtgccttggtaata

SEQ ID NO: 50665 - RNA, 19 nt, synthetic construct
  misc_feature 1..19: note = siRNA antisense sequence
  source 1..19: mol_type = other RNA
tattaccaaggcacagtcc

SEQ ID NO: 50666 - RNA, 19 nt, synthetic construct
  misc_feature 1..19: note = siRNA sense sequence
  source 1..19: mol_type = other RNA
gactgtgccttggtaatag

SEQ ID NO: 50667 - RNA, 19 nt, synthetic construct
  misc_feature 1..19: note = siRNA antisense sequence
  source 1..19: mol_type = other RNA
ctattaccaaggcacagtc

SEQ ID NO: 50668 - RNA, 19 nt, synthetic construct
  misc_feature 1..19: note = siRNA sense sequence
  source 1..19: mol_type = other RNA
actgtgccttggtaatagt

SEQ ID NO: 50669 - RNA, 19 nt, synthetic construct
  misc_feature 1..19: note = siRNA antisense sequence
  source 1..19: mol_type = other RNA
actattaccaaggcacagt

SEQ ID NO: 50670 - RNA, 19 nt, synthetic construct
  misc_feature 1..19: note = siRNA sense sequence
  source 1..19: mol_type = other RNA
ctgtgccttggtaatagtt

SEQ ID NO: 50671 - RNA, 19 nt, synthetic construct
  misc_feature 1..19: note = siRNA antisense sequence
  source 1..19: mol_type = other RNA
aactattaccaaggcacag

SEQ ID NO: 50672 - RNA, 19 nt, synthetic construct
  misc_feature 1..19: note = siRNA sense sequence
  source 1..19: mol_type = other RNA
tgtgccttggtaatagttt

SEQ ID NO: 50673 - RNA, 19 nt, synthetic construct
  misc_feature 1..19: note = siRNA antisense sequence
  source 1..19: mol_type = other RNA
aaactattaccaaggcaca

SEQ ID NO: 50674 - RNA, 19 nt, synthetic construct
  misc_feature 1..19: note = siRNA sense sequence
  source 1..19: mol_type = other RNA
gtgccttggtaatagtttc

SEQ ID NO: 50675 - RNA, 19 nt, synthetic construct
  misc_feature 1..19: note = siRNA antisense sequence
  source 1..19: mol_type = other RNA
gaaactattaccaaggcac

SEQ ID NO: 50676 - RNA, 19 nt, synthetic construct
  misc_feature 1..19: note = siRNA sense sequence
  source 1..19: mol_type = other RNA
tgccttggtaatagtttca

SEQ ID NO: 50677 - RNA, 19 nt, synthetic construct
  misc_feature 1..19: note = siRNA antisense sequence
  source 1..19: mol_type = other RNA
tgaaactattaccaaggca

SEQ ID NO: 50678 - RNA, 19 nt, synthetic construct
  misc_feature 1..19: note = siRNA sense sequence
  source 1..19: mol_type = other RNA
gccttggtaatagtttcag

SEQ ID NO: 50679 - RNA, 19 nt, synthetic construct
  misc_feature 1..19: note = siRNA antisense sequence
  source 1..19: mol_type = other RNA
ctgaaactattaccaaggc

SEQ ID NO: 50680 - RNA, 19 nt, synthetic construct
  misc_feature 1..19: note = siRNA sense sequence
  source 1..19: mol_type = other RNA
ccttggtaatagtttcagg

SEQ ID NO: 50681 - RNA, 19 nt, synthetic construct
  misc_feature 1..19: note = siRNA antisense sequence
  source 1..19: mol_type = other RNA
cctgaaactattaccaagg

SEQ ID NO: 50682 - RNA, 19 nt, synthetic construct
  misc_feature 1..19: note = siRNA sense sequence
  source 1..19: mol_type = other RNA
ggtaatagtttcaggaaga

SEQ ID NO: 50683 - RNA, 19 nt, synthetic construct
  misc_feature 1..19: note = siRNA antisense sequence
  source 1..19: mol_type = other RNA
tcttcctgaaactattacc

SEQ ID NO: 50684 - RNA, 19 nt, synthetic construct
  misc_feature 1..19: note = siRNA sense sequence
  source 1..19: mol_type = other RNA
gtaatagtttcaggaagaa

SEQ ID NO: 50685 - RNA, 19 nt, synthetic construct
  misc_feature 1..19: note = siRNA antisense sequence
  source 1..19: mol_type = other RNA
ttcttcctgaaactattac

SEQ ID NO: 50686 - RNA, 19 nt, synthetic construct
  misc_feature 1..19: note = siRNA sense sequence
  source 1..19: mol_type = other RNA
atagtttcaggaagaattg

SEQ ID NO: 50687 - RNA, 19 nt, synthetic construct
  misc_feature 1..19: note = siRNA antisense sequence
  source 1..19: mol_type = other RNA
caattcttcctgaaactat

SEQ ID NO: 50688 - RNA, 19 nt, synthetic construct
  misc_feature 1..19: note = siRNA sense sequence
  source 1..19: mol_type = other RNA
tagtttcaggaagaattgc

SEQ ID NO: 50689 - RNA, 19 nt, synthetic construct
  misc_feature 1..19: note = siRNA antisense sequence
  source 1..19: mol_type = other RNA
gcaattcttcctgaaacta

SEQ ID NO: 50690 - RNA, 19 nt, synthetic construct
  misc_feature 1..19: note = siRNA sense sequence
  source 1..19: mol_type = other RNA
tttcaggaagaattgctca

SEQ ID NO: 50691 - RNA, 19 nt, synthetic construct
  misc_feature 1..19: note = siRNA antisense sequence
  source 1..19: mol_type = other RNA
tgagcaattcttcctgaaa

SEQ ID NO: 50692 - RNA, 19 nt, synthetic construct
  misc_feature 1..19: note = siRNA sense sequence
  source 1..19: mol_type = other RNA
ttcaggaagaattgctcat

SEQ ID NO: 50693 - RNA, 19 nt, synthetic construct
  misc_feature 1..19: note = siRNA antisense sequence
  source 1..19: mol_type = other RNA
atgagcaattcttcctgaa

SEQ ID NO: 50694 - RNA, 19 nt, synthetic construct
  misc_feature 1..19: note = siRNA sense sequence
  source 1..19: mol_type = other RNA
tcaggaagaattgctcatt

SEQ ID NO: 50695 - RNA, 19 nt, synthetic construct
  misc_feature 1..19: note = siRNA antisense sequence
  source 1..19: mol_type = other RNA
aatgagcaattcttcctga

SEQ ID NO: 50696 - RNA, 19 nt, synthetic construct
  misc_feature 1..19: note = siRNA sense sequence
  source 1..19: mol_type = other RNA
cattcaaaagcaggcaact

SEQ ID NO: 50697 - RNA, 19 nt, synthetic construct
  misc_feature 1..19: note = siRNA antisense sequence
  source 1..19: mol_type = other RNA
agttgcctgcttttgaatg

SEQ ID NO: 50698 - RNA, 19 nt, synthetic construct
  misc_feature 1..19: note = siRNA sense sequence
  source 1..19: mol_type = other RNA
caaaagcaggcaactcact

SEQ ID NO: 50699 - RNA, 19 nt, synthetic construct
  misc_feature 1..19: note = siRNA antisense sequence
  source 1..19: mol_type = other RNA
agtgagttgcctgcttttg

SEQ ID NO: 50700 - RNA, 19 nt, synthetic construct
  misc_feature 1..19: note = siRNA sense sequence
  source 1..19: mol_type = other RNA
aaaagcaggcaactcactt

SEQ ID NO: 50701 - RNA, 19 nt, synthetic construct
  misc_feature 1..19: note = siRNA antisense sequence
  source 1..19: mol_type = other RNA
aagtgagttgcctgctttt

SEQ ID NO: 50702 - RNA, 19 nt, synthetic construct
  misc_feature 1..19: note = siRNA sense sequence
  source 1..19: mol_type = other RNA
aaagcaggcaactcacttg

SEQ ID NO: 50703 - RNA, 19 nt, synthetic construct
  misc_feature 1..19: note = siRNA antisense sequence
  source 1..19: mol_type = other RNA
caagtgagttgcctgcttt

SEQ ID NO: 50704 - RNA, 19 nt, synthetic construct
  misc_feature 1..19: note = siRNA sense sequence
  source 1..19: mol_type = other RNA
caactcacttgctgattgc

SEQ ID NO: 50705 - RNA, 19 nt, synthetic construct
  misc_feature 1..19: note = siRNA antisense sequence
  source 1..19: mol_type = other RNA
gcaatcagcaagtgagttg

SEQ ID NO: 50706 - RNA, 19 nt, synthetic construct
  misc_feature 1..19: note = siRNA sense sequence
  source 1..19: mol_type = other RNA
aactcacttgctgattgcc

SEQ ID NO: 50707 - RNA, 19 nt, synthetic construct
  misc_feature 1..19: note = siRNA antisense sequence
  source 1..19: mol_type = other RNA
ggcaatcagcaagtgagtt

SEQ ID NO: 50708 - RNA, 19 nt, synthetic construct
  misc_feature 1..19: note = siRNA sense sequence
  source 1..19: mol_type = other RNA
actcacttgctgattgcct

SEQ ID NO: 50709 - RNA, 19 nt, synthetic construct
  misc_feature 1..19: note = siRNA antisense sequence
  source 1..19: mol_type = other RNA
aggcaatcagcaagtgagt

SEQ ID NO: 50710 - RNA, 19 nt, synthetic construct
  misc_feature 1..19: note = siRNA sense sequence
  source 1..19: mol_type = other RNA
acttgctgattgcctttgc

SEQ ID NO: 50711 - RNA, 19 nt, synthetic construct
  misc_feature 1..19: note = siRNA antisense sequence
  source 1..19: mol_type = other RNA
gcaaaggcaatcagcaagt

SEQ ID NO: 50712 - RNA, 19 nt, synthetic construct
  misc_feature 1..19: note = siRNA sense sequence
  source 1..19: mol_type = other RNA
cttgctgattgcctttgcc

SEQ ID NO: 50713 - RNA, 19 nt, synthetic construct
  misc_feature 1..19: note = siRNA antisense sequence
  source 1..19: mol_type = other RNA
ggcaaaggcaatcagcaag

SEQ ID NO: 50714 - RNA, 19 nt, synthetic construct
  misc_feature 1..19: note = siRNA sense sequence
  source 1..19: mol_type = other RNA
ttgctgattgcctttgcca

SEQ ID NO: 50715 - RNA, 19 nt, synthetic construct
  misc_feature 1..19: note = siRNA antisense sequence
  source 1..19: mol_type = other RNA
tggcaaaggcaatcagcaa

SEQ ID NO: 50716 - RNA, 19 nt, synthetic construct
  misc_feature 1..19: note = siRNA sense sequence
  source 1..19: mol_type = other RNA
tgctgattgcctttgccag

SEQ ID NO: 50717 - RNA, 19 nt, synthetic construct
  misc_feature 1..19: note = siRNA antisense sequence
  source 1..19: mol_type = other RNA
ctggcaaaggcaatcagca

SEQ ID NO: 50718 - RNA, 19 nt, synthetic construct
  misc_feature 1..19: note = siRNA sense sequence
  source 1..19: mol_type = other RNA
ctgattgcctttgccagca

SEQ ID NO: 50719 - RNA, 19 nt, synthetic construct
  misc_feature 1..19: note = siRNA antisense sequence
  source 1..19: mol_type = other RNA
tgctggcaaaggcaatcag

SEQ ID NO: 50720 - RNA, 19 nt, synthetic construct
  misc_feature 1..19: note = siRNA sense sequence
  source 1..19: mol_type = other RNA
tgcctttgccagcagataa

SEQ ID NO: 50721 - RNA, 19 nt, synthetic construct
  misc_feature 1..19: note = siRNA antisense sequence
  source 1..19: mol_type = other RNA
ttatctgctggcaaaggca

SEQ ID NO: 50722 - RNA, 19 nt, synthetic construct
  misc_feature 1..19: note = siRNA sense sequence
  source 1..19: mol_type = other RNA
gcctttgccagcagataat

SEQ ID NO: 50723 - RNA, 19 nt, synthetic construct
  misc_feature 1..19: note = siRNA antisense sequence
  source 1..19: mol_type = other RNA
attatctgctggcaaaggc

SEQ ID NO: 50724 - RNA, 19 nt, synthetic construct
  misc_feature 1..19: note = siRNA sense sequence
  source 1..19: mol_type = other RNA
cctttgccagcagataatg

SEQ ID NO: 50725 - RNA, 19 nt, synthetic construct
  misc_feature 1..19: note = siRNA antisense sequence
  source 1..19: mol_type = other RNA
cattatctgctggcaaagg

SEQ ID NO: 50726 - RNA, 19 nt, synthetic construct
  misc_feature 1..19: note = siRNA sense sequence
  source 1..19: mol_type = other RNA
ctttgccagcagataatga

SEQ ID NO: 50727 - RNA, 19 nt, synthetic construct
  misc_feature 1..19: note = siRNA antisense sequence
  source 1..19: mol_type = other RNA
tcattatctgctggcaaag

SEQ ID NO: 50728 - RNA, 19 nt, synthetic construct
  misc_feature 1..19: note = siRNA sense sequence
  source 1..19: mol_type = other RNA
tttgccagcagataatgac

SEQ ID NO: 50729 - RNA, 19 nt, synthetic construct
  misc_feature 1..19: note = siRNA antisense sequence
  source 1..19: mol_type = other RNA
gtcattatctgctggcaaa

SEQ ID NO: 50730 - RNA, 19 nt, synthetic construct
  misc_feature 1..19: note = siRNA sense sequence
  source 1..19: mol_type = other RNA
ttgccagcagataatgaca

SEQ ID NO: 50731 - RNA, 19 nt, synthetic construct
  misc_feature 1..19: note = siRNA antisense sequence
  source 1..19: mol_type = other RNA
tgtcattatctgctggcaa

SEQ ID NO: 50732 - RNA, 19 nt, synthetic construct
  misc_feature 1..19: note = siRNA sense sequence
  source 1..19: mol_type = other RNA
tgccagcagataatgacat

SEQ ID NO: 50733 - RNA, 19 nt, synthetic construct
  misc_feature 1..19: note = siRNA antisense sequence
  source 1..19: mol_type = other RNA
atgtcattatctgctggca

SEQ ID NO: 50734 - RNA, 19 nt, synthetic construct
  misc_feature 1..19: note = siRNA sense sequence
  source 1..19: mol_type = other RNA
agcagataatgacatcact

SEQ ID NO: 50735 - RNA, 19 nt, synthetic construct
  misc_feature 1..19: note = siRNA antisense sequence
  source 1..19: mol_type = other RNA
agtgatgtcattatctgct

SEQ ID NO: 50736 - RNA, 19 nt, synthetic construct
  misc_feature 1..19: note = siRNA sense sequence
  source 1..19: mol_type = other RNA
cagataatgacatcactag

SEQ ID NO: 50737 - RNA, 19 nt, synthetic construct
  misc_feature 1..19: note = siRNA antisense sequence
  source 1..19: mol_type = other RNA
ctagtgatgtcattatctg

SEQ ID NO: 50738 - RNA, 19 nt, synthetic construct
  misc_feature 1..19: note = siRNA sense sequence
  source 1..19: mol_type = other RNA
agataatgacatcactagc

SEQ ID NO: 50739 - RNA, 19 nt, synthetic construct
  misc_feature 1..19: note = siRNA antisense sequence
  source 1..19: mol_type = other RNA
gctagtgatgtcattatct

SEQ ID NO: 50740 - RNA, 19 nt, synthetic construct
  misc_feature 1..19: note = siRNA sense sequence
  source 1..19: mol_type = other RNA
gataatgacatcactagct

SEQ ID NO: 50741 - RNA, 19 nt, synthetic construct
  misc_feature 1..19: note = siRNA antisense sequence
  source 1..19: mol_type = other RNA
agctagtgatgtcattatc

SEQ ID NO: 50742 - RNA, 19 nt, synthetic construct
  misc_feature 1..19: note = siRNA sense sequence
  source 1..19: mol_type = other RNA
ataatgacatcactagctg

SEQ ID NO: 50743 - RNA, 19 nt, synthetic construct
  misc_feature 1..19: note = siRNA antisense sequence
  source 1..19: mol_type = other RNA
cagctagtgatgtcattat

SEQ ID NO: 50744 - RNA, 19 nt, synthetic construct
  misc_feature 1..19: note = siRNA sense sequence
  source 1..19: mol_type = other RNA
taatgacatcactagctgg

SEQ ID NO: 50745 - RNA, 19 nt, synthetic construct
  misc_feature 1..19: note = siRNA antisense sequence
  source 1..19: mol_type = other RNA
ccagctagtgatgtcatta

SEQ ID NO: 50746 - RNA, 19 nt, synthetic construct
  misc_feature 1..19: note = siRNA sense sequence
  source 1..19: mol_type = other RNA
tgacatcactagctggaat

SEQ ID NO: 50747 - RNA, 19 nt, synthetic construct
  misc_feature 1..19: note = siRNA antisense sequence
  source 1..19: mol_type = other RNA
attccagctagtgatgtca

SEQ ID NO: 50748 - RNA, 19 nt, synthetic construct
  misc_feature 1..19: note = siRNA sense sequence
  source 1..19: mol_type = other RNA
gacatcactagctggaata

SEQ ID NO: 50749 - RNA, 19 nt, synthetic construct
  misc_feature 1..19: note = siRNA antisense sequence
  source 1..19: mol_type = other RNA
tattccagctagtgatgtc

SEQ ID NO: 50750 - RNA, 19 nt, synthetic construct
  misc_feature 1..19: note = siRNA sense sequence
  source 1..19: mol_type = other RNA
acatcactagctggaataa

SEQ ID NO: 50751 - RNA, 19 nt, synthetic construct
  misc_feature 1..19: note = siRNA antisense sequence
  source 1..19: mol_type = other RNA
ttattccagctagtgatgt

SEQ ID NO: 50752 - RNA, 19 nt, synthetic construct
  misc_feature 1..19: note = siRNA sense sequence
  source 1..19: mol_type = other RNA
cactagctggaataatatc

SEQ ID NO: 50753 - RNA, 19 nt, synthetic construct
  misc_feature 1..19: note = siRNA antisense sequence
  source 1..19: mol_type = other RNA
gatattattccagctagtg

SEQ ID NO: 50754 - RNA, 19 nt, synthetic construct
  misc_feature 1..19: note = siRNA sense sequence
  source 1..19: mol_type = other RNA
gctggaataatatcaaaga

SEQ ID NO: 50755 - RNA, 19 nt, synthetic construct
  misc_feature 1..19: note = siRNA antisense sequence
  source 1..19: mol_type = other RNA
tctttgatattattccagc

SEQ ID NO: 50756 - RNA, 19 nt, synthetic construct
  misc_feature 1..19: note = siRNA sense sequence
  source 1..19: mol_type = other RNA
ctggaataatatcaaagac

SEQ ID NO: 50757 - RNA, 19 nt, synthetic construct
  misc_feature 1..19: note = siRNA antisense sequence
  source 1..19: mol_type = other RNA
gtctttgatattattccag

SEQ ID NO: 50758 - RNA, 19 nt, synthetic construct
  misc_feature 1..19: note = siRNA sense sequence
  source 1..19: mol_type = other RNA
aaatacagctgttagtaac

SEQ ID NO: 50759 - RNA, 19 nt, synthetic construct
  misc_feature 1..19: note = siRNA antisense sequence
  source 1..19: mol_type = other RNA
gttactaacagctgtattt

SEQ ID NO: 50760 - RNA, 19 nt, synthetic construct
  misc_feature 1..19: note = siRNA sense sequence
  source 1..19: mol_type = other RNA
ttttctacaccaattgtgg

SEQ ID NO: 50761 - RNA, 19 nt, synthetic construct
  misc_feature 1..19: note = siRNA antisense sequence
  source 1..19: mol_type = other RNA
ccacaattggtgtagaaaa

SEQ ID NO: 50762 - RNA, 19 nt, synthetic construct
  misc_feature 1..19: note = siRNA sense sequence
  source 1..19: mol_type = other RNA
agttaatattagggagtct

SEQ ID NO: 50763 - RNA, 19 nt, synthetic construct
  misc_feature 1..19: note = siRNA antisense sequence
  source 1..19: mol_type = other RNA
agactccctaatattaact

SEQ ID NO: 50764 - RNA, 19 nt, synthetic construct
  misc_feature 1..19: note = siRNA sense sequence
  source 1..19: mol_type = other RNA
cactcttccataaatatga

SEQ ID NO: 50765 - RNA, 19 nt, synthetic construct
  misc_feature 1..19: note = siRNA antisense sequence
  source 1..19: mol_type = other RNA
tcatatttatggaagagtg

SEQ ID NO: 50766 - RNA, 19 nt, synthetic construct
  misc_feature 1..19: note = siRNA sense sequence
  source 1..19: mol_type = other RNA
aaattccattatgctaagg

SEQ ID NO: 50767 - RNA, 19 nt, synthetic construct
  misc_feature 1..19: note = siRNA antisense sequence
  source 1..19: mol_type = other RNA
ccttagcataatggaattt

SEQ ID NO: 50768 - RNA, 19 nt, synthetic construct
  misc_feature 1..19: note = siRNA sense sequence
  source 1..19: mol_type = other RNA
aattccattatgctaaggt

SEQ ID NO: 50769 - RNA, 19 nt, synthetic construct
  misc_feature 1..19: note = siRNA antisense sequence
  source 1..19: mol_type = other RNA
accttagcataatggaatt

SEQ ID NO: 50770 - RNA, 19 nt, synthetic construct
  misc_feature 1..19: note = siRNA sense sequence
  source 1..19: mol_type = other RNA
attccattatgctaaggta

SEQ ID NO: 50771 - RNA, 19 nt, synthetic construct
  misc_feature 1..19: note = siRNA antisense sequence
  source 1..19: mol_type = other RNA
taccttagcataatggaat

SEQ ID NO: 50772 - RNA, 19 nt, synthetic construct
  misc_feature 1..19: note = siRNA sense sequence
  source 1..19: mol_type = other RNA
ttccattatgctaaggtac

SEQ ID NO: 50773 - RNA, 19 nt, synthetic construct
  misc_feature 1..19: note = siRNA antisense sequence
  source 1..19: mol_type = other RNA
gtaccttagcataatggaa

SEQ ID NO: 50774 - RNA, 19 nt, synthetic construct
  misc_feature 1..19: note = siRNA sense sequence
  source 1..19: mol_type = other RNA
tccattatgctaaggtact

SEQ ID NO: 50775 - RNA, 19 nt, synthetic construct
  misc_feature 1..19: note = siRNA antisense sequence
  source 1..19: mol_type = other RNA
agtaccttagcataatgga

SEQ ID NO: 50776 - RNA, 19 nt, synthetic construct
  misc_feature 1..19: note = siRNA sense sequence
  source 1..19: mol_type = other RNA
ccattatgctaaggtactc

SEQ ID NO: 50777 - RNA, 19 nt, synthetic construct
  misc_feature 1..19: note = siRNA antisense sequence
  source 1..19: mol_type = other RNA
gagtaccttagcataatgg

SEQ ID NO: 50778 - RNA, 19 nt, synthetic construct
  misc_feature 1..19: note = siRNA sense sequence
  source 1..19: mol_type = other RNA
cattatgctaaggtactct

SEQ ID NO: 50779 - RNA, 19 nt, synthetic construct
  misc_feature 1..19: note = siRNA antisense sequence
  source 1..19: mol_type = other RNA
agagtaccttagcataatg

SEQ ID NO: 50780 - RNA, 19 nt, synthetic construct
  misc_feature 1..19: note = siRNA sense sequence
  source 1..19: mol_type = other RNA
attatgctaaggtactcta

SEQ ID NO: 50781 - RNA, 19 nt, synthetic construct
  misc_feature 1..19: note = siRNA antisense sequence
  source 1..19: mol_type = other RNA
tagagtaccttagcataat

SEQ ID NO: 50782 - RNA, 19 nt, synthetic construct
  misc_feature 1..19: note = siRNA sense sequence
  source 1..19: mol_type = other RNA
ttatgctaaggtactctac

SEQ ID NO: 50783 - RNA, 19 nt, synthetic construct
  misc_feature 1..19: note = siRNA antisense sequence
  source 1..19: mol_type = other RNA
gtagagtaccttagcataa

SEQ ID NO: 50784 - RNA, 19 nt, synthetic construct
  misc_feature 1..19: note = siRNA sense sequence
  source 1..19: mol_type = other RNA
tatgctaaggtactctaca

SEQ ID NO: 50785 - RNA, 19 nt, synthetic construct
  misc_feature 1..19: note = siRNA antisense sequence
  source 1..19: mol_type = other RNA
tgtagagtaccttagcata

SEQ ID NO: 50786 - RNA, 19 nt, synthetic construct
  misc_feature 1..19: note = siRNA sense sequence
  source 1..19: mol_type = other RNA
tgctaaggtactctacact

SEQ ID NO: 50787 - RNA, 19 nt, synthetic construct
  misc_feature 1..19: note = siRNA antisense sequence
  source 1..19: mol_type = other RNA
agtgtagagtaccttagca

SEQ ID NO: 50788 - RNA, 19 nt, synthetic construct
  misc_feature 1..19: note = siRNA sense sequence
  source 1..19: mol_type = other RNA
gctaaggtactctacactg

SEQ ID NO: 50789 - RNA, 19 nt, synthetic construct
  misc_feature 1..19: note = siRNA antisense sequence
  source 1..19: mol_type = other RNA
cagtgtagagtaccttagc

SEQ ID NO: 50790 - RNA, 19 nt, synthetic construct
  misc_feature 1..19: note = siRNA sense sequence
  source 1..19: mol_type = other RNA
ctaaggtactctacactgt

SEQ ID NO: 50791 - RNA, 19 nt, synthetic construct
  misc_feature 1..19: note = siRNA antisense sequence
  source 1..19: mol_type = other RNA
acagtgtagagtaccttag

SEQ ID NO: 50792 - RNA, 19 nt, synthetic construct
  misc_feature 1..19: note = siRNA sense sequence
  source 1..19: mol_type = other RNA
ggtactctacactgttgtt

SEQ ID NO: 50793 - RNA, 19 nt, synthetic construct
  misc_feature 1..19: note = siRNA antisense sequence
  source 1..19: mol_type = other RNA
aacaacagtgtagagtacc

SEQ ID NO: 50794 - RNA, 19 nt, synthetic construct
  misc_feature 1..19: note = siRNA sense sequence
  source 1..19: mol_type = other RNA
gtactctacactgttgttt

SEQ ID NO: 50795 - RNA, 19 nt, synthetic construct
  misc_feature 1..19: note = siRNA antisense sequence
  source 1..19: mol_type = other RNA
aaacaacagtgtagagtac

SEQ ID NO: 50796 - RNA, 19 nt, synthetic construct
  misc_feature 1..19: note = siRNA sense sequence
  source 1..19: mol_type = other RNA
tactctacactgttgttta

SEQ ID NO: 50797 - RNA, 19 nt, synthetic construct
  misc_feature 1..19: note = siRNA antisense sequence
  source 1..19: mol_type = other RNA
taaacaacagtgtagagta

SEQ ID NO: 50798 - RNA, 19 nt, synthetic construct
  misc_feature 1..19: note = siRNA sense sequence
  source 1..19: mol_type = other RNA
tcttgctgtttctgttgtg

SEQ ID NO: 50799 - RNA, 19 nt, synthetic construct
  misc_feature 1..19: note = siRNA antisense sequence
  source 1..19: mol_type = other RNA
cacaacagaaacagcaaga

SEQ ID NO: 50800 - RNA, 19 nt, synthetic construct
  misc_feature 1..19: note = siRNA sense sequence
  source 1..19: mol_type = other RNA
ttgctgtttctgttgtgtc

SEQ ID NO: 50801 - RNA, 19 nt, synthetic construct
  misc_feature 1..19: note = siRNA antisense sequence
  source 1..19: mol_type = other RNA
gacacaacagaaacagcaa

SEQ ID NO: 50802 - RNA, 19 nt, synthetic construct
  misc_feature 1..19: note = siRNA sense sequence
  source 1..19: mol_type = other RNA
ttctgttgtgtcttagatt

SEQ ID NO: 50803 - RNA, 19 nt, synthetic construct
  misc_feature 1..19: note = siRNA antisense sequence
  source 1..19: mol_type = other RNA
aatctaagacacaacagaa

SEQ ID NO: 50804 - RNA, 19 nt, synthetic construct
  misc_feature 1..19: note = siRNA sense sequence
  source 1..19: mol_type = other RNA
tctgttgtgtcttagattc

SEQ ID NO: 50805 - RNA, 19 nt, synthetic construct
  misc_feature 1..19: note = siRNA antisense sequence
  source 1..19: mol_type = other RNA
gaatctaagacacaacaga

SEQ ID NO: 50806 - RNA, 19 nt, synthetic construct
  misc_feature 1..19: note = siRNA sense sequence
  source 1..19: mol_type = other RNA
ctgttgtgtcttagattct

SEQ ID NO: 50807 - RNA, 19 nt, synthetic construct
  misc_feature 1..19: note = siRNA antisense sequence
  source 1..19: mol_type = other RNA
agaatctaagacacaacag

SEQ ID NO: 50808 - RNA, 19 nt, synthetic construct
  misc_feature 1..19: note = siRNA sense sequence
  source 1..19: mol_type = other RNA
tgttgtgtcttagattctt

SEQ ID NO: 50809 - RNA, 19 nt, synthetic construct
  misc_feature 1..19: note = siRNA antisense sequence
  source 1..19: mol_type = other RNA
aagaatctaagacacaaca

SEQ ID NO: 50810 - RNA, 19 nt, synthetic construct
  misc_feature 1..19: note = siRNA sense sequence
  source 1..19: mol_type = other RNA
gttgtgtcttagattcttg

SEQ ID NO: 50811 - RNA, 19 nt, synthetic construct
  misc_feature 1..19: note = siRNA antisense sequence
  source 1..19: mol_type = other RNA
caagaatctaagacacaac

SEQ ID NO: 50812 - RNA, 19 nt, synthetic construct
  misc_feature 1..19: note = siRNA sense sequence
  source 1..19: mol_type = other RNA
ttgtgtcttagattcttgg

SEQ ID NO: 50813 - RNA, 19 nt, synthetic construct
  misc_feature 1..19: note = siRNA antisense sequence
  source 1..19: mol_type = other RNA
ccaagaatctaagacacaa

SEQ ID NO: 50814 - RNA, 19 nt, synthetic construct
  misc_feature 1..19: note = siRNA sense sequence
  source 1..19: mol_type = other RNA
tgtgtcttagattcttggc

SEQ ID NO: 50815 - RNA, 19 nt, synthetic construct
  misc_feature 1..19: note = siRNA antisense sequence
  source 1..19: mol_type = other RNA
gccaagaatctaagacaca

SEQ ID NO: 50816 - RNA, 19 nt, synthetic construct
  misc_feature 1..19: note = siRNA sense sequence
  source 1..19: mol_type = other RNA
gtgtcttagattcttggca

SEQ ID NO: 50817 - RNA, 19 nt, synthetic construct
  misc_feature 1..19: note = siRNA antisense sequence
  source 1..19: mol_type = other RNA
tgccaagaatctaagacac

SEQ ID NO: 50818 - RNA, 19 nt, synthetic construct
  misc_feature 1..19: note = siRNA sense sequence
  source 1..19: mol_type = other RNA
tgtcttagattcttggcag

SEQ ID NO: 50819 - RNA, 19 nt, synthetic construct
  misc_feature 1..19: note = siRNA antisense sequence
  source 1..19: mol_type = other RNA
ctgccaagaatctaagaca

SEQ ID NO: 50820 - RNA, 19 nt, synthetic construct
  misc_feature 1..19: note = siRNA sense sequence
  source 1..19: mol_type = other RNA
gtcttagattcttggcagc

SEQ ID NO: 50821 - RNA, 19 nt, synthetic construct
  misc_feature 1..19: note = siRNA antisense sequence
  source 1..19: mol_type = other RNA
gctgccaagaatctaagac

SEQ ID NO: 50822 - RNA, 19 nt, synthetic construct
  misc_feature 1..19: note = siRNA sense sequence
  source 1..19: mol_type = other RNA
tagattcttggcagctata

SEQ ID NO: 50823 - RNA, 19 nt, synthetic construct
  misc_feature 1..19: note = siRNA antisense sequence
  source 1..19: mol_type = other RNA
tatagctgccaagaatcta

SEQ ID NO: 50824 - RNA, 19 nt, synthetic construct
  misc_feature 1..19: note = siRNA sense sequence
  source 1..19: mol_type = other RNA
agattcttggcagctataa

SEQ ID NO: 50825 - RNA, 19 nt, synthetic construct
  misc_feature 1..19: note = siRNA antisense sequence
  source 1..19: mol_type = other RNA
ttatagctgccaagaatct

SEQ ID NO: 50826 - RNA, 19 nt, synthetic construct
  misc_feature 1..19: note = siRNA sense sequence
  source 1..19: mol_type = other RNA
gattcttggcagctataac

SEQ ID NO: 50827 - RNA, 19 nt, synthetic construct
  misc_feature 1..19: note = siRNA antisense sequence
  source 1..19: mol_type = other RNA
gttatagctgccaagaatc

SEQ ID NO: 50828 - RNA, 19 nt, synthetic construct
  misc_feature 1..19: note = siRNA sense sequence
  source 1..19: mol_type = other RNA
attcttggcagctataacc

SEQ ID NO: 50829 - RNA, 19 nt, synthetic construct
  misc_feature 1..19: note = siRNA antisense sequence
  source 1..19: mol_type = other RNA
ggttatagctgccaagaat

SEQ ID NO: 50830 - RNA, 19 nt, synthetic construct
  misc_feature 1..19: note = siRNA sense sequence
  source 1..19: mol_type = other RNA
ttggcagctataaccgagg

SEQ ID NO: 50831 - RNA, 19 nt, synthetic construct
  misc_feature 1..19: note = siRNA antisense sequence
  source 1..19: mol_type = other RNA
cctcggttatagctgccaa

SEQ ID NO: 50832 - RNA, 19 nt, synthetic construct
  misc_feature 1..19: note = siRNA sense sequence
  source 1..19: mol_type = other RNA
tggcagctataaccgagga

SEQ ID NO: 50833 - RNA, 19 nt, synthetic construct
  misc_feature 1..19: note = siRNA antisense sequence
  source 1..19: mol_type = other RNA
tcctcggttatagctgcca

SEQ ID NO: 50834 - RNA, 19 nt, synthetic construct
  misc_feature 1..19: note = siRNA sense sequence
  source 1..19: mol_type = other RNA
ttcttcaatgtctctgatg

SEQ ID NO: 50835 - RNA, 19 nt, synthetic construct
  misc_feature 1..19: note = siRNA antisense sequence
  source 1..19: mol_type = other RNA
catcagagacattgaagaa

SEQ ID NO: 50836 - RNA, 19 nt, synthetic construct
  misc_feature 1..19: note = siRNA sense sequence
  source 1..19: mol_type = other RNA
tcttcaatgtctctgatga

SEQ ID NO: 50837 - RNA, 19 nt, synthetic construct
  misc_feature 1..19: note = siRNA antisense sequence
  source 1..19: mol_type = other RNA
tcatcagagacattgaaga

SEQ ID NO: 50838 - RNA, 19 nt, synthetic construct
  misc_feature 1..19: note = siRNA sense sequence
  source 1..19: mol_type = other RNA
atgtctctgatgaattggc

SEQ ID NO: 50839 - RNA, 19 nt, synthetic construct
  misc_feature 1..19: note = siRNA antisense sequence
  source 1..19: mol_type = other RNA
gccaattcatcagagacat

SEQ ID NO: 50840 - RNA, 19 nt, synthetic construct
  misc_feature 1..19: note = siRNA sense sequence
  source 1..19: mol_type = other RNA
tgtctctgatgaattggct

SEQ ID NO: 50841 - RNA, 19 nt, synthetic construct
  misc_feature 1..19: note = siRNA antisense sequence
  source 1..19: mol_type = other RNA
agccaattcatcagagaca

SEQ ID NO: 50842 - RNA, 19 nt, synthetic construct
  misc_feature 1..19: note = siRNA sense sequence
  source 1..19: mol_type = other RNA
gtctctgatgaattggctc

SEQ ID NO: 50843 - RNA, 19 nt, synthetic construct
  misc_feature 1..19: note = siRNA antisense sequence
  source 1..19: mol_type = other RNA
gagccaattcatcagagac

SEQ ID NO: 50844 - RNA, 19 nt, synthetic construct
  misc_feature 1..19: note = siRNA sense sequence
  source 1..19: mol_type = other RNA
ctctgatgaattggctcta

SEQ ID NO: 50845 - RNA, 19 nt, synthetic construct
  misc_feature 1..19: note = siRNA antisense sequence
  source 1..19: mol_type = other RNA
tagagccaattcatcagag

SEQ ID NO: 50846 - RNA, 19 nt, synthetic construct
  misc_feature 1..19: note = siRNA sense sequence
  source 1..19: mol_type = other RNA
tctgatgaattggctctag

SEQ ID NO: 50847 - RNA, 19 nt, synthetic construct
  misc_feature 1..19: note = siRNA antisense sequence
  source 1..19: mol_type = other RNA
ctagagccaattcatcaga

SEQ ID NO: 50848 - RNA, 19 nt, synthetic construct
  misc_feature 1..19: note = siRNA sense sequence
  source 1..19: mol_type = other RNA
aattggctctagtcaccat

SEQ ID NO: 50849 - RNA, 19 nt, synthetic construct
  misc_feature 1..19: note = siRNA antisense sequence
  source 1..19: mol_type = other RNA
atggtgactagagccaatt

SEQ ID NO: 50850 - RNA, 19 nt, synthetic construct
  misc_feature 1..19: note = siRNA sense sequence
  source 1..19: mol_type = other RNA
attggctctagtcaccatt

SEQ ID NO: 50851 - RNA, 19 nt, synthetic construct
  misc_feature 1..19: note = siRNA antisense sequence
  source 1..19: mol_type = other RNA
aatggtgactagagccaat

SEQ ID NO: 50852 - RNA, 19 nt, synthetic construct
  misc_feature 1..19: note = siRNA sense sequence
  source 1..19: mol_type = other RNA
ttggctctagtcaccattg

SEQ ID NO: 50853 - RNA, 19 nt, synthetic construct
  misc_feature 1..19: note = siRNA antisense sequence
  source 1..19: mol_type = other RNA
caatggtgactagagccaa

SEQ ID NO: 50854 - RNA, 19 nt, synthetic construct
  misc_feature 1..19: note = siRNA sense sequence
  source 1..19: mol_type = other RNA
tggctctagtcaccattgt

SEQ ID NO: 50855 - RNA, 19 nt, synthetic construct
  misc_feature 1..19: note = siRNA antisense sequence
  source 1..19: mol_type = other RNA
acaatggtgactagagcca

SEQ ID NO: 50856 - RNA, 19 nt, synthetic construct
  misc_feature 1..19: note = siRNA sense sequence
  source 1..19: mol_type = other RNA
ggctctagtcaccattgtt

SEQ ID NO: 50857 - RNA, 19 nt, synthetic construct
  misc_feature 1..19: note = siRNA antisense sequence
  source 1..19: mol_type = other RNA
aacaatggtgactagagcc

SEQ ID NO: 50858 - RNA, 19 nt, synthetic construct
  misc_feature 1..19: note = siRNA sense sequence
  source 1..19: mol_type = other RNA
gctctagtcaccattgtta

SEQ ID NO: 50859 - RNA, 19 nt, synthetic construct
  misc_feature 1..19: note = siRNA antisense sequence
  source 1..19: mol_type = other RNA
taacaatggtgactagagc

SEQ ID NO: 50860 - RNA, 19 nt, synthetic construct
  misc_feature 1..19: note = siRNA sense sequence
  source 1..19: mol_type = other RNA
ctctagtcaccattgttaa

SEQ ID NO: 50861 - RNA, 19 nt, synthetic construct
  misc_feature 1..19: note = siRNA antisense sequence
  source 1..19: mol_type = other RNA
ttaacaatggtgactagag

SEQ ID NO: 50862 - RNA, 19 nt, synthetic construct
  misc_feature 1..19: note = siRNA sense sequence
  source 1..19: mol_type = other RNA
tctagtcaccattgttaaa

SEQ ID NO: 50863 - RNA, 19 nt, synthetic construct
  misc_feature 1..19: note = siRNA antisense sequence
  source 1..19: mol_type = other RNA
tttaacaatggtgactaga

SEQ ID NO: 50864 - RNA, 19 nt, synthetic construct
  misc_feature 1..19: note = siRNA sense sequence
  source 1..19: mol_type = other RNA
ctagtcaccattgttaaaa

SEQ ID NO: 50865 - RNA, 19 nt, synthetic construct
  misc_feature 1..19: note = siRNA antisense sequence
  source 1..19: mol_type = other RNA
ttttaacaatggtgactag

SEQ ID NO: 50866 - RNA, 19 nt, synthetic construct
  misc_feature 1..19: note = siRNA sense sequence
  source 1..19: mol_type = other RNA
agaatatttgccctggaag

SEQ ID NO: 50867 - RNA, 19 nt, synthetic construct
  misc_feature 1..19: note = siRNA antisense sequence
  source 1..19: mol_type = other RNA
cttccagggcaaatattct

SEQ ID NO: 50868 - RNA, 19 nt, synthetic construct
  misc_feature 1..19: note = siRNA sense sequence
  source 1..19: mol_type = other RNA
atatttgccctggaaggta

SEQ ID NO: 50869 - RNA, 19 nt, synthetic construct
  misc_feature 1..19: note = siRNA antisense sequence
  source 1..19: mol_type = other RNA
taccttccagggcaaatat

SEQ ID NO: 50870 - RNA, 19 nt, synthetic construct
  misc_feature 1..19: note = siRNA sense sequence
  source 1..19: mol_type = other RNA
ttgccctggaaggtatgtc

SEQ ID NO: 50871 - RNA, 19 nt, synthetic construct
  misc_feature 1..19: note = siRNA antisense sequence
  source 1..19: mol_type = other RNA
gacataccttccagggcaa

SEQ ID NO: 50872 - RNA, 19 nt, synthetic construct
  misc_feature 1..19: note = siRNA sense sequence
  source 1..19: mol_type = other RNA
tgccctggaaggtatgtct

SEQ ID NO: 50873 - RNA, 19 nt, synthetic construct
  misc_feature 1..19: note = siRNA antisense sequence
  source 1..19: mol_type = other RNA
agacataccttccagggca

SEQ ID NO: 50874 - RNA, 19 nt, synthetic construct
  misc_feature 1..19: note = siRNA sense sequence
  source 1..19: mol_type = other RNA
gccctggaaggtatgtcta

SEQ ID NO: 50875 - RNA, 19 nt, synthetic construct
  misc_feature 1..19: note = siRNA antisense sequence
  source 1..19: mol_type = other RNA
tagacataccttccagggc

SEQ ID NO: 50876 - RNA, 19 nt, synthetic construct
  misc_feature 1..19: note = siRNA sense sequence
  source 1..19: mol_type = other RNA
ccctggaaggtatgtctat

SEQ ID NO: 50877 - RNA, 19 nt, synthetic construct
  misc_feature 1..19: note = siRNA antisense sequence
  source 1..19: mol_type = other RNA
atagacataccttccaggg

SEQ ID NO: 50878 - RNA, 19 nt, synthetic construct
  misc_feature 1..19: note = siRNA sense sequence
  source 1..19: mol_type = other RNA
ctggaaggtatgtctattt

SEQ ID NO: 50879 - RNA, 19 nt, synthetic construct
  misc_feature 1..19: note = siRNA antisense sequence
  source 1..19: mol_type = other RNA
aaatagacataccttccag

SEQ ID NO: 50880 - RNA, 19 nt, synthetic construct
  misc_feature 1..19: note = siRNA sense sequence
  source 1..19: mol_type = other RNA
tggaaggtatgtctattta

SEQ ID NO: 50881 - RNA, 19 nt, synthetic construct
  misc_feature 1..19: note = siRNA antisense sequence
  source 1..19: mol_type = other RNA
taaatagacataccttcca

SEQ ID NO: 50882 - RNA, 19 nt, synthetic construct
  misc_feature 1..19: note = siRNA sense sequence
  source 1..19: mol_type = other RNA
ggaaggtatgtctatttat

SEQ ID NO: 50883 - RNA, 19 nt, synthetic construct
  misc_feature 1..19: note = siRNA antisense sequence
  source 1..19: mol_type = other RNA
ataaatagacataccttcc

SEQ ID NO: 50884 - RNA, 19 nt, synthetic construct
  misc_feature 1..19: note = siRNA sense sequence
  source 1..19: mol_type = other RNA
gaaggtatgtctatttatc

SEQ ID NO: 50885 - RNA, 19 nt, synthetic construct
  misc_feature 1..19: note = siRNA antisense sequence
  source 1..19: mol_type = other RNA
gataaatagacataccttc

SEQ ID NO: 50886 - RNA, 19 nt, synthetic construct
  misc_feature 1..19: note = siRNA sense sequence
  source 1..19: mol_type = other RNA
tttatcttattgctgcatg

SEQ ID NO: 50887 - RNA, 19 nt, synthetic construct
  misc_feature 1..19: note = siRNA antisense sequence
  source 1..19: mol_type = other RNA
catgcagcaataagataaa

SEQ ID NO: 50888 - RNA, 19 nt, synthetic construct
  misc_feature 1..19: note = siRNA sense sequence
  source 1..19: mol_type = other RNA
ttatcttattgctgcatgt

SEQ ID NO: 50889 - RNA, 19 nt, synthetic construct
  misc_feature 1..19: note = siRNA antisense sequence
  source 1..19: mol_type = other RNA
acatgcagcaataagataa

SEQ ID NO: 50890 - RNA, 19 nt, synthetic construct
  misc_feature 1..19: note = siRNA sense sequence
  source 1..19: mol_type = other RNA
tatcttattgctgcatgtt

SEQ ID NO: 50891 - RNA, 19 nt, synthetic construct
  misc_feature 1..19: note = siRNA antisense sequence
  source 1..19: mol_type = other RNA
aacatgcagcaataagata

SEQ ID NO: 50892 - RNA, 19 nt, synthetic construct
  misc_feature 1..19: note = siRNA sense sequence
  source 1..19: mol_type = other RNA
atcttattgctgcatgttc

SEQ ID NO: 50893 - RNA, 19 nt, synthetic construct
  misc_feature 1..19: note = siRNA antisense sequence
  source 1..19: mol_type = other RNA
gaacatgcagcaataagat

SEQ ID NO: 50894 - RNA, 19 nt, synthetic construct
  misc_feature 1..19: note = siRNA sense sequence
  source 1..19: mol_type = other RNA
tcttattgctgcatgttct

SEQ ID NO: 50895 - RNA, 19 nt, synthetic construct
  misc_feature 1..19: note = siRNA antisense sequence
  source 1..19: mol_type = other RNA
agaacatgcagcaataaga

SEQ ID NO: 50896 - RNA, 19 nt, synthetic construct
  misc_feature 1..19: note = siRNA sense sequence
  source 1..19: mol_type = other RNA
ttgctgcatgttctctctg

SEQ ID NO: 50897 - RNA, 19 nt, synthetic construct
  misc_feature 1..19: note = siRNA antisense sequence
  source 1..19: mol_type = other RNA
cagagagaacatgcagcaa

SEQ ID NO: 50898 - RNA, 19 nt, synthetic construct
  misc_feature 1..19: note = siRNA sense sequence
  source 1..19: mol_type = other RNA
gttctctctgcaattcaaa

SEQ ID NO: 50899 - RNA, 19 nt, synthetic construct
  misc_feature 1..19: note = siRNA antisense sequence
  source 1..19: mol_type = other RNA
tttgaattgcagagagaac

SEQ ID NO: 50900 - RNA, 19 nt, synthetic construct
  misc_feature 1..19: note = siRNA sense sequence
  source 1..19: mol_type = other RNA
ctctctgcaattcaaaatc

SEQ ID NO: 50901 - RNA, 19 nt, synthetic construct
  misc_feature 1..19: note = siRNA antisense sequence
  source 1..19: mol_type = other RNA
gattttgaattgcagagag

SEQ ID NO: 50902 - RNA, 19 nt, synthetic construct
  misc_feature 1..19: note = siRNA sense sequence
  source 1..19: mol_type = other RNA
tctctgcaattcaaaatca

SEQ ID NO: 50903 - RNA, 19 nt, synthetic construct
  misc_feature 1..19: note = siRNA antisense sequence
  source 1..19: mol_type = other RNA
tgattttgaattgcagaga

SEQ ID NO: 50904 - RNA, 19 nt, synthetic construct
  misc_feature 1..19: note = siRNA sense sequence
  source 1..19: mol_type = other RNA
tcaaaatcagtataatggg

SEQ ID NO: 50905 - RNA, 19 nt, synthetic construct
  misc_feature 1..19: note = siRNA antisense sequence
  source 1..19: mol_type = other RNA
cccattatactgattttga

SEQ ID NO: 50906 - RNA, 19 nt, synthetic construct
  misc_feature 1..19: note = siRNA sense sequence
  source 1..19: mol_type = other RNA
caaaatcagtataatggga

SEQ ID NO: 50907 - RNA, 19 nt, synthetic construct
  misc_feature 1..19: note = siRNA antisense sequence
  source 1..19: mol_type = other RNA
tcccattatactgattttg

SEQ ID NO: 50908 - RNA, 19 nt, synthetic construct
  misc_feature 1..19: note = siRNA sense sequence
  source 1..19: mol_type = other RNA
cctaatacatcagtaatac

SEQ ID NO: 50909 - RNA, 19 nt, synthetic construct
  misc_feature 1..19: note = siRNA antisense sequence
  source 1..19: mol_type = other RNA
gtattactgatgtattagg

SEQ ID NO: 50910 - RNA, 19 nt, synthetic construct
  misc_feature 1..19: note = siRNA sense sequence
  source 1..19: mol_type = other RNA
agactctctttgtaagggc

SEQ ID NO: 50911 - RNA, 19 nt, synthetic construct
  misc_feature 1..19: note = siRNA antisense sequence
  source 1..19: mol_type = other RNA
gcccttacaaagagagtct

SEQ ID NO: 50912 - RNA, 19 nt, synthetic construct
  misc_feature 1..19: note = siRNA sense sequence
  source 1..19: mol_type = other RNA
tctctttgtaagggcatgg

SEQ ID NO: 50913 - RNA, 19 nt, synthetic construct
  misc_feature 1..19: note = siRNA antisense sequence
  source 1..19: mol_type = other RNA
ccatgcccttacaaagaga

SEQ ID NO: 50914 - RNA, 19 nt, synthetic construct
  misc_feature 1..19: note = siRNA sense sequence
  source 1..19: mol_type = other RNA
ctctttgtaagggcatggt

SEQ ID NO: 50915 - RNA, 19 nt, synthetic construct
  misc_feature 1..19: note = siRNA antisense sequence
  source 1..19: mol_type = other RNA
accatgcccttacaaagag

SEQ ID NO: 50916 - RNA, 19 nt, synthetic construct
  misc_feature 1..19: note = siRNA sense sequence
  source 1..19: mol_type = other RNA
tctttgtaagggcatggta

SEQ ID NO: 50917 - RNA, 19 nt, synthetic construct
  misc_feature 1..19: note = siRNA antisense sequence
  source 1..19: mol_type = other RNA
taccatgcccttacaaaga

SEQ ID NO: 50918 - RNA, 19 nt, synthetic construct
  misc_feature 1..19: note = siRNA sense sequence
  source 1..19: mol_type = other RNA
ggcagtgctgatgggacag

SEQ ID NO: 50919 - RNA, 19 nt, synthetic construct
  misc_feature 1..19: note = siRNA antisense sequence
  source 1..19: mol_type = other RNA
ctgtcccatcagcactgcc

SEQ ID NO: 50920 - RNA, 19 nt, synthetic construct
  misc_feature 1..19: note = siRNA sense sequence
  source 1..19: mol_type = other RNA
ctgatgggacagccgatga

SEQ ID NO: 50921 - RNA, 19 nt, synthetic construct
  misc_feature 1..19: note = siRNA antisense sequence
  source 1..19: mol_type = other RNA
tcatcggctgtcccatcag

SEQ ID NO: 50922 - RNA, 19 nt, synthetic construct
  misc_feature 1..19: note = siRNA sense sequence
  source 1..19: mol_type = other RNA
tgatgggacagccgatgaa

SEQ ID NO: 50923 - RNA, 19 nt, synthetic construct
  misc_feature 1..19: note = siRNA antisense sequence
  source 1..19: mol_type = other RNA
ttcatcggctgtcccatca

SEQ ID NO: 50924 - RNA, 19 nt, synthetic construct
  misc_feature 1..19: note = siRNA sense sequence
  source 1..19: mol_type = other RNA
gatgggacagccgatgaag

SEQ ID NO: 50925 - RNA, 19 nt, synthetic construct
  misc_feature 1..19: note = siRNA antisense sequence
  source 1..19: mol_type = other RNA
cttcatcggctgtcccatc

SEQ ID NO: 50926 - RNA, 19 nt, synthetic construct
  misc_feature 1..19: note = siRNA sense sequence
  source 1..19: mol_type = other RNA
atgggacagccgatgaaga

SEQ ID NO: 50927 - RNA, 19 nt, synthetic construct
  misc_feature 1..19: note = siRNA antisense sequence
  source 1..19: mol_type = other RNA
tcttcatcggctgtcccat

SEQ ID NO: 50928 - RNA, 19 nt, synthetic construct
  misc_feature 1..19: note = siRNA sense sequence
  source 1..19: mol_type = other RNA
tgggacagccgatgaagac

SEQ ID NO: 50929 - RNA, 19 nt, synthetic construct
  misc_feature 1..19: note = siRNA antisense sequence
  source 1..19: mol_type = other RNA
gtcttcatcggctgtccca

SEQ ID NO: 50930 - RNA, 19 nt, synthetic construct
  misc_feature 1..19: note = siRNA sense sequence
  source 1..19: mol_type = other RNA
gggacagccgatgaagaca

SEQ ID NO: 50931 - RNA, 19 nt, synthetic construct
  misc_feature 1..19: note = siRNA antisense sequence
  source 1..19: mol_type = other RNA
tgtcttcatcggctgtccc

SEQ ID NO: 50932 - RNA, 19 nt, synthetic construct
  misc_feature 1..19: note = siRNA sense sequence
  source 1..19: mol_type = other RNA
caatggtcaatgtagatgt

SEQ ID NO: 50933 - RNA, 19 nt, synthetic construct
  misc_feature 1..19: note = siRNA antisense sequence
  source 1..19: mol_type = other RNA
acatctacattgaccattg

SEQ ID NO: 50934 - RNA, 19 nt, synthetic construct
  misc_feature 1..19: note = siRNA sense sequence
  source 1..19: mol_type = other RNA
aatggtcaatgtagatgtg

SEQ ID NO: 50935 - RNA, 19 nt, synthetic construct
  misc_feature 1..19: note = siRNA antisense sequence
  source 1..19: mol_type = other RNA
cacatctacattgaccatt

SEQ ID NO: 50936 - RNA, 19 nt, synthetic construct
  misc_feature 1..19: note = siRNA sense sequence
  source 1..19: mol_type = other RNA
atggtcaatgtagatgtgc

SEQ ID NO: 50937 - RNA, 19 nt, synthetic construct
  misc_feature 1..19: note = siRNA antisense sequence
  source 1..19: mol_type = other RNA
gcacatctacattgaccat

SEQ ID NO: 50938 - RNA, 19 nt, synthetic construct
  misc_feature 1..19: note = siRNA sense sequence
  source 1..19: mol_type = other RNA
tggtcaatgtagatgtgcc

SEQ ID NO: 50939 - RNA, 19 nt, synthetic construct
  misc_feature 1..19: note = siRNA antisense sequence
  source 1..19: mol_type = other RNA
ggcacatctacattgacca

SEQ ID NO: 50940 - RNA, 19 nt, synthetic construct
  misc_feature 1..19: note = siRNA sense sequence
  source 1..19: mol_type = other RNA
ggtcaatgtagatgtgcca

SEQ ID NO: 50941 - RNA, 19 nt, synthetic construct
  misc_feature 1..19: note = siRNA antisense sequence
  source 1..19: mol_type = other RNA
tggcacatctacattgacc

SEQ ID NO: 50942 - RNA, 19 nt, synthetic construct
  misc_feature 1..19: note = siRNA sense sequence
  source 1..19: mol_type = other RNA
gtcaatgtagatgtgccag

SEQ ID NO: 50943 - RNA, 19 nt, synthetic construct
  misc_feature 1..19: note = siRNA antisense sequence
  source 1..19: mol_type = other RNA
ctggcacatctacattgac

SEQ ID NO: 50944 - RNA, 19 nt, synthetic construct
  misc_feature 1..19: note = siRNA sense sequence
  source 1..19: mol_type = other RNA
atgtagatgtgccaggaca

SEQ ID NO: 50945 - RNA, 19 nt, synthetic construct
  misc_feature 1..19: note = siRNA antisense sequence
  source 1..19: mol_type = other RNA
tgtcctggcacatctacat

SEQ ID NO: 50946 - RNA, 19 nt, synthetic construct
  misc_feature 1..19: note = siRNA sense sequence
  source 1..19: mol_type = other RNA
ttctgttacatagatttgg

SEQ ID NO: 50947 - RNA, 19 nt, synthetic construct
  misc_feature 1..19: note = siRNA antisense sequence
  source 1..19: mol_type = other RNA
ccaaatctatgtaacagaa

SEQ ID NO: 50948 - RNA, 19 nt, synthetic construct
  misc_feature 1..19: note = siRNA sense sequence
  source 1..19: mol_type = other RNA
tctgttacatagatttgga

SEQ ID NO: 50949 - RNA, 19 nt, synthetic construct
  misc_feature 1..19: note = siRNA antisense sequence
  source 1..19: mol_type = other RNA
tccaaatctatgtaacaga

SEQ ID NO: 50950 - RNA, 19 nt, synthetic construct
  misc_feature 1..19: note = siRNA sense sequence
  source 1..19: mol_type = other RNA
ctgttacatagatttggaa

SEQ ID NO: 50951 - RNA, 19 nt, synthetic construct
  misc_feature 1..19: note = siRNA antisense sequence
  source 1..19: mol_type = other RNA
ttccaaatctatgtaacag

SEQ ID NO: 50952 - RNA, 19 nt, synthetic construct
  misc_feature 1..19: note = siRNA sense sequence
  source 1..19: mol_type = other RNA
agggtactacctctggttt

SEQ ID NO: 50953 - RNA, 19 nt, synthetic construct
  misc_feature 1..19: note = siRNA antisense sequence
  source 1..19: mol_type = other RNA
aaaccagaggtagtaccct

SEQ ID NO: 50954 - RNA, 19 nt, synthetic construct
  misc_feature 1..19: note = siRNA sense sequence
  source 1..19: mol_type = other RNA
tactacctctggtttgggt

SEQ ID NO: 50955 - RNA, 19 nt, synthetic construct
  misc_feature 1..19: note = siRNA antisense sequence
  source 1..19: mol_type = other RNA
acccaaaccagaggtagta

SEQ ID NO: 50956 - RNA, 19 nt, synthetic construct
  misc_feature 1..19: note = siRNA sense sequence
  source 1..19: mol_type = other RNA
actacctctggtttgggtt

SEQ ID NO: 50957 - RNA, 19 nt, synthetic construct
  misc_feature 1..19: note = siRNA antisense sequence
  source 1..19: mol_type = other RNA
aacccaaaccagaggtagt

SEQ ID NO: 50958 - RNA, 19 nt, synthetic construct
  misc_feature 1..19: note = siRNA sense sequence
  source 1..19: mol_type = other RNA
ctacctctggtttgggttt

SEQ ID NO: 50959 - RNA, 19 nt, synthetic construct
  misc_feature 1..19: note = siRNA antisense sequence
  source 1..19: mol_type = other RNA
aaacccaaaccagaggtag

SEQ ID NO: 50960 - RNA, 19 nt, synthetic construct
  misc_feature 1..19: note = siRNA sense sequence
  source 1..19: mol_type = other RNA
tacctctggtttgggtttt

SEQ ID NO: 50961 - RNA, 19 nt, synthetic construct
  misc_feature 1..19: note = siRNA antisense sequence
  source 1..19: mol_type = other RNA
aaaacccaaaccagaggta

SEQ ID NO: 50962 - RNA, 19 nt, synthetic construct
  misc_feature 1..19: note = siRNA sense sequence
  source 1..19: mol_type = other RNA
cttcatttcatattgagct

SEQ ID NO: 50963 - RNA, 19 nt, synthetic construct
  misc_feature 1..19: note = siRNA antisense sequence
  source 1..19: mol_type = other RNA
agctcaatatgaaatgaag

SEQ ID NO: 50964 - RNA, 19 nt, synthetic construct
  misc_feature 1..19: note = siRNA sense sequence
  source 1..19: mol_type = other RNA
tcatttcatattgagctac

SEQ ID NO: 50965 - RNA, 19 nt, synthetic construct
  misc_feature 1..19: note = siRNA antisense sequence
  source 1..19: mol_type = other RNA
gtagctcaatatgaaatga

SEQ ID NO: 50966 - RNA, 19 nt, synthetic construct
  misc_feature 1..19: note = siRNA sense sequence
  source 1..19: mol_type = other RNA
catttcatattgagctact

SEQ ID NO: 50967 - RNA, 19 nt, synthetic construct
  misc_feature 1..19: note = siRNA antisense sequence
  source 1..19: mol_type = other RNA
agtagctcaatatgaaatg

SEQ ID NO: 50968 - RNA, 19 nt, synthetic construct
  misc_feature 1..19: note = siRNA sense sequence
  source 1..19: mol_type = other RNA
tttcatattgagctactac

SEQ ID NO: 50969 - RNA, 19 nt, synthetic construct
  misc_feature 1..19: note = siRNA antisense sequence
  source 1..19: mol_type = other RNA
gtagtagctcaatatgaaa

SEQ ID NO: 50970 - RNA, 19 nt, synthetic construct
  misc_feature 1..19: note = siRNA sense sequence
  source 1..19: mol_type = other RNA
ttcatattgagctactaca

SEQ ID NO: 50971 - RNA, 19 nt, synthetic construct
  misc_feature 1..19: note = siRNA antisense sequence
  source 1..19: mol_type = other RNA
tgtagtagctcaatatgaa

SEQ ID NO: 50972 - RNA, 19 nt, synthetic construct
  misc_feature 1..19: note = siRNA sense sequence
  source 1..19: mol_type = other RNA
caataacttctttgttcac

SEQ ID NO: 50973 - RNA, 19 nt, synthetic construct
  misc_feature 1..19: note = siRNA antisense sequence
  source 1..19: mol_type = other RNA
gtgaacaaagaagttattg

SEQ ID NO: 50974 - RNA, 19 nt, synthetic construct
  misc_feature 1..19: note = siRNA sense sequence
  source 1..19: mol_type = other RNA
tttctctgtattttgctcc

SEQ ID NO: 50975 - RNA, 19 nt, synthetic construct
  misc_feature 1..19: note = siRNA antisense sequence
  source 1..19: mol_type = other RNA
ggagcaaaatacagagaaa

SEQ ID NO: 50976 - RNA, 19 nt, synthetic construct
  misc_feature 1..19: note = siRNA sense sequence
  source 1..19: mol_type = other RNA
tattttgctccttgcccat

SEQ ID NO: 50977 - RNA, 19 nt, synthetic construct
  misc_feature 1..19: note = siRNA antisense sequence
  source 1..19: mol_type = other RNA
atgggcaaggagcaaaata

SEQ ID NO: 50978 - RNA, 19 nt, synthetic construct
  misc_feature 1..19: note = siRNA sense sequence
  source 1..19: mol_type = other RNA
attttgctccttgcccatt

SEQ ID NO: 50979 - RNA, 19 nt, synthetic construct
  misc_feature 1..19: note = siRNA antisense sequence
  source 1..19: mol_type = other RNA
aatgggcaaggagcaaaat

SEQ ID NO: 50980 - RNA, 19 nt, synthetic construct
  misc_feature 1..19: note = siRNA sense sequence
  source 1..19: mol_type = other RNA
ttttgctccttgcccattt

SEQ ID NO: 50981 - RNA, 19 nt, synthetic construct
  misc_feature 1..19: note = siRNA antisense sequence
  source 1..19: mol_type = other RNA
aaatgggcaaggagcaaaa

SEQ ID NO: 50982 - RNA, 19 nt, synthetic construct
  misc_feature 1..19: note = siRNA sense sequence
  source 1..19: mol_type = other RNA
ctccttgcccattttaaag

SEQ ID NO: 50983 - RNA, 19 nt, synthetic construct
  misc_feature 1..19: note = siRNA antisense sequence
  source 1..19: mol_type = other RNA
ctttaaaatgggcaaggag

SEQ ID NO: 50984 - RNA, 19 nt, synthetic construct
  misc_feature 1..19: note = siRNA sense sequence
  source 1..19: mol_type = other RNA
gtctaaatcatgttacttc

SEQ ID NO: 50985 - RNA, 19 nt, synthetic construct
  misc_feature 1..19: note = siRNA antisense sequence
  source 1..19: mol_type = other RNA
gaagtaacatgatttagac

SEQ ID NO: 50986 - RNA, 19 nt, synthetic construct
  misc_feature 1..19: note = siRNA sense sequence
  source 1..19: mol_type = other RNA
catgttacttctttgcaga

SEQ ID NO: 50987 - RNA, 19 nt, synthetic construct
  misc_feature 1..19: note = siRNA antisense sequence
  source 1..19: mol_type = other RNA
tctgcaaagaagtaacatg

SEQ ID NO: 50988 - RNA, 19 nt, synthetic construct
  misc_feature 1..19: note = siRNA sense sequence
  source 1..19: mol_type = other RNA
atgttacttctttgcagat

SEQ ID NO: 50989 - RNA, 19 nt, synthetic construct
  misc_feature 1..19: note = siRNA antisense sequence
  source 1..19: mol_type = other RNA
atctgcaaagaagtaacat

SEQ ID NO: 50990 - RNA, 19 nt, synthetic construct
  misc_feature 1..19: note = siRNA sense sequence
  source 1..19: mol_type = other RNA
tgttacttctttgcagatt

SEQ ID NO: 50991 - RNA, 19 nt, synthetic construct
  misc_feature 1..19: note = siRNA antisense sequence
  source 1..19: mol_type = other RNA
aatctgcaaagaagtaaca

SEQ ID NO: 50992 - RNA, 19 nt, synthetic construct
  misc_feature 1..19: note = siRNA sense sequence
  source 1..19: mol_type = other RNA
tgagttttcaatggtgact

SEQ ID NO: 50993 - RNA, 19 nt, synthetic construct
  misc_feature 1..19: note = siRNA antisense sequence
  source 1..19: mol_type = other RNA
agtcaccattgaaaactca

SEQ ID NO: 50994 - RNA, 19 nt, synthetic construct
  misc_feature 1..19: note = siRNA sense sequence
  source 1..19: mol_type = other RNA
gagttttcaatggtgactg

SEQ ID NO: 50995 - RNA, 19 nt, synthetic construct
  misc_feature 1..19: note = siRNA antisense sequence
  source 1..19: mol_type = other RNA
cagtcaccattgaaaactc

SEQ ID NO: 50996 - RNA, 19 nt, synthetic construct
  misc_feature 1..19: note = siRNA sense sequence
  source 1..19: mol_type = other RNA
agttttcaatggtgactgg

SEQ ID NO: 50997 - RNA, 19 nt, synthetic construct
  misc_feature 1..19: note = siRNA antisense sequence
  source 1..19: mol_type = other RNA
ccagtcaccattgaaaact

SEQ ID NO: 50998 - RNA, 19 nt, synthetic construct
  misc_feature 1..19: note = siRNA sense sequence
  source 1..19: mol_type = other RNA
gttttcaatggtgactggc

SEQ ID NO: 50999 - RNA, 19 nt, synthetic construct
  misc_feature 1..19: note = siRNA antisense sequence
  source 1..19: mol_type = other RNA
gccagtcaccattgaaaac

SEQ ID NO: 51000 - RNA, 19 nt, synthetic construct
  misc_feature 1..19: note = siRNA sense sequence
  source 1..19: mol_type = other RNA
ttttcaatggtgactggct

SEQ ID NO: 51001 - RNA, 19 nt, synthetic construct
  misc_feature 1..19: note = siRNA antisense sequence
  source 1..19: mol_type = other RNA
agccagtcaccattgaaaa

SEQ ID NO: 51002 - RNA, 19 nt, synthetic construct
  misc_feature 1..19: note = siRNA sense sequence
  source 1..19: mol_type = other RNA
tttcaatggtgactggctg

SEQ ID NO: 51003 - RNA, 19 nt, synthetic construct
  misc_feature 1..19: note = siRNA antisense sequence
  source 1..19: mol_type = other RNA
cagccagtcaccattgaaa

SEQ ID NO: 51004 - RNA, 19 nt, synthetic construct
  misc_feature 1..19: note = siRNA sense sequence
  source 1..19: mol_type = other RNA
ttcaatggtgactggctgt

SEQ ID NO: 51005 - RNA, 19 nt, synthetic construct
  misc_feature 1..19: note = siRNA antisense sequence
  source 1..19: mol_type = other RNA
acagccagtcaccattgaa

SEQ ID NO: 51006 - RNA, 19 nt, synthetic construct
  misc_feature 1..19: note = siRNA sense sequence
  source 1..19: mol_type = other RNA
tcaatggtgactggctgtt

SEQ ID NO: 51007 - RNA, 19 nt, synthetic construct
  misc_feature 1..19: note = siRNA antisense sequence
  source 1..19: mol_type = other RNA
aacagccagtcaccattga

SEQ ID NO: 51008 - RNA, 19 nt, synthetic construct
  misc_feature 1..19: note = siRNA sense sequence
  source 1..19: mol_type = other RNA
caatggtgactggctgttg

SEQ ID NO: 51009 - RNA, 19 nt, synthetic construct
  misc_feature 1..19: note = siRNA antisense sequence
  source 1..19: mol_type = other RNA
caacagccagtcaccattg

SEQ ID NO: 51010 - RNA, 19 nt, synthetic construct
  misc_feature 1..19: note = siRNA sense sequence
  source 1..19: mol_type = other RNA
ggtgactggctgttgagga

SEQ ID NO: 51011 - RNA, 19 nt, synthetic construct
  misc_feature 1..19: note = siRNA antisense sequence
  source 1..19: mol_type = other RNA
tcctcaacagccagtcacc

SEQ ID NO: 51012 - RNA, 19 nt, synthetic construct
  misc_feature 1..19: note = siRNA sense sequence
  source 1..19: mol_type = other RNA
gtgactggctgttgaggat

SEQ ID NO: 51013 - RNA, 19 nt, synthetic construct
  misc_feature 1..19: note = siRNA antisense sequence
  source 1..19: mol_type = other RNA
atcctcaacagccagtcac

SEQ ID NO: 51014 - RNA, 19 nt, synthetic construct
  misc_feature 1..19: note = siRNA sense sequence
  source 1..19: mol_type = other RNA
tgactggctgttgaggata

SEQ ID NO: 51015 - RNA, 19 nt, synthetic construct
  misc_feature 1..19: note = siRNA antisense sequence
  source 1..19: mol_type = other RNA
tatcctcaacagccagtca

SEQ ID NO: 51016 - RNA, 19 nt, synthetic construct
  misc_feature 1..19: note = siRNA sense sequence
  source 1..19: mol_type = other RNA
gactggctgttgaggataa

SEQ ID NO: 51017 - RNA, 19 nt, synthetic construct
  misc_feature 1..19: note = siRNA antisense sequence
  source 1..19: mol_type = other RNA
ttatcctcaacagccagtc

SEQ ID NO: 51018 - RNA, 19 nt, synthetic construct
  misc_feature 1..19: note = siRNA sense sequence
  source 1..19: mol_type = other RNA
actggctgttgaggataac

SEQ ID NO: 51019 - RNA, 19 nt, synthetic construct
  misc_feature 1..19: note = siRNA antisense sequence
  source 1..19: mol_type = other RNA
gttatcctcaacagccagt

SEQ ID NO: 51020 - RNA, 19 nt, synthetic construct
  misc_feature 1..19: note = siRNA sense sequence
  source 1..19: mol_type = other RNA
ctggctgttgaggataacg

SEQ ID NO: 51021 - RNA, 19 nt, synthetic construct
  misc_feature 1..19: note = siRNA antisense sequence
  source 1..19: mol_type = other RNA
cgttatcctcaacagccag

SEQ ID NO: 51022 - RNA, 19 nt, synthetic construct
  misc_feature 1..19: note = siRNA sense sequence
  source 1..19: mol_type = other RNA
tggctgttgaggataacga

SEQ ID NO: 51023 - RNA, 19 nt, synthetic construct
  misc_feature 1..19: note = siRNA antisense sequence
  source 1..19: mol_type = other RNA
tcgttatcctcaacagcca

SEQ ID NO: 51024 - RNA, 19 nt, synthetic construct
  misc_feature 1..19: note = siRNA sense sequence
  source 1..19: mol_type = other RNA
ggctgttgaggataacgag

SEQ ID NO: 51025 - RNA, 19 nt, synthetic construct
  misc_feature 1..19: note = siRNA antisense sequence
  source 1..19: mol_type = other RNA
ctcgttatcctcaacagcc

SEQ ID NO: 51026 - RNA, 19 nt, synthetic construct
  misc_feature 1..19: note = siRNA sense sequence
  source 1..19: mol_type = other RNA
gctgttgaggataacgagt

SEQ ID NO: 51027 - RNA, 19 nt, synthetic construct
  misc_feature 1..19: note = siRNA antisense sequence
  source 1..19: mol_type = other RNA
actcgttatcctcaacagc

SEQ ID NO: 51028 - RNA, 19 nt, synthetic construct
  misc_feature 1..19: note = siRNA sense sequence
  source 1..19: mol_type = other RNA
ctgttgaggataacgagtt

SEQ ID NO: 51029 - RNA, 19 nt, synthetic construct
  misc_feature 1..19: note = siRNA antisense sequence
  source 1..19: mol_type = other RNA
aactcgttatcctcaacag

SEQ ID NO: 51030 - RNA, 19 nt, synthetic construct
  misc_feature 1..19: note = siRNA sense sequence
  source 1..19: mol_type = other RNA
tgttgaggataacgagtta

SEQ ID NO: 51031 - RNA, 19 nt, synthetic construct
  misc_feature 1..19: note = siRNA antisense sequence
  source 1..19: mol_type = other RNA
taactcgttatcctcaaca

SEQ ID NO: 51032 - RNA, 19 nt, synthetic construct
  misc_feature 1..19: note = siRNA sense sequence
  source 1..19: mol_type = other RNA
cgagttatggcattcccta

SEQ ID NO: 51033 - RNA, 19 nt, synthetic construct
  misc_feature 1..19: note = siRNA antisense sequence
  source 1..19: mol_type = other RNA
tagggaatgccataactcg

SEQ ID NO: 51034 - RNA, 19 nt, synthetic construct
  misc_feature 1..19: note = siRNA sense sequence
  source 1..19: mol_type = other RNA
gagttatggcattccctat

SEQ ID NO: 51035 - RNA, 19 nt, synthetic construct
  misc_feature 1..19: note = siRNA antisense sequence
  source 1..19: mol_type = other RNA
atagggaatgccataactc

SEQ ID NO: 51036 - RNA, 19 nt, synthetic construct
  misc_feature 1..19: note = siRNA sense sequence
  source 1..19: mol_type = other RNA
agttatggcattccctatt

SEQ ID NO: 51037 - RNA, 19 nt, synthetic construct
  misc_feature 1..19: note = siRNA antisense sequence
  source 1..19: mol_type = other RNA
aatagggaatgccataact

SEQ ID NO: 51038 - RNA, 19 nt, synthetic construct
  misc_feature 1..19: note = siRNA sense sequence
  source 1..19: mol_type = other RNA
gttatggcattccctattc

SEQ ID NO: 51039 - RNA, 19 nt, synthetic construct
  misc_feature 1..19: note = siRNA antisense sequence
  source 1..19: mol_type = other RNA
gaatagggaatgccataac

SEQ ID NO: 51040 - RNA, 19 nt, synthetic construct
  misc_feature 1..19: note = siRNA sense sequence
  source 1..19: mol_type = other RNA
ttatggcattccctattct

SEQ ID NO: 51041 - RNA, 19 nt, synthetic construct
  misc_feature 1..19: note = siRNA antisense sequence
  source 1..19: mol_type = other RNA
agaatagggaatgccataa

SEQ ID NO: 51042 - RNA, 19 nt, synthetic construct
  misc_feature 1..19: note = siRNA sense sequence
  source 1..19: mol_type = other RNA
tatggcattccctattctg

SEQ ID NO: 51043 - RNA, 19 nt, synthetic construct
  misc_feature 1..19: note = siRNA antisense sequence
  source 1..19: mol_type = other RNA
cagaatagggaatgccata

SEQ ID NO: 51044 - RNA, 19 nt, synthetic construct
  misc_feature 1..19: note = siRNA sense sequence
  source 1..19: mol_type = other RNA
atggcattccctattctgc

SEQ ID NO: 51045 - RNA, 19 nt, synthetic construct
  misc_feature 1..19: note = siRNA antisense sequence
  source 1..19: mol_type = other RNA
gcagaatagggaatgccat

SEQ ID NO: 51046 - RNA, 19 nt, synthetic construct
  misc_feature 1..19: note = siRNA sense sequence
  source 1..19: mol_type = other RNA
ctattctgccttaggtaga

SEQ ID NO: 51047 - RNA, 19 nt, synthetic construct
  misc_feature 1..19: note = siRNA antisense sequence
  source 1..19: mol_type = other RNA
tctacctaaggcagaatag

SEQ ID NO: 51048 - RNA, 19 nt, synthetic construct
  misc_feature 1..19: note = siRNA sense sequence
  source 1..19: mol_type = other RNA
tattctgccttaggtagag

SEQ ID NO: 51049 - RNA, 19 nt, synthetic construct
  misc_feature 1..19: note = siRNA antisense sequence
  source 1..19: mol_type = other RNA
ctctacctaaggcagaata

SEQ ID NO: 51050 - RNA, 19 nt, synthetic construct
  misc_feature 1..19: note = siRNA sense sequence
  source 1..19: mol_type = other RNA
attctgccttaggtagagg

SEQ ID NO: 51051 - RNA, 19 nt, synthetic construct
  misc_feature 1..19: note = siRNA antisense sequence
  source 1..19: mol_type = other RNA
cctctacctaaggcagaat

SEQ ID NO: 51052 - RNA, 19 nt, synthetic construct
  misc_feature 1..19: note = siRNA sense sequence
  source 1..19: mol_type = other RNA
ttctgccttaggtagagga

SEQ ID NO: 51053 - RNA, 19 nt, synthetic construct
  misc_feature 1..19: note = siRNA antisense sequence
  source 1..19: mol_type = other RNA
tcctctacctaaggcagaa

SEQ ID NO: 51054 - RNA, 19 nt, synthetic construct
  misc_feature 1..19: note = siRNA sense sequence
  source 1..19: mol_type = other RNA
tctgccttaggtagaggat

SEQ ID NO: 51055 - RNA, 19 nt, synthetic construct
  misc_feature 1..19: note = siRNA antisense sequence
  source 1..19: mol_type = other RNA
atcctctacctaaggcaga

SEQ ID NO: 51056 - RNA, 19 nt, synthetic construct
  misc_feature 1..19: note = siRNA sense sequence
  source 1..19: mol_type = other RNA
ctgccttaggtagaggatg

SEQ ID NO: 51057 - RNA, 19 nt, synthetic construct
  misc_feature 1..19: note = siRNA antisense sequence
  source 1..19: mol_type = other RNA
catcctctacctaaggcag

SEQ ID NO: 51058 - RNA, 19 nt, synthetic construct
  misc_feature 1..19: note = siRNA sense sequence
  source 1..19: mol_type = other RNA
tgccttaggtagaggatgt

SEQ ID NO: 51059 - RNA, 19 nt, synthetic construct
  misc_feature 1..19: note = siRNA antisense sequence
  source 1..19: mol_type = other RNA
acatcctctacctaaggca

SEQ ID NO: 51060 - RNA, 19 nt, synthetic construct
  misc_feature 1..19: note = siRNA sense sequence
  source 1..19: mol_type = other RNA
gccttaggtagaggatgtc

SEQ ID NO: 51061 - RNA, 19 nt, synthetic construct
  misc_feature 1..19: note = siRNA antisense sequence
  source 1..19: mol_type = other RNA
gacatcctctacctaaggc

SEQ ID NO: 51062 - RNA, 19 nt, synthetic construct
  misc_feature 1..19: note = siRNA sense sequence
  source 1..19: mol_type = other RNA
ccttaggtagaggatgtca

SEQ ID NO: 51063 - RNA, 19 nt, synthetic construct
  misc_feature 1..19: note = siRNA antisense sequence
  source 1..19: mol_type = other RNA
tgacatcctctacctaagg

SEQ ID NO: 51064 - RNA, 19 nt, synthetic construct
  misc_feature 1..19: note = siRNA sense sequence
  source 1..19: mol_type = other RNA
cttaggtagaggatgtcaa

SEQ ID NO: 51065 - RNA, 19 nt, synthetic construct
  misc_feature 1..19: note = siRNA antisense sequence
  source 1..19: mol_type = other RNA
ttgacatcctctacctaag

SEQ ID NO: 51066 - RNA, 19 nt, synthetic construct
  misc_feature 1..19: note = siRNA sense sequence
  source 1..19: mol_type = other RNA
ttaggtagaggatgtcaag

SEQ ID NO: 51067 - RNA, 19 nt, synthetic construct
  misc_feature 1..19: note = siRNA antisense sequence
  source 1..19: mol_type = other RNA
cttgacatcctctacctaa

SEQ ID NO: 51068 - RNA, 19 nt, synthetic construct
  misc_feature 1..19: note = siRNA sense sequence
  source 1..19: mol_type = other RNA
taggtagaggatgtcaagt

SEQ ID NO: 51069 - RNA, 19 nt, synthetic construct
  misc_feature 1..19: note = siRNA antisense sequence
  source 1..19: mol_type = other RNA
acttgacatcctctaccta

SEQ ID NO: 51070 - RNA, 19 nt, synthetic construct
  misc_feature 1..19: note = siRNA sense sequence
  source 1..19: mol_type = other RNA
aggtagaggatgtcaagta

SEQ ID NO: 51071 - RNA, 19 nt, synthetic construct
  misc_feature 1..19: note = siRNA antisense sequence
  source 1..19: mol_type = other RNA
tacttgacatcctctacct

SEQ ID NO: 51072 - RNA, 19 nt, synthetic construct
  misc_feature 1..19: note = siRNA sense sequence
  source 1..19: mol_type = other RNA
ggtagaggatgtcaagtag

SEQ ID NO: 51073 - RNA, 19 nt, synthetic construct
  misc_feature 1..19: note = siRNA antisense sequence
  source 1..19: mol_type = other RNA
ctacttgacatcctctacc

SEQ ID NO: 51074 - RNA, 19 nt, synthetic construct
  misc_feature 1..19: note = siRNA sense sequence
  source 1..19: mol_type = other RNA
gtagaggatgtcaagtagc

SEQ ID NO: 51075 - RNA, 19 nt, synthetic construct
  misc_feature 1..19: note = siRNA antisense sequence
  source 1..19: mol_type = other RNA
gctacttgacatcctctac

SEQ ID NO: 51076 - RNA, 19 nt, synthetic construct
  misc_feature 1..19: note = siRNA sense sequence
  source 1..19: mol_type = other RNA
tagaggatgtcaagtagct

SEQ ID NO: 51077 - RNA, 19 nt, synthetic construct
  misc_feature 1..19: note = siRNA antisense sequence
  source 1..19: mol_type = other RNA
agctacttgacatcctcta

SEQ ID NO: 51078 - RNA, 19 nt, synthetic construct
  misc_feature 1..19: note = siRNA sense sequence
  source 1..19: mol_type = other RNA
agaggatgtcaagtagcta

SEQ ID NO: 51079 - RNA, 19 nt, synthetic construct
  misc_feature 1..19: note = siRNA antisense sequence
  source 1..19: mol_type = other RNA
tagctacttgacatcctct

SEQ ID NO: 51080 - RNA, 19 nt, synthetic construct
  misc_feature 1..19: note = siRNA sense sequence
  source 1..19: mol_type = other RNA
gaggatgtcaagtagctaa

SEQ ID NO: 51081 - RNA, 19 nt, synthetic construct
  misc_feature 1..19: note = siRNA antisense sequence
  source 1..19: mol_type = other RNA
ttagctacttgacatcctc

SEQ ID NO: 51082 - RNA, 19 nt, synthetic construct
  misc_feature 1..19: note = siRNA sense sequence
  source 1..19: mol_type = other RNA
aggatgtcaagtagctaat

SEQ ID NO: 51083 - RNA, 19 nt, synthetic construct
  misc_feature 1..19: note = siRNA antisense sequence
  source 1..19: mol_type = other RNA
attagctacttgacatcct

SEQ ID NO: 51084 - RNA, 19 nt, synthetic construct
  misc_feature 1..19: note = siRNA sense sequence
  source 1..19: mol_type = other RNA
ggatgtcaagtagctaatt

SEQ ID NO: 51085 - RNA, 19 nt, synthetic construct
  misc_feature 1..19: note = siRNA antisense sequence
  source 1..19: mol_type = other RNA
aattagctacttgacatcc

SEQ ID NO: 51086 - RNA, 19 nt, synthetic construct
  misc_feature 1..19: note = siRNA sense sequence
  source 1..19: mol_type = other RNA
gatgtcaagtagctaatta

SEQ ID NO: 51087 - RNA, 19 nt, synthetic construct
  misc_feature 1..19: note = siRNA antisense sequence
  source 1..19: mol_type = other RNA
taattagctacttgacatc

SEQ ID NO: 51088 - RNA, 19 nt, synthetic construct
  misc_feature 1..19: note = siRNA sense sequence
  source 1..19: mol_type = other RNA
atgtcaagtagctaattac

SEQ ID NO: 51089 - RNA, 19 nt, synthetic construct
  misc_feature 1..19: note = siRNA antisense sequence
  source 1..19: mol_type = other RNA
gtaattagctacttgacat

SEQ ID NO: 51090 - RNA, 19 nt, synthetic construct
  misc_feature 1..19: note = siRNA sense sequence
  source 1..19: mol_type = other RNA
gtagctaattactttggaa

SEQ ID NO: 51091 - RNA, 19 nt, synthetic construct
  misc_feature 1..19: note = siRNA antisense sequence
  source 1..19: mol_type = other RNA
ttccaaagtaattagctac

SEQ ID NO: 51092 - RNA, 19 nt, synthetic construct
  misc_feature 1..19: note = siRNA sense sequence
  source 1..19: mol_type = other RNA
aactcgatctttcctaaaa

SEQ ID NO: 51093 - RNA, 19 nt, synthetic construct
  misc_feature 1..19: note = siRNA antisense sequence
  source 1..19: mol_type = other RNA
ttttaggaaagatcgagtt

SEQ ID NO: 51094 - RNA, 19 nt, synthetic construct
  misc_feature 1..19: note = siRNA sense sequence
  source 1..19: mol_type = other RNA
agtcttcagaattgttatg

SEQ ID NO: 51095 - RNA, 19 nt, synthetic construct
  misc_feature 1..19: note = siRNA antisense sequence
  source 1..19: mol_type = other RNA
cataacaattctgaagact

SEQ ID NO: 51096 - RNA, 19 nt, synthetic construct
  misc_feature 1..19: note = siRNA sense sequence
  source 1..19: mol_type = other RNA
gtcttcagaattgttatgc

SEQ ID NO: 51097 - RNA, 19 nt, synthetic construct
  misc_feature 1..19: note = siRNA antisense sequence
  source 1..19: mol_type = other RNA
gcataacaattctgaagac

SEQ ID NO: 51098 - RNA, 19 nt, synthetic construct
  misc_feature 1..19: note = siRNA sense sequence
  source 1..19: mol_type = other RNA
tcttcagaattgttatgcc

SEQ ID NO: 51099 - RNA, 19 nt, synthetic construct
  misc_feature 1..19: note = siRNA antisense sequence
  source 1..19: mol_type = other RNA
ggcataacaattctgaaga

SEQ ID NO: 51100 - RNA, 19 nt, synthetic construct
  misc_feature 1..19: note = siRNA sense sequence
  source 1..19: mol_type = other RNA
cttcagaattgttatgcca

SEQ ID NO: 51101 - RNA, 19 nt, synthetic construct
  misc_feature 1..19: note = siRNA antisense sequence
  source 1..19: mol_type = other RNA
tggcataacaattctgaag

SEQ ID NO: 51102 - RNA, 19 nt, synthetic construct
  misc_feature 1..19: note = siRNA sense sequence
  source 1..19: mol_type = other RNA
ttcagaattgttatgccag

SEQ ID NO: 51103 - RNA, 19 nt, synthetic construct
  misc_feature 1..19: note = siRNA antisense sequence
  source 1..19: mol_type = other RNA
ctggcataacaattctgaa

SEQ ID NO: 51104 - RNA, 19 nt, synthetic construct
  misc_feature 1..19: note = siRNA sense sequence
  source 1..19: mol_type = other RNA
agcttctttcttcacattc

SEQ ID NO: 51105 - RNA, 19 nt, synthetic construct
  misc_feature 1..19: note = siRNA antisense sequence
  source 1..19: mol_type = other RNA
gaatgtgaagaaagaagct

SEQ ID NO: 51106 - RNA, 19 nt, synthetic construct
  misc_feature 1..19: note = siRNA sense sequence
  source 1..19: mol_type = other RNA
gcttctttcttcacattct

SEQ ID NO: 51107 - RNA, 19 nt, synthetic construct
  misc_feature 1..19: note = siRNA antisense sequence
  source 1..19: mol_type = other RNA
agaatgtgaagaaagaagc

SEQ ID NO: 51108 - RNA, 19 nt, synthetic construct
  misc_feature 1..19: note = siRNA sense sequence
  source 1..19: mol_type = other RNA
tcttcacattctttgatga

SEQ ID NO: 51109 - RNA, 19 nt, synthetic construct
  misc_feature 1..19: note = siRNA antisense sequence
  source 1..19: mol_type = other RNA
tcatcaaagaatgtgaaga

SEQ ID NO: 51110 - RNA, 19 nt, synthetic construct
  misc_feature 1..19: note = siRNA sense sequence
  source 1..19: mol_type = other RNA
tcacattctttgatgatct

SEQ ID NO: 51111 - RNA, 19 nt, synthetic construct
  misc_feature 1..19: note = siRNA antisense sequence
  source 1..19: mol_type = other RNA
agatcatcaaagaatgtga

SEQ ID NO: 51112 - RNA, 19 nt, synthetic construct
  misc_feature 1..19: note = siRNA sense sequence
  source 1..19: mol_type = other RNA
cacattctttgatgatctc

SEQ ID NO: 51113 - RNA, 19 nt, synthetic construct
  misc_feature 1..19: note = siRNA antisense sequence
  source 1..19: mol_type = other RNA
gagatcatcaaagaatgtg

SEQ ID NO: 51114 - RNA, 19 nt, synthetic construct
  misc_feature 1..19: note = siRNA sense sequence
  source 1..19: mol_type = other RNA
cattctttgatgatctcta

SEQ ID NO: 51115 - RNA, 19 nt, synthetic construct
  misc_feature 1..19: note = siRNA antisense sequence
  source 1..19: mol_type = other RNA
tagagatcatcaaagaatg

SEQ ID NO: 51116 - RNA, 19 nt, synthetic construct
  misc_feature 1..19: note = siRNA sense sequence
  source 1..19: mol_type = other RNA
attctttgatgatctctag

SEQ ID NO: 51117 - RNA, 19 nt, synthetic construct
  misc_feature 1..19: note = siRNA antisense sequence
  source 1..19: mol_type = other RNA
ctagagatcatcaaagaat

SEQ ID NO: 51118 - RNA, 19 nt, synthetic construct
  misc_feature 1..19: note = siRNA sense sequence
  source 1..19: mol_type = other RNA
tttgatgatctctagtctc

SEQ ID NO: 51119 - RNA, 19 nt, synthetic construct
  misc_feature 1..19: note = siRNA antisense sequence
  source 1..19: mol_type = other RNA
gagactagagatcatcaaa

SEQ ID NO: 51120 - RNA, 19 nt, synthetic construct
  misc_feature 1..19: note = siRNA sense sequence
  source 1..19: mol_type = other RNA
ttgatgatctctagtctca

SEQ ID NO: 51121 - RNA, 19 nt, synthetic construct
  misc_feature 1..19: note = siRNA antisense sequence
  source 1..19: mol_type = other RNA
tgagactagagatcatcaa

SEQ ID NO: 51122 - RNA, 19 nt, synthetic construct
  misc_feature 1..19: note = siRNA sense sequence
  source 1..19: mol_type = other RNA
tgatgatctctagtctcag

SEQ ID NO: 51123 - RNA, 19 nt, synthetic construct
  misc_feature 1..19: note = siRNA antisense sequence
  source 1..19: mol_type = other RNA
ctgagactagagatcatca

SEQ ID NO: 51124 - RNA, 19 nt, synthetic construct
  misc_feature 1..19: note = siRNA sense sequence
  source 1..19: mol_type = other RNA
acatgcgccttttctccaa

SEQ ID NO: 51125 - RNA, 19 nt, synthetic construct
  misc_feature 1..19: note = siRNA antisense sequence
  source 1..19: mol_type = other RNA
ttggagaaaaggcgcatgt

SEQ ID NO: 51126 - RNA, 19 nt, synthetic construct
  misc_feature 1..19: note = siRNA sense sequence
  source 1..19: mol_type = other RNA
catgcgccttttctccaac

SEQ ID NO: 51127 - RNA, 19 nt, synthetic construct
  misc_feature 1..19: note = siRNA antisense sequence
  source 1..19: mol_type = other RNA
gttggagaaaaggcgcatg

SEQ ID NO: 51128 - RNA, 19 nt, synthetic construct
  misc_feature 1..19: note = siRNA sense sequence
  source 1..19: mol_type = other RNA
atgcgccttttctccaact

SEQ ID NO: 51129 - RNA, 19 nt, synthetic construct
  misc_feature 1..19: note = siRNA antisense sequence
  source 1..19: mol_type = other RNA
agttggagaaaaggcgcat

SEQ ID NO: 51130 - RNA, 19 nt, synthetic construct
  misc_feature 1..19: note = siRNA sense sequence
  source 1..19: mol_type = other RNA
tgcgccttttctccaacta

SEQ ID NO: 51131 - RNA, 19 nt, synthetic construct
  misc_feature 1..19: note = siRNA antisense sequence
  source 1..19: mol_type = other RNA
tagttggagaaaaggcgca

SEQ ID NO: 51132 - RNA, 19 nt, synthetic construct
  misc_feature 1..19: note = siRNA sense sequence
  source 1..19: mol_type = other RNA
gcgccttttctccaactag

SEQ ID NO: 51133 - RNA, 19 nt, synthetic construct
  misc_feature 1..19: note = siRNA antisense sequence
  source 1..19: mol_type = other RNA
ctagttggagaaaaggcgc

SEQ ID NO: 51134 - RNA, 19 nt, synthetic construct
  misc_feature 1..19: note = siRNA sense sequence
  source 1..19: mol_type = other RNA
cgccttttctccaactagg

SEQ ID NO: 51135 - RNA, 19 nt, synthetic construct
  misc_feature 1..19: note = siRNA antisense sequence
  source 1..19: mol_type = other RNA
cctagttggagaaaaggcg

SEQ ID NO: 51136 - RNA, 19 nt, synthetic construct
  misc_feature 1..19: note = siRNA sense sequence
  source 1..19: mol_type = other RNA
gccttttctccaactaggg

SEQ ID NO: 51137 - RNA, 19 nt, synthetic construct
  misc_feature 1..19: note = siRNA antisense sequence
  source 1..19: mol_type = other RNA
ccctagttggagaaaaggc

SEQ ID NO: 51138 - RNA, 19 nt, synthetic construct
  misc_feature 1..19: note = siRNA sense sequence
  source 1..19: mol_type = other RNA
ccttttctccaactaggga

SEQ ID NO: 51139 - RNA, 19 nt, synthetic construct
  misc_feature 1..19: note = siRNA antisense sequence
  source 1..19: mol_type = other RNA
tccctagttggagaaaagg

SEQ ID NO: 51140 - RNA, 19 nt, synthetic construct
  misc_feature 1..19: note = siRNA sense sequence
  source 1..19: mol_type = other RNA
cccttaggctacatccaaa

SEQ ID NO: 51141 - RNA, 19 nt, synthetic construct
  misc_feature 1..19: note = siRNA antisense sequence
  source 1..19: mol_type = other RNA
tttggatgtagcctaaggg

SEQ ID NO: 51142 - RNA, 19 nt, synthetic construct
  misc_feature 1..19: note = siRNA sense sequence
  source 1..19: mol_type = other RNA
ccttaggctacatccaaat

SEQ ID NO: 51143 - RNA, 19 nt, synthetic construct
  misc_feature 1..19: note = siRNA antisense sequence
  source 1..19: mol_type = other RNA
atttggatgtagcctaagg

SEQ ID NO: 51144 - RNA, 19 nt, synthetic construct
  misc_feature 1..19: note = siRNA sense sequence
  source 1..19: mol_type = other RNA
cttaggctacatccaaatc

SEQ ID NO: 51145 - RNA, 19 nt, synthetic construct
  misc_feature 1..19: note = siRNA antisense sequence
  source 1..19: mol_type = other RNA
gatttggatgtagcctaag

SEQ ID NO: 51146 - RNA, 19 nt, synthetic construct
  misc_feature 1..19: note = siRNA sense sequence
  source 1..19: mol_type = other RNA
ggctacatccaaatccagt

SEQ ID NO: 51147 - RNA, 19 nt, synthetic construct
  misc_feature 1..19: note = siRNA antisense sequence
  source 1..19: mol_type = other RNA
actggatttggatgtagcc

SEQ ID NO: 51148 - RNA, 19 nt, synthetic construct
  misc_feature 1..19: note = siRNA sense sequence
  source 1..19: mol_type = other RNA
gctacatccaaatccagtt

SEQ ID NO: 51149 - RNA, 19 nt, synthetic construct
  misc_feature 1..19: note = siRNA antisense sequence
  source 1..19: mol_type = other RNA
aactggatttggatgtagc

SEQ ID NO: 51150 - RNA, 19 nt, synthetic construct
  misc_feature 1..19: note = siRNA sense sequence
  source 1..19: mol_type = other RNA
ctacatccaaatccagttg

SEQ ID NO: 51151 - RNA, 19 nt, synthetic construct
  misc_feature 1..19: note = siRNA antisense sequence
  source 1..19: mol_type = other RNA
caactggatttggatgtag

SEQ ID NO: 51152 - RNA, 19 nt, synthetic construct
  misc_feature 1..19: note = siRNA sense sequence
  source 1..19: mol_type = other RNA
tacatccaaatccagttga

SEQ ID NO: 51153 - RNA, 19 nt, synthetic construct
  misc_feature 1..19: note = siRNA antisense sequence
  source 1..19: mol_type = other RNA
tcaactggatttggatgta

SEQ ID NO: 51154 - RNA, 19 nt, synthetic construct
  misc_feature 1..19: note = siRNA sense sequence
  source 1..19: mol_type = other RNA
atccaaatccagttgaccc

SEQ ID NO: 51155 - RNA, 19 nt, synthetic construct
  misc_feature 1..19: note = siRNA antisense sequence
  source 1..19: mol_type = other RNA
gggtcaactggatttggat

SEQ ID NO: 51156 - RNA, 19 nt, synthetic construct
  misc_feature 1..19: note = siRNA sense sequence
  source 1..19: mol_type = other RNA
tccaaatccagttgaccct

SEQ ID NO: 51157 - RNA, 19 nt, synthetic construct
  misc_feature 1..19: note = siRNA antisense sequence
  source 1..19: mol_type = other RNA
agggtcaactggatttgga

SEQ ID NO: 51158 - RNA, 19 nt, synthetic construct
  misc_feature 1..19: note = siRNA sense sequence
  source 1..19: mol_type = other RNA
ccaaatccagttgaccctg

SEQ ID NO: 51159 - RNA, 19 nt, synthetic construct
  misc_feature 1..19: note = siRNA antisense sequence
  source 1..19: mol_type = other RNA
cagggtcaactggatttgg

SEQ ID NO: 51160 - RNA, 19 nt, synthetic construct
  misc_feature 1..19: note = siRNA sense sequence
  source 1..19: mol_type = other RNA
caaatccagttgaccctgt

SEQ ID NO: 51161 - RNA, 19 nt, synthetic construct
  misc_feature 1..19: note = siRNA antisense sequence
  source 1..19: mol_type = other RNA
acagggtcaactggatttg

SEQ ID NO: 51162 - RNA, 19 nt, synthetic construct
  misc_feature 1..19: note = siRNA sense sequence
  source 1..19: mol_type = other RNA
aaatccagttgaccctgtc

SEQ ID NO: 51163 - RNA, 19 nt, synthetic construct
  misc_feature 1..19: note = siRNA antisense sequence
  source 1..19: mol_type = other RNA
gacagggtcaactggattt

SEQ ID NO: 51164 - RNA, 19 nt, synthetic construct
  misc_feature 1..19: note = siRNA sense sequence
  source 1..19: mol_type = other RNA
aatccagttgaccctgtcc

SEQ ID NO: 51165 - RNA, 19 nt, synthetic construct
  misc_feature 1..19: note = siRNA antisense sequence
  source 1..19: mol_type = other RNA
ggacagggtcaactggatt

SEQ ID NO: 51166 - RNA, 19 nt, synthetic construct
  misc_feature 1..19: note = siRNA sense sequence
  source 1..19: mol_type = other RNA
atccagttgaccctgtcct

SEQ ID NO: 51167 - RNA, 19 nt, synthetic construct
  misc_feature 1..19: note = siRNA antisense sequence
  source 1..19: mol_type = other RNA
aggacagggtcaactggat

SEQ ID NO: 51168 - RNA, 19 nt, synthetic construct
  misc_feature 1..19: note = siRNA sense sequence
  source 1..19: mol_type = other RNA
tccagttgaccctgtcctt

SEQ ID NO: 51169 - RNA, 19 nt, synthetic construct
  misc_feature 1..19: note = siRNA antisense sequence
  source 1..19: mol_type = other RNA
aaggacagggtcaactgga

SEQ ID NO: 51170 - RNA, 19 nt, synthetic construct
  misc_feature 1..19: note = siRNA sense sequence
  source 1..19: mol_type = other RNA
ccagttgaccctgtccttg

SEQ ID NO: 51171 - RNA, 19 nt, synthetic construct
  misc_feature 1..19: note = siRNA antisense sequence
  source 1..19: mol_type = other RNA
caaggacagggtcaactgg

SEQ ID NO: 51172 - RNA, 19 nt, synthetic construct
  misc_feature 1..19: note = siRNA sense sequence
  source 1..19: mol_type = other RNA
cagttgaccctgtccttgt

SEQ ID NO: 51173 - RNA, 19 nt, synthetic construct
  misc_feature 1..19: note = siRNA antisense sequence
  source 1..19: mol_type = other RNA
acaaggacagggtcaactg

SEQ ID NO: 51174 - RNA, 19 nt, synthetic construct
  misc_feature 1..19: note = siRNA sense sequence
  source 1..19: mol_type = other RNA
agttgaccctgtccttgtg

SEQ ID NO: 51175 - RNA, 19 nt, synthetic construct
  misc_feature 1..19: note = siRNA antisense sequence
  source 1..19: mol_type = other RNA
cacaaggacagggtcaact

SEQ ID NO: 51176 - RNA, 19 nt, synthetic construct
  misc_feature 1..19: note = siRNA sense sequence
  source 1..19: mol_type = other RNA
aaagactgttgtttctaca

SEQ ID NO: 51177 - RNA, 19 nt, synthetic construct
  misc_feature 1..19: note = siRNA antisense sequence
  source 1..19: mol_type = other RNA
tgtagaaacaacagtcttt

SEQ ID NO: 51178 - RNA, 19 nt, synthetic construct
  misc_feature 1..19: note = siRNA sense sequence
  source 1..19: mol_type = other RNA
actgttgtttctacatctt

SEQ ID NO: 51179 - RNA, 19 nt, synthetic construct
  misc_feature 1..19: note = siRNA antisense sequence
  source 1..19: mol_type = other RNA
aagatgtagaaacaacagt

SEQ ID NO: 51180 - RNA, 19 nt, synthetic construct
  misc_feature 1..19: note = siRNA sense sequence
  source 1..19: mol_type = other RNA
ttaaaagcactttctcagt

SEQ ID NO: 51181 - RNA, 19 nt, synthetic construct
  misc_feature 1..19: note = siRNA antisense sequence
  source 1..19: mol_type = other RNA
actgagaaagtgcttttaa

SEQ ID NO: 51182 - RNA, 19 nt, synthetic construct
  misc_feature 1..19: note = siRNA sense sequence
  source 1..19: mol_type = other RNA
taaaagcactttctcagtt

SEQ ID NO: 51183 - RNA, 19 nt, synthetic construct
  misc_feature 1..19: note = siRNA antisense sequence
  source 1..19: mol_type = other RNA
aactgagaaagtgctttta

SEQ ID NO: 51184 - RNA, 19 nt, synthetic construct
  misc_feature 1..19: note = siRNA sense sequence
  source 1..19: mol_type = other RNA
aaagcactttctcagtttc

SEQ ID NO: 51185 - RNA, 19 nt, synthetic construct
  misc_feature 1..19: note = siRNA antisense sequence
  source 1..19: mol_type = other RNA
gaaactgagaaagtgcttt

SEQ ID NO: 51186 - RNA, 19 nt, synthetic construct
  misc_feature 1..19: note = siRNA sense sequence
  source 1..19: mol_type = other RNA
aagcactttctcagtttcc

SEQ ID NO: 51187 - RNA, 19 nt, synthetic construct
  misc_feature 1..19: note = siRNA antisense sequence
  source 1..19: mol_type = other RNA
ggaaactgagaaagtgctt

SEQ ID NO: 51188 - RNA, 19 nt, synthetic construct
  misc_feature 1..19: note = siRNA sense sequence
  source 1..19: mol_type = other RNA
cagtttccctgatttgatt

SEQ ID NO: 51189 - RNA, 19 nt, synthetic construct
  misc_feature 1..19: note = siRNA antisense sequence
  source 1..19: mol_type = other RNA
aatcaaatcagggaaactg

SEQ ID NO: 51190 - RNA, 19 nt, synthetic construct
  misc_feature 1..19: note = siRNA sense sequence
  source 1..19: mol_type = other RNA
agtttccctgatttgattg

SEQ ID NO: 51191 - RNA, 19 nt, synthetic construct
  misc_feature 1..19: note = siRNA antisense sequence
  source 1..19: mol_type = other RNA
caatcaaatcagggaaact

SEQ ID NO: 51192 - RNA, 19 nt, synthetic construct
  misc_feature 1..19: note = siRNA sense sequence
  source 1..19: mol_type = other RNA
gtttccctgatttgattga

SEQ ID NO: 51193 - RNA, 19 nt, synthetic construct
  misc_feature 1..19: note = siRNA antisense sequence
  source 1..19: mol_type = other RNA
tcaatcaaatcagggaaac

SEQ ID NO: 51194 - RNA, 19 nt, synthetic construct
  misc_feature 1..19: note = siRNA sense sequence
  source 1..19: mol_type = other RNA
tccctgatttgattgataa

SEQ ID NO: 51195 - RNA, 19 nt, synthetic construct
  misc_feature 1..19: note = siRNA antisense sequence
  source 1..19: mol_type = other RNA
ttatcaatcaaatcaggga

SEQ ID NO: 51196 - RNA, 19 nt, synthetic construct
  misc_feature 1..19: note = siRNA sense sequence
  source 1..19: mol_type = other RNA
ccctgatttgattgataat

SEQ ID NO: 51197 - RNA, 19 nt, synthetic construct
  misc_feature 1..19: note = siRNA antisense sequence
  source 1..19: mol_type = other RNA
attatcaatcaaatcaggg

SEQ ID NO: 51198 - RNA, 19 nt, synthetic construct
  misc_feature 1..19: note = siRNA sense sequence
  source 1..19: mol_type = other RNA
aagtagaccattttgattg

SEQ ID NO: 51199 - RNA, 19 nt, synthetic construct
  misc_feature 1..19: note = siRNA antisense sequence
  source 1..19: mol_type = other RNA
caatcaaaatggtctactt

SEQ ID NO: 51200 - RNA, 19 nt, synthetic construct
  misc_feature 1..19: note = siRNA sense sequence
  source 1..19: mol_type = other RNA
agtagaccattttgattga

SEQ ID NO: 51201 - RNA, 19 nt, synthetic construct
  misc_feature 1..19: note = siRNA antisense sequence
  source 1..19: mol_type = other RNA
tcaatcaaaatggtctact

SEQ ID NO: 51202 - RNA, 19 nt, synthetic construct
  misc_feature 1..19: note = siRNA sense sequence
  source 1..19: mol_type = other RNA
gtagaccattttgattgag

SEQ ID NO: 51203 - RNA, 19 nt, synthetic construct
  misc_feature 1..19: note = siRNA antisense sequence
  source 1..19: mol_type = other RNA
ctcaatcaaaatggtctac

SEQ ID NO: 51204 - RNA, 19 nt, synthetic construct
  misc_feature 1..19: note = siRNA sense sequence
  source 1..19: mol_type = other RNA
tagaccattttgattgagc

SEQ ID NO: 51205 - RNA, 19 nt, synthetic construct
  misc_feature 1..19: note = siRNA antisense sequence
  source 1..19: mol_type = other RNA
gctcaatcaaaatggtcta

SEQ ID NO: 51206 - RNA, 19 nt, synthetic construct
  misc_feature 1..19: note = siRNA sense sequence
  source 1..19: mol_type = other RNA
agaccattttgattgagcg

SEQ ID NO: 51207 - RNA, 19 nt, synthetic construct
  misc_feature 1..19: note = siRNA antisense sequence
  source 1..19: mol_type = other RNA
cgctcaatcaaaatggtct

SEQ ID NO: 51208 - RNA, 19 nt, synthetic construct
  misc_feature 1..19: note = siRNA sense sequence
  source 1..19: mol_type = other RNA
gaccattttgattgagcgt

SEQ ID NO: 51209 - RNA, 19 nt, synthetic construct
  misc_feature 1..19: note = siRNA antisense sequence
  source 1..19: mol_type = other RNA
acgctcaatcaaaatggtc

SEQ ID NO: 51210 - RNA, 19 nt, synthetic construct
  misc_feature 1..19: note = siRNA sense sequence
  source 1..19: mol_type = other RNA
accattttgattgagcgtc

SEQ ID NO: 51211 - RNA, 19 nt, synthetic construct
  misc_feature 1..19: note = siRNA antisense sequence
  source 1..19: mol_type = other RNA
gacgctcaatcaaaatggt

SEQ ID NO: 51212 - RNA, 19 nt, synthetic construct
  misc_feature 1..19: note = siRNA sense sequence
  source 1..19: mol_type = other RNA
ccattttgattgagcgtca

SEQ ID NO: 51213 - RNA, 19 nt, synthetic construct
  misc_feature 1..19: note = siRNA antisense sequence
  source 1..19: mol_type = other RNA
tgacgctcaatcaaaatgg

SEQ ID NO: 51214 - RNA, 19 nt, synthetic construct
  misc_feature 1..19: note = siRNA sense sequence
  source 1..19: mol_type = other RNA
atttagagttatggctttc

SEQ ID NO: 51215 - RNA, 19 nt, synthetic construct
  misc_feature 1..19: note = siRNA antisense sequence
  source 1..19: mol_type = other RNA
gaaagccataactctaaat

SEQ ID NO: 51216 - RNA, 19 nt, synthetic construct
  misc_feature 1..19: note = siRNA sense sequence
  source 1..19: mol_type = other RNA
agtgtgactcacgataata

SEQ ID NO: 51217 - RNA, 19 nt, synthetic construct
  misc_feature 1..19: note = siRNA antisense sequence
  source 1..19: mol_type = other RNA
tattatcgtgagtcacact

SEQ ID NO: 51218 - RNA, 19 nt, synthetic construct
  misc_feature 1..19: note = siRNA sense sequence
  source 1..19: mol_type = other RNA
gtgtgactcacgataataa

SEQ ID NO: 51219 - RNA, 19 nt, synthetic construct
  misc_feature 1..19: note = siRNA antisense sequence
  source 1..19: mol_type = other RNA
ttattatcgtgagtcacac

SEQ ID NO: 51220 - RNA, 19 nt, synthetic construct
  misc_feature 1..19: note = siRNA sense sequence
  source 1..19: mol_type = other RNA
tgtgactcacgataataac

SEQ ID NO: 51221 - RNA, 19 nt, synthetic construct
  misc_feature 1..19: note = siRNA antisense sequence
  source 1..19: mol_type = other RNA
gttattatcgtgagtcaca

SEQ ID NO: 51222 - RNA, 19 nt, synthetic construct
  misc_feature 1..19: note = siRNA sense sequence
  source 1..19: mol_type = other RNA
gtgactcacgataataact

SEQ ID NO: 51223 - RNA, 19 nt, synthetic construct
  misc_feature 1..19: note = siRNA antisense sequence
  source 1..19: mol_type = other RNA
agttattatcgtgagtcac

SEQ ID NO: 51224 - RNA, 19 nt, synthetic construct
  misc_feature 1..19: note = siRNA sense sequence
  source 1..19: mol_type = other RNA
tgactcacgataataacta

SEQ ID NO: 51225 - RNA, 19 nt, synthetic construct
  misc_feature 1..19: note = siRNA antisense sequence
  source 1..19: mol_type = other RNA
tagttattatcgtgagtca

SEQ ID NO: 51226 - RNA, 19 nt, synthetic construct
  misc_feature 1..19: note = siRNA sense sequence
  source 1..19: mol_type = other RNA
gactcacgataataactac

SEQ ID NO: 51227 - RNA, 19 nt, synthetic construct
  misc_feature 1..19: note = siRNA antisense sequence
  source 1..19: mol_type = other RNA
gtagttattatcgtgagtc

SEQ ID NO: 51228 - RNA, 19 nt, synthetic construct
  misc_feature 1..19: note = siRNA sense sequence
  source 1..19: mol_type = other RNA
actcacgataataactaca

SEQ ID NO: 51229 - RNA, 19 nt, synthetic construct
  misc_feature 1..19: note = siRNA antisense sequence
  source 1..19: mol_type = other RNA
tgtagttattatcgtgagt

SEQ ID NO: 51230 - RNA, 19 nt, synthetic construct
  misc_feature 1..19: note = siRNA sense sequence
  source 1..19: mol_type = other RNA
aaataaggcaaagtttcac

SEQ ID NO: 51231 - RNA, 19 nt, synthetic construct
  misc_feature 1..19: note = siRNA antisense sequence
  source 1..19: mol_type = other RNA
gtgaaactttgccttattt

SEQ ID NO: 51232 - RNA, 19 nt, synthetic construct
  misc_feature 1..19: note = siRNA sense sequence
  source 1..19: mol_type = other RNA
aataaggcaaagtttcaca

SEQ ID NO: 51233 - RNA, 19 nt, synthetic construct
  misc_feature 1..19: note = siRNA antisense sequence
  source 1..19: mol_type = other RNA
tgtgaaactttgccttatt

SEQ ID NO: 51234 - RNA, 19 nt, synthetic construct
  misc_feature 1..19: note = siRNA sense sequence
  source 1..19: mol_type = other RNA
ttcttattacatgtgatgc

SEQ ID NO: 51235 - RNA, 19 nt, synthetic construct
  misc_feature 1..19: note = siRNA antisense sequence
  source 1..19: mol_type = other RNA
gcatcacatgtaataagaa

SEQ ID NO: 51236 - RNA, 19 nt, synthetic construct
  misc_feature 1..19: note = siRNA sense sequence
  source 1..19: mol_type = other RNA
tcttattacatgtgatgca

SEQ ID NO: 51237 - RNA, 19 nt, synthetic construct
  misc_feature 1..19: note = siRNA antisense sequence
  source 1..19: mol_type = other RNA
tgcatcacatgtaataaga

SEQ ID NO: 51238 - RNA, 19 nt, synthetic construct
  misc_feature 1..19: note = siRNA sense sequence
  source 1..19: mol_type = other RNA
atgtgatgcactgtgatgg

SEQ ID NO: 51239 - RNA, 19 nt, synthetic construct
  misc_feature 1..19: note = siRNA antisense sequence
  source 1..19: mol_type = other RNA
ccatcacagtgcatcacat

SEQ ID NO: 51240 - RNA, 19 nt, synthetic construct
  misc_feature 1..19: note = siRNA sense sequence
  source 1..19: mol_type = other RNA
tgtgatgcactgtgatggt

SEQ ID NO: 51241 - RNA, 19 nt, synthetic construct
  misc_feature 1..19: note = siRNA antisense sequence
  source 1..19: mol_type = other RNA
accatcacagtgcatcaca

SEQ ID NO: 51242 - RNA, 19 nt, synthetic construct
  misc_feature 1..19: note = siRNA sense sequence
  source 1..19: mol_type = other RNA
gtgatgcactgtgatggtt

SEQ ID NO: 51243 - RNA, 19 nt, synthetic construct
  misc_feature 1..19: note = siRNA antisense sequence
  source 1..19: mol_type = other RNA
aaccatcacagtgcatcac

SEQ ID NO: 51244 - RNA, 19 nt, synthetic construct
  misc_feature 1..19: note = siRNA sense sequence
  source 1..19: mol_type = other RNA
tgatgcactgtgatggttt

SEQ ID NO: 51245 - RNA, 19 nt, synthetic construct
  misc_feature 1..19: note = siRNA antisense sequence
  source 1..19: mol_type = other RNA
aaaccatcacagtgcatca

SEQ ID NO: 51246 - RNA, 19 nt, synthetic construct
  misc_feature 1..19: note = siRNA sense sequence
  source 1..19: mol_type = other RNA
gatgcactgtgatggtttc

SEQ ID NO: 51247 - RNA, 19 nt, synthetic construct
  misc_feature 1..19: note = siRNA antisense sequence
  source 1..19: mol_type = other RNA
gaaaccatcacagtgcatc

SEQ ID NO: 51248 - RNA, 19 nt, synthetic construct
  misc_feature 1..19: note = siRNA sense sequence
  source 1..19: mol_type = other RNA
atgcactgtgatggtttct

SEQ ID NO: 51249 - RNA, 19 nt, synthetic construct
  misc_feature 1..19: note = siRNA antisense sequence
  source 1..19: mol_type = other RNA
agaaaccatcacagtgcat

SEQ ID NO: 51250 - RNA, 19 nt, synthetic construct
  misc_feature 1..19: note = siRNA sense sequence
  source 1..19: mol_type = other RNA
ggtttctcatcaattccat

SEQ ID NO: 51251 - RNA, 19 nt, synthetic construct
  misc_feature 1..19: note = siRNA antisense sequence
  source 1..19: mol_type = other RNA
atggaattgatgagaaacc

SEQ ID NO: 51252 - RNA, 19 nt, synthetic construct
  misc_feature 1..19: note = siRNA sense sequence
  source 1..19: mol_type = other RNA
gtttctcatcaattccatt

SEQ ID NO: 51253 - RNA, 19 nt, synthetic construct
  misc_feature 1..19: note = siRNA antisense sequence
  source 1..19: mol_type = other RNA
aatggaattgatgagaaac

SEQ ID NO: 51254 - RNA, 19 nt, synthetic construct
  misc_feature 1..19: note = siRNA sense sequence
  source 1..19: mol_type = other RNA
tttctcatcaattccattc

SEQ ID NO: 51255 - RNA, 19 nt, synthetic construct
  misc_feature 1..19: note = siRNA antisense sequence
  source 1..19: mol_type = other RNA
gaatggaattgatgagaaa

SEQ ID NO: 51256 - RNA, 19 nt, synthetic construct
  misc_feature 1..19: note = siRNA sense sequence
  source 1..19: mol_type = other RNA
ttctcatcaattccattct

SEQ ID NO: 51257 - RNA, 19 nt, synthetic construct
  misc_feature 1..19: note = siRNA antisense sequence
  source 1..19: mol_type = other RNA
agaatggaattgatgagaa

SEQ ID NO: 51258 - RNA, 19 nt, synthetic construct
  misc_feature 1..19: note = siRNA sense sequence
  source 1..19: mol_type = other RNA
ctcatcaattccattctac

SEQ ID NO: 51259 - RNA, 19 nt, synthetic construct
  misc_feature 1..19: note = siRNA antisense sequence
  source 1..19: mol_type = other RNA
gtagaatggaattgatgag

SEQ ID NO: 51260 - RNA, 19 nt, synthetic construct
  misc_feature 1..19: note = siRNA sense sequence
  source 1..19: mol_type = other RNA
tcaattccattctacccta

SEQ ID NO: 51261 - RNA, 19 nt, synthetic construct
  misc_feature 1..19: note = siRNA antisense sequence
  source 1..19: mol_type = other RNA
tagggtagaatggaattga

SEQ ID NO: 51262 - RNA, 19 nt, synthetic construct
  misc_feature 1..19: note = siRNA sense sequence
  source 1..19: mol_type = other RNA
caattccattctaccctaa

SEQ ID NO: 51263 - RNA, 19 nt, synthetic construct
  misc_feature 1..19: note = siRNA antisense sequence
  source 1..19: mol_type = other RNA
ttagggtagaatggaattg

SEQ ID NO: 51264 - RNA, 19 nt, synthetic construct
  misc_feature 1..19: note = siRNA sense sequence
  source 1..19: mol_type = other RNA
aattccattctaccctaat

SEQ ID NO: 51265 - RNA, 19 nt, synthetic construct
  misc_feature 1..19: note = siRNA antisense sequence
  source 1..19: mol_type = other RNA
attagggtagaatggaatt

SEQ ID NO: 51266 - RNA, 19 nt, synthetic construct
  misc_feature 1..19: note = siRNA sense sequence
  source 1..19: mol_type = other RNA
attccattctaccctaatc

SEQ ID NO: 51267 - RNA, 19 nt, synthetic construct
  misc_feature 1..19: note = siRNA antisense sequence
  source 1..19: mol_type = other RNA
gattagggtagaatggaat

SEQ ID NO: 51268 - RNA, 19 nt, synthetic construct
  misc_feature 1..19: note = siRNA sense sequence
  source 1..19: mol_type = other RNA
tccattctaccctaatctc

SEQ ID NO: 51269 - RNA, 19 nt, synthetic construct
  misc_feature 1..19: note = siRNA antisense sequence
  source 1..19: mol_type = other RNA
gagattagggtagaatgga

SEQ ID NO: 51270 - RNA, 19 nt, synthetic construct
  misc_feature 1..19: note = siRNA sense sequence
  source 1..19: mol_type = other RNA
ccattctaccctaatctct

SEQ ID NO: 51271 - RNA, 19 nt, synthetic construct
  misc_feature 1..19: note = siRNA antisense sequence
  source 1..19: mol_type = other RNA
agagattagggtagaatgg

SEQ ID NO: 51272 - RNA, 19 nt, synthetic construct
  misc_feature 1..19: note = siRNA sense sequence
  source 1..19: mol_type = other RNA
cattctaccctaatctctt

SEQ ID NO: 51273 - RNA, 19 nt, synthetic construct
  misc_feature 1..19: note = siRNA antisense sequence
  source 1..19: mol_type = other RNA
aagagattagggtagaatg

SEQ ID NO: 51274 - RNA, 19 nt, synthetic construct
  misc_feature 1..19: note = siRNA sense sequence
  source 1..19: mol_type = other RNA
accctaatctctttcaatg

SEQ ID NO: 51275 - RNA, 19 nt, synthetic construct
  misc_feature 1..19: note = siRNA antisense sequence
  source 1..19: mol_type = other RNA
cattgaaagagattagggt

SEQ ID NO: 51276 - RNA, 19 nt, synthetic construct
  misc_feature 1..19: note = siRNA sense sequence
  source 1..19: mol_type = other RNA
ccctaatctctttcaatga

SEQ ID NO: 51277 - RNA, 19 nt, synthetic construct
  misc_feature 1..19: note = siRNA antisense sequence
  source 1..19: mol_type = other RNA
tcattgaaagagattaggg

SEQ ID NO: 51278 - RNA, 19 nt, synthetic construct
  misc_feature 1..19: note = siRNA sense sequence
  source 1..19: mol_type = other RNA
cctaatctctttcaatgaa

SEQ ID NO: 51279 - RNA, 19 nt, synthetic construct
  misc_feature 1..19: note = siRNA antisense sequence
  source 1..19: mol_type = other RNA
ttcattgaaagagattagg

SEQ ID NO: 51280 - RNA, 19 nt, synthetic construct
  misc_feature 1..19: note = siRNA sense sequence
  source 1..19: mol_type = other RNA
tggctatactcagtctgtt

SEQ ID NO: 51281 - RNA, 19 nt, synthetic construct
  misc_feature 1..19: note = siRNA antisense sequence
  source 1..19: mol_type = other RNA
aacagactgagtatagcca

SEQ ID NO: 51282 - RNA, 19 nt, synthetic construct
  misc_feature 1..19: note = siRNA sense sequence
  source 1..19: mol_type = other RNA
ggctatactcagtctgttg

SEQ ID NO: 51283 - RNA, 19 nt, synthetic construct
  misc_feature 1..19: note = siRNA antisense sequence
  source 1..19: mol_type = other RNA
caacagactgagtatagcc

SEQ ID NO: 51284 - RNA, 19 nt, synthetic construct
  misc_feature 1..19: note = siRNA sense sequence
  source 1..19: mol_type = other RNA
tctgttgatttcatgactg

SEQ ID NO: 51285 - RNA, 19 nt, synthetic construct
  misc_feature 1..19: note = siRNA antisense sequence
  source 1..19: mol_type = other RNA
cagtcatgaaatcaacaga

SEQ ID NO: 51286 - RNA, 19 nt, synthetic construct
  misc_feature 1..19: note = siRNA sense sequence
  source 1..19: mol_type = other RNA
ctgttgatttcatgactgg

SEQ ID NO: 51287 - RNA, 19 nt, synthetic construct
  misc_feature 1..19: note = siRNA antisense sequence
  source 1..19: mol_type = other RNA
ccagtcatgaaatcaacag

SEQ ID NO: 51288 - RNA, 19 nt, synthetic construct
  misc_feature 1..19: note = siRNA sense sequence
  source 1..19: mol_type = other RNA
ttgatttcatgactgggtc

SEQ ID NO: 51289 - RNA, 19 nt, synthetic construct
  misc_feature 1..19: note = siRNA antisense sequence
  source 1..19: mol_type = other RNA
gacccagtcatgaaatcaa

SEQ ID NO: 51290 - RNA, 19 nt, synthetic construct
  misc_feature 1..19: note = siRNA sense sequence
  source 1..19: mol_type = other RNA
catttgatttagaggtgat

SEQ ID NO: 51291 - RNA, 19 nt, synthetic construct
  misc_feature 1..19: note = siRNA antisense sequence
  source 1..19: mol_type = other RNA
atcacctctaaatcaaatg

SEQ ID NO: 51292 - RNA, 19 nt, synthetic construct
  misc_feature 1..19: note = siRNA sense sequence
  source 1..19: mol_type = other RNA
tttgatttagaggtgatag

SEQ ID NO: 51293 - RNA, 19 nt, synthetic construct
  misc_feature 1..19: note = siRNA antisense sequence
  source 1..19: mol_type = other RNA
ctatcacctctaaatcaaa

SEQ ID NO: 51294 - RNA, 19 nt, synthetic construct
  misc_feature 1..19: note = siRNA sense sequence
  source 1..19: mol_type = other RNA
ttgatttagaggtgatagg

SEQ ID NO: 51295 - RNA, 19 nt, synthetic construct
  misc_feature 1..19: note = siRNA antisense sequence
  source 1..19: mol_type = other RNA
cctatcacctctaaatcaa

SEQ ID NO: 51296 - RNA, 19 nt, synthetic construct
  misc_feature 1..19: note = siRNA sense sequence
  source 1..19: mol_type = other RNA
ttagaggtgataggaatct

SEQ ID NO: 51297 - RNA, 19 nt, synthetic construct
  misc_feature 1..19: note = siRNA antisense sequence
  source 1..19: mol_type = other RNA
agattcctatcacctctaa

SEQ ID NO: 51298 - RNA, 19 nt, synthetic construct
  misc_feature 1..19: note = siRNA sense sequence
  source 1..19: mol_type = other RNA
ataggaatctacaggccag

SEQ ID NO: 51299 - RNA, 19 nt, synthetic construct
  misc_feature 1..19: note = siRNA antisense sequence
  source 1..19: mol_type = other RNA
ctggcctgtagattcctat

SEQ ID NO: 51300 - RNA, 19 nt, synthetic construct
  misc_feature 1..19: note = siRNA sense sequence
  source 1..19: mol_type = other RNA
taggaatctacaggccagc

SEQ ID NO: 51301 - RNA, 19 nt, synthetic construct
  misc_feature 1..19: note = siRNA antisense sequence
  source 1..19: mol_type = other RNA
gctggcctgtagattccta

SEQ ID NO: 51302 - RNA, 19 nt, synthetic construct
  misc_feature 1..19: note = siRNA sense sequence
  source 1..19: mol_type = other RNA
tctacaggccagccagact

SEQ ID NO: 51303 - RNA, 19 nt, synthetic construct
  misc_feature 1..19: note = siRNA antisense sequence
  source 1..19: mol_type = other RNA
agtctggctggcctgtaga

SEQ ID NO: 51304 - RNA, 19 nt, synthetic construct
  misc_feature 1..19: note = siRNA sense sequence
  source 1..19: mol_type = other RNA
agactgaatttctgtgcct

SEQ ID NO: 51305 - RNA, 19 nt, synthetic construct
  misc_feature 1..19: note = siRNA antisense sequence
  source 1..19: mol_type = other RNA
aggcacagaaattcagtct

SEQ ID NO: 51306 - RNA, 19 nt, synthetic construct
  misc_feature 1..19: note = siRNA sense sequence
  source 1..19: mol_type = other RNA
tgaatttctgtgcctccct

SEQ ID NO: 51307 - RNA, 19 nt, synthetic construct
  misc_feature 1..19: note = siRNA antisense sequence
  source 1..19: mol_type = other RNA
agggaggcacagaaattca

SEQ ID NO: 51308 - RNA, 19 nt, synthetic construct
  misc_feature 1..19: note = siRNA sense sequence
  source 1..19: mol_type = other RNA
aatttctgtgcctcccttt

SEQ ID NO: 51309 - RNA, 19 nt, synthetic construct
  misc_feature 1..19: note = siRNA antisense sequence
  source 1..19: mol_type = other RNA
aaagggaggcacagaaatt

SEQ ID NO: 51310 - RNA, 19 nt, synthetic construct
  misc_feature 1..19: note = siRNA sense sequence
  source 1..19: mol_type = other RNA
atttctgtgcctccctttt

SEQ ID NO: 51311 - RNA, 19 nt, synthetic construct
  misc_feature 1..19: note = siRNA antisense sequence
  source 1..19: mol_type = other RNA
aaaagggaggcacagaaat

SEQ ID NO: 51312 - RNA, 19 nt, synthetic construct
  misc_feature 1..19: note = siRNA sense sequence
  source 1..19: mol_type = other RNA
ttctgtgcctcccttttcc

SEQ ID NO: 51313 - RNA, 19 nt, synthetic construct
  misc_feature 1..19: note = siRNA antisense sequence
  source 1..19: mol_type = other RNA
ggaaaagggaggcacagaa

SEQ ID NO: 51314 - RNA, 19 nt, synthetic construct
  misc_feature 1..19: note = siRNA sense sequence
  source 1..19: mol_type = other RNA
cactctaattgtttatgag

SEQ ID NO: 51315 - RNA, 19 nt, synthetic construct
  misc_feature 1..19: note = siRNA antisense sequence
  source 1..19: mol_type = other RNA
ctcataaacaattagagtg

SEQ ID NO: 51316 - RNA, 19 nt, synthetic construct
  misc_feature 1..19: note = siRNA sense sequence
  source 1..19: mol_type = other RNA
ctctaattgtttatgagtc

SEQ ID NO: 51317 - RNA, 19 nt, synthetic construct
  misc_feature 1..19: note = siRNA antisense sequence
  source 1..19: mol_type = other RNA
gactcataaacaattagag

SEQ ID NO: 51318 - RNA, 19 nt, synthetic construct
  misc_feature 1..19: note = siRNA sense sequence
  source 1..19: mol_type = other RNA
ctaattgtttatgagtctg

SEQ ID NO: 51319 - RNA, 19 nt, synthetic construct
  misc_feature 1..19: note = siRNA antisense sequence
  source 1..19: mol_type = other RNA
cagactcataaacaattag

SEQ ID NO: 51320 - RNA, 19 nt, synthetic construct
  misc_feature 1..19: note = siRNA sense sequence
  source 1..19: mol_type = other RNA
aattgtttatgagtctgga

SEQ ID NO: 51321 - RNA, 19 nt, synthetic construct
  misc_feature 1..19: note = siRNA antisense sequence
  source 1..19: mol_type = other RNA
tccagactcataaacaatt

SEQ ID NO: 51322 - RNA, 19 nt, synthetic construct
  misc_feature 1..19: note = siRNA sense sequence
  source 1..19: mol_type = other RNA
attgtttatgagtctggag

SEQ ID NO: 51323 - RNA, 19 nt, synthetic construct
  misc_feature 1..19: note = siRNA antisense sequence
  source 1..19: mol_type = other RNA
ctccagactcataaacaat

SEQ ID NO: 51324 - RNA, 19 nt, synthetic construct
  misc_feature 1..19: note = siRNA sense sequence
  source 1..19: mol_type = other RNA
tttatgagtctggagtccc

SEQ ID NO: 51325 - RNA, 19 nt, synthetic construct
  misc_feature 1..19: note = siRNA antisense sequence
  source 1..19: mol_type = other RNA
gggactccagactcataaa

SEQ ID NO: 51326 - RNA, 19 nt, synthetic construct
  misc_feature 1..19: note = siRNA sense sequence
  source 1..19: mol_type = other RNA
ttatgagtctggagtccca

SEQ ID NO: 51327 - RNA, 19 nt, synthetic construct
  misc_feature 1..19: note = siRNA antisense sequence
  source 1..19: mol_type = other RNA
tgggactccagactcataa

SEQ ID NO: 51328 - RNA, 19 nt, synthetic construct
  misc_feature 1..19: note = siRNA sense sequence
  source 1..19: mol_type = other RNA
tggagtcccagctgcttct

SEQ ID NO: 51329 - RNA, 19 nt, synthetic construct
  misc_feature 1..19: note = siRNA antisense sequence
  source 1..19: mol_type = other RNA
agaagcagctgggactcca

SEQ ID NO: 51330 - RNA, 19 nt, synthetic construct
  misc_feature 1..19: note = siRNA sense sequence
  source 1..19: mol_type = other RNA
agtcccagctgcttctgaa

SEQ ID NO: 51331 - RNA, 19 nt, synthetic construct
  misc_feature 1..19: note = siRNA antisense sequence
  source 1..19: mol_type = other RNA
ttcagaagcagctgggact

SEQ ID NO: 51332 - RNA, 19 nt, synthetic construct
  misc_feature 1..19: note = siRNA sense sequence
  source 1..19: mol_type = other RNA
gtcccagctgcttctgaag

SEQ ID NO: 51333 - RNA, 19 nt, synthetic construct
  misc_feature 1..19: note = siRNA antisense sequence
  source 1..19: mol_type = other RNA
cttcagaagcagctgggac

SEQ ID NO: 51334 - RNA, 19 nt, synthetic construct
  misc_feature 1..19: note = siRNA sense sequence
  source 1..19: mol_type = other RNA
tcccagctgcttctgaaga

SEQ ID NO: 51335 - RNA, 19 nt, synthetic construct
  misc_feature 1..19: note = siRNA antisense sequence
  source 1..19: mol_type = other RNA
tcttcagaagcagctggga

SEQ ID NO: 51336 - RNA, 19 nt, synthetic construct
  misc_feature 1..19: note = siRNA sense sequence
  source 1..19: mol_type = other RNA
cccagctgcttctgaagaa

SEQ ID NO: 51337 - RNA, 19 nt, synthetic construct
  misc_feature 1..19: note = siRNA antisense sequence
  source 1..19: mol_type = other RNA
ttcttcagaagcagctggg

SEQ ID NO: 51338 - RNA, 19 nt, synthetic construct
  misc_feature 1..19: note = siRNA sense sequence
  source 1..19: mol_type = other RNA
aactcagctgtcttgtgct

SEQ ID NO: 51339 - RNA, 19 nt, synthetic construct
  misc_feature 1..19: note = siRNA antisense sequence
  source 1..19: mol_type = other RNA
agcacaagacagctgagtt

SEQ ID NO: 51340 - RNA, 19 nt, synthetic construct
  misc_feature 1..19: note = siRNA sense sequence
  source 1..19: mol_type = other RNA
cagctgtcttgtgctctgt

SEQ ID NO: 51341 - RNA, 19 nt, synthetic construct
  misc_feature 1..19: note = siRNA antisense sequence
  source 1..19: mol_type = other RNA
acagagcacaagacagctg

SEQ ID NO: 51342 - RNA, 19 nt, synthetic construct
  misc_feature 1..19: note = siRNA sense sequence
  source 1..19: mol_type = other RNA
agctgtcttgtgctctgtg

SEQ ID NO: 51343 - RNA, 19 nt, synthetic construct
  misc_feature 1..19: note = siRNA antisense sequence
  source 1..19: mol_type = other RNA
cacagagcacaagacagct

SEQ ID NO: 51344 - RNA, 19 nt, synthetic construct
  misc_feature 1..19: note = siRNA sense sequence
  source 1..19: mol_type = other RNA
gctctcccggtgtcattta

SEQ ID NO: 51345 - RNA, 19 nt, synthetic construct
  misc_feature 1..19: note = siRNA antisense sequence
  source 1..19: mol_type = other RNA
taaatgacaccgggagagc

SEQ ID NO: 51346 - RNA, 19 nt, synthetic construct
  misc_feature 1..19: note = siRNA sense sequence
  source 1..19: mol_type = other RNA
ctctcccggtgtcatttac

SEQ ID NO: 51347 - RNA, 19 nt, synthetic construct
  misc_feature 1..19: note = siRNA antisense sequence
  source 1..19: mol_type = other RNA
gtaaatgacaccgggagag

SEQ ID NO: 51348 - RNA, 19 nt, synthetic construct
  misc_feature 1..19: note = siRNA sense sequence
  source 1..19: mol_type = other RNA
tctcccggtgtcatttacc

SEQ ID NO: 51349 - RNA, 19 nt, synthetic construct
  misc_feature 1..19: note = siRNA antisense sequence
  source 1..19: mol_type = other RNA
ggtaaatgacaccgggaga

SEQ ID NO: 51350 - RNA, 19 nt, synthetic construct
  misc_feature 1..19: note = siRNA sense sequence
  source 1..19: mol_type = other RNA
ctcccggtgtcatttacca

SEQ ID NO: 51351 - RNA, 19 nt, synthetic construct
  misc_feature 1..19: note = siRNA antisense sequence
  source 1..19: mol_type = other RNA
tggtaaatgacaccgggag

SEQ ID NO: 51352 - RNA, 19 nt, synthetic construct
  misc_feature 1..19: note = siRNA sense sequence
  source 1..19: mol_type = other RNA
tcccggtgtcatttaccaa

SEQ ID NO: 51353 - RNA, 19 nt, synthetic construct
  misc_feature 1..19: note = siRNA antisense sequence
  source 1..19: mol_type = other RNA
ttggtaaatgacaccggga

SEQ ID NO: 51354 - RNA, 19 nt, synthetic construct
  misc_feature 1..19: note = siRNA sense sequence
  source 1..19: mol_type = other RNA
cccggtgtcatttaccaat

SEQ ID NO: 51355 - RNA, 19 nt, synthetic construct
  misc_feature 1..19: note = siRNA antisense sequence
  source 1..19: mol_type = other RNA
attggtaaatgacaccggg

SEQ ID NO: 51356 - RNA, 19 nt, synthetic construct
  misc_feature 1..19: note = siRNA sense sequence
  source 1..19: mol_type = other RNA
ccggtgtcatttaccaata

SEQ ID NO: 51357 - RNA, 19 nt, synthetic construct
  misc_feature 1..19: note = siRNA antisense sequence
  source 1..19: mol_type = other RNA
tattggtaaatgacaccgg

SEQ ID NO: 51358 - RNA, 19 nt, synthetic construct
  misc_feature 1..19: note = siRNA sense sequence
  source 1..19: mol_type = other RNA
cggtgtcatttaccaataa

SEQ ID NO: 51359 - RNA, 19 nt, synthetic construct
  misc_feature 1..19: note = siRNA antisense sequence
  source 1..19: mol_type = other RNA
ttattggtaaatgacaccg

SEQ ID NO: 51360 - RNA, 19 nt, synthetic construct
  misc_feature 1..19: note = siRNA sense sequence
  source 1..19: mol_type = other RNA
accagattatgagcttggc

SEQ ID NO: 51361 - RNA, 19 nt, synthetic construct
  misc_feature 1..19: note = siRNA antisense sequence
  source 1..19: mol_type = other RNA
gccaagctcataatctggt

SEQ ID NO: 51362 - RNA, 19 nt, synthetic construct
  misc_feature 1..19: note = siRNA sense sequence
  source 1..19: mol_type = other RNA
ccagattatgagcttggct

SEQ ID NO: 51363 - RNA, 19 nt, synthetic construct
  misc_feature 1..19: note = siRNA antisense sequence
  source 1..19: mol_type = other RNA
agccaagctcataatctgg

SEQ ID NO: 51364 - RNA, 19 nt, synthetic construct
  misc_feature 1..19: note = siRNA sense sequence
  source 1..19: mol_type = other RNA
cagattatgagcttggctg

SEQ ID NO: 51365 - RNA, 19 nt, synthetic construct
  misc_feature 1..19: note = siRNA antisense sequence
  source 1..19: mol_type = other RNA
cagccaagctcataatctg

SEQ ID NO: 51366 - RNA, 19 nt, synthetic construct
  misc_feature 1..19: note = siRNA sense sequence
  source 1..19: mol_type = other RNA
agattatgagcttggctgg

SEQ ID NO: 51367 - RNA, 19 nt, synthetic construct
  misc_feature 1..19: note = siRNA antisense sequence
  source 1..19: mol_type = other RNA
ccagccaagctcataatct

SEQ ID NO: 51368 - RNA, 19 nt, synthetic construct
  misc_feature 1..19: note = siRNA sense sequence
  source 1..19: mol_type = other RNA
gattatgagcttggctggc

SEQ ID NO: 51369 - RNA, 19 nt, synthetic construct
  misc_feature 1..19: note = siRNA antisense sequence
  source 1..19: mol_type = other RNA
gccagccaagctcataatc

SEQ ID NO: 51370 - RNA, 19 nt, synthetic construct
  misc_feature 1..19: note = siRNA sense sequence
  source 1..19: mol_type = other RNA
attatgagcttggctggcc

SEQ ID NO: 51371 - RNA, 19 nt, synthetic construct
  misc_feature 1..19: note = siRNA antisense sequence
  source 1..19: mol_type = other RNA
ggccagccaagctcataat

SEQ ID NO: 51372 - RNA, 19 nt, synthetic construct
  misc_feature 1..19: note = siRNA sense sequence
  source 1..19: mol_type = other RNA
ttatgagcttggctggcct

SEQ ID NO: 51373 - RNA, 19 nt, synthetic construct
  misc_feature 1..19: note = siRNA antisense sequence
  source 1..19: mol_type = other RNA
aggccagccaagctcataa

SEQ ID NO: 51374 - RNA, 19 nt, synthetic construct
  misc_feature 1..19: note = siRNA sense sequence
  source 1..19: mol_type = other RNA
tatgagcttggctggcctt

SEQ ID NO: 51375 - RNA, 19 nt, synthetic construct
  misc_feature 1..19: note = siRNA antisense sequence
  source 1..19: mol_type = other RNA
aaggccagccaagctcata

SEQ ID NO: 51376 - RNA, 19 nt, synthetic construct
  misc_feature 1..19: note = siRNA sense sequence
  source 1..19: mol_type = other RNA
atgagcttggctggcctta

SEQ ID NO: 51377 - RNA, 19 nt, synthetic construct
  misc_feature 1..19: note = siRNA antisense sequence
  source 1..19: mol_type = other RNA
taaggccagccaagctcat

SEQ ID NO: 51378 - RNA, 19 nt, synthetic construct
  misc_feature 1..19: note = siRNA sense sequence
  source 1..19: mol_type = other RNA
tgagcttggctggccttaa

SEQ ID NO: 51379 - RNA, 19 nt, synthetic construct
  misc_feature 1..19: note = siRNA antisense sequence
  source 1..19: mol_type = other RNA
ttaaggccagccaagctca

SEQ ID NO: 51380 - RNA, 19 nt, synthetic construct
  misc_feature 1..19: note = siRNA sense sequence
  source 1..19: mol_type = other RNA
gagcttggctggccttaag

SEQ ID NO: 51381 - RNA, 19 nt, synthetic construct
  misc_feature 1..19: note = siRNA antisense sequence
  source 1..19: mol_type = other RNA
cttaaggccagccaagctc

SEQ ID NO: 51382 - RNA, 19 nt, synthetic construct
  misc_feature 1..19: note = siRNA sense sequence
  source 1..19: mol_type = other RNA
agcttggctggccttaagg

SEQ ID NO: 51383 - RNA, 19 nt, synthetic construct
  misc_feature 1..19: note = siRNA antisense sequence
  source 1..19: mol_type = other RNA
ccttaaggccagccaagct

SEQ ID NO: 51384 - RNA, 19 nt, synthetic construct
  misc_feature 1..19: note = siRNA sense sequence
  source 1..19: mol_type = other RNA
gcttggctggccttaagga

SEQ ID NO: 51385 - RNA, 19 nt, synthetic construct
  misc_feature 1..19: note = siRNA antisense sequence
  source 1..19: mol_type = other RNA
tccttaaggccagccaagc

SEQ ID NO: 51386 - RNA, 19 nt, synthetic construct
  misc_feature 1..19: note = siRNA sense sequence
  source 1..19: mol_type = other RNA
cttggctggccttaaggaa

SEQ ID NO: 51387 - RNA, 19 nt, synthetic construct
  misc_feature 1..19: note = siRNA antisense sequence
  source 1..19: mol_type = other RNA
ttccttaaggccagccaag

SEQ ID NO: 51388 - RNA, 19 nt, synthetic construct
  misc_feature 1..19: note = siRNA sense sequence
  source 1..19: mol_type = other RNA
atacataaggtcttccaac

SEQ ID NO: 51389 - RNA, 19 nt, synthetic construct
  misc_feature 1..19: note = siRNA antisense sequence
  source 1..19: mol_type = other RNA
gttggaagaccttatgtat

SEQ ID NO: 51390 - RNA, 19 nt, synthetic construct
  misc_feature 1..19: note = siRNA sense sequence
  source 1..19: mol_type = other RNA
tacataaggtcttccaact

SEQ ID NO: 51391 - RNA, 19 nt, synthetic construct
  misc_feature 1..19: note = siRNA antisense sequence
  source 1..19: mol_type = other RNA
agttggaagaccttatgta

SEQ ID NO: 51392 - RNA, 19 nt, synthetic construct
  misc_feature 1..19: note = siRNA sense sequence
  source 1..19: mol_type = other RNA
acataaggtcttccaacta

SEQ ID NO: 51393 - RNA, 19 nt, synthetic construct
  misc_feature 1..19: note = siRNA antisense sequence
  source 1..19: mol_type = other RNA
tagttggaagaccttatgt

SEQ ID NO: 51394 - RNA, 19 nt, synthetic construct
  misc_feature 1..19: note = siRNA sense sequence
  source 1..19: mol_type = other RNA
cataaggtcttccaactaa

SEQ ID NO: 51395 - RNA, 19 nt, synthetic construct
  misc_feature 1..19: note = siRNA antisense sequence
  source 1..19: mol_type = other RNA
ttagttggaagaccttatg

SEQ ID NO: 51396 - RNA, 19 nt, synthetic construct
  misc_feature 1..19: note = siRNA sense sequence
  source 1..19: mol_type = other RNA
ataaggtcttccaactaat

SEQ ID NO: 51397 - RNA, 19 nt, synthetic construct
  misc_feature 1..19: note = siRNA antisense sequence
  source 1..19: mol_type = other RNA
attagttggaagaccttat

SEQ ID NO: 51398 - RNA, 19 nt, synthetic construct
  misc_feature 1..19: note = siRNA sense sequence
  source 1..19: mol_type = other RNA
taaggtcttccaactaatt

SEQ ID NO: 51399 - RNA, 19 nt, synthetic construct
  misc_feature 1..19: note = siRNA antisense sequence
  source 1..19: mol_type = other RNA
aattagttggaagacctta

SEQ ID NO: 51400 - RNA, 19 nt, synthetic construct
  misc_feature 1..19: note = siRNA sense sequence
  source 1..19: mol_type = other RNA
aaggtcttccaactaattg

SEQ ID NO: 51401 - RNA, 19 nt, synthetic construct
  misc_feature 1..19: note = siRNA antisense sequence
  source 1..19: mol_type = other RNA
caattagttggaagacctt

SEQ ID NO: 51402 - RNA, 19 nt, synthetic construct
  misc_feature 1..19: note = siRNA sense sequence
  source 1..19: mol_type = other RNA
aggtcttccaactaattgt

SEQ ID NO: 51403 - RNA, 19 nt, synthetic construct
  misc_feature 1..19: note = siRNA antisense sequence
  source 1..19: mol_type = other RNA
acaattagttggaagacct

SEQ ID NO: 51404 - RNA, 19 nt, synthetic construct
  misc_feature 1..19: note = siRNA sense sequence
  source 1..19: mol_type = other RNA
ggtcttccaactaattgtg

SEQ ID NO: 51405 - RNA, 19 nt, synthetic construct
  misc_feature 1..19: note = siRNA antisense sequence
  source 1..19: mol_type = other RNA
cacaattagttggaagacc

SEQ ID NO: 51406 - RNA, 19 nt, synthetic construct
  misc_feature 1..19: note = siRNA sense sequence
  source 1..19: mol_type = other RNA
gtcttccaactaattgtgt

SEQ ID NO: 51407 - RNA, 19 nt, synthetic construct
  misc_feature 1..19: note = siRNA antisense sequence
  source 1..19: mol_type = other RNA
acacaattagttggaagac

SEQ ID NO: 51408 - RNA, 19 nt, synthetic construct
  misc_feature 1..19: note = siRNA sense sequence
  source 1..19: mol_type = other RNA
cttccaactaattgtgtac

SEQ ID NO: 51409 - RNA, 19 nt, synthetic construct
  misc_feature 1..19: note = siRNA antisense sequence
  source 1..19: mol_type = other RNA
gtacacaattagttggaag

SEQ ID NO: 51410 - RNA, 19 nt, synthetic construct
  misc_feature 1..19: note = siRNA sense sequence
  source 1..19: mol_type = other RNA
ttccaactaattgtgtact

SEQ ID NO: 51411 - RNA, 19 nt, synthetic construct
  misc_feature 1..19: note = siRNA antisense sequence
  source 1..19: mol_type = other RNA
agtacacaattagttggaa

SEQ ID NO: 51412 - RNA, 19 nt, synthetic construct
  misc_feature 1..19: note = siRNA sense sequence
  source 1..19: mol_type = other RNA
tccaactaattgtgtactt

SEQ ID NO: 51413 - RNA, 19 nt, synthetic construct
  misc_feature 1..19: note = siRNA antisense sequence
  source 1..19: mol_type = other RNA
aagtacacaattagttgga

SEQ ID NO: 51414 - RNA, 19 nt, synthetic construct
  misc_feature 1..19: note = siRNA sense sequence
  source 1..19: mol_type = other RNA
tgggctaagatatgataga

SEQ ID NO: 51415 - RNA, 19 nt, synthetic construct
  misc_feature 1..19: note = siRNA antisense sequence
  source 1..19: mol_type = other RNA
tctatcatatcttagccca

SEQ ID NO: 51416 - RNA, 19 nt, synthetic construct
  misc_feature 1..19: note = siRNA sense sequence
  source 1..19: mol_type = other RNA
gggctaagatatgatagaa

SEQ ID NO: 51417 - RNA, 19 nt, synthetic construct
  misc_feature 1..19: note = siRNA antisense sequence
  source 1..19: mol_type = other RNA
ttctatcatatcttagccc

SEQ ID NO: 51418 - RNA, 19 nt, synthetic construct
  misc_feature 1..19: note = siRNA sense sequence
  source 1..19: mol_type = other RNA
cagaatacagtgtcatttc

SEQ ID NO: 51419 - RNA, 19 nt, synthetic construct
  misc_feature 1..19: note = siRNA antisense sequence
  source 1..19: mol_type = other RNA
gaaatgacactgtattctg

SEQ ID NO: 51420 - RNA, 19 nt, synthetic construct
  misc_feature 1..19: note = siRNA sense sequence
  source 1..19: mol_type = other RNA
gaatacagtgtcatttcta

SEQ ID NO: 51421 - RNA, 19 nt, synthetic construct
  misc_feature 1..19: note = siRNA antisense sequence
  source 1..19: mol_type = other RNA
tagaaatgacactgtattc

SEQ ID NO: 51422 - RNA, 19 nt, synthetic construct
  misc_feature 1..19: note = siRNA sense sequence
  source 1..19: mol_type = other RNA
cagtgtcatttctaaatct

SEQ ID NO: 51423 - RNA, 19 nt, synthetic construct
  misc_feature 1..19: note = siRNA antisense sequence
  source 1..19: mol_type = other RNA
agatttagaaatgacactg

SEQ ID NO: 51424 - RNA, 19 nt, synthetic construct
  misc_feature 1..19: note = siRNA sense sequence
  source 1..19: mol_type = other RNA
agtgtcatttctaaatctc

SEQ ID NO: 51425 - RNA, 19 nt, synthetic construct
  misc_feature 1..19: note = siRNA antisense sequence
  source 1..19: mol_type = other RNA
gagatttagaaatgacact

SEQ ID NO: 51426 - RNA, 19 nt, synthetic construct
  misc_feature 1..19: note = siRNA sense sequence
  source 1..19: mol_type = other RNA
gtgtcatttctaaatctcc

SEQ ID NO: 51427 - RNA, 19 nt, synthetic construct
  misc_feature 1..19: note = siRNA antisense sequence
  source 1..19: mol_type = other RNA
ggagatttagaaatgacac

SEQ ID NO: 51428 - RNA, 19 nt, synthetic construct
  misc_feature 1..19: note = siRNA sense sequence
  source 1..19: mol_type = other RNA
tgtcatttctaaatctcct

SEQ ID NO: 51429 - RNA, 19 nt, synthetic construct
  misc_feature 1..19: note = siRNA antisense sequence
  source 1..19: mol_type = other RNA
aggagatttagaaatgaca

SEQ ID NO: 51430 - RNA, 19 nt, synthetic construct
  misc_feature 1..19: note = siRNA sense sequence
  source 1..19: mol_type = other RNA
gtcatttctaaatctcctt

SEQ ID NO: 51431 - RNA, 19 nt, synthetic construct
  misc_feature 1..19: note = siRNA antisense sequence
  source 1..19: mol_type = other RNA
aaggagatttagaaatgac

SEQ ID NO: 51432 - RNA, 19 nt, synthetic construct
  misc_feature 1..19: note = siRNA sense sequence
  source 1..19: mol_type = other RNA
aatctccttttaagtaagc

SEQ ID NO: 51433 - RNA, 19 nt, synthetic construct
  misc_feature 1..19: note = siRNA antisense sequence
  source 1..19: mol_type = other RNA
gcttacttaaaaggagatt

SEQ ID NO: 51434 - RNA, 19 nt, synthetic construct
  misc_feature 1..19: note = siRNA sense sequence
  source 1..19: mol_type = other RNA
atctccttttaagtaagca

SEQ ID NO: 51435 - RNA, 19 nt, synthetic construct
  misc_feature 1..19: note = siRNA antisense sequence
  source 1..19: mol_type = other RNA
tgcttacttaaaaggagat

SEQ ID NO: 51436 - RNA, 19 nt, synthetic construct
  misc_feature 1..19: note = siRNA sense sequence
  source 1..19: mol_type = other RNA
ccttttaagtaagcaagta

SEQ ID NO: 51437 - RNA, 19 nt, synthetic construct
  misc_feature 1..19: note = siRNA antisense sequence
  source 1..19: mol_type = other RNA
tacttgcttacttaaaagg

SEQ ID NO: 51438 - RNA, 19 nt, synthetic construct
  misc_feature 1..19: note = siRNA sense sequence
  source 1..19: mol_type = other RNA
agtaagcaagtaacctaaa

SEQ ID NO: 51439 - RNA, 19 nt, synthetic construct
  misc_feature 1..19: note = siRNA antisense sequence
  source 1..19: mol_type = other RNA
tttaggttacttgcttact

SEQ ID NO: 51440 - RNA, 19 nt, synthetic construct
  misc_feature 1..19: note = siRNA sense sequence
  source 1..19: mol_type = other RNA
gtaagcaagtaacctaaaa

SEQ ID NO: 51441 - RNA, 19 nt, synthetic construct
  misc_feature 1..19: note = siRNA antisense sequence
  source 1..19: mol_type = other RNA
ttttaggttacttgcttac

SEQ ID NO: 51442 - RNA, 19 nt, synthetic construct
  misc_feature 1..19: note = siRNA sense sequence
  source 1..19: mol_type = other RNA
atttctaacctaactacac

SEQ ID NO: 51443 - RNA, 19 nt, synthetic construct
  misc_feature 1..19: note = siRNA antisense sequence
  source 1..19: mol_type = other RNA
gtgtagttaggttagaaat

SEQ ID NO: 51444 - RNA, 19 nt, synthetic construct
  misc_feature 1..19: note = siRNA sense sequence
  source 1..19: mol_type = other RNA
ctaacctaactacaccatg

SEQ ID NO: 51445 - RNA, 19 nt, synthetic construct
  misc_feature 1..19: note = siRNA antisense sequence
  source 1..19: mol_type = other RNA
catggtgtagttaggttag

SEQ ID NO: 51446 - RNA, 19 nt, synthetic construct
  misc_feature 1..19: note = siRNA sense sequence
  source 1..19: mol_type = other RNA
taacctaactacaccatgg

SEQ ID NO: 51447 - RNA, 19 nt, synthetic construct
  misc_feature 1..19: note = siRNA antisense sequence
  source 1..19: mol_type = other RNA
ccatggtgtagttaggtta

SEQ ID NO: 51448 - RNA, 19 nt, synthetic construct
  misc_feature 1..19: note = siRNA sense sequence
  source 1..19: mol_type = other RNA
aacctaactacaccatgga

SEQ ID NO: 51449 - RNA, 19 nt, synthetic construct
  misc_feature 1..19: note = siRNA antisense sequence
  source 1..19: mol_type = other RNA
tccatggtgtagttaggtt

SEQ ID NO: 51450 - RNA, 19 nt, synthetic construct
  misc_feature 1..19: note = siRNA sense sequence
  source 1..19: mol_type = other RNA
acctaactacaccatggat

SEQ ID NO: 51451 - RNA, 19 nt, synthetic construct
  misc_feature 1..19: note = siRNA antisense sequence
  source 1..19: mol_type = other RNA
atccatggtgtagttaggt

SEQ ID NO: 51452 - RNA, 19 nt, synthetic construct
  misc_feature 1..19: note = siRNA sense sequence
  source 1..19: mol_type = other RNA
cctaactacaccatggatt

SEQ ID NO: 51453 - RNA, 19 nt, synthetic construct
  misc_feature 1..19: note = siRNA antisense sequence
  source 1..19: mol_type = other RNA
aatccatggtgtagttagg

SEQ ID NO: 51454 - RNA, 19 nt, synthetic construct
  misc_feature 1..19: note = siRNA sense sequence
  source 1..19: mol_type = other RNA
ctaactacaccatggatta

SEQ ID NO: 51455 - RNA, 19 nt, synthetic construct
  misc_feature 1..19: note = siRNA antisense sequence
  source 1..19: mol_type = other RNA
taatccatggtgtagttag

SEQ ID NO: 51456 - RNA, 19 nt, synthetic construct
  misc_feature 1..19: note = siRNA sense sequence
  source 1..19: mol_type = other RNA
taactacaccatggattaa

SEQ ID NO: 51457 - RNA, 19 nt, synthetic construct
  misc_feature 1..19: note = siRNA antisense sequence
  source 1..19: mol_type = other RNA
ttaatccatggtgtagtta

SEQ ID NO: 51458 - RNA, 19 nt, synthetic construct
  misc_feature 1..19: note = siRNA sense sequence
  source 1..19: mol_type = other RNA
aactacaccatggattaaa

SEQ ID NO: 51459 - RNA, 19 nt, synthetic construct
  misc_feature 1..19: note = siRNA antisense sequence
  source 1..19: mol_type = other RNA
tttaatccatggtgtagtt

SEQ ID NO: 51460 - RNA, 19 nt, synthetic construct
  misc_feature 1..19: note = siRNA sense sequence
  source 1..19: mol_type = other RNA
actacaccatggattaaag

SEQ ID NO: 51461 - RNA, 19 nt, synthetic construct
  misc_feature 1..19: note = siRNA antisense sequence
  source 1..19: mol_type = other RNA
ctttaatccatggtgtagt

SEQ ID NO: 51462 - RNA, 19 nt, synthetic construct
  misc_feature 1..19: note = siRNA sense sequence
  source 1..19: mol_type = other RNA
ctacaccatggattaaagg

SEQ ID NO: 51463 - RNA, 19 nt, synthetic construct
  misc_feature 1..19: note = siRNA antisense sequence
  source 1..19: mol_type = other RNA
cctttaatccatggtgtag

SEQ ID NO: 51464 - RNA, 19 nt, synthetic construct
  misc_feature 1..19: note = siRNA sense sequence
  source 1..19: mol_type = other RNA
tacaccatggattaaaggt

SEQ ID NO: 51465 - RNA, 19 nt, synthetic construct
  misc_feature 1..19: note = siRNA antisense sequence
  source 1..19: mol_type = other RNA
acctttaatccatggtgta

SEQ ID NO: 51466 - RNA, 19 nt, synthetic construct
  misc_feature 1..19: note = siRNA sense sequence
  source 1..19: mol_type = other RNA
accatggattaaaggtgac

SEQ ID NO: 51467 - RNA, 19 nt, synthetic construct
  misc_feature 1..19: note = siRNA antisense sequence
  source 1..19: mol_type = other RNA
gtcacctttaatccatggt

SEQ ID NO: 51468 - RNA, 19 nt, synthetic construct
  misc_feature 1..19: note = siRNA sense sequence
  source 1..19: mol_type = other RNA
ccatggattaaaggtgaca

SEQ ID NO: 51469 - RNA, 19 nt, synthetic construct
  misc_feature 1..19: note = siRNA antisense sequence
  source 1..19: mol_type = other RNA
tgtcacctttaatccatgg

SEQ ID NO: 51470 - RNA, 19 nt, synthetic construct
  misc_feature 1..19: note = siRNA sense sequence
  source 1..19: mol_type = other RNA
atggattaaaggtgacagg

SEQ ID NO: 51471 - RNA, 19 nt, synthetic construct
  misc_feature 1..19: note = siRNA antisense sequence
  source 1..19: mol_type = other RNA
cctgtcacctttaatccat

SEQ ID NO: 51472 - RNA, 19 nt, synthetic construct
  misc_feature 1..19: note = siRNA sense sequence
  source 1..19: mol_type = other RNA
ttaaaggtgacaggttgaa

SEQ ID NO: 51473 - RNA, 19 nt, synthetic construct
  misc_feature 1..19: note = siRNA antisense sequence
  source 1..19: mol_type = other RNA
ttcaacctgtcacctttaa

SEQ ID NO: 51474 - RNA, 19 nt, synthetic construct
  misc_feature 1..19: note = siRNA sense sequence
  source 1..19: mol_type = other RNA
aaggtgacaggttgaagag

SEQ ID NO: 51475 - RNA, 19 nt, synthetic construct
  misc_feature 1..19: note = siRNA antisense sequence
  source 1..19: mol_type = other RNA
ctcttcaacctgtcacctt

SEQ ID NO: 51476 - RNA, 19 nt, synthetic construct
  misc_feature 1..19: note = siRNA sense sequence
  source 1..19: mol_type = other RNA
aggtgacaggttgaagagc

SEQ ID NO: 51477 - RNA, 19 nt, synthetic construct
  misc_feature 1..19: note = siRNA antisense sequence
  source 1..19: mol_type = other RNA
gctcttcaacctgtcacct

SEQ ID NO: 51478 - RNA, 19 nt, synthetic construct
  misc_feature 1..19: note = siRNA sense sequence
  source 1..19: mol_type = other RNA
gacaggttgaagagcccaa

SEQ ID NO: 51479 - RNA, 19 nt, synthetic construct
  misc_feature 1..19: note = siRNA antisense sequence
  source 1..19: mol_type = other RNA
ttgggctcttcaacctgtc

SEQ ID NO: 51480 - RNA, 19 nt, synthetic construct
  misc_feature 1..19: note = siRNA sense sequence
  source 1..19: mol_type = other RNA
acaggttgaagagcccaaa

SEQ ID NO: 51481 - RNA, 19 nt, synthetic construct
  misc_feature 1..19: note = siRNA antisense sequence
  source 1..19: mol_type = other RNA
tttgggctcttcaacctgt

SEQ ID NO: 51482 - RNA, 19 nt, synthetic construct
  misc_feature 1..19: note = siRNA sense sequence
  source 1..19: mol_type = other RNA
acactccaagaagtctcta

SEQ ID NO: 51483 - RNA, 19 nt, synthetic construct
  misc_feature 1..19: note = siRNA antisense sequence
  source 1..19: mol_type = other RNA
tagagacttcttggagtgt

SEQ ID NO: 51484 - RNA, 19 nt, synthetic construct
  misc_feature 1..19: note = siRNA sense sequence
  source 1..19: mol_type = other RNA
cactccaagaagtctctat

SEQ ID NO: 51485 - RNA, 19 nt, synthetic construct
  misc_feature 1..19: note = siRNA antisense sequence
  source 1..19: mol_type = other RNA
atagagacttcttggagtg

SEQ ID NO: 51486 - RNA, 19 nt, synthetic construct
  misc_feature 1..19: note = siRNA sense sequence
  source 1..19: mol_type = other RNA
actccaagaagtctctata

SEQ ID NO: 51487 - RNA, 19 nt, synthetic construct
  misc_feature 1..19: note = siRNA antisense sequence
  source 1..19: mol_type = other RNA
tatagagacttcttggagt

SEQ ID NO: 51488 - RNA, 19 nt, synthetic construct
  misc_feature 1..19: note = siRNA sense sequence
  source 1..19: mol_type = other RNA
ctccaagaagtctctatat

SEQ ID NO: 51489 - RNA, 19 nt, synthetic construct
  misc_feature 1..19: note = siRNA antisense sequence
  source 1..19: mol_type = other RNA
atatagagacttcttggag

SEQ ID NO: 51490 - RNA, 19 nt, synthetic construct
  misc_feature 1..19: note = siRNA sense sequence
  source 1..19: mol_type = other RNA
tccaagaagtctctatatt

SEQ ID NO: 51491 - RNA, 19 nt, synthetic construct
  misc_feature 1..19: note = siRNA antisense sequence
  source 1..19: mol_type = other RNA
aatatagagacttcttgga

SEQ ID NO: 51492 - RNA, 19 nt, synthetic construct
  misc_feature 1..19: note = siRNA sense sequence
  source 1..19: mol_type = other RNA
ccaagaagtctctatattt

SEQ ID NO: 51493 - RNA, 19 nt, synthetic construct
  misc_feature 1..19: note = siRNA antisense sequence
  source 1..19: mol_type = other RNA
aaatatagagacttcttgg

SEQ ID NO: 51494 - RNA, 19 nt, synthetic construct
  misc_feature 1..19: note = siRNA sense sequence
  source 1..19: mol_type = other RNA
gtcttctatatcatctttg

SEQ ID NO: 51495 - RNA, 19 nt, synthetic construct
  misc_feature 1..19: note = siRNA antisense sequence
  source 1..19: mol_type = other RNA
caaagatgatatagaagac

SEQ ID NO: 51496 - RNA, 19 nt, synthetic construct
  misc_feature 1..19: note = siRNA sense sequence
  source 1..19: mol_type = other RNA
tatcatctttgttgctaca

SEQ ID NO: 51497 - RNA, 19 nt, synthetic construct
  misc_feature 1..19: note = siRNA antisense sequence
  source 1..19: mol_type = other RNA
tgtagcaacaaagatgata

SEQ ID NO: 51498 - RNA, 19 nt, synthetic construct
  misc_feature 1..19: note = siRNA sense sequence
  source 1..19: mol_type = other RNA
atcatctttgttgctacac

SEQ ID NO: 51499 - RNA, 19 nt, synthetic construct
  misc_feature 1..19: note = siRNA antisense sequence
  source 1..19: mol_type = other RNA
gtgtagcaacaaagatgat

SEQ ID NO: 51500 - RNA, 19 nt, synthetic construct
  misc_feature 1..19: note = siRNA sense sequence
  source 1..19: mol_type = other RNA
tcatctttgttgctacact

SEQ ID NO: 51501 - RNA, 19 nt, synthetic construct
  misc_feature 1..19: note = siRNA antisense sequence
  source 1..19: mol_type = other RNA
agtgtagcaacaaagatga

SEQ ID NO: 51502 - RNA, 19 nt, synthetic construct
  misc_feature 1..19: note = siRNA sense sequence
  source 1..19: mol_type = other RNA
catctttgttgctacacta

SEQ ID NO: 51503 - RNA, 19 nt, synthetic construct
  misc_feature 1..19: note = siRNA antisense sequence
  source 1..19: mol_type = other RNA
tagtgtagcaacaaagatg

SEQ ID NO: 51504 - RNA, 19 nt, synthetic construct
  misc_feature 1..19: note = siRNA sense sequence
  source 1..19: mol_type = other RNA
aaagcagtgttttgactag

SEQ ID NO: 51505 - RNA, 19 nt, synthetic construct
  misc_feature 1..19: note = siRNA antisense sequence
  source 1..19: mol_type = other RNA
ctagtcaaaacactgcttt

SEQ ID NO: 51506 - RNA, 19 nt, synthetic construct
  misc_feature 1..19: note = siRNA sense sequence
  source 1..19: mol_type = other RNA
aagcagtgttttgactaga

SEQ ID NO: 51507 - RNA, 19 nt, synthetic construct
  misc_feature 1..19: note = siRNA antisense sequence
  source 1..19: mol_type = other RNA
tctagtcaaaacactgctt

SEQ ID NO: 51508 - RNA, 19 nt, synthetic construct
  misc_feature 1..19: note = siRNA sense sequence
  source 1..19: mol_type = other RNA
agcagtgttttgactagac

SEQ ID NO: 51509 - RNA, 19 nt, synthetic construct
  misc_feature 1..19: note = siRNA antisense sequence
  source 1..19: mol_type = other RNA
gtctagtcaaaacactgct

SEQ ID NO: 51510 - RNA, 19 nt, synthetic construct
  misc_feature 1..19: note = siRNA sense sequence
  source 1..19: mol_type = other RNA
gcagtgttttgactagact

SEQ ID NO: 51511 - RNA, 19 nt, synthetic construct
  misc_feature 1..19: note = siRNA antisense sequence
  source 1..19: mol_type = other RNA
agtctagtcaaaacactgc

SEQ ID NO: 51512 - RNA, 19 nt, synthetic construct
  misc_feature 1..19: note = siRNA sense sequence
  source 1..19: mol_type = other RNA
cagtgttttgactagacta

SEQ ID NO: 51513 - RNA, 19 nt, synthetic construct
  misc_feature 1..19: note = siRNA antisense sequence
  source 1..19: mol_type = other RNA
tagtctagtcaaaacactg

SEQ ID NO: 51514 - RNA, 19 nt, synthetic construct
  misc_feature 1..19: note = siRNA sense sequence
  source 1..19: mol_type = other RNA
agtgttttgactagactat

SEQ ID NO: 51515 - RNA, 19 nt, synthetic construct
  misc_feature 1..19: note = siRNA antisense sequence
  source 1..19: mol_type = other RNA
atagtctagtcaaaacact

SEQ ID NO: 51516 - RNA, 19 nt, synthetic construct
  misc_feature 1..19: note = siRNA sense sequence
  source 1..19: mol_type = other RNA
gtgttttgactagactatt

SEQ ID NO: 51517 - RNA, 19 nt, synthetic construct
  misc_feature 1..19: note = siRNA antisense sequence
  source 1..19: mol_type = other RNA
aatagtctagtcaaaacac

SEQ ID NO: 51518 - RNA, 19 nt, synthetic construct
  misc_feature 1..19: note = siRNA sense sequence
  source 1..19: mol_type = other RNA
gttttgactagactatttc

SEQ ID NO: 51519 - RNA, 19 nt, synthetic construct
  misc_feature 1..19: note = siRNA antisense sequence
  source 1..19: mol_type = other RNA
gaaatagtctagtcaaaac

SEQ ID NO: 51520 - RNA, 19 nt, synthetic construct
  misc_feature 1..19: note = siRNA sense sequence
  source 1..19: mol_type = other RNA
ctttatttctttgttgctc

SEQ ID NO: 51521 - RNA, 19 nt, synthetic construct
  misc_feature 1..19: note = siRNA antisense sequence
  source 1..19: mol_type = other RNA
gagcaacaaagaaataaag

SEQ ID NO: 51522 - RNA, 19 nt, synthetic construct
  misc_feature 1..19: note = siRNA sense sequence
  source 1..19: mol_type = other RNA
tttatttctttgttgctcg

SEQ ID NO: 51523 - RNA, 19 nt, synthetic construct
  misc_feature 1..19: note = siRNA antisense sequence
  source 1..19: mol_type = other RNA
cgagcaacaaagaaataaa

SEQ ID NO: 51524 - RNA, 19 nt, synthetic construct
  misc_feature 1..19: note = siRNA sense sequence
  source 1..19: mol_type = other RNA
tatttctttgttgctcggg

SEQ ID NO: 51525 - RNA, 19 nt, synthetic construct
  misc_feature 1..19: note = siRNA antisense sequence
  source 1..19: mol_type = other RNA
cccgagcaacaaagaaata

SEQ ID NO: 51526 - RNA, 19 nt, synthetic construct
  misc_feature 1..19: note = siRNA sense sequence
  source 1..19: mol_type = other RNA
atttctttgttgctcggga

SEQ ID NO: 51527 - RNA, 19 nt, synthetic construct
  misc_feature 1..19: note = siRNA antisense sequence
  source 1..19: mol_type = other RNA
tcccgagcaacaaagaaat

SEQ ID NO: 51528 - RNA, 19 nt, synthetic construct
  misc_feature 1..19: note = siRNA sense sequence
  source 1..19: mol_type = other RNA
tttctttgttgctcgggaa

SEQ ID NO: 51529 - RNA, 19 nt, synthetic construct
  misc_feature 1..19: note = siRNA antisense sequence
  source 1..19: mol_type = other RNA
ttcccgagcaacaaagaaa

SEQ ID NO: 51530 - RNA, 19 nt, synthetic construct
  misc_feature 1..19: note = siRNA sense sequence
  source 1..19: mol_type = other RNA
aatctccatttcctgtcaa

SEQ ID NO: 51531 - RNA, 19 nt, synthetic construct
  misc_feature 1..19: note = siRNA antisense sequence
  source 1..19: mol_type = other RNA
ttgacaggaaatggagatt

SEQ ID NO: 51532 - RNA, 19 nt, synthetic construct
  misc_feature 1..19: note = siRNA sense sequence
  source 1..19: mol_type = other RNA
atctccatttcctgtcaac

SEQ ID NO: 51533 - RNA, 19 nt, synthetic construct
  misc_feature 1..19: note = siRNA antisense sequence
  source 1..19: mol_type = other RNA
gttgacaggaaatggagat

SEQ ID NO: 51534 - RNA, 19 nt, synthetic construct
  misc_feature 1..19: note = siRNA sense sequence
  source 1..19: mol_type = other RNA
acatgtatcttaagatgac

SEQ ID NO: 51535 - RNA, 19 nt, synthetic construct
  misc_feature 1..19: note = siRNA antisense sequence
  source 1..19: mol_type = other RNA
gtcatcttaagatacatgt

SEQ ID NO: 51536 - RNA, 19 nt, synthetic construct
  misc_feature 1..19: note = siRNA sense sequence
  source 1..19: mol_type = other RNA
catgtatcttaagatgaca

SEQ ID NO: 51537 - RNA, 19 nt, synthetic construct
  misc_feature 1..19: note = siRNA antisense sequence
  source 1..19: mol_type = other RNA
tgtcatcttaagatacatg

SEQ ID NO: 51538 - RNA, 19 nt, synthetic construct
  misc_feature 1..19: note = siRNA sense sequence
  source 1..19: mol_type = other RNA
aagtagctgtgattatgaa

SEQ ID NO: 51539 - RNA, 19 nt, synthetic construct
  misc_feature 1..19: note = siRNA antisense sequence
  source 1..19: mol_type = other RNA
ttcataatcacagctactt

SEQ ID NO: 51540 - RNA, 19 nt, synthetic construct
  misc_feature 1..19: note = siRNA sense sequence
  source 1..19: mol_type = other RNA
tttctgtttgccaaggaca

SEQ ID NO: 51541 - RNA, 19 nt, synthetic construct
  misc_feature 1..19: note = siRNA antisense sequence
  source 1..19: mol_type = other RNA
tgtccttggcaaacagaaa

SEQ ID NO: 51542 - RNA, 19 nt, synthetic construct
  misc_feature 1..19: note = siRNA sense sequence
  source 1..19: mol_type = other RNA
tgtttgccaaggacagtgc

SEQ ID NO: 51543 - RNA, 19 nt, synthetic construct
  misc_feature 1..19: note = siRNA antisense sequence
  source 1..19: mol_type = other RNA
gcactgtccttggcaaaca

SEQ ID NO: 51544 - RNA, 19 nt, synthetic construct
  misc_feature 1..19: note = siRNA sense sequence
  source 1..19: mol_type = other RNA
gtttgccaaggacagtgcc

SEQ ID NO: 51545 - RNA, 19 nt, synthetic construct
  misc_feature 1..19: note = siRNA antisense sequence
  source 1..19: mol_type = other RNA
ggcactgtccttggcaaac

SEQ ID NO: 51546 - RNA, 19 nt, synthetic construct
  misc_feature 1..19: note = siRNA sense sequence
  source 1..19: mol_type = other RNA
tttgccaaggacagtgcca

SEQ ID NO: 51547 - RNA, 19 nt, synthetic construct
  misc_feature 1..19: note = siRNA antisense sequence
  source 1..19: mol_type = other RNA
tggcactgtccttggcaaa

SEQ ID NO: 51548 - RNA, 19 nt, synthetic construct
  misc_feature 1..19: note = siRNA sense sequence
  source 1..19: mol_type = other RNA
gtatgccaaggacttgctt

SEQ ID NO: 51549 - RNA, 19 nt, synthetic construct
  misc_feature 1..19: note = siRNA antisense sequence
  source 1..19: mol_type = other RNA
aagcaagtccttggcatac

SEQ ID NO: 51550 - RNA, 19 nt, synthetic construct
  misc_feature 1..19: note = siRNA sense sequence
  source 1..19: mol_type = other RNA
tatgccaaggacttgctta

SEQ ID NO: 51551 - RNA, 19 nt, synthetic construct
  misc_feature 1..19: note = siRNA antisense sequence
  source 1..19: mol_type = other RNA
taagcaagtccttggcata

SEQ ID NO: 51552 - RNA, 19 nt, synthetic construct
  misc_feature 1..19: note = siRNA sense sequence
  source 1..19: mol_type = other RNA
tgccaaggacttgcttagt

SEQ ID NO: 51553 - RNA, 19 nt, synthetic construct
  misc_feature 1..19: note = siRNA antisense sequence
  source 1..19: mol_type = other RNA
actaagcaagtccttggca

SEQ ID NO: 51554 - RNA, 19 nt, synthetic construct
  misc_feature 1..19: note = siRNA sense sequence
  source 1..19: mol_type = other RNA
gccaaggacttgcttagta

SEQ ID NO: 51555 - RNA, 19 nt, synthetic construct
  misc_feature 1..19: note = siRNA antisense sequence
  source 1..19: mol_type = other RNA
tactaagcaagtccttggc

SEQ ID NO: 51556 - RNA, 19 nt, synthetic construct
  misc_feature 1..19: note = siRNA sense sequence
  source 1..19: mol_type = other RNA
ccaaggacttgcttagtac

SEQ ID NO: 51557 - RNA, 19 nt, synthetic construct
  misc_feature 1..19: note = siRNA antisense sequence
  source 1..19: mol_type = other RNA
gtactaagcaagtccttgg

SEQ ID NO: 51558 - RNA, 19 nt, synthetic construct
  misc_feature 1..19: note = siRNA sense sequence
  source 1..19: mol_type = other RNA
caaggacttgcttagtaca

SEQ ID NO: 51559 - RNA, 19 nt, synthetic construct
  misc_feature 1..19: note = siRNA antisense sequence
  source 1..19: mol_type = other RNA
tgtactaagcaagtccttg

SEQ ID NO: 51560 - RNA, 19 nt, synthetic construct
  misc_feature 1..19: note = siRNA sense sequence
  source 1..19: mol_type = other RNA
aaggacttgcttagtacat

SEQ ID NO: 51561 - RNA, 19 nt, synthetic construct
  misc_feature 1..19: note = siRNA antisense sequence
  source 1..19: mol_type = other RNA
atgtactaagcaagtcctt

SEQ ID NO: 51562 - RNA, 19 nt, synthetic construct
  misc_feature 1..19: note = siRNA sense sequence
  source 1..19: mol_type = other RNA
aggacttgcttagtacatc

SEQ ID NO: 51563 - RNA, 19 nt, synthetic construct
  misc_feature 1..19: note = siRNA antisense sequence
  source 1..19: mol_type = other RNA
gatgtactaagcaagtcct

SEQ ID NO: 51564 - RNA, 19 nt, synthetic construct
  misc_feature 1..19: note = siRNA sense sequence
  source 1..19: mol_type = other RNA
ggacttgcttagtacatca

SEQ ID NO: 51565 - RNA, 19 nt, synthetic construct
  misc_feature 1..19: note = siRNA antisense sequence
  source 1..19: mol_type = other RNA
tgatgtactaagcaagtcc

SEQ ID NO: 51566 - RNA, 19 nt, synthetic construct
  misc_feature 1..19: note = siRNA sense sequence
  source 1..19: mol_type = other RNA
gtctactgtctccatttcc

SEQ ID NO: 51567 - RNA, 19 nt, synthetic construct
  misc_feature 1..19: note = siRNA antisense sequence
  source 1..19: mol_type = other RNA
ggaaatggagacagtagac

SEQ ID NO: 51568 - RNA, 19 nt, synthetic construct
  misc_feature 1..19: note = siRNA sense sequence
  source 1..19: mol_type = other RNA
acatttctaaccagaggct

SEQ ID NO: 51569 - RNA, 19 nt, synthetic construct
  misc_feature 1..19: note = siRNA antisense sequence
  source 1..19: mol_type = other RNA
agcctctggttagaaatgt

SEQ ID NO: 51570 - RNA, 19 nt, synthetic construct
  misc_feature 1..19: note = siRNA sense sequence
  source 1..19: mol_type = other RNA
catttctaaccagaggctg

SEQ ID NO: 51571 - RNA, 19 nt, synthetic construct
  misc_feature 1..19: note = siRNA antisense sequence
  source 1..19: mol_type = other RNA
cagcctctggttagaaatg

SEQ ID NO: 51572 - RNA, 19 nt, synthetic construct
  misc_feature 1..19: note = siRNA sense sequence
  source 1..19: mol_type = other RNA
atttctaaccagaggctgc

SEQ ID NO: 51573 - RNA, 19 nt, synthetic construct
  misc_feature 1..19: note = siRNA antisense sequence
  source 1..19: mol_type = other RNA
gcagcctctggttagaaat

SEQ ID NO: 51574 - RNA, 19 nt, synthetic construct
  misc_feature 1..19: note = siRNA sense sequence
  source 1..19: mol_type = other RNA
tttctaaccagaggctgca

SEQ ID NO: 51575 - RNA, 19 nt, synthetic construct
  misc_feature 1..19: note = siRNA antisense sequence
  source 1..19: mol_type = other RNA
tgcagcctctggttagaaa

SEQ ID NO: 51576 - RNA, 19 nt, synthetic construct
  misc_feature 1..19: note = siRNA sense sequence
  source 1..19: mol_type = other RNA
taaccagaggctgcacagt

SEQ ID NO: 51577 - RNA, 19 nt, synthetic construct
  misc_feature 1..19: note = siRNA antisense sequence
  source 1..19: mol_type = other RNA
actgtgcagcctctggtta

SEQ ID NO: 51578 - RNA, 19 nt, synthetic construct
  misc_feature 1..19: note = siRNA sense sequence
  source 1..19: mol_type = other RNA
accagaggctgcacagtgg

SEQ ID NO: 51579 - RNA, 19 nt, synthetic construct
  misc_feature 1..19: note = siRNA antisense sequence
  source 1..19: mol_type = other RNA
ccactgtgcagcctctggt

SEQ ID NO: 51580 - RNA, 19 nt, synthetic construct
  misc_feature 1..19: note = siRNA sense sequence
  source 1..19: mol_type = other RNA
cagaggctgcacagtggtt

SEQ ID NO: 51581 - RNA, 19 nt, synthetic construct
  misc_feature 1..19: note = siRNA antisense sequence
  source 1..19: mol_type = other RNA
aaccactgtgcagcctctg

SEQ ID NO: 51582 - RNA, 19 nt, synthetic construct
  misc_feature 1..19: note = siRNA sense sequence
  source 1..19: mol_type = other RNA
agaggctgcacagtggtta

SEQ ID NO: 51583 - RNA, 19 nt, synthetic construct
  misc_feature 1..19: note = siRNA antisense sequence
  source 1..19: mol_type = other RNA
taaccactgtgcagcctct

SEQ ID NO: 51584 - RNA, 19 nt, synthetic construct
  misc_feature 1..19: note = siRNA sense sequence
  source 1..19: mol_type = other RNA
gaggctgcacagtggttag

SEQ ID NO: 51585 - RNA, 19 nt, synthetic construct
  misc_feature 1..19: note = siRNA antisense sequence
  source 1..19: mol_type = other RNA
ctaaccactgtgcagcctc

SEQ ID NO: 51586 - RNA, 19 nt, synthetic construct
  misc_feature 1..19: note = siRNA sense sequence
  source 1..19: mol_type = other RNA
aggctgcacagtggttaga

SEQ ID NO: 51587 - RNA, 19 nt, synthetic construct
  misc_feature 1..19: note = siRNA antisense sequence
  source 1..19: mol_type = other RNA
tctaaccactgtgcagcct

SEQ ID NO: 51588 - RNA, 19 nt, synthetic construct
  misc_feature 1..19: note = siRNA sense sequence
  source 1..19: mol_type = other RNA
ctgcacagtggttagagtg

SEQ ID NO: 51589 - RNA, 19 nt, synthetic construct
  misc_feature 1..19: note = siRNA antisense sequence
  source 1..19: mol_type = other RNA
cactctaaccactgtgcag

SEQ ID NO: 51590 - RNA, 19 nt, synthetic construct
  misc_feature 1..19: note = siRNA sense sequence
  source 1..19: mol_type = other RNA
tgcacagtggttagagtgg

SEQ ID NO: 51591 - RNA, 19 nt, synthetic construct
  misc_feature 1..19: note = siRNA antisense sequence
  source 1..19: mol_type = other RNA
ccactctaaccactgtgca

SEQ ID NO: 51592 - RNA, 19 nt, synthetic construct
  misc_feature 1..19: note = siRNA sense sequence
  source 1..19: mol_type = other RNA
ggtctattaccatgatgcc

SEQ ID NO: 51593 - RNA, 19 nt, synthetic construct
  misc_feature 1..19: note = siRNA antisense sequence
  source 1..19: mol_type = other RNA
ggcatcatggtaatagacc

SEQ ID NO: 51594 - RNA, 19 nt, synthetic construct
  misc_feature 1..19: note = siRNA sense sequence
  source 1..19: mol_type = other RNA
gtctattaccatgatgcca

SEQ ID NO: 51595 - RNA, 19 nt, synthetic construct
  misc_feature 1..19: note = siRNA antisense sequence
  source 1..19: mol_type = other RNA
tggcatcatggtaatagac

SEQ ID NO: 51596 - RNA, 19 nt, synthetic construct
  misc_feature 1..19: note = siRNA sense sequence
  source 1..19: mol_type = other RNA
tctattaccatgatgccac

SEQ ID NO: 51597 - RNA, 19 nt, synthetic construct
  misc_feature 1..19: note = siRNA antisense sequence
  source 1..19: mol_type = other RNA
gtggcatcatggtaataga

SEQ ID NO: 51598 - RNA, 19 nt, synthetic construct
  misc_feature 1..19: note = siRNA sense sequence
  source 1..19: mol_type = other RNA
ctattaccatgatgccact

SEQ ID NO: 51599 - RNA, 19 nt, synthetic construct
  misc_feature 1..19: note = siRNA antisense sequence
  source 1..19: mol_type = other RNA
agtggcatcatggtaatag

SEQ ID NO: 51600 - RNA, 19 nt, synthetic construct
  misc_feature 1..19: note = siRNA sense sequence
  source 1..19: mol_type = other RNA
atgccactgcagcaggaag

SEQ ID NO: 51601 - RNA, 19 nt, synthetic construct
  misc_feature 1..19: note = siRNA antisense sequence
  source 1..19: mol_type = other RNA
cttcctgctgcagtggcat

SEQ ID NO: 51602 - RNA, 19 nt, synthetic construct
  misc_feature 1..19: note = siRNA sense sequence
  source 1..19: mol_type = other RNA
tgccactgcagcaggaaga

SEQ ID NO: 51603 - RNA, 19 nt, synthetic construct
  misc_feature 1..19: note = siRNA antisense sequence
  source 1..19: mol_type = other RNA
tcttcctgctgcagtggca

SEQ ID NO: 51604 - RNA, 19 nt, synthetic construct
  misc_feature 1..19: note = siRNA sense sequence
  source 1..19: mol_type = other RNA
acatcacatagcgtccttc

SEQ ID NO: 51605 - RNA, 19 nt, synthetic construct
  misc_feature 1..19: note = siRNA antisense sequence
  source 1..19: mol_type = other RNA
gaaggacgctatgtgatgt

SEQ ID NO: 51606 - RNA, 19 nt, synthetic construct
  misc_feature 1..19: note = siRNA sense sequence
  source 1..19: mol_type = other RNA
catcacatagcgtccttct

SEQ ID NO: 51607 - RNA, 19 nt, synthetic construct
  misc_feature 1..19: note = siRNA antisense sequence
  source 1..19: mol_type = other RNA
agaaggacgctatgtgatg

SEQ ID NO: 51608 - RNA, 19 nt, synthetic construct
  misc_feature 1..19: note = siRNA sense sequence
  source 1..19: mol_type = other RNA
atcacatagcgtccttctg

SEQ ID NO: 51609 - RNA, 19 nt, synthetic construct
  misc_feature 1..19: note = siRNA antisense sequence
  source 1..19: mol_type = other RNA
cagaaggacgctatgtgat

SEQ ID NO: 51610 - RNA, 19 nt, synthetic construct
  misc_feature 1..19: note = siRNA sense sequence
  source 1..19: mol_type = other RNA
tcacatagcgtccttctgt

SEQ ID NO: 51611 - RNA, 19 nt, synthetic construct
  misc_feature 1..19: note = siRNA antisense sequence
  source 1..19: mol_type = other RNA
acagaaggacgctatgtga

SEQ ID NO: 51612 - RNA, 19 nt, synthetic construct
  misc_feature 1..19: note = siRNA sense sequence
  source 1..19: mol_type = other RNA
cacatagcgtccttctgtc

SEQ ID NO: 51613 - RNA, 19 nt, synthetic construct
  misc_feature 1..19: note = siRNA antisense sequence
  source 1..19: mol_type = other RNA
gacagaaggacgctatgtg

SEQ ID NO: 51614 - RNA, 19 nt, synthetic construct
  misc_feature 1..19: note = siRNA sense sequence
  source 1..19: mol_type = other RNA
acatagcgtccttctgtct

SEQ ID NO: 51615 - RNA, 19 nt, synthetic construct
  misc_feature 1..19: note = siRNA antisense sequence
  source 1..19: mol_type = other RNA
agacagaaggacgctatgt

SEQ ID NO: 51616 - RNA, 19 nt, synthetic construct
  misc_feature 1..19: note = siRNA sense sequence
  source 1..19: mol_type = other RNA
catagcgtccttctgtctg

SEQ ID NO: 51617 - RNA, 19 nt, synthetic construct
  misc_feature 1..19: note = siRNA antisense sequence
  source 1..19: mol_type = other RNA
cagacagaaggacgctatg

SEQ ID NO: 51618 - RNA, 19 nt, synthetic construct
  misc_feature 1..19: note = siRNA sense sequence
  source 1..19: mol_type = other RNA
atagcgtccttctgtctgt

SEQ ID NO: 51619 - RNA, 19 nt, synthetic construct
  misc_feature 1..19: note = siRNA antisense sequence
  source 1..19: mol_type = other RNA
acagacagaaggacgctat

SEQ ID NO: 51620 - RNA, 19 nt, synthetic construct
  misc_feature 1..19: note = siRNA sense sequence
  source 1..19: mol_type = other RNA
tagcgtccttctgtctgtt

SEQ ID NO: 51621 - RNA, 19 nt, synthetic construct
  misc_feature 1..19: note = siRNA antisense sequence
  source 1..19: mol_type = other RNA
aacagacagaaggacgcta

SEQ ID NO: 51622 - RNA, 19 nt, synthetic construct
  misc_feature 1..19: note = siRNA sense sequence
  source 1..19: mol_type = other RNA
agcgtccttctgtctgttc

SEQ ID NO: 51623 - RNA, 19 nt, synthetic construct
  misc_feature 1..19: note = siRNA antisense sequence
  source 1..19: mol_type = other RNA
gaacagacagaaggacgct

SEQ ID NO: 51624 - RNA, 19 nt, synthetic construct
  misc_feature 1..19: note = siRNA sense sequence
  source 1..19: mol_type = other RNA
tctgtctgttctcagctga

SEQ ID NO: 51625 - RNA, 19 nt, synthetic construct
  misc_feature 1..19: note = siRNA antisense sequence
  source 1..19: mol_type = other RNA
tcagctgagaacagacaga

SEQ ID NO: 51626 - RNA, 19 nt, synthetic construct
  misc_feature 1..19: note = siRNA sense sequence
  source 1..19: mol_type = other RNA
ctgtctgttctcagctgaa

SEQ ID NO: 51627 - RNA, 19 nt, synthetic construct
  misc_feature 1..19: note = siRNA antisense sequence
  source 1..19: mol_type = other RNA
ttcagctgagaacagacag

SEQ ID NO: 51628 - RNA, 19 nt, synthetic construct
  misc_feature 1..19: note = siRNA sense sequence
  source 1..19: mol_type = other RNA
tgtctgttctcagctgaag

SEQ ID NO: 51629 - RNA, 19 nt, synthetic construct
  misc_feature 1..19: note = siRNA antisense sequence
  source 1..19: mol_type = other RNA
cttcagctgagaacagaca

SEQ ID NO: 51630 - RNA, 19 nt, synthetic construct
  misc_feature 1..19: note = siRNA sense sequence
  source 1..19: mol_type = other RNA
tgttctcagctgaaggcag

SEQ ID NO: 51631 - RNA, 19 nt, synthetic construct
  misc_feature 1..19: note = siRNA antisense sequence
  source 1..19: mol_type = other RNA
ctgccttcagctgagaaca

SEQ ID NO: 51632 - RNA, 19 nt, synthetic construct
  misc_feature 1..19: note = siRNA sense sequence
  source 1..19: mol_type = other RNA
aaaataatgcaggtttccg

SEQ ID NO: 51633 - RNA, 19 nt, synthetic construct
  misc_feature 1..19: note = siRNA antisense sequence
  source 1..19: mol_type = other RNA
cggaaacctgcattatttt

SEQ ID NO: 51634 - RNA, 19 nt, synthetic construct
  misc_feature 1..19: note = siRNA sense sequence
  source 1..19: mol_type = other RNA
aaataatgcaggtttccgt

SEQ ID NO: 51635 - RNA, 19 nt, synthetic construct
  misc_feature 1..19: note = siRNA antisense sequence
  source 1..19: mol_type = other RNA
acggaaacctgcattattt

SEQ ID NO: 51636 - RNA, 19 nt, synthetic construct
  misc_feature 1..19: note = siRNA sense sequence
  source 1..19: mol_type = other RNA
aatgcaggtttccgttgct

SEQ ID NO: 51637 - RNA, 19 nt, synthetic construct
  misc_feature 1..19: note = siRNA antisense sequence
  source 1..19: mol_type = other RNA
agcaacggaaacctgcatt

SEQ ID NO: 51638 - RNA, 19 nt, synthetic construct
  misc_feature 1..19: note = siRNA sense sequence
  source 1..19: mol_type = other RNA
atgcaggtttccgttgctg

SEQ ID NO: 51639 - RNA, 19 nt, synthetic construct
  misc_feature 1..19: note = siRNA antisense sequence
  source 1..19: mol_type = other RNA
cagcaacggaaacctgcat

SEQ ID NO: 51640 - RNA, 19 nt, synthetic construct
  misc_feature 1..19: note = siRNA sense sequence
  source 1..19: mol_type = other RNA
aggtttccgttgctgcatt

SEQ ID NO: 51641 - RNA, 19 nt, synthetic construct
  misc_feature 1..19: note = siRNA antisense sequence
  source 1..19: mol_type = other RNA
aatgcagcaacggaaacct

SEQ ID NO: 51642 - RNA, 19 nt, synthetic construct
  misc_feature 1..19: note = siRNA sense sequence
  source 1..19: mol_type = other RNA
ggtttccgttgctgcattc

SEQ ID NO: 51643 - RNA, 19 nt, synthetic construct
  misc_feature 1..19: note = siRNA antisense sequence
  source 1..19: mol_type = other RNA
gaatgcagcaacggaaacc

SEQ ID NO: 51644 - RNA, 19 nt, synthetic construct
  misc_feature 1..19: note = siRNA sense sequence
  source 1..19: mol_type = other RNA
gtttccgttgctgcattct

SEQ ID NO: 51645 - RNA, 19 nt, synthetic construct
  misc_feature 1..19: note = siRNA antisense sequence
  source 1..19: mol_type = other RNA
agaatgcagcaacggaaac

SEQ ID NO: 51646 - RNA, 19 nt, synthetic construct
  misc_feature 1..19: note = siRNA sense sequence
  source 1..19: mol_type = other RNA
tttccgttgctgcattctt

SEQ ID NO: 51647 - RNA, 19 nt, synthetic construct
  misc_feature 1..19: note = siRNA antisense sequence
  source 1..19: mol_type = other RNA
aagaatgcagcaacggaaa

SEQ ID NO: 51648 - RNA, 19 nt, synthetic construct
  misc_feature 1..19: note = siRNA sense sequence
  source 1..19: mol_type = other RNA
ttccgttgctgcattctta

SEQ ID NO: 51649 - RNA, 19 nt, synthetic construct
  misc_feature 1..19: note = siRNA antisense sequence
  source 1..19: mol_type = other RNA
taagaatgcagcaacggaa

SEQ ID NO: 51650 - RNA, 19 nt, synthetic construct
  misc_feature 1..19: note = siRNA sense sequence
  source 1..19: mol_type = other RNA
tccgttgctgcattcttat

SEQ ID NO: 51651 - RNA, 19 nt, synthetic construct
  misc_feature 1..19: note = siRNA antisense sequence
  source 1..19: mol_type = other RNA
ataagaatgcagcaacgga

SEQ ID NO: 51652 - RNA, 19 nt, synthetic construct
  misc_feature 1..19: note = siRNA sense sequence
  source 1..19: mol_type = other RNA
ccgttgctgcattcttatt

SEQ ID NO: 51653 - RNA, 19 nt, synthetic construct
  misc_feature 1..19: note = siRNA antisense sequence
  source 1..19: mol_type = other RNA
aataagaatgcagcaacgg

SEQ ID NO: 51654 - RNA, 19 nt, synthetic construct
  misc_feature 1..19: note = siRNA sense sequence
  source 1..19: mol_type = other RNA
cgttgctgcattcttattg

SEQ ID NO: 51655 - RNA, 19 nt, synthetic construct
  misc_feature 1..19: note = siRNA antisense sequence
  source 1..19: mol_type = other RNA
caataagaatgcagcaacg

SEQ ID NO: 51656 - RNA, 19 nt, synthetic construct
  misc_feature 1..19: note = siRNA sense sequence
  source 1..19: mol_type = other RNA
gttgctgcattcttattga

SEQ ID NO: 51657 - RNA, 19 nt, synthetic construct
  misc_feature 1..19: note = siRNA antisense sequence
  source 1..19: mol_type = other RNA
tcaataagaatgcagcaac

SEQ ID NO: 51658 - RNA, 19 nt, synthetic construct
  misc_feature 1..19: note = siRNA sense sequence
  source 1..19: mol_type = other RNA
ttgctgcattcttattgat

SEQ ID NO: 51659 - RNA, 19 nt, synthetic construct
  misc_feature 1..19: note = siRNA antisense sequence
  source 1..19: mol_type = other RNA
atcaataagaatgcagcaa

SEQ ID NO: 51660 - RNA, 19 nt, synthetic construct
  misc_feature 1..19: note = siRNA sense sequence
  source 1..19: mol_type = other RNA
ctgcattcttattgatctt

SEQ ID NO: 51661 - RNA, 19 nt, synthetic construct
  misc_feature 1..19: note = siRNA antisense sequence
  source 1..19: mol_type = other RNA
aagatcaataagaatgcag

SEQ ID NO: 51662 - RNA, 19 nt, synthetic construct
  misc_feature 1..19: note = siRNA sense sequence
  source 1..19: mol_type = other RNA
tgcattcttattgatcttg

SEQ ID NO: 51663 - RNA, 19 nt, synthetic construct
  misc_feature 1..19: note = siRNA antisense sequence
  source 1..19: mol_type = other RNA
caagatcaataagaatgca

SEQ ID NO: 51664 - RNA, 19 nt, synthetic construct
  misc_feature 1..19: note = siRNA sense sequence
  source 1..19: mol_type = other RNA
gcattcttattgatcttgc

SEQ ID NO: 51665 - RNA, 19 nt, synthetic construct
  misc_feature 1..19: note = siRNA antisense sequence
  source 1..19: mol_type = other RNA
gcaagatcaataagaatgc

SEQ ID NO: 51666 - RNA, 19 nt, synthetic construct
  misc_feature 1..19: note = siRNA sense sequence
  source 1..19: mol_type = other RNA
cattcttattgatcttgca

SEQ ID NO: 51667 - RNA, 19 nt, synthetic construct
  misc_feature 1..19: note = siRNA antisense sequence
  source 1..19: mol_type = other RNA
tgcaagatcaataagaatg

SEQ ID NO: 51668 - RNA, 19 nt, synthetic construct
  misc_feature 1..19: note = siRNA sense sequence
  source 1..19: mol_type = other RNA
attcttattgatcttgcag

SEQ ID NO: 51669 - RNA, 19 nt, synthetic construct
  misc_feature 1..19: note = siRNA antisense sequence
  source 1..19: mol_type = other RNA
ctgcaagatcaataagaat

SEQ ID NO: 51670 - RNA, 19 nt, synthetic construct
  misc_feature 1..19: note = siRNA sense sequence
  source 1..19: mol_type = other RNA
ttcttattgatcttgcaga

SEQ ID NO: 51671 - RNA, 19 nt, synthetic construct
  misc_feature 1..19: note = siRNA antisense sequence
  source 1..19: mol_type = other RNA
tctgcaagatcaataagaa

SEQ ID NO: 51672 - RNA, 19 nt, synthetic construct
  misc_feature 1..19: note = siRNA sense sequence
  source 1..19: mol_type = other RNA
agttaaaatgcatctcagt

SEQ ID NO: 51673 - RNA, 19 nt, synthetic construct
  misc_feature 1..19: note = siRNA antisense sequence
  source 1..19: mol_type = other RNA
actgagatgcattttaact

SEQ ID NO: 51674 - RNA, 19 nt, synthetic construct
  misc_feature 1..19: note = siRNA sense sequence
  source 1..19: mol_type = other RNA
gttaaaatgcatctcagtc

SEQ ID NO: 51675 - RNA, 19 nt, synthetic construct
  misc_feature 1..19: note = siRNA antisense sequence
  source 1..19: mol_type = other RNA
gactgagatgcattttaac

SEQ ID NO: 51676 - RNA, 19 nt, synthetic construct
  misc_feature 1..19: note = siRNA sense sequence
  source 1..19: mol_type = other RNA
ttaaaatgcatctcagtca

SEQ ID NO: 51677 - RNA, 19 nt, synthetic construct
  misc_feature 1..19: note = siRNA antisense sequence
  source 1..19: mol_type = other RNA
tgactgagatgcattttaa

SEQ ID NO: 51678 - RNA, 19 nt, synthetic construct
  misc_feature 1..19: note = siRNA sense sequence
  source 1..19: mol_type = other RNA
taaaatgcatctcagtcat

SEQ ID NO: 51679 - RNA, 19 nt, synthetic construct
  misc_feature 1..19: note = siRNA antisense sequence
  source 1..19: mol_type = other RNA
atgactgagatgcatttta

SEQ ID NO: 51680 - RNA, 19 nt, synthetic construct
  misc_feature 1..19: note = siRNA sense sequence
  source 1..19: mol_type = other RNA
atgcatctcagtcatttaa

SEQ ID NO: 51681 - RNA, 19 nt, synthetic construct
  misc_feature 1..19: note = siRNA antisense sequence
  source 1..19: mol_type = other RNA
ttaaatgactgagatgcat

SEQ ID NO: 51682 - RNA, 19 nt, synthetic construct
  misc_feature 1..19: note = siRNA sense sequence
  source 1..19: mol_type = other RNA
gcatctcagtcatttaaat

SEQ ID NO: 51683 - RNA, 19 nt, synthetic construct
  misc_feature 1..19: note = siRNA antisense sequence
  source 1..19: mol_type = other RNA
atttaaatgactgagatgc

SEQ ID NO: 51684 - RNA, 19 nt, synthetic construct
  misc_feature 1..19: note = siRNA sense sequence
  source 1..19: mol_type = other RNA
caaaggtaattactgatgt

SEQ ID NO: 51685 - RNA, 19 nt, synthetic construct
  misc_feature 1..19: note = siRNA antisense sequence
  source 1..19: mol_type = other RNA
acatcagtaattacctttg

SEQ ID NO: 51686 - RNA, 19 nt, synthetic construct
  misc_feature 1..19: note = siRNA sense sequence
  source 1..19: mol_type = other RNA
ttattctcttgcctcaacg

SEQ ID NO: 51687 - RNA, 19 nt, synthetic construct
  misc_feature 1..19: note = siRNA antisense sequence
  source 1..19: mol_type = other RNA
cgttgaggcaagagaataa

SEQ ID NO: 51688 - RNA, 19 nt, synthetic construct
  misc_feature 1..19: note = siRNA sense sequence
  source 1..19: mol_type = other RNA
tattctcttgcctcaacga

SEQ ID NO: 51689 - RNA, 19 nt, synthetic construct
  misc_feature 1..19: note = siRNA antisense sequence
  source 1..19: mol_type = other RNA
tcgttgaggcaagagaata

SEQ ID NO: 51690 - RNA, 19 nt, synthetic construct
  misc_feature 1..19: note = siRNA sense sequence
  source 1..19: mol_type = other RNA
attctcttgcctcaacgaa

SEQ ID NO: 51691 - RNA, 19 nt, synthetic construct
  misc_feature 1..19: note = siRNA antisense sequence
  source 1..19: mol_type = other RNA
ttcgttgaggcaagagaat

SEQ ID NO: 51692 - RNA, 19 nt, synthetic construct
  misc_feature 1..19: note = siRNA sense sequence
  source 1..19: mol_type = other RNA
agggcagactgactttctt

SEQ ID NO: 51693 - RNA, 19 nt, synthetic construct
  misc_feature 1..19: note = siRNA antisense sequence
  source 1..19: mol_type = other RNA
aagaaagtcagtctgccct

SEQ ID NO: 51694 - RNA, 19 nt, synthetic construct
  misc_feature 1..19: note = siRNA sense sequence
  source 1..19: mol_type = other RNA
ttttaacttatctgcaagg

SEQ ID NO: 51695 - RNA, 19 nt, synthetic construct
  misc_feature 1..19: note = siRNA antisense sequence
  source 1..19: mol_type = other RNA
ccttgcagataagttaaaa

SEQ ID NO: 51696 - RNA, 19 nt, synthetic construct
  misc_feature 1..19: note = siRNA sense sequence
  source 1..19: mol_type = other RNA
tttaacttatctgcaaggc

SEQ ID NO: 51697 - RNA, 19 nt, synthetic construct
  misc_feature 1..19: note = siRNA antisense sequence
  source 1..19: mol_type = other RNA
gccttgcagataagttaaa

SEQ ID NO: 51698 - RNA, 19 nt, synthetic construct
  misc_feature 1..19: note = siRNA sense sequence
  source 1..19: mol_type = other RNA
ttaacttatctgcaaggcc

SEQ ID NO: 51699 - RNA, 19 nt, synthetic construct
  misc_feature 1..19: note = siRNA antisense sequence
  source 1..19: mol_type = other RNA
ggccttgcagataagttaa

SEQ ID NO: 51700 - RNA, 19 nt, synthetic construct
  misc_feature 1..19: note = siRNA sense sequence
  source 1..19: mol_type = other RNA
taacttatctgcaaggcca

SEQ ID NO: 51701 - RNA, 19 nt, synthetic construct
  misc_feature 1..19: note = siRNA antisense sequence
  source 1..19: mol_type = other RNA
tggccttgcagataagtta

SEQ ID NO: 51702 - RNA, 19 nt, synthetic construct
  misc_feature 1..19: note = siRNA sense sequence
  source 1..19: mol_type = other RNA
aacttatctgcaaggccaa

SEQ ID NO: 51703 - RNA, 19 nt, synthetic construct
  misc_feature 1..19: note = siRNA antisense sequence
  source 1..19: mol_type = other RNA
ttggccttgcagataagtt

SEQ ID NO: 51704 - RNA, 19 nt, synthetic construct
  misc_feature 1..19: note = siRNA sense sequence
  source 1..19: mol_type = other RNA
acttatctgcaaggccaaa

SEQ ID NO: 51705 - RNA, 19 nt, synthetic construct
  misc_feature 1..19: note = siRNA antisense sequence
  source 1..19: mol_type = other RNA
tttggccttgcagataagt

SEQ ID NO: 51706 - RNA, 19 nt, synthetic construct
  misc_feature 1..19: note = siRNA sense sequence
  source 1..19: mol_type = other RNA
cttatctgcaaggccaaat

SEQ ID NO: 51707 - RNA, 19 nt, synthetic construct
  misc_feature 1..19: note = siRNA antisense sequence
  source 1..19: mol_type = other RNA
atttggccttgcagataag

SEQ ID NO: 51708 - RNA, 19 nt, synthetic construct
  misc_feature 1..19: note = siRNA sense sequence
  source 1..19: mol_type = other RNA
ttatctgcaaggccaaata

SEQ ID NO: 51709 - RNA, 19 nt, synthetic construct
  misc_feature 1..19: note = siRNA antisense sequence
  source 1..19: mol_type = other RNA
tatttggccttgcagataa

SEQ ID NO: 51710 - RNA, 19 nt, synthetic construct
  misc_feature 1..19: note = siRNA sense sequence
  source 1..19: mol_type = other RNA
tatctgcaaggccaaataa

SEQ ID NO: 51711 - RNA, 19 nt, synthetic construct
  misc_feature 1..19: note = siRNA antisense sequence
  source 1..19: mol_type = other RNA
ttatttggccttgcagata

SEQ ID NO: 51712 - RNA, 19 nt, synthetic construct
  misc_feature 1..19: note = siRNA sense sequence
  source 1..19: mol_type = other RNA
atctgcaaggccaaataaa

SEQ ID NO: 51713 - RNA, 19 nt, synthetic construct
  misc_feature 1..19: note = siRNA antisense sequence
  source 1..19: mol_type = other RNA
tttatttggccttgcagat

SEQ ID NO: 51714 - RNA, 19 nt, synthetic construct
  misc_feature 1..19: note = siRNA sense sequence
  source 1..19: mol_type = other RNA
tctgcaaggccaaataaat

SEQ ID NO: 51715 - RNA, 19 nt, synthetic construct
  misc_feature 1..19: note = siRNA antisense sequence
  source 1..19: mol_type = other RNA
atttatttggccttgcaga

SEQ ID NO: 51716 - RNA, 19 nt, synthetic construct
  misc_feature 1..19: note = siRNA sense sequence
  source 1..19: mol_type = other RNA
ctgcaaggccaaataaatc

SEQ ID NO: 51717 - RNA, 19 nt, synthetic construct
  misc_feature 1..19: note = siRNA antisense sequence
  source 1..19: mol_type = other RNA
gatttatttggccttgcag

SEQ ID NO: 51718 - RNA, 19 nt, synthetic construct
  misc_feature 1..19: note = siRNA sense sequence
  source 1..19: mol_type = other RNA
tgcaaggccaaataaatca

SEQ ID NO: 51719 - RNA, 19 nt, synthetic construct
  misc_feature 1..19: note = siRNA antisense sequence
  source 1..19: mol_type = other RNA
tgatttatttggccttgca

SEQ ID NO: 51720 - RNA, 19 nt, synthetic construct
  misc_feature 1..19: note = siRNA sense sequence
  source 1..19: mol_type = other RNA
aggccaaataaatcagtaa

SEQ ID NO: 51721 - RNA, 19 nt, synthetic construct
  misc_feature 1..19: note = siRNA antisense sequence
  source 1..19: mol_type = other RNA
ttactgatttatttggcct

SEQ ID NO: 51722 - RNA, 19 nt, synthetic construct
  misc_feature 1..19: note = siRNA sense sequence
  source 1..19: mol_type = other RNA
ggccaaataaatcagtaac

SEQ ID NO: 51723 - RNA, 19 nt, synthetic construct
  misc_feature 1..19: note = siRNA antisense sequence
  source 1..19: mol_type = other RNA
gttactgatttatttggcc

SEQ ID NO: 51724 - RNA, 19 nt, synthetic construct
  misc_feature 1..19: note = siRNA sense sequence
  source 1..19: mol_type = other RNA
ccctagtgcaagcaaataa

SEQ ID NO: 51725 - RNA, 19 nt, synthetic construct
  misc_feature 1..19: note = siRNA antisense sequence
  source 1..19: mol_type = other RNA
ttatttgcttgcactaggg

SEQ ID NO: 51726 - RNA, 19 nt, synthetic construct
  misc_feature 1..19: note = siRNA sense sequence
  source 1..19: mol_type = other RNA
cctagtgcaagcaaataaa

SEQ ID NO: 51727 - RNA, 19 nt, synthetic construct
  misc_feature 1..19: note = siRNA antisense sequence
  source 1..19: mol_type = other RNA
tttatttgcttgcactagg

SEQ ID NO: 51728 - RNA, 19 nt, synthetic construct
  misc_feature 1..19: note = siRNA sense sequence
  source 1..19: mol_type = other RNA
ctagtgcaagcaaataaat

SEQ ID NO: 51729 - RNA, 19 nt, synthetic construct
  misc_feature 1..19: note = siRNA antisense sequence
  source 1..19: mol_type = other RNA
atttatttgcttgcactag

SEQ ID NO: 51730 - RNA, 19 nt, synthetic construct
  misc_feature 1..19: note = siRNA sense sequence
  source 1..19: mol_type = other RNA
tagtgcaagcaaataaatc

SEQ ID NO: 51731 - RNA, 19 nt, synthetic construct
  misc_feature 1..19: note = siRNA antisense sequence
  source 1..19: mol_type = other RNA
gatttatttgcttgcacta

SEQ ID NO: 51732 - RNA, 19 nt, synthetic construct
  misc_feature 1..19: note = siRNA sense sequence
  source 1..19: mol_type = other RNA
agtgcaagcaaataaatca

SEQ ID NO: 51733 - RNA, 19 nt, synthetic construct
  misc_feature 1..19: note = siRNA antisense sequence
  source 1..19: mol_type = other RNA
tgatttatttgcttgcact

SEQ ID NO: 51734 - RNA, 19 nt, synthetic construct
  misc_feature 1..19: note = siRNA sense sequence
  source 1..19: mol_type = other RNA
gtgcaagcaaataaatcaa

SEQ ID NO: 51735 - RNA, 19 nt, synthetic construct
  misc_feature 1..19: note = siRNA antisense sequence
  source 1..19: mol_type = other RNA
ttgatttatttgcttgcac

SEQ ID NO: 51736 - RNA, 19 nt, synthetic construct
  misc_feature 1..19: note = siRNA sense sequence
  source 1..19: mol_type = other RNA
tgcaagcaaataaatcaac

SEQ ID NO: 51737 - RNA, 19 nt, synthetic construct
  misc_feature 1..19: note = siRNA antisense sequence
  source 1..19: mol_type = other RNA
gttgatttatttgcttgca

SEQ ID NO: 51738 - RNA, 19 nt, synthetic construct
  misc_feature 1..19: note = siRNA sense sequence
  source 1..19: mol_type = other RNA
acattccatcaattccctc

SEQ ID NO: 51739 - RNA, 19 nt, synthetic construct
  misc_feature 1..19: note = siRNA antisense sequence
  source 1..19: mol_type = other RNA
gagggaattgatggaatgt

SEQ ID NO: 51740 - RNA, 19 nt, synthetic construct
  misc_feature 1..19: note = siRNA sense sequence
  source 1..19: mol_type = other RNA
cattccatcaattccctca

SEQ ID NO: 51741 - RNA, 19 nt, synthetic construct
  misc_feature 1..19: note = siRNA antisense sequence
  source 1..19: mol_type = other RNA
tgagggaattgatggaatg

SEQ ID NO: 51742 - RNA, 19 nt, synthetic construct
  misc_feature 1..19: note = siRNA sense sequence
  source 1..19: mol_type = other RNA
attccatcaattccctcag

SEQ ID NO: 51743 - RNA, 19 nt, synthetic construct
  misc_feature 1..19: note = siRNA antisense sequence
  source 1..19: mol_type = other RNA
ctgagggaattgatggaat

SEQ ID NO: 51744 - RNA, 19 nt, synthetic construct
  misc_feature 1..19: note = siRNA sense sequence
  source 1..19: mol_type = other RNA
ttccatcaattccctcagg

SEQ ID NO: 51745 - RNA, 19 nt, synthetic construct
  misc_feature 1..19: note = siRNA antisense sequence
  source 1..19: mol_type = other RNA
cctgagggaattgatggaa

SEQ ID NO: 51746 - RNA, 19 nt, synthetic construct
  misc_feature 1..19: note = siRNA sense sequence
  source 1..19: mol_type = other RNA
aaattgtggctttgggttt

SEQ ID NO: 51747 - RNA, 19 nt, synthetic construct
  misc_feature 1..19: note = siRNA antisense sequence
  source 1..19: mol_type = other RNA
aaacccaaagccacaattt

SEQ ID NO: 51748 - RNA, 19 nt, synthetic construct
  misc_feature 1..19: note = siRNA sense sequence
  source 1..19: mol_type = other RNA
agtagcagactgccatgga

SEQ ID NO: 51749 - RNA, 19 nt, synthetic construct
  misc_feature 1..19: note = siRNA antisense sequence
  source 1..19: mol_type = other RNA
tccatggcagtctgctact

SEQ ID NO: 51750 - RNA, 19 nt, synthetic construct
  misc_feature 1..19: note = siRNA sense sequence
  source 1..19: mol_type = other RNA
gtagcagactgccatggaa

SEQ ID NO: 51751 - RNA, 19 nt, synthetic construct
  misc_feature 1..19: note = siRNA antisense sequence
  source 1..19: mol_type = other RNA
ttccatggcagtctgctac

SEQ ID NO: 51752 - RNA, 19 nt, synthetic construct
  misc_feature 1..19: note = siRNA sense sequence
  source 1..19: mol_type = other RNA
tagcagactgccatggaat

SEQ ID NO: 51753 - RNA, 19 nt, synthetic construct
  misc_feature 1..19: note = siRNA antisense sequence
  source 1..19: mol_type = other RNA
attccatggcagtctgcta

SEQ ID NO: 51754 - RNA, 19 nt, synthetic construct
  misc_feature 1..19: note = siRNA sense sequence
  source 1..19: mol_type = other RNA
agcagactgccatggaatg

SEQ ID NO: 51755 - RNA, 19 nt, synthetic construct
  misc_feature 1..19: note = siRNA antisense sequence
  source 1..19: mol_type = other RNA
cattccatggcagtctgct

SEQ ID NO: 51756 - RNA, 19 nt, synthetic construct
  misc_feature 1..19: note = siRNA sense sequence
  source 1..19: mol_type = other RNA
cagactgccatggaatgct

SEQ ID NO: 51757 - RNA, 19 nt, synthetic construct
  misc_feature 1..19: note = siRNA antisense sequence
  source 1..19: mol_type = other RNA
agcattccatggcagtctg

SEQ ID NO: 51758 - RNA, 19 nt, synthetic construct
  misc_feature 1..19: note = siRNA sense sequence
  source 1..19: mol_type = other RNA
agactgccatggaatgctc

SEQ ID NO: 51759 - RNA, 19 nt, synthetic construct
  misc_feature 1..19: note = siRNA antisense sequence
  source 1..19: mol_type = other RNA
gagcattccatggcagtct

SEQ ID NO: 51760 - RNA, 19 nt, synthetic construct
  misc_feature 1..19: note = siRNA sense sequence
  source 1..19: mol_type = other RNA
gactgccatggaatgctct

SEQ ID NO: 51761 - RNA, 19 nt, synthetic construct
  misc_feature 1..19: note = siRNA antisense sequence
  source 1..19: mol_type = other RNA
agagcattccatggcagtc

SEQ ID NO: 51762 - RNA, 19 nt, synthetic construct
  misc_feature 1..19: note = siRNA sense sequence
  source 1..19: mol_type = other RNA
actgccatggaatgctctg

SEQ ID NO: 51763 - RNA, 19 nt, synthetic construct
  misc_feature 1..19: note = siRNA antisense sequence
  source 1..19: mol_type = other RNA
cagagcattccatggcagt

SEQ ID NO: 51764 - RNA, 19 nt, synthetic construct
  misc_feature 1..19: note = siRNA sense sequence
  source 1..19: mol_type = other RNA
ctgccatggaatgctctga

SEQ ID NO: 51765 - RNA, 19 nt, synthetic construct
  misc_feature 1..19: note = siRNA antisense sequence
  source 1..19: mol_type = other RNA
tcagagcattccatggcag

SEQ ID NO: 51766 - RNA, 19 nt, synthetic construct
  misc_feature 1..19: note = siRNA sense sequence
  source 1..19: mol_type = other RNA
tgccatggaatgctctgaa

SEQ ID NO: 51767 - RNA, 19 nt, synthetic construct
  misc_feature 1..19: note = siRNA antisense sequence
  source 1..19: mol_type = other RNA
ttcagagcattccatggca

SEQ ID NO: 51768 - RNA, 19 nt, synthetic construct
  misc_feature 1..19: note = siRNA sense sequence
  source 1..19: mol_type = other RNA
tggaatgctctgaattatc

SEQ ID NO: 51769 - RNA, 19 nt, synthetic construct
  misc_feature 1..19: note = siRNA antisense sequence
  source 1..19: mol_type = other RNA
gataattcagagcattcca

SEQ ID NO: 51770 - RNA, 19 nt, synthetic construct
  misc_feature 1..19: note = siRNA sense sequence
  source 1..19: mol_type = other RNA
ggaatgctctgaattatct

SEQ ID NO: 51771 - RNA, 19 nt, synthetic construct
  misc_feature 1..19: note = siRNA antisense sequence
  source 1..19: mol_type = other RNA
agataattcagagcattcc

SEQ ID NO: 51772 - RNA, 19 nt, synthetic construct
  misc_feature 1..19: note = siRNA sense sequence
  source 1..19: mol_type = other RNA
gaatgctctgaattatctc

SEQ ID NO: 51773 - RNA, 19 nt, synthetic construct
  misc_feature 1..19: note = siRNA antisense sequence
  source 1..19: mol_type = other RNA
gagataattcagagcattc

SEQ ID NO: 51774 - RNA, 19 nt, synthetic construct
  misc_feature 1..19: note = siRNA sense sequence
  source 1..19: mol_type = other RNA
aatgctctgaattatctct

SEQ ID NO: 51775 - RNA, 19 nt, synthetic construct
  misc_feature 1..19: note = siRNA antisense sequence
  source 1..19: mol_type = other RNA
agagataattcagagcatt

SEQ ID NO: 51776 - RNA, 19 nt, synthetic construct
  misc_feature 1..19: note = siRNA sense sequence
  source 1..19: mol_type = other RNA
atgctctgaattatctctg

SEQ ID NO: 51777 - RNA, 19 nt, synthetic construct
  misc_feature 1..19: note = siRNA antisense sequence
  source 1..19: mol_type = other RNA
cagagataattcagagcat

SEQ ID NO: 51778 - RNA, 19 nt, synthetic construct
  misc_feature 1..19: note = siRNA sense sequence
  source 1..19: mol_type = other RNA
ttatctctgcatttcagta

SEQ ID NO: 51779 - RNA, 19 nt, synthetic construct
  misc_feature 1..19: note = siRNA antisense sequence
  source 1..19: mol_type = other RNA
tactgaaatgcagagataa

SEQ ID NO: 51780 - RNA, 19 nt, synthetic construct
  misc_feature 1..19: note = siRNA sense sequence
  source 1..19: mol_type = other RNA
tatctctgcatttcagtaa

SEQ ID NO: 51781 - RNA, 19 nt, synthetic construct
  misc_feature 1..19: note = siRNA antisense sequence
  source 1..19: mol_type = other RNA
ttactgaaatgcagagata

SEQ ID NO: 51782 - RNA, 19 nt, synthetic construct
  misc_feature 1..19: note = siRNA sense sequence
  source 1..19: mol_type = other RNA
tctctgcatttcagtaaag

SEQ ID NO: 51783 - RNA, 19 nt, synthetic construct
  misc_feature 1..19: note = siRNA antisense sequence
  source 1..19: mol_type = other RNA
ctttactgaaatgcagaga

SEQ ID NO: 51784 - RNA, 19 nt, synthetic construct
  misc_feature 1..19: note = siRNA sense sequence
  source 1..19: mol_type = other RNA
tcagtaaagagcttcaaaa

SEQ ID NO: 51785 - RNA, 19 nt, synthetic construct
  misc_feature 1..19: note = siRNA antisense sequence
  source 1..19: mol_type = other RNA
ttttgaagctctttactga

SEQ ID NO: 51786 - RNA, 19 nt, synthetic construct
  misc_feature 1..19: note = siRNA sense sequence
  source 1..19: mol_type = other RNA
cagtaaagagcttcaaaat

SEQ ID NO: 51787 - RNA, 19 nt, synthetic construct
  misc_feature 1..19: note = siRNA antisense sequence
  source 1..19: mol_type = other RNA
attttgaagctctttactg

SEQ ID NO: 51788 - RNA, 19 nt, synthetic construct
  misc_feature 1..19: note = siRNA sense sequence
  source 1..19: mol_type = other RNA
agtaaagagcttcaaaatg

SEQ ID NO: 51789 - RNA, 19 nt, synthetic construct
  misc_feature 1..19: note = siRNA antisense sequence
  source 1..19: mol_type = other RNA
cattttgaagctctttact

SEQ ID NO: 51790 - RNA, 19 nt, synthetic construct
  misc_feature 1..19: note = siRNA sense sequence
  source 1..19: mol_type = other RNA
gtaaagagcttcaaaatgg

SEQ ID NO: 51791 - RNA, 19 nt, synthetic construct
  misc_feature 1..19: note = siRNA antisense sequence
  source 1..19: mol_type = other RNA
ccattttgaagctctttac

SEQ ID NO: 51792 - RNA, 19 nt, synthetic construct
  misc_feature 1..19: note = siRNA sense sequence
  source 1..19: mol_type = other RNA
taaagagcttcaaaatggg

SEQ ID NO: 51793 - RNA, 19 nt, synthetic construct
  misc_feature 1..19: note = siRNA antisense sequence
  source 1..19: mol_type = other RNA
cccattttgaagctcttta

SEQ ID NO: 51794 - RNA, 19 nt, synthetic construct
  misc_feature 1..19: note = siRNA sense sequence
  source 1..19: mol_type = other RNA
aaagagcttcaaaatgggt

SEQ ID NO: 51795 - RNA, 19 nt, synthetic construct
  misc_feature 1..19: note = siRNA antisense sequence
  source 1..19: mol_type = other RNA
acccattttgaagctcttt

SEQ ID NO: 51796 - RNA, 19 nt, synthetic construct
  misc_feature 1..19: note = siRNA sense sequence
  source 1..19: mol_type = other RNA
aagagcttcaaaatgggta

SEQ ID NO: 51797 - RNA, 19 nt, synthetic construct
  misc_feature 1..19: note = siRNA antisense sequence
  source 1..19: mol_type = other RNA
tacccattttgaagctctt

SEQ ID NO: 51798 - RNA, 19 nt, synthetic construct
  misc_feature 1..19: note = siRNA sense sequence
  source 1..19: mol_type = other RNA
agagcttcaaaatgggtac

SEQ ID NO: 51799 - RNA, 19 nt, synthetic construct
  misc_feature 1..19: note = siRNA antisense sequence
  source 1..19: mol_type = other RNA
gtacccattttgaagctct

SEQ ID NO: 51800 - RNA, 19 nt, synthetic construct
  misc_feature 1..19: note = siRNA sense sequence
  source 1..19: mol_type = other RNA
gagcttcaaaatgggtaca

SEQ ID NO: 51801 - RNA, 19 nt, synthetic construct
  misc_feature 1..19: note = siRNA antisense sequence
  source 1..19: mol_type = other RNA
tgtacccattttgaagctc

SEQ ID NO: 51802 - RNA, 19 nt, synthetic construct
  misc_feature 1..19: note = siRNA sense sequence
  source 1..19: mol_type = other RNA
agcttcaaaatgggtacag

SEQ ID NO: 51803 - RNA, 19 nt, synthetic construct
  misc_feature 1..19: note = siRNA antisense sequence
  source 1..19: mol_type = other RNA
ctgtacccattttgaagct

SEQ ID NO: 51804 - RNA, 19 nt, synthetic construct
  misc_feature 1..19: note = siRNA sense sequence
  source 1..19: mol_type = other RNA
tcaaaatgggtacaggatc

SEQ ID NO: 51805 - RNA, 19 nt, synthetic construct
  misc_feature 1..19: note = siRNA antisense sequence
  source 1..19: mol_type = other RNA
gatcctgtacccattttga

SEQ ID NO: 51806 - RNA, 19 nt, synthetic construct
  misc_feature 1..19: note = siRNA sense sequence
  source 1..19: mol_type = other RNA
caaaatgggtacaggatct

SEQ ID NO: 51807 - RNA, 19 nt, synthetic construct
  misc_feature 1..19: note = siRNA antisense sequence
  source 1..19: mol_type = other RNA
agatcctgtacccattttg

SEQ ID NO: 51808 - RNA, 19 nt, synthetic construct
  misc_feature 1..19: note = siRNA sense sequence
  source 1..19: mol_type = other RNA
aaaatgggtacaggatctt

SEQ ID NO: 51809 - RNA, 19 nt, synthetic construct
  misc_feature 1..19: note = siRNA antisense sequence
  source 1..19: mol_type = other RNA
aagatcctgtacccatttt

SEQ ID NO: 51810 - RNA, 19 nt, synthetic construct
  misc_feature 1..19: note = siRNA sense sequence
  source 1..19: mol_type = other RNA
aaatgggtacaggatcttt

SEQ ID NO: 51811 - RNA, 19 nt, synthetic construct
  misc_feature 1..19: note = siRNA antisense sequence
  source 1..19: mol_type = other RNA
aaagatcctgtacccattt

SEQ ID NO: 51812 - RNA, 19 nt, synthetic construct
  misc_feature 1..19: note = siRNA sense sequence
  source 1..19: mol_type = other RNA
aatgggtacaggatctttt

SEQ ID NO: 51813 - RNA, 19 nt, synthetic construct
  misc_feature 1..19: note = siRNA antisense sequence
  source 1..19: mol_type = other RNA
aaaagatcctgtacccatt

SEQ ID NO: 51814 - RNA, 19 nt, synthetic construct
  misc_feature 1..19: note = siRNA sense sequence
  source 1..19: mol_type = other RNA
atgggtacaggatctttta

SEQ ID NO: 51815 - RNA, 19 nt, synthetic construct
  misc_feature 1..19: note = siRNA antisense sequence
  source 1..19: mol_type = other RNA
taaaagatcctgtacccat

SEQ ID NO: 51816 - RNA, 19 nt, synthetic construct
  misc_feature 1..19: note = siRNA sense sequence
  source 1..19: mol_type = other RNA
tgggtacaggatcttttaa

SEQ ID NO: 51817 - RNA, 19 nt, synthetic construct
  misc_feature 1..19: note = siRNA antisense sequence
  source 1..19: mol_type = other RNA
ttaaaagatcctgtaccca

SEQ ID NO: 51818 - RNA, 19 nt, synthetic construct
  misc_feature 1..19: note = siRNA sense sequence
  source 1..19: mol_type = other RNA
gggtacaggatcttttaaa

SEQ ID NO: 51819 - RNA, 19 nt, synthetic construct
  misc_feature 1..19: note = siRNA antisense sequence
  source 1..19: mol_type = other RNA
tttaaaagatcctgtaccc

SEQ ID NO: 51820 - RNA, 19 nt, synthetic construct
  misc_feature 1..19: note = siRNA sense sequence
  source 1..19: mol_type = other RNA
ggtacaggatcttttaaaa

SEQ ID NO: 51821 - RNA, 19 nt, synthetic construct
  misc_feature 1..19: note = siRNA antisense sequence
  source 1..19: mol_type = other RNA
ttttaaaagatcctgtacc

SEQ ID NO: 51822 - RNA, 19 nt, synthetic construct
  misc_feature 1..19: note = siRNA sense sequence
  source 1..19: mol_type = other RNA
aaatgtatgattgaatggc

SEQ ID NO: 51823 - RNA, 19 nt, synthetic construct
  misc_feature 1..19: note = siRNA antisense sequence
  source 1..19: mol_type = other RNA
gccattcaatcatacattt

SEQ ID NO: 51824 - RNA, 19 nt, synthetic construct
  misc_feature 1..19: note = siRNA sense sequence
  source 1..19: mol_type = other RNA
aatgtatgattgaatggca

SEQ ID NO: 51825 - RNA, 19 nt, synthetic construct
  misc_feature 1..19: note = siRNA antisense sequence
  source 1..19: mol_type = other RNA
tgccattcaatcatacatt

SEQ ID NO: 51826 - RNA, 19 nt, synthetic construct
  misc_feature 1..19: note = siRNA sense sequence
  source 1..19: mol_type = other RNA
atgtatgattgaatggcat

SEQ ID NO: 51827 - RNA, 19 nt, synthetic construct
  misc_feature 1..19: note = siRNA antisense sequence
  source 1..19: mol_type = other RNA
atgccattcaatcatacat

SEQ ID NO: 51828 - RNA, 19 nt, synthetic construct
  misc_feature 1..19: note = siRNA sense sequence
  source 1..19: mol_type = other RNA
tatgattgaatggcatgtg

SEQ ID NO: 51829 - RNA, 19 nt, synthetic construct
  misc_feature 1..19: note = siRNA antisense sequence
  source 1..19: mol_type = other RNA
cacatgccattcaatcata

SEQ ID NO: 51830 - RNA, 19 nt, synthetic construct
  misc_feature 1..19: note = siRNA sense sequence
  source 1..19: mol_type = other RNA
atgattgaatggcatgtgg

SEQ ID NO: 51831 - RNA, 19 nt, synthetic construct
  misc_feature 1..19: note = siRNA antisense sequence
  source 1..19: mol_type = other RNA
ccacatgccattcaatcat

SEQ ID NO: 51832 - RNA, 19 nt, synthetic construct
  misc_feature 1..19: note = siRNA sense sequence
  source 1..19: mol_type = other RNA
tgattgaatggcatgtggg

SEQ ID NO: 51833 - RNA, 19 nt, synthetic construct
  misc_feature 1..19: note = siRNA antisense sequence
  source 1..19: mol_type = other RNA
cccacatgccattcaatca

SEQ ID NO: 51834 - RNA, 19 nt, synthetic construct
  misc_feature 1..19: note = siRNA sense sequence
  source 1..19: mol_type = other RNA
gattgaatggcatgtgggc

SEQ ID NO: 51835 - RNA, 19 nt, synthetic construct
  misc_feature 1..19: note = siRNA antisense sequence
  source 1..19: mol_type = other RNA
gcccacatgccattcaatc

SEQ ID NO: 51836 - RNA, 19 nt, synthetic construct
  misc_feature 1..19: note = siRNA sense sequence
  source 1..19: mol_type = other RNA
attgaatggcatgtgggca

SEQ ID NO: 51837 - RNA, 19 nt, synthetic construct
  misc_feature 1..19: note = siRNA antisense sequence
  source 1..19: mol_type = other RNA
tgcccacatgccattcaat

SEQ ID NO: 51838 - RNA, 19 nt, synthetic construct
  misc_feature 1..19: note = siRNA sense sequence
  source 1..19: mol_type = other RNA
tggcatgtgggcagcccta

SEQ ID NO: 51839 - RNA, 19 nt, synthetic construct
  misc_feature 1..19: note = siRNA antisense sequence
  source 1..19: mol_type = other RNA
tagggctgcccacatgcca

SEQ ID NO: 51840 - RNA, 19 nt, synthetic construct
  misc_feature 1..19: note = siRNA sense sequence
  source 1..19: mol_type = other RNA
ggcatgtgggcagccctat

SEQ ID NO: 51841 - RNA, 19 nt, synthetic construct
  misc_feature 1..19: note = siRNA antisense sequence
  source 1..19: mol_type = other RNA
atagggctgcccacatgcc

SEQ ID NO: 51842 - RNA, 19 nt, synthetic construct
  misc_feature 1..19: note = siRNA sense sequence
  source 1..19: mol_type = other RNA
gcatgtgggcagccctatc

SEQ ID NO: 51843 - RNA, 19 nt, synthetic construct
  misc_feature 1..19: note = siRNA antisense sequence
  source 1..19: mol_type = other RNA
gatagggctgcccacatgc

SEQ ID NO: 51844 - RNA, 19 nt, synthetic construct
  misc_feature 1..19: note = siRNA sense sequence
  source 1..19: mol_type = other RNA
catgtgggcagccctatca

SEQ ID NO: 51845 - RNA, 19 nt, synthetic construct
  misc_feature 1..19: note = siRNA antisense sequence
  source 1..19: mol_type = other RNA
tgatagggctgcccacatg

SEQ ID NO: 51846 - RNA, 19 nt, synthetic construct
  misc_feature 1..19: note = siRNA sense sequence
  source 1..19: mol_type = other RNA
atgtgggcagccctatcac

SEQ ID NO: 51847 - RNA, 19 nt, synthetic construct
  misc_feature 1..19: note = siRNA antisense sequence
  source 1..19: mol_type = other RNA
gtgatagggctgcccacat

SEQ ID NO: 51848 - RNA, 19 nt, synthetic construct
  misc_feature 1..19: note = siRNA sense sequence
  source 1..19: mol_type = other RNA
tggatctgtgagtgatact

SEQ ID NO: 51849 - RNA, 19 nt, synthetic construct
  misc_feature 1..19: note = siRNA antisense sequence
  source 1..19: mol_type = other RNA
agtatcactcacagatcca

SEQ ID NO: 51850 - RNA, 19 nt, synthetic construct
  misc_feature 1..19: note = siRNA sense sequence
  source 1..19: mol_type = other RNA
ggatctgtgagtgatactt

SEQ ID NO: 51851 - RNA, 19 nt, synthetic construct
  misc_feature 1..19: note = siRNA antisense sequence
  source 1..19: mol_type = other RNA
aagtatcactcacagatcc

SEQ ID NO: 51852 - RNA, 19 nt, synthetic construct
  misc_feature 1..19: note = siRNA sense sequence
  source 1..19: mol_type = other RNA
gatctgtgagtgatactta

SEQ ID NO: 51853 - RNA, 19 nt, synthetic construct
  misc_feature 1..19: note = siRNA antisense sequence
  source 1..19: mol_type = other RNA
taagtatcactcacagatc

SEQ ID NO: 51854 - RNA, 19 nt, synthetic construct
  misc_feature 1..19: note = siRNA sense sequence
  source 1..19: mol_type = other RNA
atctgtgagtgatacttac

SEQ ID NO: 51855 - RNA, 19 nt, synthetic construct
  misc_feature 1..19: note = siRNA antisense sequence
  source 1..19: mol_type = other RNA
gtaagtatcactcacagat

SEQ ID NO: 51856 - RNA, 19 nt, synthetic construct
  misc_feature 1..19: note = siRNA sense sequence
  source 1..19: mol_type = other RNA
tctgtgagtgatacttacc

SEQ ID NO: 51857 - RNA, 19 nt, synthetic construct
  misc_feature 1..19: note = siRNA antisense sequence
  source 1..19: mol_type = other RNA
ggtaagtatcactcacaga

SEQ ID NO: 51858 - RNA, 19 nt, synthetic construct
  misc_feature 1..19: note = siRNA sense sequence
  source 1..19: mol_type = other RNA
ctgtgagtgatacttacca

SEQ ID NO: 51859 - RNA, 19 nt, synthetic construct
  misc_feature 1..19: note = siRNA antisense sequence
  source 1..19: mol_type = other RNA
tggtaagtatcactcacag

SEQ ID NO: 51860 - RNA, 19 nt, synthetic construct
  misc_feature 1..19: note = siRNA sense sequence
  source 1..19: mol_type = other RNA
tgtgagtgatacttaccac

SEQ ID NO: 51861 - RNA, 19 nt, synthetic construct
  misc_feature 1..19: note = siRNA antisense sequence
  source 1..19: mol_type = other RNA
gtggtaagtatcactcaca

SEQ ID NO: 51862 - RNA, 19 nt, synthetic construct
  misc_feature 1..19: note = siRNA sense sequence
  source 1..19: mol_type = other RNA
agtgatacttaccaccagt

SEQ ID NO: 51863 - RNA, 19 nt, synthetic construct
  misc_feature 1..19: note = siRNA antisense sequence
  source 1..19: mol_type = other RNA
actggtggtaagtatcact

SEQ ID NO: 51864 - RNA, 19 nt, synthetic construct
  misc_feature 1..19: note = siRNA sense sequence
  source 1..19: mol_type = other RNA
taccaccagtaattagagc

SEQ ID NO: 51865 - RNA, 19 nt, synthetic construct
  misc_feature 1..19: note = siRNA antisense sequence
  source 1..19: mol_type = other RNA
gctctaattactggtggta

SEQ ID NO: 51866 - RNA, 19 nt, synthetic construct
  misc_feature 1..19: note = siRNA sense sequence
  source 1..19: mol_type = other RNA
accaccagtaattagagca

SEQ ID NO: 51867 - RNA, 19 nt, synthetic construct
  misc_feature 1..19: note = siRNA antisense sequence
  source 1..19: mol_type = other RNA
tgctctaattactggtggt

SEQ ID NO: 51868 - RNA, 19 nt, synthetic construct
  misc_feature 1..19: note = siRNA sense sequence
  source 1..19: mol_type = other RNA
ccaccagtaattagagcaa

SEQ ID NO: 51869 - RNA, 19 nt, synthetic construct
  misc_feature 1..19: note = siRNA antisense sequence
  source 1..19: mol_type = other RNA
ttgctctaattactggtgg

SEQ ID NO: 51870 - RNA, 19 nt, synthetic construct
  misc_feature 1..19: note = siRNA sense sequence
  source 1..19: mol_type = other RNA
accagtaattagagcaaat

SEQ ID NO: 51871 - RNA, 19 nt, synthetic construct
  misc_feature 1..19: note = siRNA antisense sequence
  source 1..19: mol_type = other RNA
atttgctctaattactggt

SEQ ID NO: 51872 - RNA, 19 nt, synthetic construct
  misc_feature 1..19: note = siRNA sense sequence
  source 1..19: mol_type = other RNA
ccagtaattagagcaaata

SEQ ID NO: 51873 - RNA, 19 nt, synthetic construct
  misc_feature 1..19: note = siRNA antisense sequence
  source 1..19: mol_type = other RNA
tatttgctctaattactgg

SEQ ID NO: 51874 - RNA, 19 nt, synthetic construct
  misc_feature 1..19: note = siRNA sense sequence
  source 1..19: mol_type = other RNA
agagcaaataaatgcatac

SEQ ID NO: 51875 - RNA, 19 nt, synthetic construct
  misc_feature 1..19: note = siRNA antisense sequence
  source 1..19: mol_type = other RNA
gtatgcatttatttgctct

SEQ ID NO: 51876 - RNA, 19 nt, synthetic construct
  misc_feature 1..19: note = siRNA sense sequence
  source 1..19: mol_type = other RNA
gagcaaataaatgcatact

SEQ ID NO: 51877 - RNA, 19 nt, synthetic construct
  misc_feature 1..19: note = siRNA antisense sequence
  source 1..19: mol_type = other RNA
agtatgcatttatttgctc

SEQ ID NO: 51878 - RNA, 19 nt, synthetic construct
  misc_feature 1..19: note = siRNA sense sequence
  source 1..19: mol_type = other RNA
tctgacagaatctatggcc

SEQ ID NO: 51879 - RNA, 19 nt, synthetic construct
  misc_feature 1..19: note = siRNA antisense sequence
  source 1..19: mol_type = other RNA
ggccatagattctgtcaga

SEQ ID NO: 51880 - RNA, 19 nt, synthetic construct
  misc_feature 1..19: note = siRNA sense sequence
  source 1..19: mol_type = other RNA
ctgacagaatctatggcct

SEQ ID NO: 51881 - RNA, 19 nt, synthetic construct
  misc_feature 1..19: note = siRNA antisense sequence
  source 1..19: mol_type = other RNA
aggccatagattctgtcag

SEQ ID NO: 51882 - RNA, 19 nt, synthetic construct
  misc_feature 1..19: note = siRNA sense sequence
  source 1..19: mol_type = other RNA
tgacagaatctatggcctg

SEQ ID NO: 51883 - RNA, 19 nt, synthetic construct
  misc_feature 1..19: note = siRNA antisense sequence
  source 1..19: mol_type = other RNA
caggccatagattctgtca

SEQ ID NO: 51884 - RNA, 19 nt, synthetic construct
  misc_feature 1..19: note = siRNA sense sequence
  source 1..19: mol_type = other RNA
gacagaatctatggcctga

SEQ ID NO: 51885 - RNA, 19 nt, synthetic construct
  misc_feature 1..19: note = siRNA antisense sequence
  source 1..19: mol_type = other RNA
tcaggccatagattctgtc

SEQ ID NO: 51886 - RNA, 19 nt, synthetic construct
  misc_feature 1..19: note = siRNA sense sequence
  source 1..19: mol_type = other RNA
acagaatctatggcctgaa

SEQ ID NO: 51887 - RNA, 19 nt, synthetic construct
  misc_feature 1..19: note = siRNA antisense sequence
  source 1..19: mol_type = other RNA
ttcaggccatagattctgt

SEQ ID NO: 51888 - RNA, 19 nt, synthetic construct
  misc_feature 1..19: note = siRNA sense sequence
  source 1..19: mol_type = other RNA
tctatggcctgaatatggg

SEQ ID NO: 51889 - RNA, 19 nt, synthetic construct
  misc_feature 1..19: note = siRNA antisense sequence
  source 1..19: mol_type = other RNA
cccatattcaggccataga

SEQ ID NO: 51890 - RNA, 19 nt, synthetic construct
  misc_feature 1..19: note = siRNA sense sequence
  source 1..19: mol_type = other RNA
ctatggcctgaatatgggt

SEQ ID NO: 51891 - RNA, 19 nt, synthetic construct
  misc_feature 1..19: note = siRNA antisense sequence
  source 1..19: mol_type = other RNA
acccatattcaggccatag

SEQ ID NO: 51892 - RNA, 19 nt, synthetic construct
  misc_feature 1..19: note = siRNA sense sequence
  source 1..19: mol_type = other RNA
tatggcctgaatatgggtg

SEQ ID NO: 51893 - RNA, 19 nt, synthetic construct
  misc_feature 1..19: note = siRNA antisense sequence
  source 1..19: mol_type = other RNA
cacccatattcaggccata

SEQ ID NO: 51894 - RNA, 19 nt, synthetic construct
  misc_feature 1..19: note = siRNA sense sequence
  source 1..19: mol_type = other RNA
aatatgggtgggactgatg

SEQ ID NO: 51895 - RNA, 19 nt, synthetic construct
  misc_feature 1..19: note = siRNA antisense sequence
  source 1..19: mol_type = other RNA
catcagtcccacccatatt

SEQ ID NO: 51896 - RNA, 19 nt, synthetic construct
  misc_feature 1..19: note = siRNA sense sequence
  source 1..19: mol_type = other RNA
atatgggtgggactgatgg

SEQ ID NO: 51897 - RNA, 19 nt, synthetic construct
  misc_feature 1..19: note = siRNA antisense sequence
  source 1..19: mol_type = other RNA
ccatcagtcccacccatat

SEQ ID NO: 51898 - RNA, 19 nt, synthetic construct
  misc_feature 1..19: note = siRNA sense sequence
  source 1..19: mol_type = other RNA
tatgggtgggactgatgga

SEQ ID NO: 51899 - RNA, 19 nt, synthetic construct
  misc_feature 1..19: note = siRNA antisense sequence
  source 1..19: mol_type = other RNA
tccatcagtcccacccata

SEQ ID NO: 51900 - RNA, 19 nt, synthetic construct
  misc_feature 1..19: note = siRNA sense sequence
  source 1..19: mol_type = other RNA
gtgggactgatggagttga

SEQ ID NO: 51901 - RNA, 19 nt, synthetic construct
  misc_feature 1..19: note = siRNA antisense sequence
  source 1..19: mol_type = other RNA
tcaactccatcagtcccac

SEQ ID NO: 51902 - RNA, 19 nt, synthetic construct
  misc_feature 1..19: note = siRNA sense sequence
  source 1..19: mol_type = other RNA
tgggactgatggagttgag

SEQ ID NO: 51903 - RNA, 19 nt, synthetic construct
  misc_feature 1..19: note = siRNA antisense sequence
  source 1..19: mol_type = other RNA
ctcaactccatcagtccca

SEQ ID NO: 51904 - RNA, 19 nt, synthetic construct
  misc_feature 1..19: note = siRNA sense sequence
  source 1..19: mol_type = other RNA
acatattaagggagtttag

SEQ ID NO: 51905 - RNA, 19 nt, synthetic construct
  misc_feature 1..19: note = siRNA antisense sequence
  source 1..19: mol_type = other RNA
ctaaactcccttaatatgt

SEQ ID NO: 51906 - RNA, 19 nt, synthetic construct
  misc_feature 1..19: note = siRNA sense sequence
  source 1..19: mol_type = other RNA
catattaagggagtttagc

SEQ ID NO: 51907 - RNA, 19 nt, synthetic construct
  misc_feature 1..19: note = siRNA antisense sequence
  source 1..19: mol_type = other RNA
gctaaactcccttaatatg

SEQ ID NO: 51908 - RNA, 19 nt, synthetic construct
  misc_feature 1..19: note = siRNA sense sequence
  source 1..19: mol_type = other RNA
atattaagggagtttagcc

SEQ ID NO: 51909 - RNA, 19 nt, synthetic construct
  misc_feature 1..19: note = siRNA antisense sequence
  source 1..19: mol_type = other RNA
ggctaaactcccttaatat

SEQ ID NO: 51910 - RNA, 19 nt, synthetic construct
  misc_feature 1..19: note = siRNA sense sequence
  source 1..19: mol_type = other RNA
tattaagggagtttagcct

SEQ ID NO: 51911 - RNA, 19 nt, synthetic construct
  misc_feature 1..19: note = siRNA antisense sequence
  source 1..19: mol_type = other RNA
aggctaaactcccttaata

SEQ ID NO: 51912 - RNA, 19 nt, synthetic construct
  misc_feature 1..19: note = siRNA sense sequence
  source 1..19: mol_type = other RNA
ttaagggagtttagcctaa

SEQ ID NO: 51913 - RNA, 19 nt, synthetic construct
  misc_feature 1..19: note = siRNA antisense sequence
  source 1..19: mol_type = other RNA
ttaggctaaactcccttaa

SEQ ID NO: 51914 - RNA, 19 nt, synthetic construct
  misc_feature 1..19: note = siRNA sense sequence
  source 1..19: mol_type = other RNA
taagggagtttagcctaag

SEQ ID NO: 51915 - RNA, 19 nt, synthetic construct
  misc_feature 1..19: note = siRNA antisense sequence
  source 1..19: mol_type = other RNA
cttaggctaaactccctta

SEQ ID NO: 51916 - RNA, 19 nt, synthetic construct
  misc_feature 1..19: note = siRNA sense sequence
  source 1..19: mol_type = other RNA
aagggagtttagcctaagg

SEQ ID NO: 51917 - RNA, 19 nt, synthetic construct
  misc_feature 1..19: note = siRNA antisense sequence
  source 1..19: mol_type = other RNA
ccttaggctaaactccctt

SEQ ID NO: 51918 - RNA, 19 nt, synthetic construct
  misc_feature 1..19: note = siRNA sense sequence
  source 1..19: mol_type = other RNA
agggagtttagcctaaggg

SEQ ID NO: 51919 - RNA, 19 nt, synthetic construct
  misc_feature 1..19: note = siRNA antisense sequence
  source 1..19: mol_type = other RNA
cccttaggctaaactccct

SEQ ID NO: 51920 - RNA, 19 nt, synthetic construct
  misc_feature 1..19: note = siRNA sense sequence
  source 1..19: mol_type = other RNA
gggagtttagcctaagggc

SEQ ID NO: 51921 - RNA, 19 nt, synthetic construct
  misc_feature 1..19: note = siRNA antisense sequence
  source 1..19: mol_type = other RNA
gcccttaggctaaactccc

SEQ ID NO: 51922 - RNA, 19 nt, synthetic construct
  misc_feature 1..19: note = siRNA sense sequence
  source 1..19: mol_type = other RNA
aagggctcagcagggttcc

SEQ ID NO: 51923 - RNA, 19 nt, synthetic construct
  misc_feature 1..19: note = siRNA antisense sequence
  source 1..19: mol_type = other RNA
ggaaccctgctgagccctt

SEQ ID NO: 51924 - RNA, 19 nt, synthetic construct
  misc_feature 1..19: note = siRNA sense sequence
  source 1..19: mol_type = other RNA
gctcagcagggttcccaag

SEQ ID NO: 51925 - RNA, 19 nt, synthetic construct
  misc_feature 1..19: note = siRNA antisense sequence
  source 1..19: mol_type = other RNA
cttgggaaccctgctgagc

SEQ ID NO: 51926 - RNA, 19 nt, synthetic construct
  misc_feature 1..19: note = siRNA sense sequence
  source 1..19: mol_type = other RNA
agggttcccaaggcatgaa

SEQ ID NO: 51927 - RNA, 19 nt, synthetic construct
  misc_feature 1..19: note = siRNA antisense sequence
  source 1..19: mol_type = other RNA
ttcatgccttgggaaccct

SEQ ID NO: 51928 - RNA, 19 nt, synthetic construct
  misc_feature 1..19: note = siRNA sense sequence
  source 1..19: mol_type = other RNA
caaggcatgaatttggaca

SEQ ID NO: 51929 - RNA, 19 nt, synthetic construct
  misc_feature 1..19: note = siRNA antisense sequence
  source 1..19: mol_type = other RNA
tgtccaaattcatgccttg

SEQ ID NO: 51930 - RNA, 19 nt, synthetic construct
  misc_feature 1..19: note = siRNA sense sequence
  source 1..19: mol_type = other RNA
aaggcatgaatttggacag

SEQ ID NO: 51931 - RNA, 19 nt, synthetic construct
  misc_feature 1..19: note = siRNA antisense sequence
  source 1..19: mol_type = other RNA
ctgtccaaattcatgcctt

SEQ ID NO: 51932 - RNA, 19 nt, synthetic construct
  misc_feature 1..19: note = siRNA sense sequence
  source 1..19: mol_type = other RNA
aggcatgaatttggacagg

SEQ ID NO: 51933 - RNA, 19 nt, synthetic construct
  misc_feature 1..19: note = siRNA antisense sequence
  source 1..19: mol_type = other RNA
cctgtccaaattcatgcct

SEQ ID NO: 51934 - RNA, 19 nt, synthetic construct
  misc_feature 1..19: note = siRNA sense sequence
  source 1..19: mol_type = other RNA
ggcatgaatttggacagga

SEQ ID NO: 51935 - RNA, 19 nt, synthetic construct
  misc_feature 1..19: note = siRNA antisense sequence
  source 1..19: mol_type = other RNA
tcctgtccaaattcatgcc

SEQ ID NO: 51936 - RNA, 19 nt, synthetic construct
  misc_feature 1..19: note = siRNA sense sequence
  source 1..19: mol_type = other RNA
gcatgaatttggacaggaa

SEQ ID NO: 51937 - RNA, 19 nt, synthetic construct
  misc_feature 1..19: note = siRNA antisense sequence
  source 1..19: mol_type = other RNA
ttcctgtccaaattcatgc

SEQ ID NO: 51938 - RNA, 19 nt, synthetic construct
  misc_feature 1..19: note = siRNA sense sequence
  source 1..19: mol_type = other RNA
catgaatttggacaggaat

SEQ ID NO: 51939 - RNA, 19 nt, synthetic construct
  misc_feature 1..19: note = siRNA antisense sequence
  source 1..19: mol_type = other RNA
attcctgtccaaattcatg

SEQ ID NO: 51940 - RNA, 19 nt, synthetic construct
  misc_feature 1..19: note = siRNA sense sequence
  source 1..19: mol_type = other RNA
gaatttcctactgtagtac

SEQ ID NO: 51941 - RNA, 19 nt, synthetic construct
  misc_feature 1..19: note = siRNA antisense sequence
  source 1..19: mol_type = other RNA
gtactacagtaggaaattc

SEQ ID NO: 51942 - RNA, 19 nt, synthetic construct
  misc_feature 1..19: note = siRNA sense sequence
  source 1..19: mol_type = other RNA
tttcctactgtagtacatc

SEQ ID NO: 51943 - RNA, 19 nt, synthetic construct
  misc_feature 1..19: note = siRNA antisense sequence
  source 1..19: mol_type = other RNA
gatgtactacagtaggaaa

SEQ ID NO: 51944 - RNA, 19 nt, synthetic construct
  misc_feature 1..19: note = siRNA sense sequence
  source 1..19: mol_type = other RNA
ttcctactgtagtacatcc

SEQ ID NO: 51945 - RNA, 19 nt, synthetic construct
  misc_feature 1..19: note = siRNA antisense sequence
  source 1..19: mol_type = other RNA
ggatgtactacagtaggaa

SEQ ID NO: 51946 - RNA, 19 nt, synthetic construct
  misc_feature 1..19: note = siRNA sense sequence
  source 1..19: mol_type = other RNA
tcctactgtagtacatcca

SEQ ID NO: 51947 - RNA, 19 nt, synthetic construct
  misc_feature 1..19: note = siRNA antisense sequence
  source 1..19: mol_type = other RNA
tggatgtactacagtagga

SEQ ID NO: 51948 - RNA, 19 nt, synthetic construct
  misc_feature 1..19: note = siRNA sense sequence
  source 1..19: mol_type = other RNA
cctactgtagtacatccaa

SEQ ID NO: 51949 - RNA, 19 nt, synthetic construct
  misc_feature 1..19: note = siRNA antisense sequence
  source 1..19: mol_type = other RNA
ttggatgtactacagtagg

SEQ ID NO: 51950 - RNA, 19 nt, synthetic construct
  misc_feature 1..19: note = siRNA sense sequence
  source 1..19: mol_type = other RNA
ctactgtagtacatccaac

SEQ ID NO: 51951 - RNA, 19 nt, synthetic construct
  misc_feature 1..19: note = siRNA antisense sequence
  source 1..19: mol_type = other RNA
gttggatgtactacagtag

SEQ ID NO: 51952 - RNA, 19 nt, synthetic construct
  misc_feature 1..19: note = siRNA sense sequence
  source 1..19: mol_type = other RNA
tactgtagtacatccaact

SEQ ID NO: 51953 - RNA, 19 nt, synthetic construct
  misc_feature 1..19: note = siRNA antisense sequence
  source 1..19: mol_type = other RNA
agttggatgtactacagta

SEQ ID NO: 51954 - RNA, 19 nt, synthetic construct
  misc_feature 1..19: note = siRNA sense sequence
  source 1..19: mol_type = other RNA
acatccaacttgagccttg

SEQ ID NO: 51955 - RNA, 19 nt, synthetic construct
  misc_feature 1..19: note = siRNA antisense sequence
  source 1..19: mol_type = other RNA
caaggctcaagttggatgt

SEQ ID NO: 51956 - RNA, 19 nt, synthetic construct
  misc_feature 1..19: note = siRNA sense sequence
  source 1..19: mol_type = other RNA
catccaacttgagccttgt

SEQ ID NO: 51957 - RNA, 19 nt, synthetic construct
  misc_feature 1..19: note = siRNA antisense sequence
  source 1..19: mol_type = other RNA
acaaggctcaagttggatg

SEQ ID NO: 51958 - RNA, 19 nt, synthetic construct
  misc_feature 1..19: note = siRNA sense sequence
  source 1..19: mol_type = other RNA
atccaacttgagccttgtg

SEQ ID NO: 51959 - RNA, 19 nt, synthetic construct
  misc_feature 1..19: note = siRNA antisense sequence
  source 1..19: mol_type = other RNA
cacaaggctcaagttggat

SEQ ID NO: 51960 - RNA, 19 nt, synthetic construct
  misc_feature 1..19: note = siRNA sense sequence
  source 1..19: mol_type = other RNA
tccaacttgagccttgtgg

SEQ ID NO: 51961 - RNA, 19 nt, synthetic construct
  misc_feature 1..19: note = siRNA antisense sequence
  source 1..19: mol_type = other RNA
ccacaaggctcaagttgga

SEQ ID NO: 51962 - RNA, 19 nt, synthetic construct
  misc_feature 1..19: note = siRNA sense sequence
  source 1..19: mol_type = other RNA
ccaacttgagccttgtgga

SEQ ID NO: 51963 - RNA, 19 nt, synthetic construct
  misc_feature 1..19: note = siRNA antisense sequence
  source 1..19: mol_type = other RNA
tccacaaggctcaagttgg

SEQ ID NO: 51964 - RNA, 19 nt, synthetic construct
  misc_feature 1..19: note = siRNA sense sequence
  source 1..19: mol_type = other RNA
caacttgagccttgtggac

SEQ ID NO: 51965 - RNA, 19 nt, synthetic construct
  misc_feature 1..19: note = siRNA antisense sequence
  source 1..19: mol_type = other RNA
gtccacaaggctcaagttg

SEQ ID NO: 51966 - RNA, 19 nt, synthetic construct
  misc_feature 1..19: note = siRNA sense sequence
  source 1..19: mol_type = other RNA
aacttgagccttgtggacc

SEQ ID NO: 51967 - RNA, 19 nt, synthetic construct
  misc_feature 1..19: note = siRNA antisense sequence
  source 1..19: mol_type = other RNA
ggtccacaaggctcaagtt

SEQ ID NO: 51968 - RNA, 19 nt, synthetic construct
  misc_feature 1..19: note = siRNA sense sequence
  source 1..19: mol_type = other RNA
acttgagccttgtggaccc

SEQ ID NO: 51969 - RNA, 19 nt, synthetic construct
  misc_feature 1..19: note = siRNA antisense sequence
  source 1..19: mol_type = other RNA
gggtccacaaggctcaagt

SEQ ID NO: 51970 - RNA, 19 nt, synthetic construct
  misc_feature 1..19: note = siRNA sense sequence
  source 1..19: mol_type = other RNA
cttgagccttgtggaccca

SEQ ID NO: 51971 - RNA, 19 nt, synthetic construct
  misc_feature 1..19: note = siRNA antisense sequence
  source 1..19: mol_type = other RNA
tgggtccacaaggctcaag

SEQ ID NO: 51972 - RNA, 19 nt, synthetic construct
  misc_feature 1..19: note = siRNA sense sequence
  source 1..19: mol_type = other RNA
ttgagccttgtggacccaa

SEQ ID NO: 51973 - RNA, 19 nt, synthetic construct
  misc_feature 1..19: note = siRNA antisense sequence
  source 1..19: mol_type = other RNA
ttgggtccacaaggctcaa

SEQ ID NO: 51974 - RNA, 19 nt, synthetic construct
  misc_feature 1..19: note = siRNA sense sequence
  source 1..19: mol_type = other RNA
tgagccttgtggacccaaa

SEQ ID NO: 51975 - RNA, 19 nt, synthetic construct
  misc_feature 1..19: note = siRNA antisense sequence
  source 1..19: mol_type = other RNA
tttgggtccacaaggctca

SEQ ID NO: 51976 - RNA, 19 nt, synthetic construct
  misc_feature 1..19: note = siRNA sense sequence
  source 1..19: mol_type = other RNA
gtggacccaaagcaccata

SEQ ID NO: 51977 - RNA, 19 nt, synthetic construct
  misc_feature 1..19: note = siRNA antisense sequence
  source 1..19: mol_type = other RNA
tatggtgctttgggtccac

SEQ ID NO: 51978 - RNA, 19 nt, synthetic construct
  misc_feature 1..19: note = siRNA sense sequence
  source 1..19: mol_type = other RNA
tggacccaaagcaccatag

SEQ ID NO: 51979 - RNA, 19 nt, synthetic construct
  misc_feature 1..19: note = siRNA antisense sequence
  source 1..19: mol_type = other RNA
ctatggtgctttgggtcca

SEQ ID NO: 51980 - RNA, 19 nt, synthetic construct
  misc_feature 1..19: note = siRNA sense sequence
  source 1..19: mol_type = other RNA
ggacccaaagcaccatagg

SEQ ID NO: 51981 - RNA, 19 nt, synthetic construct
  misc_feature 1..19: note = siRNA antisense sequence
  source 1..19: mol_type = other RNA
cctatggtgctttgggtcc

SEQ ID NO: 51982 - RNA, 19 nt, synthetic construct
  misc_feature 1..19: note = siRNA sense sequence
  source 1..19: mol_type = other RNA
ccaaagcaccataggatcc

SEQ ID NO: 51983 - RNA, 19 nt, synthetic construct
  misc_feature 1..19: note = siRNA antisense sequence
  source 1..19: mol_type = other RNA
ggatcctatggtgctttgg

SEQ ID NO: 51984 - RNA, 19 nt, synthetic construct
  misc_feature 1..19: note = siRNA sense sequence
  source 1..19: mol_type = other RNA
caaagcaccataggatcca

SEQ ID NO: 51985 - RNA, 19 nt, synthetic construct
  misc_feature 1..19: note = siRNA antisense sequence
  source 1..19: mol_type = other RNA
tggatcctatggtgctttg

SEQ ID NO: 51986 - RNA, 19 nt, synthetic construct
  misc_feature 1..19: note = siRNA sense sequence
  source 1..19: mol_type = other RNA
aagcaccataggatccaca

SEQ ID NO: 51987 - RNA, 19 nt, synthetic construct
  misc_feature 1..19: note = siRNA antisense sequence
  source 1..19: mol_type = other RNA
tgtggatcctatggtgctt

SEQ ID NO: 51988 - RNA, 19 nt, synthetic construct
  misc_feature 1..19: note = siRNA sense sequence
  source 1..19: mol_type = other RNA
acatgctacagtataagaa

SEQ ID NO: 51989 - RNA, 19 nt, synthetic construct
  misc_feature 1..19: note = siRNA antisense sequence
  source 1..19: mol_type = other RNA
ttcttatactgtagcatgt

SEQ ID NO: 51990 - RNA, 19 nt, synthetic construct
  misc_feature 1..19: note = siRNA sense sequence
  source 1..19: mol_type = other RNA
atgctacagtataagaatg

SEQ ID NO: 51991 - RNA, 19 nt, synthetic construct
  misc_feature 1..19: note = siRNA antisense sequence
  source 1..19: mol_type = other RNA
cattcttatactgtagcat

SEQ ID NO: 51992 - RNA, 19 nt, synthetic construct
  misc_feature 1..19: note = siRNA sense sequence
  source 1..19: mol_type = other RNA
tgctacagtataagaatgg

SEQ ID NO: 51993 - RNA, 19 nt, synthetic construct
  misc_feature 1..19: note = siRNA antisense sequence
  source 1..19: mol_type = other RNA
ccattcttatactgtagca

SEQ ID NO: 51994 - RNA, 19 nt, synthetic construct
  misc_feature 1..19: note = siRNA sense sequence
  source 1..19: mol_type = other RNA
gctacagtataagaatgga

SEQ ID NO: 51995 - RNA, 19 nt, synthetic construct
  misc_feature 1..19: note = siRNA antisense sequence
  source 1..19: mol_type = other RNA
tccattcttatactgtagc

SEQ ID NO: 51996 - RNA, 19 nt, synthetic construct
  misc_feature 1..19: note = siRNA sense sequence
  source 1..19: mol_type = other RNA
aggacagggctgctaatga

SEQ ID NO: 51997 - RNA, 19 nt, synthetic construct
  misc_feature 1..19: note = siRNA antisense sequence
  source 1..19: mol_type = other RNA
tcattagcagccctgtcct

SEQ ID NO: 51998 - RNA, 19 nt, synthetic construct
  misc_feature 1..19: note = siRNA sense sequence
  source 1..19: mol_type = other RNA
agacatgagccctttgact

SEQ ID NO: 51999 - RNA, 19 nt, synthetic construct
  misc_feature 1..19: note = siRNA antisense sequence
  source 1..19: mol_type = other RNA
agtcaaagggctcatgtct

SEQ ID NO: 52000 - RNA, 19 nt, synthetic construct
  misc_feature 1..19: note = siRNA sense sequence
  source 1..19: mol_type = other RNA
gacatgagccctttgacta

SEQ ID NO: 52001 - RNA, 19 nt, synthetic construct
  misc_feature 1..19: note = siRNA antisense sequence
  source 1..19: mol_type = other RNA
tagtcaaagggctcatgtc

SEQ ID NO: 52002 - RNA, 19 nt, synthetic construct
  misc_feature 1..19: note = siRNA sense sequence
  source 1..19: mol_type = other RNA
acatgagccctttgactat

SEQ ID NO: 52003 - RNA, 19 nt, synthetic construct
  misc_feature 1..19: note = siRNA antisense sequence
  source 1..19: mol_type = other RNA
atagtcaaagggctcatgt

SEQ ID NO: 52004 - RNA, 19 nt, synthetic construct
  misc_feature 1..19: note = siRNA sense sequence
  source 1..19: mol_type = other RNA
catgagccctttgactatt

SEQ ID NO: 52005 - RNA, 19 nt, synthetic construct
  misc_feature 1..19: note = siRNA antisense sequence
  source 1..19: mol_type = other RNA
aatagtcaaagggctcatg

SEQ ID NO: 52006 - RNA, 19 nt, synthetic construct
  misc_feature 1..19: note = siRNA sense sequence
  source 1..19: mol_type = other RNA
atgagccctttgactattt

SEQ ID NO: 52007 - RNA, 19 nt, synthetic construct
  misc_feature 1..19: note = siRNA antisense sequence
  source 1..19: mol_type = other RNA
aaatagtcaaagggctcat

SEQ ID NO: 52008 - RNA, 19 nt, synthetic construct
  misc_feature 1..19: note = siRNA sense sequence
  source 1..19: mol_type = other RNA
tgagccctttgactatttt

SEQ ID NO: 52009 - RNA, 19 nt, synthetic construct
  misc_feature 1..19: note = siRNA antisense sequence
  source 1..19: mol_type = other RNA
aaaatagtcaaagggctca

SEQ ID NO: 52010 - RNA, 19 nt, synthetic construct
  misc_feature 1..19: note = siRNA sense sequence
  source 1..19: mol_type = other RNA
aaaatgccctaagatgttt

SEQ ID NO: 52011 - RNA, 19 nt, synthetic construct
  misc_feature 1..19: note = siRNA antisense sequence
  source 1..19: mol_type = other RNA
aaacatcttagggcatttt

SEQ ID NO: 52012 - RNA, 19 nt, synthetic construct
  misc_feature 1..19: note = siRNA sense sequence
  source 1..19: mol_type = other RNA
aaatgccctaagatgtttg

SEQ ID NO: 52013 - RNA, 19 nt, synthetic construct
  misc_feature 1..19: note = siRNA antisense sequence
  source 1..19: mol_type = other RNA
caaacatcttagggcattt

SEQ ID NO: 52014 - RNA, 19 nt, synthetic construct
  misc_feature 1..19: note = siRNA sense sequence
  source 1..19: mol_type = other RNA
aatgccctaagatgtttga

SEQ ID NO: 52015 - RNA, 19 nt, synthetic construct
  misc_feature 1..19: note = siRNA antisense sequence
  source 1..19: mol_type = other RNA
tcaaacatcttagggcatt

SEQ ID NO: 52016 - RNA, 19 nt, synthetic construct
  misc_feature 1..19: note = siRNA sense sequence
  source 1..19: mol_type = other RNA
atgccctaagatgtttgaa

SEQ ID NO: 52017 - RNA, 19 nt, synthetic construct
  misc_feature 1..19: note = siRNA antisense sequence
  source 1..19: mol_type = other RNA
ttcaaacatcttagggcat

SEQ ID NO: 52018 - RNA, 19 nt, synthetic construct
  misc_feature 1..19: note = siRNA sense sequence
  source 1..19: mol_type = other RNA
gccctaagatgtttgaagt

SEQ ID NO: 52019 - RNA, 19 nt, synthetic construct
  misc_feature 1..19: note = siRNA antisense sequence
  source 1..19: mol_type = other RNA
acttcaaacatcttagggc

SEQ ID NO: 52020 - RNA, 19 nt, synthetic construct
  misc_feature 1..19: note = siRNA sense sequence
  source 1..19: mol_type = other RNA
ccctaagatgtttgaagtt

SEQ ID NO: 52021 - RNA, 19 nt, synthetic construct
  misc_feature 1..19: note = siRNA antisense sequence
  source 1..19: mol_type = other RNA
aacttcaaacatcttaggg

SEQ ID NO: 52022 - RNA, 19 nt, synthetic construct
  misc_feature 1..19: note = siRNA sense sequence
  source 1..19: mol_type = other RNA
cctaagatgtttgaagttc

SEQ ID NO: 52023 - RNA, 19 nt, synthetic construct
  misc_feature 1..19: note = siRNA antisense sequence
  source 1..19: mol_type = other RNA
gaacttcaaacatcttagg

SEQ ID NO: 52024 - RNA, 19 nt, synthetic construct
  misc_feature 1..19: note = siRNA sense sequence
  source 1..19: mol_type = other RNA
ctaagatgtttgaagttct

SEQ ID NO: 52025 - RNA, 19 nt, synthetic construct
  misc_feature 1..19: note = siRNA antisense sequence
  source 1..19: mol_type = other RNA
agaacttcaaacatcttag

SEQ ID NO: 52026 - RNA, 19 nt, synthetic construct
  misc_feature 1..19: note = siRNA sense sequence
  source 1..19: mol_type = other RNA
taagatgtttgaagttctg

SEQ ID NO: 52027 - RNA, 19 nt, synthetic construct
  misc_feature 1..19: note = siRNA antisense sequence
  source 1..19: mol_type = other RNA
cagaacttcaaacatctta

SEQ ID NO: 52028 - RNA, 19 nt, synthetic construct
  misc_feature 1..19: note = siRNA sense sequence
  source 1..19: mol_type = other RNA
aagatgtttgaagttctgg

SEQ ID NO: 52029 - RNA, 19 nt, synthetic construct
  misc_feature 1..19: note = siRNA antisense sequence
  source 1..19: mol_type = other RNA
ccagaacttcaaacatctt

SEQ ID NO: 52030 - RNA, 19 nt, synthetic construct
  misc_feature 1..19: note = siRNA sense sequence
  source 1..19: mol_type = other RNA
agatgtttgaagttctggt

SEQ ID NO: 52031 - RNA, 19 nt, synthetic construct
  misc_feature 1..19: note = siRNA antisense sequence
  source 1..19: mol_type = other RNA
accagaacttcaaacatct

SEQ ID NO: 52032 - RNA, 19 nt, synthetic construct
  misc_feature 1..19: note = siRNA sense sequence
  source 1..19: mol_type = other RNA
gatgtttgaagttctggtt

SEQ ID NO: 52033 - RNA, 19 nt, synthetic construct
  misc_feature 1..19: note = siRNA antisense sequence
  source 1..19: mol_type = other RNA
aaccagaacttcaaacatc

SEQ ID NO: 52034 - RNA, 19 nt, synthetic construct
  misc_feature 1..19: note = siRNA sense sequence
  source 1..19: mol_type = other RNA
atgtttgaagttctggttg

SEQ ID NO: 52035 - RNA, 19 nt, synthetic construct
  misc_feature 1..19: note = siRNA antisense sequence
  source 1..19: mol_type = other RNA
caaccagaacttcaaacat

SEQ ID NO: 52036 - RNA, 19 nt, synthetic construct
  misc_feature 1..19: note = siRNA sense sequence
  source 1..19: mol_type = other RNA
tgtttgaagttctggttgg

SEQ ID NO: 52037 - RNA, 19 nt, synthetic construct
  misc_feature 1..19: note = siRNA antisense sequence
  source 1..19: mol_type = other RNA
ccaaccagaacttcaaaca

SEQ ID NO: 52038 - RNA, 19 nt, synthetic construct
  misc_feature 1..19: note = siRNA sense sequence
  source 1..19: mol_type = other RNA
gtttgaagttctggttggt

SEQ ID NO: 52039 - RNA, 19 nt, synthetic construct
  misc_feature 1..19: note = siRNA antisense sequence
  source 1..19: mol_type = other RNA
accaaccagaacttcaaac

SEQ ID NO: 52040 - RNA, 19 nt, synthetic construct
  misc_feature 1..19: note = siRNA sense sequence
  source 1..19: mol_type = other RNA
tttgaagttctggttggta

SEQ ID NO: 52041 - RNA, 19 nt, synthetic construct
  misc_feature 1..19: note = siRNA antisense sequence
  source 1..19: mol_type = other RNA
taccaaccagaacttcaaa

SEQ ID NO: 52042 - RNA, 19 nt, synthetic construct
  misc_feature 1..19: note = siRNA sense sequence
  source 1..19: mol_type = other RNA
ttgaagttctggttggtaa

SEQ ID NO: 52043 - RNA, 19 nt, synthetic construct
  misc_feature 1..19: note = siRNA antisense sequence
  source 1..19: mol_type = other RNA
ttaccaaccagaacttcaa

SEQ ID NO: 52044 - RNA, 19 nt, synthetic construct
  misc_feature 1..19: note = siRNA sense sequence
  source 1..19: mol_type = other RNA
tgaagttctggttggtaag

SEQ ID NO: 52045 - RNA, 19 nt, synthetic construct
  misc_feature 1..19: note = siRNA antisense sequence
  source 1..19: mol_type = other RNA
cttaccaaccagaacttca

SEQ ID NO: 52046 - RNA, 19 nt, synthetic construct
  misc_feature 1..19: note = siRNA sense sequence
  source 1..19: mol_type = other RNA
gaagttctggttggtaaga

SEQ ID NO: 52047 - RNA, 19 nt, synthetic construct
  misc_feature 1..19: note = siRNA antisense sequence
  source 1..19: mol_type = other RNA
tcttaccaaccagaacttc

SEQ ID NO: 52048 - RNA, 19 nt, synthetic construct
  misc_feature 1..19: note = siRNA sense sequence
  source 1..19: mol_type = other RNA
aagctctaccaggtatctg

SEQ ID NO: 52049 - RNA, 19 nt, synthetic construct
  misc_feature 1..19: note = siRNA antisense sequence
  source 1..19: mol_type = other RNA
cagatacctggtagagctt

SEQ ID NO: 52050 - RNA, 19 nt, synthetic construct
  misc_feature 1..19: note = siRNA sense sequence
  source 1..19: mol_type = other RNA
agctctaccaggtatctgt

SEQ ID NO: 52051 - RNA, 19 nt, synthetic construct
  misc_feature 1..19: note = siRNA antisense sequence
  source 1..19: mol_type = other RNA
acagatacctggtagagct

SEQ ID NO: 52052 - RNA, 19 nt, synthetic construct
  misc_feature 1..19: note = siRNA sense sequence
  source 1..19: mol_type = other RNA
ctctaccaggtatctgtat

SEQ ID NO: 52053 - RNA, 19 nt, synthetic construct
  misc_feature 1..19: note = siRNA antisense sequence
  source 1..19: mol_type = other RNA
atacagatacctggtagag

SEQ ID NO: 52054 - RNA, 19 nt, synthetic construct
  misc_feature 1..19: note = siRNA sense sequence
  source 1..19: mol_type = other RNA
tctaccaggtatctgtatt

SEQ ID NO: 52055 - RNA, 19 nt, synthetic construct
  misc_feature 1..19: note = siRNA antisense sequence
  source 1..19: mol_type = other RNA
aatacagatacctggtaga

SEQ ID NO: 52056 - RNA, 19 nt, synthetic construct
  misc_feature 1..19: note = siRNA sense sequence
  source 1..19: mol_type = other RNA
ctaccaggtatctgtattc

SEQ ID NO: 52057 - RNA, 19 nt, synthetic construct
  misc_feature 1..19: note = siRNA antisense sequence
  source 1..19: mol_type = other RNA
gaatacagatacctggtag

SEQ ID NO: 52058 - RNA, 19 nt, synthetic construct
  misc_feature 1..19: note = siRNA sense sequence
  source 1..19: mol_type = other RNA
taccaggtatctgtattct

SEQ ID NO: 52059 - RNA, 19 nt, synthetic construct
  misc_feature 1..19: note = siRNA antisense sequence
  source 1..19: mol_type = other RNA
agaatacagatacctggta

SEQ ID NO: 52060 - RNA, 19 nt, synthetic construct
  misc_feature 1..19: note = siRNA sense sequence
  source 1..19: mol_type = other RNA
accaggtatctgtattctg

SEQ ID NO: 52061 - RNA, 19 nt, synthetic construct
  misc_feature 1..19: note = siRNA antisense sequence
  source 1..19: mol_type = other RNA
cagaatacagatacctggt

SEQ ID NO: 52062 - RNA, 19 nt, synthetic construct
  misc_feature 1..19: note = siRNA sense sequence
  source 1..19: mol_type = other RNA
ccaggtatctgtattctgc

SEQ ID NO: 52063 - RNA, 19 nt, synthetic construct
  misc_feature 1..19: note = siRNA antisense sequence
  source 1..19: mol_type = other RNA
gcagaatacagatacctgg

SEQ ID NO: 52064 - RNA, 19 nt, synthetic construct
  misc_feature 1..19: note = siRNA sense sequence
  source 1..19: mol_type = other RNA
caggtatctgtattctgca

SEQ ID NO: 52065 - RNA, 19 nt, synthetic construct
  misc_feature 1..19: note = siRNA antisense sequence
  source 1..19: mol_type = other RNA
tgcagaatacagatacctg

SEQ ID NO: 52066 - RNA, 19 nt, synthetic construct
  misc_feature 1..19: note = siRNA sense sequence
  source 1..19: mol_type = other RNA
aggtatctgtattctgcaa

SEQ ID NO: 52067 - RNA, 19 nt, synthetic construct
  misc_feature 1..19: note = siRNA antisense sequence
  source 1..19: mol_type = other RNA
ttgcagaatacagatacct

SEQ ID NO: 52068 - RNA, 19 nt, synthetic construct
  misc_feature 1..19: note = siRNA sense sequence
  source 1..19: mol_type = other RNA
ggtatctgtattctgcaag

SEQ ID NO: 52069 - RNA, 19 nt, synthetic construct
  misc_feature 1..19: note = siRNA antisense sequence
  source 1..19: mol_type = other RNA
cttgcagaatacagatacc

SEQ ID NO: 52070 - RNA, 19 nt, synthetic construct
  misc_feature 1..19: note = siRNA sense sequence
  source 1..19: mol_type = other RNA
tatctgtattctgcaagtc

SEQ ID NO: 52071 - RNA, 19 nt, synthetic construct
  misc_feature 1..19: note = siRNA antisense sequence
  source 1..19: mol_type = other RNA
gacttgcagaatacagata

SEQ ID NO: 52072 - RNA, 19 nt, synthetic construct
  misc_feature 1..19: note = siRNA sense sequence
  source 1..19: mol_type = other RNA
atctgtattctgcaagtca

SEQ ID NO: 52073 - RNA, 19 nt, synthetic construct
  misc_feature 1..19: note = siRNA antisense sequence
  source 1..19: mol_type = other RNA
tgacttgcagaatacagat

SEQ ID NO: 52074 - RNA, 19 nt, synthetic construct
  misc_feature 1..19: note = siRNA sense sequence
  source 1..19: mol_type = other RNA
gtattctgcaagtcagtag

SEQ ID NO: 52075 - RNA, 19 nt, synthetic construct
  misc_feature 1..19: note = siRNA antisense sequence
  source 1..19: mol_type = other RNA
ctactgacttgcagaatac

SEQ ID NO: 52076 - RNA, 19 nt, synthetic construct
  misc_feature 1..19: note = siRNA sense sequence
  source 1..19: mol_type = other RNA
tattctgcaagtcagtagt

SEQ ID NO: 52077 - RNA, 19 nt, synthetic construct
  misc_feature 1..19: note = siRNA antisense sequence
  source 1..19: mol_type = other RNA
actactgacttgcagaata

SEQ ID NO: 52078 - RNA, 19 nt, synthetic construct
  misc_feature 1..19: note = siRNA sense sequence
  source 1..19: mol_type = other RNA
ttctgcaagtcagtagtgc

SEQ ID NO: 52079 - RNA, 19 nt, synthetic construct
  misc_feature 1..19: note = siRNA antisense sequence
  source 1..19: mol_type = other RNA
gcactactgacttgcagaa

SEQ ID NO: 52080 - RNA, 19 nt, synthetic construct
  misc_feature 1..19: note = siRNA sense sequence
  source 1..19: mol_type = other RNA
ggcattgttacttatttac

SEQ ID NO: 52081 - RNA, 19 nt, synthetic construct
  misc_feature 1..19: note = siRNA antisense sequence
  source 1..19: mol_type = other RNA
gtaaataagtaacaatgcc

SEQ ID NO: 52082 - RNA, 19 nt, synthetic construct
  misc_feature 1..19: note = siRNA sense sequence
  source 1..19: mol_type = other RNA
ccagtcagcagcttcattt

SEQ ID NO: 52083 - RNA, 19 nt, synthetic construct
  misc_feature 1..19: note = siRNA antisense sequence
  source 1..19: mol_type = other RNA
aaatgaagctgctgactgg

SEQ ID NO: 52084 - RNA, 19 nt, synthetic construct
  misc_feature 1..19: note = siRNA sense sequence
  source 1..19: mol_type = other RNA
cagtcagcagcttcatttg

SEQ ID NO: 52085 - RNA, 19 nt, synthetic construct
  misc_feature 1..19: note = siRNA antisense sequence
  source 1..19: mol_type = other RNA
caaatgaagctgctgactg

SEQ ID NO: 52086 - RNA, 19 nt, synthetic construct
  misc_feature 1..19: note = siRNA sense sequence
  source 1..19: mol_type = other RNA
agtcagcagcttcatttga

SEQ ID NO: 52087 - RNA, 19 nt, synthetic construct
  misc_feature 1..19: note = siRNA antisense sequence
  source 1..19: mol_type = other RNA
tcaaatgaagctgctgact

SEQ ID NO: 52088 - RNA, 19 nt, synthetic construct
  misc_feature 1..19: note = siRNA sense sequence
  source 1..19: mol_type = other RNA
gtcagcagcttcatttgaa

SEQ ID NO: 52089 - RNA, 19 nt, synthetic construct
  misc_feature 1..19: note = siRNA antisense sequence
  source 1..19: mol_type = other RNA
ttcaaatgaagctgctgac

SEQ ID NO: 52090 - RNA, 19 nt, synthetic construct
  misc_feature 1..19: note = siRNA sense sequence
  source 1..19: mol_type = other RNA
aaatgtctcagactggctt

SEQ ID NO: 52091 - RNA, 19 nt, synthetic construct
  misc_feature 1..19: note = siRNA antisense sequence
  source 1..19: mol_type = other RNA
aagccagtctgagacattt

SEQ ID NO: 52092 - RNA, 19 nt, synthetic construct
  misc_feature 1..19: note = siRNA sense sequence
  source 1..19: mol_type = other RNA
aatgtctcagactggcttc

SEQ ID NO: 52093 - RNA, 19 nt, synthetic construct
  misc_feature 1..19: note = siRNA antisense sequence
  source 1..19: mol_type = other RNA
gaagccagtctgagacatt

SEQ ID NO: 52094 - RNA, 19 nt, synthetic construct
  misc_feature 1..19: note = siRNA sense sequence
  source 1..19: mol_type = other RNA
ctggcttcagtgctcatta

SEQ ID NO: 52095 - RNA, 19 nt, synthetic construct
  misc_feature 1..19: note = siRNA antisense sequence
  source 1..19: mol_type = other RNA
taatgagcactgaagccag

SEQ ID NO: 52096 - RNA, 19 nt, synthetic construct
  misc_feature 1..19: note = siRNA sense sequence
  source 1..19: mol_type = other RNA
tggcttcagtgctcattat

SEQ ID NO: 52097 - RNA, 19 nt, synthetic construct
  misc_feature 1..19: note = siRNA antisense sequence
  source 1..19: mol_type = other RNA
ataatgagcactgaagcca

SEQ ID NO: 52098 - RNA, 19 nt, synthetic construct
  misc_feature 1..19: note = siRNA sense sequence
  source 1..19: mol_type = other RNA
ggcttcagtgctcattatt

SEQ ID NO: 52099 - RNA, 19 nt, synthetic construct
  misc_feature 1..19: note = siRNA antisense sequence
  source 1..19: mol_type = other RNA
aataatgagcactgaagcc

SEQ ID NO: 52100 - RNA, 19 nt, synthetic construct
  misc_feature 1..19: note = siRNA sense sequence
  source 1..19: mol_type = other RNA
gcttcagtgctcattattc

SEQ ID NO: 52101 - RNA, 19 nt, synthetic construct
  misc_feature 1..19: note = siRNA antisense sequence
  source 1..19: mol_type = other RNA
gaataatgagcactgaagc

SEQ ID NO: 52102 - RNA, 19 nt, synthetic construct
  misc_feature 1..19: note = siRNA sense sequence
  source 1..19: mol_type = other RNA
agtgctcattattcacagg

SEQ ID NO: 52103 - RNA, 19 nt, synthetic construct
  misc_feature 1..19: note = siRNA antisense sequence
  source 1..19: mol_type = other RNA
cctgtgaataatgagcact

SEQ ID NO: 52104 - RNA, 19 nt, synthetic construct
  misc_feature 1..19: note = siRNA sense sequence
  source 1..19: mol_type = other RNA
tgctcattattcacaggta

SEQ ID NO: 52105 - RNA, 19 nt, synthetic construct
  misc_feature 1..19: note = siRNA antisense sequence
  source 1..19: mol_type = other RNA
tacctgtgaataatgagca

SEQ ID NO: 52106 - RNA, 19 nt, synthetic construct
  misc_feature 1..19: note = siRNA sense sequence
  source 1..19: mol_type = other RNA
cattattcacaggtatgtt

SEQ ID NO: 52107 - RNA, 19 nt, synthetic construct
  misc_feature 1..19: note = siRNA antisense sequence
  source 1..19: mol_type = other RNA
aacatacctgtgaataatg

SEQ ID NO: 52108 - RNA, 19 nt, synthetic construct
  misc_feature 1..19: note = siRNA sense sequence
  source 1..19: mol_type = other RNA
attattcacaggtatgttg

SEQ ID NO: 52109 - RNA, 19 nt, synthetic construct
  misc_feature 1..19: note = siRNA antisense sequence
  source 1..19: mol_type = other RNA
caacatacctgtgaataat

SEQ ID NO: 52110 - RNA, 19 nt, synthetic construct
  misc_feature 1..19: note = siRNA sense sequence
  source 1..19: mol_type = other RNA
ttcacaggtatgttgacca

SEQ ID NO: 52111 - RNA, 19 nt, synthetic construct
  misc_feature 1..19: note = siRNA antisense sequence
  source 1..19: mol_type = other RNA
tggtcaacatacctgtgaa

SEQ ID NO: 52112 - RNA, 19 nt, synthetic construct
  misc_feature 1..19: note = siRNA sense sequence
  source 1..19: mol_type = other RNA
caggtatgttgaccagttg

SEQ ID NO: 52113 - RNA, 19 nt, synthetic construct
  misc_feature 1..19: note = siRNA antisense sequence
  source 1..19: mol_type = other RNA
caactggtcaacatacctg

SEQ ID NO: 52114 - RNA, 19 nt, synthetic construct
  misc_feature 1..19: note = siRNA sense sequence
  source 1..19: mol_type = other RNA
aggtatgttgaccagttgg

SEQ ID NO: 52115 - RNA, 19 nt, synthetic construct
  misc_feature 1..19: note = siRNA antisense sequence
  source 1..19: mol_type = other RNA
ccaactggtcaacatacct

SEQ ID NO: 52116 - RNA, 19 nt, synthetic construct
  misc_feature 1..19: note = siRNA sense sequence
  source 1..19: mol_type = other RNA
ggtatgttgaccagttggt

SEQ ID NO: 52117 - RNA, 19 nt, synthetic construct
  misc_feature 1..19: note = siRNA antisense sequence
  source 1..19: mol_type = other RNA
accaactggtcaacatacc

SEQ ID NO: 52118 - RNA, 19 nt, synthetic construct
  misc_feature 1..19: note = siRNA sense sequence
  source 1..19: mol_type = other RNA
gtatgttgaccagttggtg

SEQ ID NO: 52119 - RNA, 19 nt, synthetic construct
  misc_feature 1..19: note = siRNA antisense sequence
  source 1..19: mol_type = other RNA
caccaactggtcaacatac

SEQ ID NO: 52120 - RNA, 19 nt, synthetic construct
  misc_feature 1..19: note = siRNA sense sequence
  source 1..19: mol_type = other RNA
tatgttgaccagttggtga

SEQ ID NO: 52121 - RNA, 19 nt, synthetic construct
  misc_feature 1..19: note = siRNA antisense sequence
  source 1..19: mol_type = other RNA
tcaccaactggtcaacata

SEQ ID NO: 52122 - RNA, 19 nt, synthetic construct
  misc_feature 1..19: note = siRNA sense sequence
  source 1..19: mol_type = other RNA
atgttgaccagttggtgaa

SEQ ID NO: 52123 - RNA, 19 nt, synthetic construct
  misc_feature 1..19: note = siRNA antisense sequence
  source 1..19: mol_type = other RNA
ttcaccaactggtcaacat

SEQ ID NO: 52124 - RNA, 19 nt, synthetic construct
  misc_feature 1..19: note = siRNA sense sequence
  source 1..19: mol_type = other RNA
tgtttgcaagacttccctt

SEQ ID NO: 52125 - RNA, 19 nt, synthetic construct
  misc_feature 1..19: note = siRNA antisense sequence
  source 1..19: mol_type = other RNA
aagggaagtcttgcaaaca

SEQ ID NO: 52126 - RNA, 19 nt, synthetic construct
  misc_feature 1..19: note = siRNA sense sequence
  source 1..19: mol_type = other RNA
gtttgcaagacttcccttc

SEQ ID NO: 52127 - RNA, 19 nt, synthetic construct
  misc_feature 1..19: note = siRNA antisense sequence
  source 1..19: mol_type = other RNA
gaagggaagtcttgcaaac

SEQ ID NO: 52128 - RNA, 19 nt, synthetic construct
  misc_feature 1..19: note = siRNA sense sequence
  source 1..19: mol_type = other RNA
tttgcaagacttcccttcc

SEQ ID NO: 52129 - RNA, 19 nt, synthetic construct
  misc_feature 1..19: note = siRNA antisense sequence
  source 1..19: mol_type = other RNA
ggaagggaagtcttgcaaa

SEQ ID NO: 52130 - RNA, 19 nt, synthetic construct
  misc_feature 1..19: note = siRNA sense sequence
  source 1..19: mol_type = other RNA
ttgcaagacttcccttccc

SEQ ID NO: 52131 - RNA, 19 nt, synthetic construct
  misc_feature 1..19: note = siRNA antisense sequence
  source 1..19: mol_type = other RNA
gggaagggaagtcttgcaa

SEQ ID NO: 52132 - RNA, 19 nt, synthetic construct
  misc_feature 1..19: note = siRNA sense sequence
  source 1..19: mol_type = other RNA
gcaagacttcccttcccaa

SEQ ID NO: 52133 - RNA, 19 nt, synthetic construct
  misc_feature 1..19: note = siRNA antisense sequence
  source 1..19: mol_type = other RNA
ttgggaagggaagtcttgc

SEQ ID NO: 52134 - RNA, 19 nt, synthetic construct
  misc_feature 1..19: note = siRNA sense sequence
  source 1..19: mol_type = other RNA
aagacttcccttcccaaaa

SEQ ID NO: 52135 - RNA, 19 nt, synthetic construct
  misc_feature 1..19: note = siRNA antisense sequence
  source 1..19: mol_type = other RNA
ttttgggaagggaagtctt

SEQ ID NO: 52136 - RNA, 19 nt, synthetic construct
  misc_feature 1..19: note = siRNA sense sequence
  source 1..19: mol_type = other RNA
acatctagccatcagtatg

SEQ ID NO: 52137 - RNA, 19 nt, synthetic construct
  misc_feature 1..19: note = siRNA antisense sequence
  source 1..19: mol_type = other RNA
catactgatggctagatgt

SEQ ID NO: 52138 - RNA, 19 nt, synthetic construct
  misc_feature 1..19: note = siRNA sense sequence
  source 1..19: mol_type = other RNA
catctagccatcagtatgt

SEQ ID NO: 52139 - RNA, 19 nt, synthetic construct
  misc_feature 1..19: note = siRNA antisense sequence
  source 1..19: mol_type = other RNA
acatactgatggctagatg

SEQ ID NO: 52140 - RNA, 19 nt, synthetic construct
  misc_feature 1..19: note = siRNA sense sequence
  source 1..19: mol_type = other RNA
atctagccatcagtatgta

SEQ ID NO: 52141 - RNA, 19 nt, synthetic construct
  misc_feature 1..19: note = siRNA antisense sequence
  source 1..19: mol_type = other RNA
tacatactgatggctagat

SEQ ID NO: 52142 - RNA, 19 nt, synthetic construct
  misc_feature 1..19: note = siRNA sense sequence
  source 1..19: mol_type = other RNA
acgtgcagttcatagcttg

SEQ ID NO: 52143 - RNA, 19 nt, synthetic construct
  misc_feature 1..19: note = siRNA antisense sequence
  source 1..19: mol_type = other RNA
caagctatgaactgcacgt

SEQ ID NO: 52144 - RNA, 19 nt, synthetic construct
  misc_feature 1..19: note = siRNA sense sequence
  source 1..19: mol_type = other RNA
cgtgcagttcatagcttga

SEQ ID NO: 52145 - RNA, 19 nt, synthetic construct
  misc_feature 1..19: note = siRNA antisense sequence
  source 1..19: mol_type = other RNA
tcaagctatgaactgcacg

SEQ ID NO: 52146 - RNA, 19 nt, synthetic construct
  misc_feature 1..19: note = siRNA sense sequence
  source 1..19: mol_type = other RNA
ttatgcaggctatgatgat

SEQ ID NO: 52147 - RNA, 19 nt, synthetic construct
  misc_feature 1..19: note = siRNA antisense sequence
  source 1..19: mol_type = other RNA
atcatcatagcctgcataa

SEQ ID NO: 52148 - RNA, 19 nt, synthetic construct
  misc_feature 1..19: note = siRNA sense sequence
  source 1..19: mol_type = other RNA
tatgcaggctatgatgatg

SEQ ID NO: 52149 - RNA, 19 nt, synthetic construct
  misc_feature 1..19: note = siRNA antisense sequence
  source 1..19: mol_type = other RNA
catcatcatagcctgcata

SEQ ID NO: 52150 - RNA, 19 nt, synthetic construct
  misc_feature 1..19: note = siRNA sense sequence
  source 1..19: mol_type = other RNA
atgcaggctatgatgatgt

SEQ ID NO: 52151 - RNA, 19 nt, synthetic construct
  misc_feature 1..19: note = siRNA antisense sequence
  source 1..19: mol_type = other RNA
acatcatcatagcctgcat

SEQ ID NO: 52152 - RNA, 19 nt, synthetic construct
  misc_feature 1..19: note = siRNA sense sequence
  source 1..19: mol_type = other RNA
tgcaggctatgatgatgtt

SEQ ID NO: 52153 - RNA, 19 nt, synthetic construct
  misc_feature 1..19: note = siRNA antisense sequence
  source 1..19: mol_type = other RNA
aacatcatcatagcctgca

SEQ ID NO: 52154 - RNA, 19 nt, synthetic construct
  misc_feature 1..19: note = siRNA sense sequence
  source 1..19: mol_type = other RNA
gcaggctatgatgatgttt

SEQ ID NO: 52155 - RNA, 19 nt, synthetic construct
  misc_feature 1..19: note = siRNA antisense sequence
  source 1..19: mol_type = other RNA
aaacatcatcatagcctgc

SEQ ID NO: 52156 - RNA, 19 nt, synthetic construct
  misc_feature 1..19: note = siRNA sense sequence
  source 1..19: mol_type = other RNA
caggctatgatgatgtttt

SEQ ID NO: 52157 - RNA, 19 nt, synthetic construct
  misc_feature 1..19: note = siRNA antisense sequence
  source 1..19: mol_type = other RNA
aaaacatcatcatagcctg

SEQ ID NO: 52158 - RNA, 19 nt, synthetic construct
  misc_feature 1..19: note = siRNA sense sequence
  source 1..19: mol_type = other RNA
aggctatgatgatgttttc

SEQ ID NO: 52159 - RNA, 19 nt, synthetic construct
  misc_feature 1..19: note = siRNA antisense sequence
  source 1..19: mol_type = other RNA
gaaaacatcatcatagcct

SEQ ID NO: 52160 - RNA, 19 nt, synthetic construct
  misc_feature 1..19: note = siRNA sense sequence
  source 1..19: mol_type = other RNA
ggctatgatgatgttttct

SEQ ID NO: 52161 - RNA, 19 nt, synthetic construct
  misc_feature 1..19: note = siRNA antisense sequence
  source 1..19: mol_type = other RNA
agaaaacatcatcatagcc

SEQ ID NO: 52162 - RNA, 19 nt, synthetic construct
  misc_feature 1..19: note = siRNA sense sequence
  source 1..19: mol_type = other RNA
gctatgatgatgttttcta

SEQ ID NO: 52163 - RNA, 19 nt, synthetic construct
  misc_feature 1..19: note = siRNA antisense sequence
  source 1..19: mol_type = other RNA
tagaaaacatcatcatagc

SEQ ID NO: 52164 - RNA, 19 nt, synthetic construct
  misc_feature 1..19: note = siRNA sense sequence
  source 1..19: mol_type = other RNA
aaaatatgttctctcacac

SEQ ID NO: 52165 - RNA, 19 nt, synthetic construct
  misc_feature 1..19: note = siRNA antisense sequence
  source 1..19: mol_type = other RNA
gtgtgagagaacatatttt

SEQ ID NO: 52166 - RNA, 19 nt, synthetic construct
  misc_feature 1..19: note = siRNA sense sequence
  source 1..19: mol_type = other RNA
cacagttcactacattgta

SEQ ID NO: 52167 - RNA, 19 nt, synthetic construct
  misc_feature 1..19: note = siRNA antisense sequence
  source 1..19: mol_type = other RNA
tacaatgtagtgaactgtg

SEQ ID NO: 52168 - RNA, 19 nt, synthetic construct
  misc_feature 1..19: note = siRNA sense sequence
  source 1..19: mol_type = other RNA
acagttcactacattgtac

SEQ ID NO: 52169 - RNA, 19 nt, synthetic construct
  misc_feature 1..19: note = siRNA antisense sequence
  source 1..19: mol_type = other RNA
gtacaatgtagtgaactgt

SEQ ID NO: 52170 - RNA, 19 nt, synthetic construct
  misc_feature 1..19: note = siRNA sense sequence
  source 1..19: mol_type = other RNA
cagttcactacattgtact

SEQ ID NO: 52171 - RNA, 19 nt, synthetic construct
  misc_feature 1..19: note = siRNA antisense sequence
  source 1..19: mol_type = other RNA
agtacaatgtagtgaactg

SEQ ID NO: 52172 - RNA, 19 nt, synthetic construct
  misc_feature 1..19: note = siRNA sense sequence
  source 1..19: mol_type = other RNA
agttcactacattgtacta

SEQ ID NO: 52173 - RNA, 19 nt, synthetic construct
  misc_feature 1..19: note = siRNA antisense sequence
  source 1..19: mol_type = other RNA
tagtacaatgtagtgaact

SEQ ID NO: 52174 - RNA, 19 nt, synthetic construct
  misc_feature 1..19: note = siRNA sense sequence
  source 1..19: mol_type = other RNA
gttcactacattgtactaa

SEQ ID NO: 52175 - RNA, 19 nt, synthetic construct
  misc_feature 1..19: note = siRNA antisense sequence
  source 1..19: mol_type = other RNA
ttagtacaatgtagtgaac

SEQ ID NO: 52176 - RNA, 19 nt, synthetic construct
  misc_feature 1..19: note = siRNA sense sequence
  source 1..19: mol_type = other RNA
cactacattgtactaatag

SEQ ID NO: 52177 - RNA, 19 nt, synthetic construct
  misc_feature 1..19: note = siRNA antisense sequence
  source 1..19: mol_type = other RNA
ctattagtacaatgtagtg

SEQ ID NO: 52178 - RNA, 19 nt, synthetic construct
  misc_feature 1..19: note = siRNA sense sequence
  source 1..19: mol_type = other RNA
cattgtactaatagttgtg

SEQ ID NO: 52179 - RNA, 19 nt, synthetic construct
  misc_feature 1..19: note = siRNA antisense sequence
  source 1..19: mol_type = other RNA
cacaactattagtacaatg

SEQ ID NO: 52180 - RNA, 19 nt, synthetic construct
  misc_feature 1..19: note = siRNA sense sequence
  source 1..19: mol_type = other RNA
gtactaatagttgtgaatc

SEQ ID NO: 52181 - RNA, 19 nt, synthetic construct
  misc_feature 1..19: note = siRNA antisense sequence
  source 1..19: mol_type = other RNA
gattcacaactattagtac

SEQ ID NO: 52182 - RNA, 19 nt, synthetic construct
  misc_feature 1..19: note = siRNA sense sequence
  source 1..19: mol_type = other RNA
aatagttgtgaatcagaca

SEQ ID NO: 52183 - RNA, 19 nt, synthetic construct
  misc_feature 1..19: note = siRNA antisense sequence
  source 1..19: mol_type = other RNA
tgtctgattcacaactatt

SEQ ID NO: 52184 - RNA, 19 nt, synthetic construct
  misc_feature 1..19: note = siRNA sense sequence
  source 1..19: mol_type = other RNA
atagttgtgaatcagacag

SEQ ID NO: 52185 - RNA, 19 nt, synthetic construct
  misc_feature 1..19: note = siRNA antisense sequence
  source 1..19: mol_type = other RNA
ctgtctgattcacaactat

SEQ ID NO: 52186 - RNA, 19 nt, synthetic construct
  misc_feature 1..19: note = siRNA sense sequence
  source 1..19: mol_type = other RNA
tagttgtgaatcagacagt

SEQ ID NO: 52187 - RNA, 19 nt, synthetic construct
  misc_feature 1..19: note = siRNA antisense sequence
  source 1..19: mol_type = other RNA
actgtctgattcacaacta

SEQ ID NO: 52188 - RNA, 19 nt, synthetic construct
  misc_feature 1..19: note = siRNA sense sequence
  source 1..19: mol_type = other RNA
agttgtgaatcagacagtg

SEQ ID NO: 52189 - RNA, 19 nt, synthetic construct
  misc_feature 1..19: note = siRNA antisense sequence
  source 1..19: mol_type = other RNA
cactgtctgattcacaact

SEQ ID NO: 52190 - RNA, 19 nt, synthetic construct
  misc_feature 1..19: note = siRNA sense sequence
  source 1..19: mol_type = other RNA
gttgtgaatcagacagtgt

SEQ ID NO: 52191 - RNA, 19 nt, synthetic construct
  misc_feature 1..19: note = siRNA antisense sequence
  source 1..19: mol_type = other RNA
acactgtctgattcacaac

SEQ ID NO: 52192 - RNA, 19 nt, synthetic construct
  misc_feature 1..19: note = siRNA sense sequence
  source 1..19: mol_type = other RNA
ttgtgaatcagacagtgtg

SEQ ID NO: 52193 - RNA, 19 nt, synthetic construct
  misc_feature 1..19: note = siRNA antisense sequence
  source 1..19: mol_type = other RNA
cacactgtctgattcacaa

SEQ ID NO: 52194 - RNA, 19 nt, synthetic construct
  misc_feature 1..19: note = siRNA sense sequence
  source 1..19: mol_type = other RNA
tgtgaatcagacagtgtga

SEQ ID NO: 52195 - RNA, 19 nt, synthetic construct
  misc_feature 1..19: note = siRNA antisense sequence
  source 1..19: mol_type = other RNA
tcacactgtctgattcaca

SEQ ID NO: 52196 - RNA, 19 nt, synthetic construct
  misc_feature 1..19: note = siRNA sense sequence
  source 1..19: mol_type = other RNA
gacagtgtgagctttgcct

SEQ ID NO: 52197 - RNA, 19 nt, synthetic construct
  misc_feature 1..19: note = siRNA antisense sequence
  source 1..19: mol_type = other RNA
aggcaaagctcacactgtc

SEQ ID NO: 52198 - RNA, 19 nt, synthetic construct
  misc_feature 1..19: note = siRNA sense sequence
  source 1..19: mol_type = other RNA
gtgtgagctttgccttgta

SEQ ID NO: 52199 - RNA, 19 nt, synthetic construct
  misc_feature 1..19: note = siRNA antisense sequence
  source 1..19: mol_type = other RNA
tacaaggcaaagctcacac

SEQ ID NO: 52200 - RNA, 19 nt, synthetic construct
  misc_feature 1..19: note = siRNA sense sequence
  source 1..19: mol_type = other RNA
tgtgagctttgccttgtaa

SEQ ID NO: 52201 - RNA, 19 nt, synthetic construct
  misc_feature 1..19: note = siRNA antisense sequence
  source 1..19: mol_type = other RNA
ttacaaggcaaagctcaca

SEQ ID NO: 52202 - RNA, 19 nt, synthetic construct
  misc_feature 1..19: note = siRNA sense sequence
  source 1..19: mol_type = other RNA
gtgagctttgccttgtaat

SEQ ID NO: 52203 - RNA, 19 nt, synthetic construct
  misc_feature 1..19: note = siRNA antisense sequence
  source 1..19: mol_type = other RNA
attacaaggcaaagctcac

SEQ ID NO: 52204 - RNA, 19 nt, synthetic construct
  misc_feature 1..19: note = siRNA sense sequence
  source 1..19: mol_type = other RNA
tgagctttgccttgtaatt

SEQ ID NO: 52205 - RNA, 19 nt, synthetic construct
  misc_feature 1..19: note = siRNA antisense sequence
  source 1..19: mol_type = other RNA
aattacaaggcaaagctca

SEQ ID NO: 52206 - RNA, 19 nt, synthetic construct
  misc_feature 1..19: note = siRNA sense sequence
  source 1..19: mol_type = other RNA
gagctttgccttgtaatta

SEQ ID NO: 52207 - RNA, 19 nt, synthetic construct
  misc_feature 1..19: note = siRNA antisense sequence
  source 1..19: mol_type = other RNA
taattacaaggcaaagctc

SEQ ID NO: 52208 - RNA, 19 nt, synthetic construct
  misc_feature 1..19: note = siRNA sense sequence
  source 1..19: mol_type = other RNA
agctttgccttgtaattat

SEQ ID NO: 52209 - RNA, 19 nt, synthetic construct
  misc_feature 1..19: note = siRNA antisense sequence
  source 1..19: mol_type = other RNA
ataattacaaggcaaagct

SEQ ID NO: 52210 - RNA, 19 nt, synthetic construct
  misc_feature 1..19: note = siRNA sense sequence
  source 1..19: mol_type = other RNA
tgccttgtaattatgtatc

SEQ ID NO: 52211 - RNA, 19 nt, synthetic construct
  misc_feature 1..19: note = siRNA antisense sequence
  source 1..19: mol_type = other RNA
gatacataattacaaggca

SEQ ID NO: 52212 - RNA, 19 nt, synthetic construct
  misc_feature 1..19: note = siRNA sense sequence
  source 1..19: mol_type = other RNA
gccttgtaattatgtatct

SEQ ID NO: 52213 - RNA, 19 nt, synthetic construct
  misc_feature 1..19: note = siRNA antisense sequence
  source 1..19: mol_type = other RNA
agatacataattacaaggc

SEQ ID NO: 52214 - RNA, 19 nt, synthetic construct
  misc_feature 1..19: note = siRNA sense sequence
  source 1..19: mol_type = other RNA
catatttgctacagatgtg

SEQ ID NO: 52215 - RNA, 19 nt, synthetic construct
  misc_feature 1..19: note = siRNA antisense sequence
  source 1..19: mol_type = other RNA
cacatctgtagcaaatatg

SEQ ID NO: 52216 - RNA, 19 nt, synthetic construct
  misc_feature 1..19: note = siRNA sense sequence
  source 1..19: mol_type = other RNA
atatttgctacagatgtgg

SEQ ID NO: 52217 - RNA, 19 nt, synthetic construct
  misc_feature 1..19: note = siRNA antisense sequence
  source 1..19: mol_type = other RNA
ccacatctgtagcaaatat

SEQ ID NO: 52218 - RNA, 19 nt, synthetic construct
  misc_feature 1..19: note = siRNA sense sequence
  source 1..19: mol_type = other RNA
tatttgctacagatgtgga

SEQ ID NO: 52219 - RNA, 19 nt, synthetic construct
  misc_feature 1..19: note = siRNA antisense sequence
  source 1..19: mol_type = other RNA
tccacatctgtagcaaata

SEQ ID NO: 52220 - RNA, 19 nt, synthetic construct
  misc_feature 1..19: note = siRNA sense sequence
  source 1..19: mol_type = other RNA
ttgctacagatgtggaata

SEQ ID NO: 52221 - RNA, 19 nt, synthetic construct
  misc_feature 1..19: note = siRNA antisense sequence
  source 1..19: mol_type = other RNA
tattccacatctgtagcaa

SEQ ID NO: 52222 - RNA, 19 nt, synthetic construct
  misc_feature 1..19: note = siRNA sense sequence
  source 1..19: mol_type = other RNA
tgctacagatgtggaatat

SEQ ID NO: 52223 - RNA, 19 nt, synthetic construct
  misc_feature 1..19: note = siRNA antisense sequence
  source 1..19: mol_type = other RNA
atattccacatctgtagca

SEQ ID NO: 52224 - RNA, 19 nt, synthetic construct
  misc_feature 1..19: note = siRNA sense sequence
  source 1..19: mol_type = other RNA
ccacaggtcaaggaattca

SEQ ID NO: 52225 - RNA, 19 nt, synthetic construct
  misc_feature 1..19: note = siRNA antisense sequence
  source 1..19: mol_type = other RNA
tgaattccttgacctgtgg

SEQ ID NO: 52226 - RNA, 19 nt, synthetic construct
  misc_feature 1..19: note = siRNA sense sequence
  source 1..19: mol_type = other RNA
cacaggtcaaggaattcaa

SEQ ID NO: 52227 - RNA, 19 nt, synthetic construct
  misc_feature 1..19: note = siRNA antisense sequence
  source 1..19: mol_type = other RNA
ttgaattccttgacctgtg

SEQ ID NO: 52228 - RNA, 19 nt, synthetic construct
  misc_feature 1..19: note = siRNA sense sequence
  source 1..19: mol_type = other RNA
acaggtcaaggaattcaag

SEQ ID NO: 52229 - RNA, 19 nt, synthetic construct
  misc_feature 1..19: note = siRNA antisense sequence
  source 1..19: mol_type = other RNA
cttgaattccttgacctgt

SEQ ID NO: 52230 - RNA, 19 nt, synthetic construct
  misc_feature 1..19: note = siRNA sense sequence
  source 1..19: mol_type = other RNA
caggtcaaggaattcaagg

SEQ ID NO: 52231 - RNA, 19 nt, synthetic construct
  misc_feature 1..19: note = siRNA antisense sequence
  source 1..19: mol_type = other RNA
ccttgaattccttgacctg

SEQ ID NO: 52232 - RNA, 19 nt, synthetic construct
  misc_feature 1..19: note = siRNA sense sequence
  source 1..19: mol_type = other RNA
aggtcaaggaattcaaggg

SEQ ID NO: 52233 - RNA, 19 nt, synthetic construct
  misc_feature 1..19: note = siRNA antisense sequence
  source 1..19: mol_type = other RNA
cccttgaattccttgacct

SEQ ID NO: 52234 - RNA, 19 nt, synthetic construct
  misc_feature 1..19: note = siRNA sense sequence
  source 1..19: mol_type = other RNA
ggtcaaggaattcaagggt

SEQ ID NO: 52235 - RNA, 19 nt, synthetic construct
  misc_feature 1..19: note = siRNA antisense sequence
  source 1..19: mol_type = other RNA
acccttgaattccttgacc

SEQ ID NO: 52236 - RNA, 19 nt, synthetic construct
  misc_feature 1..19: note = siRNA sense sequence
  source 1..19: mol_type = other RNA
ttcaagggtcttattagaa

SEQ ID NO: 52237 - RNA, 19 nt, synthetic construct
  misc_feature 1..19: note = siRNA antisense sequence
  source 1..19: mol_type = other RNA
ttctaataagacccttgaa

SEQ ID NO: 52238 - RNA, 19 nt, synthetic construct
  misc_feature 1..19: note = siRNA sense sequence
  source 1..19: mol_type = other RNA
caagggtcttattagaatt

SEQ ID NO: 52239 - RNA, 19 nt, synthetic construct
  misc_feature 1..19: note = siRNA antisense sequence
  source 1..19: mol_type = other RNA
aattctaataagacccttg

SEQ ID NO: 52240 - RNA, 19 nt, synthetic construct
  misc_feature 1..19: note = siRNA sense sequence
  source 1..19: mol_type = other RNA
aagggtcttattagaattc

SEQ ID NO: 52241 - RNA, 19 nt, synthetic construct
  misc_feature 1..19: note = siRNA antisense sequence
  source 1..19: mol_type = other RNA
gaattctaataagaccctt

SEQ ID NO: 52242 - RNA, 19 nt, synthetic construct
  misc_feature 1..19: note = siRNA sense sequence
  source 1..19: mol_type = other RNA
agggtcttattagaattcc

SEQ ID NO: 52243 - RNA, 19 nt, synthetic construct
  misc_feature 1..19: note = siRNA antisense sequence
  source 1..19: mol_type = other RNA
ggaattctaataagaccct

SEQ ID NO: 52244 - RNA, 19 nt, synthetic construct
  misc_feature 1..19: note = siRNA sense sequence
  source 1..19: mol_type = other RNA
gggtcttattagaattcca

SEQ ID NO: 52245 - RNA, 19 nt, synthetic construct
  misc_feature 1..19: note = siRNA antisense sequence
  source 1..19: mol_type = other RNA
tggaattctaataagaccc

SEQ ID NO: 52246 - RNA, 19 nt, synthetic construct
  misc_feature 1..19: note = siRNA sense sequence
  source 1..19: mol_type = other RNA
ggtcttattagaattccat

SEQ ID NO: 52247 - RNA, 19 nt, synthetic construct
  misc_feature 1..19: note = siRNA antisense sequence
  source 1..19: mol_type = other RNA
atggaattctaataagacc

SEQ ID NO: 52248 - RNA, 19 nt, synthetic construct
  misc_feature 1..19: note = siRNA sense sequence
  source 1..19: mol_type = other RNA
ttagaattccatgttcaag

SEQ ID NO: 52249 - RNA, 19 nt, synthetic construct
  misc_feature 1..19: note = siRNA antisense sequence
  source 1..19: mol_type = other RNA
cttgaacatggaattctaa

SEQ ID NO: 52250 - RNA, 19 nt, synthetic construct
  misc_feature 1..19: note = siRNA sense sequence
  source 1..19: mol_type = other RNA
attccatgttcaagaccta

SEQ ID NO: 52251 - RNA, 19 nt, synthetic construct
  misc_feature 1..19: note = siRNA antisense sequence
  source 1..19: mol_type = other RNA
taggtcttgaacatggaat

SEQ ID NO: 52252 - RNA, 19 nt, synthetic construct
  misc_feature 1..19: note = siRNA sense sequence
  source 1..19: mol_type = other RNA
ttccatgttcaagacctag

SEQ ID NO: 52253 - RNA, 19 nt, synthetic construct
  misc_feature 1..19: note = siRNA antisense sequence
  source 1..19: mol_type = other RNA
ctaggtcttgaacatggaa

SEQ ID NO: 52254 - RNA, 19 nt, synthetic construct
  misc_feature 1..19: note = siRNA sense sequence
  source 1..19: mol_type = other RNA
tccatgttcaagacctagg

SEQ ID NO: 52255 - RNA, 19 nt, synthetic construct
  misc_feature 1..19: note = siRNA antisense sequence
  source 1..19: mol_type = other RNA
cctaggtcttgaacatgga

SEQ ID NO: 52256 - RNA, 19 nt, synthetic construct
  misc_feature 1..19: note = siRNA sense sequence
  source 1..19: mol_type = other RNA
ccatgttcaagacctagga

SEQ ID NO: 52257 - RNA, 19 nt, synthetic construct
  misc_feature 1..19: note = siRNA antisense sequence
  source 1..19: mol_type = other RNA
tcctaggtcttgaacatgg

SEQ ID NO: 52258 - RNA, 19 nt, synthetic construct
  misc_feature 1..19: note = siRNA sense sequence
  source 1..19: mol_type = other RNA
catgttcaagacctaggat

SEQ ID NO: 52259 - RNA, 19 nt, synthetic construct
  misc_feature 1..19: note = siRNA antisense sequence
  source 1..19: mol_type = other RNA
atcctaggtcttgaacatg

SEQ ID NO: 52260 - RNA, 19 nt, synthetic construct
  misc_feature 1..19: note = siRNA sense sequence
  source 1..19: mol_type = other RNA
atgttcaagacctaggatg

SEQ ID NO: 52261 - RNA, 19 nt, synthetic construct
  misc_feature 1..19: note = siRNA antisense sequence
  source 1..19: mol_type = other RNA
catcctaggtcttgaacat

SEQ ID NO: 52262 - RNA, 19 nt, synthetic construct
  misc_feature 1..19: note = siRNA sense sequence
  source 1..19: mol_type = other RNA
agacctaggatgctgggca

SEQ ID NO: 52263 - RNA, 19 nt, synthetic construct
  misc_feature 1..19: note = siRNA antisense sequence
  source 1..19: mol_type = other RNA
tgcccagcatcctaggtct

SEQ ID NO: 52264 - RNA, 19 nt, synthetic construct
  misc_feature 1..19: note = siRNA sense sequence
  source 1..19: mol_type = other RNA
gacctaggatgctgggcac

SEQ ID NO: 52265 - RNA, 19 nt, synthetic construct
  misc_feature 1..19: note = siRNA antisense sequence
  source 1..19: mol_type = other RNA
gtgcccagcatcctaggtc

SEQ ID NO: 52266 - RNA, 19 nt, synthetic construct
  misc_feature 1..19: note = siRNA sense sequence
  source 1..19: mol_type = other RNA
acctaggatgctgggcacc

SEQ ID NO: 52267 - RNA, 19 nt, synthetic construct
  misc_feature 1..19: note = siRNA antisense sequence
  source 1..19: mol_type = other RNA
ggtgcccagcatcctaggt

SEQ ID NO: 52268 - RNA, 19 nt, synthetic construct
  misc_feature 1..19: note = siRNA sense sequence
  source 1..19: mol_type = other RNA
tgggcacccagaataaagt

SEQ ID NO: 52269 - RNA, 19 nt, synthetic construct
  misc_feature 1..19: note = siRNA antisense sequence
  source 1..19: mol_type = other RNA
actttattctgggtgccca

SEQ ID NO: 52270 - RNA, 19 nt, synthetic construct
  misc_feature 1..19: note = siRNA sense sequence
  source 1..19: mol_type = other RNA
gggcacccagaataaagta

SEQ ID NO: 52271 - RNA, 19 nt, synthetic construct
  misc_feature 1..19: note = siRNA antisense sequence
  source 1..19: mol_type = other RNA
tactttattctgggtgccc

SEQ ID NO: 52272 - RNA, 19 nt, synthetic construct
  misc_feature 1..19: note = siRNA sense sequence
  source 1..19: mol_type = other RNA
ggcacccagaataaagtag

SEQ ID NO: 52273 - RNA, 19 nt, synthetic construct
  misc_feature 1..19: note = siRNA antisense sequence
  source 1..19: mol_type = other RNA
ctactttattctgggtgcc

SEQ ID NO: 52274 - RNA, 19 nt, synthetic construct
  misc_feature 1..19: note = siRNA sense sequence
  source 1..19: mol_type = other RNA
cacccagaataaagtagaa

SEQ ID NO: 52275 - RNA, 19 nt, synthetic construct
  misc_feature 1..19: note = siRNA antisense sequence
  source 1..19: mol_type = other RNA
ttctactttattctgggtg

SEQ ID NO: 52276 - RNA, 19 nt, synthetic construct
  misc_feature 1..19: note = siRNA sense sequence
  source 1..19: mol_type = other RNA
gcataatggtccttgcaaa

SEQ ID NO: 52277 - RNA, 19 nt, synthetic construct
  misc_feature 1..19: note = siRNA antisense sequence
  source 1..19: mol_type = other RNA
tttgcaaggaccattatgc

SEQ ID NO: 52278 - RNA, 19 nt, synthetic construct
  misc_feature 1..19: note = siRNA sense sequence
  source 1..19: mol_type = other RNA
cataatggtccttgcaaaa

SEQ ID NO: 52279 - RNA, 19 nt, synthetic construct
  misc_feature 1..19: note = siRNA antisense sequence
  source 1..19: mol_type = other RNA
ttttgcaaggaccattatg

SEQ ID NO: 52280 - RNA, 19 nt, synthetic construct
  misc_feature 1..19: note = siRNA sense sequence
  source 1..19: mol_type = other RNA
ataatggtccttgcaaaag

SEQ ID NO: 52281 - RNA, 19 nt, synthetic construct
  misc_feature 1..19: note = siRNA antisense sequence
  source 1..19: mol_type = other RNA
cttttgcaaggaccattat

SEQ ID NO: 52282 - RNA, 19 nt, synthetic construct
  misc_feature 1..19: note = siRNA sense sequence
  source 1..19: mol_type = other RNA
taatggtccttgcaaaaga

SEQ ID NO: 52283 - RNA, 19 nt, synthetic construct
  misc_feature 1..19: note = siRNA antisense sequence
  source 1..19: mol_type = other RNA
tcttttgcaaggaccatta

SEQ ID NO: 52284 - RNA, 19 nt, synthetic construct
  misc_feature 1..19: note = siRNA sense sequence
  source 1..19: mol_type = other RNA
aatggtccttgcaaaagaa

SEQ ID NO: 52285 - RNA, 19 nt, synthetic construct
  misc_feature 1..19: note = siRNA antisense sequence
  source 1..19: mol_type = other RNA
ttcttttgcaaggaccatt

SEQ ID NO: 52286 - RNA, 19 nt, synthetic construct
  misc_feature 1..19: note = siRNA sense sequence
  source 1..19: mol_type = other RNA
atggtccttgcaaaagaat

SEQ ID NO: 52287 - RNA, 19 nt, synthetic construct
  misc_feature 1..19: note = siRNA antisense sequence
  source 1..19: mol_type = other RNA
attcttttgcaaggaccat

SEQ ID NO: 52288 - RNA, 19 nt, synthetic construct
  misc_feature 1..19: note = siRNA sense sequence
  source 1..19: mol_type = other RNA
tggtccttgcaaaagaata

SEQ ID NO: 52289 - RNA, 19 nt, synthetic construct
  misc_feature 1..19: note = siRNA antisense sequence
  source 1..19: mol_type = other RNA
tattcttttgcaaggacca

SEQ ID NO: 52290 - RNA, 19 nt, synthetic construct
  misc_feature 1..19: note = siRNA sense sequence
  source 1..19: mol_type = other RNA
ggtccttgcaaaagaatat

SEQ ID NO: 52291 - RNA, 19 nt, synthetic construct
  misc_feature 1..19: note = siRNA antisense sequence
  source 1..19: mol_type = other RNA
atattcttttgcaaggacc

SEQ ID NO: 52292 - RNA, 19 nt, synthetic construct
  misc_feature 1..19: note = siRNA sense sequence
  source 1..19: mol_type = other RNA
gtccttgcaaaagaatatt

SEQ ID NO: 52293 - RNA, 19 nt, synthetic construct
  misc_feature 1..19: note = siRNA antisense sequence
  source 1..19: mol_type = other RNA
aatattcttttgcaaggac

SEQ ID NO: 52294 - RNA, 19 nt, synthetic construct
  misc_feature 1..19: note = siRNA sense sequence
  source 1..19: mol_type = other RNA
tttactgtataacttgggt

SEQ ID NO: 52295 - RNA, 19 nt, synthetic construct
  misc_feature 1..19: note = siRNA antisense sequence
  source 1..19: mol_type = other RNA
acccaagttatacagtaaa

SEQ ID NO: 52296 - RNA, 19 nt, synthetic construct
  misc_feature 1..19: note = siRNA sense sequence
  source 1..19: mol_type = other RNA
ttactgtataacttgggta

SEQ ID NO: 52297 - RNA, 19 nt, synthetic construct
  misc_feature 1..19: note = siRNA antisense sequence
  source 1..19: mol_type = other RNA
tacccaagttatacagtaa

SEQ ID NO: 52298 - RNA, 19 nt, synthetic construct
  misc_feature 1..19: note = siRNA sense sequence
  source 1..19: mol_type = other RNA
ccttgatttccttttctgt

SEQ ID NO: 52299 - RNA, 19 nt, synthetic construct
  misc_feature 1..19: note = siRNA antisense sequence
  source 1..19: mol_type = other RNA
acagaaaaggaaatcaagg

SEQ ID NO: 52300 - RNA, 19 nt, synthetic construct
  misc_feature 1..19: note = siRNA sense sequence
  source 1..19: mol_type = other RNA
aggtatggtagcaatagca

SEQ ID NO: 52301 - RNA, 19 nt, synthetic construct
  misc_feature 1..19: note = siRNA antisense sequence
  source 1..19: mol_type = other RNA
tgctattgctaccatacct

SEQ ID NO: 52302 - RNA, 19 nt, synthetic construct
  misc_feature 1..19: note = siRNA sense sequence
  source 1..19: mol_type = other RNA
ggtatggtagcaatagcat

SEQ ID NO: 52303 - RNA, 19 nt, synthetic construct
  misc_feature 1..19: note = siRNA antisense sequence
  source 1..19: mol_type = other RNA
atgctattgctaccatacc

SEQ ID NO: 52304 - RNA, 19 nt, synthetic construct
  misc_feature 1..19: note = siRNA sense sequence
  source 1..19: mol_type = other RNA
gtatggtagcaatagcatc

SEQ ID NO: 52305 - RNA, 19 nt, synthetic construct
  misc_feature 1..19: note = siRNA antisense sequence
  source 1..19: mol_type = other RNA
gatgctattgctaccatac

SEQ ID NO: 52306 - RNA, 19 nt, synthetic construct
  misc_feature 1..19: note = siRNA sense sequence
  source 1..19: mol_type = other RNA
tatggtagcaatagcatct

SEQ ID NO: 52307 - RNA, 19 nt, synthetic construct
  misc_feature 1..19: note = siRNA antisense sequence
  source 1..19: mol_type = other RNA
agatgctattgctaccata

SEQ ID NO: 52308 - RNA, 19 nt, synthetic construct
  misc_feature 1..19: note = siRNA sense sequence
  source 1..19: mol_type = other RNA
tggtagcaatagcatctaa

SEQ ID NO: 52309 - RNA, 19 nt, synthetic construct
  misc_feature 1..19: note = siRNA antisense sequence
  source 1..19: mol_type = other RNA
ttagatgctattgctacca

SEQ ID NO: 52310 - RNA, 19 nt, synthetic construct
  misc_feature 1..19: note = siRNA sense sequence
  source 1..19: mol_type = other RNA
ggtagcaatagcatctaac

SEQ ID NO: 52311 - RNA, 19 nt, synthetic construct
  misc_feature 1..19: note = siRNA antisense sequence
  source 1..19: mol_type = other RNA
gttagatgctattgctacc

SEQ ID NO: 52312 - RNA, 19 nt, synthetic construct
  misc_feature 1..19: note = siRNA sense sequence
  source 1..19: mol_type = other RNA
gtagcaatagcatctaact

SEQ ID NO: 52313 - RNA, 19 nt, synthetic construct
  misc_feature 1..19: note = siRNA antisense sequence
  source 1..19: mol_type = other RNA
agttagatgctattgctac

SEQ ID NO: 52314 - RNA, 19 nt, synthetic construct
  misc_feature 1..19: note = siRNA sense sequence
  source 1..19: mol_type = other RNA
tagcaatagcatctaactc

SEQ ID NO: 52315 - RNA, 19 nt, synthetic construct
  misc_feature 1..19: note = siRNA antisense sequence
  source 1..19: mol_type = other RNA
gagttagatgctattgcta

SEQ ID NO: 52316 - RNA, 19 nt, synthetic construct
  misc_feature 1..19: note = siRNA sense sequence
  source 1..19: mol_type = other RNA
agcaatagcatctaactca

SEQ ID NO: 52317 - RNA, 19 nt, synthetic construct
  misc_feature 1..19: note = siRNA antisense sequence
  source 1..19: mol_type = other RNA
tgagttagatgctattgct

SEQ ID NO: 52318 - RNA, 19 nt, synthetic construct
  misc_feature 1..19: note = siRNA sense sequence
  source 1..19: mol_type = other RNA
gcaatagcatctaactcat

SEQ ID NO: 52319 - RNA, 19 nt, synthetic construct
  misc_feature 1..19: note = siRNA antisense sequence
  source 1..19: mol_type = other RNA
atgagttagatgctattgc

SEQ ID NO: 52320 - RNA, 19 nt, synthetic construct
  misc_feature 1..19: note = siRNA sense sequence
  source 1..19: mol_type = other RNA
atggtgtttaagtatttcc

SEQ ID NO: 52321 - RNA, 19 nt, synthetic construct
  misc_feature 1..19: note = siRNA antisense sequence
  source 1..19: mol_type = other RNA
ggaaatacttaaacaccat

SEQ ID NO: 52322 - RNA, 19 nt, synthetic construct
  misc_feature 1..19: note = siRNA sense sequence
  source 1..19: mol_type = other RNA
tttatttgcatgtaaggac

SEQ ID NO: 52323 - RNA, 19 nt, synthetic construct
  misc_feature 1..19: note = siRNA antisense sequence
  source 1..19: mol_type = other RNA
gtccttacatgcaaataaa

SEQ ID NO: 52324 - RNA, 19 nt, synthetic construct
  misc_feature 1..19: note = siRNA sense sequence
  source 1..19: mol_type = other RNA
ttatttgcatgtaaggact

SEQ ID NO: 52325 - RNA, 19 nt, synthetic construct
  misc_feature 1..19: note = siRNA antisense sequence
  source 1..19: mol_type = other RNA
agtccttacatgcaaataa

SEQ ID NO: 52326 - RNA, 19 nt, synthetic construct
  misc_feature 1..19: note = siRNA sense sequence
  source 1..19: mol_type = other RNA
ttgcatgtaaggactgggt

SEQ ID NO: 52327 - RNA, 19 nt, synthetic construct
  misc_feature 1..19: note = siRNA antisense sequence
  source 1..19: mol_type = other RNA
acccagtccttacatgcaa

SEQ ID NO: 52328 - RNA, 19 nt, synthetic construct
  misc_feature 1..19: note = siRNA sense sequence
  source 1..19: mol_type = other RNA
tgcatgtaaggactgggtc

SEQ ID NO: 52329 - RNA, 19 nt, synthetic construct
  misc_feature 1..19: note = siRNA antisense sequence
  source 1..19: mol_type = other RNA
gacccagtccttacatgca

SEQ ID NO: 52330 - RNA, 19 nt, synthetic construct
  misc_feature 1..19: note = siRNA sense sequence
  source 1..19: mol_type = other RNA
gcatgtaaggactgggtca

SEQ ID NO: 52331 - RNA, 19 nt, synthetic construct
  misc_feature 1..19: note = siRNA antisense sequence
  source 1..19: mol_type = other RNA
tgacccagtccttacatgc

SEQ ID NO: 52332 - RNA, 19 nt, synthetic construct
  misc_feature 1..19: note = siRNA sense sequence
  source 1..19: mol_type = other RNA
catgtaaggactgggtcat

SEQ ID NO: 52333 - RNA, 19 nt, synthetic construct
  misc_feature 1..19: note = siRNA antisense sequence
  source 1..19: mol_type = other RNA
atgacccagtccttacatg

SEQ ID NO: 52334 - RNA, 19 nt, synthetic construct
  misc_feature 1..19: note = siRNA sense sequence
  source 1..19: mol_type = other RNA
atgtaaggactgggtcatg

SEQ ID NO: 52335 - RNA, 19 nt, synthetic construct
  misc_feature 1..19: note = siRNA antisense sequence
  source 1..19: mol_type = other RNA
catgacccagtccttacat

SEQ ID NO: 52336 - RNA, 19 nt, synthetic construct
  misc_feature 1..19: note = siRNA sense sequence
  source 1..19: mol_type = other RNA
tgtaaggactgggtcatgc

SEQ ID NO: 52337 - RNA, 19 nt, synthetic construct
  misc_feature 1..19: note = siRNA antisense sequence
  source 1..19: mol_type = other RNA
gcatgacccagtccttaca

SEQ ID NO: 52338 - RNA, 19 nt, synthetic construct
  misc_feature 1..19: note = siRNA sense sequence
  source 1..19: mol_type = other RNA
gtaaggactgggtcatgct

SEQ ID NO: 52339 - RNA, 19 nt, synthetic construct
  misc_feature 1..19: note = siRNA antisense sequence
  source 1..19: mol_type = other RNA
agcatgacccagtccttac

SEQ ID NO: 52340 - RNA, 19 nt, synthetic construct
  misc_feature 1..19: note = siRNA sense sequence
  source 1..19: mol_type = other RNA
taaggactgggtcatgctt

SEQ ID NO: 52341 - RNA, 19 nt, synthetic construct
  misc_feature 1..19: note = siRNA antisense sequence
  source 1..19: mol_type = other RNA
aagcatgacccagtcctta

SEQ ID NO: 52342 - RNA, 19 nt, synthetic construct
  misc_feature 1..19: note = siRNA sense sequence
  source 1..19: mol_type = other RNA
aggactgggtcatgcttgg

SEQ ID NO: 52343 - RNA, 19 nt, synthetic construct
  misc_feature 1..19: note = siRNA antisense sequence
  source 1..19: mol_type = other RNA
ccaagcatgacccagtcct

SEQ ID NO: 52344 - RNA, 19 nt, synthetic construct
  misc_feature 1..19: note = siRNA sense sequence
  source 1..19: mol_type = other RNA
ggactgggtcatgcttgga

SEQ ID NO: 52345 - RNA, 19 nt, synthetic construct
  misc_feature 1..19: note = siRNA antisense sequence
  source 1..19: mol_type = other RNA
tccaagcatgacccagtcc

SEQ ID NO: 52346 - RNA, 19 nt, synthetic construct
  misc_feature 1..19: note = siRNA sense sequence
  source 1..19: mol_type = other RNA
gactgggtcatgcttggag

SEQ ID NO: 52347 - RNA, 19 nt, synthetic construct
  misc_feature 1..19: note = siRNA antisense sequence
  source 1..19: mol_type = other RNA
ctccaagcatgacccagtc

SEQ ID NO: 52348 - RNA, 19 nt, synthetic construct
  misc_feature 1..19: note = siRNA sense sequence
  source 1..19: mol_type = other RNA
actgggtcatgcttggagc

SEQ ID NO: 52349 - RNA, 19 nt, synthetic construct
  misc_feature 1..19: note = siRNA antisense sequence
  source 1..19: mol_type = other RNA
gctccaagcatgacccagt

SEQ ID NO: 52350 - RNA, 19 nt, synthetic construct
  misc_feature 1..19: note = siRNA sense sequence
  source 1..19: mol_type = other RNA
gcttggagcagtaggagcc

SEQ ID NO: 52351 - RNA, 19 nt, synthetic construct
  misc_feature 1..19: note = siRNA antisense sequence
  source 1..19: mol_type = other RNA
ggctcctactgctccaagc

SEQ ID NO: 52352 - RNA, 19 nt, synthetic construct
  misc_feature 1..19: note = siRNA sense sequence
  source 1..19: mol_type = other RNA
cttggagcagtaggagcct

SEQ ID NO: 52353 - RNA, 19 nt, synthetic construct
  misc_feature 1..19: note = siRNA antisense sequence
  source 1..19: mol_type = other RNA
aggctcctactgctccaag

SEQ ID NO: 52354 - RNA, 19 nt, synthetic construct
  misc_feature 1..19: note = siRNA sense sequence
  source 1..19: mol_type = other RNA
ttggagcagtaggagccta

SEQ ID NO: 52355 - RNA, 19 nt, synthetic construct
  misc_feature 1..19: note = siRNA antisense sequence
  source 1..19: mol_type = other RNA
taggctcctactgctccaa

SEQ ID NO: 52356 - RNA, 19 nt, synthetic construct
  misc_feature 1..19: note = siRNA sense sequence
  source 1..19: mol_type = other RNA
tggagcagtaggagcctat

SEQ ID NO: 52357 - RNA, 19 nt, synthetic construct
  misc_feature 1..19: note = siRNA antisense sequence
  source 1..19: mol_type = other RNA
ataggctcctactgctcca

SEQ ID NO: 52358 - RNA, 19 nt, synthetic construct
  misc_feature 1..19: note = siRNA sense sequence
  source 1..19: mol_type = other RNA
ggagcagtaggagcctatg

SEQ ID NO: 52359 - RNA, 19 nt, synthetic construct
  misc_feature 1..19: note = siRNA antisense sequence
  source 1..19: mol_type = other RNA
cataggctcctactgctcc

SEQ ID NO: 52360 - RNA, 19 nt, synthetic construct
  misc_feature 1..19: note = siRNA sense sequence
  source 1..19: mol_type = other RNA
agtaggagcctatgattgg

SEQ ID NO: 52361 - RNA, 19 nt, synthetic construct
  misc_feature 1..19: note = siRNA antisense sequence
  source 1..19: mol_type = other RNA
ccaatcataggctcctact

SEQ ID NO: 52362 - RNA, 19 nt, synthetic construct
  misc_feature 1..19: note = siRNA sense sequence
  source 1..19: mol_type = other RNA
gtaggagcctatgattgga

SEQ ID NO: 52363 - RNA, 19 nt, synthetic construct
  misc_feature 1..19: note = siRNA antisense sequence
  source 1..19: mol_type = other RNA
tccaatcataggctcctac

SEQ ID NO: 52364 - RNA, 19 nt, synthetic construct
  misc_feature 1..19: note = siRNA sense sequence
  source 1..19: mol_type = other RNA
taggagcctatgattggaa

SEQ ID NO: 52365 - RNA, 19 nt, synthetic construct
  misc_feature 1..19: note = siRNA antisense sequence
  source 1..19: mol_type = other RNA
ttccaatcataggctccta

SEQ ID NO: 52366 - RNA, 19 nt, synthetic construct
  misc_feature 1..19: note = siRNA sense sequence
  source 1..19: mol_type = other RNA
aggagcctatgattggaat

SEQ ID NO: 52367 - RNA, 19 nt, synthetic construct
  misc_feature 1..19: note = siRNA antisense sequence
  source 1..19: mol_type = other RNA
attccaatcataggctcct

SEQ ID NO: 52368 - RNA, 19 nt, synthetic construct
  misc_feature 1..19: note = siRNA sense sequence
  source 1..19: mol_type = other RNA
ggagcctatgattggaatg

SEQ ID NO: 52369 - RNA, 19 nt, synthetic construct
  misc_feature 1..19: note = siRNA antisense sequence
  source 1..19: mol_type = other RNA
cattccaatcataggctcc

SEQ ID NO: 52370 - RNA, 19 nt, synthetic construct
  misc_feature 1..19: note = siRNA sense sequence
  source 1..19: mol_type = other RNA
gagcctatgattggaatgg

SEQ ID NO: 52371 - RNA, 19 nt, synthetic construct
  misc_feature 1..19: note = siRNA antisense sequence
  source 1..19: mol_type = other RNA
ccattccaatcataggctc

SEQ ID NO: 52372 - RNA, 19 nt, synthetic construct
  misc_feature 1..19: note = siRNA sense sequence
  source 1..19: mol_type = other RNA
agcctatgattggaatgga

SEQ ID NO: 52373 - RNA, 19 nt, synthetic construct
  misc_feature 1..19: note = siRNA antisense sequence
  source 1..19: mol_type = other RNA
tccattccaatcataggct

SEQ ID NO: 52374 - RNA, 19 nt, synthetic construct
  misc_feature 1..19: note = siRNA sense sequence
  source 1..19: mol_type = other RNA
gcctatgattggaatggaa

SEQ ID NO: 52375 - RNA, 19 nt, synthetic construct
  misc_feature 1..19: note = siRNA antisense sequence
  source 1..19: mol_type = other RNA
ttccattccaatcataggc

SEQ ID NO: 52376 - RNA, 19 nt, synthetic construct
  misc_feature 1..19: note = siRNA sense sequence
  source 1..19: mol_type = other RNA
gttgtcatgcagaaggcta

SEQ ID NO: 52377 - RNA, 19 nt, synthetic construct
  misc_feature 1..19: note = siRNA antisense sequence
  source 1..19: mol_type = other RNA
tagccttctgcatgacaac

SEQ ID NO: 52378 - RNA, 19 nt, synthetic construct
  misc_feature 1..19: note = siRNA sense sequence
  source 1..19: mol_type = other RNA
tgtcatgcagaaggctagt

SEQ ID NO: 52379 - RNA, 19 nt, synthetic construct
  misc_feature 1..19: note = siRNA antisense sequence
  source 1..19: mol_type = other RNA
actagccttctgcatgaca

SEQ ID NO: 52380 - RNA, 19 nt, synthetic construct
  misc_feature 1..19: note = siRNA sense sequence
  source 1..19: mol_type = other RNA
gtcatgcagaaggctagtc

SEQ ID NO: 52381 - RNA, 19 nt, synthetic construct
  misc_feature 1..19: note = siRNA antisense sequence
  source 1..19: mol_type = other RNA
gactagccttctgcatgac

SEQ ID NO: 52382 - RNA, 19 nt, synthetic construct
  misc_feature 1..19: note = siRNA sense sequence
  source 1..19: mol_type = other RNA
catgcagaaggctagtcaa

SEQ ID NO: 52383 - RNA, 19 nt, synthetic construct
  misc_feature 1..19: note = siRNA antisense sequence
  source 1..19: mol_type = other RNA
ttgactagccttctgcatg

SEQ ID NO: 52384 - RNA, 19 nt, synthetic construct
  misc_feature 1..19: note = siRNA sense sequence
  source 1..19: mol_type = other RNA
atgcagaaggctagtcaaa

SEQ ID NO: 52385 - RNA, 19 nt, synthetic construct
  misc_feature 1..19: note = siRNA antisense sequence
  source 1..19: mol_type = other RNA
tttgactagccttctgcat

SEQ ID NO: 52386 - RNA, 19 nt, synthetic construct
  misc_feature 1..19: note = siRNA sense sequence
  source 1..19: mol_type = other RNA
tgcagaaggctagtcaaat

SEQ ID NO: 52387 - RNA, 19 nt, synthetic construct
  misc_feature 1..19: note = siRNA antisense sequence
  source 1..19: mol_type = other RNA
atttgactagccttctgca

SEQ ID NO: 52388 - RNA, 19 nt, synthetic construct
  misc_feature 1..19: note = siRNA sense sequence
  source 1..19: mol_type = other RNA
gcagaaggctagtcaaatc

SEQ ID NO: 52389 - RNA, 19 nt, synthetic construct
  misc_feature 1..19: note = siRNA antisense sequence
  source 1..19: mol_type = other RNA
gatttgactagccttctgc

SEQ ID NO: 52390 - RNA, 19 nt, synthetic construct
  misc_feature 1..19: note = siRNA sense sequence
  source 1..19: mol_type = other RNA
cagaaggctagtcaaatca

SEQ ID NO: 52391 - RNA, 19 nt, synthetic construct
  misc_feature 1..19: note = siRNA antisense sequence
  source 1..19: mol_type = other RNA
tgatttgactagccttctg

SEQ ID NO: 52392 - RNA, 19 nt, synthetic construct
  misc_feature 1..19: note = siRNA sense sequence
  source 1..19: mol_type = other RNA
agaaggctagtcaaatcat

SEQ ID NO: 52393 - RNA, 19 nt, synthetic construct
  misc_feature 1..19: note = siRNA antisense sequence
  source 1..19: mol_type = other RNA
atgatttgactagccttct

SEQ ID NO: 52394 - RNA, 19 nt, synthetic construct
  misc_feature 1..19: note = siRNA sense sequence
  source 1..19: mol_type = other RNA
gaaggctagtcaaatcata

SEQ ID NO: 52395 - RNA, 19 nt, synthetic construct
  misc_feature 1..19: note = siRNA antisense sequence
  source 1..19: mol_type = other RNA
tatgatttgactagccttc

SEQ ID NO: 52396 - RNA, 19 nt, synthetic construct
  misc_feature 1..19: note = siRNA sense sequence
  source 1..19: mol_type = other RNA
aaggctagtcaaatcataa

SEQ ID NO: 52397 - RNA, 19 nt, synthetic construct
  misc_feature 1..19: note = siRNA antisense sequence
  source 1..19: mol_type = other RNA
ttatgatttgactagcctt

SEQ ID NO: 52398 - RNA, 19 nt, synthetic construct
  misc_feature 1..19: note = siRNA sense sequence
  source 1..19: mol_type = other RNA
aggctagtcaaatcataat

SEQ ID NO: 52399 - RNA, 19 nt, synthetic construct
  misc_feature 1..19: note = siRNA antisense sequence
  source 1..19: mol_type = other RNA
attatgatttgactagcct

SEQ ID NO: 52400 - RNA, 19 nt, synthetic construct
  misc_feature 1..19: note = siRNA sense sequence
  source 1..19: mol_type = other RNA
ggctagtcaaatcataatc

SEQ ID NO: 52401 - RNA, 19 nt, synthetic construct
  misc_feature 1..19: note = siRNA antisense sequence
  source 1..19: mol_type = other RNA
gattatgatttgactagcc

SEQ ID NO: 52402 - RNA, 19 nt, synthetic construct
  misc_feature 1..19: note = siRNA sense sequence
  source 1..19: mol_type = other RNA
gctagtcaaatcataatcc

SEQ ID NO: 52403 - RNA, 19 nt, synthetic construct
  misc_feature 1..19: note = siRNA antisense sequence
  source 1..19: mol_type = other RNA
ggattatgatttgactagc

SEQ ID NO: 52404 - RNA, 19 nt, synthetic construct
  misc_feature 1..19: note = siRNA sense sequence
  source 1..19: mol_type = other RNA
ctagtcaaatcataatccc

SEQ ID NO: 52405 - RNA, 19 nt, synthetic construct
  misc_feature 1..19: note = siRNA antisense sequence
  source 1..19: mol_type = other RNA
gggattatgatttgactag

SEQ ID NO: 52406 - RNA, 19 nt, synthetic construct
  misc_feature 1..19: note = siRNA sense sequence
  source 1..19: mol_type = other RNA
tcaaatcataatccctcga

SEQ ID NO: 52407 - RNA, 19 nt, synthetic construct
  misc_feature 1..19: note = siRNA antisense sequence
  source 1..19: mol_type = other RNA
tcgagggattatgatttga

SEQ ID NO: 52408 - RNA, 19 nt, synthetic construct
  misc_feature 1..19: note = siRNA sense sequence
  source 1..19: mol_type = other RNA
caaatcataatccctcgaa

SEQ ID NO: 52409 - RNA, 19 nt, synthetic construct
  misc_feature 1..19: note = siRNA antisense sequence
  source 1..19: mol_type = other RNA
ttcgagggattatgatttg

SEQ ID NO: 52410 - RNA, 19 nt, synthetic construct
  misc_feature 1..19: note = siRNA sense sequence
  source 1..19: mol_type = other RNA
aacctttaatgttgagtct

SEQ ID NO: 52411 - RNA, 19 nt, synthetic construct
  misc_feature 1..19: note = siRNA antisense sequence
  source 1..19: mol_type = other RNA
agactcaacattaaaggtt

SEQ ID NO: 52412 - RNA, 19 nt, synthetic construct
  misc_feature 1..19: note = siRNA sense sequence
  source 1..19: mol_type = other RNA
taatgttgagtctaccaaa

SEQ ID NO: 52413 - RNA, 19 nt, synthetic construct
  misc_feature 1..19: note = siRNA antisense sequence
  source 1..19: mol_type = other RNA
tttggtagactcaacatta

SEQ ID NO: 52414 - RNA, 19 nt, synthetic construct
  misc_feature 1..19: note = siRNA sense sequence
  source 1..19: mol_type = other RNA
aatgttgagtctaccaaaa

SEQ ID NO: 52415 - RNA, 19 nt, synthetic construct
  misc_feature 1..19: note = siRNA antisense sequence
  source 1..19: mol_type = other RNA
ttttggtagactcaacatt

SEQ ID NO: 52416 - RNA, 19 nt, synthetic construct
  misc_feature 1..19: note = siRNA sense sequence
  source 1..19: mol_type = other RNA
ccgcttgcttcttatttag

SEQ ID NO: 52417 - RNA, 19 nt, synthetic construct
  misc_feature 1..19: note = siRNA antisense sequence
  source 1..19: mol_type = other RNA
ctaaataagaagcaagcgg

SEQ ID NO: 52418 - RNA, 19 nt, synthetic construct
  misc_feature 1..19: note = siRNA sense sequence
  source 1..19: mol_type = other RNA
cgcttgcttcttatttagg

SEQ ID NO: 52419 - RNA, 19 nt, synthetic construct
  misc_feature 1..19: note = siRNA antisense sequence
  source 1..19: mol_type = other RNA
cctaaataagaagcaagcg

SEQ ID NO: 52420 - RNA, 19 nt, synthetic construct
  misc_feature 1..19: note = siRNA sense sequence
  source 1..19: mol_type = other RNA
gcttgcttcttatttaggt

SEQ ID NO: 52421 - RNA, 19 nt, synthetic construct
  misc_feature 1..19: note = siRNA antisense sequence
  source 1..19: mol_type = other RNA
acctaaataagaagcaagc

SEQ ID NO: 52422 - RNA, 19 nt, synthetic construct
  misc_feature 1..19: note = siRNA sense sequence
  source 1..19: mol_type = other RNA
cttgcttcttatttaggta

SEQ ID NO: 52423 - RNA, 19 nt, synthetic construct
  misc_feature 1..19: note = siRNA antisense sequence
  source 1..19: mol_type = other RNA
tacctaaataagaagcaag

SEQ ID NO: 52424 - RNA, 19 nt, synthetic construct
  misc_feature 1..19: note = siRNA sense sequence
  source 1..19: mol_type = other RNA
atttaggtaaggtttggat

SEQ ID NO: 52425 - RNA, 19 nt, synthetic construct
  misc_feature 1..19: note = siRNA antisense sequence
  source 1..19: mol_type = other RNA
atccaaaccttacctaaat

SEQ ID NO: 52426 - RNA, 19 nt, synthetic construct
  misc_feature 1..19: note = siRNA sense sequence
  source 1..19: mol_type = other RNA
tttaggtaaggtttggata

SEQ ID NO: 52427 - RNA, 19 nt, synthetic construct
  misc_feature 1..19: note = siRNA antisense sequence
  source 1..19: mol_type = other RNA
tatccaaaccttacctaaa

SEQ ID NO: 52428 - RNA, 19 nt, synthetic construct
  misc_feature 1..19: note = siRNA sense sequence
  source 1..19: mol_type = other RNA
ttaggtaaggtttggatat

SEQ ID NO: 52429 - RNA, 19 nt, synthetic construct
  misc_feature 1..19: note = siRNA antisense sequence
  source 1..19: mol_type = other RNA
atatccaaaccttacctaa

SEQ ID NO: 52430 - RNA, 19 nt, synthetic construct
  misc_feature 1..19: note = siRNA sense sequence
  source 1..19: mol_type = other RNA
taggtaaggtttggatata

SEQ ID NO: 52431 - RNA, 19 nt, synthetic construct
  misc_feature 1..19: note = siRNA antisense sequence
  source 1..19: mol_type = other RNA
tatatccaaaccttaccta

SEQ ID NO: 52432 - RNA, 19 nt, synthetic construct
  misc_feature 1..19: note = siRNA sense sequence
  source 1..19: mol_type = other RNA
aggtaaggtttggatataa

SEQ ID NO: 52433 - RNA, 19 nt, synthetic construct
  misc_feature 1..19: note = siRNA antisense sequence
  source 1..19: mol_type = other RNA
ttatatccaaaccttacct

SEQ ID NO: 52434 - RNA, 19 nt, synthetic construct
  misc_feature 1..19: note = siRNA sense sequence
  source 1..19: mol_type = other RNA
ggtaaggtttggatataat

SEQ ID NO: 52435 - RNA, 19 nt, synthetic construct
  misc_feature 1..19: note = siRNA antisense sequence
  source 1..19: mol_type = other RNA
attatatccaaaccttacc

SEQ ID NO: 52436 - RNA, 19 nt, synthetic construct
  misc_feature 1..19: note = siRNA sense sequence
  source 1..19: mol_type = other RNA
agagttgttttacttttcc

SEQ ID NO: 52437 - RNA, 19 nt, synthetic construct
  misc_feature 1..19: note = siRNA antisense sequence
  source 1..19: mol_type = other RNA
ggaaaagtaaaacaactct

SEQ ID NO: 52438 - RNA, 19 nt, synthetic construct
  misc_feature 1..19: note = siRNA sense sequence
  source 1..19: mol_type = other RNA
gagttgttttacttttcca

SEQ ID NO: 52439 - RNA, 19 nt, synthetic construct
  misc_feature 1..19: note = siRNA antisense sequence
  source 1..19: mol_type = other RNA
tggaaaagtaaaacaactc

SEQ ID NO: 52440 - RNA, 19 nt, synthetic construct
  misc_feature 1..19: note = siRNA sense sequence
  source 1..19: mol_type = other RNA
tacctttagcattatttgc

SEQ ID NO: 52441 - RNA, 19 nt, synthetic construct
  misc_feature 1..19: note = siRNA antisense sequence
  source 1..19: mol_type = other RNA
gcaaataatgctaaaggta

SEQ ID NO: 52442 - RNA, 19 nt, synthetic construct
  misc_feature 1..19: note = siRNA sense sequence
  source 1..19: mol_type = other RNA
tgcttatgtttctataggc

SEQ ID NO: 52443 - RNA, 19 nt, synthetic construct
  misc_feature 1..19: note = siRNA antisense sequence
  source 1..19: mol_type = other RNA
gcctatagaaacataagca

SEQ ID NO: 52444 - RNA, 19 nt, synthetic construct
  misc_feature 1..19: note = siRNA sense sequence
  source 1..19: mol_type = other RNA
ttatgtttctataggcttg

SEQ ID NO: 52445 - RNA, 19 nt, synthetic construct
  misc_feature 1..19: note = siRNA antisense sequence
  source 1..19: mol_type = other RNA
caagcctatagaaacataa

SEQ ID NO: 52446 - RNA, 19 nt, synthetic construct
  misc_feature 1..19: note = siRNA sense sequence
  source 1..19: mol_type = other RNA
tatgtttctataggcttgc

SEQ ID NO: 52447 - RNA, 19 nt, synthetic construct
  misc_feature 1..19: note = siRNA antisense sequence
  source 1..19: mol_type = other RNA
gcaagcctatagaaacata

SEQ ID NO: 52448 - RNA, 19 nt, synthetic construct
  misc_feature 1..19: note = siRNA sense sequence
  source 1..19: mol_type = other RNA
atgtttctataggcttgca

SEQ ID NO: 52449 - RNA, 19 nt, synthetic construct
  misc_feature 1..19: note = siRNA antisense sequence
  source 1..19: mol_type = other RNA
tgcaagcctatagaaacat

SEQ ID NO: 52450 - RNA, 19 nt, synthetic construct
  misc_feature 1..19: note = siRNA sense sequence
  source 1..19: mol_type = other RNA
tgtttctataggcttgcaa

SEQ ID NO: 52451 - RNA, 19 nt, synthetic construct
  misc_feature 1..19: note = siRNA antisense sequence
  source 1..19: mol_type = other RNA
ttgcaagcctatagaaaca

SEQ ID NO: 52452 - RNA, 19 nt, synthetic construct
  misc_feature 1..19: note = siRNA sense sequence
  source 1..19: mol_type = other RNA
gtttctataggcttgcaac

SEQ ID NO: 52453 - RNA, 19 nt, synthetic construct
  misc_feature 1..19: note = siRNA antisense sequence
  source 1..19: mol_type = other RNA
gttgcaagcctatagaaac

SEQ ID NO: 52454 - RNA, 19 nt, synthetic construct
  misc_feature 1..19: note = siRNA sense sequence
  source 1..19: mol_type = other RNA
tttctataggcttgcaacc

SEQ ID NO: 52455 - RNA, 19 nt, synthetic construct
  misc_feature 1..19: note = siRNA antisense sequence
  source 1..19: mol_type = other RNA
ggttgcaagcctatagaaa

SEQ ID NO: 52456 - RNA, 19 nt, synthetic construct
  misc_feature 1..19: note = siRNA sense sequence
  source 1..19: mol_type = other RNA
ttctataggcttgcaacca

SEQ ID NO: 52457 - RNA, 19 nt, synthetic construct
  misc_feature 1..19: note = siRNA antisense sequence
  source 1..19: mol_type = other RNA
tggttgcaagcctatagaa

SEQ ID NO: 52458 - RNA, 19 nt, synthetic construct
  misc_feature 1..19: note = siRNA sense sequence
  source 1..19: mol_type = other RNA
ataggcttgcaaccatata

SEQ ID NO: 52459 - RNA, 19 nt, synthetic construct
  misc_feature 1..19: note = siRNA antisense sequence
  source 1..19: mol_type = other RNA
tatatggttgcaagcctat

SEQ ID NO: 52460 - RNA, 19 nt, synthetic construct
  misc_feature 1..19: note = siRNA sense sequence
  source 1..19: mol_type = other RNA
taggcttgcaaccatatag

SEQ ID NO: 52461 - RNA, 19 nt, synthetic construct
  misc_feature 1..19: note = siRNA antisense sequence
  source 1..19: mol_type = other RNA
ctatatggttgcaagccta

SEQ ID NO: 52462 - RNA, 19 nt, synthetic construct
  misc_feature 1..19: note = siRNA sense sequence
  source 1..19: mol_type = other RNA
aggcttgcaaccatatagc

SEQ ID NO: 52463 - RNA, 19 nt, synthetic construct
  misc_feature 1..19: note = siRNA antisense sequence
  source 1..19: mol_type = other RNA
gctatatggttgcaagcct

SEQ ID NO: 52464 - RNA, 19 nt, synthetic construct
  misc_feature 1..19: note = siRNA sense sequence
  source 1..19: mol_type = other RNA
ggcttgcaaccatatagca

SEQ ID NO: 52465 - RNA, 19 nt, synthetic construct
  misc_feature 1..19: note = siRNA antisense sequence
  source 1..19: mol_type = other RNA
tgctatatggttgcaagcc

SEQ ID NO: 52466 - RNA, 19 nt, synthetic construct
  misc_feature 1..19: note = siRNA sense sequence
  source 1..19: mol_type = other RNA
gcttgcaaccatatagcag

SEQ ID NO: 52467 - RNA, 19 nt, synthetic construct
  misc_feature 1..19: note = siRNA antisense sequence
  source 1..19: mol_type = other RNA
ctgctatatggttgcaagc

SEQ ID NO: 52468 - RNA, 19 nt, synthetic construct
  misc_feature 1..19: note = siRNA sense sequence
  source 1..19: mol_type = other RNA
gcaaccatatagcaggatt

SEQ ID NO: 52469 - RNA, 19 nt, synthetic construct
  misc_feature 1..19: note = siRNA antisense sequence
  source 1..19: mol_type = other RNA
aatcctgctatatggttgc

SEQ ID NO: 52470 - RNA, 19 nt, synthetic construct
  misc_feature 1..19: note = siRNA sense sequence
  source 1..19: mol_type = other RNA
caaccatatagcaggatta

SEQ ID NO: 52471 - RNA, 19 nt, synthetic construct
  misc_feature 1..19: note = siRNA antisense sequence
  source 1..19: mol_type = other RNA
taatcctgctatatggttg

SEQ ID NO: 52472 - RNA, 19 nt, synthetic construct
  misc_feature 1..19: note = siRNA sense sequence
  source 1..19: mol_type = other RNA
aaccatatagcaggattat

SEQ ID NO: 52473 - RNA, 19 nt, synthetic construct
  misc_feature 1..19: note = siRNA antisense sequence
  source 1..19: mol_type = other RNA
ataatcctgctatatggtt

SEQ ID NO: 52474 - RNA, 19 nt, synthetic construct
  misc_feature 1..19: note = siRNA sense sequence
  source 1..19: mol_type = other RNA
accatatagcaggattatt

SEQ ID NO: 52475 - RNA, 19 nt, synthetic construct
  misc_feature 1..19: note = siRNA antisense sequence
  source 1..19: mol_type = other RNA
aataatcctgctatatggt

SEQ ID NO: 52476 - RNA, 19 nt, synthetic construct
  misc_feature 1..19: note = siRNA sense sequence
  source 1..19: mol_type = other RNA
ccatatagcaggattattt

SEQ ID NO: 52477 - RNA, 19 nt, synthetic construct
  misc_feature 1..19: note = siRNA antisense sequence
  source 1..19: mol_type = other RNA
aaataatcctgctatatgg

SEQ ID NO: 52478 - RNA, 19 nt, synthetic construct
  misc_feature 1..19: note = siRNA sense sequence
  source 1..19: mol_type = other RNA
catatagcaggattatttc

SEQ ID NO: 52479 - RNA, 19 nt, synthetic construct
  misc_feature 1..19: note = siRNA antisense sequence
  source 1..19: mol_type = other RNA
gaaataatcctgctatatg

SEQ ID NO: 52480 - RNA, 19 nt, synthetic construct
  misc_feature 1..19: note = siRNA sense sequence
  source 1..19: mol_type = other RNA
agttgggtattttccagaa

SEQ ID NO: 52481 - RNA, 19 nt, synthetic construct
  misc_feature 1..19: note = siRNA antisense sequence
  source 1..19: mol_type = other RNA
ttctggaaaatacccaact

SEQ ID NO: 52482 - RNA, 19 nt, synthetic construct
  misc_feature 1..19: note = siRNA sense sequence
  source 1..19: mol_type = other RNA
aacccatgcaaagttttag

SEQ ID NO: 52483 - RNA, 19 nt, synthetic construct
  misc_feature 1..19: note = siRNA antisense sequence
  source 1..19: mol_type = other RNA
ctaaaactttgcatgggtt

SEQ ID NO: 52484 - RNA, 19 nt, synthetic construct
  misc_feature 1..19: note = siRNA sense sequence
  source 1..19: mol_type = other RNA
acccatgcaaagttttagg

SEQ ID NO: 52485 - RNA, 19 nt, synthetic construct
  misc_feature 1..19: note = siRNA antisense sequence
  source 1..19: mol_type = other RNA
cctaaaactttgcatgggt

SEQ ID NO: 52486 - RNA, 19 nt, synthetic construct
  misc_feature 1..19: note = siRNA sense sequence
  source 1..19: mol_type = other RNA
cccatgcaaagttttaggc

SEQ ID NO: 52487 - RNA, 19 nt, synthetic construct
  misc_feature 1..19: note = siRNA antisense sequence
  source 1..19: mol_type = other RNA
gcctaaaactttgcatggg

SEQ ID NO: 52488 - RNA, 19 nt, synthetic construct
  misc_feature 1..19: note = siRNA sense sequence
  source 1..19: mol_type = other RNA
atgcaaagttttaggcctc

SEQ ID NO: 52489 - RNA, 19 nt, synthetic construct
  misc_feature 1..19: note = siRNA antisense sequence
  source 1..19: mol_type = other RNA
gaggcctaaaactttgcat

SEQ ID NO: 52490 - RNA, 19 nt, synthetic construct
  misc_feature 1..19: note = siRNA sense sequence
  source 1..19: mol_type = other RNA
tgcaaagttttaggcctct

SEQ ID NO: 52491 - RNA, 19 nt, synthetic construct
  misc_feature 1..19: note = siRNA antisense sequence
  source 1..19: mol_type = other RNA
agaggcctaaaactttgca

SEQ ID NO: 52492 - RNA, 19 nt, synthetic construct
  misc_feature 1..19: note = siRNA sense sequence
  source 1..19: mol_type = other RNA
gcaaagttttaggcctctg

SEQ ID NO: 52493 - RNA, 19 nt, synthetic construct
  misc_feature 1..19: note = siRNA antisense sequence
  source 1..19: mol_type = other RNA
cagaggcctaaaactttgc

SEQ ID NO: 52494 - RNA, 19 nt, synthetic construct
  misc_feature 1..19: note = siRNA sense sequence
  source 1..19: mol_type = other RNA
caaagttttaggcctctga

SEQ ID NO: 52495 - RNA, 19 nt, synthetic construct
  misc_feature 1..19: note = siRNA antisense sequence
  source 1..19: mol_type = other RNA
tcagaggcctaaaactttg

SEQ ID NO: 52496 - RNA, 19 nt, synthetic construct
  misc_feature 1..19: note = siRNA sense sequence
  source 1..19: mol_type = other RNA
aaagttttaggcctctgag

SEQ ID NO: 52497 - RNA, 19 nt, synthetic construct
  misc_feature 1..19: note = siRNA antisense sequence
  source 1..19: mol_type = other RNA
ctcagaggcctaaaacttt

SEQ ID NO: 52498 - RNA, 19 nt, synthetic construct
  misc_feature 1..19: note = siRNA sense sequence
  source 1..19: mol_type = other RNA
aagttttaggcctctgagc

SEQ ID NO: 52499 - RNA, 19 nt, synthetic construct
  misc_feature 1..19: note = siRNA antisense sequence
  source 1..19: mol_type = other RNA
gctcagaggcctaaaactt

SEQ ID NO: 52500 - RNA, 19 nt, synthetic construct
  misc_feature 1..19: note = siRNA sense sequence
  source 1..19: mol_type = other RNA
agttttaggcctctgagca

SEQ ID NO: 52501 - RNA, 19 nt, synthetic construct
  misc_feature 1..19: note = siRNA antisense sequence
  source 1..19: mol_type = other RNA
tgctcagaggcctaaaact

SEQ ID NO: 52502 - RNA, 19 nt, synthetic construct
  misc_feature 1..19: note = siRNA sense sequence
  source 1..19: mol_type = other RNA
gttttaggcctctgagcag

SEQ ID NO: 52503 - RNA, 19 nt, synthetic construct
  misc_feature 1..19: note = siRNA antisense sequence
  source 1..19: mol_type = other RNA
ctgctcagaggcctaaaac

SEQ ID NO: 52504 - RNA, 19 nt, synthetic construct
  misc_feature 1..19: note = siRNA sense sequence
  source 1..19: mol_type = other RNA
ttttaggcctctgagcagc

SEQ ID NO: 52505 - RNA, 19 nt, synthetic construct
  misc_feature 1..19: note = siRNA antisense sequence
  source 1..19: mol_type = other RNA
gctgctcagaggcctaaaa

SEQ ID NO: 52506 - RNA, 19 nt, synthetic construct
  misc_feature 1..19: note = siRNA sense sequence
  source 1..19: mol_type = other RNA
cctctgagcagctttagtt

SEQ ID NO: 52507 - RNA, 19 nt, synthetic construct
  misc_feature 1..19: note = siRNA antisense sequence
  source 1..19: mol_type = other RNA
aactaaagctgctcagagg

SEQ ID NO: 52508 - RNA, 19 nt, synthetic construct
  misc_feature 1..19: note = siRNA sense sequence
  source 1..19: mol_type = other RNA
tctgagcagctttagttag

SEQ ID NO: 52509 - RNA, 19 nt, synthetic construct
  misc_feature 1..19: note = siRNA antisense sequence
  source 1..19: mol_type = other RNA
ctaactaaagctgctcaga

SEQ ID NO: 52510 - RNA, 19 nt, synthetic construct
  misc_feature 1..19: note = siRNA sense sequence
  source 1..19: mol_type = other RNA
ctgagcagctttagttagt

SEQ ID NO: 52511 - RNA, 19 nt, synthetic construct
  misc_feature 1..19: note = siRNA antisense sequence
  source 1..19: mol_type = other RNA
actaactaaagctgctcag

SEQ ID NO: 52512 - RNA, 19 nt, synthetic construct
  misc_feature 1..19: note = siRNA sense sequence
  source 1..19: mol_type = other RNA
tgagcagctttagttagtc

SEQ ID NO: 52513 - RNA, 19 nt, synthetic construct
  misc_feature 1..19: note = siRNA antisense sequence
  source 1..19: mol_type = other RNA
gactaactaaagctgctca

SEQ ID NO: 52514 - RNA, 19 nt, synthetic construct
  misc_feature 1..19: note = siRNA sense sequence
  source 1..19: mol_type = other RNA
gagcagctttagttagtca

SEQ ID NO: 52515 - RNA, 19 nt, synthetic construct
  misc_feature 1..19: note = siRNA antisense sequence
  source 1..19: mol_type = other RNA
tgactaactaaagctgctc

SEQ ID NO: 52516 - RNA, 19 nt, synthetic construct
  misc_feature 1..19: note = siRNA sense sequence
  source 1..19: mol_type = other RNA
agcagctttagttagtcaa

SEQ ID NO: 52517 - RNA, 19 nt, synthetic construct
  misc_feature 1..19: note = siRNA antisense sequence
  source 1..19: mol_type = other RNA
ttgactaactaaagctgct

SEQ ID NO: 52518 - RNA, 19 nt, synthetic construct
  misc_feature 1..19: note = siRNA sense sequence
  source 1..19: mol_type = other RNA
gcagctttagttagtcaaa

SEQ ID NO: 52519 - RNA, 19 nt, synthetic construct
  misc_feature 1..19: note = siRNA antisense sequence
  source 1..19: mol_type = other RNA
tttgactaactaaagctgc

SEQ ID NO: 52520 - RNA, 19 nt, synthetic construct
  misc_feature 1..19: note = siRNA sense sequence
  source 1..19: mol_type = other RNA
cagctttagttagtcaaaa

SEQ ID NO: 52521 - RNA, 19 nt, synthetic construct
  misc_feature 1..19: note = siRNA antisense sequence
  source 1..19: mol_type = other RNA
ttttgactaactaaagctg

SEQ ID NO: 52522 - RNA, 19 nt, synthetic construct
  misc_feature 1..19: note = siRNA sense sequence
  source 1..19: mol_type = other RNA
tcaaaatgacatacatggg

SEQ ID NO: 52523 - RNA, 19 nt, synthetic construct
  misc_feature 1..19: note = siRNA antisense sequence
  source 1..19: mol_type = other RNA
cccatgtatgtcattttga

SEQ ID NO: 52524 - RNA, 19 nt, synthetic construct
  misc_feature 1..19: note = siRNA sense sequence
  source 1..19: mol_type = other RNA
ttttgttagtagggctgtc

SEQ ID NO: 52525 - RNA, 19 nt, synthetic construct
  misc_feature 1..19: note = siRNA antisense sequence
  source 1..19: mol_type = other RNA
gacagccctactaacaaaa

SEQ ID NO: 52526 - RNA, 19 nt, synthetic construct
  misc_feature 1..19: note = siRNA sense sequence
  source 1..19: mol_type = other RNA
tttgttagtagggctgtct

SEQ ID NO: 52527 - RNA, 19 nt, synthetic construct
  misc_feature 1..19: note = siRNA antisense sequence
  source 1..19: mol_type = other RNA
agacagccctactaacaaa

SEQ ID NO: 52528 - RNA, 19 nt, synthetic construct
  misc_feature 1..19: note = siRNA sense sequence
  source 1..19: mol_type = other RNA
ttgttagtagggctgtcta

SEQ ID NO: 52529 - RNA, 19 nt, synthetic construct
  misc_feature 1..19: note = siRNA antisense sequence
  source 1..19: mol_type = other RNA
tagacagccctactaacaa

SEQ ID NO: 52530 - RNA, 19 nt, synthetic construct
  misc_feature 1..19: note = siRNA sense sequence
  source 1..19: mol_type = other RNA
tagtagggctgtctaatgc

SEQ ID NO: 52531 - RNA, 19 nt, synthetic construct
  misc_feature 1..19: note = siRNA antisense sequence
  source 1..19: mol_type = other RNA
gcattagacagccctacta

SEQ ID NO: 52532 - RNA, 19 nt, synthetic construct
  misc_feature 1..19: note = siRNA sense sequence
  source 1..19: mol_type = other RNA
gggctgtctaatgcaggga

SEQ ID NO: 52533 - RNA, 19 nt, synthetic construct
  misc_feature 1..19: note = siRNA antisense sequence
  source 1..19: mol_type = other RNA
tccctgcattagacagccc

SEQ ID NO: 52534 - RNA, 19 nt, synthetic construct
  misc_feature 1..19: note = siRNA sense sequence
  source 1..19: mol_type = other RNA
ggctgtctaatgcagggaa

SEQ ID NO: 52535 - RNA, 19 nt, synthetic construct
  misc_feature 1..19: note = siRNA antisense sequence
  source 1..19: mol_type = other RNA
ttccctgcattagacagcc

SEQ ID NO: 52536 - RNA, 19 nt, synthetic construct
  misc_feature 1..19: note = siRNA sense sequence
  source 1..19: mol_type = other RNA
tgtctaatgcagggaatgg

SEQ ID NO: 52537 - RNA, 19 nt, synthetic construct
  misc_feature 1..19: note = siRNA antisense sequence
  source 1..19: mol_type = other RNA
ccattccctgcattagaca

SEQ ID NO: 52538 - RNA, 19 nt, synthetic construct
  misc_feature 1..19: note = siRNA sense sequence
  source 1..19: mol_type = other RNA
gtctaatgcagggaatggt

SEQ ID NO: 52539 - RNA, 19 nt, synthetic construct
  misc_feature 1..19: note = siRNA antisense sequence
  source 1..19: mol_type = other RNA
accattccctgcattagac

SEQ ID NO: 52540 - RNA, 19 nt, synthetic construct
  misc_feature 1..19: note = siRNA sense sequence
  source 1..19: mol_type = other RNA
tctaatgcagggaatggtt

SEQ ID NO: 52541 - RNA, 19 nt, synthetic construct
  misc_feature 1..19: note = siRNA antisense sequence
  source 1..19: mol_type = other RNA
aaccattccctgcattaga

SEQ ID NO: 52542 - RNA, 19 nt, synthetic construct
  misc_feature 1..19: note = siRNA sense sequence
  source 1..19: mol_type = other RNA
ctaatgcagggaatggttt

SEQ ID NO: 52543 - RNA, 19 nt, synthetic construct
  misc_feature 1..19: note = siRNA antisense sequence
  source 1..19: mol_type = other RNA
aaaccattccctgcattag

SEQ ID NO: 52544 - RNA, 19 nt, synthetic construct
  misc_feature 1..19: note = siRNA sense sequence
  source 1..19: mol_type = other RNA
taatgcagggaatggttta

SEQ ID NO: 52545 - RNA, 19 nt, synthetic construct
  misc_feature 1..19: note = siRNA antisense sequence
  source 1..19: mol_type = other RNA
taaaccattccctgcatta

SEQ ID NO: 52546 - RNA, 19 nt, synthetic construct
  misc_feature 1..19: note = siRNA sense sequence
  source 1..19: mol_type = other RNA
aatgcagggaatggtttag

SEQ ID NO: 52547 - RNA, 19 nt, synthetic construct
  misc_feature 1..19: note = siRNA antisense sequence
  source 1..19: mol_type = other RNA
ctaaaccattccctgcatt

SEQ ID NO: 52548 - RNA, 19 nt, synthetic construct
  misc_feature 1..19: note = siRNA sense sequence
  source 1..19: mol_type = other RNA
atgcagggaatggtttagg

SEQ ID NO: 52549 - RNA, 19 nt, synthetic construct
  misc_feature 1..19: note = siRNA antisense sequence
  source 1..19: mol_type = other RNA
cctaaaccattccctgcat

SEQ ID NO: 52550 - RNA, 19 nt, synthetic construct
  misc_feature 1..19: note = siRNA sense sequence
  source 1..19: mol_type = other RNA
tgcagggaatggtttaggt

SEQ ID NO: 52551 - RNA, 19 nt, synthetic construct
  misc_feature 1..19: note = siRNA antisense sequence
  source 1..19: mol_type = other RNA
acctaaaccattccctgca

SEQ ID NO: 52552 - RNA, 19 nt, synthetic construct
  misc_feature 1..19: note = siRNA sense sequence
  source 1..19: mol_type = other RNA
gcagggaatggtttaggtt

SEQ ID NO: 52553 - RNA, 19 nt, synthetic construct
  misc_feature 1..19: note = siRNA antisense sequence
  source 1..19: mol_type = other RNA
aacctaaaccattccctgc

SEQ ID NO: 52554 - RNA, 19 nt, synthetic construct
  misc_feature 1..19: note = siRNA sense sequence
  source 1..19: mol_type = other RNA
agggaatggtttaggttga

SEQ ID NO: 52555 - RNA, 19 nt, synthetic construct
  misc_feature 1..19: note = siRNA antisense sequence
  source 1..19: mol_type = other RNA
tcaacctaaaccattccct

SEQ ID NO: 52556 - RNA, 19 nt, synthetic construct
  misc_feature 1..19: note = siRNA sense sequence
  source 1..19: mol_type = other RNA
ggaatggtttaggttgata

SEQ ID NO: 52557 - RNA, 19 nt, synthetic construct
  misc_feature 1..19: note = siRNA antisense sequence
  source 1..19: mol_type = other RNA
tatcaacctaaaccattcc

SEQ ID NO: 52558 - RNA, 19 nt, synthetic construct
  misc_feature 1..19: note = siRNA sense sequence
  source 1..19: mol_type = other RNA
tggtttaggttgatatgtg

SEQ ID NO: 52559 - RNA, 19 nt, synthetic construct
  misc_feature 1..19: note = siRNA antisense sequence
  source 1..19: mol_type = other RNA
cacatatcaacctaaacca

SEQ ID NO: 52560 - RNA, 19 nt, synthetic construct
  misc_feature 1..19: note = siRNA sense sequence
  source 1..19: mol_type = other RNA
ggtttaggttgatatgtgc

SEQ ID NO: 52561 - RNA, 19 nt, synthetic construct
  misc_feature 1..19: note = siRNA antisense sequence
  source 1..19: mol_type = other RNA
gcacatatcaacctaaacc

SEQ ID NO: 52562 - RNA, 19 nt, synthetic construct
  misc_feature 1..19: note = siRNA sense sequence
  source 1..19: mol_type = other RNA
gtttaggttgatatgtgcc

SEQ ID NO: 52563 - RNA, 19 nt, synthetic construct
  misc_feature 1..19: note = siRNA antisense sequence
  source 1..19: mol_type = other RNA
ggcacatatcaacctaaac

SEQ ID NO: 52564 - RNA, 19 nt, synthetic construct
  misc_feature 1..19: note = siRNA sense sequence
  source 1..19: mol_type = other RNA
tttaggttgatatgtgccc

SEQ ID NO: 52565 - RNA, 19 nt, synthetic construct
  misc_feature 1..19: note = siRNA antisense sequence
  source 1..19: mol_type = other RNA
gggcacatatcaacctaaa

SEQ ID NO: 52566 - RNA, 19 nt, synthetic construct
  misc_feature 1..19: note = siRNA sense sequence
  source 1..19: mol_type = other RNA
ttaggttgatatgtgccct

SEQ ID NO: 52567 - RNA, 19 nt, synthetic construct
  misc_feature 1..19: note = siRNA antisense sequence
  source 1..19: mol_type = other RNA
agggcacatatcaacctaa

SEQ ID NO: 52568 - RNA, 19 nt, synthetic construct
  misc_feature 1..19: note = siRNA sense sequence
  source 1..19: mol_type = other RNA
taggttgatatgtgccctt

SEQ ID NO: 52569 - RNA, 19 nt, synthetic construct
  misc_feature 1..19: note = siRNA antisense sequence
  source 1..19: mol_type = other RNA
aagggcacatatcaaccta

SEQ ID NO: 52570 - RNA, 19 nt, synthetic construct
  misc_feature 1..19: note = siRNA sense sequence
  source 1..19: mol_type = other RNA
aggttgatatgtgcccttt

SEQ ID NO: 52571 - RNA, 19 nt, synthetic construct
  misc_feature 1..19: note = siRNA antisense sequence
  source 1..19: mol_type = other RNA
aaagggcacatatcaacct

SEQ ID NO: 52572 - RNA, 19 nt, synthetic construct
  misc_feature 1..19: note = siRNA sense sequence
  source 1..19: mol_type = other RNA
tgatatgtgccctttctga

SEQ ID NO: 52573 - RNA, 19 nt, synthetic construct
  misc_feature 1..19: note = siRNA antisense sequence
  source 1..19: mol_type = other RNA
tcagaaagggcacatatca

SEQ ID NO: 52574 - RNA, 19 nt, synthetic construct
  misc_feature 1..19: note = siRNA sense sequence
  source 1..19: mol_type = other RNA
gtgccctttctgatatgtt

SEQ ID NO: 52575 - RNA, 19 nt, synthetic construct
  misc_feature 1..19: note = siRNA antisense sequence
  source 1..19: mol_type = other RNA
aacatatcagaaagggcac

SEQ ID NO: 52576 - RNA, 19 nt, synthetic construct
  misc_feature 1..19: note = siRNA sense sequence
  source 1..19: mol_type = other RNA
tgccctttctgatatgttc

SEQ ID NO: 52577 - RNA, 19 nt, synthetic construct
  misc_feature 1..19: note = siRNA antisense sequence
  source 1..19: mol_type = other RNA
gaacatatcagaaagggca

SEQ ID NO: 52578 - RNA, 19 nt, synthetic construct
  misc_feature 1..19: note = siRNA sense sequence
  source 1..19: mol_type = other RNA
gccctttctgatatgttca

SEQ ID NO: 52579 - RNA, 19 nt, synthetic construct
  misc_feature 1..19: note = siRNA antisense sequence
  source 1..19: mol_type = other RNA
tgaacatatcagaaagggc

SEQ ID NO: 52580 - RNA, 19 nt, synthetic construct
  misc_feature 1..19: note = siRNA sense sequence
  source 1..19: mol_type = other RNA
atgttcagtttctctgtgt

SEQ ID NO: 52581 - RNA, 19 nt, synthetic construct
  misc_feature 1..19: note = siRNA antisense sequence
  source 1..19: mol_type = other RNA
acacagagaaactgaacat

SEQ ID NO: 52582 - RNA, 19 nt, synthetic construct
  misc_feature 1..19: note = siRNA sense sequence
  source 1..19: mol_type = other RNA
ttcagtttctctgtgtctg

SEQ ID NO: 52583 - RNA, 19 nt, synthetic construct
  misc_feature 1..19: note = siRNA antisense sequence
  source 1..19: mol_type = other RNA
cagacacagagaaactgaa

SEQ ID NO: 52584 - RNA, 19 nt, synthetic construct
  misc_feature 1..19: note = siRNA sense sequence
  source 1..19: mol_type = other RNA
tttctctgtgtctggtatc

SEQ ID NO: 52585 - RNA, 19 nt, synthetic construct
  misc_feature 1..19: note = siRNA antisense sequence
  source 1..19: mol_type = other RNA
gataccagacacagagaaa

SEQ ID NO: 52586 - RNA, 19 nt, synthetic construct
  misc_feature 1..19: note = siRNA sense sequence
  source 1..19: mol_type = other RNA
ttctctgtgtctggtatca

SEQ ID NO: 52587 - RNA, 19 nt, synthetic construct
  misc_feature 1..19: note = siRNA antisense sequence
  source 1..19: mol_type = other RNA
tgataccagacacagagaa

SEQ ID NO: 52588 - RNA, 19 nt, synthetic construct
  misc_feature 1..19: note = siRNA sense sequence
  source 1..19: mol_type = other RNA
tctctgtgtctggtatcaa

SEQ ID NO: 52589 - RNA, 19 nt, synthetic construct
  misc_feature 1..19: note = siRNA antisense sequence
  source 1..19: mol_type = other RNA
ttgataccagacacagaga

SEQ ID NO: 52590 - RNA, 19 nt, synthetic construct
  misc_feature 1..19: note = siRNA sense sequence
  source 1..19: mol_type = other RNA
ctctgtgtctggtatcaac

SEQ ID NO: 52591 - RNA, 19 nt, synthetic construct
  misc_feature 1..19: note = siRNA antisense sequence
  source 1..19: mol_type = other RNA
gttgataccagacacagag

SEQ ID NO: 52592 - RNA, 19 nt, synthetic construct
  misc_feature 1..19: note = siRNA sense sequence
  source 1..19: mol_type = other RNA
tctgtgtctggtatcaact

SEQ ID NO: 52593 - RNA, 19 nt, synthetic construct
  misc_feature 1..19: note = siRNA antisense sequence
  source 1..19: mol_type = other RNA
agttgataccagacacaga

SEQ ID NO: 52594 - RNA, 19 nt, synthetic construct
  misc_feature 1..19: note = siRNA sense sequence
  source 1..19: mol_type = other RNA
tgtctggtatcaactttaa

SEQ ID NO: 52595 - RNA, 19 nt, synthetic construct
  misc_feature 1..19: note = siRNA antisense sequence
  source 1..19: mol_type = other RNA
ttaaagttgataccagaca

SEQ ID NO: 52596 - RNA, 19 nt, synthetic construct
  misc_feature 1..19: note = siRNA sense sequence
  source 1..19: mol_type = other RNA
gtctggtatcaactttaac

SEQ ID NO: 52597 - RNA, 19 nt, synthetic construct
  misc_feature 1..19: note = siRNA antisense sequence
  source 1..19: mol_type = other RNA
gttaaagttgataccagac

SEQ ID NO: 52598 - RNA, 19 nt, synthetic construct
  misc_feature 1..19: note = siRNA sense sequence
  source 1..19: mol_type = other RNA
tctggtatcaactttaact

SEQ ID NO: 52599 - RNA, 19 nt, synthetic construct
  misc_feature 1..19: note = siRNA antisense sequence
  source 1..19: mol_type = other RNA
agttaaagttgataccaga

SEQ ID NO: 52600 - RNA, 19 nt, synthetic construct
  misc_feature 1..19: note = siRNA sense sequence
  source 1..19: mol_type = other RNA
ctggtatcaactttaactt

SEQ ID NO: 52601 - RNA, 19 nt, synthetic construct
  misc_feature 1..19: note = siRNA antisense sequence
  source 1..19: mol_type = other RNA
aagttaaagttgataccag

SEQ ID NO: 52602 - RNA, 19 nt, synthetic construct
  misc_feature 1..19: note = siRNA sense sequence
  source 1..19: mol_type = other RNA
tggtatcaactttaacttc

SEQ ID NO: 52603 - RNA, 19 nt, synthetic construct
  misc_feature 1..19: note = siRNA antisense sequence
  source 1..19: mol_type = other RNA
gaagttaaagttgatacca

SEQ ID NO: 52604 - RNA, 19 nt, synthetic construct
  misc_feature 1..19: note = siRNA sense sequence
  source 1..19: mol_type = other RNA
ggtatcaactttaacttca

SEQ ID NO: 52605 - RNA, 19 nt, synthetic construct
  misc_feature 1..19: note = siRNA antisense sequence
  source 1..19: mol_type = other RNA
tgaagttaaagttgatacc

SEQ ID NO: 52606 - RNA, 19 nt, synthetic construct
  misc_feature 1..19: note = siRNA sense sequence
  source 1..19: mol_type = other RNA
aacctcgacttctcctata

SEQ ID NO: 52607 - RNA, 19 nt, synthetic construct
  misc_feature 1..19: note = siRNA antisense sequence
  source 1..19: mol_type = other RNA
tataggagaagtcgaggtt

SEQ ID NO: 52608 - RNA, 19 nt, synthetic construct
  misc_feature 1..19: note = siRNA sense sequence
  source 1..19: mol_type = other RNA
acctcgacttctcctatat

SEQ ID NO: 52609 - RNA, 19 nt, synthetic construct
  misc_feature 1..19: note = siRNA antisense sequence
  source 1..19: mol_type = other RNA
atataggagaagtcgaggt

SEQ ID NO: 52610 - RNA, 19 nt, synthetic construct
  misc_feature 1..19: note = siRNA sense sequence
  source 1..19: mol_type = other RNA
cctcgacttctcctatatc

SEQ ID NO: 52611 - RNA, 19 nt, synthetic construct
  misc_feature 1..19: note = siRNA antisense sequence
  source 1..19: mol_type = other RNA
gatataggagaagtcgagg

SEQ ID NO: 52612 - RNA, 19 nt, synthetic construct
  misc_feature 1..19: note = siRNA sense sequence
  source 1..19: mol_type = other RNA
ctcgacttctcctatatcc

SEQ ID NO: 52613 - RNA, 19 nt, synthetic construct
  misc_feature 1..19: note = siRNA antisense sequence
  source 1..19: mol_type = other RNA
ggatataggagaagtcgag

SEQ ID NO: 52614 - RNA, 19 nt, synthetic construct
  misc_feature 1..19: note = siRNA sense sequence
  source 1..19: mol_type = other RNA
tcgacttctcctatatcct

SEQ ID NO: 52615 - RNA, 19 nt, synthetic construct
  misc_feature 1..19: note = siRNA antisense sequence
  source 1..19: mol_type = other RNA
aggatataggagaagtcga

SEQ ID NO: 52616 - RNA, 19 nt, synthetic construct
  misc_feature 1..19: note = siRNA sense sequence
  source 1..19: mol_type = other RNA
gacttctcctatatcctga

SEQ ID NO: 52617 - RNA, 19 nt, synthetic construct
  misc_feature 1..19: note = siRNA antisense sequence
  source 1..19: mol_type = other RNA
tcaggatataggagaagtc

SEQ ID NO: 52618 - RNA, 19 nt, synthetic construct
  misc_feature 1..19: note = siRNA sense sequence
  source 1..19: mol_type = other RNA
cattaatttctctctatgg

SEQ ID NO: 52619 - RNA, 19 nt, synthetic construct
  misc_feature 1..19: note = siRNA antisense sequence
  source 1..19: mol_type = other RNA
ccatagagagaaattaatg

SEQ ID NO: 52620 - RNA, 19 nt, synthetic construct
  misc_feature 1..19: note = siRNA sense sequence
  source 1..19: mol_type = other RNA
attaatttctctctatggg

SEQ ID NO: 52621 - RNA, 19 nt, synthetic construct
  misc_feature 1..19: note = siRNA antisense sequence
  source 1..19: mol_type = other RNA
cccatagagagaaattaat

SEQ ID NO: 52622 - RNA, 19 nt, synthetic construct
  misc_feature 1..19: note = siRNA sense sequence
  source 1..19: mol_type = other RNA
taatttctctctatgggtc

SEQ ID NO: 52623 - RNA, 19 nt, synthetic construct
  misc_feature 1..19: note = siRNA antisense sequence
  source 1..19: mol_type = other RNA
gacccatagagagaaatta

SEQ ID NO: 52624 - RNA, 19 nt, synthetic construct
  misc_feature 1..19: note = siRNA sense sequence
  source 1..19: mol_type = other RNA
ttctctctatgggtcctaa

SEQ ID NO: 52625 - RNA, 19 nt, synthetic construct
  misc_feature 1..19: note = siRNA antisense sequence
  source 1..19: mol_type = other RNA
ttaggacccatagagagaa

SEQ ID NO: 52626 - RNA, 19 nt, synthetic construct
  misc_feature 1..19: note = siRNA sense sequence
  source 1..19: mol_type = other RNA
tctctctatgggtcctaat

SEQ ID NO: 52627 - RNA, 19 nt, synthetic construct
  misc_feature 1..19: note = siRNA antisense sequence
  source 1..19: mol_type = other RNA
attaggacccatagagaga

SEQ ID NO: 52628 - RNA, 19 nt, synthetic construct
  misc_feature 1..19: note = siRNA sense sequence
  source 1..19: mol_type = other RNA
ctctctatgggtcctaatt

SEQ ID NO: 52629 - RNA, 19 nt, synthetic construct
  misc_feature 1..19: note = siRNA antisense sequence
  source 1..19: mol_type = other RNA
aattaggacccatagagag

SEQ ID NO: 52630 - RNA, 19 nt, synthetic construct
  misc_feature 1..19: note = siRNA sense sequence
  source 1..19: mol_type = other RNA
tttgtcatgtaacttcttc

SEQ ID NO: 52631 - RNA, 19 nt, synthetic construct
  misc_feature 1..19: note = siRNA antisense sequence
  source 1..19: mol_type = other RNA
gaagaagttacatgacaaa

SEQ ID NO: 52632 - RNA, 19 nt, synthetic construct
  misc_feature 1..19: note = siRNA sense sequence
  source 1..19: mol_type = other RNA
tgtcatgtaacttcttctt

SEQ ID NO: 52633 - RNA, 19 nt, synthetic construct
  misc_feature 1..19: note = siRNA antisense sequence
  source 1..19: mol_type = other RNA
aagaagaagttacatgaca

SEQ ID NO: 52634 - RNA, 19 nt, synthetic construct
  misc_feature 1..19: note = siRNA sense sequence
  source 1..19: mol_type = other RNA
gatcttgtttcccagtgtc

SEQ ID NO: 52635 - RNA, 19 nt, synthetic construct
  misc_feature 1..19: note = siRNA antisense sequence
  source 1..19: mol_type = other RNA
gacactgggaaacaagatc

SEQ ID NO: 52636 - RNA, 19 nt, synthetic construct
  misc_feature 1..19: note = siRNA sense sequence
  source 1..19: mol_type = other RNA
atcttgtttcccagtgtct

SEQ ID NO: 52637 - RNA, 19 nt, synthetic construct
  misc_feature 1..19: note = siRNA antisense sequence
  source 1..19: mol_type = other RNA
agacactgggaaacaagat

SEQ ID NO: 52638 - RNA, 19 nt, synthetic construct
  misc_feature 1..19: note = siRNA sense sequence
  source 1..19: mol_type = other RNA
tcttgtttcccagtgtctt

SEQ ID NO: 52639 - RNA, 19 nt, synthetic construct
  misc_feature 1..19: note = siRNA antisense sequence
  source 1..19: mol_type = other RNA
aagacactgggaaacaaga

SEQ ID NO: 52640 - RNA, 19 nt, synthetic construct
  misc_feature 1..19: note = siRNA sense sequence
  source 1..19: mol_type = other RNA
ttcccagtgtcttgccaga

SEQ ID NO: 52641 - RNA, 19 nt, synthetic construct
  misc_feature 1..19: note = siRNA antisense sequence
  source 1..19: mol_type = other RNA
tctggcaagacactgggaa

SEQ ID NO: 52642 - RNA, 19 nt, synthetic construct
  misc_feature 1..19: note = siRNA sense sequence
  source 1..19: mol_type = other RNA
tcccagtgtcttgccagaa

SEQ ID NO: 52643 - RNA, 19 nt, synthetic construct
  misc_feature 1..19: note = siRNA antisense sequence
  source 1..19: mol_type = other RNA
ttctggcaagacactggga

SEQ ID NO: 52644 - RNA, 19 nt, synthetic construct
  misc_feature 1..19: note = siRNA sense sequence
  source 1..19: mol_type = other RNA
aaatgaggagttgtatgtc

SEQ ID NO: 52645 - RNA, 19 nt, synthetic construct
  misc_feature 1..19: note = siRNA antisense sequence
  source 1..19: mol_type = other RNA
gacatacaactcctcattt

SEQ ID NO: 52646 - RNA, 19 nt, synthetic construct
  misc_feature 1..19: note = siRNA sense sequence
  source 1..19: mol_type = other RNA
aatgaggagttgtatgtct

SEQ ID NO: 52647 - RNA, 19 nt, synthetic construct
  misc_feature 1..19: note = siRNA antisense sequence
  source 1..19: mol_type = other RNA
agacatacaactcctcatt

SEQ ID NO: 52648 - RNA, 19 nt, synthetic construct
  misc_feature 1..19: note = siRNA sense sequence
  source 1..19: mol_type = other RNA
atgaggagttgtatgtctg

SEQ ID NO: 52649 - RNA, 19 nt, synthetic construct
  misc_feature 1..19: note = siRNA antisense sequence
  source 1..19: mol_type = other RNA
cagacatacaactcctcat

SEQ ID NO: 52650 - RNA, 19 nt, synthetic construct
  misc_feature 1..19: note = siRNA sense sequence
  source 1..19: mol_type = other RNA
tgaggagttgtatgtctgg

SEQ ID NO: 52651 - RNA, 19 nt, synthetic construct
  misc_feature 1..19: note = siRNA antisense sequence
  source 1..19: mol_type = other RNA
ccagacatacaactcctca

SEQ ID NO: 52652 - RNA, 19 nt, synthetic construct
  misc_feature 1..19: note = siRNA sense sequence
  source 1..19: mol_type = other RNA
gaggagttgtatgtctggt

SEQ ID NO: 52653 - RNA, 19 nt, synthetic construct
  misc_feature 1..19: note = siRNA antisense sequence
  source 1..19: mol_type = other RNA
accagacatacaactcctc

SEQ ID NO: 52654 - RNA, 19 nt, synthetic construct
  misc_feature 1..19: note = siRNA sense sequence
  source 1..19: mol_type = other RNA
aggagttgtatgtctggta

SEQ ID NO: 52655 - RNA, 19 nt, synthetic construct
  misc_feature 1..19: note = siRNA antisense sequence
  source 1..19: mol_type = other RNA
taccagacatacaactcct

SEQ ID NO: 52656 - RNA, 19 nt, synthetic construct
  misc_feature 1..19: note = siRNA sense sequence
  source 1..19: mol_type = other RNA
ggagttgtatgtctggtac

SEQ ID NO: 52657 - RNA, 19 nt, synthetic construct
  misc_feature 1..19: note = siRNA antisense sequence
  source 1..19: mol_type = other RNA
gtaccagacatacaactcc

SEQ ID NO: 52658 - RNA, 19 nt, synthetic construct
  misc_feature 1..19: note = siRNA sense sequence
  source 1..19: mol_type = other RNA
gagttgtatgtctggtacc

SEQ ID NO: 52659 - RNA, 19 nt, synthetic construct
  misc_feature 1..19: note = siRNA antisense sequence
  source 1..19: mol_type = other RNA
ggtaccagacatacaactc

SEQ ID NO: 52660 - RNA, 19 nt, synthetic construct
  misc_feature 1..19: note = siRNA sense sequence
  source 1..19: mol_type = other RNA
tgggatctataccaagctg

SEQ ID NO: 52661 - RNA, 19 nt, synthetic construct
  misc_feature 1..19: note = siRNA antisense sequence
  source 1..19: mol_type = other RNA
cagcttggtatagatccca

SEQ ID NO: 52662 - RNA, 19 nt, synthetic construct
  misc_feature 1..19: note = siRNA sense sequence
  source 1..19: mol_type = other RNA
gggatctataccaagctga

SEQ ID NO: 52663 - RNA, 19 nt, synthetic construct
  misc_feature 1..19: note = siRNA antisense sequence
  source 1..19: mol_type = other RNA
tcagcttggtatagatccc

SEQ ID NO: 52664 - RNA, 19 nt, synthetic construct
  misc_feature 1..19: note = siRNA sense sequence
  source 1..19: mol_type = other RNA
ggatctataccaagctgag

SEQ ID NO: 52665 - RNA, 19 nt, synthetic construct
  misc_feature 1..19: note = siRNA antisense sequence
  source 1..19: mol_type = other RNA
ctcagcttggtatagatcc

SEQ ID NO: 52666 - RNA, 19 nt, synthetic construct
  misc_feature 1..19: note = siRNA sense sequence
  source 1..19: mol_type = other RNA
gatctataccaagctgagc

SEQ ID NO: 52667 - RNA, 19 nt, synthetic construct
  misc_feature 1..19: note = siRNA antisense sequence
  source 1..19: mol_type = other RNA
gctcagcttggtatagatc

SEQ ID NO: 52668 - RNA, 19 nt, synthetic construct
  misc_feature 1..19: note = siRNA sense sequence
  source 1..19: mol_type = other RNA
atctataccaagctgagca

SEQ ID NO: 52669 - RNA, 19 nt, synthetic construct
  misc_feature 1..19: note = siRNA antisense sequence
  source 1..19: mol_type = other RNA
tgctcagcttggtatagat

SEQ ID NO: 52670 - RNA, 19 nt, synthetic construct
  misc_feature 1..19: note = siRNA sense sequence
  source 1..19: mol_type = other RNA
tctataccaagctgagcaa

SEQ ID NO: 52671 - RNA, 19 nt, synthetic construct
  misc_feature 1..19: note = siRNA antisense sequence
  source 1..19: mol_type = other RNA
ttgctcagcttggtataga

SEQ ID NO: 52672 - RNA, 19 nt, synthetic construct
  misc_feature 1..19: note = siRNA sense sequence
  source 1..19: mol_type = other RNA
ctataccaagctgagcaac

SEQ ID NO: 52673 - RNA, 19 nt, synthetic construct
  misc_feature 1..19: note = siRNA antisense sequence
  source 1..19: mol_type = other RNA
gttgctcagcttggtatag

SEQ ID NO: 52674 - RNA, 19 nt, synthetic construct
  misc_feature 1..19: note = siRNA sense sequence
  source 1..19: mol_type = other RNA
acagttgggaggacctaaa

SEQ ID NO: 52675 - RNA, 19 nt, synthetic construct
  misc_feature 1..19: note = siRNA antisense sequence
  source 1..19: mol_type = other RNA
tttaggtcctcccaactgt

SEQ ID NO: 52676 - RNA, 19 nt, synthetic construct
  misc_feature 1..19: note = siRNA sense sequence
  source 1..19: mol_type = other RNA
cagttgggaggacctaaaa

SEQ ID NO: 52677 - RNA, 19 nt, synthetic construct
  misc_feature 1..19: note = siRNA antisense sequence
  source 1..19: mol_type = other RNA
ttttaggtcctcccaactg

SEQ ID NO: 52678 - RNA, 19 nt, synthetic construct
  misc_feature 1..19: note = siRNA sense sequence
  source 1..19: mol_type = other RNA
agttgggaggacctaaaat

SEQ ID NO: 52679 - RNA, 19 nt, synthetic construct
  misc_feature 1..19: note = siRNA antisense sequence
  source 1..19: mol_type = other RNA
attttaggtcctcccaact

SEQ ID NO: 52680 - RNA, 19 nt, synthetic construct
  misc_feature 1..19: note = siRNA sense sequence
  source 1..19: mol_type = other RNA
ttgggaggacctaaaataa

SEQ ID NO: 52681 - RNA, 19 nt, synthetic construct
  misc_feature 1..19: note = siRNA antisense sequence
  source 1..19: mol_type = other RNA
ttattttaggtcctcccaa

SEQ ID NO: 52682 - RNA, 19 nt, synthetic construct
  misc_feature 1..19: note = siRNA sense sequence
  source 1..19: mol_type = other RNA
catcaggatatggcttccc

SEQ ID NO: 52683 - RNA, 19 nt, synthetic construct
  misc_feature 1..19: note = siRNA antisense sequence
  source 1..19: mol_type = other RNA
gggaagccatatcctgatg

SEQ ID NO: 52684 - RNA, 19 nt, synthetic construct
  misc_feature 1..19: note = siRNA sense sequence
  source 1..19: mol_type = other RNA
atcaggatatggcttccca

SEQ ID NO: 52685 - RNA, 19 nt, synthetic construct
  misc_feature 1..19: note = siRNA antisense sequence
  source 1..19: mol_type = other RNA
tgggaagccatatcctgat

SEQ ID NO: 52686 - RNA, 19 nt, synthetic construct
  misc_feature 1..19: note = siRNA sense sequence
  source 1..19: mol_type = other RNA
gatatggcttcccagctct

SEQ ID NO: 52687 - RNA, 19 nt, synthetic construct
  misc_feature 1..19: note = siRNA antisense sequence
  source 1..19: mol_type = other RNA
agagctgggaagccatatc

SEQ ID NO: 52688 - RNA, 19 nt, synthetic construct
  misc_feature 1..19: note = siRNA sense sequence
  source 1..19: mol_type = other RNA
atatggcttcccagctctt

SEQ ID NO: 52689 - RNA, 19 nt, synthetic construct
  misc_feature 1..19: note = siRNA antisense sequence
  source 1..19: mol_type = other RNA
aagagctgggaagccatat

SEQ ID NO: 52690 - RNA, 19 nt, synthetic construct
  misc_feature 1..19: note = siRNA sense sequence
  source 1..19: mol_type = other RNA
atggcttcccagctcttac

SEQ ID NO: 52691 - RNA, 19 nt, synthetic construct
  misc_feature 1..19: note = siRNA antisense sequence
  source 1..19: mol_type = other RNA
gtaagagctgggaagccat

SEQ ID NO: 52692 - RNA, 19 nt, synthetic construct
  misc_feature 1..19: note = siRNA sense sequence
  source 1..19: mol_type = other RNA
tggcttcccagctcttact

SEQ ID NO: 52693 - RNA, 19 nt, synthetic construct
  misc_feature 1..19: note = siRNA antisense sequence
  source 1..19: mol_type = other RNA
agtaagagctgggaagcca

SEQ ID NO: 52694 - RNA, 19 nt, synthetic construct
  misc_feature 1..19: note = siRNA sense sequence
  source 1..19: mol_type = other RNA
gcttcccagctcttactca

SEQ ID NO: 52695 - RNA, 19 nt, synthetic construct
  misc_feature 1..19: note = siRNA antisense sequence
  source 1..19: mol_type = other RNA
tgagtaagagctgggaagc

SEQ ID NO: 52696 - RNA, 19 nt, synthetic construct
  misc_feature 1..19: note = siRNA sense sequence
  source 1..19: mol_type = other RNA
cttcccagctcttactcac

SEQ ID NO: 52697 - RNA, 19 nt, synthetic construct
  misc_feature 1..19: note = siRNA antisense sequence
  source 1..19: mol_type = other RNA
gtgagtaagagctgggaag

SEQ ID NO: 52698 - RNA, 19 nt, synthetic construct
  misc_feature 1..19: note = siRNA sense sequence
  source 1..19: mol_type = other RNA
ttcccagctcttactcact

SEQ ID NO: 52699 - RNA, 19 nt, synthetic construct
  misc_feature 1..19: note = siRNA antisense sequence
  source 1..19: mol_type = other RNA
agtgagtaagagctgggaa

SEQ ID NO: 52700 - RNA, 19 nt, synthetic construct
  misc_feature 1..19: note = siRNA sense sequence
  source 1..19: mol_type = other RNA
tcccagctcttactcactc

SEQ ID NO: 52701 - RNA, 19 nt, synthetic construct
  misc_feature 1..19: note = siRNA antisense sequence
  source 1..19: mol_type = other RNA
gagtgagtaagagctggga

SEQ ID NO: 52702 - RNA, 19 nt, synthetic construct
  misc_feature 1..19: note = siRNA sense sequence
  source 1..19: mol_type = other RNA
cccaggcattgatcttagt

SEQ ID NO: 52703 - RNA, 19 nt, synthetic construct
  misc_feature 1..19: note = siRNA antisense sequence
  source 1..19: mol_type = other RNA
actaagatcaatgcctggg

SEQ ID NO: 52704 - RNA, 19 nt, synthetic construct
  misc_feature 1..19: note = siRNA sense sequence
  source 1..19: mol_type = other RNA
ccaggcattgatcttagtg

SEQ ID NO: 52705 - RNA, 19 nt, synthetic construct
  misc_feature 1..19: note = siRNA antisense sequence
  source 1..19: mol_type = other RNA
cactaagatcaatgcctgg

SEQ ID NO: 52706 - RNA, 19 nt, synthetic construct
  misc_feature 1..19: note = siRNA sense sequence
  source 1..19: mol_type = other RNA
caggcattgatcttagtgc

SEQ ID NO: 52707 - RNA, 19 nt, synthetic construct
  misc_feature 1..19: note = siRNA antisense sequence
  source 1..19: mol_type = other RNA
gcactaagatcaatgcctg

SEQ ID NO: 52708 - RNA, 19 nt, synthetic construct
  misc_feature 1..19: note = siRNA sense sequence
  source 1..19: mol_type = other RNA
aggcattgatcttagtgct

SEQ ID NO: 52709 - RNA, 19 nt, synthetic construct
  misc_feature 1..19: note = siRNA antisense sequence
  source 1..19: mol_type = other RNA
agcactaagatcaatgcct

SEQ ID NO: 52710 - RNA, 19 nt, synthetic construct
  misc_feature 1..19: note = siRNA sense sequence
  source 1..19: mol_type = other RNA
ttgatcttagtgctgggaa

SEQ ID NO: 52711 - RNA, 19 nt, synthetic construct
  misc_feature 1..19: note = siRNA antisense sequence
  source 1..19: mol_type = other RNA
ttcccagcactaagatcaa

SEQ ID NO: 52712 - RNA, 19 nt, synthetic construct
  misc_feature 1..19: note = siRNA sense sequence
  source 1..19: mol_type = other RNA
tgatcttagtgctgggaat

SEQ ID NO: 52713 - RNA, 19 nt, synthetic construct
  misc_feature 1..19: note = siRNA antisense sequence
  source 1..19: mol_type = other RNA
attcccagcactaagatca

SEQ ID NO: 52714 - RNA, 19 nt, synthetic construct
  misc_feature 1..19: note = siRNA sense sequence
  source 1..19: mol_type = other RNA
gatcttagtgctgggaata

SEQ ID NO: 52715 - RNA, 19 nt, synthetic construct
  misc_feature 1..19: note = siRNA antisense sequence
  source 1..19: mol_type = other RNA
tattcccagcactaagatc

SEQ ID NO: 52716 - RNA, 19 nt, synthetic construct
  misc_feature 1..19: note = siRNA sense sequence
  source 1..19: mol_type = other RNA
atcttagtgctgggaataa

SEQ ID NO: 52717 - RNA, 19 nt, synthetic construct
  misc_feature 1..19: note = siRNA antisense sequence
  source 1..19: mol_type = other RNA
ttattcccagcactaagat

SEQ ID NO: 52718 - RNA, 19 nt, synthetic construct
  misc_feature 1..19: note = siRNA sense sequence
  source 1..19: mol_type = other RNA
tcttagtgctgggaataaa

SEQ ID NO: 52719 - RNA, 19 nt, synthetic construct
  misc_feature 1..19: note = siRNA antisense sequence
  source 1..19: mol_type = other RNA
tttattcccagcactaaga

SEQ ID NO: 52720 - RNA, 19 nt, synthetic construct
  misc_feature 1..19: note = siRNA sense sequence
  source 1..19: mol_type = other RNA
cttagtgctgggaataaag

SEQ ID NO: 52721 - RNA, 19 nt, synthetic construct
  misc_feature 1..19: note = siRNA antisense sequence
  source 1..19: mol_type = other RNA
ctttattcccagcactaag

SEQ ID NO: 52722 - RNA, 19 nt, synthetic construct
  misc_feature 1..19: note = siRNA sense sequence
  source 1..19: mol_type = other RNA
tagtgctgggaataaagtg

SEQ ID NO: 52723 - RNA, 19 nt, synthetic construct
  misc_feature 1..19: note = siRNA antisense sequence
  source 1..19: mol_type = other RNA
cactttattcccagcacta

SEQ ID NO: 52724 - RNA, 19 nt, synthetic construct
  misc_feature 1..19: note = siRNA sense sequence
  source 1..19: mol_type = other RNA
agtgctgggaataaagtga

SEQ ID NO: 52725 - RNA, 19 nt, synthetic construct
  misc_feature 1..19: note = siRNA antisense sequence
  source 1..19: mol_type = other RNA
tcactttattcccagcact

SEQ ID NO: 52726 - RNA, 19 nt, synthetic construct
  misc_feature 1..19: note = siRNA sense sequence
  source 1..19: mol_type = other RNA
ctgggaataaagtgataaa

SEQ ID NO: 52727 - RNA, 19 nt, synthetic construct
  misc_feature 1..19: note = siRNA antisense sequence
  source 1..19: mol_type = other RNA
tttatcactttattcccag

SEQ ID NO: 52728 - RNA, 19 nt, synthetic construct
  misc_feature 1..19: note = siRNA sense sequence
  source 1..19: mol_type = other RNA
gggaataaagtgataaaga

SEQ ID NO: 52729 - RNA, 19 nt, synthetic construct
  misc_feature 1..19: note = siRNA antisense sequence
  source 1..19: mol_type = other RNA
tctttatcactttattccc

SEQ ID NO: 52730 - RNA, 19 nt, synthetic construct
  misc_feature 1..19: note = siRNA sense sequence
  source 1..19: mol_type = other RNA
cacataccttggcctggaa

SEQ ID NO: 52731 - RNA, 19 nt, synthetic construct
  misc_feature 1..19: note = siRNA antisense sequence
  source 1..19: mol_type = other RNA
ttccaggccaaggtatgtg

SEQ ID NO: 52732 - RNA, 19 nt, synthetic construct
  misc_feature 1..19: note = siRNA sense sequence
  source 1..19: mol_type = other RNA
cattcacagcttcacgtgt

SEQ ID NO: 52733 - RNA, 19 nt, synthetic construct
  misc_feature 1..19: note = siRNA antisense sequence
  source 1..19: mol_type = other RNA
acacgtgaagctgtgaatg

SEQ ID NO: 52734 - RNA, 19 nt, synthetic construct
  misc_feature 1..19: note = siRNA sense sequence
  source 1..19: mol_type = other RNA
attcacagcttcacgtgtt

SEQ ID NO: 52735 - RNA, 19 nt, synthetic construct
  misc_feature 1..19: note = siRNA antisense sequence
  source 1..19: mol_type = other RNA
aacacgtgaagctgtgaat

SEQ ID NO: 52736 - RNA, 19 nt, synthetic construct
  misc_feature 1..19: note = siRNA sense sequence
  source 1..19: mol_type = other RNA
ttcacagcttcacgtgtta

SEQ ID NO: 52737 - RNA, 19 nt, synthetic construct
  misc_feature 1..19: note = siRNA antisense sequence
  source 1..19: mol_type = other RNA
taacacgtgaagctgtgaa

SEQ ID NO: 52738 - RNA, 19 nt, synthetic construct
  misc_feature 1..19: note = siRNA sense sequence
  source 1..19: mol_type = other RNA
tcacagcttcacgtgttag

SEQ ID NO: 52739 - RNA, 19 nt, synthetic construct
  misc_feature 1..19: note = siRNA antisense sequence
  source 1..19: mol_type = other RNA
ctaacacgtgaagctgtga

SEQ ID NO: 52740 - RNA, 19 nt, synthetic construct
  misc_feature 1..19: note = siRNA sense sequence
  source 1..19: mol_type = other RNA
cacagcttcacgtgttagc

SEQ ID NO: 52741 - RNA, 19 nt, synthetic construct
  misc_feature 1..19: note = siRNA antisense sequence
  source 1..19: mol_type = other RNA
gctaacacgtgaagctgtg

SEQ ID NO: 52742 - RNA, 19 nt, synthetic construct
  misc_feature 1..19: note = siRNA sense sequence
  source 1..19: mol_type = other RNA
acagcttcacgtgttagcc

SEQ ID NO: 52743 - RNA, 19 nt, synthetic construct
  misc_feature 1..19: note = siRNA antisense sequence
  source 1..19: mol_type = other RNA
ggctaacacgtgaagctgt

SEQ ID NO: 52744 - RNA, 19 nt, synthetic construct
  misc_feature 1..19: note = siRNA sense sequence
  source 1..19: mol_type = other RNA
cagcttcacgtgttagcct

SEQ ID NO: 52745 - RNA, 19 nt, synthetic construct
  misc_feature 1..19: note = siRNA antisense sequence
  source 1..19: mol_type = other RNA
aggctaacacgtgaagctg

SEQ ID NO: 52746 - RNA, 19 nt, synthetic construct
  misc_feature 1..19: note = siRNA sense sequence
  source 1..19: mol_type = other RNA
agcttcacgtgttagcctt

SEQ ID NO: 52747 - RNA, 19 nt, synthetic construct
  misc_feature 1..19: note = siRNA antisense sequence
  source 1..19: mol_type = other RNA
aaggctaacacgtgaagct

SEQ ID NO: 52748 - RNA, 19 nt, synthetic construct
  misc_feature 1..19: note = siRNA sense sequence
  source 1..19: mol_type = other RNA
gcttcacgtgttagccttc

SEQ ID NO: 52749 - RNA, 19 nt, synthetic construct
  misc_feature 1..19: note = siRNA antisense sequence
  source 1..19: mol_type = other RNA
gaaggctaacacgtgaagc

SEQ ID NO: 52750 - RNA, 19 nt, synthetic construct
  misc_feature 1..19: note = siRNA sense sequence
  source 1..19: mol_type = other RNA
cttcacgtgttagccttcc

SEQ ID NO: 52751 - RNA, 19 nt, synthetic construct
  misc_feature 1..19: note = siRNA antisense sequence
  source 1..19: mol_type = other RNA
ggaaggctaacacgtgaag

SEQ ID NO: 52752 - RNA, 19 nt, synthetic construct
  misc_feature 1..19: note = siRNA sense sequence
  source 1..19: mol_type = other RNA
ttcacgtgttagccttcct

SEQ ID NO: 52753 - RNA, 19 nt, synthetic construct
  misc_feature 1..19: note = siRNA antisense sequence
  source 1..19: mol_type = other RNA
aggaaggctaacacgtgaa

SEQ ID NO: 52754 - RNA, 19 nt, synthetic construct
  misc_feature 1..19: note = siRNA sense sequence
  source 1..19: mol_type = other RNA
tcacgtgttagccttcctc

SEQ ID NO: 52755 - RNA, 19 nt, synthetic construct
  misc_feature 1..19: note = siRNA antisense sequence
  source 1..19: mol_type = other RNA
gaggaaggctaacacgtga

SEQ ID NO: 52756 - RNA, 19 nt, synthetic construct
  misc_feature 1..19: note = siRNA sense sequence
  source 1..19: mol_type = other RNA
cacgtgttagccttcctct

SEQ ID NO: 52757 - RNA, 19 nt, synthetic construct
  misc_feature 1..19: note = siRNA antisense sequence
  source 1..19: mol_type = other RNA
agaggaaggctaacacgtg

SEQ ID NO: 52758 - RNA, 19 nt, synthetic construct
  misc_feature 1..19: note = siRNA sense sequence
  source 1..19: mol_type = other RNA
acgtgttagccttcctctc

SEQ ID NO: 52759 - RNA, 19 nt, synthetic construct
  misc_feature 1..19: note = siRNA antisense sequence
  source 1..19: mol_type = other RNA
gagaggaaggctaacacgt

SEQ ID NO: 52760 - RNA, 19 nt, synthetic construct
  misc_feature 1..19: note = siRNA sense sequence
  source 1..19: mol_type = other RNA
cgtgttagccttcctctct

SEQ ID NO: 52761 - RNA, 19 nt, synthetic construct
  misc_feature 1..19: note = siRNA antisense sequence
  source 1..19: mol_type = other RNA
agagaggaaggctaacacg

SEQ ID NO: 52762 - RNA, 19 nt, synthetic construct
  misc_feature 1..19: note = siRNA sense sequence
  source 1..19: mol_type = other RNA
tgttagccttcctctctgg

SEQ ID NO: 52763 - RNA, 19 nt, synthetic construct
  misc_feature 1..19: note = siRNA antisense sequence
  source 1..19: mol_type = other RNA
ccagagaggaaggctaaca

SEQ ID NO: 52764 - RNA, 19 nt, synthetic construct
  misc_feature 1..19: note = siRNA sense sequence
  source 1..19: mol_type = other RNA
gttagccttcctctctggg

SEQ ID NO: 52765 - RNA, 19 nt, synthetic construct
  misc_feature 1..19: note = siRNA antisense sequence
  source 1..19: mol_type = other RNA
cccagagaggaaggctaac

SEQ ID NO: 52766 - RNA, 19 nt, synthetic construct
  misc_feature 1..19: note = siRNA sense sequence
  source 1..19: mol_type = other RNA
ttagccttcctctctggga

SEQ ID NO: 52767 - RNA, 19 nt, synthetic construct
  misc_feature 1..19: note = siRNA antisense sequence
  source 1..19: mol_type = other RNA
tcccagagaggaaggctaa

SEQ ID NO: 52768 - RNA, 19 nt, synthetic construct
  misc_feature 1..19: note = siRNA sense sequence
  source 1..19: mol_type = other RNA
tagccttcctctctgggat

SEQ ID NO: 52769 - RNA, 19 nt, synthetic construct
  misc_feature 1..19: note = siRNA antisense sequence
  source 1..19: mol_type = other RNA
atcccagagaggaaggcta

SEQ ID NO: 52770 - RNA, 19 nt, synthetic construct
  misc_feature 1..19: note = siRNA sense sequence
  source 1..19: mol_type = other RNA
cttcctctctgggatcttt

SEQ ID NO: 52771 - RNA, 19 nt, synthetic construct
  misc_feature 1..19: note = siRNA antisense sequence
  source 1..19: mol_type = other RNA
aaagatcccagagaggaag

SEQ ID NO: 52772 - RNA, 19 nt, synthetic construct
  misc_feature 1..19: note = siRNA sense sequence
  source 1..19: mol_type = other RNA
ttcctctctgggatctttc

SEQ ID NO: 52773 - RNA, 19 nt, synthetic construct
  misc_feature 1..19: note = siRNA antisense sequence
  source 1..19: mol_type = other RNA
gaaagatcccagagaggaa

SEQ ID NO: 52774 - RNA, 19 nt, synthetic construct
  misc_feature 1..19: note = siRNA sense sequence
  source 1..19: mol_type = other RNA
tcctctctgggatctttct

SEQ ID NO: 52775 - RNA, 19 nt, synthetic construct
  misc_feature 1..19: note = siRNA antisense sequence
  source 1..19: mol_type = other RNA
agaaagatcccagagagga

SEQ ID NO: 52776 - RNA, 19 nt, synthetic construct
  misc_feature 1..19: note = siRNA sense sequence
  source 1..19: mol_type = other RNA
cctctctgggatctttctg

SEQ ID NO: 52777 - RNA, 19 nt, synthetic construct
  misc_feature 1..19: note = siRNA antisense sequence
  source 1..19: mol_type = other RNA
cagaaagatcccagagagg

SEQ ID NO: 52778 - RNA, 19 nt, synthetic construct
  misc_feature 1..19: note = siRNA sense sequence
  source 1..19: mol_type = other RNA
tctctgggatctttctgtc

SEQ ID NO: 52779 - RNA, 19 nt, synthetic construct
  misc_feature 1..19: note = siRNA antisense sequence
  source 1..19: mol_type = other RNA
gacagaaagatcccagaga

SEQ ID NO: 52780 - RNA, 19 nt, synthetic construct
  misc_feature 1..19: note = siRNA sense sequence
  source 1..19: mol_type = other RNA
ggatctttctgtcccggag

SEQ ID NO: 52781 - RNA, 19 nt, synthetic construct
  misc_feature 1..19: note = siRNA antisense sequence
  source 1..19: mol_type = other RNA
ctccgggacagaaagatcc

SEQ ID NO: 52782 - RNA, 19 nt, synthetic construct
  misc_feature 1..19: note = siRNA sense sequence
  source 1..19: mol_type = other RNA
ttctctctgtcccagttgc

SEQ ID NO: 52783 - RNA, 19 nt, synthetic construct
  misc_feature 1..19: note = siRNA antisense sequence
  source 1..19: mol_type = other RNA
gcaactgggacagagagaa

SEQ ID NO: 52784 - RNA, 19 nt, synthetic construct
  misc_feature 1..19: note = siRNA sense sequence
  source 1..19: mol_type = other RNA
tctctctgtcccagttgct

SEQ ID NO: 52785 - RNA, 19 nt, synthetic construct
  misc_feature 1..19: note = siRNA antisense sequence
  source 1..19: mol_type = other RNA
agcaactgggacagagaga

SEQ ID NO: 52786 - RNA, 19 nt, synthetic construct
  misc_feature 1..19: note = siRNA sense sequence
  source 1..19: mol_type = other RNA
ctctctgtcccagttgctt

SEQ ID NO: 52787 - RNA, 19 nt, synthetic construct
  misc_feature 1..19: note = siRNA antisense sequence
  source 1..19: mol_type = other RNA
aagcaactgggacagagag

SEQ ID NO: 52788 - RNA, 19 nt, synthetic construct
  misc_feature 1..19: note = siRNA sense sequence
  source 1..19: mol_type = other RNA
tctctgtcccagttgcttt

SEQ ID NO: 52789 - RNA, 19 nt, synthetic construct
  misc_feature 1..19: note = siRNA antisense sequence
  source 1..19: mol_type = other RNA
aaagcaactgggacagaga

SEQ ID NO: 52790 - RNA, 19 nt, synthetic construct
  misc_feature 1..19: note = siRNA sense sequence
  source 1..19: mol_type = other RNA
ctctgtcccagttgctttc

SEQ ID NO: 52791 - RNA, 19 nt, synthetic construct
  misc_feature 1..19: note = siRNA antisense sequence
  source 1..19: mol_type = other RNA
gaaagcaactgggacagag

SEQ ID NO: 52792 - RNA, 19 nt, synthetic construct
  misc_feature 1..19: note = siRNA sense sequence
  source 1..19: mol_type = other RNA
tctgtcccagttgctttct

SEQ ID NO: 52793 - RNA, 19 nt, synthetic construct
  misc_feature 1..19: note = siRNA antisense sequence
  source 1..19: mol_type = other RNA
agaaagcaactgggacaga

SEQ ID NO: 52794 - RNA, 19 nt, synthetic construct
  misc_feature 1..19: note = siRNA sense sequence
  source 1..19: mol_type = other RNA
ctgtcccagttgctttcta

SEQ ID NO: 52795 - RNA, 19 nt, synthetic construct
  misc_feature 1..19: note = siRNA antisense sequence
  source 1..19: mol_type = other RNA
tagaaagcaactgggacag

SEQ ID NO: 52796 - RNA, 19 nt, synthetic construct
  misc_feature 1..19: note = siRNA sense sequence
  source 1..19: mol_type = other RNA
tgtcccagttgctttctat

SEQ ID NO: 52797 - RNA, 19 nt, synthetic construct
  misc_feature 1..19: note = siRNA antisense sequence
  source 1..19: mol_type = other RNA
atagaaagcaactgggaca

SEQ ID NO: 52798 - RNA, 19 nt, synthetic construct
  misc_feature 1..19: note = siRNA sense sequence
  source 1..19: mol_type = other RNA
gtcccagttgctttctatt

SEQ ID NO: 52799 - RNA, 19 nt, synthetic construct
  misc_feature 1..19: note = siRNA antisense sequence
  source 1..19: mol_type = other RNA
aatagaaagcaactgggac

SEQ ID NO: 52800 - RNA, 19 nt, synthetic construct
  misc_feature 1..19: note = siRNA sense sequence
  source 1..19: mol_type = other RNA
cccagttgctttctatttt

SEQ ID NO: 52801 - RNA, 19 nt, synthetic construct
  misc_feature 1..19: note = siRNA antisense sequence
  source 1..19: mol_type = other RNA
aaaatagaaagcaactggg

SEQ ID NO: 52802 - RNA, 19 nt, synthetic construct
  misc_feature 1..19: note = siRNA sense sequence
  source 1..19: mol_type = other RNA
caggaaggtggcaggtctt

SEQ ID NO: 52803 - RNA, 19 nt, synthetic construct
  misc_feature 1..19: note = siRNA antisense sequence
  source 1..19: mol_type = other RNA
aagacctgccaccttcctg

SEQ ID NO: 52804 - RNA, 19 nt, synthetic construct
  misc_feature 1..19: note = siRNA sense sequence
  source 1..19: mol_type = other RNA
aaggtggcaggtctttact

SEQ ID NO: 52805 - RNA, 19 nt, synthetic construct
  misc_feature 1..19: note = siRNA antisense sequence
  source 1..19: mol_type = other RNA
agtaaagacctgccacctt

SEQ ID NO: 52806 - RNA, 19 nt, synthetic construct
  misc_feature 1..19: note = siRNA sense sequence
  source 1..19: mol_type = other RNA
caggtctttactgcggtgt

SEQ ID NO: 52807 - RNA, 19 nt, synthetic construct
  misc_feature 1..19: note = siRNA antisense sequence
  source 1..19: mol_type = other RNA
acaccgcagtaaagacctg

SEQ ID NO: 52808 - RNA, 19 nt, synthetic construct
  misc_feature 1..19: note = siRNA sense sequence
  source 1..19: mol_type = other RNA
aggtctttactgcggtgtt

SEQ ID NO: 52809 - RNA, 19 nt, synthetic construct
  misc_feature 1..19: note = siRNA antisense sequence
  source 1..19: mol_type = other RNA
aacaccgcagtaaagacct

SEQ ID NO: 52810 - RNA, 19 nt, synthetic construct
  misc_feature 1..19: note = siRNA sense sequence
  source 1..19: mol_type = other RNA
ggtctttactgcggtgttt

SEQ ID NO: 52811 - RNA, 19 nt, synthetic construct
  misc_feature 1..19: note = siRNA antisense sequence
  source 1..19: mol_type = other RNA
aaacaccgcagtaaagacc

SEQ ID NO: 52812 - RNA, 19 nt, synthetic construct
  misc_feature 1..19: note = siRNA sense sequence
  source 1..19: mol_type = other RNA
gtctttactgcggtgttta

SEQ ID NO: 52813 - RNA, 19 nt, synthetic construct
  misc_feature 1..19: note = siRNA antisense sequence
  source 1..19: mol_type = other RNA
taaacaccgcagtaaagac

SEQ ID NO: 52814 - RNA, 19 nt, synthetic construct
  misc_feature 1..19: note = siRNA sense sequence
  source 1..19: mol_type = other RNA
tctttactgcggtgtttat

SEQ ID NO: 52815 - RNA, 19 nt, synthetic construct
  misc_feature 1..19: note = siRNA antisense sequence
  source 1..19: mol_type = other RNA
ataaacaccgcagtaaaga

SEQ ID NO: 52816 - RNA, 19 nt, synthetic construct
  misc_feature 1..19: note = siRNA sense sequence
  source 1..19: mol_type = other RNA
ctgcggtgtttatacatct

SEQ ID NO: 52817 - RNA, 19 nt, synthetic construct
  misc_feature 1..19: note = siRNA antisense sequence
  source 1..19: mol_type = other RNA
agatgtataaacaccgcag

SEQ ID NO: 52818 - RNA, 19 nt, synthetic construct
  misc_feature 1..19: note = siRNA sense sequence
  source 1..19: mol_type = other RNA
ggtgtttatacatctcctt

SEQ ID NO: 52819 - RNA, 19 nt, synthetic construct
  misc_feature 1..19: note = siRNA antisense sequence
  source 1..19: mol_type = other RNA
aaggagatgtataaacacc

SEQ ID NO: 52820 - RNA, 19 nt, synthetic construct
  misc_feature 1..19: note = siRNA sense sequence
  source 1..19: mol_type = other RNA
gtgtttatacatctcctta

SEQ ID NO: 52821 - RNA, 19 nt, synthetic construct
  misc_feature 1..19: note = siRNA antisense sequence
  source 1..19: mol_type = other RNA
taaggagatgtataaacac

SEQ ID NO: 52822 - RNA, 19 nt, synthetic construct
  misc_feature 1..19: note = siRNA sense sequence
  source 1..19: mol_type = other RNA
atacatctccttattgaag

SEQ ID NO: 52823 - RNA, 19 nt, synthetic construct
  misc_feature 1..19: note = siRNA antisense sequence
  source 1..19: mol_type = other RNA
cttcaataaggagatgtat

SEQ ID NO: 52824 - RNA, 19 nt, synthetic construct
  misc_feature 1..19: note = siRNA sense sequence
  source 1..19: mol_type = other RNA
tgaaggacacctattaaag

SEQ ID NO: 52825 - RNA, 19 nt, synthetic construct
  misc_feature 1..19: note = siRNA antisense sequence
  source 1..19: mol_type = other RNA
ctttaataggtgtccttca

SEQ ID NO: 52826 - RNA, 19 nt, synthetic construct
  misc_feature 1..19: note = siRNA sense sequence
  source 1..19: mol_type = other RNA
gaaggacacctattaaagc

SEQ ID NO: 52827 - RNA, 19 nt, synthetic construct
  misc_feature 1..19: note = siRNA antisense sequence
  source 1..19: mol_type = other RNA
gctttaataggtgtccttc

SEQ ID NO: 52828 - RNA, 19 nt, synthetic construct
  misc_feature 1..19: note = siRNA sense sequence
  source 1..19: mol_type = other RNA
gacacctattaaagctgta

SEQ ID NO: 52829 - RNA, 19 nt, synthetic construct
  misc_feature 1..19: note = siRNA antisense sequence
  source 1..19: mol_type = other RNA
tacagctttaataggtgtc

SEQ ID NO: 52830 - RNA, 19 nt, synthetic construct
  misc_feature 1..19: note = siRNA sense sequence
  source 1..19: mol_type = other RNA
tattaaagctgtaggagca

SEQ ID NO: 52831 - RNA, 19 nt, synthetic construct
  misc_feature 1..19: note = siRNA antisense sequence
  source 1..19: mol_type = other RNA
tgctcctacagctttaata

SEQ ID NO: 52832 - RNA, 19 nt, synthetic construct
  misc_feature 1..19: note = siRNA sense sequence
  source 1..19: mol_type = other RNA
attaaagctgtaggagcag

SEQ ID NO: 52833 - RNA, 19 nt, synthetic construct
  misc_feature 1..19: note = siRNA antisense sequence
  source 1..19: mol_type = other RNA
ctgctcctacagctttaat

SEQ ID NO: 52834 - RNA, 19 nt, synthetic construct
  misc_feature 1..19: note = siRNA sense sequence
  source 1..19: mol_type = other RNA
ctgtaggagcagcaggact

SEQ ID NO: 52835 - RNA, 19 nt, synthetic construct
  misc_feature 1..19: note = siRNA antisense sequence
  source 1..19: mol_type = other RNA
agtcctgctgctcctacag

SEQ ID NO: 52836 - RNA, 19 nt, synthetic construct
  misc_feature 1..19: note = siRNA sense sequence
  source 1..19: mol_type = other RNA
tgtaggagcagcaggactt

SEQ ID NO: 52837 - RNA, 19 nt, synthetic construct
  misc_feature 1..19: note = siRNA antisense sequence
  source 1..19: mol_type = other RNA
aagtcctgctgctcctaca

SEQ ID NO: 52838 - RNA, 19 nt, synthetic construct
  misc_feature 1..19: note = siRNA sense sequence
  source 1..19: mol_type = other RNA
gtaggagcagcaggactta

SEQ ID NO: 52839 - RNA, 19 nt, synthetic construct
  misc_feature 1..19: note = siRNA antisense sequence
  source 1..19: mol_type = other RNA
taagtcctgctgctcctac

SEQ ID NO: 52840 - RNA, 19 nt, synthetic construct
  misc_feature 1..19: note = siRNA sense sequence
  source 1..19: mol_type = other RNA
taggagcagcaggacttaa

SEQ ID NO: 52841 - RNA, 19 nt, synthetic construct
  misc_feature 1..19: note = siRNA antisense sequence
  source 1..19: mol_type = other RNA
ttaagtcctgctgctccta

SEQ ID NO: 52842 - RNA, 19 nt, synthetic construct
  misc_feature 1..19: note = siRNA sense sequence
  source 1..19: mol_type = other RNA
aggagcagcaggacttaag

SEQ ID NO: 52843 - RNA, 19 nt, synthetic construct
  misc_feature 1..19: note = siRNA antisense sequence
  source 1..19: mol_type = other RNA
cttaagtcctgctgctcct

SEQ ID NO: 52844 - RNA, 19 nt, synthetic construct
  misc_feature 1..19: note = siRNA sense sequence
  source 1..19: mol_type = other RNA
gagcagcaggacttaagaa

SEQ ID NO: 52845 - RNA, 19 nt, synthetic construct
  misc_feature 1..19: note = siRNA antisense sequence
  source 1..19: mol_type = other RNA
ttcttaagtcctgctgctc

SEQ ID NO: 52846 - RNA, 19 nt, synthetic construct
  misc_feature 1..19: note = siRNA sense sequence
  source 1..19: mol_type = other RNA
agcagcaggacttaagaag

SEQ ID NO: 52847 - RNA, 19 nt, synthetic construct
  misc_feature 1..19: note = siRNA antisense sequence
  source 1..19: mol_type = other RNA
cttcttaagtcctgctgct

SEQ ID NO: 52848 - RNA, 19 nt, synthetic construct
  misc_feature 1..19: note = siRNA sense sequence
  source 1..19: mol_type = other RNA
gcagcaggacttaagaaga

SEQ ID NO: 52849 - RNA, 19 nt, synthetic construct
  misc_feature 1..19: note = siRNA antisense sequence
  source 1..19: mol_type = other RNA
tcttcttaagtcctgctgc

SEQ ID NO: 52850 - RNA, 19 nt, synthetic construct
  misc_feature 1..19: note = siRNA sense sequence
  source 1..19: mol_type = other RNA
cagcaggacttaagaagaa

SEQ ID NO: 52851 - RNA, 19 nt, synthetic construct
  misc_feature 1..19: note = siRNA antisense sequence
  source 1..19: mol_type = other RNA
ttcttcttaagtcctgctg

SEQ ID NO: 52852 - RNA, 19 nt, synthetic construct
  misc_feature 1..19: note = siRNA sense sequence
  source 1..19: mol_type = other RNA
agcaggacttaagaagaat

SEQ ID NO: 52853 - RNA, 19 nt, synthetic construct
  misc_feature 1..19: note = siRNA antisense sequence
  source 1..19: mol_type = other RNA
attcttcttaagtcctgct

SEQ ID NO: 52854 - RNA, 19 nt, synthetic construct
  misc_feature 1..19: note = siRNA sense sequence
  source 1..19: mol_type = other RNA
gcaggacttaagaagaata

SEQ ID NO: 52855 - RNA, 19 nt, synthetic construct
  misc_feature 1..19: note = siRNA antisense sequence
  source 1..19: mol_type = other RNA
tattcttcttaagtcctgc

SEQ ID NO: 52856 - RNA, 19 nt, synthetic construct
  misc_feature 1..19: note = siRNA sense sequence
  source 1..19: mol_type = other RNA
caggacttaagaagaataa

SEQ ID NO: 52857 - RNA, 19 nt, synthetic construct
  misc_feature 1..19: note = siRNA antisense sequence
  source 1..19: mol_type = other RNA
ttattcttcttaagtcctg

SEQ ID NO: 52858 - RNA, 19 nt, synthetic construct
  misc_feature 1..19: note = siRNA sense sequence
  source 1..19: mol_type = other RNA
aagaataaaaggactagag

SEQ ID NO: 52859 - RNA, 19 nt, synthetic construct
  misc_feature 1..19: note = siRNA antisense sequence
  source 1..19: mol_type = other RNA
ctctagtccttttattctt

SEQ ID NO: 52860 - RNA, 19 nt, synthetic construct
  misc_feature 1..19: note = siRNA sense sequence
  source 1..19: mol_type = other RNA
agaataaaaggactagagt

SEQ ID NO: 52861 - RNA, 19 nt, synthetic construct
  misc_feature 1..19: note = siRNA antisense sequence
  source 1..19: mol_type = other RNA
actctagtccttttattct

SEQ ID NO: 52862 - RNA, 19 nt, synthetic construct
  misc_feature 1..19: note = siRNA sense sequence
  source 1..19: mol_type = other RNA
gaataaaaggactagagtt

SEQ ID NO: 52863 - RNA, 19 nt, synthetic construct
  misc_feature 1..19: note = siRNA antisense sequence
  source 1..19: mol_type = other RNA
aactctagtccttttattc

SEQ ID NO: 52864 - RNA, 19 nt, synthetic construct
  misc_feature 1..19: note = siRNA sense sequence
  source 1..19: mol_type = other RNA
aaaggactagagttttaga

SEQ ID NO: 52865 - RNA, 19 nt, synthetic construct
  misc_feature 1..19: note = siRNA antisense sequence
  source 1..19: mol_type = other RNA
tctaaaactctagtccttt

SEQ ID NO: 52866 - RNA, 19 nt, synthetic construct
  misc_feature 1..19: note = siRNA sense sequence
  source 1..19: mol_type = other RNA
aaggactagagttttagat

SEQ ID NO: 52867 - RNA, 19 nt, synthetic construct
  misc_feature 1..19: note = siRNA antisense sequence
  source 1..19: mol_type = other RNA
atctaaaactctagtcctt

SEQ ID NO: 52868 - RNA, 19 nt, synthetic construct
  misc_feature 1..19: note = siRNA sense sequence
  source 1..19: mol_type = other RNA
aggactagagttttagatg

SEQ ID NO: 52869 - RNA, 19 nt, synthetic construct
  misc_feature 1..19: note = siRNA antisense sequence
  source 1..19: mol_type = other RNA
catctaaaactctagtcct

SEQ ID NO: 52870 - RNA, 19 nt, synthetic construct
  misc_feature 1..19: note = siRNA sense sequence
  source 1..19: mol_type = other RNA
ggactagagttttagatga

SEQ ID NO: 52871 - RNA, 19 nt, synthetic construct
  misc_feature 1..19: note = siRNA antisense sequence
  source 1..19: mol_type = other RNA
tcatctaaaactctagtcc

SEQ ID NO: 52872 - RNA, 19 nt, synthetic construct
  misc_feature 1..19: note = siRNA sense sequence
  source 1..19: mol_type = other RNA
gactagagttttagatgac

SEQ ID NO: 52873 - RNA, 19 nt, synthetic construct
  misc_feature 1..19: note = siRNA antisense sequence
  source 1..19: mol_type = other RNA
gtcatctaaaactctagtc

SEQ ID NO: 52874 - RNA, 19 nt, synthetic construct
  misc_feature 1..19: note = siRNA sense sequence
  source 1..19: mol_type = other RNA
actagagttttagatgact

SEQ ID NO: 52875 - RNA, 19 nt, synthetic construct
  misc_feature 1..19: note = siRNA antisense sequence
  source 1..19: mol_type = other RNA
agtcatctaaaactctagt

SEQ ID NO: 52876 - RNA, 19 nt, synthetic construct
  misc_feature 1..19: note = siRNA sense sequence
  source 1..19: mol_type = other RNA
ctagagttttagatgacta

SEQ ID NO: 52877 - RNA, 19 nt, synthetic construct
  misc_feature 1..19: note = siRNA antisense sequence
  source 1..19: mol_type = other RNA
tagtcatctaaaactctag

SEQ ID NO: 52878 - RNA, 19 nt, synthetic construct
  misc_feature 1..19: note = siRNA sense sequence
  source 1..19: mol_type = other RNA
agcagctgcactgtgactg

SEQ ID NO: 52879 - RNA, 19 nt, synthetic construct
  misc_feature 1..19: note = siRNA antisense sequence
  source 1..19: mol_type = other RNA
cagtcacagtgcagctgct

SEQ ID NO: 52880 - RNA, 19 nt, synthetic construct
  misc_feature 1..19: note = siRNA sense sequence
  source 1..19: mol_type = other RNA
cagctgcactgtgactgct

SEQ ID NO: 52881 - RNA, 19 nt, synthetic construct
  misc_feature 1..19: note = siRNA antisense sequence
  source 1..19: mol_type = other RNA
agcagtcacagtgcagctg

SEQ ID NO: 52882 - RNA, 19 nt, synthetic construct
  misc_feature 1..19: note = siRNA sense sequence
  source 1..19: mol_type = other RNA
agctgcactgtgactgcta

SEQ ID NO: 52883 - RNA, 19 nt, synthetic construct
  misc_feature 1..19: note = siRNA antisense sequence
  source 1..19: mol_type = other RNA
tagcagtcacagtgcagct

SEQ ID NO: 52884 - RNA, 19 nt, synthetic construct
  misc_feature 1..19: note = siRNA sense sequence
  source 1..19: mol_type = other RNA
gctgcactgtgactgctaa

SEQ ID NO: 52885 - RNA, 19 nt, synthetic construct
  misc_feature 1..19: note = siRNA antisense sequence
  source 1..19: mol_type = other RNA
ttagcagtcacagtgcagc

SEQ ID NO: 52886 - RNA, 19 nt, synthetic construct
  misc_feature 1..19: note = siRNA sense sequence
  source 1..19: mol_type = other RNA
ctgcactgtgactgctaaa

SEQ ID NO: 52887 - RNA, 19 nt, synthetic construct
  misc_feature 1..19: note = siRNA antisense sequence
  source 1..19: mol_type = other RNA
tttagcagtcacagtgcag

SEQ ID NO: 52888 - RNA, 19 nt, synthetic construct
  misc_feature 1..19: note = siRNA sense sequence
  source 1..19: mol_type = other RNA
gcactgtgactgctaaaat

SEQ ID NO: 52889 - RNA, 19 nt, synthetic construct
  misc_feature 1..19: note = siRNA antisense sequence
  source 1..19: mol_type = other RNA
attttagcagtcacagtgc

SEQ ID NO: 52890 - RNA, 19 nt, synthetic construct
  misc_feature 1..19: note = siRNA sense sequence
  source 1..19: mol_type = other RNA
cactgtgactgctaaaatc

SEQ ID NO: 52891 - RNA, 19 nt, synthetic construct
  misc_feature 1..19: note = siRNA antisense sequence
  source 1..19: mol_type = other RNA
gattttagcagtcacagtg

SEQ ID NO: 52892 - RNA, 19 nt, synthetic construct
  misc_feature 1..19: note = siRNA sense sequence
  source 1..19: mol_type = other RNA
actgtgactgctaaaatct

SEQ ID NO: 52893 - RNA, 19 nt, synthetic construct
  misc_feature 1..19: note = siRNA antisense sequence
  source 1..19: mol_type = other RNA
agattttagcagtcacagt

SEQ ID NO: 52894 - RNA, 19 nt, synthetic construct
  misc_feature 1..19: note = siRNA sense sequence
  source 1..19: mol_type = other RNA
ctgtgactgctaaaatctc

SEQ ID NO: 52895 - RNA, 19 nt, synthetic construct
  misc_feature 1..19: note = siRNA antisense sequence
  source 1..19: mol_type = other RNA
gagattttagcagtcacag

SEQ ID NO: 52896 - RNA, 19 nt, synthetic construct
  misc_feature 1..19: note = siRNA sense sequence
  source 1..19: mol_type = other RNA
tgtgactgctaaaatctct

SEQ ID NO: 52897 - RNA, 19 nt, synthetic construct
  misc_feature 1..19: note = siRNA antisense sequence
  source 1..19: mol_type = other RNA
agagattttagcagtcaca

SEQ ID NO: 52898 - RNA, 19 nt, synthetic construct
  misc_feature 1..19: note = siRNA sense sequence
  source 1..19: mol_type = other RNA
gtgactgctaaaatctctt

SEQ ID NO: 52899 - RNA, 19 nt, synthetic construct
  misc_feature 1..19: note = siRNA antisense sequence
  source 1..19: mol_type = other RNA
aagagattttagcagtcac

SEQ ID NO: 52900 - RNA, 19 nt, synthetic construct
  misc_feature 1..19: note = siRNA sense sequence
  source 1..19: mol_type = other RNA
tgactgctaaaatctctta

SEQ ID NO: 52901 - RNA, 19 nt, synthetic construct
  misc_feature 1..19: note = siRNA antisense sequence
  source 1..19: mol_type = other RNA
taagagattttagcagtca

SEQ ID NO: 52902 - RNA, 19 nt, synthetic construct
  misc_feature 1..19: note = siRNA sense sequence
  source 1..19: mol_type = other RNA
gactgctaaaatctcttaa

SEQ ID NO: 52903 - RNA, 19 nt, synthetic construct
  misc_feature 1..19: note = siRNA antisense sequence
  source 1..19: mol_type = other RNA
ttaagagattttagcagtc

SEQ ID NO: 52904 - RNA, 19 nt, synthetic construct
  misc_feature 1..19: note = siRNA sense sequence
  source 1..19: mol_type = other RNA
ctgctaaaatctcttaaga

SEQ ID NO: 52905 - RNA, 19 nt, synthetic construct
  misc_feature 1..19: note = siRNA antisense sequence
  source 1..19: mol_type = other RNA
tcttaagagattttagcag

SEQ ID NO: 52906 - RNA, 19 nt, synthetic construct
  misc_feature 1..19: note = siRNA sense sequence
  source 1..19: mol_type = other RNA
aatctcttaagacatgtag

SEQ ID NO: 52907 - RNA, 19 nt, synthetic construct
  misc_feature 1..19: note = siRNA antisense sequence
  source 1..19: mol_type = other RNA
ctacatgtcttaagagatt

SEQ ID NO: 52908 - RNA, 19 nt, synthetic construct
  misc_feature 1..19: note = siRNA sense sequence
  source 1..19: mol_type = other RNA
atctcttaagacatgtaga

SEQ ID NO: 52909 - RNA, 19 nt, synthetic construct
  misc_feature 1..19: note = siRNA antisense sequence
  source 1..19: mol_type = other RNA
tctacatgtcttaagagat

SEQ ID NO: 52910 - RNA, 19 nt, synthetic construct
  misc_feature 1..19: note = siRNA sense sequence
  source 1..19: mol_type = other RNA
tctcttaagacatgtagaa

SEQ ID NO: 52911 - RNA, 19 nt, synthetic construct
  misc_feature 1..19: note = siRNA antisense sequence
  source 1..19: mol_type = other RNA
ttctacatgtcttaagaga

SEQ ID NO: 52912 - RNA, 19 nt, synthetic construct
  misc_feature 1..19: note = siRNA sense sequence
  source 1..19: mol_type = other RNA
gtccagtctgtttctcata

SEQ ID NO: 52913 - RNA, 19 nt, synthetic construct
  misc_feature 1..19: note = siRNA antisense sequence
  source 1..19: mol_type = other RNA
tatgagaaacagactggac

SEQ ID NO: 52914 - RNA, 19 nt, synthetic construct
  misc_feature 1..19: note = siRNA sense sequence
  source 1..19: mol_type = other RNA
tccagtctgtttctcatag

SEQ ID NO: 52915 - RNA, 19 nt, synthetic construct
  misc_feature 1..19: note = siRNA antisense sequence
  source 1..19: mol_type = other RNA
ctatgagaaacagactgga

SEQ ID NO: 52916 - RNA, 19 nt, synthetic construct
  misc_feature 1..19: note = siRNA sense sequence
  source 1..19: mol_type = other RNA
ccagtctgtttctcataga

SEQ ID NO: 52917 - RNA, 19 nt, synthetic construct
  misc_feature 1..19: note = siRNA antisense sequence
  source 1..19: mol_type = other RNA
tctatgagaaacagactgg

SEQ ID NO: 52918 - RNA, 19 nt, synthetic construct
  misc_feature 1..19: note = siRNA sense sequence
  source 1..19: mol_type = other RNA
aatcctgttacattccact

SEQ ID NO: 52919 - RNA, 19 nt, synthetic construct
  misc_feature 1..19: note = siRNA antisense sequence
  source 1..19: mol_type = other RNA
agtggaatgtaacaggatt

SEQ ID NO: 52920 - RNA, 19 nt, synthetic construct
  misc_feature 1..19: note = siRNA sense sequence
  source 1..19: mol_type = other RNA
atcctgttacattccactc

SEQ ID NO: 52921 - RNA, 19 nt, synthetic construct
  misc_feature 1..19: note = siRNA antisense sequence
  source 1..19: mol_type = other RNA
gagtggaatgtaacaggat

SEQ ID NO: 52922 - RNA, 19 nt, synthetic construct
  misc_feature 1..19: note = siRNA sense sequence
  source 1..19: mol_type = other RNA
tcctgttacattccactct

SEQ ID NO: 52923 - RNA, 19 nt, synthetic construct
  misc_feature 1..19: note = siRNA antisense sequence
  source 1..19: mol_type = other RNA
agagtggaatgtaacagga

SEQ ID NO: 52924 - RNA, 19 nt, synthetic construct
  misc_feature 1..19: note = siRNA sense sequence
  source 1..19: mol_type = other RNA
gttacattccactctggtc

SEQ ID NO: 52925 - RNA, 19 nt, synthetic construct
  misc_feature 1..19: note = siRNA antisense sequence
  source 1..19: mol_type = other RNA
gaccagagtggaatgtaac

SEQ ID NO: 52926 - RNA, 19 nt, synthetic construct
  misc_feature 1..19: note = siRNA sense sequence
  source 1..19: mol_type = other RNA
ttacattccactctggtca

SEQ ID NO: 52927 - RNA, 19 nt, synthetic construct
  misc_feature 1..19: note = siRNA antisense sequence
  source 1..19: mol_type = other RNA
tgaccagagtggaatgtaa

SEQ ID NO: 52928 - RNA, 19 nt, synthetic construct
  misc_feature 1..19: note = siRNA sense sequence
  source 1..19: mol_type = other RNA
tacattccactctggtcag

SEQ ID NO: 52929 - RNA, 19 nt, synthetic construct
  misc_feature 1..19: note = siRNA antisense sequence
  source 1..19: mol_type = other RNA
ctgaccagagtggaatgta

SEQ ID NO: 52930 - RNA, 19 nt, synthetic construct
  misc_feature 1..19: note = siRNA sense sequence
  source 1..19: mol_type = other RNA
cagctagagtatctggttg

SEQ ID NO: 52931 - RNA, 19 nt, synthetic construct
  misc_feature 1..19: note = siRNA antisense sequence
  source 1..19: mol_type = other RNA
caaccagatactctagctg

SEQ ID NO: 52932 - RNA, 19 nt, synthetic construct
  misc_feature 1..19: note = siRNA sense sequence
  source 1..19: mol_type = other RNA
agctagagtatctggttgt

SEQ ID NO: 52933 - RNA, 19 nt, synthetic construct
  misc_feature 1..19: note = siRNA antisense sequence
  source 1..19: mol_type = other RNA
acaaccagatactctagct

SEQ ID NO: 52934 - RNA, 19 nt, synthetic construct
  misc_feature 1..19: note = siRNA sense sequence
  source 1..19: mol_type = other RNA
gctagagtatctggttgtt

SEQ ID NO: 52935 - RNA, 19 nt, synthetic construct
  misc_feature 1..19: note = siRNA antisense sequence
  source 1..19: mol_type = other RNA
aacaaccagatactctagc

SEQ ID NO: 52936 - RNA, 19 nt, synthetic construct
  misc_feature 1..19: note = siRNA sense sequence
  source 1..19: mol_type = other RNA
ctagagtatctggttgttc

SEQ ID NO: 52937 - RNA, 19 nt, synthetic construct
  misc_feature 1..19: note = siRNA antisense sequence
  source 1..19: mol_type = other RNA
gaacaaccagatactctag

SEQ ID NO: 52938 - RNA, 19 nt, synthetic construct
  misc_feature 1..19: note = siRNA sense sequence
  source 1..19: mol_type = other RNA
tagagtatctggttgttct

SEQ ID NO: 52939 - RNA, 19 nt, synthetic construct
  misc_feature 1..19: note = siRNA antisense sequence
  source 1..19: mol_type = other RNA
agaacaaccagatactcta

SEQ ID NO: 52940 - RNA, 19 nt, synthetic construct
  misc_feature 1..19: note = siRNA sense sequence
  source 1..19: mol_type = other RNA
agagtatctggttgttcta

SEQ ID NO: 52941 - RNA, 19 nt, synthetic construct
  misc_feature 1..19: note = siRNA antisense sequence
  source 1..19: mol_type = other RNA
tagaacaaccagatactct

SEQ ID NO: 52942 - RNA, 19 nt, synthetic construct
  misc_feature 1..19: note = siRNA sense sequence
  source 1..19: mol_type = other RNA
gagtatctggttgttctaa

SEQ ID NO: 52943 - RNA, 19 nt, synthetic construct
  misc_feature 1..19: note = siRNA antisense sequence
  source 1..19: mol_type = other RNA
ttagaacaaccagatactc

SEQ ID NO: 52944 - RNA, 19 nt, synthetic construct
  misc_feature 1..19: note = siRNA sense sequence
  source 1..19: mol_type = other RNA
agtatctggttgttctaag

SEQ ID NO: 52945 - RNA, 19 nt, synthetic construct
  misc_feature 1..19: note = siRNA antisense sequence
  source 1..19: mol_type = other RNA
cttagaacaaccagatact

SEQ ID NO: 52946 - RNA, 19 nt, synthetic construct
  misc_feature 1..19: note = siRNA sense sequence
  source 1..19: mol_type = other RNA
gtatctggttgttctaagt

SEQ ID NO: 52947 - RNA, 19 nt, synthetic construct
  misc_feature 1..19: note = siRNA antisense sequence
  source 1..19: mol_type = other RNA
acttagaacaaccagatac

SEQ ID NO: 52948 - RNA, 19 nt, synthetic construct
  misc_feature 1..19: note = siRNA sense sequence
  source 1..19: mol_type = other RNA
tatctggttgttctaagta

SEQ ID NO: 52949 - RNA, 19 nt, synthetic construct
  misc_feature 1..19: note = siRNA antisense sequence
  source 1..19: mol_type = other RNA
tacttagaacaaccagata

SEQ ID NO: 52950 - RNA, 19 nt, synthetic construct
  misc_feature 1..19: note = siRNA sense sequence
  source 1..19: mol_type = other RNA
atctggttgttctaagtat

SEQ ID NO: 52951 - RNA, 19 nt, synthetic construct
  misc_feature 1..19: note = siRNA antisense sequence
  source 1..19: mol_type = other RNA
atacttagaacaaccagat

SEQ ID NO: 52952 - RNA, 19 nt, synthetic construct
  misc_feature 1..19: note = siRNA sense sequence
  source 1..19: mol_type = other RNA
tctggttgttctaagtatc

SEQ ID NO: 52953 - RNA, 19 nt, synthetic construct
  misc_feature 1..19: note = siRNA antisense sequence
  source 1..19: mol_type = other RNA
gatacttagaacaaccaga

SEQ ID NO: 52954 - RNA, 19 nt, synthetic construct
  misc_feature 1..19: note = siRNA sense sequence
  source 1..19: mol_type = other RNA
ctggttgttctaagtatca

SEQ ID NO: 52955 - RNA, 19 nt, synthetic construct
  misc_feature 1..19: note = siRNA antisense sequence
  source 1..19: mol_type = other RNA
tgatacttagaacaaccag

SEQ ID NO: 52956 - RNA, 19 nt, synthetic construct
  misc_feature 1..19: note = siRNA sense sequence
  source 1..19: mol_type = other RNA
tggttgttctaagtatcac

SEQ ID NO: 52957 - RNA, 19 nt, synthetic construct
  misc_feature 1..19: note = siRNA antisense sequence
  source 1..19: mol_type = other RNA
gtgatacttagaacaacca

SEQ ID NO: 52958 - RNA, 19 nt, synthetic construct
  misc_feature 1..19: note = siRNA sense sequence
  source 1..19: mol_type = other RNA
ggttgttctaagtatcaca

SEQ ID NO: 52959 - RNA, 19 nt, synthetic construct
  misc_feature 1..19: note = siRNA antisense sequence
  source 1..19: mol_type = other RNA
tgtgatacttagaacaacc

SEQ ID NO: 52960 - RNA, 19 nt, synthetic construct
  misc_feature 1..19: note = siRNA sense sequence
  source 1..19: mol_type = other RNA
actaggatgtgccagtaaa

SEQ ID NO: 52961 - RNA, 19 nt, synthetic construct
  misc_feature 1..19: note = siRNA antisense sequence
  source 1..19: mol_type = other RNA
tttactggcacatcctagt

SEQ ID NO: 52962 - RNA, 19 nt, synthetic construct
  misc_feature 1..19: note = siRNA sense sequence
  source 1..19: mol_type = other RNA
ctaggatgtgccagtaaaa

SEQ ID NO: 52963 - RNA, 19 nt, synthetic construct
  misc_feature 1..19: note = siRNA antisense sequence
  source 1..19: mol_type = other RNA
ttttactggcacatcctag

SEQ ID NO: 52964 - RNA, 19 nt, synthetic construct
  misc_feature 1..19: note = siRNA sense sequence
  source 1..19: mol_type = other RNA
taggatgtgccagtaaaat

SEQ ID NO: 52965 - RNA, 19 nt, synthetic construct
  misc_feature 1..19: note = siRNA antisense sequence
  source 1..19: mol_type = other RNA
attttactggcacatccta

SEQ ID NO: 52966 - RNA, 19 nt, synthetic construct
  misc_feature 1..19: note = siRNA sense sequence
  source 1..19: mol_type = other RNA
aggatgtgccagtaaaata

SEQ ID NO: 52967 - RNA, 19 nt, synthetic construct
  misc_feature 1..19: note = siRNA antisense sequence
  source 1..19: mol_type = other RNA
tattttactggcacatcct

SEQ ID NO: 52968 - RNA, 19 nt, synthetic construct
  misc_feature 1..19: note = siRNA sense sequence
  source 1..19: mol_type = other RNA
ggatgtgccagtaaaatat

SEQ ID NO: 52969 - RNA, 19 nt, synthetic construct
  misc_feature 1..19: note = siRNA antisense sequence
  source 1..19: mol_type = other RNA
atattttactggcacatcc

SEQ ID NO: 52970 - RNA, 19 nt, synthetic construct
  misc_feature 1..19: note = siRNA sense sequence
  source 1..19: mol_type = other RNA
caaagtgtgcattgcatgt

SEQ ID NO: 52971 - RNA, 19 nt, synthetic construct
  misc_feature 1..19: note = siRNA antisense sequence
  source 1..19: mol_type = other RNA
acatgcaatgcacactttg

SEQ ID NO: 52972 - RNA, 19 nt, synthetic construct
  misc_feature 1..19: note = siRNA sense sequence
  source 1..19: mol_type = other RNA
aaagtgtgcattgcatgta

SEQ ID NO: 52973 - RNA, 19 nt, synthetic construct
  misc_feature 1..19: note = siRNA antisense sequence
  source 1..19: mol_type = other RNA
tacatgcaatgcacacttt

SEQ ID NO: 52974 - RNA, 19 nt, synthetic construct
  misc_feature 1..19: note = siRNA sense sequence
  source 1..19: mol_type = other RNA
agtgtgcattgcatgtatt

SEQ ID NO: 52975 - RNA, 19 nt, synthetic construct
  misc_feature 1..19: note = siRNA antisense sequence
  source 1..19: mol_type = other RNA
aatacatgcaatgcacact

SEQ ID NO: 52976 - RNA, 19 nt, synthetic construct
  misc_feature 1..19: note = siRNA sense sequence
  source 1..19: mol_type = other RNA
gtgcattgcatgtatttta

SEQ ID NO: 52977 - RNA, 19 nt, synthetic construct
  misc_feature 1..19: note = siRNA antisense sequence
  source 1..19: mol_type = other RNA
taaaatacatgcaatgcac

SEQ ID NO: 52978 - RNA, 19 nt, synthetic construct
  misc_feature 1..19: note = siRNA sense sequence
  source 1..19: mol_type = other RNA
gcattgcatgtattttagg

SEQ ID NO: 52979 - RNA, 19 nt, synthetic construct
  misc_feature 1..19: note = siRNA antisense sequence
  source 1..19: mol_type = other RNA
cctaaaatacatgcaatgc

SEQ ID NO: 52980 - RNA, 19 nt, synthetic construct
  misc_feature 1..19: note = siRNA sense sequence
  source 1..19: mol_type = other RNA
cattgcatgtattttaggt

SEQ ID NO: 52981 - RNA, 19 nt, synthetic construct
  misc_feature 1..19: note = siRNA antisense sequence
  source 1..19: mol_type = other RNA
acctaaaatacatgcaatg

SEQ ID NO: 52982 - RNA, 19 nt, synthetic construct
  misc_feature 1..19: note = siRNA sense sequence
  source 1..19: mol_type = other RNA
ttttaggtatttggaggat

SEQ ID NO: 52983 - RNA, 19 nt, synthetic construct
  misc_feature 1..19: note = siRNA antisense sequence
  source 1..19: mol_type = other RNA
atcctccaaatacctaaaa

SEQ ID NO: 52984 - RNA, 19 nt, synthetic construct
  misc_feature 1..19: note = siRNA sense sequence
  source 1..19: mol_type = other RNA
ttaggtatttggaggattg

SEQ ID NO: 52985 - RNA, 19 nt, synthetic construct
  misc_feature 1..19: note = siRNA antisense sequence
  source 1..19: mol_type = other RNA
caatcctccaaatacctaa

SEQ ID NO: 52986 - RNA, 19 nt, synthetic construct
  misc_feature 1..19: note = siRNA sense sequence
  source 1..19: mol_type = other RNA
taggtatttggaggattgt

SEQ ID NO: 52987 - RNA, 19 nt, synthetic construct
  misc_feature 1..19: note = siRNA antisense sequence
  source 1..19: mol_type = other RNA
acaatcctccaaataccta

SEQ ID NO: 52988 - RNA, 19 nt, synthetic construct
  misc_feature 1..19: note = siRNA sense sequence
  source 1..19: mol_type = other RNA
aggtatttggaggattgtg

SEQ ID NO: 52989 - RNA, 19 nt, synthetic construct
  misc_feature 1..19: note = siRNA antisense sequence
  source 1..19: mol_type = other RNA
cacaatcctccaaatacct

SEQ ID NO: 52990 - RNA, 19 nt, synthetic construct
  misc_feature 1..19: note = siRNA sense sequence
  source 1..19: mol_type = other RNA
tggaggattgtgatataaa

SEQ ID NO: 52991 - RNA, 19 nt, synthetic construct
  misc_feature 1..19: note = siRNA antisense sequence
  source 1..19: mol_type = other RNA
tttatatcacaatcctcca

SEQ ID NO: 52992 - RNA, 19 nt, synthetic construct
  misc_feature 1..19: note = siRNA sense sequence
  source 1..19: mol_type = other RNA
ggaggattgtgatataaaa

SEQ ID NO: 52993 - RNA, 19 nt, synthetic construct
  misc_feature 1..19: note = siRNA antisense sequence
  source 1..19: mol_type = other RNA
ttttatatcacaatcctcc

SEQ ID NO: 52994 - RNA, 19 nt, synthetic construct
  misc_feature 1..19: note = siRNA sense sequence
  source 1..19: mol_type = other RNA
gggttaggcttaaaattca

SEQ ID NO: 52995 - RNA, 19 nt, synthetic construct
  misc_feature 1..19: note = siRNA antisense sequence
  source 1..19: mol_type = other RNA
tgaattttaagcctaaccc

SEQ ID NO: 52996 - RNA, 19 nt, synthetic construct
  misc_feature 1..19: note = siRNA sense sequence
  source 1..19: mol_type = other RNA
ggttaggcttaaaattcat

SEQ ID NO: 52997 - RNA, 19 nt, synthetic construct
  misc_feature 1..19: note = siRNA antisense sequence
  source 1..19: mol_type = other RNA
atgaattttaagcctaacc

SEQ ID NO: 52998 - RNA, 19 nt, synthetic construct
  misc_feature 1..19: note = siRNA sense sequence
  source 1..19: mol_type = other RNA
agatcctatggagcatgta

SEQ ID NO: 52999 - RNA, 19 nt, synthetic construct
  misc_feature 1..19: note = siRNA antisense sequence
  source 1..19: mol_type = other RNA
tacatgctccataggatct

SEQ ID NO: 53000 - RNA, 19 nt, synthetic construct
  misc_feature 1..19: note = siRNA sense sequence
  source 1..19: mol_type = other RNA
gatcctatggagcatgtag

SEQ ID NO: 53001 - RNA, 19 nt, synthetic construct
  misc_feature 1..19: note = siRNA antisense sequence
  source 1..19: mol_type = other RNA
ctacatgctccataggatc

SEQ ID NO: 53002 - RNA, 19 nt, synthetic construct
  misc_feature 1..19: note = siRNA sense sequence
  source 1..19: mol_type = other RNA
atcctatggagcatgtagt

SEQ ID NO: 53003 - RNA, 19 nt, synthetic construct
  misc_feature 1..19: note = siRNA antisense sequence
  source 1..19: mol_type = other RNA
actacatgctccataggat

SEQ ID NO: 53004 - RNA, 19 nt, synthetic construct
  misc_feature 1..19: note = siRNA sense sequence
  source 1..19: mol_type = other RNA
tcctatggagcatgtagtc

SEQ ID NO: 53005 - RNA, 19 nt, synthetic construct
  misc_feature 1..19: note = siRNA antisense sequence
  source 1..19: mol_type = other RNA
gactacatgctccatagga

SEQ ID NO: 53006 - RNA, 19 nt, synthetic construct
  misc_feature 1..19: note = siRNA sense sequence
  source 1..19: mol_type = other RNA
cctatggagcatgtagtct

SEQ ID NO: 53007 - RNA, 19 nt, synthetic construct
  misc_feature 1..19: note = siRNA antisense sequence
  source 1..19: mol_type = other RNA
agactacatgctccatagg

SEQ ID NO: 53008 - RNA, 19 nt, synthetic construct
  misc_feature 1..19: note = siRNA sense sequence
  source 1..19: mol_type = other RNA
ctatggagcatgtagtctt

SEQ ID NO: 53009 - RNA, 19 nt, synthetic construct
  misc_feature 1..19: note = siRNA antisense sequence
  source 1..19: mol_type = other RNA
aagactacatgctccatag

SEQ ID NO: 53010 - RNA, 19 nt, synthetic construct
  misc_feature 1..19: note = siRNA sense sequence
  source 1..19: mol_type = other RNA
ggagcatgtagtcttaatt

SEQ ID NO: 53011 - RNA, 19 nt, synthetic construct
  misc_feature 1..19: note = siRNA antisense sequence
  source 1..19: mol_type = other RNA
aattaagactacatgctcc

SEQ ID NO: 53012 - RNA, 19 nt, synthetic construct
  misc_feature 1..19: note = siRNA sense sequence
  source 1..19: mol_type = other RNA
gagcatgtagtcttaattt

SEQ ID NO: 53013 - RNA, 19 nt, synthetic construct
  misc_feature 1..19: note = siRNA antisense sequence
  source 1..19: mol_type = other RNA
aaattaagactacatgctc

SEQ ID NO: 53014 - RNA, 19 nt, synthetic construct
  misc_feature 1..19: note = siRNA sense sequence
  source 1..19: mol_type = other RNA
gcatgtagtcttaatttcc

SEQ ID NO: 53015 - RNA, 19 nt, synthetic construct
  misc_feature 1..19: note = siRNA antisense sequence
  source 1..19: mol_type = other RNA
ggaaattaagactacatgc

SEQ ID NO: 53016 - RNA, 19 nt, synthetic construct
  misc_feature 1..19: note = siRNA sense sequence
  source 1..19: mol_type = other RNA
catgtagtcttaatttcca

SEQ ID NO: 53017 - RNA, 19 nt, synthetic construct
  misc_feature 1..19: note = siRNA antisense sequence
  source 1..19: mol_type = other RNA
tggaaattaagactacatg

SEQ ID NO: 53018 - RNA, 19 nt, synthetic construct
  misc_feature 1..19: note = siRNA sense sequence
  source 1..19: mol_type = other RNA
gtcttaatttccaatcaag

SEQ ID NO: 53019 - RNA, 19 nt, synthetic construct
  misc_feature 1..19: note = siRNA antisense sequence
  source 1..19: mol_type = other RNA
cttgattggaaattaagac

SEQ ID NO: 53020 - RNA, 19 nt, synthetic construct
  misc_feature 1..19: note = siRNA sense sequence
  source 1..19: mol_type = other RNA
caattatgtcccagctgcc

SEQ ID NO: 53021 - RNA, 19 nt, synthetic construct
  misc_feature 1..19: note = siRNA antisense sequence
  source 1..19: mol_type = other RNA
ggcagctgggacataattg

SEQ ID NO: 53022 - RNA, 19 nt, synthetic construct
  misc_feature 1..19: note = siRNA sense sequence
  source 1..19: mol_type = other RNA
aattatgtcccagctgcct

SEQ ID NO: 53023 - RNA, 19 nt, synthetic construct
  misc_feature 1..19: note = siRNA antisense sequence
  source 1..19: mol_type = other RNA
aggcagctgggacataatt

SEQ ID NO: 53024 - RNA, 19 nt, synthetic construct
  misc_feature 1..19: note = siRNA sense sequence
  source 1..19: mol_type = other RNA
attatgtcccagctgccta

SEQ ID NO: 53025 - RNA, 19 nt, synthetic construct
  misc_feature 1..19: note = siRNA antisense sequence
  source 1..19: mol_type = other RNA
taggcagctgggacataat

SEQ ID NO: 53026 - RNA, 19 nt, synthetic construct
  misc_feature 1..19: note = siRNA sense sequence
  source 1..19: mol_type = other RNA
ttatgtcccagctgcctat

SEQ ID NO: 53027 - RNA, 19 nt, synthetic construct
  misc_feature 1..19: note = siRNA antisense sequence
  source 1..19: mol_type = other RNA
ataggcagctgggacataa

SEQ ID NO: 53028 - RNA, 19 nt, synthetic construct
  misc_feature 1..19: note = siRNA sense sequence
  source 1..19: mol_type = other RNA
tatgtcccagctgcctatg

SEQ ID NO: 53029 - RNA, 19 nt, synthetic construct
  misc_feature 1..19: note = siRNA antisense sequence
  source 1..19: mol_type = other RNA
cataggcagctgggacata

SEQ ID NO: 53030 - RNA, 19 nt, synthetic construct
  misc_feature 1..19: note = siRNA sense sequence
  source 1..19: mol_type = other RNA
atgtcccagctgcctatgg

SEQ ID NO: 53031 - RNA, 19 nt, synthetic construct
  misc_feature 1..19: note = siRNA antisense sequence
  source 1..19: mol_type = other RNA
ccataggcagctgggacat

SEQ ID NO: 53032 - RNA, 19 nt, synthetic construct
  misc_feature 1..19: note = siRNA sense sequence
  source 1..19: mol_type = other RNA
tgtcccagctgcctatggc

SEQ ID NO: 53033 - RNA, 19 nt, synthetic construct
  misc_feature 1..19: note = siRNA antisense sequence
  source 1..19: mol_type = other RNA
gccataggcagctgggaca

SEQ ID NO: 53034 - RNA, 19 nt, synthetic construct
  misc_feature 1..19: note = siRNA sense sequence
  source 1..19: mol_type = other RNA
tgaggcttcttgattctta

SEQ ID NO: 53035 - RNA, 19 nt, synthetic construct
  misc_feature 1..19: note = siRNA antisense sequence
  source 1..19: mol_type = other RNA
taagaatcaagaagcctca

SEQ ID NO: 53036 - RNA, 19 nt, synthetic construct
  misc_feature 1..19: note = siRNA sense sequence
  source 1..19: mol_type = other RNA
gaggcttcttgattcttat

SEQ ID NO: 53037 - RNA, 19 nt, synthetic construct
  misc_feature 1..19: note = siRNA antisense sequence
  source 1..19: mol_type = other RNA
ataagaatcaagaagcctc

SEQ ID NO: 53038 - RNA, 19 nt, synthetic construct
  misc_feature 1..19: note = siRNA sense sequence
  source 1..19: mol_type = other RNA
aggcttcttgattcttatg

SEQ ID NO: 53039 - RNA, 19 nt, synthetic construct
  misc_feature 1..19: note = siRNA antisense sequence
  source 1..19: mol_type = other RNA
cataagaatcaagaagcct

SEQ ID NO: 53040 - RNA, 19 nt, synthetic construct
  misc_feature 1..19: note = siRNA sense sequence
  source 1..19: mol_type = other RNA
ggcttcttgattcttatgt

SEQ ID NO: 53041 - RNA, 19 nt, synthetic construct
  misc_feature 1..19: note = siRNA antisense sequence
  source 1..19: mol_type = other RNA
acataagaatcaagaagcc

SEQ ID NO: 53042 - RNA, 19 nt, synthetic construct
  misc_feature 1..19: note = siRNA sense sequence
  source 1..19: mol_type = other RNA
gcttcttgattcttatgtc

SEQ ID NO: 53043 - RNA, 19 nt, synthetic construct
  misc_feature 1..19: note = siRNA antisense sequence
  source 1..19: mol_type = other RNA
gacataagaatcaagaagc

SEQ ID NO: 53044 - RNA, 19 nt, synthetic construct
  misc_feature 1..19: note = siRNA sense sequence
  source 1..19: mol_type = other RNA
cttcttgattcttatgtca

SEQ ID NO: 53045 - RNA, 19 nt, synthetic construct
  misc_feature 1..19: note = siRNA antisense sequence
  source 1..19: mol_type = other RNA
tgacataagaatcaagaag

SEQ ID NO: 53046 - RNA, 19 nt, synthetic construct
  misc_feature 1..19: note = siRNA sense sequence
  source 1..19: mol_type = other RNA
ttcttgattcttatgtcag

SEQ ID NO: 53047 - RNA, 19 nt, synthetic construct
  misc_feature 1..19: note = siRNA antisense sequence
  source 1..19: mol_type = other RNA
ctgacataagaatcaagaa

SEQ ID NO: 53048 - RNA, 19 nt, synthetic construct
  misc_feature 1..19: note = siRNA sense sequence
  source 1..19: mol_type = other RNA
tcttgattcttatgtcagt

SEQ ID NO: 53049 - RNA, 19 nt, synthetic construct
  misc_feature 1..19: note = siRNA antisense sequence
  source 1..19: mol_type = other RNA
actgacataagaatcaaga

SEQ ID NO: 53050 - RNA, 19 nt, synthetic construct
  misc_feature 1..19: note = siRNA sense sequence
  source 1..19: mol_type = other RNA
cttgattcttatgtcagtg

SEQ ID NO: 53051 - RNA, 19 nt, synthetic construct
  misc_feature 1..19: note = siRNA antisense sequence
  source 1..19: mol_type = other RNA
cactgacataagaatcaag

SEQ ID NO: 53052 - RNA, 19 nt, synthetic construct
  misc_feature 1..19: note = siRNA sense sequence
  source 1..19: mol_type = other RNA
ttgattcttatgtcagtgt

SEQ ID NO: 53053 - RNA, 19 nt, synthetic construct
  misc_feature 1..19: note = siRNA antisense sequence
  source 1..19: mol_type = other RNA
acactgacataagaatcaa

SEQ ID NO: 53054 - RNA, 19 nt, synthetic construct
  misc_feature 1..19: note = siRNA sense sequence
  source 1..19: mol_type = other RNA
atgtcagtgtttatatcac

SEQ ID NO: 53055 - RNA, 19 nt, synthetic construct
  misc_feature 1..19: note = siRNA antisense sequence
  source 1..19: mol_type = other RNA
gtgatataaacactgacat

SEQ ID NO: 53056 - RNA, 19 nt, synthetic construct
  misc_feature 1..19: note = siRNA sense sequence
  source 1..19: mol_type = other RNA
tgtcagtgtttatatcacg

SEQ ID NO: 53057 - RNA, 19 nt, synthetic construct
  misc_feature 1..19: note = siRNA antisense sequence
  source 1..19: mol_type = other RNA
cgtgatataaacactgaca

SEQ ID NO: 53058 - RNA, 19 nt, synthetic construct
  misc_feature 1..19: note = siRNA sense sequence
  source 1..19: mol_type = other RNA
gtcagtgtttatatcacga

SEQ ID NO: 53059 - RNA, 19 nt, synthetic construct
  misc_feature 1..19: note = siRNA antisense sequence
  source 1..19: mol_type = other RNA
tcgtgatataaacactgac

SEQ ID NO: 53060 - RNA, 19 nt, synthetic construct
  misc_feature 1..19: note = siRNA sense sequence
  source 1..19: mol_type = other RNA
tcagtgtttatatcacgat

SEQ ID NO: 53061 - RNA, 19 nt, synthetic construct
  misc_feature 1..19: note = siRNA antisense sequence
  source 1..19: mol_type = other RNA
atcgtgatataaacactga

SEQ ID NO: 53062 - RNA, 19 nt, synthetic construct
  misc_feature 1..19: note = siRNA sense sequence
  source 1..19: mol_type = other RNA
cagtgtttatatcacgata

SEQ ID NO: 53063 - RNA, 19 nt, synthetic construct
  misc_feature 1..19: note = siRNA antisense sequence
  source 1..19: mol_type = other RNA
tatcgtgatataaacactg

SEQ ID NO: 53064 - RNA, 19 nt, synthetic construct
  misc_feature 1..19: note = siRNA sense sequence
  source 1..19: mol_type = other RNA
agtgtttatatcacgatac

SEQ ID NO: 53065 - RNA, 19 nt, synthetic construct
  misc_feature 1..19: note = siRNA antisense sequence
  source 1..19: mol_type = other RNA
gtatcgtgatataaacact

SEQ ID NO: 53066 - RNA, 19 nt, synthetic construct
  misc_feature 1..19: note = siRNA sense sequence
  source 1..19: mol_type = other RNA
gtgtttatatcacgatacc

SEQ ID NO: 53067 - RNA, 19 nt, synthetic construct
  misc_feature 1..19: note = siRNA antisense sequence
  source 1..19: mol_type = other RNA
ggtatcgtgatataaacac

SEQ ID NO: 53068 - RNA, 19 nt, synthetic construct
  misc_feature 1..19: note = siRNA sense sequence
  source 1..19: mol_type = other RNA
tgtttatatcacgatacca

SEQ ID NO: 53069 - RNA, 19 nt, synthetic construct
  misc_feature 1..19: note = siRNA antisense sequence
  source 1..19: mol_type = other RNA
tggtatcgtgatataaaca

SEQ ID NO: 53070 - RNA, 19 nt, synthetic construct
  misc_feature 1..19: note = siRNA sense sequence
  source 1..19: mol_type = other RNA
gtttatatcacgataccaa

SEQ ID NO: 53071 - RNA, 19 nt, synthetic construct
  misc_feature 1..19: note = siRNA antisense sequence
  source 1..19: mol_type = other RNA
ttggtatcgtgatataaac

SEQ ID NO: 53072 - RNA, 19 nt, synthetic construct
  misc_feature 1..19: note = siRNA sense sequence
  source 1..19: mol_type = other RNA
atcacgataccaaaataac

SEQ ID NO: 53073 - RNA, 19 nt, synthetic construct
  misc_feature 1..19: note = siRNA antisense sequence
  source 1..19: mol_type = other RNA
gttattttggtatcgtgat

SEQ ID NO: 53074 - RNA, 19 nt, synthetic construct
  misc_feature 1..19: note = siRNA sense sequence
  source 1..19: mol_type = other RNA
tcacgataccaaaataact

SEQ ID NO: 53075 - RNA, 19 nt, synthetic construct
  misc_feature 1..19: note = siRNA antisense sequence
  source 1..19: mol_type = other RNA
agttattttggtatcgtga

SEQ ID NO: 53076 - RNA, 19 nt, synthetic construct
  misc_feature 1..19: note = siRNA sense sequence
  source 1..19: mol_type = other RNA
caaaataactgattctggg

SEQ ID NO: 53077 - RNA, 19 nt, synthetic construct
  misc_feature 1..19: note = siRNA antisense sequence
  source 1..19: mol_type = other RNA
cccagaatcagttattttg

SEQ ID NO: 53078 - RNA, 19 nt, synthetic construct
  misc_feature 1..19: note = siRNA sense sequence
  source 1..19: mol_type = other RNA
aaaataactgattctgggt

SEQ ID NO: 53079 - RNA, 19 nt, synthetic construct
  misc_feature 1..19: note = siRNA antisense sequence
  source 1..19: mol_type = other RNA
acccagaatcagttatttt

SEQ ID NO: 53080 - RNA, 19 nt, synthetic construct
  misc_feature 1..19: note = siRNA sense sequence
  source 1..19: mol_type = other RNA
aaataactgattctgggtt

SEQ ID NO: 53081 - RNA, 19 nt, synthetic construct
  misc_feature 1..19: note = siRNA antisense sequence
  source 1..19: mol_type = other RNA
aacccagaatcagttattt

SEQ ID NO: 53082 - RNA, 19 nt, synthetic construct
  misc_feature 1..19: note = siRNA sense sequence
  source 1..19: mol_type = other RNA
aataactgattctgggttg

SEQ ID NO: 53083 - RNA, 19 nt, synthetic construct
  misc_feature 1..19: note = siRNA antisense sequence
  source 1..19: mol_type = other RNA
caacccagaatcagttatt

SEQ ID NO: 53084 - RNA, 19 nt, synthetic construct
  misc_feature 1..19: note = siRNA sense sequence
  source 1..19: mol_type = other RNA
ataactgattctgggttga

SEQ ID NO: 53085 - RNA, 19 nt, synthetic construct
  misc_feature 1..19: note = siRNA antisense sequence
  source 1..19: mol_type = other RNA
tcaacccagaatcagttat

SEQ ID NO: 53086 - RNA, 19 nt, synthetic construct
  misc_feature 1..19: note = siRNA sense sequence
  source 1..19: mol_type = other RNA
taactgattctgggttgat

SEQ ID NO: 53087 - RNA, 19 nt, synthetic construct
  misc_feature 1..19: note = siRNA antisense sequence
  source 1..19: mol_type = other RNA
atcaacccagaatcagtta

SEQ ID NO: 53088 - RNA, 19 nt, synthetic construct
  misc_feature 1..19: note = siRNA sense sequence
  source 1..19: mol_type = other RNA
aactgattctgggttgatt

SEQ ID NO: 53089 - RNA, 19 nt, synthetic construct
  misc_feature 1..19: note = siRNA antisense sequence
  source 1..19: mol_type = other RNA
aatcaacccagaatcagtt

SEQ ID NO: 53090 - RNA, 19 nt, synthetic construct
  misc_feature 1..19: note = siRNA sense sequence
  source 1..19: mol_type = other RNA
actgattctgggttgatta

SEQ ID NO: 53091 - RNA, 19 nt, synthetic construct
  misc_feature 1..19: note = siRNA antisense sequence
  source 1..19: mol_type = other RNA
taatcaacccagaatcagt

SEQ ID NO: 53092 - RNA, 19 nt, synthetic construct
  misc_feature 1..19: note = siRNA sense sequence
  source 1..19: mol_type = other RNA
ctgattctgggttgattaa

SEQ ID NO: 53093 - RNA, 19 nt, synthetic construct
  misc_feature 1..19: note = siRNA antisense sequence
  source 1..19: mol_type = other RNA
ttaatcaacccagaatcag

SEQ ID NO: 53094 - RNA, 19 nt, synthetic construct
  misc_feature 1..19: note = siRNA sense sequence
  source 1..19: mol_type = other RNA
tgattctgggttgattaag

SEQ ID NO: 53095 - RNA, 19 nt, synthetic construct
  misc_feature 1..19: note = siRNA antisense sequence
  source 1..19: mol_type = other RNA
cttaatcaacccagaatca

SEQ ID NO: 53096 - RNA, 19 nt, synthetic construct
  misc_feature 1..19: note = siRNA sense sequence
  source 1..19: mol_type = other RNA
gattctgggttgattaaga

SEQ ID NO: 53097 - RNA, 19 nt, synthetic construct
  misc_feature 1..19: note = siRNA antisense sequence
  source 1..19: mol_type = other RNA
tcttaatcaacccagaatc

SEQ ID NO: 53098 - RNA, 19 nt, synthetic construct
  misc_feature 1..19: note = siRNA sense sequence
  source 1..19: mol_type = other RNA
ttgagtaccagcaatgtgc

SEQ ID NO: 53099 - RNA, 19 nt, synthetic construct
  misc_feature 1..19: note = siRNA antisense sequence
  source 1..19: mol_type = other RNA
gcacattgctggtactcaa

SEQ ID NO: 53100 - RNA, 19 nt, synthetic construct
  misc_feature 1..19: note = siRNA sense sequence
  source 1..19: mol_type = other RNA
actgagtttatagggaata

SEQ ID NO: 53101 - RNA, 19 nt, synthetic construct
  misc_feature 1..19: note = siRNA antisense sequence
  source 1..19: mol_type = other RNA
tattccctataaactcagt

SEQ ID NO: 53102 - RNA, 19 nt, synthetic construct
  misc_feature 1..19: note = siRNA sense sequence
  source 1..19: mol_type = other RNA
caagcaatcactatcagta

SEQ ID NO: 53103 - RNA, 19 nt, synthetic construct
  misc_feature 1..19: note = siRNA antisense sequence
  source 1..19: mol_type = other RNA
tactgatagtgattgcttg

SEQ ID NO: 53104 - RNA, 19 nt, synthetic construct
  misc_feature 1..19: note = siRNA sense sequence
  source 1..19: mol_type = other RNA
aagcaatcactatcagtat

SEQ ID NO: 53105 - RNA, 19 nt, synthetic construct
  misc_feature 1..19: note = siRNA antisense sequence
  source 1..19: mol_type = other RNA
atactgatagtgattgctt

SEQ ID NO: 53106 - RNA, 19 nt, synthetic construct
  misc_feature 1..19: note = siRNA sense sequence
  source 1..19: mol_type = other RNA
agcaatcactatcagtatg

SEQ ID NO: 53107 - RNA, 19 nt, synthetic construct
  misc_feature 1..19: note = siRNA antisense sequence
  source 1..19: mol_type = other RNA
catactgatagtgattgct

SEQ ID NO: 53108 - RNA, 19 nt, synthetic construct
  misc_feature 1..19: note = siRNA sense sequence
  source 1..19: mol_type = other RNA
gcaatcactatcagtatga

SEQ ID NO: 53109 - RNA, 19 nt, synthetic construct
  misc_feature 1..19: note = siRNA antisense sequence
  source 1..19: mol_type = other RNA
tcatactgatagtgattgc

SEQ ID NO: 53110 - RNA, 19 nt, synthetic construct
  misc_feature 1..19: note = siRNA sense sequence
  source 1..19: mol_type = other RNA
tcagtatgatatgtgctat

SEQ ID NO: 53111 - RNA, 19 nt, synthetic construct
  misc_feature 1..19: note = siRNA antisense sequence
  source 1..19: mol_type = other RNA
atagcacatatcatactga

SEQ ID NO: 53112 - RNA, 19 nt, synthetic construct
  misc_feature 1..19: note = siRNA sense sequence
  source 1..19: mol_type = other RNA
atgatatgtgctatgacac

SEQ ID NO: 53113 - RNA, 19 nt, synthetic construct
  misc_feature 1..19: note = siRNA antisense sequence
  source 1..19: mol_type = other RNA
gtgtcatagcacatatcat

SEQ ID NO: 53114 - RNA, 19 nt, synthetic construct
  misc_feature 1..19: note = siRNA sense sequence
  source 1..19: mol_type = other RNA
aagttcattacatcctaag

SEQ ID NO: 53115 - RNA, 19 nt, synthetic construct
  misc_feature 1..19: note = siRNA antisense sequence
  source 1..19: mol_type = other RNA
cttaggatgtaatgaactt

SEQ ID NO: 53116 - RNA, 19 nt, synthetic construct
  misc_feature 1..19: note = siRNA sense sequence
  source 1..19: mol_type = other RNA
agttcattacatcctaagg

SEQ ID NO: 53117 - RNA, 19 nt, synthetic construct
  misc_feature 1..19: note = siRNA antisense sequence
  source 1..19: mol_type = other RNA
ccttaggatgtaatgaact

SEQ ID NO: 53118 - RNA, 19 nt, synthetic construct
  misc_feature 1..19: note = siRNA sense sequence
  source 1..19: mol_type = other RNA
gttcattacatcctaaggt

SEQ ID NO: 53119 - RNA, 19 nt, synthetic construct
  misc_feature 1..19: note = siRNA antisense sequence
  source 1..19: mol_type = other RNA
accttaggatgtaatgaac

SEQ ID NO: 53120 - RNA, 19 nt, synthetic construct
  misc_feature 1..19: note = siRNA sense sequence
  source 1..19: mol_type = other RNA
ttcattacatcctaaggtt

SEQ ID NO: 53121 - RNA, 19 nt, synthetic construct
  misc_feature 1..19: note = siRNA antisense sequence
  source 1..19: mol_type = other RNA
aaccttaggatgtaatgaa

SEQ ID NO: 53122 - RNA, 19 nt, synthetic construct
  misc_feature 1..19: note = siRNA sense sequence
  source 1..19: mol_type = other RNA
tcattacatcctaaggttc

SEQ ID NO: 53123 - RNA, 19 nt, synthetic construct
  misc_feature 1..19: note = siRNA antisense sequence
  source 1..19: mol_type = other RNA
gaaccttaggatgtaatga

SEQ ID NO: 53124 - RNA, 19 nt, synthetic construct
  misc_feature 1..19: note = siRNA sense sequence
  source 1..19: mol_type = other RNA
cattacatcctaaggttct

SEQ ID NO: 53125 - RNA, 19 nt, synthetic construct
  misc_feature 1..19: note = siRNA antisense sequence
  source 1..19: mol_type = other RNA
agaaccttaggatgtaatg

SEQ ID NO: 53126 - RNA, 19 nt, synthetic construct
  misc_feature 1..19: note = siRNA sense sequence
  source 1..19: mol_type = other RNA
attacatcctaaggttcta

SEQ ID NO: 53127 - RNA, 19 nt, synthetic construct
  misc_feature 1..19: note = siRNA antisense sequence
  source 1..19: mol_type = other RNA
tagaaccttaggatgtaat

SEQ ID NO: 53128 - RNA, 19 nt, synthetic construct
  misc_feature 1..19: note = siRNA sense sequence
  source 1..19: mol_type = other RNA
tacatcctaaggttctatg

SEQ ID NO: 53129 - RNA, 19 nt, synthetic construct
  misc_feature 1..19: note = siRNA antisense sequence
  source 1..19: mol_type = other RNA
catagaaccttaggatgta

SEQ ID NO: 53130 - RNA, 19 nt, synthetic construct
  misc_feature 1..19: note = siRNA sense sequence
  source 1..19: mol_type = other RNA
aaccagcttaacctgaggc

SEQ ID NO: 53131 - RNA, 19 nt, synthetic construct
  misc_feature 1..19: note = siRNA antisense sequence
  source 1..19: mol_type = other RNA
gcctcaggttaagctggtt

SEQ ID NO: 53132 - RNA, 19 nt, synthetic construct
  misc_feature 1..19: note = siRNA sense sequence
  source 1..19: mol_type = other RNA
ccagcttaacctgaggctt

SEQ ID NO: 53133 - RNA, 19 nt, synthetic construct
  misc_feature 1..19: note = siRNA antisense sequence
  source 1..19: mol_type = other RNA
aagcctcaggttaagctgg

SEQ ID NO: 53134 - RNA, 19 nt, synthetic construct
  misc_feature 1..19: note = siRNA sense sequence
  source 1..19: mol_type = other RNA
cagcttaacctgaggcttc

SEQ ID NO: 53135 - RNA, 19 nt, synthetic construct
  misc_feature 1..19: note = siRNA antisense sequence
  source 1..19: mol_type = other RNA
gaagcctcaggttaagctg

SEQ ID NO: 53136 - RNA, 19 nt, synthetic construct
  misc_feature 1..19: note = siRNA sense sequence
  source 1..19: mol_type = other RNA
agcttaacctgaggcttct

SEQ ID NO: 53137 - RNA, 19 nt, synthetic construct
  misc_feature 1..19: note = siRNA antisense sequence
  source 1..19: mol_type = other RNA
agaagcctcaggttaagct

SEQ ID NO: 53138 - RNA, 19 nt, synthetic construct
  misc_feature 1..19: note = siRNA sense sequence
  source 1..19: mol_type = other RNA
gcttaacctgaggcttctg

SEQ ID NO: 53139 - RNA, 19 nt, synthetic construct
  misc_feature 1..19: note = siRNA antisense sequence
  source 1..19: mol_type = other RNA
cagaagcctcaggttaagc

SEQ ID NO: 53140 - RNA, 19 nt, synthetic construct
  misc_feature 1..19: note = siRNA sense sequence
  source 1..19: mol_type = other RNA
cttaacctgaggcttctgt

SEQ ID NO: 53141 - RNA, 19 nt, synthetic construct
  misc_feature 1..19: note = siRNA antisense sequence
  source 1..19: mol_type = other RNA
acagaagcctcaggttaag

SEQ ID NO: 53142 - RNA, 19 nt, synthetic construct
  misc_feature 1..19: note = siRNA sense sequence
  source 1..19: mol_type = other RNA
ttaacctgaggcttctgtt

SEQ ID NO: 53143 - RNA, 19 nt, synthetic construct
  misc_feature 1..19: note = siRNA antisense sequence
  source 1..19: mol_type = other RNA
aacagaagcctcaggttaa

SEQ ID NO: 53144 - RNA, 19 nt, synthetic construct
  misc_feature 1..19: note = siRNA sense sequence
  source 1..19: mol_type = other RNA
aacctgaggcttctgttat

SEQ ID NO: 53145 - RNA, 19 nt, synthetic construct
  misc_feature 1..19: note = siRNA antisense sequence
  source 1..19: mol_type = other RNA
ataacagaagcctcaggtt

SEQ ID NO: 53146 - RNA, 19 nt, synthetic construct
  misc_feature 1..19: note = siRNA sense sequence
  source 1..19: mol_type = other RNA
acctgaggcttctgttata

SEQ ID NO: 53147 - RNA, 19 nt, synthetic construct
  misc_feature 1..19: note = siRNA antisense sequence
  source 1..19: mol_type = other RNA
tataacagaagcctcaggt

SEQ ID NO: 53148 - RNA, 19 nt, synthetic construct
  misc_feature 1..19: note = siRNA sense sequence
  source 1..19: mol_type = other RNA
gaggcttctgttatatgta

SEQ ID NO: 53149 - RNA, 19 nt, synthetic construct
  misc_feature 1..19: note = siRNA antisense sequence
  source 1..19: mol_type = other RNA
tacatataacagaagcctc

SEQ ID NO: 53150 - RNA, 19 nt, synthetic construct
  misc_feature 1..19: note = siRNA sense sequence
  source 1..19: mol_type = other RNA
aggcttctgttatatgtag

SEQ ID NO: 53151 - RNA, 19 nt, synthetic construct
  misc_feature 1..19: note = siRNA antisense sequence
  source 1..19: mol_type = other RNA
ctacatataacagaagcct

SEQ ID NO: 53152 - RNA, 19 nt, synthetic construct
  misc_feature 1..19: note = siRNA sense sequence
  source 1..19: mol_type = other RNA
ggcttctgttatatgtaga

SEQ ID NO: 53153 - RNA, 19 nt, synthetic construct
  misc_feature 1..19: note = siRNA antisense sequence
  source 1..19: mol_type = other RNA
tctacatataacagaagcc

SEQ ID NO: 53154 - RNA, 19 nt, synthetic construct
  misc_feature 1..19: note = siRNA sense sequence
  source 1..19: mol_type = other RNA
tcttcctatataatggatg

SEQ ID NO: 53155 - RNA, 19 nt, synthetic construct
  misc_feature 1..19: note = siRNA antisense sequence
  source 1..19: mol_type = other RNA
catccattatataggaaga

SEQ ID NO: 53156 - RNA, 19 nt, synthetic construct
  misc_feature 1..19: note = siRNA sense sequence
  source 1..19: mol_type = other RNA
cttcctatataatggatga

SEQ ID NO: 53157 - RNA, 19 nt, synthetic construct
  misc_feature 1..19: note = siRNA antisense sequence
  source 1..19: mol_type = other RNA
tcatccattatataggaag

SEQ ID NO: 53158 - RNA, 19 nt, synthetic construct
  misc_feature 1..19: note = siRNA sense sequence
  source 1..19: mol_type = other RNA
ttcctatataatggatgac

SEQ ID NO: 53159 - RNA, 19 nt, synthetic construct
  misc_feature 1..19: note = siRNA antisense sequence
  source 1..19: mol_type = other RNA
gtcatccattatataggaa

SEQ ID NO: 53160 - RNA, 19 nt, synthetic construct
  misc_feature 1..19: note = siRNA sense sequence
  source 1..19: mol_type = other RNA
tcctatataatggatgaca

SEQ ID NO: 53161 - RNA, 19 nt, synthetic construct
  misc_feature 1..19: note = siRNA antisense sequence
  source 1..19: mol_type = other RNA
tgtcatccattatatagga

SEQ ID NO: 53162 - RNA, 19 nt, synthetic construct
  misc_feature 1..19: note = siRNA sense sequence
  source 1..19: mol_type = other RNA
cctatataatggatgacat

SEQ ID NO: 53163 - RNA, 19 nt, synthetic construct
  misc_feature 1..19: note = siRNA antisense sequence
  source 1..19: mol_type = other RNA
atgtcatccattatatagg

SEQ ID NO: 53164 - RNA, 19 nt, synthetic construct
  misc_feature 1..19: note = siRNA sense sequence
  source 1..19: mol_type = other RNA
caatgtgtttacagagcta

SEQ ID NO: 53165 - RNA, 19 nt, synthetic construct
  misc_feature 1..19: note = siRNA antisense sequence
  source 1..19: mol_type = other RNA
tagctctgtaaacacattg

SEQ ID NO: 53166 - RNA, 19 nt, synthetic construct
  misc_feature 1..19: note = siRNA sense sequence
  source 1..19: mol_type = other RNA
aatgtgtttacagagctat

SEQ ID NO: 53167 - RNA, 19 nt, synthetic construct
  misc_feature 1..19: note = siRNA antisense sequence
  source 1..19: mol_type = other RNA
atagctctgtaaacacatt

SEQ ID NO: 53168 - RNA, 19 nt, synthetic construct
  misc_feature 1..19: note = siRNA sense sequence
  source 1..19: mol_type = other RNA
atgtgtttacagagctata

SEQ ID NO: 53169 - RNA, 19 nt, synthetic construct
  misc_feature 1..19: note = siRNA antisense sequence
  source 1..19: mol_type = other RNA
tatagctctgtaaacacat

SEQ ID NO: 53170 - RNA, 19 nt, synthetic construct
  misc_feature 1..19: note = siRNA sense sequence
  source 1..19: mol_type = other RNA
tgtgtttacagagctataa

SEQ ID NO: 53171 - RNA, 19 nt, synthetic construct
  misc_feature 1..19: note = siRNA antisense sequence
  source 1..19: mol_type = other RNA
ttatagctctgtaaacaca

SEQ ID NO: 53172 - RNA, 19 nt, synthetic construct
  misc_feature 1..19: note = siRNA sense sequence
  source 1..19: mol_type = other RNA
tccaatatttaagaatgcc

SEQ ID NO: 53173 - RNA, 19 nt, synthetic construct
  misc_feature 1..19: note = siRNA antisense sequence
  source 1..19: mol_type = other RNA
ggcattcttaaatattgga

SEQ ID NO: 53174 - RNA, 19 nt, synthetic construct
  misc_feature 1..19: note = siRNA sense sequence
  source 1..19: mol_type = other RNA
ccaatatttaagaatgcca

SEQ ID NO: 53175 - RNA, 19 nt, synthetic construct
  misc_feature 1..19: note = siRNA antisense sequence
  source 1..19: mol_type = other RNA
tggcattcttaaatattgg

SEQ ID NO: 53176 - RNA, 19 nt, synthetic construct
  misc_feature 1..19: note = siRNA sense sequence
  source 1..19: mol_type = other RNA
tatttaagaatgccaagtg

SEQ ID NO: 53177 - RNA, 19 nt, synthetic construct
  misc_feature 1..19: note = siRNA antisense sequence
  source 1..19: mol_type = other RNA
cacttggcattcttaaata

SEQ ID NO: 53178 - RNA, 19 nt, synthetic construct
  misc_feature 1..19: note = siRNA sense sequence
  source 1..19: mol_type = other RNA
atttaagaatgccaagtga

SEQ ID NO: 53179 - RNA, 19 nt, synthetic construct
  misc_feature 1..19: note = siRNA antisense sequence
  source 1..19: mol_type = other RNA
tcacttggcattcttaaat

SEQ ID NO: 53180 - RNA, 19 nt, synthetic construct
  misc_feature 1..19: note = siRNA sense sequence
  source 1..19: mol_type = other RNA
tttaagaatgccaagtgaa

SEQ ID NO: 53181 - RNA, 19 nt, synthetic construct
  misc_feature 1..19: note = siRNA antisense sequence
  source 1..19: mol_type = other RNA
ttcacttggcattcttaaa

SEQ ID NO: 53182 - RNA, 19 nt, synthetic construct
  misc_feature 1..19: note = siRNA sense sequence
  source 1..19: mol_type = other RNA
attatcctaaatgcccgaa

SEQ ID NO: 53183 - RNA, 19 nt, synthetic construct
  misc_feature 1..19: note = siRNA antisense sequence
  source 1..19: mol_type = other RNA
ttcgggcatttaggataat

SEQ ID NO: 53184 - RNA, 19 nt, synthetic construct
  misc_feature 1..19: note = siRNA sense sequence
  source 1..19: mol_type = other RNA
aaatatgcaggtagttaag

SEQ ID NO: 53185 - RNA, 19 nt, synthetic construct
  misc_feature 1..19: note = siRNA antisense sequence
  source 1..19: mol_type = other RNA
cttaactacctgcatattt

SEQ ID NO: 53186 - RNA, 19 nt, synthetic construct
  misc_feature 1..19: note = siRNA sense sequence
  source 1..19: mol_type = other RNA
aatatgcaggtagttaagt

SEQ ID NO: 53187 - RNA, 19 nt, synthetic construct
  misc_feature 1..19: note = siRNA antisense sequence
  source 1..19: mol_type = other RNA
acttaactacctgcatatt

SEQ ID NO: 53188 - RNA, 19 nt, synthetic construct
  misc_feature 1..19: note = siRNA sense sequence
  source 1..19: mol_type = other RNA
atatgcaggtagttaagta

SEQ ID NO: 53189 - RNA, 19 nt, synthetic construct
  misc_feature 1..19: note = siRNA antisense sequence
  source 1..19: mol_type = other RNA
tacttaactacctgcatat

SEQ ID NO: 53190 - RNA, 19 nt, synthetic construct
  misc_feature 1..19: note = siRNA sense sequence
  source 1..19: mol_type = other RNA
tatgcaggtagttaagtaa

SEQ ID NO: 53191 - RNA, 19 nt, synthetic construct
  misc_feature 1..19: note = siRNA antisense sequence
  source 1..19: mol_type = other RNA
ttacttaactacctgcata

SEQ ID NO: 53192 - RNA, 19 nt, synthetic construct
  misc_feature 1..19: note = siRNA sense sequence
  source 1..19: mol_type = other RNA
atgcaggtagttaagtaaa

SEQ ID NO: 53193 - RNA, 19 nt, synthetic construct
  misc_feature 1..19: note = siRNA antisense sequence
  source 1..19: mol_type = other RNA
tttacttaactacctgcat

SEQ ID NO: 53194 - RNA, 19 nt, synthetic construct
  misc_feature 1..19: note = siRNA sense sequence
  source 1..19: mol_type = other RNA
tgcaggtagttaagtaaat

SEQ ID NO: 53195 - RNA, 19 nt, synthetic construct
  misc_feature 1..19: note = siRNA antisense sequence
  source 1..19: mol_type = other RNA
atttacttaactacctgca

SEQ ID NO: 53196 - RNA, 19 nt, synthetic construct
  misc_feature 1..19: note = siRNA sense sequence
  source 1..19: mol_type = other RNA
gcaggtagttaagtaaata

SEQ ID NO: 53197 - RNA, 19 nt, synthetic construct
  misc_feature 1..19: note = siRNA antisense sequence
  source 1..19: mol_type = other RNA
tatttacttaactacctgc

SEQ ID NO: 53198 - RNA, 19 nt, synthetic construct
  misc_feature 1..19: note = siRNA sense sequence
  source 1..19: mol_type = other RNA
gctgattctatgatactaa

SEQ ID NO: 53199 - RNA, 19 nt, synthetic construct
  misc_feature 1..19: note = siRNA antisense sequence
  source 1..19: mol_type = other RNA
ttagtatcatagaatcagc

SEQ ID NO: 53200 - RNA, 19 nt, synthetic construct
  misc_feature 1..19: note = siRNA sense sequence
  source 1..19: mol_type = other RNA
gatactaaagacttgaagc

SEQ ID NO: 53201 - RNA, 19 nt, synthetic construct
  misc_feature 1..19: note = siRNA antisense sequence
  source 1..19: mol_type = other RNA
gcttcaagtctttagtatc

SEQ ID NO: 53202 - RNA, 19 nt, synthetic construct
  misc_feature 1..19: note = siRNA sense sequence
  source 1..19: mol_type = other RNA
atactaaagacttgaagca

SEQ ID NO: 53203 - RNA, 19 nt, synthetic construct
  misc_feature 1..19: note = siRNA antisense sequence
  source 1..19: mol_type = other RNA
tgcttcaagtctttagtat

SEQ ID NO: 53204 - RNA, 19 nt, synthetic construct
  misc_feature 1..19: note = siRNA sense sequence
  source 1..19: mol_type = other RNA
tactaaagacttgaagcag

SEQ ID NO: 53205 - RNA, 19 nt, synthetic construct
  misc_feature 1..19: note = siRNA antisense sequence
  source 1..19: mol_type = other RNA
ctgcttcaagtctttagta

SEQ ID NO: 53206 - RNA, 19 nt, synthetic construct
  misc_feature 1..19: note = siRNA sense sequence
  source 1..19: mol_type = other RNA
actaaagacttgaagcagt

SEQ ID NO: 53207 - RNA, 19 nt, synthetic construct
  misc_feature 1..19: note = siRNA antisense sequence
  source 1..19: mol_type = other RNA
actgcttcaagtctttagt

SEQ ID NO: 53208 - RNA, 19 nt, synthetic construct
  misc_feature 1..19: note = siRNA sense sequence
  source 1..19: mol_type = other RNA
aagacttgaagcagttatg

SEQ ID NO: 53209 - RNA, 19 nt, synthetic construct
  misc_feature 1..19: note = siRNA antisense sequence
  source 1..19: mol_type = other RNA
cataactgcttcaagtctt

SEQ ID NO: 53210 - RNA, 19 nt, synthetic construct
  misc_feature 1..19: note = siRNA sense sequence
  source 1..19: mol_type = other RNA
agacttgaagcagttatgg

SEQ ID NO: 53211 - RNA, 19 nt, synthetic construct
  misc_feature 1..19: note = siRNA antisense sequence
  source 1..19: mol_type = other RNA
ccataactgcttcaagtct

SEQ ID NO: 53212 - RNA, 19 nt, synthetic construct
  misc_feature 1..19: note = siRNA sense sequence
  source 1..19: mol_type = other RNA
gacttgaagcagttatggt

SEQ ID NO: 53213 - RNA, 19 nt, synthetic construct
  misc_feature 1..19: note = siRNA antisense sequence
  source 1..19: mol_type = other RNA
accataactgcttcaagtc

SEQ ID NO: 53214 - RNA, 19 nt, synthetic construct
  misc_feature 1..19: note = siRNA sense sequence
  source 1..19: mol_type = other RNA
acttgaagcagttatggta

SEQ ID NO: 53215 - RNA, 19 nt, synthetic construct
  misc_feature 1..19: note = siRNA antisense sequence
  source 1..19: mol_type = other RNA
taccataactgcttcaagt

SEQ ID NO: 53216 - RNA, 19 nt, synthetic construct
  misc_feature 1..19: note = siRNA sense sequence
  source 1..19: mol_type = other RNA
cttgaagcagttatggtac

SEQ ID NO: 53217 - RNA, 19 nt, synthetic construct
  misc_feature 1..19: note = siRNA antisense sequence
  source 1..19: mol_type = other RNA
gtaccataactgcttcaag

SEQ ID NO: 53218 - RNA, 19 nt, synthetic construct
  misc_feature 1..19: note = siRNA sense sequence
  source 1..19: mol_type = other RNA
ttgaagcagttatggtaca

SEQ ID NO: 53219 - RNA, 19 nt, synthetic construct
  misc_feature 1..19: note = siRNA antisense sequence
  source 1..19: mol_type = other RNA
tgtaccataactgcttcaa

SEQ ID NO: 53220 - RNA, 19 nt, synthetic construct
  misc_feature 1..19: note = siRNA sense sequence
  source 1..19: mol_type = other RNA
gatagcgatgaggtcatag

SEQ ID NO: 53221 - RNA, 19 nt, synthetic construct
  misc_feature 1..19: note = siRNA antisense sequence
  source 1..19: mol_type = other RNA
ctatgacctcatcgctatc

SEQ ID NO: 53222 - RNA, 19 nt, synthetic construct
  misc_feature 1..19: note = siRNA sense sequence
  source 1..19: mol_type = other RNA
atagcgatgaggtcataga

SEQ ID NO: 53223 - RNA, 19 nt, synthetic construct
  misc_feature 1..19: note = siRNA antisense sequence
  source 1..19: mol_type = other RNA
tctatgacctcatcgctat

SEQ ID NO: 53224 - RNA, 19 nt, synthetic construct
  misc_feature 1..19: note = siRNA sense sequence
  source 1..19: mol_type = other RNA
tagcgatgaggtcatagag

SEQ ID NO: 53225 - RNA, 19 nt, synthetic construct
  misc_feature 1..19: note = siRNA antisense sequence
  source 1..19: mol_type = other RNA
ctctatgacctcatcgcta

SEQ ID NO: 53226 - RNA, 19 nt, synthetic construct
  misc_feature 1..19: note = siRNA sense sequence
  source 1..19: mol_type = other RNA
gcttgttttctgattctgc

SEQ ID NO: 53227 - RNA, 19 nt, synthetic construct
  misc_feature 1..19: note = siRNA antisense sequence
  source 1..19: mol_type = other RNA
gcagaatcagaaaacaagc

SEQ ID NO: 53228 - RNA, 19 nt, synthetic construct
  misc_feature 1..19: note = siRNA sense sequence
  source 1..19: mol_type = other RNA
cttgttttctgattctgcc

SEQ ID NO: 53229 - RNA, 19 nt, synthetic construct
  misc_feature 1..19: note = siRNA antisense sequence
  source 1..19: mol_type = other RNA
ggcagaatcagaaaacaag

SEQ ID NO: 53230 - RNA, 19 nt, synthetic construct
  misc_feature 1..19: note = siRNA sense sequence
  source 1..19: mol_type = other RNA
ttgttttctgattctgccc

SEQ ID NO: 53231 - RNA, 19 nt, synthetic construct
  misc_feature 1..19: note = siRNA antisense sequence
  source 1..19: mol_type = other RNA
gggcagaatcagaaaacaa

SEQ ID NO: 53232 - RNA, 19 nt, synthetic construct
  misc_feature 1..19: note = siRNA sense sequence
  source 1..19: mol_type = other RNA
cctggctatggctttaggc

SEQ ID NO: 53233 - RNA, 19 nt, synthetic construct
  misc_feature 1..19: note = siRNA antisense sequence
  source 1..19: mol_type = other RNA
gcctaaagccatagccagg

SEQ ID NO: 53234 - RNA, 19 nt, synthetic construct
  misc_feature 1..19: note = siRNA sense sequence
  source 1..19: mol_type = other RNA
ctggctatggctttaggca

SEQ ID NO: 53235 - RNA, 19 nt, synthetic construct
  misc_feature 1..19: note = siRNA antisense sequence
  source 1..19: mol_type = other RNA
tgcctaaagccatagccag

SEQ ID NO: 53236 - RNA, 19 nt, synthetic construct
  misc_feature 1..19: note = siRNA sense sequence
  source 1..19: mol_type = other RNA
tggctatggctttaggcaa

SEQ ID NO: 53237 - RNA, 19 nt, synthetic construct
  misc_feature 1..19: note = siRNA antisense sequence
  source 1..19: mol_type = other RNA
ttgcctaaagccatagcca

SEQ ID NO: 53238 - RNA, 19 nt, synthetic construct
  misc_feature 1..19: note = siRNA sense sequence
  source 1..19: mol_type = other RNA
gctatggctttaggcaaat

SEQ ID NO: 53239 - RNA, 19 nt, synthetic construct
  misc_feature 1..19: note = siRNA antisense sequence
  source 1..19: mol_type = other RNA
atttgcctaaagccatagc

SEQ ID NO: 53240 - RNA, 19 nt, synthetic construct
  misc_feature 1..19: note = siRNA sense sequence
  source 1..19: mol_type = other RNA
ctatggctttaggcaaatt

SEQ ID NO: 53241 - RNA, 19 nt, synthetic construct
  misc_feature 1..19: note = siRNA antisense sequence
  source 1..19: mol_type = other RNA
aatttgcctaaagccatag

SEQ ID NO: 53242 - RNA, 19 nt, synthetic construct
  misc_feature 1..19: note = siRNA sense sequence
  source 1..19: mol_type = other RNA
gctttaggcaaattactct

SEQ ID NO: 53243 - RNA, 19 nt, synthetic construct
  misc_feature 1..19: note = siRNA antisense sequence
  source 1..19: mol_type = other RNA
agagtaatttgcctaaagc

SEQ ID NO: 53244 - RNA, 19 nt, synthetic construct
  misc_feature 1..19: note = siRNA sense sequence
  source 1..19: mol_type = other RNA
ctttaggcaaattactctc

SEQ ID NO: 53245 - RNA, 19 nt, synthetic construct
  misc_feature 1..19: note = siRNA antisense sequence
  source 1..19: mol_type = other RNA
gagagtaatttgcctaaag

SEQ ID NO: 53246 - RNA, 19 nt, synthetic construct
  misc_feature 1..19: note = siRNA sense sequence
  source 1..19: mol_type = other RNA
aagcctcaattttcctatt

SEQ ID NO: 53247 - RNA, 19 nt, synthetic construct
  misc_feature 1..19: note = siRNA antisense sequence
  source 1..19: mol_type = other RNA
aataggaaaattgaggctt

SEQ ID NO: 53248 - RNA, 19 nt, synthetic construct
  misc_feature 1..19: note = siRNA sense sequence
  source 1..19: mol_type = other RNA
gcctcaattttcctatttc

SEQ ID NO: 53249 - RNA, 19 nt, synthetic construct
  misc_feature 1..19: note = siRNA antisense sequence
  source 1..19: mol_type = other RNA
gaaataggaaaattgaggc

SEQ ID NO: 53250 - RNA, 19 nt, synthetic construct
  misc_feature 1..19: note = siRNA sense sequence
  source 1..19: mol_type = other RNA
caccatatatatcatttgg

SEQ ID NO: 53251 - RNA, 19 nt, synthetic construct
  misc_feature 1..19: note = siRNA antisense sequence
  source 1..19: mol_type = other RNA
ccaaatgatatatatggtg

SEQ ID NO: 53252 - RNA, 19 nt, synthetic construct
  misc_feature 1..19: note = siRNA sense sequence
  source 1..19: mol_type = other RNA
accatatatatcatttggg

SEQ ID NO: 53253 - RNA, 19 nt, synthetic construct
  misc_feature 1..19: note = siRNA antisense sequence
  source 1..19: mol_type = other RNA
cccaaatgatatatatggt

SEQ ID NO: 53254 - RNA, 19 nt, synthetic construct
  misc_feature 1..19: note = siRNA sense sequence
  source 1..19: mol_type = other RNA
ccatatatatcatttgggt

SEQ ID NO: 53255 - RNA, 19 nt, synthetic construct
  misc_feature 1..19: note = siRNA antisense sequence
  source 1..19: mol_type = other RNA
acccaaatgatatatatgg

SEQ ID NO: 53256 - RNA, 19 nt, synthetic construct
  misc_feature 1..19: note = siRNA sense sequence
  source 1..19: mol_type = other RNA
atatcatttgggttgttag

SEQ ID NO: 53257 - RNA, 19 nt, synthetic construct
  misc_feature 1..19: note = siRNA antisense sequence
  source 1..19: mol_type = other RNA
ctaacaacccaaatgatat

SEQ ID NO: 53258 - RNA, 19 nt, synthetic construct
  misc_feature 1..19: note = siRNA sense sequence
  source 1..19: mol_type = other RNA
tatcatttgggttgttaga

SEQ ID NO: 53259 - RNA, 19 nt, synthetic construct
  misc_feature 1..19: note = siRNA antisense sequence
  source 1..19: mol_type = other RNA
tctaacaacccaaatgata

SEQ ID NO: 53260 - RNA, 19 nt, synthetic construct
  misc_feature 1..19: note = siRNA sense sequence
  source 1..19: mol_type = other RNA
atcatttgggttgttagat

SEQ ID NO: 53261 - RNA, 19 nt, synthetic construct
  misc_feature 1..19: note = siRNA antisense sequence
  source 1..19: mol_type = other RNA
atctaacaacccaaatgat

SEQ ID NO: 53262 - RNA, 19 nt, synthetic construct
  misc_feature 1..19: note = siRNA sense sequence
  source 1..19: mol_type = other RNA
catttgggttgttagatta

SEQ ID NO: 53263 - RNA, 19 nt, synthetic construct
  misc_feature 1..19: note = siRNA antisense sequence
  source 1..19: mol_type = other RNA
taatctaacaacccaaatg

SEQ ID NO: 53264 - RNA, 19 nt, synthetic construct
  misc_feature 1..19: note = siRNA sense sequence
  source 1..19: mol_type = other RNA
tttgggttgttagattaag

SEQ ID NO: 53265 - RNA, 19 nt, synthetic construct
  misc_feature 1..19: note = siRNA antisense sequence
  source 1..19: mol_type = other RNA
cttaatctaacaacccaaa

SEQ ID NO: 53266 - RNA, 19 nt, synthetic construct
  misc_feature 1..19: note = siRNA sense sequence
  source 1..19: mol_type = other RNA
ttgggttgttagattaagt

SEQ ID NO: 53267 - RNA, 19 nt, synthetic construct
  misc_feature 1..19: note = siRNA antisense sequence
  source 1..19: mol_type = other RNA
acttaatctaacaacccaa

SEQ ID NO: 53268 - RNA, 19 nt, synthetic construct
  misc_feature 1..19: note = siRNA sense sequence
  source 1..19: mol_type = other RNA
tgggttgttagattaagta

SEQ ID NO: 53269 - RNA, 19 nt, synthetic construct
  misc_feature 1..19: note = siRNA antisense sequence
  source 1..19: mol_type = other RNA
tacttaatctaacaaccca

SEQ ID NO: 53270 - RNA, 19 nt, synthetic construct
  misc_feature 1..19: note = siRNA sense sequence
  source 1..19: mol_type = other RNA
gggttgttagattaagtaa

SEQ ID NO: 53271 - RNA, 19 nt, synthetic construct
  misc_feature 1..19: note = siRNA antisense sequence
  source 1..19: mol_type = other RNA
ttacttaatctaacaaccc

SEQ ID NO: 53272 - RNA, 19 nt, synthetic construct
  misc_feature 1..19: note = siRNA sense sequence
  source 1..19: mol_type = other RNA
tatatttagtactgtgcct

SEQ ID NO: 53273 - RNA, 19 nt, synthetic construct
  misc_feature 1..19: note = siRNA antisense sequence
  source 1..19: mol_type = other RNA
aggcacagtactaaatata

SEQ ID NO: 53274 - RNA, 19 nt, synthetic construct
  misc_feature 1..19: note = siRNA sense sequence
  source 1..19: mol_type = other RNA
atatttagtactgtgcctg

SEQ ID NO: 53275 - RNA, 19 nt, synthetic construct
  misc_feature 1..19: note = siRNA antisense sequence
  source 1..19: mol_type = other RNA
caggcacagtactaaatat

SEQ ID NO: 53276 - RNA, 19 nt, synthetic construct
  misc_feature 1..19: note = siRNA sense sequence
  source 1..19: mol_type = other RNA
tttagtactgtgcctgaca

SEQ ID NO: 53277 - RNA, 19 nt, synthetic construct
  misc_feature 1..19: note = siRNA antisense sequence
  source 1..19: mol_type = other RNA
tgtcaggcacagtactaaa

SEQ ID NO: 53278 - RNA, 19 nt, synthetic construct
  misc_feature 1..19: note = siRNA sense sequence
  source 1..19: mol_type = other RNA
cactcaatgggtgttgtct

SEQ ID NO: 53279 - RNA, 19 nt, synthetic construct
  misc_feature 1..19: note = siRNA antisense sequence
  source 1..19: mol_type = other RNA
agacaacacccattgagtg

SEQ ID NO: 53280 - RNA, 19 nt, synthetic construct
  misc_feature 1..19: note = siRNA sense sequence
  source 1..19: mol_type = other RNA
ctcaatgggtgttgtctat

SEQ ID NO: 53281 - RNA, 19 nt, synthetic construct
  misc_feature 1..19: note = siRNA antisense sequence
  source 1..19: mol_type = other RNA
atagacaacacccattgag

SEQ ID NO: 53282 - RNA, 19 nt, synthetic construct
  misc_feature 1..19: note = siRNA sense sequence
  source 1..19: mol_type = other RNA
tcaatgggtgttgtctatt

SEQ ID NO: 53283 - RNA, 19 nt, synthetic construct
  misc_feature 1..19: note = siRNA antisense sequence
  source 1..19: mol_type = other RNA
aatagacaacacccattga

SEQ ID NO: 53284 - RNA, 19 nt, synthetic construct
  misc_feature 1..19: note = siRNA sense sequence
  source 1..19: mol_type = other RNA
caatgggtgttgtctatta

SEQ ID NO: 53285 - RNA, 19 nt, synthetic construct
  misc_feature 1..19: note = siRNA antisense sequence
  source 1..19: mol_type = other RNA
taatagacaacacccattg

SEQ ID NO: 53286 - RNA, 19 nt, synthetic construct
  misc_feature 1..19: note = siRNA sense sequence
  source 1..19: mol_type = other RNA
gggtgttgtctattatttt

SEQ ID NO: 53287 - RNA, 19 nt, synthetic construct
  misc_feature 1..19: note = siRNA antisense sequence
  source 1..19: mol_type = other RNA
aaaataatagacaacaccc

SEQ ID NO: 53288 - RNA, 19 nt, synthetic construct
  misc_feature 1..19: note = siRNA sense sequence
  source 1..19: mol_type = other RNA
ttattagtattgtggtagg

SEQ ID NO: 53289 - RNA, 19 nt, synthetic construct
  misc_feature 1..19: note = siRNA antisense sequence
  source 1..19: mol_type = other RNA
cctaccacaatactaataa

SEQ ID NO: 53290 - RNA, 19 nt, synthetic construct
  misc_feature 1..19: note = siRNA sense sequence
  source 1..19: mol_type = other RNA
tattagtattgtggtaggc

SEQ ID NO: 53291 - RNA, 19 nt, synthetic construct
  misc_feature 1..19: note = siRNA antisense sequence
  source 1..19: mol_type = other RNA
gcctaccacaatactaata

SEQ ID NO: 53292 - RNA, 19 nt, synthetic construct
  misc_feature 1..19: note = siRNA sense sequence
  source 1..19: mol_type = other RNA
attagtattgtggtaggca

SEQ ID NO: 53293 - RNA, 19 nt, synthetic construct
  misc_feature 1..19: note = siRNA antisense sequence
  source 1..19: mol_type = other RNA
tgcctaccacaatactaat

SEQ ID NO: 53294 - RNA, 19 nt, synthetic construct
  misc_feature 1..19: note = siRNA sense sequence
  source 1..19: mol_type = other RNA
cctaatccctggacccata

SEQ ID NO: 53295 - RNA, 19 nt, synthetic construct
  misc_feature 1..19: note = siRNA antisense sequence
  source 1..19: mol_type = other RNA
tatgggtccagggattagg

SEQ ID NO: 53296 - RNA, 19 nt, synthetic construct
  misc_feature 1..19: note = siRNA sense sequence
  source 1..19: mol_type = other RNA
ctaatccctggacccatac

SEQ ID NO: 53297 - RNA, 19 nt, synthetic construct
  misc_feature 1..19: note = siRNA antisense sequence
  source 1..19: mol_type = other RNA
gtatgggtccagggattag

SEQ ID NO: 53298 - RNA, 19 nt, synthetic construct
  misc_feature 1..19: note = siRNA sense sequence
  source 1..19: mol_type = other RNA
taatccctggacccatact

SEQ ID NO: 53299 - RNA, 19 nt, synthetic construct
  misc_feature 1..19: note = siRNA antisense sequence
  source 1..19: mol_type = other RNA
agtatgggtccagggatta

SEQ ID NO: 53300 - RNA, 19 nt, synthetic construct
  misc_feature 1..19: note = siRNA sense sequence
  source 1..19: mol_type = other RNA
aatccctggacccatactt

SEQ ID NO: 53301 - RNA, 19 nt, synthetic construct
  misc_feature 1..19: note = siRNA antisense sequence
  source 1..19: mol_type = other RNA
aagtatgggtccagggatt

SEQ ID NO: 53302 - RNA, 19 nt, synthetic construct
  misc_feature 1..19: note = siRNA sense sequence
  source 1..19: mol_type = other RNA
atccctggacccatacttt

SEQ ID NO: 53303 - RNA, 19 nt, synthetic construct
  misc_feature 1..19: note = siRNA antisense sequence
  source 1..19: mol_type = other RNA
aaagtatgggtccagggat

SEQ ID NO: 53304 - RNA, 19 nt, synthetic construct
  misc_feature 1..19: note = siRNA sense sequence
  source 1..19: mol_type = other RNA
tccctggacccatactttg

SEQ ID NO: 53305 - RNA, 19 nt, synthetic construct
  misc_feature 1..19: note = siRNA antisense sequence
  source 1..19: mol_type = other RNA
caaagtatgggtccaggga

SEQ ID NO: 53306 - RNA, 19 nt, synthetic construct
  misc_feature 1..19: note = siRNA sense sequence
  source 1..19: mol_type = other RNA
ccctggacccatactttgc

SEQ ID NO: 53307 - RNA, 19 nt, synthetic construct
  misc_feature 1..19: note = siRNA antisense sequence
  source 1..19: mol_type = other RNA
gcaaagtatgggtccaggg

SEQ ID NO: 53308 - RNA, 19 nt, synthetic construct
  misc_feature 1..19: note = siRNA sense sequence
  source 1..19: mol_type = other RNA
cctggacccatactttgca

SEQ ID NO: 53309 - RNA, 19 nt, synthetic construct
  misc_feature 1..19: note = siRNA antisense sequence
  source 1..19: mol_type = other RNA
tgcaaagtatgggtccagg

SEQ ID NO: 53310 - RNA, 19 nt, synthetic construct
  misc_feature 1..19: note = siRNA sense sequence
  source 1..19: mol_type = other RNA
ctggacccatactttgcat

SEQ ID NO: 53311 - RNA, 19 nt, synthetic construct
  misc_feature 1..19: note = siRNA antisense sequence
  source 1..19: mol_type = other RNA
atgcaaagtatgggtccag

SEQ ID NO: 53312 - RNA, 19 nt, synthetic construct
  misc_feature 1..19: note = siRNA sense sequence
  source 1..19: mol_type = other RNA
tggacccatactttgcatg

SEQ ID NO: 53313 - RNA, 19 nt, synthetic construct
  misc_feature 1..19: note = siRNA antisense sequence
  source 1..19: mol_type = other RNA
catgcaaagtatgggtcca

SEQ ID NO: 53314 - RNA, 19 nt, synthetic construct
  misc_feature 1..19: note = siRNA sense sequence
  source 1..19: mol_type = other RNA
agggacttttcagatatga

SEQ ID NO: 53315 - RNA, 19 nt, synthetic construct
  misc_feature 1..19: note = siRNA antisense sequence
  source 1..19: mol_type = other RNA
tcatatctgaaaagtccct

SEQ ID NO: 53316 - RNA, 19 nt, synthetic construct
  misc_feature 1..19: note = siRNA sense sequence
  source 1..19: mol_type = other RNA
aaattaaggatcccgagtt

SEQ ID NO: 53317 - RNA, 19 nt, synthetic construct
  misc_feature 1..19: note = siRNA antisense sequence
  source 1..19: mol_type = other RNA
aactcgggatccttaattt

SEQ ID NO: 53318 - RNA, 19 nt, synthetic construct
  misc_feature 1..19: note = siRNA sense sequence
  source 1..19: mol_type = other RNA
aattaaggatcccgagttg

SEQ ID NO: 53319 - RNA, 19 nt, synthetic construct
  misc_feature 1..19: note = siRNA antisense sequence
  source 1..19: mol_type = other RNA
caactcgggatccttaatt

SEQ ID NO: 53320 - RNA, 19 nt, synthetic construct
  misc_feature 1..19: note = siRNA sense sequence
  source 1..19: mol_type = other RNA
attaaggatcccgagttgg

SEQ ID NO: 53321 - RNA, 19 nt, synthetic construct
  misc_feature 1..19: note = siRNA antisense sequence
  source 1..19: mol_type = other RNA
ccaactcgggatccttaat

SEQ ID NO: 53322 - RNA, 19 nt, synthetic construct
  misc_feature 1..19: note = siRNA sense sequence
  source 1..19: mol_type = other RNA
ttaaggatcccgagttgga

SEQ ID NO: 53323 - RNA, 19 nt, synthetic construct
  misc_feature 1..19: note = siRNA antisense sequence
  source 1..19: mol_type = other RNA
tccaactcgggatccttaa

SEQ ID NO: 53324 - RNA, 19 nt, synthetic construct
  misc_feature 1..19: note = siRNA sense sequence
  source 1..19: mol_type = other RNA
taaggatcccgagttggaa

SEQ ID NO: 53325 - RNA, 19 nt, synthetic construct
  misc_feature 1..19: note = siRNA antisense sequence
  source 1..19: mol_type = other RNA
ttccaactcgggatcctta

SEQ ID NO: 53326 - RNA, 19 nt, synthetic construct
  misc_feature 1..19: note = siRNA sense sequence
  source 1..19: mol_type = other RNA
aaggatcccgagttggaag

SEQ ID NO: 53327 - RNA, 19 nt, synthetic construct
  misc_feature 1..19: note = siRNA antisense sequence
  source 1..19: mol_type = other RNA
cttccaactcgggatcctt

SEQ ID NO: 53328 - RNA, 19 nt, synthetic construct
  misc_feature 1..19: note = siRNA sense sequence
  source 1..19: mol_type = other RNA
aggatcccgagttggaaga

SEQ ID NO: 53329 - RNA, 19 nt, synthetic construct
  misc_feature 1..19: note = siRNA antisense sequence
  source 1..19: mol_type = other RNA
tcttccaactcgggatcct

SEQ ID NO: 53330 - RNA, 19 nt, synthetic construct
  misc_feature 1..19: note = siRNA sense sequence
  source 1..19: mol_type = other RNA
ggatcccgagttggaagat

SEQ ID NO: 53331 - RNA, 19 nt, synthetic construct
  misc_feature 1..19: note = siRNA antisense sequence
  source 1..19: mol_type = other RNA
atcttccaactcgggatcc

SEQ ID NO: 53332 - RNA, 19 nt, synthetic construct
  misc_feature 1..19: note = siRNA sense sequence
  source 1..19: mol_type = other RNA
gatcccgagttggaagatt

SEQ ID NO: 53333 - RNA, 19 nt, synthetic construct
  misc_feature 1..19: note = siRNA antisense sequence
  source 1..19: mol_type = other RNA
aatcttccaactcgggatc

SEQ ID NO: 53334 - RNA, 19 nt, synthetic construct
  misc_feature 1..19: note = siRNA sense sequence
  source 1..19: mol_type = other RNA
atcccgagttggaagatta

SEQ ID NO: 53335 - RNA, 19 nt, synthetic construct
  misc_feature 1..19: note = siRNA antisense sequence
  source 1..19: mol_type = other RNA
taatcttccaactcgggat

SEQ ID NO: 53336 - RNA, 19 nt, synthetic construct
  misc_feature 1..19: note = siRNA sense sequence
  source 1..19: mol_type = other RNA
tcccgagttggaagattat

SEQ ID NO: 53337 - RNA, 19 nt, synthetic construct
  misc_feature 1..19: note = siRNA antisense sequence
  source 1..19: mol_type = other RNA
ataatcttccaactcggga

SEQ ID NO: 53338 - RNA, 19 nt, synthetic construct
  misc_feature 1..19: note = siRNA sense sequence
  source 1..19: mol_type = other RNA
cccgagttggaagattatc

SEQ ID NO: 53339 - RNA, 19 nt, synthetic construct
  misc_feature 1..19: note = siRNA antisense sequence
  source 1..19: mol_type = other RNA
gataatcttccaactcggg

SEQ ID NO: 53340 - RNA, 19 nt, synthetic construct
  misc_feature 1..19: note = siRNA sense sequence
  source 1..19: mol_type = other RNA
ccgagttggaagattatcc

SEQ ID NO: 53341 - RNA, 19 nt, synthetic construct
  misc_feature 1..19: note = siRNA antisense sequence
  source 1..19: mol_type = other RNA
ggataatcttccaactcgg

SEQ ID NO: 53342 - RNA, 19 nt, synthetic construct
  misc_feature 1..19: note = siRNA sense sequence
  source 1..19: mol_type = other RNA
cgagttggaagattatcct

SEQ ID NO: 53343 - RNA, 19 nt, synthetic construct
  misc_feature 1..19: note = siRNA antisense sequence
  source 1..19: mol_type = other RNA
aggataatcttccaactcg

SEQ ID NO: 53344 - RNA, 19 nt, synthetic construct
  misc_feature 1..19: note = siRNA sense sequence
  source 1..19: mol_type = other RNA
gagttggaagattatcctc

SEQ ID NO: 53345 - RNA, 19 nt, synthetic construct
  misc_feature 1..19: note = siRNA antisense sequence
  source 1..19: mol_type = other RNA
gaggataatcttccaactc

SEQ ID NO: 53346 - RNA, 19 nt, synthetic construct
  misc_feature 1..19: note = siRNA sense sequence
  source 1..19: mol_type = other RNA
tggaagattatcctcagat

SEQ ID NO: 53347 - RNA, 19 nt, synthetic construct
  misc_feature 1..19: note = siRNA antisense sequence
  source 1..19: mol_type = other RNA
atctgaggataatcttcca

SEQ ID NO: 53348 - RNA, 19 nt, synthetic construct
  misc_feature 1..19: note = siRNA sense sequence
  source 1..19: mol_type = other RNA
atcctcagatatctggctg

SEQ ID NO: 53349 - RNA, 19 nt, synthetic construct
  misc_feature 1..19: note = siRNA antisense sequence
  source 1..19: mol_type = other RNA
cagccagatatctgaggat

SEQ ID NO: 53350 - RNA, 19 nt, synthetic construct
  misc_feature 1..19: note = siRNA sense sequence
  source 1..19: mol_type = other RNA
tcctcagatatctggctgg

SEQ ID NO: 53351 - RNA, 19 nt, synthetic construct
  misc_feature 1..19: note = siRNA antisense sequence
  source 1..19: mol_type = other RNA
ccagccagatatctgagga

SEQ ID NO: 53352 - RNA, 19 nt, synthetic construct
  misc_feature 1..19: note = siRNA sense sequence
  source 1..19: mol_type = other RNA
cctcagatatctggctgga

SEQ ID NO: 53353 - RNA, 19 nt, synthetic construct
  misc_feature 1..19: note = siRNA antisense sequence
  source 1..19: mol_type = other RNA
tccagccagatatctgagg

SEQ ID NO: 53354 - RNA, 19 nt, synthetic construct
  misc_feature 1..19: note = siRNA sense sequence
  source 1..19: mol_type = other RNA
agatatctggctggacctg

SEQ ID NO: 53355 - RNA, 19 nt, synthetic construct
  misc_feature 1..19: note = siRNA antisense sequence
  source 1..19: mol_type = other RNA
caggtccagccagatatct

SEQ ID NO: 53356 - RNA, 19 nt, synthetic construct
  misc_feature 1..19: note = siRNA sense sequence
  source 1..19: mol_type = other RNA
gatatctggctggacctga

SEQ ID NO: 53357 - RNA, 19 nt, synthetic construct
  misc_feature 1..19: note = siRNA antisense sequence
  source 1..19: mol_type = other RNA
tcaggtccagccagatatc

SEQ ID NO: 53358 - RNA, 19 nt, synthetic construct
  misc_feature 1..19: note = siRNA sense sequence
  source 1..19: mol_type = other RNA
atatctggctggacctgat

SEQ ID NO: 53359 - RNA, 19 nt, synthetic construct
  misc_feature 1..19: note = siRNA antisense sequence
  source 1..19: mol_type = other RNA
atcaggtccagccagatat

SEQ ID NO: 53360 - RNA, 19 nt, synthetic construct
  misc_feature 1..19: note = siRNA sense sequence
  source 1..19: mol_type = other RNA
aacctctcctggatgtggc

SEQ ID NO: 53361 - RNA, 19 nt, synthetic construct
  misc_feature 1..19: note = siRNA antisense sequence
  source 1..19: mol_type = other RNA
gccacatccaggagaggtt

SEQ ID NO: 53362 - RNA, 19 nt, synthetic construct
  misc_feature 1..19: note = siRNA sense sequence
  source 1..19: mol_type = other RNA
acctctcctggatgtggcc

SEQ ID NO: 53363 - RNA, 19 nt, synthetic construct
  misc_feature 1..19: note = siRNA antisense sequence
  source 1..19: mol_type = other RNA
ggccacatccaggagaggt

SEQ ID NO: 53364 - RNA, 19 nt, synthetic construct
  misc_feature 1..19: note = siRNA sense sequence
  source 1..19: mol_type = other RNA
cctctcctggatgtggcca

SEQ ID NO: 53365 - RNA, 19 nt, synthetic construct
  misc_feature 1..19: note = siRNA antisense sequence
  source 1..19: mol_type = other RNA
tggccacatccaggagagg

SEQ ID NO: 53366 - RNA, 19 nt, synthetic construct
  misc_feature 1..19: note = siRNA sense sequence
  source 1..19: mol_type = other RNA
agatgcagtgttgttggct

SEQ ID NO: 53367 - RNA, 19 nt, synthetic construct
  misc_feature 1..19: note = siRNA antisense sequence
  source 1..19: mol_type = other RNA
agccaacaacactgcatct

SEQ ID NO: 53368 - RNA, 19 nt, synthetic construct
  misc_feature 1..19: note = siRNA sense sequence
  source 1..19: mol_type = other RNA
agtgttgttggctttaaag

SEQ ID NO: 53369 - RNA, 19 nt, synthetic construct
  misc_feature 1..19: note = siRNA antisense sequence
  source 1..19: mol_type = other RNA
ctttaaagccaacaacact

SEQ ID NO: 53370 - RNA, 19 nt, synthetic construct
  misc_feature 1..19: note = siRNA sense sequence
  source 1..19: mol_type = other RNA
tgttgttggctttaaagat

SEQ ID NO: 53371 - RNA, 19 nt, synthetic construct
  misc_feature 1..19: note = siRNA antisense sequence
  source 1..19: mol_type = other RNA
atctttaaagccaacaaca

SEQ ID NO: 53372 - RNA, 19 nt, synthetic construct
  misc_feature 1..19: note = siRNA sense sequence
  source 1..19: mol_type = other RNA
agatggctctagagctaca

SEQ ID NO: 53373 - RNA, 19 nt, synthetic construct
  misc_feature 1..19: note = siRNA antisense sequence
  source 1..19: mol_type = other RNA
tgtagctctagagccatct

SEQ ID NO: 53374 - RNA, 19 nt, synthetic construct
  misc_feature 1..19: note = siRNA sense sequence
  source 1..19: mol_type = other RNA
aaccgattctccttgatag

SEQ ID NO: 53375 - RNA, 19 nt, synthetic construct
  misc_feature 1..19: note = siRNA antisense sequence
  source 1..19: mol_type = other RNA
ctatcaaggagaatcggtt

SEQ ID NO: 53376 - RNA, 19 nt, synthetic construct
  misc_feature 1..19: note = siRNA sense sequence
  source 1..19: mol_type = other RNA
accgattctccttgatagg

SEQ ID NO: 53377 - RNA, 19 nt, synthetic construct
  misc_feature 1..19: note = siRNA antisense sequence
  source 1..19: mol_type = other RNA
cctatcaaggagaatcggt

SEQ ID NO: 53378 - RNA, 19 nt, synthetic construct
  misc_feature 1..19: note = siRNA sense sequence
  source 1..19: mol_type = other RNA
ccgattctccttgataggc

SEQ ID NO: 53379 - RNA, 19 nt, synthetic construct
  misc_feature 1..19: note = siRNA antisense sequence
  source 1..19: mol_type = other RNA
gcctatcaaggagaatcgg

SEQ ID NO: 53380 - RNA, 19 nt, synthetic construct
  misc_feature 1..19: note = siRNA sense sequence
  source 1..19: mol_type = other RNA
cgattctccttgataggct

SEQ ID NO: 53381 - RNA, 19 nt, synthetic construct
  misc_feature 1..19: note = siRNA antisense sequence
  source 1..19: mol_type = other RNA
agcctatcaaggagaatcg

SEQ ID NO: 53382 - RNA, 19 nt, synthetic construct
  misc_feature 1..19: note = siRNA sense sequence
  source 1..19: mol_type = other RNA
gattctccttgataggctc

SEQ ID NO: 53383 - RNA, 19 nt, synthetic construct
  misc_feature 1..19: note = siRNA antisense sequence
  source 1..19: mol_type = other RNA
gagcctatcaaggagaatc

SEQ ID NO: 53384 - RNA, 19 nt, synthetic construct
  misc_feature 1..19: note = siRNA sense sequence
  source 1..19: mol_type = other RNA
acactgacctgccaatatc

SEQ ID NO: 53385 - RNA, 19 nt, synthetic construct
  misc_feature 1..19: note = siRNA antisense sequence
  source 1..19: mol_type = other RNA
gatattggcaggtcagtgt

SEQ ID NO: 53386 - RNA, 19 nt, synthetic construct
  misc_feature 1..19: note = siRNA sense sequence
  source 1..19: mol_type = other RNA
cactgacctgccaatatcc

SEQ ID NO: 53387 - RNA, 19 nt, synthetic construct
  misc_feature 1..19: note = siRNA antisense sequence
  source 1..19: mol_type = other RNA
ggatattggcaggtcagtg

SEQ ID NO: 53388 - RNA, 19 nt, synthetic construct
  misc_feature 1..19: note = siRNA sense sequence
  source 1..19: mol_type = other RNA
actgacctgccaatatcct

SEQ ID NO: 53389 - RNA, 19 nt, synthetic construct
  misc_feature 1..19: note = siRNA antisense sequence
  source 1..19: mol_type = other RNA
aggatattggcaggtcagt

SEQ ID NO: 53390 - RNA, 19 nt, synthetic construct
  misc_feature 1..19: note = siRNA sense sequence
  source 1..19: mol_type = other RNA
ctgacctgccaatatcctg

SEQ ID NO: 53391 - RNA, 19 nt, synthetic construct
  misc_feature 1..19: note = siRNA antisense sequence
  source 1..19: mol_type = other RNA
caggatattggcaggtcag

SEQ ID NO: 53392 - RNA, 19 nt, synthetic construct
  misc_feature 1..19: note = siRNA sense sequence
  source 1..19: mol_type = other RNA
tgacctgccaatatcctga

SEQ ID NO: 53393 - RNA, 19 nt, synthetic construct
  misc_feature 1..19: note = siRNA antisense sequence
  source 1..19: mol_type = other RNA
tcaggatattggcaggtca

SEQ ID NO: 53394 - RNA, 19 nt, synthetic construct
  misc_feature 1..19: note = siRNA sense sequence
  source 1..19: mol_type = other RNA
gacctgccaatatcctgat

SEQ ID NO: 53395 - RNA, 19 nt, synthetic construct
  misc_feature 1..19: note = siRNA antisense sequence
  source 1..19: mol_type = other RNA
atcaggatattggcaggtc

SEQ ID NO: 53396 - RNA, 19 nt, synthetic construct
  misc_feature 1..19: note = siRNA sense sequence
  source 1..19: mol_type = other RNA
acctgccaatatcctgatg

SEQ ID NO: 53397 - RNA, 19 nt, synthetic construct
  misc_feature 1..19: note = siRNA antisense sequence
  source 1..19: mol_type = other RNA
catcaggatattggcaggt

SEQ ID NO: 53398 - RNA, 19 nt, synthetic construct
  misc_feature 1..19: note = siRNA sense sequence
  source 1..19: mol_type = other RNA
cctgccaatatcctgatgt

SEQ ID NO: 53399 - RNA, 19 nt, synthetic construct
  misc_feature 1..19: note = siRNA antisense sequence
  source 1..19: mol_type = other RNA
acatcaggatattggcagg

SEQ ID NO: 53400 - RNA, 19 nt, synthetic construct
  misc_feature 1..19: note = siRNA sense sequence
  source 1..19: mol_type = other RNA
tgccaatatcctgatgttt

SEQ ID NO: 53401 - RNA, 19 nt, synthetic construct
  misc_feature 1..19: note = siRNA antisense sequence
  source 1..19: mol_type = other RNA
aaacatcaggatattggca

SEQ ID NO: 53402 - RNA, 19 nt, synthetic construct
  misc_feature 1..19: note = siRNA sense sequence
  source 1..19: mol_type = other RNA
gccaatatcctgatgttta

SEQ ID NO: 53403 - RNA, 19 nt, synthetic construct
  misc_feature 1..19: note = siRNA antisense sequence
  source 1..19: mol_type = other RNA
taaacatcaggatattggc

SEQ ID NO: 53404 - RNA, 19 nt, synthetic construct
  misc_feature 1..19: note = siRNA sense sequence
  source 1..19: mol_type = other RNA
ccaatatcctgatgtttag

SEQ ID NO: 53405 - RNA, 19 nt, synthetic construct
  misc_feature 1..19: note = siRNA antisense sequence
  source 1..19: mol_type = other RNA
ctaaacatcaggatattgg

SEQ ID NO: 53406 - RNA, 19 nt, synthetic construct
  misc_feature 1..19: note = siRNA sense sequence
  source 1..19: mol_type = other RNA
caatatcctgatgtttagt

SEQ ID NO: 53407 - RNA, 19 nt, synthetic construct
  misc_feature 1..19: note = siRNA antisense sequence
  source 1..19: mol_type = other RNA
actaaacatcaggatattg

SEQ ID NO: 53408 - RNA, 19 nt, synthetic construct
  misc_feature 1..19: note = siRNA sense sequence
  source 1..19: mol_type = other RNA
aatatcctgatgtttagtc

SEQ ID NO: 53409 - RNA, 19 nt, synthetic construct
  misc_feature 1..19: note = siRNA antisense sequence
  source 1..19: mol_type = other RNA
gactaaacatcaggatatt

SEQ ID NO: 53410 - RNA, 19 nt, synthetic construct
  misc_feature 1..19: note = siRNA sense sequence
  source 1..19: mol_type = other RNA
atatcctgatgtttagtcc

SEQ ID NO: 53411 - RNA, 19 nt, synthetic construct
  misc_feature 1..19: note = siRNA antisense sequence
  source 1..19: mol_type = other RNA
ggactaaacatcaggatat

SEQ ID NO: 53412 - RNA, 19 nt, synthetic construct
  misc_feature 1..19: note = siRNA sense sequence
  source 1..19: mol_type = other RNA
tatcctgatgtttagtcca

SEQ ID NO: 53413 - RNA, 19 nt, synthetic construct
  misc_feature 1..19: note = siRNA antisense sequence
  source 1..19: mol_type = other RNA
tggactaaacatcaggata

SEQ ID NO: 53414 - RNA, 19 nt, synthetic construct
  misc_feature 1..19: note = siRNA sense sequence
  source 1..19: mol_type = other RNA
ctgatgtttagtccaggaa

SEQ ID NO: 53415 - RNA, 19 nt, synthetic construct
  misc_feature 1..19: note = siRNA antisense sequence
  source 1..19: mol_type = other RNA
ttcctggactaaacatcag

SEQ ID NO: 53416 - RNA, 19 nt, synthetic construct
  misc_feature 1..19: note = siRNA sense sequence
  source 1..19: mol_type = other RNA
tgatgtttagtccaggaag

SEQ ID NO: 53417 - RNA, 19 nt, synthetic construct
  misc_feature 1..19: note = siRNA antisense sequence
  source 1..19: mol_type = other RNA
cttcctggactaaacatca

SEQ ID NO: 53418 - RNA, 19 nt, synthetic construct
  misc_feature 1..19: note = siRNA sense sequence
  source 1..19: mol_type = other RNA
gatgtttagtccaggaagc

SEQ ID NO: 53419 - RNA, 19 nt, synthetic construct
  misc_feature 1..19: note = siRNA antisense sequence
  source 1..19: mol_type = other RNA
gcttcctggactaaacatc

SEQ ID NO: 53420 - RNA, 19 nt, synthetic construct
  misc_feature 1..19: note = siRNA sense sequence
  source 1..19: mol_type = other RNA
atgtttagtccaggaagct

SEQ ID NO: 53421 - RNA, 19 nt, synthetic construct
  misc_feature 1..19: note = siRNA antisense sequence
  source 1..19: mol_type = other RNA
agcttcctggactaaacat

SEQ ID NO: 53422 - RNA, 19 nt, synthetic construct
  misc_feature 1..19: note = siRNA sense sequence
  source 1..19: mol_type = other RNA
ttagtccaggaagctctat

SEQ ID NO: 53423 - RNA, 19 nt, synthetic construct
  misc_feature 1..19: note = siRNA antisense sequence
  source 1..19: mol_type = other RNA
atagagcttcctggactaa

SEQ ID NO: 53424 - RNA, 19 nt, synthetic construct
  misc_feature 1..19: note = siRNA sense sequence
  source 1..19: mol_type = other RNA
tagtccaggaagctctatg

SEQ ID NO: 53425 - RNA, 19 nt, synthetic construct
  misc_feature 1..19: note = siRNA antisense sequence
  source 1..19: mol_type = other RNA
catagagcttcctggacta

SEQ ID NO: 53426 - RNA, 19 nt, synthetic construct
  misc_feature 1..19: note = siRNA sense sequence
  source 1..19: mol_type = other RNA
agtccaggaagctctatgc

SEQ ID NO: 53427 - RNA, 19 nt, synthetic construct
  misc_feature 1..19: note = siRNA antisense sequence
  source 1..19: mol_type = other RNA
gcatagagcttcctggact

SEQ ID NO: 53428 - RNA, 19 nt, synthetic construct
  misc_feature 1..19: note = siRNA sense sequence
  source 1..19: mol_type = other RNA
gtccaggaagctctatgcc

SEQ ID NO: 53429 - RNA, 19 nt, synthetic construct
  misc_feature 1..19: note = siRNA antisense sequence
  source 1..19: mol_type = other RNA
ggcatagagcttcctggac

SEQ ID NO: 53430 - RNA, 19 nt, synthetic construct
  misc_feature 1..19: note = siRNA sense sequence
  source 1..19: mol_type = other RNA
tccaggaagctctatgcca

SEQ ID NO: 53431 - RNA, 19 nt, synthetic construct
  misc_feature 1..19: note = siRNA antisense sequence
  source 1..19: mol_type = other RNA
tggcatagagcttcctgga

SEQ ID NO: 53432 - RNA, 19 nt, synthetic construct
  misc_feature 1..19: note = siRNA sense sequence
  source 1..19: mol_type = other RNA
caggaagctctatgccaga

SEQ ID NO: 53433 - RNA, 19 nt, synthetic construct
  misc_feature 1..19: note = siRNA antisense sequence
  source 1..19: mol_type = other RNA
tctggcatagagcttcctg

SEQ ID NO: 53434 - RNA, 19 nt, synthetic construct
  misc_feature 1..19: note = siRNA sense sequence
  source 1..19: mol_type = other RNA
gaagctctatgccagactt

SEQ ID NO: 53435 - RNA, 19 nt, synthetic construct
  misc_feature 1..19: note = siRNA antisense sequence
  source 1..19: mol_type = other RNA
aagtctggcatagagcttc

SEQ ID NO: 53436 - RNA, 19 nt, synthetic construct
  misc_feature 1..19: note = siRNA sense sequence
  source 1..19: mol_type = other RNA
aagctctatgccagacttc

SEQ ID NO: 53437 - RNA, 19 nt, synthetic construct
  misc_feature 1..19: note = siRNA antisense sequence
  source 1..19: mol_type = other RNA
gaagtctggcatagagctt

SEQ ID NO: 53438 - RNA, 19 nt, synthetic construct
  misc_feature 1..19: note = siRNA sense sequence
  source 1..19: mol_type = other RNA
agctctatgccagacttct

SEQ ID NO: 53439 - RNA, 19 nt, synthetic construct
  misc_feature 1..19: note = siRNA antisense sequence
  source 1..19: mol_type = other RNA
agaagtctggcatagagct

SEQ ID NO: 53440 - RNA, 19 nt, synthetic construct
  misc_feature 1..19: note = siRNA sense sequence
  source 1..19: mol_type = other RNA
gctctatgccagacttcta

SEQ ID NO: 53441 - RNA, 19 nt, synthetic construct
  misc_feature 1..19: note = siRNA antisense sequence
  source 1..19: mol_type = other RNA
tagaagtctggcatagagc

SEQ ID NO: 53442 - RNA, 19 nt, synthetic construct
  misc_feature 1..19: note = siRNA sense sequence
  source 1..19: mol_type = other RNA
ctctatgccagacttctaa

SEQ ID NO: 53443 - RNA, 19 nt, synthetic construct
  misc_feature 1..19: note = siRNA antisense sequence
  source 1..19: mol_type = other RNA
ttagaagtctggcatagag

SEQ ID NO: 53444 - RNA, 19 nt, synthetic construct
  misc_feature 1..19: note = siRNA sense sequence
  source 1..19: mol_type = other RNA
tctatgccagacttctaat

SEQ ID NO: 53445 - RNA, 19 nt, synthetic construct
  misc_feature 1..19: note = siRNA antisense sequence
  source 1..19: mol_type = other RNA
attagaagtctggcataga

SEQ ID NO: 53446 - RNA, 19 nt, synthetic construct
  misc_feature 1..19: note = siRNA sense sequence
  source 1..19: mol_type = other RNA
ctatgccagacttctaata

SEQ ID NO: 53447 - RNA, 19 nt, synthetic construct
  misc_feature 1..19: note = siRNA antisense sequence
  source 1..19: mol_type = other RNA
tattagaagtctggcatag

SEQ ID NO: 53448 - RNA, 19 nt, synthetic construct
  misc_feature 1..19: note = siRNA sense sequence
  source 1..19: mol_type = other RNA
tatgccagacttctaataa

SEQ ID NO: 53449 - RNA, 19 nt, synthetic construct
  misc_feature 1..19: note = siRNA antisense sequence
  source 1..19: mol_type = other RNA
ttattagaagtctggcata

SEQ ID NO: 53450 - RNA, 19 nt, synthetic construct
  misc_feature 1..19: note = siRNA sense sequence
  source 1..19: mol_type = other RNA
atgccagacttctaataaa

SEQ ID NO: 53451 - RNA, 19 nt, synthetic construct
  misc_feature 1..19: note = siRNA antisense sequence
  source 1..19: mol_type = other RNA
tttattagaagtctggcat

SEQ ID NO: 53452 - RNA, 19 nt, synthetic construct
  misc_feature 1..19: note = siRNA sense sequence
  source 1..19: mol_type = other RNA
agttcatgatgctttaagc

SEQ ID NO: 53453 - RNA, 19 nt, synthetic construct
  misc_feature 1..19: note = siRNA antisense sequence
  source 1..19: mol_type = other RNA
gcttaaagcatcatgaact

SEQ ID NO: 53454 - RNA, 19 nt, synthetic construct
  misc_feature 1..19: note = siRNA sense sequence
  source 1..19: mol_type = other RNA
gttcatgatgctttaagcc

SEQ ID NO: 53455 - RNA, 19 nt, synthetic construct
  misc_feature 1..19: note = siRNA antisense sequence
  source 1..19: mol_type = other RNA
ggcttaaagcatcatgaac

SEQ ID NO: 53456 - RNA, 19 nt, synthetic construct
  misc_feature 1..19: note = siRNA sense sequence
  source 1..19: mol_type = other RNA
ttcatgatgctttaagcca

SEQ ID NO: 53457 - RNA, 19 nt, synthetic construct
  misc_feature 1..19: note = siRNA antisense sequence
  source 1..19: mol_type = other RNA
tggcttaaagcatcatgaa

SEQ ID NO: 53458 - RNA, 19 nt, synthetic construct
  misc_feature 1..19: note = siRNA sense sequence
  source 1..19: mol_type = other RNA
tcatgatgctttaagccac

SEQ ID NO: 53459 - RNA, 19 nt, synthetic construct
  misc_feature 1..19: note = siRNA antisense sequence
  source 1..19: mol_type = other RNA
gtggcttaaagcatcatga

SEQ ID NO: 53460 - RNA, 19 nt, synthetic construct
  misc_feature 1..19: note = siRNA sense sequence
  source 1..19: mol_type = other RNA
catgatgctttaagccacc

SEQ ID NO: 53461 - RNA, 19 nt, synthetic construct
  misc_feature 1..19: note = siRNA antisense sequence
  source 1..19: mol_type = other RNA
ggtggcttaaagcatcatg

SEQ ID NO: 53462 - RNA, 19 nt, synthetic construct
  misc_feature 1..19: note = siRNA sense sequence
  source 1..19: mol_type = other RNA
atgatgctttaagccacca

SEQ ID NO: 53463 - RNA, 19 nt, synthetic construct
  misc_feature 1..19: note = siRNA antisense sequence
  source 1..19: mol_type = other RNA
tggtggcttaaagcatcat

SEQ ID NO: 53464 - RNA, 19 nt, synthetic construct
  misc_feature 1..19: note = siRNA sense sequence
  source 1..19: mol_type = other RNA
aatagtagctgacattagt

SEQ ID NO: 53465 - RNA, 19 nt, synthetic construct
  misc_feature 1..19: note = siRNA antisense sequence
  source 1..19: mol_type = other RNA
actaatgtcagctactatt

SEQ ID NO: 53466 - RNA, 19 nt, synthetic construct
  misc_feature 1..19: note = siRNA sense sequence
  source 1..19: mol_type = other RNA
atagtagctgacattagta

SEQ ID NO: 53467 - RNA, 19 nt, synthetic construct
  misc_feature 1..19: note = siRNA antisense sequence
  source 1..19: mol_type = other RNA
tactaatgtcagctactat

SEQ ID NO: 53468 - RNA, 19 nt, synthetic construct
  misc_feature 1..19: note = siRNA sense sequence
  source 1..19: mol_type = other RNA
tagtagctgacattagtac

SEQ ID NO: 53469 - RNA, 19 nt, synthetic construct
  misc_feature 1..19: note = siRNA antisense sequence
  source 1..19: mol_type = other RNA
gtactaatgtcagctacta

SEQ ID NO: 53470 - RNA, 19 nt, synthetic construct
  misc_feature 1..19: note = siRNA sense sequence
  source 1..19: mol_type = other RNA
gtagctgacattagtacta

SEQ ID NO: 53471 - RNA, 19 nt, synthetic construct
  misc_feature 1..19: note = siRNA antisense sequence
  source 1..19: mol_type = other RNA
tagtactaatgtcagctac

SEQ ID NO: 53472 - RNA, 19 nt, synthetic construct
  misc_feature 1..19: note = siRNA sense sequence
  source 1..19: mol_type = other RNA
tagctgacattagtactat

SEQ ID NO: 53473 - RNA, 19 nt, synthetic construct
  misc_feature 1..19: note = siRNA antisense sequence
  source 1..19: mol_type = other RNA
atagtactaatgtcagcta

SEQ ID NO: 53474 - RNA, 19 nt, synthetic construct
  misc_feature 1..19: note = siRNA sense sequence
  source 1..19: mol_type = other RNA
agctgacattagtactatt

SEQ ID NO: 53475 - RNA, 19 nt, synthetic construct
  misc_feature 1..19: note = siRNA antisense sequence
  source 1..19: mol_type = other RNA
aatagtactaatgtcagct

SEQ ID NO: 53476 - RNA, 19 nt, synthetic construct
  misc_feature 1..19: note = siRNA sense sequence
  source 1..19: mol_type = other RNA
gctgacattagtactatta

SEQ ID NO: 53477 - RNA, 19 nt, synthetic construct
  misc_feature 1..19: note = siRNA antisense sequence
  source 1..19: mol_type = other RNA
taatagtactaatgtcagc

SEQ ID NO: 53478 - RNA, 19 nt, synthetic construct
  misc_feature 1..19: note = siRNA sense sequence
  source 1..19: mol_type = other RNA
ctgacattagtactattac

SEQ ID NO: 53479 - RNA, 19 nt, synthetic construct
  misc_feature 1..19: note = siRNA antisense sequence
  source 1..19: mol_type = other RNA
gtaatagtactaatgtcag

SEQ ID NO: 53480 - RNA, 19 nt, synthetic construct
  misc_feature 1..19: note = siRNA sense sequence
  source 1..19: mol_type = other RNA
atttaaagacactgtgtga

SEQ ID NO: 53481 - RNA, 19 nt, synthetic construct
  misc_feature 1..19: note = siRNA antisense sequence
  source 1..19: mol_type = other RNA
tcacacagtgtctttaaat

SEQ ID NO: 53482 - RNA, 19 nt, synthetic construct
  misc_feature 1..19: note = siRNA sense sequence
  source 1..19: mol_type = other RNA
tttaaagacactgtgtgaa

SEQ ID NO: 53483 - RNA, 19 nt, synthetic construct
  misc_feature 1..19: note = siRNA antisense sequence
  source 1..19: mol_type = other RNA
ttcacacagtgtctttaaa

SEQ ID NO: 53484 - RNA, 19 nt, synthetic construct
  misc_feature 1..19: note = siRNA sense sequence
  source 1..19: mol_type = other RNA
ttaaagacactgtgtgaag

SEQ ID NO: 53485 - RNA, 19 nt, synthetic construct
  misc_feature 1..19: note = siRNA antisense sequence
  source 1..19: mol_type = other RNA
cttcacacagtgtctttaa

SEQ ID NO: 53486 - RNA, 19 nt, synthetic construct
  misc_feature 1..19: note = siRNA sense sequence
  source 1..19: mol_type = other RNA
taaagacactgtgtgaagt

SEQ ID NO: 53487 - RNA, 19 nt, synthetic construct
  misc_feature 1..19: note = siRNA antisense sequence
  source 1..19: mol_type = other RNA
acttcacacagtgtcttta

SEQ ID NO: 53488 - RNA, 19 nt, synthetic construct
  misc_feature 1..19: note = siRNA sense sequence
  source 1..19: mol_type = other RNA
aaagacactgtgtgaagtc

SEQ ID NO: 53489 - RNA, 19 nt, synthetic construct
  misc_feature 1..19: note = siRNA antisense sequence
  source 1..19: mol_type = other RNA
gacttcacacagtgtcttt

SEQ ID NO: 53490 - RNA, 19 nt, synthetic construct
  misc_feature 1..19: note = siRNA sense sequence
  source 1..19: mol_type = other RNA
aagacactgtgtgaagtcc

SEQ ID NO: 53491 - RNA, 19 nt, synthetic construct
  misc_feature 1..19: note = siRNA antisense sequence
  source 1..19: mol_type = other RNA
ggacttcacacagtgtctt

SEQ ID NO: 53492 - RNA, 19 nt, synthetic construct
  misc_feature 1..19: note = siRNA sense sequence
  source 1..19: mol_type = other RNA
agacactgtgtgaagtcca

SEQ ID NO: 53493 - RNA, 19 nt, synthetic construct
  misc_feature 1..19: note = siRNA antisense sequence
  source 1..19: mol_type = other RNA
tggacttcacacagtgtct

SEQ ID NO: 53494 - RNA, 19 nt, synthetic construct
  misc_feature 1..19: note = siRNA sense sequence
  source 1..19: mol_type = other RNA
gtgtatgatattgttgcca

SEQ ID NO: 53495 - RNA, 19 nt, synthetic construct
  misc_feature 1..19: note = siRNA antisense sequence
  source 1..19: mol_type = other RNA
tggcaacaatatcatacac

SEQ ID NO: 53496 - RNA, 19 nt, synthetic construct
  misc_feature 1..19: note = siRNA sense sequence
  source 1..19: mol_type = other RNA
tgtatgatattgttgccac

SEQ ID NO: 53497 - RNA, 19 nt, synthetic construct
  misc_feature 1..19: note = siRNA antisense sequence
  source 1..19: mol_type = other RNA
gtggcaacaatatcataca

SEQ ID NO: 53498 - RNA, 19 nt, synthetic construct
  misc_feature 1..19: note = siRNA sense sequence
  source 1..19: mol_type = other RNA
gtatgatattgttgccact

SEQ ID NO: 53499 - RNA, 19 nt, synthetic construct
  misc_feature 1..19: note = siRNA antisense sequence
  source 1..19: mol_type = other RNA
agtggcaacaatatcatac

SEQ ID NO: 53500 - RNA, 19 nt, synthetic construct
  misc_feature 1..19: note = siRNA sense sequence
  source 1..19: mol_type = other RNA
tatgatattgttgccactc

SEQ ID NO: 53501 - RNA, 19 nt, synthetic construct
  misc_feature 1..19: note = siRNA antisense sequence
  source 1..19: mol_type = other RNA
gagtggcaacaatatcata

SEQ ID NO: 53502 - RNA, 19 nt, synthetic construct
  misc_feature 1..19: note = siRNA sense sequence
  source 1..19: mol_type = other RNA
tgatattgttgccactctt

SEQ ID NO: 53503 - RNA, 19 nt, synthetic construct
  misc_feature 1..19: note = siRNA antisense sequence
  source 1..19: mol_type = other RNA
aagagtggcaacaatatca

SEQ ID NO: 53504 - RNA, 19 nt, synthetic construct
  misc_feature 1..19: note = siRNA sense sequence
  source 1..19: mol_type = other RNA
gatattgttgccactctta

SEQ ID NO: 53505 - RNA, 19 nt, synthetic construct
  misc_feature 1..19: note = siRNA antisense sequence
  source 1..19: mol_type = other RNA
taagagtggcaacaatatc

SEQ ID NO: 53506 - RNA, 19 nt, synthetic construct
  misc_feature 1..19: note = siRNA sense sequence
  source 1..19: mol_type = other RNA
atattgttgccactcttag

SEQ ID NO: 53507 - RNA, 19 nt, synthetic construct
  misc_feature 1..19: note = siRNA antisense sequence
  source 1..19: mol_type = other RNA
ctaagagtggcaacaatat

SEQ ID NO: 53508 - RNA, 19 nt, synthetic construct
  misc_feature 1..19: note = siRNA sense sequence
  source 1..19: mol_type = other RNA
tattgttgccactcttagg

SEQ ID NO: 53509 - RNA, 19 nt, synthetic construct
  misc_feature 1..19: note = siRNA antisense sequence
  source 1..19: mol_type = other RNA
cctaagagtggcaacaata

SEQ ID NO: 53510 - RNA, 19 nt, synthetic construct
  misc_feature 1..19: note = siRNA sense sequence
  source 1..19: mol_type = other RNA
attgttgccactcttagga

SEQ ID NO: 53511 - RNA, 19 nt, synthetic construct
  misc_feature 1..19: note = siRNA antisense sequence
  source 1..19: mol_type = other RNA
tcctaagagtggcaacaat

SEQ ID NO: 53512 - RNA, 19 nt, synthetic construct
  misc_feature 1..19: note = siRNA sense sequence
  source 1..19: mol_type = other RNA
ttgccactcttaggaagcc

SEQ ID NO: 53513 - RNA, 19 nt, synthetic construct
  misc_feature 1..19: note = siRNA antisense sequence
  source 1..19: mol_type = other RNA
ggcttcctaagagtggcaa

SEQ ID NO: 53514 - RNA, 19 nt, synthetic construct
  misc_feature 1..19: note = siRNA sense sequence
  source 1..19: mol_type = other RNA
ctaaatttgtcattcccaa

SEQ ID NO: 53515 - RNA, 19 nt, synthetic construct
  misc_feature 1..19: note = siRNA antisense sequence
  source 1..19: mol_type = other RNA
ttgggaatgacaaatttag

SEQ ID NO: 53516 - RNA, 19 nt, synthetic construct
  misc_feature 1..19: note = siRNA sense sequence
  source 1..19: mol_type = other RNA
gcttaaagcagatgtggag

SEQ ID NO: 53517 - RNA, 19 nt, synthetic construct
  misc_feature 1..19: note = siRNA antisense sequence
  source 1..19: mol_type = other RNA
ctccacatctgctttaagc

SEQ ID NO: 53518 - RNA, 19 nt, synthetic construct
  misc_feature 1..19: note = siRNA sense sequence
  source 1..19: mol_type = other RNA
gaattcaacttaaagatgc

SEQ ID NO: 53519 - RNA, 19 nt, synthetic construct
  misc_feature 1..19: note = siRNA antisense sequence
  source 1..19: mol_type = other RNA
gcatctttaagttgaattc

SEQ ID NO: 53520 - RNA, 19 nt, synthetic construct
  misc_feature 1..19: note = siRNA sense sequence
  source 1..19: mol_type = other RNA
aattcaacttaaagatgcc

SEQ ID NO: 53521 - RNA, 19 nt, synthetic construct
  misc_feature 1..19: note = siRNA antisense sequence
  source 1..19: mol_type = other RNA
ggcatctttaagttgaatt

SEQ ID NO: 53522 - RNA, 19 nt, synthetic construct
  misc_feature 1..19: note = siRNA sense sequence
  source 1..19: mol_type = other RNA
ttcaacttaaagatgccac

SEQ ID NO: 53523 - RNA, 19 nt, synthetic construct
  misc_feature 1..19: note = siRNA antisense sequence
  source 1..19: mol_type = other RNA
gtggcatctttaagttgaa

SEQ ID NO: 53524 - RNA, 19 nt, synthetic construct
  misc_feature 1..19: note = siRNA sense sequence
  source 1..19: mol_type = other RNA
tcaacttaaagatgccact

SEQ ID NO: 53525 - RNA, 19 nt, synthetic construct
  misc_feature 1..19: note = siRNA antisense sequence
  source 1..19: mol_type = other RNA
agtggcatctttaagttga

SEQ ID NO: 53526 - RNA, 19 nt, synthetic construct
  misc_feature 1..19: note = siRNA sense sequence
  source 1..19: mol_type = other RNA
cttaaagatgccactgcaa

SEQ ID NO: 53527 - RNA, 19 nt, synthetic construct
  misc_feature 1..19: note = siRNA antisense sequence
  source 1..19: mol_type = other RNA
ttgcagtggcatctttaag

SEQ ID NO: 53528 - RNA, 19 nt, synthetic construct
  misc_feature 1..19: note = siRNA sense sequence
  source 1..19: mol_type = other RNA
ttaaagatgccactgcaag

SEQ ID NO: 53529 - RNA, 19 nt, synthetic construct
  misc_feature 1..19: note = siRNA antisense sequence
  source 1..19: mol_type = other RNA
cttgcagtggcatctttaa

SEQ ID NO: 53530 - RNA, 19 nt, synthetic construct
  misc_feature 1..19: note = siRNA sense sequence
  source 1..19: mol_type = other RNA
taaagatgccactgcaagt

SEQ ID NO: 53531 - RNA, 19 nt, synthetic construct
  misc_feature 1..19: note = siRNA antisense sequence
  source 1..19: mol_type = other RNA
acttgcagtggcatcttta

SEQ ID NO: 53532 - RNA, 19 nt, synthetic construct
  misc_feature 1..19: note = siRNA sense sequence
  source 1..19: mol_type = other RNA
aaagatgccactgcaagta

SEQ ID NO: 53533 - RNA, 19 nt, synthetic construct
  misc_feature 1..19: note = siRNA antisense sequence
  source 1..19: mol_type = other RNA
tacttgcagtggcatcttt

SEQ ID NO: 53534 - RNA, 19 nt, synthetic construct
  misc_feature 1..19: note = siRNA sense sequence
  source 1..19: mol_type = other RNA
aagatgccactgcaagtaa

SEQ ID NO: 53535 - RNA, 19 nt, synthetic construct
  misc_feature 1..19: note = siRNA antisense sequence
  source 1..19: mol_type = other RNA
ttacttgcagtggcatctt

SEQ ID NO: 53536 - RNA, 19 nt, synthetic construct
  misc_feature 1..19: note = siRNA sense sequence
  source 1..19: mol_type = other RNA
agatgccactgcaagtaag

SEQ ID NO: 53537 - RNA, 19 nt, synthetic construct
  misc_feature 1..19: note = siRNA antisense sequence
  source 1..19: mol_type = other RNA
cttacttgcagtggcatct

SEQ ID NO: 53538 - RNA, 19 nt, synthetic construct
  misc_feature 1..19: note = siRNA sense sequence
  source 1..19: mol_type = other RNA
gatgccactgcaagtaaga

SEQ ID NO: 53539 - RNA, 19 nt, synthetic construct
  misc_feature 1..19: note = siRNA antisense sequence
  source 1..19: mol_type = other RNA
tcttacttgcagtggcatc

SEQ ID NO: 53540 - RNA, 19 nt, synthetic construct
  misc_feature 1..19: note = siRNA sense sequence
  source 1..19: mol_type = other RNA
atgccactgcaagtaagaa

SEQ ID NO: 53541 - RNA, 19 nt, synthetic construct
  misc_feature 1..19: note = siRNA antisense sequence
  source 1..19: mol_type = other RNA
ttcttacttgcagtggcat

SEQ ID NO: 53542 - RNA, 19 nt, synthetic construct
  misc_feature 1..19: note = siRNA sense sequence
  source 1..19: mol_type = other RNA
gaatcttatttctgagcac

SEQ ID NO: 53543 - RNA, 19 nt, synthetic construct
  misc_feature 1..19: note = siRNA antisense sequence
  source 1..19: mol_type = other RNA
gtgctcagaaataagattc

SEQ ID NO: 53544 - RNA, 19 nt, synthetic construct
  misc_feature 1..19: note = siRNA sense sequence
  source 1..19: mol_type = other RNA
cttatttctgagcacagta

SEQ ID NO: 53545 - RNA, 19 nt, synthetic construct
  misc_feature 1..19: note = siRNA antisense sequence
  source 1..19: mol_type = other RNA
tactgtgctcagaaataag

SEQ ID NO: 53546 - RNA, 19 nt, synthetic construct
  misc_feature 1..19: note = siRNA sense sequence
  source 1..19: mol_type = other RNA
ttatttctgagcacagtat

SEQ ID NO: 53547 - RNA, 19 nt, synthetic construct
  misc_feature 1..19: note = siRNA antisense sequence
  source 1..19: mol_type = other RNA
atactgtgctcagaaataa

SEQ ID NO: 53548 - RNA, 19 nt, synthetic construct
  misc_feature 1..19: note = siRNA sense sequence
  source 1..19: mol_type = other RNA
ttctgagcacagtatttat

SEQ ID NO: 53549 - RNA, 19 nt, synthetic construct
  misc_feature 1..19: note = siRNA antisense sequence
  source 1..19: mol_type = other RNA
ataaatactgtgctcagaa

SEQ ID NO: 53550 - RNA, 19 nt, synthetic construct
  misc_feature 1..19: note = siRNA sense sequence
  source 1..19: mol_type = other RNA
aatatatgacttctctctg

SEQ ID NO: 53551 - RNA, 19 nt, synthetic construct
  misc_feature 1..19: note = siRNA antisense sequence
  source 1..19: mol_type = other RNA
cagagagaagtcatatatt

SEQ ID NO: 53552 - RNA, 19 nt, synthetic construct
  misc_feature 1..19: note = siRNA sense sequence
  source 1..19: mol_type = other RNA
tatatgacttctctctgtc

SEQ ID NO: 53553 - RNA, 19 nt, synthetic construct
  misc_feature 1..19: note = siRNA antisense sequence
  source 1..19: mol_type = other RNA
gacagagagaagtcatata

SEQ ID NO: 53554 - RNA, 19 nt, synthetic construct
  misc_feature 1..19: note = siRNA sense sequence
  source 1..19: mol_type = other RNA
atatgacttctctctgtcc

SEQ ID NO: 53555 - RNA, 19 nt, synthetic construct
  misc_feature 1..19: note = siRNA antisense sequence
  source 1..19: mol_type = other RNA
ggacagagagaagtcatat

SEQ ID NO: 53556 - RNA, 19 nt, synthetic construct
  misc_feature 1..19: note = siRNA sense sequence
  source 1..19: mol_type = other RNA
atgacttctctctgtccaa

SEQ ID NO: 53557 - RNA, 19 nt, synthetic construct
  misc_feature 1..19: note = siRNA antisense sequence
  source 1..19: mol_type = other RNA
ttggacagagagaagtcat

SEQ ID NO: 53558 - RNA, 19 nt, synthetic construct
  misc_feature 1..19: note = siRNA sense sequence
  source 1..19: mol_type = other RNA
gacttctctctgtccaaaa

SEQ ID NO: 53559 - RNA, 19 nt, synthetic construct
  misc_feature 1..19: note = siRNA antisense sequence
  source 1..19: mol_type = other RNA
ttttggacagagagaagtc

SEQ ID NO: 53560 - RNA, 19 nt, synthetic construct
  misc_feature 1..19: note = siRNA sense sequence
  source 1..19: mol_type = other RNA
ttttgggtatgttttctac

SEQ ID NO: 53561 - RNA, 19 nt, synthetic construct
  misc_feature 1..19: note = siRNA antisense sequence
  source 1..19: mol_type = other RNA
gtagaaaacatacccaaaa

SEQ ID NO: 53562 - RNA, 19 nt, synthetic construct
  misc_feature 1..19: note = siRNA sense sequence
  source 1..19: mol_type = other RNA
tttgggtatgttttctaca

SEQ ID NO: 53563 - RNA, 19 nt, synthetic construct
  misc_feature 1..19: note = siRNA antisense sequence
  source 1..19: mol_type = other RNA
tgtagaaaacatacccaaa

SEQ ID NO: 53564 - RNA, 19 nt, synthetic construct
  misc_feature 1..19: note = siRNA sense sequence
  source 1..19: mol_type = other RNA
ttgggtatgttttctacag

SEQ ID NO: 53565 - RNA, 19 nt, synthetic construct
  misc_feature 1..19: note = siRNA antisense sequence
  source 1..19: mol_type = other RNA
ctgtagaaaacatacccaa

SEQ ID NO: 53566 - RNA, 19 nt, synthetic construct
  misc_feature 1..19: note = siRNA sense sequence
  source 1..19: mol_type = other RNA
tgggtatgttttctacagt

SEQ ID NO: 53567 - RNA, 19 nt, synthetic construct
  misc_feature 1..19: note = siRNA antisense sequence
  source 1..19: mol_type = other RNA
actgtagaaaacataccca

SEQ ID NO: 53568 - RNA, 19 nt, synthetic construct
  misc_feature 1..19: note = siRNA sense sequence
  source 1..19: mol_type = other RNA
gggtatgttttctacagtg

SEQ ID NO: 53569 - RNA, 19 nt, synthetic construct
  misc_feature 1..19: note = siRNA antisense sequence
  source 1..19: mol_type = other RNA
cactgtagaaaacataccc

SEQ ID NO: 53570 - RNA, 19 nt, synthetic construct
  misc_feature 1..19: note = siRNA sense sequence
  source 1..19: mol_type = other RNA
ggtatgttttctacagtgt

SEQ ID NO: 53571 - RNA, 19 nt, synthetic construct
  misc_feature 1..19: note = siRNA antisense sequence
  source 1..19: mol_type = other RNA
acactgtagaaaacatacc

SEQ ID NO: 53572 - RNA, 19 nt, synthetic construct
  misc_feature 1..19: note = siRNA sense sequence
  source 1..19: mol_type = other RNA
gtatgttttctacagtgtg

SEQ ID NO: 53573 - RNA, 19 nt, synthetic construct
  misc_feature 1..19: note = siRNA antisense sequence
  source 1..19: mol_type = other RNA
cacactgtagaaaacatac

SEQ ID NO: 53574 - RNA, 19 nt, synthetic construct
  misc_feature 1..19: note = siRNA sense sequence
  source 1..19: mol_type = other RNA
atgttttctacagtgtgct

SEQ ID NO: 53575 - RNA, 19 nt, synthetic construct
  misc_feature 1..19: note = siRNA antisense sequence
  source 1..19: mol_type = other RNA
agcacactgtagaaaacat

SEQ ID NO: 53576 - RNA, 19 nt, synthetic construct
  misc_feature 1..19: note = siRNA sense sequence
  source 1..19: mol_type = other RNA
atttcattagcttactcac

SEQ ID NO: 53577 - RNA, 19 nt, synthetic construct
  misc_feature 1..19: note = siRNA antisense sequence
  source 1..19: mol_type = other RNA
gtgagtaagctaatgaaat

SEQ ID NO: 53578 - RNA, 19 nt, synthetic construct
  misc_feature 1..19: note = siRNA sense sequence
  source 1..19: mol_type = other RNA
tttcattagcttactcaca

SEQ ID NO: 53579 - RNA, 19 nt, synthetic construct
  misc_feature 1..19: note = siRNA antisense sequence
  source 1..19: mol_type = other RNA
tgtgagtaagctaatgaaa

SEQ ID NO: 53580 - RNA, 19 nt, synthetic construct
  misc_feature 1..19: note = siRNA sense sequence
  source 1..19: mol_type = other RNA
caagtgagggtatatgaca

SEQ ID NO: 53581 - RNA, 19 nt, synthetic construct
  misc_feature 1..19: note = siRNA antisense sequence
  source 1..19: mol_type = other RNA
tgtcatataccctcacttg

SEQ ID NO: 53582 - RNA, 19 nt, synthetic construct
  misc_feature 1..19: note = siRNA sense sequence
  source 1..19: mol_type = other RNA
aagtgagggtatatgacat

SEQ ID NO: 53583 - RNA, 19 nt, synthetic construct
  misc_feature 1..19: note = siRNA antisense sequence
  source 1..19: mol_type = other RNA
atgtcatataccctcactt

SEQ ID NO: 53584 - RNA, 19 nt, synthetic construct
  misc_feature 1..19: note = siRNA sense sequence
  source 1..19: mol_type = other RNA
agtgagggtatatgacatt

SEQ ID NO: 53585 - RNA, 19 nt, synthetic construct
  misc_feature 1..19: note = siRNA antisense sequence
  source 1..19: mol_type = other RNA
aatgtcatataccctcact

SEQ ID NO: 53586 - RNA, 19 nt, synthetic construct
  misc_feature 1..19: note = siRNA sense sequence
  source 1..19: mol_type = other RNA
gtgagggtatatgacattt

SEQ ID NO: 53587 - RNA, 19 nt, synthetic construct
  misc_feature 1..19: note = siRNA antisense sequence
  source 1..19: mol_type = other RNA
aaatgtcatataccctcac

SEQ ID NO: 53588 - RNA, 19 nt, synthetic construct
  misc_feature 1..19: note = siRNA sense sequence
  source 1..19: mol_type = other RNA
tgagggtatatgacatttt

SEQ ID NO: 53589 - RNA, 19 nt, synthetic construct
  misc_feature 1..19: note = siRNA antisense sequence
  source 1..19: mol_type = other RNA
aaaatgtcatataccctca

SEQ ID NO: 53590 - RNA, 19 nt, synthetic construct
  misc_feature 1..19: note = siRNA sense sequence
  source 1..19: mol_type = other RNA
gagggtatatgacattttg

SEQ ID NO: 53591 - RNA, 19 nt, synthetic construct
  misc_feature 1..19: note = siRNA antisense sequence
  source 1..19: mol_type = other RNA
caaaatgtcatataccctc

SEQ ID NO: 53592 - RNA, 19 nt, synthetic construct
  misc_feature 1..19: note = siRNA sense sequence
  source 1..19: mol_type = other RNA
agggtatatgacattttgc

SEQ ID NO: 53593 - RNA, 19 nt, synthetic construct
  misc_feature 1..19: note = siRNA antisense sequence
  source 1..19: mol_type = other RNA
gcaaaatgtcatataccct

SEQ ID NO: 53594 - RNA, 19 nt, synthetic construct
  misc_feature 1..19: note = siRNA sense sequence
  source 1..19: mol_type = other RNA
gggtatatgacattttgcc

SEQ ID NO: 53595 - RNA, 19 nt, synthetic construct
  misc_feature 1..19: note = siRNA antisense sequence
  source 1..19: mol_type = other RNA
ggcaaaatgtcatataccc

SEQ ID NO: 53596 - RNA, 19 nt, synthetic construct
  misc_feature 1..19: note = siRNA sense sequence
  source 1..19: mol_type = other RNA
ggtatatgacattttgcca

SEQ ID NO: 53597 - RNA, 19 nt, synthetic construct
  misc_feature 1..19: note = siRNA antisense sequence
  source 1..19: mol_type = other RNA
tggcaaaatgtcatatacc

SEQ ID NO: 53598 - RNA, 19 nt, synthetic construct
  misc_feature 1..19: note = siRNA sense sequence
  source 1..19: mol_type = other RNA
aactgtgtggattgcaagt

SEQ ID NO: 53599 - RNA, 19 nt, synthetic construct
  misc_feature 1..19: note = siRNA antisense sequence
  source 1..19: mol_type = other RNA
acttgcaatccacacagtt

SEQ ID NO: 53600 - RNA, 19 nt, synthetic construct
  misc_feature 1..19: note = siRNA sense sequence
  source 1..19: mol_type = other RNA
ctgtgtggattgcaagttg

SEQ ID NO: 53601 - RNA, 19 nt, synthetic construct
  misc_feature 1..19: note = siRNA antisense sequence
  source 1..19: mol_type = other RNA
caacttgcaatccacacag

SEQ ID NO: 53602 - RNA, 19 nt, synthetic construct
  misc_feature 1..19: note = siRNA sense sequence
  source 1..19: mol_type = other RNA
tgtgtggattgcaagttgt

SEQ ID NO: 53603 - RNA, 19 nt, synthetic construct
  misc_feature 1..19: note = siRNA antisense sequence
  source 1..19: mol_type = other RNA
acaacttgcaatccacaca

SEQ ID NO: 53604 - RNA, 19 nt, synthetic construct
  misc_feature 1..19: note = siRNA sense sequence
  source 1..19: mol_type = other RNA
gtgtggattgcaagttgta

SEQ ID NO: 53605 - RNA, 19 nt, synthetic construct
  misc_feature 1..19: note = siRNA antisense sequence
  source 1..19: mol_type = other RNA
tacaacttgcaatccacac

SEQ ID NO: 53606 - RNA, 19 nt, synthetic construct
  misc_feature 1..19: note = siRNA sense sequence
  source 1..19: mol_type = other RNA
tgtggattgcaagttgtaa

SEQ ID NO: 53607 - RNA, 19 nt, synthetic construct
  misc_feature 1..19: note = siRNA antisense sequence
  source 1..19: mol_type = other RNA
ttacaacttgcaatccaca

SEQ ID NO: 53608 - RNA, 19 nt, synthetic construct
  misc_feature 1..19: note = siRNA sense sequence
  source 1..19: mol_type = other RNA
gtggattgcaagttgtaag

SEQ ID NO: 53609 - RNA, 19 nt, synthetic construct
  misc_feature 1..19: note = siRNA antisense sequence
  source 1..19: mol_type = other RNA
cttacaacttgcaatccac

SEQ ID NO: 53610 - RNA, 19 nt, synthetic construct
  misc_feature 1..19: note = siRNA sense sequence
  source 1..19: mol_type = other RNA
tggattgcaagttgtaagg

SEQ ID NO: 53611 - RNA, 19 nt, synthetic construct
  misc_feature 1..19: note = siRNA antisense sequence
  source 1..19: mol_type = other RNA
ccttacaacttgcaatcca

SEQ ID NO: 53612 - RNA, 19 nt, synthetic construct
  misc_feature 1..19: note = siRNA sense sequence
  source 1..19: mol_type = other RNA
ggattgcaagttgtaaggc

SEQ ID NO: 53613 - RNA, 19 nt, synthetic construct
  misc_feature 1..19: note = siRNA antisense sequence
  source 1..19: mol_type = other RNA
gccttacaacttgcaatcc

SEQ ID NO: 53614 - RNA, 19 nt, synthetic construct
  misc_feature 1..19: note = siRNA sense sequence
  source 1..19: mol_type = other RNA
gattgcaagttgtaaggct

SEQ ID NO: 53615 - RNA, 19 nt, synthetic construct
  misc_feature 1..19: note = siRNA antisense sequence
  source 1..19: mol_type = other RNA
agccttacaacttgcaatc

SEQ ID NO: 53616 - RNA, 19 nt, synthetic construct
  misc_feature 1..19: note = siRNA sense sequence
  source 1..19: mol_type = other RNA
attgcaagttgtaaggcta

SEQ ID NO: 53617 - RNA, 19 nt, synthetic construct
  misc_feature 1..19: note = siRNA antisense sequence
  source 1..19: mol_type = other RNA
tagccttacaacttgcaat

SEQ ID NO: 53618 - RNA, 19 nt, synthetic construct
  misc_feature 1..19: note = siRNA sense sequence
  source 1..19: mol_type = other RNA
ttgcaagttgtaaggctat

SEQ ID NO: 53619 - RNA, 19 nt, synthetic construct
  misc_feature 1..19: note = siRNA antisense sequence
  source 1..19: mol_type = other RNA
atagccttacaacttgcaa

SEQ ID NO: 53620 - RNA, 19 nt, synthetic construct
  misc_feature 1..19: note = siRNA sense sequence
  source 1..19: mol_type = other RNA
tgcaagttgtaaggctatg

SEQ ID NO: 53621 - RNA, 19 nt, synthetic construct
  misc_feature 1..19: note = siRNA antisense sequence
  source 1..19: mol_type = other RNA
catagccttacaacttgca

SEQ ID NO: 53622 - RNA, 19 nt, synthetic construct
  misc_feature 1..19: note = siRNA sense sequence
  source 1..19: mol_type = other RNA
aaaatcttatgaaggaagc

SEQ ID NO: 53623 - RNA, 19 nt, synthetic construct
  misc_feature 1..19: note = siRNA antisense sequence
  source 1..19: mol_type = other RNA
gcttccttcataagatttt

SEQ ID NO: 53624 - RNA, 19 nt, synthetic construct
  misc_feature 1..19: note = siRNA sense sequence
  source 1..19: mol_type = other RNA
aaatcttatgaaggaagca

SEQ ID NO: 53625 - RNA, 19 nt, synthetic construct
  misc_feature 1..19: note = siRNA antisense sequence
  source 1..19: mol_type = other RNA
tgcttccttcataagattt

SEQ ID NO: 53626 - RNA, 19 nt, synthetic construct
  misc_feature 1..19: note = siRNA sense sequence
  source 1..19: mol_type = other RNA
aatcttatgaaggaagcag

SEQ ID NO: 53627 - RNA, 19 nt, synthetic construct
  misc_feature 1..19: note = siRNA antisense sequence
  source 1..19: mol_type = other RNA
ctgcttccttcataagatt

SEQ ID NO: 53628 - RNA, 19 nt, synthetic construct
  misc_feature 1..19: note = siRNA sense sequence
  source 1..19: mol_type = other RNA
atcttatgaaggaagcaga

SEQ ID NO: 53629 - RNA, 19 nt, synthetic construct
  misc_feature 1..19: note = siRNA antisense sequence
  source 1..19: mol_type = other RNA
tctgcttccttcataagat

SEQ ID NO: 53630 - RNA, 19 nt, synthetic construct
  misc_feature 1..19: note = siRNA sense sequence
  source 1..19: mol_type = other RNA
cttatgaaggaagcagagg

SEQ ID NO: 53631 - RNA, 19 nt, synthetic construct
  misc_feature 1..19: note = siRNA antisense sequence
  source 1..19: mol_type = other RNA
cctctgcttccttcataag

SEQ ID NO: 53632 - RNA, 19 nt, synthetic construct
  misc_feature 1..19: note = siRNA sense sequence
  source 1..19: mol_type = other RNA
ttatgaaggaagcagaggc

SEQ ID NO: 53633 - RNA, 19 nt, synthetic construct
  misc_feature 1..19: note = siRNA antisense sequence
  source 1..19: mol_type = other RNA
gcctctgcttccttcataa

SEQ ID NO: 53634 - RNA, 19 nt, synthetic construct
  misc_feature 1..19: note = siRNA sense sequence
  source 1..19: mol_type = other RNA
tatgaaggaagcagaggca

SEQ ID NO: 53635 - RNA, 19 nt, synthetic construct
  misc_feature 1..19: note = siRNA antisense sequence
  source 1..19: mol_type = other RNA
tgcctctgcttccttcata

SEQ ID NO: 53636 - RNA, 19 nt, synthetic construct
  misc_feature 1..19: note = siRNA sense sequence
  source 1..19: mol_type = other RNA
atgaaggaagcagaggcag

SEQ ID NO: 53637 - RNA, 19 nt, synthetic construct
  misc_feature 1..19: note = siRNA antisense sequence
  source 1..19: mol_type = other RNA
ctgcctctgcttccttcat

SEQ ID NO: 53638 - RNA, 19 nt, synthetic construct
  misc_feature 1..19: note = siRNA sense sequence
  source 1..19: mol_type = other RNA
aggaagcagaggcagaggc

SEQ ID NO: 53639 - RNA, 19 nt, synthetic construct
  misc_feature 1..19: note = siRNA antisense sequence
  source 1..19: mol_type = other RNA
gcctctgcctctgcttcct

SEQ ID NO: 53640 - RNA, 19 nt, synthetic construct
  misc_feature 1..19: note = siRNA sense sequence
  source 1..19: mol_type = other RNA
gaagcagaggcagaggctc

SEQ ID NO: 53641 - RNA, 19 nt, synthetic construct
  misc_feature 1..19: note = siRNA antisense sequence
  source 1..19: mol_type = other RNA
gagcctctgcctctgcttc

SEQ ID NO: 53642 - RNA, 19 nt, synthetic construct
  misc_feature 1..19: note = siRNA sense sequence
  source 1..19: mol_type = other RNA
aaaatcccatgcttatcaa

SEQ ID NO: 53643 - RNA, 19 nt, synthetic construct
  misc_feature 1..19: note = siRNA antisense sequence
  source 1..19: mol_type = other RNA
ttgataagcatgggatttt

SEQ ID NO: 53644 - RNA, 19 nt, synthetic construct
  misc_feature 1..19: note = siRNA sense sequence
  source 1..19: mol_type = other RNA
aaatcccatgcttatcaat

SEQ ID NO: 53645 - RNA, 19 nt, synthetic construct
  misc_feature 1..19: note = siRNA antisense sequence
  source 1..19: mol_type = other RNA
attgataagcatgggattt

SEQ ID NO: 53646 - RNA, 19 nt, synthetic construct
  misc_feature 1..19: note = siRNA sense sequence
  source 1..19: mol_type = other RNA
aatcccatgcttatcaata

SEQ ID NO: 53647 - RNA, 19 nt, synthetic construct
  misc_feature 1..19: note = siRNA antisense sequence
  source 1..19: mol_type = other RNA
tattgataagcatgggatt

SEQ ID NO: 53648 - RNA, 19 nt, synthetic construct
  misc_feature 1..19: note = siRNA sense sequence
  source 1..19: mol_type = other RNA
atcccatgcttatcaataa

SEQ ID NO: 53649 - RNA, 19 nt, synthetic construct
  misc_feature 1..19: note = siRNA antisense sequence
  source 1..19: mol_type = other RNA
ttattgataagcatgggat

SEQ ID NO: 53650 - RNA, 19 nt, synthetic construct
  misc_feature 1..19: note = siRNA sense sequence
  source 1..19: mol_type = other RNA
cccatctttctattaccca

SEQ ID NO: 53651 - RNA, 19 nt, synthetic construct
  misc_feature 1..19: note = siRNA antisense sequence
  source 1..19: mol_type = other RNA
tgggtaatagaaagatggg

SEQ ID NO: 53652 - RNA, 19 nt, synthetic construct
  misc_feature 1..19: note = siRNA sense sequence
  source 1..19: mol_type = other RNA
ccatctttctattacccaa

SEQ ID NO: 53653 - RNA, 19 nt, synthetic construct
  misc_feature 1..19: note = siRNA antisense sequence
  source 1..19: mol_type = other RNA
ttgggtaatagaaagatgg

SEQ ID NO: 53654 - RNA, 19 nt, synthetic construct
  misc_feature 1..19: note = siRNA sense sequence
  source 1..19: mol_type = other RNA
catctttctattacccaaa

SEQ ID NO: 53655 - RNA, 19 nt, synthetic construct
  misc_feature 1..19: note = siRNA antisense sequence
  source 1..19: mol_type = other RNA
tttgggtaatagaaagatg

SEQ ID NO: 53656 - RNA, 19 nt, synthetic construct
  misc_feature 1..19: note = siRNA sense sequence
  source 1..19: mol_type = other RNA
aactgccttatgccaatac

SEQ ID NO: 53657 - RNA, 19 nt, synthetic construct
  misc_feature 1..19: note = siRNA antisense sequence
  source 1..19: mol_type = other RNA
gtattggcataaggcagtt

SEQ ID NO: 53658 - RNA, 19 nt, synthetic construct
  misc_feature 1..19: note = siRNA sense sequence
  source 1..19: mol_type = other RNA
actgccttatgccaataca

SEQ ID NO: 53659 - RNA, 19 nt, synthetic construct
  misc_feature 1..19: note = siRNA antisense sequence
  source 1..19: mol_type = other RNA
tgtattggcataaggcagt

SEQ ID NO: 53660 - RNA, 19 nt, synthetic construct
  misc_feature 1..19: note = siRNA sense sequence
  source 1..19: mol_type = other RNA
ctgccttatgccaatacag

SEQ ID NO: 53661 - RNA, 19 nt, synthetic construct
  misc_feature 1..19: note = siRNA antisense sequence
  source 1..19: mol_type = other RNA
ctgtattggcataaggcag

SEQ ID NO: 53662 - RNA, 19 nt, synthetic construct
  misc_feature 1..19: note = siRNA sense sequence
  source 1..19: mol_type = other RNA
aatacaggcattgcaagtg

SEQ ID NO: 53663 - RNA, 19 nt, synthetic construct
  misc_feature 1..19: note = siRNA antisense sequence
  source 1..19: mol_type = other RNA
cacttgcaatgcctgtatt

SEQ ID NO: 53664 - RNA, 19 nt, synthetic construct
  misc_feature 1..19: note = siRNA sense sequence
  source 1..19: mol_type = other RNA
atacaggcattgcaagtga

SEQ ID NO: 53665 - RNA, 19 nt, synthetic construct
  misc_feature 1..19: note = siRNA antisense sequence
  source 1..19: mol_type = other RNA
tcacttgcaatgcctgtat

SEQ ID NO: 53666 - RNA, 19 nt, synthetic construct
  misc_feature 1..19: note = siRNA sense sequence
  source 1..19: mol_type = other RNA
tacaggcattgcaagtgaa

SEQ ID NO: 53667 - RNA, 19 nt, synthetic construct
  misc_feature 1..19: note = siRNA antisense sequence
  source 1..19: mol_type = other RNA
ttcacttgcaatgcctgta

SEQ ID NO: 53668 - RNA, 19 nt, synthetic construct
  misc_feature 1..19: note = siRNA sense sequence
  source 1..19: mol_type = other RNA
acaggcattgcaagtgaat

SEQ ID NO: 53669 - RNA, 19 nt, synthetic construct
  misc_feature 1..19: note = siRNA antisense sequence
  source 1..19: mol_type = other RNA
attcacttgcaatgcctgt

SEQ ID NO: 53670 - RNA, 19 nt, synthetic construct
  misc_feature 1..19: note = siRNA sense sequence
  source 1..19: mol_type = other RNA
caggcattgcaagtgaatt

SEQ ID NO: 53671 - RNA, 19 nt, synthetic construct
  misc_feature 1..19: note = siRNA antisense sequence
  source 1..19: mol_type = other RNA
aattcacttgcaatgcctg

SEQ ID NO: 53672 - RNA, 19 nt, synthetic construct
  misc_feature 1..19: note = siRNA sense sequence
  source 1..19: mol_type = other RNA
cattgcaagtgaatttggt

SEQ ID NO: 53673 - RNA, 19 nt, synthetic construct
  misc_feature 1..19: note = siRNA antisense sequence
  source 1..19: mol_type = other RNA
accaaattcacttgcaatg

SEQ ID NO: 53674 - RNA, 19 nt, synthetic construct
  misc_feature 1..19: note = siRNA sense sequence
  source 1..19: mol_type = other RNA
attgcaagtgaatttggtg

SEQ ID NO: 53675 - RNA, 19 nt, synthetic construct
  misc_feature 1..19: note = siRNA antisense sequence
  source 1..19: mol_type = other RNA
caccaaattcacttgcaat

SEQ ID NO: 53676 - RNA, 19 nt, synthetic construct
  misc_feature 1..19: note = siRNA sense sequence
  source 1..19: mol_type = other RNA
ttgcaagtgaatttggtgg

SEQ ID NO: 53677 - RNA, 19 nt, synthetic construct
  misc_feature 1..19: note = siRNA antisense sequence
  source 1..19: mol_type = other RNA
ccaccaaattcacttgcaa

SEQ ID NO: 53678 - RNA, 19 nt, synthetic construct
  misc_feature 1..19: note = siRNA sense sequence
  source 1..19: mol_type = other RNA
tgcaagtgaatttggtggt

SEQ ID NO: 53679 - RNA, 19 nt, synthetic construct
  misc_feature 1..19: note = siRNA antisense sequence
  source 1..19: mol_type = other RNA
accaccaaattcacttgca

SEQ ID NO: 53680 - RNA, 19 nt, synthetic construct
  misc_feature 1..19: note = siRNA sense sequence
  source 1..19: mol_type = other RNA
gcaagtgaatttggtggtg

SEQ ID NO: 53681 - RNA, 19 nt, synthetic construct
  misc_feature 1..19: note = siRNA antisense sequence
  source 1..19: mol_type = other RNA
caccaccaaattcacttgc

SEQ ID NO: 53682 - RNA, 19 nt, synthetic construct
  misc_feature 1..19: note = siRNA sense sequence
  source 1..19: mol_type = other RNA
aagtgaatttggtggtgaa

SEQ ID NO: 53683 - RNA, 19 nt, synthetic construct
  misc_feature 1..19: note = siRNA antisense sequence
  source 1..19: mol_type = other RNA
ttcaccaccaaattcactt

SEQ ID NO: 53684 - RNA, 19 nt, synthetic construct
  misc_feature 1..19: note = siRNA sense sequence
  source 1..19: mol_type = other RNA
ctcctccacccacagtttg

SEQ ID NO: 53685 - RNA, 19 nt, synthetic construct
  misc_feature 1..19: note = siRNA antisense sequence
  source 1..19: mol_type = other RNA
caaactgtgggtggaggag

SEQ ID NO: 53686 - RNA, 19 nt, synthetic construct
  misc_feature 1..19: note = siRNA sense sequence
  source 1..19: mol_type = other RNA
tcctccacccacagtttgc

SEQ ID NO: 53687 - RNA, 19 nt, synthetic construct
  misc_feature 1..19: note = siRNA antisense sequence
  source 1..19: mol_type = other RNA
gcaaactgtgggtggagga

SEQ ID NO: 53688 - RNA, 19 nt, synthetic construct
  misc_feature 1..19: note = siRNA sense sequence
  source 1..19: mol_type = other RNA
cctccacccacagtttgct

SEQ ID NO: 53689 - RNA, 19 nt, synthetic construct
  misc_feature 1..19: note = siRNA antisense sequence
  source 1..19: mol_type = other RNA
agcaaactgtgggtggagg

SEQ ID NO: 53690 - RNA, 19 nt, synthetic construct
  misc_feature 1..19: note = siRNA sense sequence
  source 1..19: mol_type = other RNA
ctccacccacagtttgctg

SEQ ID NO: 53691 - RNA, 19 nt, synthetic construct
  misc_feature 1..19: note = siRNA antisense sequence
  source 1..19: mol_type = other RNA
cagcaaactgtgggtggag

SEQ ID NO: 53692 - RNA, 19 nt, synthetic construct
  misc_feature 1..19: note = siRNA sense sequence
  source 1..19: mol_type = other RNA
tccacccacagtttgctga

SEQ ID NO: 53693 - RNA, 19 nt, synthetic construct
  misc_feature 1..19: note = siRNA antisense sequence
  source 1..19: mol_type = other RNA
tcagcaaactgtgggtgga

SEQ ID NO: 53694 - RNA, 19 nt, synthetic construct
  misc_feature 1..19: note = siRNA sense sequence
  source 1..19: mol_type = other RNA
ccacccacagtttgctgaa

SEQ ID NO: 53695 - RNA, 19 nt, synthetic construct
  misc_feature 1..19: note = siRNA antisense sequence
  source 1..19: mol_type = other RNA
ttcagcaaactgtgggtgg

SEQ ID NO: 53696 - RNA, 19 nt, synthetic construct
  misc_feature 1..19: note = siRNA sense sequence
  source 1..19: mol_type = other RNA
ccacagtttgctgaattct

SEQ ID NO: 53697 - RNA, 19 nt, synthetic construct
  misc_feature 1..19: note = siRNA antisense sequence
  source 1..19: mol_type = other RNA
agaattcagcaaactgtgg

SEQ ID NO: 53698 - RNA, 19 nt, synthetic construct
  misc_feature 1..19: note = siRNA sense sequence
  source 1..19: mol_type = other RNA
cacagtttgctgaattcta

SEQ ID NO: 53699 - RNA, 19 nt, synthetic construct
  misc_feature 1..19: note = siRNA antisense sequence
  source 1..19: mol_type = other RNA
tagaattcagcaaactgtg

SEQ ID NO: 53700 - RNA, 19 nt, synthetic construct
  misc_feature 1..19: note = siRNA sense sequence
  source 1..19: mol_type = other RNA
ctattcctgccatacagct

SEQ ID NO: 53701 - RNA, 19 nt, synthetic construct
  misc_feature 1..19: note = siRNA antisense sequence
  source 1..19: mol_type = other RNA
agctgtatggcaggaatag

SEQ ID NO: 53702 - RNA, 19 nt, synthetic construct
  misc_feature 1..19: note = siRNA sense sequence
  source 1..19: mol_type = other RNA
tattcctgccatacagctt

SEQ ID NO: 53703 - RNA, 19 nt, synthetic construct
  misc_feature 1..19: note = siRNA antisense sequence
  source 1..19: mol_type = other RNA
aagctgtatggcaggaata

SEQ ID NO: 53704 - RNA, 19 nt, synthetic construct
  misc_feature 1..19: note = siRNA sense sequence
  source 1..19: mol_type = other RNA
attcctgccatacagcttc

SEQ ID NO: 53705 - RNA, 19 nt, synthetic construct
  misc_feature 1..19: note = siRNA antisense sequence
  source 1..19: mol_type = other RNA
gaagctgtatggcaggaat

SEQ ID NO: 53706 - RNA, 19 nt, synthetic construct
  misc_feature 1..19: note = siRNA sense sequence
  source 1..19: mol_type = other RNA
ttcctgccatacagcttcc

SEQ ID NO: 53707 - RNA, 19 nt, synthetic construct
  misc_feature 1..19: note = siRNA antisense sequence
  source 1..19: mol_type = other RNA
ggaagctgtatggcaggaa

SEQ ID NO: 53708 - RNA, 19 nt, synthetic construct
  misc_feature 1..19: note = siRNA sense sequence
  source 1..19: mol_type = other RNA
tcctgccatacagcttcca

SEQ ID NO: 53709 - RNA, 19 nt, synthetic construct
  misc_feature 1..19: note = siRNA antisense sequence
  source 1..19: mol_type = other RNA
tggaagctgtatggcagga

SEQ ID NO: 53710 - RNA, 19 nt, synthetic construct
  misc_feature 1..19: note = siRNA sense sequence
  source 1..19: mol_type = other RNA
cctgccatacagcttccaa

SEQ ID NO: 53711 - RNA, 19 nt, synthetic construct
  misc_feature 1..19: note = siRNA antisense sequence
  source 1..19: mol_type = other RNA
ttggaagctgtatggcagg

SEQ ID NO: 53712 - RNA, 19 nt, synthetic construct
  misc_feature 1..19: note = siRNA sense sequence
  source 1..19: mol_type = other RNA
ctgccatacagcttccaaa

SEQ ID NO: 53713 - RNA, 19 nt, synthetic construct
  misc_feature 1..19: note = siRNA antisense sequence
  source 1..19: mol_type = other RNA
tttggaagctgtatggcag

SEQ ID NO: 53714 - RNA, 19 nt, synthetic construct
  misc_feature 1..19: note = siRNA sense sequence
  source 1..19: mol_type = other RNA
aaagatgtgaggcaatgtc

SEQ ID NO: 53715 - RNA, 19 nt, synthetic construct
  misc_feature 1..19: note = siRNA antisense sequence
  source 1..19: mol_type = other RNA
gacattgcctcacatcttt

SEQ ID NO: 53716 - RNA, 19 nt, synthetic construct
  misc_feature 1..19: note = siRNA sense sequence
  source 1..19: mol_type = other RNA
aagatgtgaggcaatgtca

SEQ ID NO: 53717 - RNA, 19 nt, synthetic construct
  misc_feature 1..19: note = siRNA antisense sequence
  source 1..19: mol_type = other RNA
tgacattgcctcacatctt

SEQ ID NO: 53718 - RNA, 19 nt, synthetic construct
  misc_feature 1..19: note = siRNA sense sequence
  source 1..19: mol_type = other RNA
tgtgaggcaatgtcatggc

SEQ ID NO: 53719 - RNA, 19 nt, synthetic construct
  misc_feature 1..19: note = siRNA antisense sequence
  source 1..19: mol_type = other RNA
gccatgacattgcctcaca

SEQ ID NO: 53720 - RNA, 19 nt, synthetic construct
  misc_feature 1..19: note = siRNA sense sequence
  source 1..19: mol_type = other RNA
gtgaggcaatgtcatggca

SEQ ID NO: 53721 - RNA, 19 nt, synthetic construct
  misc_feature 1..19: note = siRNA antisense sequence
  source 1..19: mol_type = other RNA
tgccatgacattgcctcac

SEQ ID NO: 53722 - RNA, 19 nt, synthetic construct
  misc_feature 1..19: note = siRNA sense sequence
  source 1..19: mol_type = other RNA
tgaggcaatgtcatggcat

SEQ ID NO: 53723 - RNA, 19 nt, synthetic construct
  misc_feature 1..19: note = siRNA antisense sequence
  source 1..19: mol_type = other RNA
atgccatgacattgcctca

SEQ ID NO: 53724 - RNA, 19 nt, synthetic construct
  misc_feature 1..19: note = siRNA sense sequence
  source 1..19: mol_type = other RNA
gaggcaatgtcatggcatc

SEQ ID NO: 53725 - RNA, 19 nt, synthetic construct
  misc_feature 1..19: note = siRNA antisense sequence
  source 1..19: mol_type = other RNA
gatgccatgacattgcctc

SEQ ID NO: 53726 - RNA, 19 nt, synthetic construct
  misc_feature 1..19: note = siRNA sense sequence
  source 1..19: mol_type = other RNA
aggcaatgtcatggcatca

SEQ ID NO: 53727 - RNA, 19 nt, synthetic construct
  misc_feature 1..19: note = siRNA antisense sequence
  source 1..19: mol_type = other RNA
tgatgccatgacattgcct

SEQ ID NO: 53728 - RNA, 19 nt, synthetic construct
  misc_feature 1..19: note = siRNA sense sequence
  source 1..19: mol_type = other RNA
ggcaatgtcatggcatcaa

SEQ ID NO: 53729 - RNA, 19 nt, synthetic construct
  misc_feature 1..19: note = siRNA antisense sequence
  source 1..19: mol_type = other RNA
ttgatgccatgacattgcc

SEQ ID NO: 53730 - RNA, 19 nt, synthetic construct
  misc_feature 1..19: note = siRNA sense sequence
  source 1..19: mol_type = other RNA
gcaatgtcatggcatcaag

SEQ ID NO: 53731 - RNA, 19 nt, synthetic construct
  misc_feature 1..19: note = siRNA antisense sequence
  source 1..19: mol_type = other RNA
cttgatgccatgacattgc

SEQ ID NO: 53732 - RNA, 19 nt, synthetic construct
  misc_feature 1..19: note = siRNA sense sequence
  source 1..19: mol_type = other RNA
caatgtcatggcatcaaga

SEQ ID NO: 53733 - RNA, 19 nt, synthetic construct
  misc_feature 1..19: note = siRNA antisense sequence
  source 1..19: mol_type = other RNA
tcttgatgccatgacattg

SEQ ID NO: 53734 - RNA, 19 nt, synthetic construct
  misc_feature 1..19: note = siRNA sense sequence
  source 1..19: mol_type = other RNA
gtcatggcatcaagacaga

SEQ ID NO: 53735 - RNA, 19 nt, synthetic construct
  misc_feature 1..19: note = siRNA antisense sequence
  source 1..19: mol_type = other RNA
tctgtcttgatgccatgac

SEQ ID NO: 53736 - RNA, 19 nt, synthetic construct
  misc_feature 1..19: note = siRNA sense sequence
  source 1..19: mol_type = other RNA
tcatggcatcaagacagat

SEQ ID NO: 53737 - RNA, 19 nt, synthetic construct
  misc_feature 1..19: note = siRNA antisense sequence
  source 1..19: mol_type = other RNA
atctgtcttgatgccatga

SEQ ID NO: 53738 - RNA, 19 nt, synthetic construct
  misc_feature 1..19: note = siRNA sense sequence
  source 1..19: mol_type = other RNA
catggcatcaagacagatc

SEQ ID NO: 53739 - RNA, 19 nt, synthetic construct
  misc_feature 1..19: note = siRNA antisense sequence
  source 1..19: mol_type = other RNA
gatctgtcttgatgccatg

SEQ ID NO: 53740 - RNA, 19 nt, synthetic construct
  misc_feature 1..19: note = siRNA sense sequence
  source 1..19: mol_type = other RNA
atggcatcaagacagatca

SEQ ID NO: 53741 - RNA, 19 nt, synthetic construct
  misc_feature 1..19: note = siRNA antisense sequence
  source 1..19: mol_type = other RNA
tgatctgtcttgatgccat

SEQ ID NO: 53742 - RNA, 19 nt, synthetic construct
  misc_feature 1..19: note = siRNA sense sequence
  source 1..19: mol_type = other RNA
tggcatcaagacagatcat

SEQ ID NO: 53743 - RNA, 19 nt, synthetic construct
  misc_feature 1..19: note = siRNA antisense sequence
  source 1..19: mol_type = other RNA
atgatctgtcttgatgcca

SEQ ID NO: 53744 - RNA, 19 nt, synthetic construct
  misc_feature 1..19: note = siRNA sense sequence
  source 1..19: mol_type = other RNA
ggcatcaagacagatcata

SEQ ID NO: 53745 - RNA, 19 nt, synthetic construct
  misc_feature 1..19: note = siRNA antisense sequence
  source 1..19: mol_type = other RNA
tatgatctgtcttgatgcc

SEQ ID NO: 53746 - RNA, 19 nt, synthetic construct
  misc_feature 1..19: note = siRNA sense sequence
  source 1..19: mol_type = other RNA
catcaagacagatcatacc

SEQ ID NO: 53747 - RNA, 19 nt, synthetic construct
  misc_feature 1..19: note = siRNA antisense sequence
  source 1..19: mol_type = other RNA
ggtatgatctgtcttgatg

SEQ ID NO: 53748 - RNA, 19 nt, synthetic construct
  misc_feature 1..19: note = siRNA sense sequence
  source 1..19: mol_type = other RNA
tcaagacagatcatacctg

SEQ ID NO: 53749 - RNA, 19 nt, synthetic construct
  misc_feature 1..19: note = siRNA antisense sequence
  source 1..19: mol_type = other RNA
caggtatgatctgtcttga

SEQ ID NO: 53750 - RNA, 19 nt, synthetic construct
  misc_feature 1..19: note = siRNA sense sequence
  source 1..19: mol_type = other RNA
atacctgtttcccattacc

SEQ ID NO: 53751 - RNA, 19 nt, synthetic construct
  misc_feature 1..19: note = siRNA antisense sequence
  source 1..19: mol_type = other RNA
ggtaatgggaaacaggtat

SEQ ID NO: 53752 - RNA, 19 nt, synthetic construct
  misc_feature 1..19: note = siRNA sense sequence
  source 1..19: mol_type = other RNA
tacctgtttcccattacct

SEQ ID NO: 53753 - RNA, 19 nt, synthetic construct
  misc_feature 1..19: note = siRNA antisense sequence
  source 1..19: mol_type = other RNA
aggtaatgggaaacaggta

SEQ ID NO: 53754 - RNA, 19 nt, synthetic construct
  misc_feature 1..19: note = siRNA sense sequence
  source 1..19: mol_type = other RNA
tgtttcccattacctcact

SEQ ID NO: 53755 - RNA, 19 nt, synthetic construct
  misc_feature 1..19: note = siRNA antisense sequence
  source 1..19: mol_type = other RNA
agtgaggtaatgggaaaca

SEQ ID NO: 53756 - RNA, 19 nt, synthetic construct
  misc_feature 1..19: note = siRNA sense sequence
  source 1..19: mol_type = other RNA
gtttcccattacctcacta

SEQ ID NO: 53757 - RNA, 19 nt, synthetic construct
  misc_feature 1..19: note = siRNA antisense sequence
  source 1..19: mol_type = other RNA
tagtgaggtaatgggaaac

SEQ ID NO: 53758 - RNA, 19 nt, synthetic construct
  misc_feature 1..19: note = siRNA sense sequence
  source 1..19: mol_type = other RNA
tttcccattacctcactag

SEQ ID NO: 53759 - RNA, 19 nt, synthetic construct
  misc_feature 1..19: note = siRNA antisense sequence
  source 1..19: mol_type = other RNA
ctagtgaggtaatgggaaa

SEQ ID NO: 53760 - RNA, 19 nt, synthetic construct
  misc_feature 1..19: note = siRNA sense sequence
  source 1..19: mol_type = other RNA
ttcccattacctcactaga

SEQ ID NO: 53761 - RNA, 19 nt, synthetic construct
  misc_feature 1..19: note = siRNA antisense sequence
  source 1..19: mol_type = other RNA
tctagtgaggtaatgggaa

SEQ ID NO: 53762 - RNA, 19 nt, synthetic construct
  misc_feature 1..19: note = siRNA sense sequence
  source 1..19: mol_type = other RNA
tcccattacctcactagat

SEQ ID NO: 53763 - RNA, 19 nt, synthetic construct
  misc_feature 1..19: note = siRNA antisense sequence
  source 1..19: mol_type = other RNA
atctagtgaggtaatggga

SEQ ID NO: 53764 - RNA, 19 nt, synthetic construct
  misc_feature 1..19: note = siRNA sense sequence
  source 1..19: mol_type = other RNA
cccattacctcactagatc

SEQ ID NO: 53765 - RNA, 19 nt, synthetic construct
  misc_feature 1..19: note = siRNA antisense sequence
  source 1..19: mol_type = other RNA
gatctagtgaggtaatggg

SEQ ID NO: 53766 - RNA, 19 nt, synthetic construct
  misc_feature 1..19: note = siRNA sense sequence
  source 1..19: mol_type = other RNA
ccattacctcactagatcc

SEQ ID NO: 53767 - RNA, 19 nt, synthetic construct
  misc_feature 1..19: note = siRNA antisense sequence
  source 1..19: mol_type = other RNA
ggatctagtgaggtaatgg

SEQ ID NO: 53768 - RNA, 19 nt, synthetic construct
  misc_feature 1..19: note = siRNA sense sequence
  source 1..19: mol_type = other RNA
cattacctcactagatcct

SEQ ID NO: 53769 - RNA, 19 nt, synthetic construct
  misc_feature 1..19: note = siRNA antisense sequence
  source 1..19: mol_type = other RNA
aggatctagtgaggtaatg

SEQ ID NO: 53770 - RNA, 19 nt, synthetic construct
  misc_feature 1..19: note = siRNA sense sequence
  source 1..19: mol_type = other RNA
ctcactagatcctggccct

SEQ ID NO: 53771 - RNA, 19 nt, synthetic construct
  misc_feature 1..19: note = siRNA antisense sequence
  source 1..19: mol_type = other RNA
agggccaggatctagtgag

SEQ ID NO: 53772 - RNA, 19 nt, synthetic construct
  misc_feature 1..19: note = siRNA sense sequence
  source 1..19: mol_type = other RNA
tcactagatcctggccctt

SEQ ID NO: 53773 - RNA, 19 nt, synthetic construct
  misc_feature 1..19: note = siRNA antisense sequence
  source 1..19: mol_type = other RNA
aagggccaggatctagtga

SEQ ID NO: 53774 - RNA, 19 nt, synthetic construct
  misc_feature 1..19: note = siRNA sense sequence
  source 1..19: mol_type = other RNA
cactagatcctggcccttt

SEQ ID NO: 53775 - RNA, 19 nt, synthetic construct
  misc_feature 1..19: note = siRNA antisense sequence
  source 1..19: mol_type = other RNA
aaagggccaggatctagtg

SEQ ID NO: 53776 - RNA, 19 nt, synthetic construct
  misc_feature 1..19: note = siRNA sense sequence
  source 1..19: mol_type = other RNA
actagatcctggccctttt

SEQ ID NO: 53777 - RNA, 19 nt, synthetic construct
  misc_feature 1..19: note = siRNA antisense sequence
  source 1..19: mol_type = other RNA
aaaagggccaggatctagt

SEQ ID NO: 53778 - RNA, 19 nt, synthetic construct
  misc_feature 1..19: note = siRNA sense sequence
  source 1..19: mol_type = other RNA
ctagatcctggcccttttc

SEQ ID NO: 53779 - RNA, 19 nt, synthetic construct
  misc_feature 1..19: note = siRNA antisense sequence
  source 1..19: mol_type = other RNA
gaaaagggccaggatctag

SEQ ID NO: 53780 - RNA, 19 nt, synthetic construct
  misc_feature 1..19: note = siRNA sense sequence
  source 1..19: mol_type = other RNA
tagatcctggcccttttcc

SEQ ID NO: 53781 - RNA, 19 nt, synthetic construct
  misc_feature 1..19: note = siRNA antisense sequence
  source 1..19: mol_type = other RNA
ggaaaagggccaggatcta

SEQ ID NO: 53782 - RNA, 19 nt, synthetic construct
  misc_feature 1..19: note = siRNA sense sequence
  source 1..19: mol_type = other RNA
agagctgacagaattcatt

SEQ ID NO: 53783 - RNA, 19 nt, synthetic construct
  misc_feature 1..19: note = siRNA antisense sequence
  source 1..19: mol_type = other RNA
aatgaattctgtcagctct

SEQ ID NO: 53784 - RNA, 19 nt, synthetic construct
  misc_feature 1..19: note = siRNA sense sequence
  source 1..19: mol_type = other RNA
gagctgacagaattcattc

SEQ ID NO: 53785 - RNA, 19 nt, synthetic construct
  misc_feature 1..19: note = siRNA antisense sequence
  source 1..19: mol_type = other RNA
gaatgaattctgtcagctc

SEQ ID NO: 53786 - RNA, 19 nt, synthetic construct
  misc_feature 1..19: note = siRNA sense sequence
  source 1..19: mol_type = other RNA
tcttcataaatccatgcaa

SEQ ID NO: 53787 - RNA, 19 nt, synthetic construct
  misc_feature 1..19: note = siRNA antisense sequence
  source 1..19: mol_type = other RNA
ttgcatggatttatgaaga

SEQ ID NO: 53788 - RNA, 19 nt, synthetic construct
  misc_feature 1..19: note = siRNA sense sequence
  source 1..19: mol_type = other RNA
cttcataaatccatgcaaa

SEQ ID NO: 53789 - RNA, 19 nt, synthetic construct
  misc_feature 1..19: note = siRNA antisense sequence
  source 1..19: mol_type = other RNA
tttgcatggatttatgaag

SEQ ID NO: 53790 - RNA, 19 nt, synthetic construct
  misc_feature 1..19: note = siRNA sense sequence
  source 1..19: mol_type = other RNA
ttcataaatccatgcaaag

SEQ ID NO: 53791 - RNA, 19 nt, synthetic construct
  misc_feature 1..19: note = siRNA antisense sequence
  source 1..19: mol_type = other RNA
ctttgcatggatttatgaa

SEQ ID NO: 53792 - RNA, 19 nt, synthetic construct
  misc_feature 1..19: note = siRNA sense sequence
  source 1..19: mol_type = other RNA
tcataaatccatgcaaagg

SEQ ID NO: 53793 - RNA, 19 nt, synthetic construct
  misc_feature 1..19: note = siRNA antisense sequence
  source 1..19: mol_type = other RNA
cctttgcatggatttatga

SEQ ID NO: 53794 - RNA, 19 nt, synthetic construct
  misc_feature 1..19: note = siRNA sense sequence
  source 1..19: mol_type = other RNA
cataaatccatgcaaaggg

SEQ ID NO: 53795 - RNA, 19 nt, synthetic construct
  misc_feature 1..19: note = siRNA antisense sequence
  source 1..19: mol_type = other RNA
ccctttgcatggatttatg

SEQ ID NO: 53796 - RNA, 19 nt, synthetic construct
  misc_feature 1..19: note = siRNA sense sequence
  source 1..19: mol_type = other RNA
ataaatccatgcaaagggc

SEQ ID NO: 53797 - RNA, 19 nt, synthetic construct
  misc_feature 1..19: note = siRNA antisense sequence
  source 1..19: mol_type = other RNA
gccctttgcatggatttat

SEQ ID NO: 53798 - RNA, 19 nt, synthetic construct
  misc_feature 1..19: note = siRNA sense sequence
  source 1..19: mol_type = other RNA
tccatgcaaagggctatgc

SEQ ID NO: 53799 - RNA, 19 nt, synthetic construct
  misc_feature 1..19: note = siRNA antisense sequence
  source 1..19: mol_type = other RNA
gcatagccctttgcatgga

SEQ ID NO: 53800 - RNA, 19 nt, synthetic construct
  misc_feature 1..19: note = siRNA sense sequence
  source 1..19: mol_type = other RNA
ccatgcaaagggctatgcc

SEQ ID NO: 53801 - RNA, 19 nt, synthetic construct
  misc_feature 1..19: note = siRNA antisense sequence
  source 1..19: mol_type = other RNA
ggcatagccctttgcatgg

SEQ ID NO: 53802 - RNA, 19 nt, synthetic construct
  misc_feature 1..19: note = siRNA sense sequence
  source 1..19: mol_type = other RNA
catgcaaagggctatgcca

SEQ ID NO: 53803 - RNA, 19 nt, synthetic construct
  misc_feature 1..19: note = siRNA antisense sequence
  source 1..19: mol_type = other RNA
tggcatagccctttgcatg

SEQ ID NO: 53804 - RNA, 19 nt, synthetic construct
  misc_feature 1..19: note = siRNA sense sequence
  source 1..19: mol_type = other RNA
caaagggctatgccatcca

SEQ ID NO: 53805 - RNA, 19 nt, synthetic construct
  misc_feature 1..19: note = siRNA antisense sequence
  source 1..19: mol_type = other RNA
tggatggcatagccctttg

SEQ ID NO: 53806 - RNA, 19 nt, synthetic construct
  misc_feature 1..19: note = siRNA sense sequence
  source 1..19: mol_type = other RNA
aaagggctatgccatccat

SEQ ID NO: 53807 - RNA, 19 nt, synthetic construct
  misc_feature 1..19: note = siRNA antisense sequence
  source 1..19: mol_type = other RNA
atggatggcatagcccttt

SEQ ID NO: 53808 - RNA, 19 nt, synthetic construct
  misc_feature 1..19: note = siRNA sense sequence
  source 1..19: mol_type = other RNA
aagggctatgccatccatt

SEQ ID NO: 53809 - RNA, 19 nt, synthetic construct
  misc_feature 1..19: note = siRNA antisense sequence
  source 1..19: mol_type = other RNA
aatggatggcatagccctt

SEQ ID NO: 53810 - RNA, 19 nt, synthetic construct
  misc_feature 1..19: note = siRNA sense sequence
  source 1..19: mol_type = other RNA
agggctatgccatccattt

SEQ ID NO: 53811 - RNA, 19 nt, synthetic construct
  misc_feature 1..19: note = siRNA antisense sequence
  source 1..19: mol_type = other RNA
aaatggatggcatagccct

SEQ ID NO: 53812 - RNA, 19 nt, synthetic construct
  misc_feature 1..19: note = siRNA sense sequence
  source 1..19: mol_type = other RNA
gggctatgccatccatttt

SEQ ID NO: 53813 - RNA, 19 nt, synthetic construct
  misc_feature 1..19: note = siRNA antisense sequence
  source 1..19: mol_type = other RNA
aaaatggatggcatagccc

SEQ ID NO: 53814 - RNA, 19 nt, synthetic construct
  misc_feature 1..19: note = siRNA sense sequence
  source 1..19: mol_type = other RNA
ggctatgccatccatttta

SEQ ID NO: 53815 - RNA, 19 nt, synthetic construct
  misc_feature 1..19: note = siRNA antisense sequence
  source 1..19: mol_type = other RNA
taaaatggatggcatagcc

SEQ ID NO: 53816 - RNA, 19 nt, synthetic construct
  misc_feature 1..19: note = siRNA sense sequence
  source 1..19: mol_type = other RNA
ctatgccatccattttagc

SEQ ID NO: 53817 - RNA, 19 nt, synthetic construct
  misc_feature 1..19: note = siRNA antisense sequence
  source 1..19: mol_type = other RNA
gctaaaatggatggcatag

SEQ ID NO: 53818 - RNA, 19 nt, synthetic construct
  misc_feature 1..19: note = siRNA sense sequence
  source 1..19: mol_type = other RNA
tatgccatccattttagcc

SEQ ID NO: 53819 - RNA, 19 nt, synthetic construct
  misc_feature 1..19: note = siRNA antisense sequence
  source 1..19: mol_type = other RNA
ggctaaaatggatggcata

SEQ ID NO: 53820 - RNA, 19 nt, synthetic construct
  misc_feature 1..19: note = siRNA sense sequence
  source 1..19: mol_type = other RNA
atgccatccattttagcct

SEQ ID NO: 53821 - RNA, 19 nt, synthetic construct
  misc_feature 1..19: note = siRNA antisense sequence
  source 1..19: mol_type = other RNA
aggctaaaatggatggcat

SEQ ID NO: 53822 - RNA, 19 nt, synthetic construct
  misc_feature 1..19: note = siRNA sense sequence
  source 1..19: mol_type = other RNA
tgccatccattttagcctt

SEQ ID NO: 53823 - RNA, 19 nt, synthetic construct
  misc_feature 1..19: note = siRNA antisense sequence
  source 1..19: mol_type = other RNA
aaggctaaaatggatggca

SEQ ID NO: 53824 - RNA, 19 nt, synthetic construct
  misc_feature 1..19: note = siRNA sense sequence
  source 1..19: mol_type = other RNA
gccatccattttagccttt

SEQ ID NO: 53825 - RNA, 19 nt, synthetic construct
  misc_feature 1..19: note = siRNA antisense sequence
  source 1..19: mol_type = other RNA
aaaggctaaaatggatggc

SEQ ID NO: 53826 - RNA, 19 nt, synthetic construct
  misc_feature 1..19: note = siRNA sense sequence
  source 1..19: mol_type = other RNA
ccatccattttagcctttt

SEQ ID NO: 53827 - RNA, 19 nt, synthetic construct
  misc_feature 1..19: note = siRNA antisense sequence
  source 1..19: mol_type = other RNA
aaaaggctaaaatggatgg

SEQ ID NO: 53828 - RNA, 19 nt, synthetic construct
  misc_feature 1..19: note = siRNA sense sequence
  source 1..19: mol_type = other RNA
tctcttattgcccaggctg

SEQ ID NO: 53829 - RNA, 19 nt, synthetic construct
  misc_feature 1..19: note = siRNA antisense sequence
  source 1..19: mol_type = other RNA
cagcctgggcaataagaga

SEQ ID NO: 53830 - RNA, 19 nt, synthetic construct
  misc_feature 1..19: note = siRNA sense sequence
  source 1..19: mol_type = other RNA
ctcttattgcccaggctgg

SEQ ID NO: 53831 - RNA, 19 nt, synthetic construct
  misc_feature 1..19: note = siRNA antisense sequence
  source 1..19: mol_type = other RNA
ccagcctgggcaataagag

SEQ ID NO: 53832 - RNA, 19 nt, synthetic construct
  misc_feature 1..19: note = siRNA sense sequence
  source 1..19: mol_type = other RNA
tcttattgcccaggctgga

SEQ ID NO: 53833 - RNA, 19 nt, synthetic construct
  misc_feature 1..19: note = siRNA antisense sequence
  source 1..19: mol_type = other RNA
tccagcctgggcaataaga

SEQ ID NO: 53834 - RNA, 19 nt, synthetic construct
  misc_feature 1..19: note = siRNA sense sequence
  source 1..19: mol_type = other RNA
cttattgcccaggctggag

SEQ ID NO: 53835 - RNA, 19 nt, synthetic construct
  misc_feature 1..19: note = siRNA antisense sequence
  source 1..19: mol_type = other RNA
ctccagcctgggcaataag

SEQ ID NO: 53836 - RNA, 19 nt, synthetic construct
  misc_feature 1..19: note = siRNA sense sequence
  source 1..19: mol_type = other RNA
ttgcccaggctggagtgca

SEQ ID NO: 53837 - RNA, 19 nt, synthetic construct
  misc_feature 1..19: note = siRNA antisense sequence
  source 1..19: mol_type = other RNA
tgcactccagcctgggcaa

SEQ ID NO: 53838 - RNA, 19 nt, synthetic construct
  misc_feature 1..19: note = siRNA sense sequence
  source 1..19: mol_type = other RNA
gctggagtgcagtggcatg

SEQ ID NO: 53839 - RNA, 19 nt, synthetic construct
  misc_feature 1..19: note = siRNA antisense sequence
  source 1..19: mol_type = other RNA
catgccactgcactccagc

SEQ ID NO: 53840 - RNA, 19 nt, synthetic construct
  misc_feature 1..19: note = siRNA sense sequence
  source 1..19: mol_type = other RNA
ctggagtgcagtggcatga

SEQ ID NO: 53841 - RNA, 19 nt, synthetic construct
  misc_feature 1..19: note = siRNA antisense sequence
  source 1..19: mol_type = other RNA
tcatgccactgcactccag

SEQ ID NO: 53842 - RNA, 19 nt, synthetic construct
  misc_feature 1..19: note = siRNA sense sequence
  source 1..19: mol_type = other RNA
tggagtgcagtggcatgat

SEQ ID NO: 53843 - RNA, 19 nt, synthetic construct
  misc_feature 1..19: note = siRNA antisense sequence
  source 1..19: mol_type = other RNA
atcatgccactgcactcca

SEQ ID NO: 53844 - RNA, 19 nt, synthetic construct
  misc_feature 1..19: note = siRNA sense sequence
  source 1..19: mol_type = other RNA
ggagtgcagtggcatgatc

SEQ ID NO: 53845 - RNA, 19 nt, synthetic construct
  misc_feature 1..19: note = siRNA antisense sequence
  source 1..19: mol_type = other RNA
gatcatgccactgcactcc

SEQ ID NO: 53846 - RNA, 19 nt, synthetic construct
  misc_feature 1..19: note = siRNA sense sequence
  source 1..19: mol_type = other RNA
gagtgcagtggcatgatct

SEQ ID NO: 53847 - RNA, 19 nt, synthetic construct
  misc_feature 1..19: note = siRNA antisense sequence
  source 1..19: mol_type = other RNA
agatcatgccactgcactc

SEQ ID NO: 53848 - RNA, 19 nt, synthetic construct
  misc_feature 1..19: note = siRNA sense sequence
  source 1..19: mol_type = other RNA
agtgcagtggcatgatctc

SEQ ID NO: 53849 - RNA, 19 nt, synthetic construct
  misc_feature 1..19: note = siRNA antisense sequence
  source 1..19: mol_type = other RNA
gagatcatgccactgcact

SEQ ID NO: 53850 - RNA, 19 nt, synthetic construct
  misc_feature 1..19: note = siRNA sense sequence
  source 1..19: mol_type = other RNA
gtgcagtggcatgatctct

SEQ ID NO: 53851 - RNA, 19 nt, synthetic construct
  misc_feature 1..19: note = siRNA antisense sequence
  source 1..19: mol_type = other RNA
agagatcatgccactgcac

SEQ ID NO: 53852 - RNA, 19 nt, synthetic construct
  misc_feature 1..19: note = siRNA sense sequence
  source 1..19: mol_type = other RNA
tgcagtggcatgatctctg

SEQ ID NO: 53853 - RNA, 19 nt, synthetic construct
  misc_feature 1..19: note = siRNA antisense sequence
  source 1..19: mol_type = other RNA
cagagatcatgccactgca

SEQ ID NO: 53854 - RNA, 19 nt, synthetic construct
  misc_feature 1..19: note = siRNA sense sequence
  source 1..19: mol_type = other RNA
atctctgctcactgcaacc

SEQ ID NO: 53855 - RNA, 19 nt, synthetic construct
  misc_feature 1..19: note = siRNA antisense sequence
  source 1..19: mol_type = other RNA
ggttgcagtgagcagagat

SEQ ID NO: 53856 - RNA, 19 nt, synthetic construct
  misc_feature 1..19: note = siRNA sense sequence
  source 1..19: mol_type = other RNA
tctctgctcactgcaacct

SEQ ID NO: 53857 - RNA, 19 nt, synthetic construct
  misc_feature 1..19: note = siRNA antisense sequence
  source 1..19: mol_type = other RNA
aggttgcagtgagcagaga

SEQ ID NO: 53858 - RNA, 19 nt, synthetic construct
  misc_feature 1..19: note = siRNA sense sequence
  source 1..19: mol_type = other RNA
ctcactgcaacctccacct

SEQ ID NO: 53859 - RNA, 19 nt, synthetic construct
  misc_feature 1..19: note = siRNA antisense sequence
  source 1..19: mol_type = other RNA
aggtggaggttgcagtgag

SEQ ID NO: 53860 - RNA, 19 nt, synthetic construct
  misc_feature 1..19: note = siRNA sense sequence
  source 1..19: mol_type = other RNA
tcactgcaacctccacctc

SEQ ID NO: 53861 - RNA, 19 nt, synthetic construct
  misc_feature 1..19: note = siRNA antisense sequence
  source 1..19: mol_type = other RNA
gaggtggaggttgcagtga

SEQ ID NO: 53862 - RNA, 19 nt, synthetic construct
  misc_feature 1..19: note = siRNA sense sequence
  source 1..19: mol_type = other RNA
cactgcaacctccacctcc

SEQ ID NO: 53863 - RNA, 19 nt, synthetic construct
  misc_feature 1..19: note = siRNA antisense sequence
  source 1..19: mol_type = other RNA
ggaggtggaggttgcagtg

SEQ ID NO: 53864 - RNA, 19 nt, synthetic construct
  misc_feature 1..19: note = siRNA sense sequence
  source 1..19: mol_type = other RNA
acctccacctcctgggttc

SEQ ID NO: 53865 - RNA, 19 nt, synthetic construct
  misc_feature 1..19: note = siRNA antisense sequence
  source 1..19: mol_type = other RNA
gaacccaggaggtggaggt

SEQ ID NO: 53866 - RNA, 19 nt, synthetic construct
  misc_feature 1..19: note = siRNA sense sequence
  source 1..19: mol_type = other RNA
cctccacctcctgggttca

SEQ ID NO: 53867 - RNA, 19 nt, synthetic construct
  misc_feature 1..19: note = siRNA antisense sequence
  source 1..19: mol_type = other RNA
tgaacccaggaggtggagg

SEQ ID NO: 53868 - RNA, 19 nt, synthetic construct
  misc_feature 1..19: note = siRNA sense sequence
  source 1..19: mol_type = other RNA
ctccacctcctgggttcaa

SEQ ID NO: 53869 - RNA, 19 nt, synthetic construct
  misc_feature 1..19: note = siRNA antisense sequence
  source 1..19: mol_type = other RNA
ttgaacccaggaggtggag

SEQ ID NO: 53870 - RNA, 19 nt, synthetic construct
  misc_feature 1..19: note = siRNA sense sequence
  source 1..19: mol_type = other RNA
tccacctcctgggttcaag

SEQ ID NO: 53871 - RNA, 19 nt, synthetic construct
  misc_feature 1..19: note = siRNA antisense sequence
  source 1..19: mol_type = other RNA
cttgaacccaggaggtgga

SEQ ID NO: 53872 - RNA, 19 nt, synthetic construct
  misc_feature 1..19: note = siRNA sense sequence
  source 1..19: mol_type = other RNA
ccacctcctgggttcaagt

SEQ ID NO: 53873 - RNA, 19 nt, synthetic construct
  misc_feature 1..19: note = siRNA antisense sequence
  source 1..19: mol_type = other RNA
acttgaacccaggaggtgg

SEQ ID NO: 53874 - RNA, 19 nt, synthetic construct
  misc_feature 1..19: note = siRNA sense sequence
  source 1..19: mol_type = other RNA
cacctcctgggttcaagtg

SEQ ID NO: 53875 - RNA, 19 nt, synthetic construct
  misc_feature 1..19: note = siRNA antisense sequence
  source 1..19: mol_type = other RNA
cacttgaacccaggaggtg

SEQ ID NO: 53876 - RNA, 19 nt, synthetic construct
  misc_feature 1..19: note = siRNA sense sequence
  source 1..19: mol_type = other RNA
acctcctgggttcaagtga

SEQ ID NO: 53877 - RNA, 19 nt, synthetic construct
  misc_feature 1..19: note = siRNA antisense sequence
  source 1..19: mol_type = other RNA
tcacttgaacccaggaggt

SEQ ID NO: 53878 - RNA, 19 nt, synthetic construct
  misc_feature 1..19: note = siRNA sense sequence
  source 1..19: mol_type = other RNA
tgggttcaagtgattctcc

SEQ ID NO: 53879 - RNA, 19 nt, synthetic construct
  misc_feature 1..19: note = siRNA antisense sequence
  source 1..19: mol_type = other RNA
ggagaatcacttgaaccca

SEQ ID NO: 53880 - RNA, 19 nt, synthetic construct
  misc_feature 1..19: note = siRNA sense sequence
  source 1..19: mol_type = other RNA
gggttcaagtgattctcct

SEQ ID NO: 53881 - RNA, 19 nt, synthetic construct
  misc_feature 1..19: note = siRNA antisense sequence
  source 1..19: mol_type = other RNA
aggagaatcacttgaaccc

SEQ ID NO: 53882 - RNA, 19 nt, synthetic construct
  misc_feature 1..19: note = siRNA sense sequence
  source 1..19: mol_type = other RNA
ggttcaagtgattctcctg

SEQ ID NO: 53883 - RNA, 19 nt, synthetic construct
  misc_feature 1..19: note = siRNA antisense sequence
  source 1..19: mol_type = other RNA
caggagaatcacttgaacc

SEQ ID NO: 53884 - RNA, 19 nt, synthetic construct
  misc_feature 1..19: note = siRNA sense sequence
  source 1..19: mol_type = other RNA
gttcaagtgattctcctgc

SEQ ID NO: 53885 - RNA, 19 nt, synthetic construct
  misc_feature 1..19: note = siRNA antisense sequence
  source 1..19: mol_type = other RNA
gcaggagaatcacttgaac

SEQ ID NO: 53886 - RNA, 19 nt, synthetic construct
  misc_feature 1..19: note = siRNA sense sequence
  source 1..19: mol_type = other RNA
ttcaagtgattctcctgcc

SEQ ID NO: 53887 - RNA, 19 nt, synthetic construct
  misc_feature 1..19: note = siRNA antisense sequence
  source 1..19: mol_type = other RNA
ggcaggagaatcacttgaa

SEQ ID NO: 53888 - RNA, 19 nt, synthetic construct
  misc_feature 1..19: note = siRNA sense sequence
  source 1..19: mol_type = other RNA
tcaagtgattctcctgcct

SEQ ID NO: 53889 - RNA, 19 nt, synthetic construct
  misc_feature 1..19: note = siRNA antisense sequence
  source 1..19: mol_type = other RNA
aggcaggagaatcacttga

SEQ ID NO: 53890 - RNA, 19 nt, synthetic construct
  misc_feature 1..19: note = siRNA sense sequence
  source 1..19: mol_type = other RNA
taactgggattacaggcgc

SEQ ID NO: 53891 - RNA, 19 nt, synthetic construct
  misc_feature 1..19: note = siRNA antisense sequence
  source 1..19: mol_type = other RNA
gcgcctgtaatcccagtta

SEQ ID NO: 53892 - RNA, 19 nt, synthetic construct
  misc_feature 1..19: note = siRNA sense sequence
  source 1..19: mol_type = other RNA
ctgacctcaggtgatccac

SEQ ID NO: 53893 - RNA, 19 nt, synthetic construct
  misc_feature 1..19: note = siRNA antisense sequence
  source 1..19: mol_type = other RNA
gtggatcacctgaggtcag

SEQ ID NO: 53894 - RNA, 19 nt, synthetic construct
  misc_feature 1..19: note = siRNA sense sequence
  source 1..19: mol_type = other RNA
gtgatccacctgcctcgga

SEQ ID NO: 53895 - RNA, 19 nt, synthetic construct
  misc_feature 1..19: note = siRNA antisense sequence
  source 1..19: mol_type = other RNA
tccgaggcaggtggatcac

SEQ ID NO: 53896 - RNA, 19 nt, synthetic construct
  misc_feature 1..19: note = siRNA sense sequence
  source 1..19: mol_type = other RNA
tccacctgcctcggattcc

SEQ ID NO: 53897 - RNA, 19 nt, synthetic construct
  misc_feature 1..19: note = siRNA antisense sequence
  source 1..19: mol_type = other RNA
ggaatccgaggcaggtgga

SEQ ID NO: 53898 - RNA, 19 nt, synthetic construct
  misc_feature 1..19: note = siRNA sense sequence
  source 1..19: mol_type = other RNA
ccaaagtgctgggattaca

SEQ ID NO: 53899 - RNA, 19 nt, synthetic construct
  misc_feature 1..19: note = siRNA antisense sequence
  source 1..19: mol_type = other RNA
tgtaatcccagcactttgg

SEQ ID NO: 53900 - RNA, 19 nt, synthetic construct
  misc_feature 1..19: note = siRNA sense sequence
  source 1..19: mol_type = other RNA
caaagtgctgggattacag

SEQ ID NO: 53901 - RNA, 19 nt, synthetic construct
  misc_feature 1..19: note = siRNA antisense sequence
  source 1..19: mol_type = other RNA
ctgtaatcccagcactttg

SEQ ID NO: 53902 - RNA, 19 nt, synthetic construct
  misc_feature 1..19: note = siRNA sense sequence
  source 1..19: mol_type = other RNA
ctgggattacaggcatgca

SEQ ID NO: 53903 - RNA, 19 nt, synthetic construct
  misc_feature 1..19: note = siRNA antisense sequence
  source 1..19: mol_type = other RNA
tgcatgcctgtaatcccag

SEQ ID NO: 53904 - RNA, 19 nt, synthetic construct
  misc_feature 1..19: note = siRNA sense sequence
  source 1..19: mol_type = other RNA
tgggattacaggcatgcac

SEQ ID NO: 53905 - RNA, 19 nt, synthetic construct
  misc_feature 1..19: note = siRNA antisense sequence
  source 1..19: mol_type = other RNA
gtgcatgcctgtaatccca

SEQ ID NO: 53906 - RNA, 19 nt, synthetic construct
  misc_feature 1..19: note = siRNA sense sequence
  source 1..19: mol_type = other RNA
gggattacaggcatgcacc

SEQ ID NO: 53907 - RNA, 19 nt, synthetic construct
  misc_feature 1..19: note = siRNA antisense sequence
  source 1..19: mol_type = other RNA
ggtgcatgcctgtaatccc

SEQ ID NO: 53908 - RNA, 19 nt, synthetic construct
  misc_feature 1..19: note = siRNA sense sequence
  source 1..19: mol_type = other RNA
ggattacaggcatgcacca

SEQ ID NO: 53909 - RNA, 19 nt, synthetic construct
  misc_feature 1..19: note = siRNA antisense sequence
  source 1..19: mol_type = other RNA
tggtgcatgcctgtaatcc

SEQ ID NO: 53910 - RNA, 19 nt, synthetic construct
  misc_feature 1..19: note = siRNA sense sequence
  source 1..19: mol_type = other RNA
gattacaggcatgcaccac

SEQ ID NO: 53911 - RNA, 19 nt, synthetic construct
  misc_feature 1..19: note = siRNA antisense sequence
  source 1..19: mol_type = other RNA
gtggtgcatgcctgtaatc

SEQ ID NO: 53912 - RNA, 19 nt, synthetic construct
  misc_feature 1..19: note = siRNA sense sequence
  source 1..19: mol_type = other RNA
gcccttttcttccatctta

SEQ ID NO: 53913 - RNA, 19 nt, synthetic construct
  misc_feature 1..19: note = siRNA antisense sequence
  source 1..19: mol_type = other RNA
taagatggaagaaaagggc

SEQ ID NO: 53914 - RNA, 19 nt, synthetic construct
  misc_feature 1..19: note = siRNA sense sequence
  source 1..19: mol_type = other RNA
cccttttcttccatcttat

SEQ ID NO: 53915 - RNA, 19 nt, synthetic construct
  misc_feature 1..19: note = siRNA antisense sequence
  source 1..19: mol_type = other RNA
ataagatggaagaaaaggg

SEQ ID NO: 53916 - RNA, 19 nt, synthetic construct
  misc_feature 1..19: note = siRNA sense sequence
  source 1..19: mol_type = other RNA
cttttcttccatcttattc

SEQ ID NO: 53917 - RNA, 19 nt, synthetic construct
  misc_feature 1..19: note = siRNA antisense sequence
  source 1..19: mol_type = other RNA
gaataagatggaagaaaag

SEQ ID NO: 53918 - RNA, 19 nt, synthetic construct
  misc_feature 1..19: note = siRNA sense sequence
  source 1..19: mol_type = other RNA
ccttcttttaaaattaggc

SEQ ID NO: 53919 - RNA, 19 nt, synthetic construct
  misc_feature 1..19: note = siRNA antisense sequence
  source 1..19: mol_type = other RNA
gcctaattttaaaagaagg

SEQ ID NO: 53920 - RNA, 19 nt, synthetic construct
  misc_feature 1..19: note = siRNA sense sequence
  source 1..19: mol_type = other RNA
aaaattaggctttacttgg

SEQ ID NO: 53921 - RNA, 19 nt, synthetic construct
  misc_feature 1..19: note = siRNA antisense sequence
  source 1..19: mol_type = other RNA
ccaagtaaagcctaatttt

SEQ ID NO: 53922 - RNA, 19 nt, synthetic construct
  misc_feature 1..19: note = siRNA sense sequence
  source 1..19: mol_type = other RNA
aattaggctttacttggct

SEQ ID NO: 53923 - RNA, 19 nt, synthetic construct
  misc_feature 1..19: note = siRNA antisense sequence
  source 1..19: mol_type = other RNA
agccaagtaaagcctaatt

SEQ ID NO: 53924 - RNA, 19 nt, synthetic construct
  misc_feature 1..19: note = siRNA sense sequence
  source 1..19: mol_type = other RNA
ttaggctttacttggctct

SEQ ID NO: 53925 - RNA, 19 nt, synthetic construct
  misc_feature 1..19: note = siRNA antisense sequence
  source 1..19: mol_type = other RNA
agagccaagtaaagcctaa

SEQ ID NO: 53926 - RNA, 19 nt, synthetic construct
  misc_feature 1..19: note = siRNA sense sequence
  source 1..19: mol_type = other RNA
taggctttacttggctctg

SEQ ID NO: 53927 - RNA, 19 nt, synthetic construct
  misc_feature 1..19: note = siRNA antisense sequence
  source 1..19: mol_type = other RNA
cagagccaagtaaagccta

SEQ ID NO: 53928 - RNA, 19 nt, synthetic construct
  misc_feature 1..19: note = siRNA sense sequence
  source 1..19: mol_type = other RNA
aggctttacttggctctgg

SEQ ID NO: 53929 - RNA, 19 nt, synthetic construct
  misc_feature 1..19: note = siRNA antisense sequence
  source 1..19: mol_type = other RNA
ccagagccaagtaaagcct

SEQ ID NO: 53930 - RNA, 19 nt, synthetic construct
  misc_feature 1..19: note = siRNA sense sequence
  source 1..19: mol_type = other RNA
ggctttacttggctctggc

SEQ ID NO: 53931 - RNA, 19 nt, synthetic construct
  misc_feature 1..19: note = siRNA antisense sequence
  source 1..19: mol_type = other RNA
gccagagccaagtaaagcc

SEQ ID NO: 53932 - RNA, 19 nt, synthetic construct
  misc_feature 1..19: note = siRNA sense sequence
  source 1..19: mol_type = other RNA
gctttacttggctctggct

SEQ ID NO: 53933 - RNA, 19 nt, synthetic construct
  misc_feature 1..19: note = siRNA antisense sequence
  source 1..19: mol_type = other RNA
agccagagccaagtaaagc

SEQ ID NO: 53934 - RNA, 19 nt, synthetic construct
  misc_feature 1..19: note = siRNA sense sequence
  source 1..19: mol_type = other RNA
ctttacttggctctggctc

SEQ ID NO: 53935 - RNA, 19 nt, synthetic construct
  misc_feature 1..19: note = siRNA antisense sequence
  source 1..19: mol_type = other RNA
gagccagagccaagtaaag

SEQ ID NO: 53936 - RNA, 19 nt, synthetic construct
  misc_feature 1..19: note = siRNA sense sequence
  source 1..19: mol_type = other RNA
tttacttggctctggctct

SEQ ID NO: 53937 - RNA, 19 nt, synthetic construct
  misc_feature 1..19: note = siRNA antisense sequence
  source 1..19: mol_type = other RNA
agagccagagccaagtaaa

SEQ ID NO: 53938 - RNA, 19 nt, synthetic construct
  misc_feature 1..19: note = siRNA sense sequence
  source 1..19: mol_type = other RNA
ttggctctggctctctttt

SEQ ID NO: 53939 - RNA, 19 nt, synthetic construct
  misc_feature 1..19: note = siRNA antisense sequence
  source 1..19: mol_type = other RNA
aaaagagagccagagccaa

SEQ ID NO: 53940 - RNA, 19 nt, synthetic construct
  misc_feature 1..19: note = siRNA sense sequence
  source 1..19: mol_type = other RNA
tcttttcttctttcttgtc

SEQ ID NO: 53941 - RNA, 19 nt, synthetic construct
  misc_feature 1..19: note = siRNA antisense sequence
  source 1..19: mol_type = other RNA
gacaagaaagaagaaaaga

SEQ ID NO: 53942 - RNA, 19 nt, synthetic construct
  misc_feature 1..19: note = siRNA sense sequence
  source 1..19: mol_type = other RNA
cttttcttctttcttgtct

SEQ ID NO: 53943 - RNA, 19 nt, synthetic construct
  misc_feature 1..19: note = siRNA antisense sequence
  source 1..19: mol_type = other RNA
agacaagaaagaagaaaag

SEQ ID NO: 53944 - RNA, 19 nt, synthetic construct
  misc_feature 1..19: note = siRNA sense sequence
  source 1..19: mol_type = other RNA
cttctttcttgtctttaga

SEQ ID NO: 53945 - RNA, 19 nt, synthetic construct
  misc_feature 1..19: note = siRNA antisense sequence
  source 1..19: mol_type = other RNA
tctaaagacaagaaagaag

SEQ ID NO: 53946 - RNA, 19 nt, synthetic construct
  misc_feature 1..19: note = siRNA sense sequence
  source 1..19: mol_type = other RNA
ttctttcttgtctttagac

SEQ ID NO: 53947 - RNA, 19 nt, synthetic construct
  misc_feature 1..19: note = siRNA antisense sequence
  source 1..19: mol_type = other RNA
gtctaaagacaagaaagaa

SEQ ID NO: 53948 - RNA, 19 nt, synthetic construct
  misc_feature 1..19: note = siRNA sense sequence
  source 1..19: mol_type = other RNA
gtctttagacacccaagcc

SEQ ID NO: 53949 - RNA, 19 nt, synthetic construct
  misc_feature 1..19: note = siRNA antisense sequence
  source 1..19: mol_type = other RNA
ggcttgggtgtctaaagac

SEQ ID NO: 53950 - RNA, 19 nt, synthetic construct
  misc_feature 1..19: note = siRNA sense sequence
  source 1..19: mol_type = other RNA
tctttagacacccaagcct

SEQ ID NO: 53951 - RNA, 19 nt, synthetic construct
  misc_feature 1..19: note = siRNA antisense sequence
  source 1..19: mol_type = other RNA
aggcttgggtgtctaaaga

SEQ ID NO: 53952 - RNA, 19 nt, synthetic construct
  misc_feature 1..19: note = siRNA sense sequence
  source 1..19: mol_type = other RNA
tagacacccaagcctcaat

SEQ ID NO: 53953 - RNA, 19 nt, synthetic construct
  misc_feature 1..19: note = siRNA antisense sequence
  source 1..19: mol_type = other RNA
attgaggcttgggtgtcta

SEQ ID NO: 53954 - RNA, 19 nt, synthetic construct
  misc_feature 1..19: note = siRNA sense sequence
  source 1..19: mol_type = other RNA
agacacccaagcctcaatt

SEQ ID NO: 53955 - RNA, 19 nt, synthetic construct
  misc_feature 1..19: note = siRNA antisense sequence
  source 1..19: mol_type = other RNA
aattgaggcttgggtgtct

SEQ ID NO: 53956 - RNA, 19 nt, synthetic construct
  misc_feature 1..19: note = siRNA sense sequence
  source 1..19: mol_type = other RNA
acacccaagcctcaattag

SEQ ID NO: 53957 - RNA, 19 nt, synthetic construct
  misc_feature 1..19: note = siRNA antisense sequence
  source 1..19: mol_type = other RNA
ctaattgaggcttgggtgt

SEQ ID NO: 53958 - RNA, 19 nt, synthetic construct
  misc_feature 1..19: note = siRNA sense sequence
  source 1..19: mol_type = other RNA
cacccaagcctcaattagt

SEQ ID NO: 53959 - RNA, 19 nt, synthetic construct
  misc_feature 1..19: note = siRNA antisense sequence
  source 1..19: mol_type = other RNA
actaattgaggcttgggtg

SEQ ID NO: 53960 - RNA, 19 nt, synthetic construct
  misc_feature 1..19: note = siRNA sense sequence
  source 1..19: mol_type = other RNA
acccaagcctcaattagta

SEQ ID NO: 53961 - RNA, 19 nt, synthetic construct
  misc_feature 1..19: note = siRNA antisense sequence
  source 1..19: mol_type = other RNA
tactaattgaggcttgggt

SEQ ID NO: 53962 - RNA, 19 nt, synthetic construct
  misc_feature 1..19: note = siRNA sense sequence
  source 1..19: mol_type = other RNA
actggtagttactgtccct

SEQ ID NO: 53963 - RNA, 19 nt, synthetic construct
  misc_feature 1..19: note = siRNA antisense sequence
  source 1..19: mol_type = other RNA
agggacagtaactaccagt

SEQ ID NO: 53964 - RNA, 19 nt, synthetic construct
  misc_feature 1..19: note = siRNA sense sequence
  source 1..19: mol_type = other RNA
ctggtagttactgtccctg

SEQ ID NO: 53965 - RNA, 19 nt, synthetic construct
  misc_feature 1..19: note = siRNA antisense sequence
  source 1..19: mol_type = other RNA
cagggacagtaactaccag

SEQ ID NO: 53966 - RNA, 19 nt, synthetic construct
  misc_feature 1..19: note = siRNA sense sequence
  source 1..19: mol_type = other RNA
tggtagttactgtccctga

SEQ ID NO: 53967 - RNA, 19 nt, synthetic construct
  misc_feature 1..19: note = siRNA antisense sequence
  source 1..19: mol_type = other RNA
tcagggacagtaactacca

SEQ ID NO: 53968 - RNA, 19 nt, synthetic construct
  misc_feature 1..19: note = siRNA sense sequence
  source 1..19: mol_type = other RNA
caagtataagtcatcaaag

SEQ ID NO: 53969 - RNA, 19 nt, synthetic construct
  misc_feature 1..19: note = siRNA antisense sequence
  source 1..19: mol_type = other RNA
ctttgatgacttatacttg

SEQ ID NO: 53970 - RNA, 19 nt, synthetic construct
  misc_feature 1..19: note = siRNA sense sequence
  source 1..19: mol_type = other RNA
aggaggccttttatcaagt

SEQ ID NO: 53971 - RNA, 19 nt, synthetic construct
  misc_feature 1..19: note = siRNA antisense sequence
  source 1..19: mol_type = other RNA
acttgataaaaggcctcct

SEQ ID NO: 53972 - RNA, 19 nt, synthetic construct
  misc_feature 1..19: note = siRNA sense sequence
  source 1..19: mol_type = other RNA
ggaggccttttatcaagtt

SEQ ID NO: 53973 - RNA, 19 nt, synthetic construct
  misc_feature 1..19: note = siRNA antisense sequence
  source 1..19: mol_type = other RNA
aacttgataaaaggcctcc

SEQ ID NO: 53974 - RNA, 19 nt, synthetic construct
  misc_feature 1..19: note = siRNA sense sequence
  source 1..19: mol_type = other RNA
aggccttttatcaagttac

SEQ ID NO: 53975 - RNA, 19 nt, synthetic construct
  misc_feature 1..19: note = siRNA antisense sequence
  source 1..19: mol_type = other RNA
gtaacttgataaaaggcct

SEQ ID NO: 53976 - RNA, 19 nt, synthetic construct
  misc_feature 1..19: note = siRNA sense sequence
  source 1..19: mol_type = other RNA
ggccttttatcaagttaca

SEQ ID NO: 53977 - RNA, 19 nt, synthetic construct
  misc_feature 1..19: note = siRNA antisense sequence
  source 1..19: mol_type = other RNA
tgtaacttgataaaaggcc

SEQ ID NO: 53978 - RNA, 19 nt, synthetic construct
  misc_feature 1..19: note = siRNA sense sequence
  source 1..19: mol_type = other RNA
tcaagttacattcacagct

SEQ ID NO: 53979 - RNA, 19 nt, synthetic construct
  misc_feature 1..19: note = siRNA antisense sequence
  source 1..19: mol_type = other RNA
agctgtgaatgtaacttga

SEQ ID NO: 53980 - RNA, 19 nt, synthetic construct
  misc_feature 1..19: note = siRNA sense sequence
  source 1..19: mol_type = other RNA
caagttacattcacagctc

SEQ ID NO: 53981 - RNA, 19 nt, synthetic construct
  misc_feature 1..19: note = siRNA antisense sequence
  source 1..19: mol_type = other RNA
gagctgtgaatgtaacttg

SEQ ID NO: 53982 - RNA, 19 nt, synthetic construct
  misc_feature 1..19: note = siRNA sense sequence
  source 1..19: mol_type = other RNA
aagttacattcacagctct

SEQ ID NO: 53983 - RNA, 19 nt, synthetic construct
  misc_feature 1..19: note = siRNA antisense sequence
  source 1..19: mol_type = other RNA
agagctgtgaatgtaactt

SEQ ID NO: 53984 - RNA, 19 nt, synthetic construct
  misc_feature 1..19: note = siRNA sense sequence
  source 1..19: mol_type = other RNA
agttacattcacagctctg

SEQ ID NO: 53985 - RNA, 19 nt, synthetic construct
  misc_feature 1..19: note = siRNA antisense sequence
  source 1..19: mol_type = other RNA
cagagctgtgaatgtaact

SEQ ID NO: 53986 - RNA, 19 nt, synthetic construct
  misc_feature 1..19: note = siRNA sense sequence
  source 1..19: mol_type = other RNA
acattcacagctctgcaaa

SEQ ID NO: 53987 - RNA, 19 nt, synthetic construct
  misc_feature 1..19: note = siRNA antisense sequence
  source 1..19: mol_type = other RNA
tttgcagagctgtgaatgt

SEQ ID NO: 53988 - RNA, 19 nt, synthetic construct
  misc_feature 1..19: note = siRNA sense sequence
  source 1..19: mol_type = other RNA
cattcacagctctgcaaat

SEQ ID NO: 53989 - RNA, 19 nt, synthetic construct
  misc_feature 1..19: note = siRNA antisense sequence
  source 1..19: mol_type = other RNA
atttgcagagctgtgaatg

SEQ ID NO: 53990 - RNA, 19 nt, synthetic construct
  misc_feature 1..19: note = siRNA sense sequence
  source 1..19: mol_type = other RNA
attcacagctctgcaaatt

SEQ ID NO: 53991 - RNA, 19 nt, synthetic construct
  misc_feature 1..19: note = siRNA antisense sequence
  source 1..19: mol_type = other RNA
aatttgcagagctgtgaat

SEQ ID NO: 53992 - RNA, 19 nt, synthetic construct
  misc_feature 1..19: note = siRNA sense sequence
  source 1..19: mol_type = other RNA
ttcacagctctgcaaatta

SEQ ID NO: 53993 - RNA, 19 nt, synthetic construct
  misc_feature 1..19: note = siRNA antisense sequence
  source 1..19: mol_type = other RNA
taatttgcagagctgtgaa

SEQ ID NO: 53994 - RNA, 19 nt, synthetic construct
  misc_feature 1..19: note = siRNA sense sequence
  source 1..19: mol_type = other RNA
tcacagctctgcaaattac

SEQ ID NO: 53995 - RNA, 19 nt, synthetic construct
  misc_feature 1..19: note = siRNA antisense sequence
  source 1..19: mol_type = other RNA
gtaatttgcagagctgtga

SEQ ID NO: 53996 - RNA, 19 nt, synthetic construct
  misc_feature 1..19: note = siRNA sense sequence
  source 1..19: mol_type = other RNA
cacagctctgcaaattaca

SEQ ID NO: 53997 - RNA, 19 nt, synthetic construct
  misc_feature 1..19: note = siRNA antisense sequence
  source 1..19: mol_type = other RNA
tgtaatttgcagagctgtg

SEQ ID NO: 53998 - RNA, 19 nt, synthetic construct
  misc_feature 1..19: note = siRNA sense sequence
  source 1..19: mol_type = other RNA
acagctctgcaaattacac

SEQ ID NO: 53999 - RNA, 19 nt, synthetic construct
  misc_feature 1..19: note = siRNA antisense sequence
  source 1..19: mol_type = other RNA
gtgtaatttgcagagctgt

SEQ ID NO: 54000 - RNA, 19 nt, synthetic construct
  misc_feature 1..19: note = siRNA sense sequence
  source 1..19: mol_type = other RNA
acactctcattctactccc

SEQ ID NO: 54001 - RNA, 19 nt, synthetic construct
  misc_feature 1..19: note = siRNA antisense sequence
  source 1..19: mol_type = other RNA
gggagtagaatgagagtgt

SEQ ID NO: 54002 - RNA, 19 nt, synthetic construct
  misc_feature 1..19: note = siRNA sense sequence
  source 1..19: mol_type = other RNA
cactctcattctactccct

SEQ ID NO: 54003 - RNA, 19 nt, synthetic construct
  misc_feature 1..19: note = siRNA antisense sequence
  source 1..19: mol_type = other RNA
agggagtagaatgagagtg

SEQ ID NO: 54004 - RNA, 19 nt, synthetic construct
  misc_feature 1..19: note = siRNA sense sequence
  source 1..19: mol_type = other RNA
actctcattctactccctt

SEQ ID NO: 54005 - RNA, 19 nt, synthetic construct
  misc_feature 1..19: note = siRNA antisense sequence
  source 1..19: mol_type = other RNA
aagggagtagaatgagagt

SEQ ID NO: 54006 - RNA, 19 nt, synthetic construct
  misc_feature 1..19: note = siRNA sense sequence
  source 1..19: mol_type = other RNA
ctctcattctactcccttc

SEQ ID NO: 54007 - RNA, 19 nt, synthetic construct
  misc_feature 1..19: note = siRNA antisense sequence
  source 1..19: mol_type = other RNA
gaagggagtagaatgagag

SEQ ID NO: 54008 - RNA, 19 nt, synthetic construct
  misc_feature 1..19: note = siRNA sense sequence
  source 1..19: mol_type = other RNA
ccttcattttgcacattct

SEQ ID NO: 54009 - RNA, 19 nt, synthetic construct
  misc_feature 1..19: note = siRNA antisense sequence
  source 1..19: mol_type = other RNA
agaatgtgcaaaatgaagg

SEQ ID NO: 54010 - RNA, 19 nt, synthetic construct
  misc_feature 1..19: note = siRNA sense sequence
  source 1..19: mol_type = other RNA
cattttgcacattcttctt

SEQ ID NO: 54011 - RNA, 19 nt, synthetic construct
  misc_feature 1..19: note = siRNA antisense sequence
  source 1..19: mol_type = other RNA
aagaagaatgtgcaaaatg

SEQ ID NO: 54012 - RNA, 19 nt, synthetic construct
  misc_feature 1..19: note = siRNA sense sequence
  source 1..19: mol_type = other RNA
tgcacattcttcttttcca

SEQ ID NO: 54013 - RNA, 19 nt, synthetic construct
  misc_feature 1..19: note = siRNA antisense sequence
  source 1..19: mol_type = other RNA
tggaaaagaagaatgtgca

SEQ ID NO: 54014 - RNA, 19 nt, synthetic construct
  misc_feature 1..19: note = siRNA sense sequence
  source 1..19: mol_type = other RNA
gcacattcttcttttccat

SEQ ID NO: 54015 - RNA, 19 nt, synthetic construct
  misc_feature 1..19: note = siRNA antisense sequence
  source 1..19: mol_type = other RNA
atggaaaagaagaatgtgc

SEQ ID NO: 54016 - RNA, 19 nt, synthetic construct
  misc_feature 1..19: note = siRNA sense sequence
  source 1..19: mol_type = other RNA
ataaaggataatatgcctg

SEQ ID NO: 54017 - RNA, 19 nt, synthetic construct
  misc_feature 1..19: note = siRNA antisense sequence
  source 1..19: mol_type = other RNA
caggcatattatcctttat

SEQ ID NO: 54018 - RNA, 19 nt, synthetic construct
  misc_feature 1..19: note = siRNA sense sequence
  source 1..19: mol_type = other RNA
taaaggataatatgcctga

SEQ ID NO: 54019 - RNA, 19 nt, synthetic construct
  misc_feature 1..19: note = siRNA antisense sequence
  source 1..19: mol_type = other RNA
tcaggcatattatccttta

SEQ ID NO: 54020 - RNA, 19 nt, synthetic construct
  misc_feature 1..19: note = siRNA sense sequence
  source 1..19: mol_type = other RNA
aaaggataatatgcctgag

SEQ ID NO: 54021 - RNA, 19 nt, synthetic construct
  misc_feature 1..19: note = siRNA antisense sequence
  source 1..19: mol_type = other RNA
ctcaggcatattatccttt

SEQ ID NO: 54022 - RNA, 19 nt, synthetic construct
  misc_feature 1..19: note = siRNA sense sequence
  source 1..19: mol_type = other RNA
aaggataatatgcctgagg

SEQ ID NO: 54023 - RNA, 19 nt, synthetic construct
  misc_feature 1..19: note = siRNA antisense sequence
  source 1..19: mol_type = other RNA
cctcaggcatattatcctt

SEQ ID NO: 54024 - RNA, 19 nt, synthetic construct
  misc_feature 1..19: note = siRNA sense sequence
  source 1..19: mol_type = other RNA
aggataatatgcctgagga

SEQ ID NO: 54025 - RNA, 19 nt, synthetic construct
  misc_feature 1..19: note = siRNA antisense sequence
  source 1..19: mol_type = other RNA
tcctcaggcatattatcct

SEQ ID NO: 54026 - RNA, 19 nt, synthetic construct
  misc_feature 1..19: note = siRNA sense sequence
  source 1..19: mol_type = other RNA
tatgcctgaggaatagtgt

SEQ ID NO: 54027 - RNA, 19 nt, synthetic construct
  misc_feature 1..19: note = siRNA antisense sequence
  source 1..19: mol_type = other RNA
acactattcctcaggcata

SEQ ID NO: 54028 - RNA, 19 nt, synthetic construct
  misc_feature 1..19: note = siRNA sense sequence
  source 1..19: mol_type = other RNA
gaatagtgttcctttagca

SEQ ID NO: 54029 - RNA, 19 nt, synthetic construct
  misc_feature 1..19: note = siRNA antisense sequence
  source 1..19: mol_type = other RNA
tgctaaaggaacactattc

SEQ ID NO: 54030 - RNA, 19 nt, synthetic construct
  misc_feature 1..19: note = siRNA sense sequence
  source 1..19: mol_type = other RNA
aatagtgttcctttagcac

SEQ ID NO: 54031 - RNA, 19 nt, synthetic construct
  misc_feature 1..19: note = siRNA antisense sequence
  source 1..19: mol_type = other RNA
gtgctaaaggaacactatt

SEQ ID NO: 54032 - RNA, 19 nt, synthetic construct
  misc_feature 1..19: note = siRNA sense sequence
  source 1..19: mol_type = other RNA
tgttcctttagcacttgta

SEQ ID NO: 54033 - RNA, 19 nt, synthetic construct
  misc_feature 1..19: note = siRNA antisense sequence
  source 1..19: mol_type = other RNA
tacaagtgctaaaggaaca

SEQ ID NO: 54034 - RNA, 19 nt, synthetic construct
  misc_feature 1..19: note = siRNA sense sequence
  source 1..19: mol_type = other RNA
gttcctttagcacttgtaa

SEQ ID NO: 54035 - RNA, 19 nt, synthetic construct
  misc_feature 1..19: note = siRNA antisense sequence
  source 1..19: mol_type = other RNA
ttacaagtgctaaaggaac

SEQ ID NO: 54036 - RNA, 19 nt, synthetic construct
  misc_feature 1..19: note = siRNA sense sequence
  source 1..19: mol_type = other RNA
cctttagcacttgtaagaa

SEQ ID NO: 54037 - RNA, 19 nt, synthetic construct
  misc_feature 1..19: note = siRNA antisense sequence
  source 1..19: mol_type = other RNA
ttcttacaagtgctaaagg

SEQ ID NO: 54038 - RNA, 19 nt, synthetic construct
  misc_feature 1..19: note = siRNA sense sequence
  source 1..19: mol_type = other RNA
ctttagcacttgtaagaat

SEQ ID NO: 54039 - RNA, 19 nt, synthetic construct
  misc_feature 1..19: note = siRNA antisense sequence
  source 1..19: mol_type = other RNA
attcttacaagtgctaaag

SEQ ID NO: 54040 - RNA, 19 nt, synthetic construct
  misc_feature 1..19: note = siRNA sense sequence
  source 1..19: mol_type = other RNA
cttggtaagtgagttagaa

SEQ ID NO: 54041 - RNA, 19 nt, synthetic construct
  misc_feature 1..19: note = siRNA antisense sequence
  source 1..19: mol_type = other RNA
ttctaactcacttaccaag

SEQ ID NO: 54042 - RNA, 19 nt, synthetic construct
  misc_feature 1..19: note = siRNA sense sequence
  source 1..19: mol_type = other RNA
gaagtgctattctgtggca

SEQ ID NO: 54043 - RNA, 19 nt, synthetic construct
  misc_feature 1..19: note = siRNA antisense sequence
  source 1..19: mol_type = other RNA
tgccacagaatagcacttc

SEQ ID NO: 54044 - RNA, 19 nt, synthetic construct
  misc_feature 1..19: note = siRNA sense sequence
  source 1..19: mol_type = other RNA
aagtgctattctgtggcat

SEQ ID NO: 54045 - RNA, 19 nt, synthetic construct
  misc_feature 1..19: note = siRNA antisense sequence
  source 1..19: mol_type = other RNA
atgccacagaatagcactt

SEQ ID NO: 54046 - RNA, 19 nt, synthetic construct
  misc_feature 1..19: note = siRNA sense sequence
  source 1..19: mol_type = other RNA
gctattctgtggcattttg

SEQ ID NO: 54047 - RNA, 19 nt, synthetic construct
  misc_feature 1..19: note = siRNA antisense sequence
  source 1..19: mol_type = other RNA
caaaatgccacagaatagc

SEQ ID NO: 54048 - RNA, 19 nt, synthetic construct
  misc_feature 1..19: note = siRNA sense sequence
  source 1..19: mol_type = other RNA
ctattctgtggcattttga

SEQ ID NO: 54049 - RNA, 19 nt, synthetic construct
  misc_feature 1..19: note = siRNA antisense sequence
  source 1..19: mol_type = other RNA
tcaaaatgccacagaatag

SEQ ID NO: 54050 - RNA, 19 nt, synthetic construct
  misc_feature 1..19: note = siRNA sense sequence
  source 1..19: mol_type = other RNA
tattctgtggcattttgaa

SEQ ID NO: 54051 - RNA, 19 nt, synthetic construct
  misc_feature 1..19: note = siRNA antisense sequence
  source 1..19: mol_type = other RNA
ttcaaaatgccacagaata

SEQ ID NO: 54052 - RNA, 19 nt, synthetic construct
  misc_feature 1..19: note = siRNA sense sequence
  source 1..19: mol_type = other RNA
atcaaaatctgcatgtggc

SEQ ID NO: 54053 - RNA, 19 nt, synthetic construct
  misc_feature 1..19: note = siRNA antisense sequence
  source 1..19: mol_type = other RNA
gccacatgcagattttgat

SEQ ID NO: 54054 - RNA, 19 nt, synthetic construct
  misc_feature 1..19: note = siRNA sense sequence
  source 1..19: mol_type = other RNA
ttattcattgatatggctc

SEQ ID NO: 54055 - RNA, 19 nt, synthetic construct
  misc_feature 1..19: note = siRNA antisense sequence
  source 1..19: mol_type = other RNA
gagccatatcaatgaataa

SEQ ID NO: 54056 - RNA, 19 nt, synthetic construct
  misc_feature 1..19: note = siRNA sense sequence
  source 1..19: mol_type = other RNA
tattcattgatatggctct

SEQ ID NO: 54057 - RNA, 19 nt, synthetic construct
  misc_feature 1..19: note = siRNA antisense sequence
  source 1..19: mol_type = other RNA
agagccatatcaatgaata

SEQ ID NO: 54058 - RNA, 19 nt, synthetic construct
  misc_feature 1..19: note = siRNA sense sequence
  source 1..19: mol_type = other RNA
ttcattgatatggctctct

SEQ ID NO: 54059 - RNA, 19 nt, synthetic construct
  misc_feature 1..19: note = siRNA antisense sequence
  source 1..19: mol_type = other RNA
agagagccatatcaatgaa

SEQ ID NO: 54060 - RNA, 19 nt, synthetic construct
  misc_feature 1..19: note = siRNA sense sequence
  source 1..19: mol_type = other RNA
tcattgatatggctctctt

SEQ ID NO: 54061 - RNA, 19 nt, synthetic construct
  misc_feature 1..19: note = siRNA antisense sequence
  source 1..19: mol_type = other RNA
aagagagccatatcaatga

SEQ ID NO: 54062 - RNA, 19 nt, synthetic construct
  misc_feature 1..19: note = siRNA sense sequence
  source 1..19: mol_type = other RNA
cattgatatggctctcttc

SEQ ID NO: 54063 - RNA, 19 nt, synthetic construct
  misc_feature 1..19: note = siRNA antisense sequence
  source 1..19: mol_type = other RNA
gaagagagccatatcaatg

SEQ ID NO: 54064 - RNA, 19 nt, synthetic construct
  misc_feature 1..19: note = siRNA sense sequence
  source 1..19: mol_type = other RNA
attgatatggctctcttct

SEQ ID NO: 54065 - RNA, 19 nt, synthetic construct
  misc_feature 1..19: note = siRNA antisense sequence
  source 1..19: mol_type = other RNA
agaagagagccatatcaat

SEQ ID NO: 54066 - RNA, 19 nt, synthetic construct
  misc_feature 1..19: note = siRNA sense sequence
  source 1..19: mol_type = other RNA
gatatggctctcttctcaa

SEQ ID NO: 54067 - RNA, 19 nt, synthetic construct
  misc_feature 1..19: note = siRNA antisense sequence
  source 1..19: mol_type = other RNA
ttgagaagagagccatatc

SEQ ID NO: 54068 - RNA, 19 nt, synthetic construct
  misc_feature 1..19: note = siRNA sense sequence
  source 1..19: mol_type = other RNA
tatggctctcttctcaaaa

SEQ ID NO: 54069 - RNA, 19 nt, synthetic construct
  misc_feature 1..19: note = siRNA antisense sequence
  source 1..19: mol_type = other RNA
ttttgagaagagagccata

SEQ ID NO: 54070 - RNA, 19 nt, synthetic construct
  misc_feature 1..19: note = siRNA sense sequence
  source 1..19: mol_type = other RNA
caaatctaacttttcactc

SEQ ID NO: 54071 - RNA, 19 nt, synthetic construct
  misc_feature 1..19: note = siRNA antisense sequence
  source 1..19: mol_type = other RNA
gagtgaaaagttagatttg

SEQ ID NO: 54072 - RNA, 19 nt, synthetic construct
  misc_feature 1..19: note = siRNA sense sequence
  source 1..19: mol_type = other RNA
atttatgctcttcctgtaa

SEQ ID NO: 54073 - RNA, 19 nt, synthetic construct
  misc_feature 1..19: note = siRNA antisense sequence
  source 1..19: mol_type = other RNA
ttacaggaagagcataaat

SEQ ID NO: 54074 - RNA, 19 nt, synthetic construct
  misc_feature 1..19: note = siRNA sense sequence
  source 1..19: mol_type = other RNA
tttatgctcttcctgtaag

SEQ ID NO: 54075 - RNA, 19 nt, synthetic construct
  misc_feature 1..19: note = siRNA antisense sequence
  source 1..19: mol_type = other RNA
cttacaggaagagcataaa

SEQ ID NO: 54076 - RNA, 19 nt, synthetic construct
  misc_feature 1..19: note = siRNA sense sequence
  source 1..19: mol_type = other RNA
ttatgctcttcctgtaagc

SEQ ID NO: 54077 - RNA, 19 nt, synthetic construct
  misc_feature 1..19: note = siRNA antisense sequence
  source 1..19: mol_type = other RNA
gcttacaggaagagcataa

SEQ ID NO: 54078 - RNA, 19 nt, synthetic construct
  misc_feature 1..19: note = siRNA sense sequence
  source 1..19: mol_type = other RNA
agatgatctcttaaaatgg

SEQ ID NO: 54079 - RNA, 19 nt, synthetic construct
  misc_feature 1..19: note = siRNA antisense sequence
  source 1..19: mol_type = other RNA
ccattttaagagatcatct

SEQ ID NO: 54080 - RNA, 19 nt, synthetic construct
  misc_feature 1..19: note = siRNA sense sequence
  source 1..19: mol_type = other RNA
atggtttactattcacttg

SEQ ID NO: 54081 - RNA, 19 nt, synthetic construct
  misc_feature 1..19: note = siRNA antisense sequence
  source 1..19: mol_type = other RNA
caagtgaatagtaaaccat

SEQ ID NO: 54082 - RNA, 19 nt, synthetic construct
  misc_feature 1..19: note = siRNA sense sequence
  source 1..19: mol_type = other RNA
tttactattcacttgaccc

SEQ ID NO: 54083 - RNA, 19 nt, synthetic construct
  misc_feature 1..19: note = siRNA antisense sequence
  source 1..19: mol_type = other RNA
gggtcaagtgaatagtaaa

SEQ ID NO: 54084 - RNA, 19 nt, synthetic construct
  misc_feature 1..19: note = siRNA sense sequence
  source 1..19: mol_type = other RNA
ttactattcacttgaccca

SEQ ID NO: 54085 - RNA, 19 nt, synthetic construct
  misc_feature 1..19: note = siRNA antisense sequence
  source 1..19: mol_type = other RNA
tgggtcaagtgaatagtaa

SEQ ID NO: 54086 - RNA, 19 nt, synthetic construct
  misc_feature 1..19: note = siRNA sense sequence
  source 1..19: mol_type = other RNA
acatccatgaagctaccca

SEQ ID NO: 54087 - RNA, 19 nt, synthetic construct
  misc_feature 1..19: note = siRNA antisense sequence
  source 1..19: mol_type = other RNA
tgggtagcttcatggatgt

SEQ ID NO: 54088 - RNA, 19 nt, synthetic construct
  misc_feature 1..19: note = siRNA sense sequence
  source 1..19: mol_type = other RNA
catccatgaagctacccag

SEQ ID NO: 54089 - RNA, 19 nt, synthetic construct
  misc_feature 1..19: note = siRNA antisense sequence
  source 1..19: mol_type = other RNA
ctgggtagcttcatggatg

SEQ ID NO: 54090 - RNA, 19 nt, synthetic construct
  misc_feature 1..19: note = siRNA sense sequence
  source 1..19: mol_type = other RNA
atccatgaagctacccagg

SEQ ID NO: 54091 - RNA, 19 nt, synthetic construct
  misc_feature 1..19: note = siRNA antisense sequence
  source 1..19: mol_type = other RNA
cctgggtagcttcatggat

SEQ ID NO: 54092 - RNA, 19 nt, synthetic construct
  misc_feature 1..19: note = siRNA sense sequence
  source 1..19: mol_type = other RNA
tgaagctacccaggcaatc

SEQ ID NO: 54093 - RNA, 19 nt, synthetic construct
  misc_feature 1..19: note = siRNA antisense sequence
  source 1..19: mol_type = other RNA
gattgcctgggtagcttca

SEQ ID NO: 54094 - RNA, 19 nt, synthetic construct
  misc_feature 1..19: note = siRNA sense sequence
  source 1..19: mol_type = other RNA
gaagctacccaggcaatca

SEQ ID NO: 54095 - RNA, 19 nt, synthetic construct
  misc_feature 1..19: note = siRNA antisense sequence
  source 1..19: mol_type = other RNA
tgattgcctgggtagcttc

SEQ ID NO: 54096 - RNA, 19 nt, synthetic construct
  misc_feature 1..19: note = siRNA sense sequence
  source 1..19: mol_type = other RNA
aagctacccaggcaatcaa

SEQ ID NO: 54097 - RNA, 19 nt, synthetic construct
  misc_feature 1..19: note = siRNA antisense sequence
  source 1..19: mol_type = other RNA
ttgattgcctgggtagctt

SEQ ID NO: 54098 - RNA, 19 nt, synthetic construct
  misc_feature 1..19: note = siRNA sense sequence
  source 1..19: mol_type = other RNA
agctacccaggcaatcaag

SEQ ID NO: 54099 - RNA, 19 nt, synthetic construct
  misc_feature 1..19: note = siRNA antisense sequence
  source 1..19: mol_type = other RNA
cttgattgcctgggtagct

SEQ ID NO: 54100 - RNA, 19 nt, synthetic construct
  misc_feature 1..19: note = siRNA sense sequence
  source 1..19: mol_type = other RNA
gctacccaggcaatcaagg

SEQ ID NO: 54101 - RNA, 19 nt, synthetic construct
  misc_feature 1..19: note = siRNA antisense sequence
  source 1..19: mol_type = other RNA
ccttgattgcctgggtagc

SEQ ID NO: 54102 - RNA, 19 nt, synthetic construct
  misc_feature 1..19: note = siRNA sense sequence
  source 1..19: mol_type = other RNA
ctacccaggcaatcaaggg

SEQ ID NO: 54103 - RNA, 19 nt, synthetic construct
  misc_feature 1..19: note = siRNA antisense sequence
  source 1..19: mol_type = other RNA
cccttgattgcctgggtag

SEQ ID NO: 54104 - RNA, 19 nt, synthetic construct
  misc_feature 1..19: note = siRNA sense sequence
  source 1..19: mol_type = other RNA
cccaggcaatcaagggtta

SEQ ID NO: 54105 - RNA, 19 nt, synthetic construct
  misc_feature 1..19: note = siRNA antisense sequence
  source 1..19: mol_type = other RNA
taacccttgattgcctggg

SEQ ID NO: 54106 - RNA, 19 nt, synthetic construct
  misc_feature 1..19: note = siRNA sense sequence
  source 1..19: mol_type = other RNA
ccaggcaatcaagggttat

SEQ ID NO: 54107 - RNA, 19 nt, synthetic construct
  misc_feature 1..19: note = siRNA antisense sequence
  source 1..19: mol_type = other RNA
ataacccttgattgcctgg

SEQ ID NO: 54108 - RNA, 19 nt, synthetic construct
  misc_feature 1..19: note = siRNA sense sequence
  source 1..19: mol_type = other RNA
caggcaatcaagggttatg

SEQ ID NO: 54109 - RNA, 19 nt, synthetic construct
  misc_feature 1..19: note = siRNA antisense sequence
  source 1..19: mol_type = other RNA
cataacccttgattgcctg

SEQ ID NO: 54110 - RNA, 19 nt, synthetic construct
  misc_feature 1..19: note = siRNA sense sequence
  source 1..19: mol_type = other RNA
aggcaatcaagggttatgt

SEQ ID NO: 54111 - RNA, 19 nt, synthetic construct
  misc_feature 1..19: note = siRNA antisense sequence
  source 1..19: mol_type = other RNA
acataacccttgattgcct

SEQ ID NO: 54112 - RNA, 19 nt, synthetic construct
  misc_feature 1..19: note = siRNA sense sequence
  source 1..19: mol_type = other RNA
ggcaatcaagggttatgta

SEQ ID NO: 54113 - RNA, 19 nt, synthetic construct
  misc_feature 1..19: note = siRNA antisense sequence
  source 1..19: mol_type = other RNA
tacataacccttgattgcc

SEQ ID NO: 54114 - RNA, 19 nt, synthetic construct
  misc_feature 1..19: note = siRNA sense sequence
  source 1..19: mol_type = other RNA
tcaagggttatgtatatct

SEQ ID NO: 54115 - RNA, 19 nt, synthetic construct
  misc_feature 1..19: note = siRNA antisense sequence
  source 1..19: mol_type = other RNA
agatatacataacccttga

SEQ ID NO: 54116 - RNA, 19 nt, synthetic construct
  misc_feature 1..19: note = siRNA sense sequence
  source 1..19: mol_type = other RNA
caagggttatgtatatctg

SEQ ID NO: 54117 - RNA, 19 nt, synthetic construct
  misc_feature 1..19: note = siRNA antisense sequence
  source 1..19: mol_type = other RNA
cagatatacataacccttg

SEQ ID NO: 54118 - RNA, 19 nt, synthetic construct
  misc_feature 1..19: note = siRNA sense sequence
  source 1..19: mol_type = other RNA
aagggttatgtatatctga

SEQ ID NO: 54119 - RNA, 19 nt, synthetic construct
  misc_feature 1..19: note = siRNA antisense sequence
  source 1..19: mol_type = other RNA
tcagatatacataaccctt

SEQ ID NO: 54120 - RNA, 19 nt, synthetic construct
  misc_feature 1..19: note = siRNA sense sequence
  source 1..19: mol_type = other RNA
agggttatgtatatctgaa

SEQ ID NO: 54121 - RNA, 19 nt, synthetic construct
  misc_feature 1..19: note = siRNA antisense sequence
  source 1..19: mol_type = other RNA
ttcagatatacataaccct

SEQ ID NO: 54122 - RNA, 19 nt, synthetic construct
  misc_feature 1..19: note = siRNA sense sequence
  source 1..19: mol_type = other RNA
aagatgtgactttacagaa

SEQ ID NO: 54123 - RNA, 19 nt, synthetic construct
  misc_feature 1..19: note = siRNA antisense sequence
  source 1..19: mol_type = other RNA
ttctgtaaagtcacatctt

SEQ ID NO: 54124 - RNA, 19 nt, synthetic construct
  misc_feature 1..19: note = siRNA sense sequence
  source 1..19: mol_type = other RNA
agatgtgactttacagaag

SEQ ID NO: 54125 - RNA, 19 nt, synthetic construct
  misc_feature 1..19: note = siRNA antisense sequence
  source 1..19: mol_type = other RNA
cttctgtaaagtcacatct

SEQ ID NO: 54126 - RNA, 19 nt, synthetic construct
  misc_feature 1..19: note = siRNA sense sequence
  source 1..19: mol_type = other RNA
gtgactttacagaagcagt

SEQ ID NO: 54127 - RNA, 19 nt, synthetic construct
  misc_feature 1..19: note = siRNA antisense sequence
  source 1..19: mol_type = other RNA
actgcttctgtaaagtcac

SEQ ID NO: 54128 - RNA, 19 nt, synthetic construct
  misc_feature 1..19: note = siRNA sense sequence
  source 1..19: mol_type = other RNA
acagaagcagtgtgtgccg

SEQ ID NO: 54129 - RNA, 19 nt, synthetic construct
  misc_feature 1..19: note = siRNA antisense sequence
  source 1..19: mol_type = other RNA
cggcacacactgcttctgt

SEQ ID NO: 54130 - RNA, 19 nt, synthetic construct
  misc_feature 1..19: note = siRNA sense sequence
  source 1..19: mol_type = other RNA
cagaagcagtgtgtgccgt

SEQ ID NO: 54131 - RNA, 19 nt, synthetic construct
  misc_feature 1..19: note = siRNA antisense sequence
  source 1..19: mol_type = other RNA
acggcacacactgcttctg

SEQ ID NO: 54132 - RNA, 19 nt, synthetic construct
  misc_feature 1..19: note = siRNA sense sequence
  source 1..19: mol_type = other RNA
agaagcagtgtgtgccgtt

SEQ ID NO: 54133 - RNA, 19 nt, synthetic construct
  misc_feature 1..19: note = siRNA antisense sequence
  source 1..19: mol_type = other RNA
aacggcacacactgcttct

SEQ ID NO: 54134 - RNA, 19 nt, synthetic construct
  misc_feature 1..19: note = siRNA sense sequence
  source 1..19: mol_type = other RNA
gaagcagtgtgtgccgttc

SEQ ID NO: 54135 - RNA, 19 nt, synthetic construct
  misc_feature 1..19: note = siRNA antisense sequence
  source 1..19: mol_type = other RNA
gaacggcacacactgcttc

SEQ ID NO: 54136 - RNA, 19 nt, synthetic construct
  misc_feature 1..19: note = siRNA sense sequence
  source 1..19: mol_type = other RNA
aagcagtgtgtgccgttcc

SEQ ID NO: 54137 - RNA, 19 nt, synthetic construct
  misc_feature 1..19: note = siRNA antisense sequence
  source 1..19: mol_type = other RNA
ggaacggcacacactgctt

SEQ ID NO: 54138 - RNA, 19 nt, synthetic construct
  misc_feature 1..19: note = siRNA sense sequence
  source 1..19: mol_type = other RNA
agcagtgtgtgccgttcca

SEQ ID NO: 54139 - RNA, 19 nt, synthetic construct
  misc_feature 1..19: note = siRNA antisense sequence
  source 1..19: mol_type = other RNA
tggaacggcacacactgct

SEQ ID NO: 54140 - RNA, 19 nt, synthetic construct
  misc_feature 1..19: note = siRNA sense sequence
  source 1..19: mol_type = other RNA
gcagtgtgtgccgttccat

SEQ ID NO: 54141 - RNA, 19 nt, synthetic construct
  misc_feature 1..19: note = siRNA antisense sequence
  source 1..19: mol_type = other RNA
atggaacggcacacactgc

SEQ ID NO: 54142 - RNA, 19 nt, synthetic construct
  misc_feature 1..19: note = siRNA sense sequence
  source 1..19: mol_type = other RNA
cagtgtgtgccgttccatc

SEQ ID NO: 54143 - RNA, 19 nt, synthetic construct
  misc_feature 1..19: note = siRNA antisense sequence
  source 1..19: mol_type = other RNA
gatggaacggcacacactg

SEQ ID NO: 54144 - RNA, 19 nt, synthetic construct
  misc_feature 1..19: note = siRNA sense sequence
  source 1..19: mol_type = other RNA
agtgtgtgccgttccatca

SEQ ID NO: 54145 - RNA, 19 nt, synthetic construct
  misc_feature 1..19: note = siRNA antisense sequence
  source 1..19: mol_type = other RNA
tgatggaacggcacacact

SEQ ID NO: 54146 - RNA, 19 nt, synthetic construct
  misc_feature 1..19: note = siRNA sense sequence
  source 1..19: mol_type = other RNA
gtgtgtgccgttccatcat

SEQ ID NO: 54147 - RNA, 19 nt, synthetic construct
  misc_feature 1..19: note = siRNA antisense sequence
  source 1..19: mol_type = other RNA
atgatggaacggcacacac

SEQ ID NO: 54148 - RNA, 19 nt, synthetic construct
  misc_feature 1..19: note = siRNA sense sequence
  source 1..19: mol_type = other RNA
tgtgtgccgttccatcatt

SEQ ID NO: 54149 - RNA, 19 nt, synthetic construct
  misc_feature 1..19: note = siRNA antisense sequence
  source 1..19: mol_type = other RNA
aatgatggaacggcacaca

SEQ ID NO: 54150 - RNA, 19 nt, synthetic construct
  misc_feature 1..19: note = siRNA sense sequence
  source 1..19: mol_type = other RNA
gtgtgccgttccatcattg

SEQ ID NO: 54151 - RNA, 19 nt, synthetic construct
  misc_feature 1..19: note = siRNA antisense sequence
  source 1..19: mol_type = other RNA
caatgatggaacggcacac

SEQ ID NO: 54152 - RNA, 19 nt, synthetic construct
  misc_feature 1..19: note = siRNA sense sequence
  source 1..19: mol_type = other RNA
tgtgccgttccatcattgc

SEQ ID NO: 54153 - RNA, 19 nt, synthetic construct
  misc_feature 1..19: note = siRNA antisense sequence
  source 1..19: mol_type = other RNA
gcaatgatggaacggcaca

SEQ ID NO: 54154 - RNA, 19 nt, synthetic construct
  misc_feature 1..19: note = siRNA sense sequence
  source 1..19: mol_type = other RNA
gtgccgttccatcattgca

SEQ ID NO: 54155 - RNA, 19 nt, synthetic construct
  misc_feature 1..19: note = siRNA antisense sequence
  source 1..19: mol_type = other RNA
tgcaatgatggaacggcac

SEQ ID NO: 54156 - RNA, 19 nt, synthetic construct
  misc_feature 1..19: note = siRNA sense sequence
  source 1..19: mol_type = other RNA
tgccgttccatcattgcaa

SEQ ID NO: 54157 - RNA, 19 nt, synthetic construct
  misc_feature 1..19: note = siRNA antisense sequence
  source 1..19: mol_type = other RNA
ttgcaatgatggaacggca

SEQ ID NO: 54158 - RNA, 19 nt, synthetic construct
  misc_feature 1..19: note = siRNA sense sequence
  source 1..19: mol_type = other RNA
catcattgcaatggtggag

SEQ ID NO: 54159 - RNA, 19 nt, synthetic construct
  misc_feature 1..19: note = siRNA antisense sequence
  source 1..19: mol_type = other RNA
ctccaccattgcaatgatg

SEQ ID NO: 54160 - RNA, 19 nt, synthetic construct
  misc_feature 1..19: note = siRNA sense sequence
  source 1..19: mol_type = other RNA
atcattgcaatggtggagc

SEQ ID NO: 54161 - RNA, 19 nt, synthetic construct
  misc_feature 1..19: note = siRNA antisense sequence
  source 1..19: mol_type = other RNA
gctccaccattgcaatgat

SEQ ID NO: 54162 - RNA, 19 nt, synthetic construct
  misc_feature 1..19: note = siRNA sense sequence
  source 1..19: mol_type = other RNA
tcattgcaatggtggagct

SEQ ID NO: 54163 - RNA, 19 nt, synthetic construct
  misc_feature 1..19: note = siRNA antisense sequence
  source 1..19: mol_type = other RNA
agctccaccattgcaatga

SEQ ID NO: 54164 - RNA, 19 nt, synthetic construct
  misc_feature 1..19: note = siRNA sense sequence
  source 1..19: mol_type = other RNA
cattgcaatggtggagctg

SEQ ID NO: 54165 - RNA, 19 nt, synthetic construct
  misc_feature 1..19: note = siRNA antisense sequence
  source 1..19: mol_type = other RNA
cagctccaccattgcaatg

SEQ ID NO: 54166 - RNA, 19 nt, synthetic construct
  misc_feature 1..19: note = siRNA sense sequence
  source 1..19: mol_type = other RNA
attgcaatggtggagctgg

SEQ ID NO: 54167 - RNA, 19 nt, synthetic construct
  misc_feature 1..19: note = siRNA antisense sequence
  source 1..19: mol_type = other RNA
ccagctccaccattgcaat

SEQ ID NO: 54168 - RNA, 19 nt, synthetic construct
  misc_feature 1..19: note = siRNA sense sequence
  source 1..19: mol_type = other RNA
ttgcaatggtggagctggt

SEQ ID NO: 54169 - RNA, 19 nt, synthetic construct
  misc_feature 1..19: note = siRNA antisense sequence
  source 1..19: mol_type = other RNA
accagctccaccattgcaa

SEQ ID NO: 54170 - RNA, 19 nt, synthetic construct
  misc_feature 1..19: note = siRNA sense sequence
  source 1..19: mol_type = other RNA
tgcaatggtggagctggta

SEQ ID NO: 54171 - RNA, 19 nt, synthetic construct
  misc_feature 1..19: note = siRNA antisense sequence
  source 1..19: mol_type = other RNA
taccagctccaccattgca

SEQ ID NO: 54172 - RNA, 19 nt, synthetic construct
  misc_feature 1..19: note = siRNA sense sequence
  source 1..19: mol_type = other RNA
gcaatggtggagctggtag

SEQ ID NO: 54173 - RNA, 19 nt, synthetic construct
  misc_feature 1..19: note = siRNA antisense sequence
  source 1..19: mol_type = other RNA
ctaccagctccaccattgc

SEQ ID NO: 54174 - RNA, 19 nt, synthetic construct
  misc_feature 1..19: note = siRNA sense sequence
  source 1..19: mol_type = other RNA
caatggtggagctggtaga

SEQ ID NO: 54175 - RNA, 19 nt, synthetic construct
  misc_feature 1..19: note = siRNA antisense sequence
  source 1..19: mol_type = other RNA
tctaccagctccaccattg

SEQ ID NO: 54176 - RNA, 19 nt, synthetic construct
  misc_feature 1..19: note = siRNA sense sequence
  source 1..19: mol_type = other RNA
aatggtggagctggtagat

SEQ ID NO: 54177 - RNA, 19 nt, synthetic construct
  misc_feature 1..19: note = siRNA antisense sequence
  source 1..19: mol_type = other RNA
atctaccagctccaccatt

SEQ ID NO: 54178 - RNA, 19 nt, synthetic construct
  misc_feature 1..19: note = siRNA sense sequence
  source 1..19: mol_type = other RNA
atggtggagctggtagatg

SEQ ID NO: 54179 - RNA, 19 nt, synthetic construct
  misc_feature 1..19: note = siRNA antisense sequence
  source 1..19: mol_type = other RNA
catctaccagctccaccat

SEQ ID NO: 54180 - RNA, 19 nt, synthetic construct
  misc_feature 1..19: note = siRNA sense sequence
  source 1..19: mol_type = other RNA
ggtggagctggtagatgtg

SEQ ID NO: 54181 - RNA, 19 nt, synthetic construct
  misc_feature 1..19: note = siRNA antisense sequence
  source 1..19: mol_type = other RNA
cacatctaccagctccacc

SEQ ID NO: 54182 - RNA, 19 nt, synthetic construct
  misc_feature 1..19: note = siRNA sense sequence
  source 1..19: mol_type = other RNA
gtggagctggtagatgtgt

SEQ ID NO: 54183 - RNA, 19 nt, synthetic construct
  misc_feature 1..19: note = siRNA antisense sequence
  source 1..19: mol_type = other RNA
acacatctaccagctccac

SEQ ID NO: 54184 - RNA, 19 nt, synthetic construct
  misc_feature 1..19: note = siRNA sense sequence
  source 1..19: mol_type = other RNA
tggagctggtagatgtgtc

SEQ ID NO: 54185 - RNA, 19 nt, synthetic construct
  misc_feature 1..19: note = siRNA antisense sequence
  source 1..19: mol_type = other RNA
gacacatctaccagctcca

SEQ ID NO: 54186 - RNA, 19 nt, synthetic construct
  misc_feature 1..19: note = siRNA sense sequence
  source 1..19: mol_type = other RNA
ggagctggtagatgtgtcc

SEQ ID NO: 54187 - RNA, 19 nt, synthetic construct
  misc_feature 1..19: note = siRNA antisense sequence
  source 1..19: mol_type = other RNA
ggacacatctaccagctcc

SEQ ID NO: 54188 - RNA, 19 nt, synthetic construct
  misc_feature 1..19: note = siRNA sense sequence
  source 1..19: mol_type = other RNA
gagctggtagatgtgtcca

SEQ ID NO: 54189 - RNA, 19 nt, synthetic construct
  misc_feature 1..19: note = siRNA antisense sequence
  source 1..19: mol_type = other RNA
tggacacatctaccagctc

SEQ ID NO: 54190 - RNA, 19 nt, synthetic construct
  misc_feature 1..19: note = siRNA sense sequence
  source 1..19: mol_type = other RNA
agctggtagatgtgtccaa

SEQ ID NO: 54191 - RNA, 19 nt, synthetic construct
  misc_feature 1..19: note = siRNA antisense sequence
  source 1..19: mol_type = other RNA
ttggacacatctaccagct

SEQ ID NO: 54192 - RNA, 19 nt, synthetic construct
  misc_feature 1..19: note = siRNA sense sequence
  source 1..19: mol_type = other RNA
gctggtagatgtgtccaaa

SEQ ID NO: 54193 - RNA, 19 nt, synthetic construct
  misc_feature 1..19: note = siRNA antisense sequence
  source 1..19: mol_type = other RNA
tttggacacatctaccagc

SEQ ID NO: 54194 - RNA, 19 nt, synthetic construct
  misc_feature 1..19: note = siRNA sense sequence
  source 1..19: mol_type = other RNA
tagatgtgtccaaagccaa

SEQ ID NO: 54195 - RNA, 19 nt, synthetic construct
  misc_feature 1..19: note = siRNA antisense sequence
  source 1..19: mol_type = other RNA
ttggctttggacacatcta

SEQ ID NO: 54196 - RNA, 19 nt, synthetic construct
  misc_feature 1..19: note = siRNA sense sequence
  source 1..19: mol_type = other RNA
agatgtgtccaaagccaaa

SEQ ID NO: 54197 - RNA, 19 nt, synthetic construct
  misc_feature 1..19: note = siRNA antisense sequence
  source 1..19: mol_type = other RNA
tttggctttggacacatct

SEQ ID NO: 54198 - RNA, 19 nt, synthetic construct
  misc_feature 1..19: note = siRNA sense sequence
  source 1..19: mol_type = other RNA
aaccgtggagctggacaga

SEQ ID NO: 54199 - RNA, 19 nt, synthetic construct
  misc_feature 1..19: note = siRNA antisense sequence
  source 1..19: mol_type = other RNA
tctgtccagctccacggtt

SEQ ID NO: 54200 - RNA, 19 nt, synthetic construct
  misc_feature 1..19: note = siRNA sense sequence
  source 1..19: mol_type = other RNA
accgtggagctggacagag

SEQ ID NO: 54201 - RNA, 19 nt, synthetic construct
  misc_feature 1..19: note = siRNA antisense sequence
  source 1..19: mol_type = other RNA
ctctgtccagctccacggt

SEQ ID NO: 54202 - RNA, 19 nt, synthetic construct
  misc_feature 1..19: note = siRNA sense sequence
  source 1..19: mol_type = other RNA
gtggagctggacagagggt

SEQ ID NO: 54203 - RNA, 19 nt, synthetic construct
  misc_feature 1..19: note = siRNA antisense sequence
  source 1..19: mol_type = other RNA
accctctgtccagctccac

SEQ ID NO: 54204 - RNA, 19 nt, synthetic construct
  misc_feature 1..19: note = siRNA sense sequence
  source 1..19: mol_type = other RNA
tggagctggacagagggtt

SEQ ID NO: 54205 - RNA, 19 nt, synthetic construct
  misc_feature 1..19: note = siRNA antisense sequence
  source 1..19: mol_type = other RNA
aaccctctgtccagctcca

SEQ ID NO: 54206 - RNA, 19 nt, synthetic construct
  misc_feature 1..19: note = siRNA sense sequence
  source 1..19: mol_type = other RNA
gagctggacagagggttta

SEQ ID NO: 54207 - RNA, 19 nt, synthetic construct
  misc_feature 1..19: note = siRNA antisense sequence
  source 1..19: mol_type = other RNA
taaaccctctgtccagctc

SEQ ID NO: 54208 - RNA, 19 nt, synthetic construct
  misc_feature 1..19: note = siRNA sense sequence
  source 1..19: mol_type = other RNA
ctggacagagggtttatgg

SEQ ID NO: 54209 - RNA, 19 nt, synthetic construct
  misc_feature 1..19: note = siRNA antisense sequence
  source 1..19: mol_type = other RNA
ccataaaccctctgtccag

SEQ ID NO: 54210 - RNA, 19 nt, synthetic construct
  misc_feature 1..19: note = siRNA sense sequence
  source 1..19: mol_type = other RNA
tggacagagggtttatggc

SEQ ID NO: 54211 - RNA, 19 nt, synthetic construct
  misc_feature 1..19: note = siRNA antisense sequence
  source 1..19: mol_type = other RNA
gccataaaccctctgtcca

SEQ ID NO: 54212 - RNA, 19 nt, synthetic construct
  misc_feature 1..19: note = siRNA sense sequence
  source 1..19: mol_type = other RNA
ggacagagggtttatggcc

SEQ ID NO: 54213 - RNA, 19 nt, synthetic construct
  misc_feature 1..19: note = siRNA antisense sequence
  source 1..19: mol_type = other RNA
ggccataaaccctctgtcc

SEQ ID NO: 54214 - RNA, 19 nt, synthetic construct
  misc_feature 1..19: note = siRNA sense sequence
  source 1..19: mol_type = other RNA
gacagagggtttatggccc

SEQ ID NO: 54215 - RNA, 19 nt, synthetic construct
  misc_feature 1..19: note = siRNA antisense sequence
  source 1..19: mol_type = other RNA
gggccataaaccctctgtc

SEQ ID NO: 54216 - RNA, 19 nt, synthetic construct
  misc_feature 1..19: note = siRNA sense sequence
  source 1..19: mol_type = other RNA
aaagtttgttgcacatgca

SEQ ID NO: 54217 - RNA, 19 nt, synthetic construct
  misc_feature 1..19: note = siRNA antisense sequence
  source 1..19: mol_type = other RNA
tgcatgtgcaacaaacttt

SEQ ID NO: 54218 - RNA, 19 nt, synthetic construct
  misc_feature 1..19: note = siRNA sense sequence
  source 1..19: mol_type = other RNA
agtttgttgcacatgcata

SEQ ID NO: 54219 - RNA, 19 nt, synthetic construct
  misc_feature 1..19: note = siRNA antisense sequence
  source 1..19: mol_type = other RNA
tatgcatgtgcaacaaact

SEQ ID NO: 54220 - RNA, 19 nt, synthetic construct
  misc_feature 1..19: note = siRNA sense sequence
  source 1..19: mol_type = other RNA
aaaagcagtgctgatctta

SEQ ID NO: 54221 - RNA, 19 nt, synthetic construct
  misc_feature 1..19: note = siRNA antisense sequence
  source 1..19: mol_type = other RNA
taagatcagcactgctttt

SEQ ID NO: 54222 - RNA, 19 nt, synthetic construct
  misc_feature 1..19: note = siRNA sense sequence
  source 1..19: mol_type = other RNA
aaagcagtgctgatcttaa

SEQ ID NO: 54223 - RNA, 19 nt, synthetic construct
  misc_feature 1..19: note = siRNA antisense sequence
  source 1..19: mol_type = other RNA
ttaagatcagcactgcttt

SEQ ID NO: 54224 - RNA, 19 nt, synthetic construct
  misc_feature 1..19: note = siRNA sense sequence
  source 1..19: mol_type = other RNA
aagcagtgctgatcttaaa

SEQ ID NO: 54225 - RNA, 19 nt, synthetic construct
  misc_feature 1..19: note = siRNA antisense sequence
  source 1..19: mol_type = other RNA
tttaagatcagcactgctt

SEQ ID NO: 54226 - RNA, 19 nt, synthetic construct
  misc_feature 1..19: note = siRNA sense sequence
  source 1..19: mol_type = other RNA
agcagtgctgatcttaaag

SEQ ID NO: 54227 - RNA, 19 nt, synthetic construct
  misc_feature 1..19: note = siRNA antisense sequence
  source 1..19: mol_type = other RNA
ctttaagatcagcactgct

SEQ ID NO: 54228 - RNA, 19 nt, synthetic construct
  misc_feature 1..19: note = siRNA sense sequence
  source 1..19: mol_type = other RNA
agtgctgatcttaaaggtt

SEQ ID NO: 54229 - RNA, 19 nt, synthetic construct
  misc_feature 1..19: note = siRNA antisense sequence
  source 1..19: mol_type = other RNA
aacctttaagatcagcact

SEQ ID NO: 54230 - RNA, 19 nt, synthetic construct
  misc_feature 1..19: note = siRNA sense sequence
  source 1..19: mol_type = other RNA
gtgctgatcttaaaggttt

SEQ ID NO: 54231 - RNA, 19 nt, synthetic construct
  misc_feature 1..19: note = siRNA antisense sequence
  source 1..19: mol_type = other RNA
aaacctttaagatcagcac

SEQ ID NO: 54232 - RNA, 19 nt, synthetic construct
  misc_feature 1..19: note = siRNA sense sequence
  source 1..19: mol_type = other RNA
cttaaaggtttgtatgtag

SEQ ID NO: 54233 - RNA, 19 nt, synthetic construct
  misc_feature 1..19: note = siRNA antisense sequence
  source 1..19: mol_type = other RNA
ctacatacaaacctttaag

SEQ ID NO: 54234 - RNA, 19 nt, synthetic construct
  misc_feature 1..19: note = siRNA sense sequence
  source 1..19: mol_type = other RNA
taaaggtttgtatgtagag

SEQ ID NO: 54235 - RNA, 19 nt, synthetic construct
  misc_feature 1..19: note = siRNA antisense sequence
  source 1..19: mol_type = other RNA
ctctacatacaaaccttta

SEQ ID NO: 54236 - RNA, 19 nt, synthetic construct
  misc_feature 1..19: note = siRNA sense sequence
  source 1..19: mol_type = other RNA
aaaggtttgtatgtagagt

SEQ ID NO: 54237 - RNA, 19 nt, synthetic construct
  misc_feature 1..19: note = siRNA antisense sequence
  source 1..19: mol_type = other RNA
actctacatacaaaccttt

SEQ ID NO: 54238 - RNA, 19 nt, synthetic construct
  misc_feature 1..19: note = siRNA sense sequence
  source 1..19: mol_type = other RNA
aaggtttgtatgtagagtc

SEQ ID NO: 54239 - RNA, 19 nt, synthetic construct
  misc_feature 1..19: note = siRNA antisense sequence
  source 1..19: mol_type = other RNA
gactctacatacaaacctt

SEQ ID NO: 54240 - RNA, 19 nt, synthetic construct
  misc_feature 1..19: note = siRNA sense sequence
  source 1..19: mol_type = other RNA
aggtttgtatgtagagtct

SEQ ID NO: 54241 - RNA, 19 nt, synthetic construct
  misc_feature 1..19: note = siRNA antisense sequence
  source 1..19: mol_type = other RNA
agactctacatacaaacct

SEQ ID NO: 54242 - RNA, 19 nt, synthetic construct
  misc_feature 1..19: note = siRNA sense sequence
  source 1..19: mol_type = other RNA
ggtttgtatgtagagtctc

SEQ ID NO: 54243 - RNA, 19 nt, synthetic construct
  misc_feature 1..19: note = siRNA antisense sequence
  source 1..19: mol_type = other RNA
gagactctacatacaaacc

SEQ ID NO: 54244 - RNA, 19 nt, synthetic construct
  misc_feature 1..19: note = siRNA sense sequence
  source 1..19: mol_type = other RNA
tatgtagagtctcttgatc

SEQ ID NO: 54245 - RNA, 19 nt, synthetic construct
  misc_feature 1..19: note = siRNA antisense sequence
  source 1..19: mol_type = other RNA
gatcaagagactctacata

SEQ ID NO: 54246 - RNA, 19 nt, synthetic construct
  misc_feature 1..19: note = siRNA sense sequence
  source 1..19: mol_type = other RNA
atgtagagtctcttgatca

SEQ ID NO: 54247 - RNA, 19 nt, synthetic construct
  misc_feature 1..19: note = siRNA antisense sequence
  source 1..19: mol_type = other RNA
tgatcaagagactctacat

SEQ ID NO: 54248 - RNA, 19 nt, synthetic construct
  misc_feature 1..19: note = siRNA sense sequence
  source 1..19: mol_type = other RNA
tgtagagtctcttgatcat

SEQ ID NO: 54249 - RNA, 19 nt, synthetic construct
  misc_feature 1..19: note = siRNA antisense sequence
  source 1..19: mol_type = other RNA
atgatcaagagactctaca

SEQ ID NO: 54250 - RNA, 19 nt, synthetic construct
  misc_feature 1..19: note = siRNA sense sequence
  source 1..19: mol_type = other RNA
gtagagtctcttgatcatt

SEQ ID NO: 54251 - RNA, 19 nt, synthetic construct
  misc_feature 1..19: note = siRNA antisense sequence
  source 1..19: mol_type = other RNA
aatgatcaagagactctac

SEQ ID NO: 54252 - RNA, 19 nt, synthetic construct
  misc_feature 1..19: note = siRNA sense sequence
  source 1..19: mol_type = other RNA
tagagtctcttgatcattg

SEQ ID NO: 54253 - RNA, 19 nt, synthetic construct
  misc_feature 1..19: note = siRNA antisense sequence
  source 1..19: mol_type = other RNA
caatgatcaagagactcta

SEQ ID NO: 54254 - RNA, 19 nt, synthetic construct
  misc_feature 1..19: note = siRNA sense sequence
  source 1..19: mol_type = other RNA
agagtctcttgatcattgt

SEQ ID NO: 54255 - RNA, 19 nt, synthetic construct
  misc_feature 1..19: note = siRNA antisense sequence
  source 1..19: mol_type = other RNA
acaatgatcaagagactct

SEQ ID NO: 54256 - RNA, 19 nt, synthetic construct
  misc_feature 1..19: note = siRNA sense sequence
  source 1..19: mol_type = other RNA
gagtctcttgatcattgtg

SEQ ID NO: 54257 - RNA, 19 nt, synthetic construct
  misc_feature 1..19: note = siRNA antisense sequence
  source 1..19: mol_type = other RNA
cacaatgatcaagagactc

SEQ ID NO: 54258 - RNA, 19 nt, synthetic construct
  misc_feature 1..19: note = siRNA sense sequence
  source 1..19: mol_type = other RNA
gtctcttgatcattgtgta

SEQ ID NO: 54259 - RNA, 19 nt, synthetic construct
  misc_feature 1..19: note = siRNA antisense sequence
  source 1..19: mol_type = other RNA
tacacaatgatcaagagac

SEQ ID NO: 54260 - RNA, 19 nt, synthetic construct
  misc_feature 1..19: note = siRNA sense sequence
  source 1..19: mol_type = other RNA
tctcttgatcattgtgtac

SEQ ID NO: 54261 - RNA, 19 nt, synthetic construct
  misc_feature 1..19: note = siRNA antisense sequence
  source 1..19: mol_type = other RNA
gtacacaatgatcaagaga

SEQ ID NO: 54262 - RNA, 19 nt, synthetic construct
  misc_feature 1..19: note = siRNA sense sequence
  source 1..19: mol_type = other RNA
ttgatcattgtgtacatct

SEQ ID NO: 54263 - RNA, 19 nt, synthetic construct
  misc_feature 1..19: note = siRNA antisense sequence
  source 1..19: mol_type = other RNA
agatgtacacaatgatcaa

SEQ ID NO: 54264 - RNA, 19 nt, synthetic construct
  misc_feature 1..19: note = siRNA sense sequence
  source 1..19: mol_type = other RNA
tgatcattgtgtacatcta

SEQ ID NO: 54265 - RNA, 19 nt, synthetic construct
  misc_feature 1..19: note = siRNA antisense sequence
  source 1..19: mol_type = other RNA
tagatgtacacaatgatca

SEQ ID NO: 54266 - RNA, 19 nt, synthetic construct
  misc_feature 1..19: note = siRNA sense sequence
  source 1..19: mol_type = other RNA
gatcattgtgtacatctag

SEQ ID NO: 54267 - RNA, 19 nt, synthetic construct
  misc_feature 1..19: note = siRNA antisense sequence
  source 1..19: mol_type = other RNA
ctagatgtacacaatgatc

SEQ ID NO: 54268 - RNA, 19 nt, synthetic construct
  misc_feature 1..19: note = siRNA sense sequence
  source 1..19: mol_type = other RNA
atcattgtgtacatctagg

SEQ ID NO: 54269 - RNA, 19 nt, synthetic construct
  misc_feature 1..19: note = siRNA antisense sequence
  source 1..19: mol_type = other RNA
cctagatgtacacaatgat

SEQ ID NO: 54270 - RNA, 19 nt, synthetic construct
  misc_feature 1..19: note = siRNA sense sequence
  source 1..19: mol_type = other RNA
tcattgtgtacatctaggt

SEQ ID NO: 54271 - RNA, 19 nt, synthetic construct
  misc_feature 1..19: note = siRNA antisense sequence
  source 1..19: mol_type = other RNA
acctagatgtacacaatga

SEQ ID NO: 54272 - RNA, 19 nt, synthetic construct
  misc_feature 1..19: note = siRNA sense sequence
  source 1..19: mol_type = other RNA
cattgtgtacatctaggtg

SEQ ID NO: 54273 - RNA, 19 nt, synthetic construct
  misc_feature 1..19: note = siRNA antisense sequence
  source 1..19: mol_type = other RNA
cacctagatgtacacaatg

SEQ ID NO: 54274 - RNA, 19 nt, synthetic construct
  misc_feature 1..19: note = siRNA sense sequence
  source 1..19: mol_type = other RNA
attgtgtacatctaggtgg

SEQ ID NO: 54275 - RNA, 19 nt, synthetic construct
  misc_feature 1..19: note = siRNA antisense sequence
  source 1..19: mol_type = other RNA
ccacctagatgtacacaat

SEQ ID NO: 54276 - RNA, 19 nt, synthetic construct
  misc_feature 1..19: note = siRNA sense sequence
  source 1..19: mol_type = other RNA
ttgtgtacatctaggtggg

SEQ ID NO: 54277 - RNA, 19 nt, synthetic construct
  misc_feature 1..19: note = siRNA antisense sequence
  source 1..19: mol_type = other RNA
cccacctagatgtacacaa

SEQ ID NO: 54278 - RNA, 19 nt, synthetic construct
  misc_feature 1..19: note = siRNA sense sequence
  source 1..19: mol_type = other RNA
tgtgtacatctaggtgggc

SEQ ID NO: 54279 - RNA, 19 nt, synthetic construct
  misc_feature 1..19: note = siRNA antisense sequence
  source 1..19: mol_type = other RNA
gcccacctagatgtacaca

SEQ ID NO: 54280 - RNA, 19 nt, synthetic construct
  misc_feature 1..19: note = siRNA sense sequence
  source 1..19: mol_type = other RNA
gtgtacatctaggtgggcg

SEQ ID NO: 54281 - RNA, 19 nt, synthetic construct
  misc_feature 1..19: note = siRNA antisense sequence
  source 1..19: mol_type = other RNA
cgcccacctagatgtacac

SEQ ID NO: 54282 - RNA, 19 nt, synthetic construct
  misc_feature 1..19: note = siRNA sense sequence
  source 1..19: mol_type = other RNA
tgtacatctaggtgggcga

SEQ ID NO: 54283 - RNA, 19 nt, synthetic construct
  misc_feature 1..19: note = siRNA antisense sequence
  source 1..19: mol_type = other RNA
tcgcccacctagatgtaca

SEQ ID NO: 54284 - RNA, 19 nt, synthetic construct
  misc_feature 1..19: note = siRNA sense sequence
  source 1..19: mol_type = other RNA
gtacatctaggtgggcgaa

SEQ ID NO: 54285 - RNA, 19 nt, synthetic construct
  misc_feature 1..19: note = siRNA antisense sequence
  source 1..19: mol_type = other RNA
ttcgcccacctagatgtac

SEQ ID NO: 54286 - RNA, 19 nt, synthetic construct
  misc_feature 1..19: note = siRNA sense sequence
  source 1..19: mol_type = other RNA
tacatctaggtgggcgaag

SEQ ID NO: 54287 - RNA, 19 nt, synthetic construct
  misc_feature 1..19: note = siRNA antisense sequence
  source 1..19: mol_type = other RNA
cttcgcccacctagatgta

SEQ ID NO: 54288 - RNA, 19 nt, synthetic construct
  misc_feature 1..19: note = siRNA sense sequence
  source 1..19: mol_type = other RNA
acatctaggtgggcgaagc

SEQ ID NO: 54289 - RNA, 19 nt, synthetic construct
  misc_feature 1..19: note = siRNA antisense sequence
  source 1..19: mol_type = other RNA
gcttcgcccacctagatgt

SEQ ID NO: 54290 - RNA, 19 nt, synthetic construct
  misc_feature 1..19: note = siRNA sense sequence
  source 1..19: mol_type = other RNA
catctaggtgggcgaagca

SEQ ID NO: 54291 - RNA, 19 nt, synthetic construct
  misc_feature 1..19: note = siRNA antisense sequence
  source 1..19: mol_type = other RNA
tgcttcgcccacctagatg

SEQ ID NO: 54292 - RNA, 19 nt, synthetic construct
  misc_feature 1..19: note = siRNA sense sequence
  source 1..19: mol_type = other RNA
atctaggtgggcgaagcac

SEQ ID NO: 54293 - RNA, 19 nt, synthetic construct
  misc_feature 1..19: note = siRNA antisense sequence
  source 1..19: mol_type = other RNA
gtgcttcgcccacctagat

SEQ ID NO: 54294 - RNA, 19 nt, synthetic construct
  misc_feature 1..19: note = siRNA sense sequence
  source 1..19: mol_type = other RNA
gggcgaagcacccaagata

SEQ ID NO: 54295 - RNA, 19 nt, synthetic construct
  misc_feature 1..19: note = siRNA antisense sequence
  source 1..19: mol_type = other RNA
tatcttgggtgcttcgccc

SEQ ID NO: 54296 - RNA, 19 nt, synthetic construct
  misc_feature 1..19: note = siRNA sense sequence
  source 1..19: mol_type = other RNA
ggcgaagcacccaagatac

SEQ ID NO: 54297 - RNA, 19 nt, synthetic construct
  misc_feature 1..19: note = siRNA antisense sequence
  source 1..19: mol_type = other RNA
gtatcttgggtgcttcgcc

SEQ ID NO: 54298 - RNA, 19 nt, synthetic construct
  misc_feature 1..19: note = siRNA sense sequence
  source 1..19: mol_type = other RNA
gcgaagcacccaagataca

SEQ ID NO: 54299 - RNA, 19 nt, synthetic construct
  misc_feature 1..19: note = siRNA antisense sequence
  source 1..19: mol_type = other RNA
tgtatcttgggtgcttcgc

SEQ ID NO: 54300 - RNA, 19 nt, synthetic construct
  misc_feature 1..19: note = siRNA sense sequence
  source 1..19: mol_type = other RNA
cccaagatacactggctct

SEQ ID NO: 54301 - RNA, 19 nt, synthetic construct
  misc_feature 1..19: note = siRNA antisense sequence
  source 1..19: mol_type = other RNA
agagccagtgtatcttggg

SEQ ID NO: 54302 - RNA, 19 nt, synthetic construct
  misc_feature 1..19: note = siRNA sense sequence
  source 1..19: mol_type = other RNA
ccaagatacactggctctg

SEQ ID NO: 54303 - RNA, 19 nt, synthetic construct
  misc_feature 1..19: note = siRNA antisense sequence
  source 1..19: mol_type = other RNA
cagagccagtgtatcttgg

SEQ ID NO: 54304 - RNA, 19 nt, synthetic construct
  misc_feature 1..19: note = siRNA sense sequence
  source 1..19: mol_type = other RNA
caagatacactggctctgt

SEQ ID NO: 54305 - RNA, 19 nt, synthetic construct
  misc_feature 1..19: note = siRNA antisense sequence
  source 1..19: mol_type = other RNA
acagagccagtgtatcttg

SEQ ID NO: 54306 - RNA, 19 nt, synthetic construct
  misc_feature 1..19: note = siRNA sense sequence
  source 1..19: mol_type = other RNA
aagatacactggctctgtt

SEQ ID NO: 54307 - RNA, 19 nt, synthetic construct
  misc_feature 1..19: note = siRNA antisense sequence
  source 1..19: mol_type = other RNA
aacagagccagtgtatctt

SEQ ID NO: 54308 - RNA, 19 nt, synthetic construct
  misc_feature 1..19: note = siRNA sense sequence
  source 1..19: mol_type = other RNA
agatacactggctctgttt

SEQ ID NO: 54309 - RNA, 19 nt, synthetic construct
  misc_feature 1..19: note = siRNA antisense sequence
  source 1..19: mol_type = other RNA
aaacagagccagtgtatct

SEQ ID NO: 54310 - RNA, 19 nt, synthetic construct
  misc_feature 1..19: note = siRNA sense sequence
  source 1..19: mol_type = other RNA
gatacactggctctgttta

SEQ ID NO: 54311 - RNA, 19 nt, synthetic construct
  misc_feature 1..19: note = siRNA antisense sequence
  source 1..19: mol_type = other RNA
taaacagagccagtgtatc

SEQ ID NO: 54312 - RNA, 19 nt, synthetic construct
  misc_feature 1..19: note = siRNA sense sequence
  source 1..19: mol_type = other RNA
ctctgtttacagggctcat

SEQ ID NO: 54313 - RNA, 19 nt, synthetic construct
  misc_feature 1..19: note = siRNA antisense sequence
  source 1..19: mol_type = other RNA
atgagccctgtaaacagag

SEQ ID NO: 54314 - RNA, 19 nt, synthetic construct
  misc_feature 1..19: note = siRNA sense sequence
  source 1..19: mol_type = other RNA
ctgtttacagggctcatgg

SEQ ID NO: 54315 - RNA, 19 nt, synthetic construct
  misc_feature 1..19: note = siRNA antisense sequence
  source 1..19: mol_type = other RNA
ccatgagccctgtaaacag

SEQ ID NO: 54316 - RNA, 19 nt, synthetic construct
  misc_feature 1..19: note = siRNA sense sequence
  source 1..19: mol_type = other RNA
tgtttacagggctcatggt

SEQ ID NO: 54317 - RNA, 19 nt, synthetic construct
  misc_feature 1..19: note = siRNA antisense sequence
  source 1..19: mol_type = other RNA
accatgagccctgtaaaca

SEQ ID NO: 54318 - RNA, 19 nt, synthetic construct
  misc_feature 1..19: note = siRNA sense sequence
  source 1..19: mol_type = other RNA
gtttacagggctcatggtc

SEQ ID NO: 54319 - RNA, 19 nt, synthetic construct
  misc_feature 1..19: note = siRNA antisense sequence
  source 1..19: mol_type = other RNA
gaccatgagccctgtaaac

SEQ ID NO: 54320 - RNA, 19 nt, synthetic construct
  misc_feature 1..19: note = siRNA sense sequence
  source 1..19: mol_type = other RNA
tttacagggctcatggtca

SEQ ID NO: 54321 - RNA, 19 nt, synthetic construct
  misc_feature 1..19: note = siRNA antisense sequence
  source 1..19: mol_type = other RNA
tgaccatgagccctgtaaa

SEQ ID NO: 54322 - RNA, 19 nt, synthetic construct
  misc_feature 1..19: note = siRNA sense sequence
  source 1..19: mol_type = other RNA
ttacagggctcatggtcag

SEQ ID NO: 54323 - RNA, 19 nt, synthetic construct
  misc_feature 1..19: note = siRNA antisense sequence
  source 1..19: mol_type = other RNA
ctgaccatgagccctgtaa

SEQ ID NO: 54324 - RNA, 19 nt, synthetic construct
  misc_feature 1..19: note = siRNA sense sequence
  source 1..19: mol_type = other RNA
tacagggctcatggtcaga

SEQ ID NO: 54325 - RNA, 19 nt, synthetic construct
  misc_feature 1..19: note = siRNA antisense sequence
  source 1..19: mol_type = other RNA
tctgaccatgagccctgta

SEQ ID NO: 54326 - RNA, 19 nt, synthetic construct
  misc_feature 1..19: note = siRNA sense sequence
  source 1..19: mol_type = other RNA
acagggctcatggtcagat

SEQ ID NO: 54327 - RNA, 19 nt, synthetic construct
  misc_feature 1..19: note = siRNA antisense sequence
  source 1..19: mol_type = other RNA
atctgaccatgagccctgt

SEQ ID NO: 54328 - RNA, 19 nt, synthetic construct
  misc_feature 1..19: note = siRNA sense sequence
  source 1..19: mol_type = other RNA
cagggctcatggtcagatt

SEQ ID NO: 54329 - RNA, 19 nt, synthetic construct
  misc_feature 1..19: note = siRNA antisense sequence
  source 1..19: mol_type = other RNA
aatctgaccatgagccctg

SEQ ID NO: 54330 - RNA, 19 nt, synthetic construct
  misc_feature 1..19: note = siRNA sense sequence
  source 1..19: mol_type = other RNA
agggctcatggtcagatta

SEQ ID NO: 54331 - RNA, 19 nt, synthetic construct
  misc_feature 1..19: note = siRNA antisense sequence
  source 1..19: mol_type = other RNA
taatctgaccatgagccct

SEQ ID NO: 54332 - RNA, 19 nt, synthetic construct
  misc_feature 1..19: note = siRNA sense sequence
  source 1..19: mol_type = other RNA
gtcagattaacccatacgt

SEQ ID NO: 54333 - RNA, 19 nt, synthetic construct
  misc_feature 1..19: note = siRNA antisense sequence
  source 1..19: mol_type = other RNA
acgtatgggttaatctgac

SEQ ID NO: 54334 - RNA, 19 nt, synthetic construct
  misc_feature 1..19: note = siRNA sense sequence
  source 1..19: mol_type = other RNA
tttctaagccagaggagga

SEQ ID NO: 54335 - RNA, 19 nt, synthetic construct
  misc_feature 1..19: note = siRNA antisense sequence
  source 1..19: mol_type = other RNA
tcctcctctggcttagaaa

SEQ ID NO: 54336 - RNA, 19 nt, synthetic construct
  misc_feature 1..19: note = siRNA sense sequence
  source 1..19: mol_type = other RNA
ttctaagccagaggaggag

SEQ ID NO: 54337 - RNA, 19 nt, synthetic construct
  misc_feature 1..19: note = siRNA antisense sequence
  source 1..19: mol_type = other RNA
ctcctcctctggcttagaa

SEQ ID NO: 54338 - RNA, 19 nt, synthetic construct
  misc_feature 1..19: note = siRNA sense sequence
  source 1..19: mol_type = other RNA
tctaagccagaggaggagg

SEQ ID NO: 54339 - RNA, 19 nt, synthetic construct
  misc_feature 1..19: note = siRNA antisense sequence
  source 1..19: mol_type = other RNA
cctcctcctctggcttaga

SEQ ID NO: 54340 - RNA, 19 nt, synthetic construct
  misc_feature 1..19: note = siRNA sense sequence
  source 1..19: mol_type = other RNA
ctaagccagaggaggaggt

SEQ ID NO: 54341 - RNA, 19 nt, synthetic construct
  misc_feature 1..19: note = siRNA antisense sequence
  source 1..19: mol_type = other RNA
acctcctcctctggcttag

SEQ ID NO: 54342 - RNA, 19 nt, synthetic construct
  misc_feature 1..19: note = siRNA sense sequence
  source 1..19: mol_type = other RNA
cagaggaggaggttgcata

SEQ ID NO: 54343 - RNA, 19 nt, synthetic construct
  misc_feature 1..19: note = siRNA antisense sequence
  source 1..19: mol_type = other RNA
tatgcaacctcctcctctg

SEQ ID NO: 54344 - RNA, 19 nt, synthetic construct
  misc_feature 1..19: note = siRNA sense sequence
  source 1..19: mol_type = other RNA
aggaggaggttgcatagaa

SEQ ID NO: 54345 - RNA, 19 nt, synthetic construct
  misc_feature 1..19: note = siRNA antisense sequence
  source 1..19: mol_type = other RNA
ttctatgcaacctcctcct

SEQ ID NO: 54346 - RNA, 19 nt, synthetic construct
  misc_feature 1..19: note = siRNA sense sequence
  source 1..19: mol_type = other RNA
ggaggaggttgcatagaag

SEQ ID NO: 54347 - RNA, 19 nt, synthetic construct
  misc_feature 1..19: note = siRNA antisense sequence
  source 1..19: mol_type = other RNA
cttctatgcaacctcctcc

SEQ ID NO: 54348 - RNA, 19 nt, synthetic construct
  misc_feature 1..19: note = siRNA sense sequence
  source 1..19: mol_type = other RNA
gaggaggttgcatagaaga

SEQ ID NO: 54349 - RNA, 19 nt, synthetic construct
  misc_feature 1..19: note = siRNA antisense sequence
  source 1..19: mol_type = other RNA
tcttctatgcaacctcctc

SEQ ID NO: 54350 - RNA, 19 nt, synthetic construct
  misc_feature 1..19: note = siRNA sense sequence
  source 1..19: mol_type = other RNA
aggaggttgcatagaagaa

SEQ ID NO: 54351 - RNA, 19 nt, synthetic construct
  misc_feature 1..19: note = siRNA antisense sequence
  source 1..19: mol_type = other RNA
ttcttctatgcaacctcct

SEQ ID NO: 54352 - RNA, 19 nt, synthetic construct
  misc_feature 1..19: note = siRNA sense sequence
  source 1..19: mol_type = other RNA
aataatgacccaggaataa

SEQ ID NO: 54353 - RNA, 19 nt, synthetic construct
  misc_feature 1..19: note = siRNA antisense sequence
  source 1..19: mol_type = other RNA
ttattcctgggtcattatt

SEQ ID NO: 54354 - RNA, 19 nt, synthetic construct
  misc_feature 1..19: note = siRNA sense sequence
  source 1..19: mol_type = other RNA
catggaagctcaattaaaa

SEQ ID NO: 54355 - RNA, 19 nt, synthetic construct
  misc_feature 1..19: note = siRNA antisense sequence
  source 1..19: mol_type = other RNA
ttttaattgagcttccatg

SEQ ID NO: 54356 - RNA, 19 nt, synthetic construct
  misc_feature 1..19: note = siRNA sense sequence
  source 1..19: mol_type = other RNA
agctcaattaaaatagagg

SEQ ID NO: 54357 - RNA, 19 nt, synthetic construct
  misc_feature 1..19: note = siRNA antisense sequence
  source 1..19: mol_type = other RNA
cctctattttaattgagct

SEQ ID NO: 54358 - RNA, 19 nt, synthetic construct
  misc_feature 1..19: note = siRNA sense sequence
  source 1..19: mol_type = other RNA
gctcaattaaaatagagga

SEQ ID NO: 54359 - RNA, 19 nt, synthetic construct
  misc_feature 1..19: note = siRNA antisense sequence
  source 1..19: mol_type = other RNA
tcctctattttaattgagc

SEQ ID NO: 54360 - RNA, 19 nt, synthetic construct
  misc_feature 1..19: note = siRNA sense sequence
  source 1..19: mol_type = other RNA
ctcaattaaaatagaggag

SEQ ID NO: 54361 - RNA, 19 nt, synthetic construct
  misc_feature 1..19: note = siRNA antisense sequence
  source 1..19: mol_type = other RNA
ctcctctattttaattgag

SEQ ID NO: 54362 - RNA, 19 nt, synthetic construct
  misc_feature 1..19: note = siRNA sense sequence
  source 1..19: mol_type = other RNA
tggctcacgcctgtaatcc

SEQ ID NO: 54363 - RNA, 19 nt, synthetic construct
  misc_feature 1..19: note = siRNA antisense sequence
  source 1..19: mol_type = other RNA
ggattacaggcgtgagcca

SEQ ID NO: 54364 - RNA, 19 nt, synthetic construct
  misc_feature 1..19: note = siRNA sense sequence
  source 1..19: mol_type = other RNA
ggctcacgcctgtaatccc

SEQ ID NO: 54365 - RNA, 19 nt, synthetic construct
  misc_feature 1..19: note = siRNA antisense sequence
  source 1..19: mol_type = other RNA
gggattacaggcgtgagcc

SEQ ID NO: 54366 - RNA, 19 nt, synthetic construct
  misc_feature 1..19: note = siRNA sense sequence
  source 1..19: mol_type = other RNA
acgcctgtaatcccagcac

SEQ ID NO: 54367 - RNA, 19 nt, synthetic construct
  misc_feature 1..19: note = siRNA antisense sequence
  source 1..19: mol_type = other RNA
gtgctgggattacaggcgt

SEQ ID NO: 54368 - RNA, 19 nt, synthetic construct
  misc_feature 1..19: note = siRNA sense sequence
  source 1..19: mol_type = other RNA
tgtaatcccagcacttcgg

SEQ ID NO: 54369 - RNA, 19 nt, synthetic construct
  misc_feature 1..19: note = siRNA antisense sequence
  source 1..19: mol_type = other RNA
ccgaagtgctgggattaca

SEQ ID NO: 54370 - RNA, 19 nt, synthetic construct
  misc_feature 1..19: note = siRNA sense sequence
  source 1..19: mol_type = other RNA
gtaatcccagcacttcggg

SEQ ID NO: 54371 - RNA, 19 nt, synthetic construct
  misc_feature 1..19: note = siRNA antisense sequence
  source 1..19: mol_type = other RNA
cccgaagtgctgggattac

SEQ ID NO: 54372 - RNA, 19 nt, synthetic construct
  misc_feature 1..19: note = siRNA sense sequence
  source 1..19: mol_type = other RNA
ggcgagtgcatcaggaggt

SEQ ID NO: 54373 - RNA, 19 nt, synthetic construct
  misc_feature 1..19: note = siRNA antisense sequence
  source 1..19: mol_type = other RNA
acctcctgatgcactcgcc

SEQ ID NO: 54374 - RNA, 19 nt, synthetic construct
  misc_feature 1..19: note = siRNA sense sequence
  source 1..19: mol_type = other RNA
gcgagtgcatcaggaggtc

SEQ ID NO: 54375 - RNA, 19 nt, synthetic construct
  misc_feature 1..19: note = siRNA antisense sequence
  source 1..19: mol_type = other RNA
gacctcctgatgcactcgc

SEQ ID NO: 54376 - RNA, 19 nt, synthetic construct
  misc_feature 1..19: note = siRNA sense sequence
  source 1..19: mol_type = other RNA
aaaattagccaggcgtggt

SEQ ID NO: 54377 - RNA, 19 nt, synthetic construct
  misc_feature 1..19: note = siRNA antisense sequence
  source 1..19: mol_type = other RNA
accacgcctggctaatttt

SEQ ID NO: 54378 - RNA, 19 nt, synthetic construct
  misc_feature 1..19: note = siRNA sense sequence
  source 1..19: mol_type = other RNA
aaattagccaggcgtggtg

SEQ ID NO: 54379 - RNA, 19 nt, synthetic construct
  misc_feature 1..19: note = siRNA antisense sequence
  source 1..19: mol_type = other RNA
caccacgcctggctaattt

SEQ ID NO: 54380 - RNA, 19 nt, synthetic construct
  misc_feature 1..19: note = siRNA sense sequence
  source 1..19: mol_type = other RNA
aattagccaggcgtggtgg

SEQ ID NO: 54381 - RNA, 19 nt, synthetic construct
  misc_feature 1..19: note = siRNA antisense sequence
  source 1..19: mol_type = other RNA
ccaccacgcctggctaatt

SEQ ID NO: 54382 - RNA, 19 nt, synthetic construct
  misc_feature 1..19: note = siRNA sense sequence
  source 1..19: mol_type = other RNA
gcgcctgtagtcccagcta

SEQ ID NO: 54383 - RNA, 19 nt, synthetic construct
  misc_feature 1..19: note = siRNA antisense sequence
  source 1..19: mol_type = other RNA
tagctgggactacaggcgc

SEQ ID NO: 54384 - RNA, 19 nt, synthetic construct
  misc_feature 1..19: note = siRNA sense sequence
  source 1..19: mol_type = other RNA
agctactcgggaggctgag

SEQ ID NO: 54385 - RNA, 19 nt, synthetic construct
  misc_feature 1..19: note = siRNA antisense sequence
  source 1..19: mol_type = other RNA
ctcagcctcccgagtagct

SEQ ID NO: 54386 - RNA, 19 nt, synthetic construct
  misc_feature 1..19: note = siRNA sense sequence
  source 1..19: mol_type = other RNA
tactcgggaggctgaggca

SEQ ID NO: 54387 - RNA, 19 nt, synthetic construct
  misc_feature 1..19: note = siRNA antisense sequence
  source 1..19: mol_type = other RNA
tgcctcagcctcccgagta

SEQ ID NO: 54388 - RNA, 19 nt, synthetic construct
  misc_feature 1..19: note = siRNA sense sequence
  source 1..19: mol_type = other RNA
agcaagactccatctcaaa

SEQ ID NO: 54389 - RNA, 19 nt, synthetic construct
  misc_feature 1..19: note = siRNA antisense sequence
  source 1..19: mol_type = other RNA
tttgagatggagtcttgct

SEQ ID NO: 54390 - RNA, 19 nt, synthetic construct
  misc_feature 1..19: note = siRNA sense sequence
  source 1..19: mol_type = other RNA
gcaagactccatctcaaaa

SEQ ID NO: 54391 - RNA, 19 nt, synthetic construct
  misc_feature 1..19: note = siRNA antisense sequence
  source 1..19: mol_type = other RNA
ttttgagatggagtcttgc

SEQ ID NO: 54392 - RNA, 19 nt, synthetic construct
  misc_feature 1..19: note = siRNA sense sequence
  source 1..19: mol_type = other RNA
aaaatgattcaagctctgt

SEQ ID NO: 54393 - RNA, 19 nt, synthetic construct
  misc_feature 1..19: note = siRNA antisense sequence
  source 1..19: mol_type = other RNA
acagagcttgaatcatttt

SEQ ID NO: 54394 - RNA, 19 nt, synthetic construct
  misc_feature 1..19: note = siRNA sense sequence
  source 1..19: mol_type = other RNA
aaatgattcaagctctgtg

SEQ ID NO: 54395 - RNA, 19 nt, synthetic construct
  misc_feature 1..19: note = siRNA antisense sequence
  source 1..19: mol_type = other RNA
cacagagcttgaatcattt

SEQ ID NO: 54396 - RNA, 19 nt, synthetic construct
  misc_feature 1..19: note = siRNA sense sequence
  source 1..19: mol_type = other RNA
aatgattcaagctctgtgt

SEQ ID NO: 54397 - RNA, 19 nt, synthetic construct
  misc_feature 1..19: note = siRNA antisense sequence
  source 1..19: mol_type = other RNA
acacagagcttgaatcatt

SEQ ID NO: 54398 - RNA, 19 nt, synthetic construct
  misc_feature 1..19: note = siRNA sense sequence
  source 1..19: mol_type = other RNA
atgattcaagctctgtgtt

SEQ ID NO: 54399 - RNA, 19 nt, synthetic construct
  misc_feature 1..19: note = siRNA antisense sequence
  source 1..19: mol_type = other RNA
aacacagagcttgaatcat

SEQ ID NO: 54400 - RNA, 19 nt, synthetic construct
  misc_feature 1..19: note = siRNA sense sequence
  source 1..19: mol_type = other RNA
tgattcaagctctgtgttg

SEQ ID NO: 54401 - RNA, 19 nt, synthetic construct
  misc_feature 1..19: note = siRNA antisense sequence
  source 1..19: mol_type = other RNA
caacacagagcttgaatca

SEQ ID NO: 54402 - RNA, 19 nt, synthetic construct
  misc_feature 1..19: note = siRNA sense sequence
  source 1..19: mol_type = other RNA
caagctctgtgttgaataa

SEQ ID NO: 54403 - RNA, 19 nt, synthetic construct
  misc_feature 1..19: note = siRNA antisense sequence
  source 1..19: mol_type = other RNA
ttattcaacacagagcttg

SEQ ID NO: 54404 - RNA, 19 nt, synthetic construct
  misc_feature 1..19: note = siRNA sense sequence
  source 1..19: mol_type = other RNA
aagctctgtgttgaataaa

SEQ ID NO: 54405 - RNA, 19 nt, synthetic construct
  misc_feature 1..19: note = siRNA antisense sequence
  source 1..19: mol_type = other RNA
tttattcaacacagagctt

SEQ ID NO: 54406 - RNA, 19 nt, synthetic construct
  misc_feature 1..19: note = siRNA sense sequence
  source 1..19: mol_type = other RNA
agctctgtgttgaataaag

SEQ ID NO: 54407 - RNA, 19 nt, synthetic construct
  misc_feature 1..19: note = siRNA antisense sequence
  source 1..19: mol_type = other RNA
ctttattcaacacagagct

SEQ ID NO: 54408 - RNA, 19 nt, synthetic construct
  misc_feature 1..19: note = siRNA sense sequence
  source 1..19: mol_type = other RNA
gctctgtgttgaataaagt

SEQ ID NO: 54409 - RNA, 19 nt, synthetic construct
  misc_feature 1..19: note = siRNA antisense sequence
  source 1..19: mol_type = other RNA
actttattcaacacagagc

SEQ ID NO: 54410 - RNA, 19 nt, synthetic construct
  misc_feature 1..19: note = siRNA sense sequence
  source 1..19: mol_type = other RNA
ctctgtgttgaataaagtc

SEQ ID NO: 54411 - RNA, 19 nt, synthetic construct
  misc_feature 1..19: note = siRNA antisense sequence
  source 1..19: mol_type = other RNA
gactttattcaacacagag

SEQ ID NO: 54412 - RNA, 19 nt, synthetic construct
  misc_feature 1..19: note = siRNA sense sequence
  source 1..19: mol_type = other RNA
tctgtgttgaataaagtca

SEQ ID NO: 54413 - RNA, 19 nt, synthetic construct
  misc_feature 1..19: note = siRNA antisense sequence
  source 1..19: mol_type = other RNA
tgactttattcaacacaga

SEQ ID NO: 54414 - RNA, 19 nt, synthetic construct
  misc_feature 1..19: note = siRNA sense sequence
  source 1..19: mol_type = other RNA
aaaggtactgttgttagac

SEQ ID NO: 54415 - RNA, 19 nt, synthetic construct
  misc_feature 1..19: note = siRNA antisense sequence
  source 1..19: mol_type = other RNA
gtctaacaacagtaccttt

SEQ ID NO: 54416 - RNA, 19 nt, synthetic construct
  misc_feature 1..19: note = siRNA sense sequence
  source 1..19: mol_type = other RNA
aaggtactgttgttagaca

SEQ ID NO: 54417 - RNA, 19 nt, synthetic construct
  misc_feature 1..19: note = siRNA antisense sequence
  source 1..19: mol_type = other RNA
tgtctaacaacagtacctt

SEQ ID NO: 54418 - RNA, 19 nt, synthetic construct
  misc_feature 1..19: note = siRNA sense sequence
  source 1..19: mol_type = other RNA
caaagcctgggacagtttc

SEQ ID NO: 54419 - RNA, 19 nt, synthetic construct
  misc_feature 1..19: note = siRNA antisense sequence
  source 1..19: mol_type = other RNA
gaaactgtcccaggctttg

SEQ ID NO: 54420 - RNA, 19 nt, synthetic construct
  misc_feature 1..19: note = siRNA sense sequence
  source 1..19: mol_type = other RNA
aaagcctgggacagtttca

SEQ ID NO: 54421 - RNA, 19 nt, synthetic construct
  misc_feature 1..19: note = siRNA antisense sequence
  source 1..19: mol_type = other RNA
tgaaactgtcccaggcttt

SEQ ID NO: 54422 - RNA, 19 nt, synthetic construct
  misc_feature 1..19: note = siRNA sense sequence
  source 1..19: mol_type = other RNA
aagcctgggacagtttcat

SEQ ID NO: 54423 - RNA, 19 nt, synthetic construct
  misc_feature 1..19: note = siRNA antisense sequence
  source 1..19: mol_type = other RNA
atgaaactgtcccaggctt

SEQ ID NO: 54424 - RNA, 19 nt, synthetic construct
  misc_feature 1..19: note = siRNA sense sequence
  source 1..19: mol_type = other RNA
agcctgggacagtttcatg

SEQ ID NO: 54425 - RNA, 19 nt, synthetic construct
  misc_feature 1..19: note = siRNA antisense sequence
  source 1..19: mol_type = other RNA
catgaaactgtcccaggct

SEQ ID NO: 54426 - RNA, 19 nt, synthetic construct
  misc_feature 1..19: note = siRNA sense sequence
  source 1..19: mol_type = other RNA
aaattgtctttcatatggc

SEQ ID NO: 54427 - RNA, 19 nt, synthetic construct
  misc_feature 1..19: note = siRNA antisense sequence
  source 1..19: mol_type = other RNA
gccatatgaaagacaattt

SEQ ID NO: 54428 - RNA, 19 nt, synthetic construct
  misc_feature 1..19: note = siRNA sense sequence
  source 1..19: mol_type = other RNA
aattgtctttcatatggcg

SEQ ID NO: 54429 - RNA, 19 nt, synthetic construct
  misc_feature 1..19: note = siRNA antisense sequence
  source 1..19: mol_type = other RNA
cgccatatgaaagacaatt

SEQ ID NO: 54430 - RNA, 19 nt, synthetic construct
  misc_feature 1..19: note = siRNA sense sequence
  source 1..19: mol_type = other RNA
attgtctttcatatggcgg

SEQ ID NO: 54431 - RNA, 19 nt, synthetic construct
  misc_feature 1..19: note = siRNA antisense sequence
  source 1..19: mol_type = other RNA
ccgccatatgaaagacaat

SEQ ID NO: 54432 - RNA, 19 nt, synthetic construct
  misc_feature 1..19: note = siRNA sense sequence
  source 1..19: mol_type = other RNA
ttgtctttcatatggcggt

SEQ ID NO: 54433 - RNA, 19 nt, synthetic construct
  misc_feature 1..19: note = siRNA antisense sequence
  source 1..19: mol_type = other RNA
accgccatatgaaagacaa

SEQ ID NO: 54434 - RNA, 19 nt, synthetic construct
  misc_feature 1..19: note = siRNA sense sequence
  source 1..19: mol_type = other RNA
tgtctttcatatggcggtt

SEQ ID NO: 54435 - RNA, 19 nt, synthetic construct
  misc_feature 1..19: note = siRNA antisense sequence
  source 1..19: mol_type = other RNA
aaccgccatatgaaagaca

SEQ ID NO: 54436 - RNA, 19 nt, synthetic construct
  misc_feature 1..19: note = siRNA sense sequence
  source 1..19: mol_type = other RNA
gtctttcatatggcggttc

SEQ ID NO: 54437 - RNA, 19 nt, synthetic construct
  misc_feature 1..19: note = siRNA antisense sequence
  source 1..19: mol_type = other RNA
gaaccgccatatgaaagac

SEQ ID NO: 54438 - RNA, 19 nt, synthetic construct
  misc_feature 1..19: note = siRNA sense sequence
  source 1..19: mol_type = other RNA
tctttcatatggcggttca

SEQ ID NO: 54439 - RNA, 19 nt, synthetic construct
  misc_feature 1..19: note = siRNA antisense sequence
  source 1..19: mol_type = other RNA
tgaaccgccatatgaaaga

SEQ ID NO: 54440 - RNA, 19 nt, synthetic construct
  misc_feature 1..19: note = siRNA sense sequence
  source 1..19: mol_type = other RNA
ctttcatatggcggttcat

SEQ ID NO: 54441 - RNA, 19 nt, synthetic construct
  misc_feature 1..19: note = siRNA antisense sequence
  source 1..19: mol_type = other RNA
atgaaccgccatatgaaag

SEQ ID NO: 54442 - RNA, 19 nt, synthetic construct
  misc_feature 1..19: note = siRNA sense sequence
  source 1..19: mol_type = other RNA
atccagtgatctattcctt

SEQ ID NO: 54443 - RNA, 19 nt, synthetic construct
  misc_feature 1..19: note = siRNA antisense sequence
  source 1..19: mol_type = other RNA
aaggaatagatcactggat

SEQ ID NO: 54444 - RNA, 19 nt, synthetic construct
  misc_feature 1..19: note = siRNA sense sequence
  source 1..19: mol_type = other RNA
tccagtgatctattccttg

SEQ ID NO: 54445 - RNA, 19 nt, synthetic construct
  misc_feature 1..19: note = siRNA antisense sequence
  source 1..19: mol_type = other RNA
caaggaatagatcactgga

SEQ ID NO: 54446 - RNA, 19 nt, synthetic construct
  misc_feature 1..19: note = siRNA sense sequence
  source 1..19: mol_type = other RNA
ccagtgatctattccttga

SEQ ID NO: 54447 - RNA, 19 nt, synthetic construct
  misc_feature 1..19: note = siRNA antisense sequence
  source 1..19: mol_type = other RNA
tcaaggaatagatcactgg

SEQ ID NO: 54448 - RNA, 19 nt, synthetic construct
  misc_feature 1..19: note = siRNA sense sequence
  source 1..19: mol_type = other RNA
cagtgatctattccttgaa

SEQ ID NO: 54449 - RNA, 19 nt, synthetic construct
  misc_feature 1..19: note = siRNA antisense sequence
  source 1..19: mol_type = other RNA
ttcaaggaatagatcactg

SEQ ID NO: 54450 - RNA, 19 nt, synthetic construct
  misc_feature 1..19: note = siRNA sense sequence
  source 1..19: mol_type = other RNA
caaatttaaatgctccaag

SEQ ID NO: 54451 - RNA, 19 nt, synthetic construct
  misc_feature 1..19: note = siRNA antisense sequence
  source 1..19: mol_type = other RNA
cttggagcatttaaatttg

SEQ ID NO: 54452 - RNA, 19 nt, synthetic construct
  misc_feature 1..19: note = siRNA sense sequence
  source 1..19: mol_type = other RNA
tttaaatgctccaaggtgt

SEQ ID NO: 54453 - RNA, 19 nt, synthetic construct
  misc_feature 1..19: note = siRNA antisense sequence
  source 1..19: mol_type = other RNA
acaccttggagcatttaaa

SEQ ID NO: 54454 - RNA, 19 nt, synthetic construct
  misc_feature 1..19: note = siRNA sense sequence
  source 1..19: mol_type = other RNA
ttaaatgctccaaggtgtc

SEQ ID NO: 54455 - RNA, 19 nt, synthetic construct
  misc_feature 1..19: note = siRNA antisense sequence
  source 1..19: mol_type = other RNA
gacaccttggagcatttaa

SEQ ID NO: 54456 - RNA, 19 nt, synthetic construct
  misc_feature 1..19: note = siRNA sense sequence
  source 1..19: mol_type = other RNA
taaatgctccaaggtgtct

SEQ ID NO: 54457 - RNA, 19 nt, synthetic construct
  misc_feature 1..19: note = siRNA antisense sequence
  source 1..19: mol_type = other RNA
agacaccttggagcattta

SEQ ID NO: 54458 - RNA, 19 nt, synthetic construct
  misc_feature 1..19: note = siRNA sense sequence
  source 1..19: mol_type = other RNA
aaatgctccaaggtgtctt

SEQ ID NO: 54459 - RNA, 19 nt, synthetic construct
  misc_feature 1..19: note = siRNA antisense sequence
  source 1..19: mol_type = other RNA
aagacaccttggagcattt

SEQ ID NO: 54460 - RNA, 19 nt, synthetic construct
  misc_feature 1..19: note = siRNA sense sequence
  source 1..19: mol_type = other RNA
gctccaaggtgtctttgaa

SEQ ID NO: 54461 - RNA, 19 nt, synthetic construct
  misc_feature 1..19: note = siRNA antisense sequence
  source 1..19: mol_type = other RNA
ttcaaagacaccttggagc

SEQ ID NO: 54462 - RNA, 19 nt, synthetic construct
  misc_feature 1..19: note = siRNA sense sequence
  source 1..19: mol_type = other RNA
aaatctgaagcataatacc

SEQ ID NO: 54463 - RNA, 19 nt, synthetic construct
  misc_feature 1..19: note = siRNA antisense sequence
  source 1..19: mol_type = other RNA
ggtattatgcttcagattt

SEQ ID NO: 54464 - RNA, 19 nt, synthetic construct
  misc_feature 1..19: note = siRNA sense sequence
  source 1..19: mol_type = other RNA
aatctgaagcataatacca

SEQ ID NO: 54465 - RNA, 19 nt, synthetic construct
  misc_feature 1..19: note = siRNA antisense sequence
  source 1..19: mol_type = other RNA
tggtattatgcttcagatt

SEQ ID NO: 54466 - RNA, 19 nt, synthetic construct
  misc_feature 1..19: note = siRNA sense sequence
  source 1..19: mol_type = other RNA
atctgaagcataataccaa

SEQ ID NO: 54467 - RNA, 19 nt, synthetic construct
  misc_feature 1..19: note = siRNA antisense sequence
  source 1..19: mol_type = other RNA
ttggtattatgcttcagat

SEQ ID NO: 54468 - RNA, 19 nt, synthetic construct
  misc_feature 1..19: note = siRNA sense sequence
  source 1..19: mol_type = other RNA
tctgaagcataataccaaa

SEQ ID NO: 54469 - RNA, 19 nt, synthetic construct
  misc_feature 1..19: note = siRNA antisense sequence
  source 1..19: mol_type = other RNA
tttggtattatgcttcaga

SEQ ID NO: 54470 - RNA, 19 nt, synthetic construct
  misc_feature 1..19: note = siRNA sense sequence
  source 1..19: mol_type = other RNA
ctgaagcataataccaaaa

SEQ ID NO: 54471 - RNA, 19 nt, synthetic construct
  misc_feature 1..19: note = siRNA antisense sequence
  source 1..19: mol_type = other RNA
ttttggtattatgcttcag

SEQ ID NO: 54472 - RNA, 19 nt, synthetic construct
  misc_feature 1..19: note = siRNA sense sequence
  source 1..19: mol_type = other RNA
cctgaattctagtgtttta

SEQ ID NO: 54473 - RNA, 19 nt, synthetic construct
  misc_feature 1..19: note = siRNA antisense sequence
  source 1..19: mol_type = other RNA
taaaacactagaattcagg

SEQ ID NO: 54474 - RNA, 19 nt, synthetic construct
  misc_feature 1..19: note = siRNA sense sequence
  source 1..19: mol_type = other RNA
aattctagtgttttatcgg

SEQ ID NO: 54475 - RNA, 19 nt, synthetic construct
  misc_feature 1..19: note = siRNA antisense sequence
  source 1..19: mol_type = other RNA
ccgataaaacactagaatt

SEQ ID NO: 54476 - RNA, 19 nt, synthetic construct
  misc_feature 1..19: note = siRNA sense sequence
  source 1..19: mol_type = other RNA
attctagtgttttatcggg

SEQ ID NO: 54477 - RNA, 19 nt, synthetic construct
  misc_feature 1..19: note = siRNA antisense sequence
  source 1..19: mol_type = other RNA
cccgataaaacactagaat

SEQ ID NO: 54478 - RNA, 19 nt, synthetic construct
  misc_feature 1..19: note = siRNA sense sequence
  source 1..19: mol_type = other RNA
ttctagtgttttatcggga

SEQ ID NO: 54479 - RNA, 19 nt, synthetic construct
  misc_feature 1..19: note = siRNA antisense sequence
  source 1..19: mol_type = other RNA
tcccgataaaacactagaa

SEQ ID NO: 54480 - RNA, 19 nt, synthetic construct
  misc_feature 1..19: note = siRNA sense sequence
  source 1..19: mol_type = other RNA
tctagtgttttatcgggaa

SEQ ID NO: 54481 - RNA, 19 nt, synthetic construct
  misc_feature 1..19: note = siRNA antisense sequence
  source 1..19: mol_type = other RNA
ttcccgataaaacactaga

SEQ ID NO: 54482 - RNA, 19 nt, synthetic construct
  misc_feature 1..19: note = siRNA sense sequence
  source 1..19: mol_type = other RNA
tggccatgtaatataaatg

SEQ ID NO: 54483 - RNA, 19 nt, synthetic construct
  misc_feature 1..19: note = siRNA antisense sequence
  source 1..19: mol_type = other RNA
catttatattacatggcca

SEQ ID NO: 54484 - RNA, 19 nt, synthetic construct
  misc_feature 1..19: note = siRNA sense sequence
  source 1..19: mol_type = other RNA
ggccatgtaatataaatgc

SEQ ID NO: 54485 - RNA, 19 nt, synthetic construct
  misc_feature 1..19: note = siRNA antisense sequence
  source 1..19: mol_type = other RNA
gcatttatattacatggcc

SEQ ID NO: 54486 - RNA, 19 nt, synthetic construct
  misc_feature 1..19: note = siRNA sense sequence
  source 1..19: mol_type = other RNA
aatgcaatgtctttatgct

SEQ ID NO: 54487 - RNA, 19 nt, synthetic construct
  misc_feature 1..19: note = siRNA antisense sequence
  source 1..19: mol_type = other RNA
agcataaagacattgcatt

SEQ ID NO: 54488 - RNA, 19 nt, synthetic construct
  misc_feature 1..19: note = siRNA sense sequence
  source 1..19: mol_type = other RNA
atgcaatgtctttatgctt

SEQ ID NO: 54489 - RNA, 19 nt, synthetic construct
  misc_feature 1..19: note = siRNA antisense sequence
  source 1..19: mol_type = other RNA
aagcataaagacattgcat

SEQ ID NO: 54490 - RNA, 19 nt, synthetic construct
  misc_feature 1..19: note = siRNA sense sequence
  source 1..19: mol_type = other RNA
tgcaatgtctttatgcttt

SEQ ID NO: 54491 - RNA, 19 nt, synthetic construct
  misc_feature 1..19: note = siRNA antisense sequence
  source 1..19: mol_type = other RNA
aaagcataaagacattgca

SEQ ID NO: 54492 - RNA, 19 nt, synthetic construct
  misc_feature 1..19: note = siRNA sense sequence
  source 1..19: mol_type = other RNA
tgtctttatgctttaacca

SEQ ID NO: 54493 - RNA, 19 nt, synthetic construct
  misc_feature 1..19: note = siRNA antisense sequence
  source 1..19: mol_type = other RNA
tggttaaagcataaagaca

SEQ ID NO: 54494 - RNA, 19 nt, synthetic construct
  misc_feature 1..19: note = siRNA sense sequence
  source 1..19: mol_type = other RNA
gtctttatgctttaaccaa

SEQ ID NO: 54495 - RNA, 19 nt, synthetic construct
  misc_feature 1..19: note = siRNA antisense sequence
  source 1..19: mol_type = other RNA
ttggttaaagcataaagac

SEQ ID NO: 54496 - RNA, 19 nt, synthetic construct
  misc_feature 1..19: note = siRNA sense sequence
  source 1..19: mol_type = other RNA
tttatgctttaaccaagag

SEQ ID NO: 54497 - RNA, 19 nt, synthetic construct
  misc_feature 1..19: note = siRNA antisense sequence
  source 1..19: mol_type = other RNA
ctcttggttaaagcataaa

SEQ ID NO: 54498 - RNA, 19 nt, synthetic construct
  misc_feature 1..19: note = siRNA sense sequence
  source 1..19: mol_type = other RNA
tttaaaagctagtagcagc

SEQ ID NO: 54499 - RNA, 19 nt, synthetic construct
  misc_feature 1..19: note = siRNA antisense sequence
  source 1..19: mol_type = other RNA
gctgctactagcttttaaa

SEQ ID NO: 54500 - RNA, 19 nt, synthetic construct
  misc_feature 1..19: note = siRNA sense sequence
  source 1..19: mol_type = other RNA
ttaaaagctagtagcagca

SEQ ID NO: 54501 - RNA, 19 nt, synthetic construct
  misc_feature 1..19: note = siRNA antisense sequence
  source 1..19: mol_type = other RNA
tgctgctactagcttttaa

SEQ ID NO: 54502 - RNA, 19 nt, synthetic construct
  misc_feature 1..19: note = siRNA sense sequence
  source 1..19: mol_type = other RNA
taaaagctagtagcagcac

SEQ ID NO: 54503 - RNA, 19 nt, synthetic construct
  misc_feature 1..19: note = siRNA antisense sequence
  source 1..19: mol_type = other RNA
gtgctgctactagctttta

SEQ ID NO: 54504 - RNA, 19 nt, synthetic construct
  misc_feature 1..19: note = siRNA sense sequence
  source 1..19: mol_type = other RNA
agctagtagcagcacagaa

SEQ ID NO: 54505 - RNA, 19 nt, synthetic construct
  misc_feature 1..19: note = siRNA antisense sequence
  source 1..19: mol_type = other RNA
ttctgtgctgctactagct

SEQ ID NO: 54506 - RNA, 19 nt, synthetic construct
  misc_feature 1..19: note = siRNA sense sequence
  source 1..19: mol_type = other RNA
gtgttaatttctgtagtgc

SEQ ID NO: 54507 - RNA, 19 nt, synthetic construct
  misc_feature 1..19: note = siRNA antisense sequence
  source 1..19: mol_type = other RNA
gcactacagaaattaacac

SEQ ID NO: 54508 - RNA, 19 nt, synthetic construct
  misc_feature 1..19: note = siRNA sense sequence
  source 1..19: mol_type = other RNA
tgttaatttctgtagtgca

SEQ ID NO: 54509 - RNA, 19 nt, synthetic construct
  misc_feature 1..19: note = siRNA antisense sequence
  source 1..19: mol_type = other RNA
tgcactacagaaattaaca

SEQ ID NO: 54510 - RNA, 19 nt, synthetic construct
  misc_feature 1..19: note = siRNA sense sequence
  source 1..19: mol_type = other RNA
tttatgtgtgtcatcattg

SEQ ID NO: 54511 - RNA, 19 nt, synthetic construct
  misc_feature 1..19: note = siRNA antisense sequence
  source 1..19: mol_type = other RNA
caatgatgacacacataaa

SEQ ID NO: 54512 - RNA, 19 nt, synthetic construct
  misc_feature 1..19: note = siRNA sense sequence
  source 1..19: mol_type = other RNA
ttatgtgtgtcatcattgt

SEQ ID NO: 54513 - RNA, 19 nt, synthetic construct
  misc_feature 1..19: note = siRNA antisense sequence
  source 1..19: mol_type = other RNA
acaatgatgacacacataa

SEQ ID NO: 54514 - RNA, 19 nt, synthetic construct
  misc_feature 1..19: note = siRNA sense sequence
  source 1..19: mol_type = other RNA
tatgtgtgtcatcattgtt

SEQ ID NO: 54515 - RNA, 19 nt, synthetic construct
  misc_feature 1..19: note = siRNA antisense sequence
  source 1..19: mol_type = other RNA
aacaatgatgacacacata

SEQ ID NO: 54516 - RNA, 19 nt, synthetic construct
  misc_feature 1..19: note = siRNA sense sequence
  source 1..19: mol_type = other RNA
atgtgtgtcatcattgtta

SEQ ID NO: 54517 - RNA, 19 nt, synthetic construct
  misc_feature 1..19: note = siRNA antisense sequence
  source 1..19: mol_type = other RNA
taacaatgatgacacacat

SEQ ID NO: 54518 - RNA, 19 nt, synthetic construct
  misc_feature 1..19: note = siRNA sense sequence
  source 1..19: mol_type = other RNA
tgtgtgtcatcattgttat

SEQ ID NO: 54519 - RNA, 19 nt, synthetic construct
  misc_feature 1..19: note = siRNA antisense sequence
  source 1..19: mol_type = other RNA
ataacaatgatgacacaca

SEQ ID NO: 54520 - RNA, 19 nt, synthetic construct
  misc_feature 1..19: note = siRNA sense sequence
  source 1..19: mol_type = other RNA
gtgtgtcatcattgttata

SEQ ID NO: 54521 - RNA, 19 nt, synthetic construct
  misc_feature 1..19: note = siRNA antisense sequence
  source 1..19: mol_type = other RNA
tataacaatgatgacacac

SEQ ID NO: 54522 - RNA, 19 nt, synthetic construct
  misc_feature 1..19: note = siRNA sense sequence
  source 1..19: mol_type = other RNA
aaagcagttgtggtagata

SEQ ID NO: 54523 - RNA, 19 nt, synthetic construct
  misc_feature 1..19: note = siRNA antisense sequence
  source 1..19: mol_type = other RNA
tatctaccacaactgcttt

SEQ ID NO: 54524 - RNA, 19 nt, synthetic construct
  misc_feature 1..19: note = siRNA sense sequence
  source 1..19: mol_type = other RNA
aagcagttgtggtagatag

SEQ ID NO: 54525 - RNA, 19 nt, synthetic construct
  misc_feature 1..19: note = siRNA antisense sequence
  source 1..19: mol_type = other RNA
ctatctaccacaactgctt

SEQ ID NO: 54526 - RNA, 19 nt, synthetic construct
  misc_feature 1..19: note = siRNA sense sequence
  source 1..19: mol_type = other RNA
agcagttgtggtagataga

SEQ ID NO: 54527 - RNA, 19 nt, synthetic construct
  misc_feature 1..19: note = siRNA antisense sequence
  source 1..19: mol_type = other RNA
tctatctaccacaactgct

SEQ ID NO: 54528 - RNA, 19 nt, synthetic construct
  misc_feature 1..19: note = siRNA sense sequence
  source 1..19: mol_type = other RNA
gcagttgtggtagatagag

SEQ ID NO: 54529 - RNA, 19 nt, synthetic construct
  misc_feature 1..19: note = siRNA antisense sequence
  source 1..19: mol_type = other RNA
ctctatctaccacaactgc

SEQ ID NO: 54530 - RNA, 19 nt, synthetic construct
  misc_feature 1..19: note = siRNA sense sequence
  source 1..19: mol_type = other RNA
gagcatattaaaagcttcc

SEQ ID NO: 54531 - RNA, 19 nt, synthetic construct
  misc_feature 1..19: note = siRNA antisense sequence
  source 1..19: mol_type = other RNA
ggaagcttttaatatgctc

SEQ ID NO: 54532 - RNA, 19 nt, synthetic construct
  misc_feature 1..19: note = siRNA sense sequence
  source 1..19: mol_type = other RNA
agcatattaaaagcttcca

SEQ ID NO: 54533 - RNA, 19 nt, synthetic construct
  misc_feature 1..19: note = siRNA antisense sequence
  source 1..19: mol_type = other RNA
tggaagcttttaatatgct

SEQ ID NO: 54534 - RNA, 19 nt, synthetic construct
  misc_feature 1..19: note = siRNA sense sequence
  source 1..19: mol_type = other RNA
gcatattaaaagcttccac

SEQ ID NO: 54535 - RNA, 19 nt, synthetic construct
  misc_feature 1..19: note = siRNA antisense sequence
  source 1..19: mol_type = other RNA
gtggaagcttttaatatgc

SEQ ID NO: 54536 - RNA, 19 nt, synthetic construct
  misc_feature 1..19: note = siRNA sense sequence
  source 1..19: mol_type = other RNA
catattaaaagcttccacc

SEQ ID NO: 54537 - RNA, 19 nt, synthetic construct
  misc_feature 1..19: note = siRNA antisense sequence
  source 1..19: mol_type = other RNA
ggtggaagcttttaatatg

SEQ ID NO: 54538 - RNA, 19 nt, synthetic construct
  misc_feature 1..19: note = siRNA sense sequence
  source 1..19: mol_type = other RNA
atattaaaagcttccacca

SEQ ID NO: 54539 - RNA, 19 nt, synthetic construct
  misc_feature 1..19: note = siRNA antisense sequence
  source 1..19: mol_type = other RNA
tggtggaagcttttaatat

SEQ ID NO: 54540 - RNA, 19 nt, synthetic construct
  misc_feature 1..19: note = siRNA sense sequence
  source 1..19: mol_type = other RNA
tattaaaagcttccaccaa

SEQ ID NO: 54541 - RNA, 19 nt, synthetic construct
  misc_feature 1..19: note = siRNA antisense sequence
  source 1..19: mol_type = other RNA
ttggtggaagcttttaata

SEQ ID NO: 54542 - RNA, 19 nt, synthetic construct
  misc_feature 1..19: note = siRNA sense sequence
  source 1..19: mol_type = other RNA
attaaaagcttccaccaaa

SEQ ID NO: 54543 - RNA, 19 nt, synthetic construct
  misc_feature 1..19: note = siRNA antisense sequence
  source 1..19: mol_type = other RNA
tttggtggaagcttttaat

SEQ ID NO: 54544 - RNA, 19 nt, synthetic construct
  misc_feature 1..19: note = siRNA sense sequence
  source 1..19: mol_type = other RNA
ttaaaagcttccaccaaaa

SEQ ID NO: 54545 - RNA, 19 nt, synthetic construct
  misc_feature 1..19: note = siRNA antisense sequence
  source 1..19: mol_type = other RNA
ttttggtggaagcttttaa

SEQ ID NO: 54546 - RNA, 19 nt, synthetic construct
  misc_feature 1..19: note = siRNA sense sequence
  source 1..19: mol_type = other RNA
aaattcttacgtgcattga

SEQ ID NO: 54547 - RNA, 19 nt, synthetic construct
  misc_feature 1..19: note = siRNA antisense sequence
  source 1..19: mol_type = other RNA
tcaatgcacgtaagaattt

SEQ ID NO: 54548 - RNA, 19 nt, synthetic construct
  misc_feature 1..19: note = siRNA sense sequence
  source 1..19: mol_type = other RNA
aattcttacgtgcattgaa

SEQ ID NO: 54549 - RNA, 19 nt, synthetic construct
  misc_feature 1..19: note = siRNA antisense sequence
  source 1..19: mol_type = other RNA
ttcaatgcacgtaagaatt

SEQ ID NO: 54550 - RNA, 19 nt, synthetic construct
  misc_feature 1..19: note = siRNA sense sequence
  source 1..19: mol_type = other RNA
attcttacgtgcattgaag

SEQ ID NO: 54551 - RNA, 19 nt, synthetic construct
  misc_feature 1..19: note = siRNA antisense sequence
  source 1..19: mol_type = other RNA
cttcaatgcacgtaagaat

SEQ ID NO: 54552 - RNA, 19 nt, synthetic construct
  misc_feature 1..19: note = siRNA sense sequence
  source 1..19: mol_type = other RNA
attacatgaagcctttaag

SEQ ID NO: 54553 - RNA, 19 nt, synthetic construct
  misc_feature 1..19: note = siRNA antisense sequence
  source 1..19: mol_type = other RNA
cttaaaggcttcatgtaat

SEQ ID NO: 54554 - RNA, 19 nt, synthetic construct
  misc_feature 1..19: note = siRNA sense sequence
  source 1..19: mol_type = other RNA
ttacatgaagcctttaagg

SEQ ID NO: 54555 - RNA, 19 nt, synthetic construct
  misc_feature 1..19: note = siRNA antisense sequence
  source 1..19: mol_type = other RNA
ccttaaaggcttcatgtaa

SEQ ID NO: 54556 - RNA, 19 nt, synthetic construct
  misc_feature 1..19: note = siRNA sense sequence
  source 1..19: mol_type = other RNA
tacatgaagcctttaaggg

SEQ ID NO: 54557 - RNA, 19 nt, synthetic construct
  misc_feature 1..19: note = siRNA antisense sequence
  source 1..19: mol_type = other RNA
cccttaaaggcttcatgta

SEQ ID NO: 54558 - RNA, 19 nt, synthetic construct
  misc_feature 1..19: note = siRNA sense sequence
  source 1..19: mol_type = other RNA
acatgaagcctttaagggt

SEQ ID NO: 54559 - RNA, 19 nt, synthetic construct
  misc_feature 1..19: note = siRNA antisense sequence
  source 1..19: mol_type = other RNA
acccttaaaggcttcatgt

SEQ ID NO: 54560 - RNA, 19 nt, synthetic construct
  misc_feature 1..19: note = siRNA sense sequence
  source 1..19: mol_type = other RNA
gcctttaagggtccaggtg

SEQ ID NO: 54561 - RNA, 19 nt, synthetic construct
  misc_feature 1..19: note = siRNA antisense sequence
  source 1..19: mol_type = other RNA
cacctggacccttaaaggc

SEQ ID NO: 54562 - RNA, 19 nt, synthetic construct
  misc_feature 1..19: note = siRNA sense sequence
  source 1..19: mol_type = other RNA
cctttaagggtccaggtgg

SEQ ID NO: 54563 - RNA, 19 nt, synthetic construct
  misc_feature 1..19: note = siRNA antisense sequence
  source 1..19: mol_type = other RNA
ccacctggacccttaaagg

SEQ ID NO: 54564 - RNA, 19 nt, synthetic construct
  misc_feature 1..19: note = siRNA sense sequence
  source 1..19: mol_type = other RNA
ctttaagggtccaggtggt

SEQ ID NO: 54565 - RNA, 19 nt, synthetic construct
  misc_feature 1..19: note = siRNA antisense sequence
  source 1..19: mol_type = other RNA
accacctggacccttaaag

SEQ ID NO: 54566 - RNA, 19 nt, synthetic construct
  misc_feature 1..19: note = siRNA sense sequence
  source 1..19: mol_type = other RNA
tttaagggtccaggtggta

SEQ ID NO: 54567 - RNA, 19 nt, synthetic construct
  misc_feature 1..19: note = siRNA antisense sequence
  source 1..19: mol_type = other RNA
taccacctggacccttaaa

SEQ ID NO: 54568 - RNA, 19 nt, synthetic construct
  misc_feature 1..19: note = siRNA sense sequence
  source 1..19: mol_type = other RNA
ttaagggtccaggtggtat

SEQ ID NO: 54569 - RNA, 19 nt, synthetic construct
  misc_feature 1..19: note = siRNA antisense sequence
  source 1..19: mol_type = other RNA
ataccacctggacccttaa

SEQ ID NO: 54570 - RNA, 19 nt, synthetic construct
  misc_feature 1..19: note = siRNA sense sequence
  source 1..19: mol_type = other RNA
taagggtccaggtggtata

SEQ ID NO: 54571 - RNA, 19 nt, synthetic construct
  misc_feature 1..19: note = siRNA antisense sequence
  source 1..19: mol_type = other RNA
tataccacctggaccctta

SEQ ID NO: 54572 - RNA, 19 nt, synthetic construct
  misc_feature 1..19: note = siRNA sense sequence
  source 1..19: mol_type = other RNA
aagggtccaggtggtatac

SEQ ID NO: 54573 - RNA, 19 nt, synthetic construct
  misc_feature 1..19: note = siRNA antisense sequence
  source 1..19: mol_type = other RNA
gtataccacctggaccctt

SEQ ID NO: 54574 - RNA, 19 nt, synthetic construct
  misc_feature 1..19: note = siRNA sense sequence
  source 1..19: mol_type = other RNA
agggtccaggtggtatacc

SEQ ID NO: 54575 - RNA, 19 nt, synthetic construct
  misc_feature 1..19: note = siRNA antisense sequence
  source 1..19: mol_type = other RNA
ggtataccacctggaccct

SEQ ID NO: 54576 - RNA, 19 nt, synthetic construct
  misc_feature 1..19: note = siRNA sense sequence
  source 1..19: mol_type = other RNA
ggtggtatacctggaatct

SEQ ID NO: 54577 - RNA, 19 nt, synthetic construct
  misc_feature 1..19: note = siRNA antisense sequence
  source 1..19: mol_type = other RNA
agattccaggtataccacc

SEQ ID NO: 54578 - RNA, 19 nt, synthetic construct
  misc_feature 1..19: note = siRNA sense sequence
  source 1..19: mol_type = other RNA
gtggtatacctggaatctt

SEQ ID NO: 54579 - RNA, 19 nt, synthetic construct
  misc_feature 1..19: note = siRNA antisense sequence
  source 1..19: mol_type = other RNA
aagattccaggtataccac

SEQ ID NO: 54580 - RNA, 19 nt, synthetic construct
  misc_feature 1..19: note = siRNA sense sequence
  source 1..19: mol_type = other RNA
tggtatacctggaatcttt

SEQ ID NO: 54581 - RNA, 19 nt, synthetic construct
  misc_feature 1..19: note = siRNA antisense sequence
  source 1..19: mol_type = other RNA
aaagattccaggtatacca

SEQ ID NO: 54582 - RNA, 19 nt, synthetic construct
  misc_feature 1..19: note = siRNA sense sequence
  source 1..19: mol_type = other RNA
ggtatacctggaatctttc

SEQ ID NO: 54583 - RNA, 19 nt, synthetic construct
  misc_feature 1..19: note = siRNA antisense sequence
  source 1..19: mol_type = other RNA
gaaagattccaggtatacc

SEQ ID NO: 54584 - RNA, 19 nt, synthetic construct
  misc_feature 1..19: note = siRNA sense sequence
  source 1..19: mol_type = other RNA
gtatacctggaatctttct

SEQ ID NO: 54585 - RNA, 19 nt, synthetic construct
  misc_feature 1..19: note = siRNA antisense sequence
  source 1..19: mol_type = other RNA
agaaagattccaggtatac

SEQ ID NO: 54586 - RNA, 19 nt, synthetic construct
  misc_feature 1..19: note = siRNA sense sequence
  source 1..19: mol_type = other RNA
tatacctggaatctttctt

SEQ ID NO: 54587 - RNA, 19 nt, synthetic construct
  misc_feature 1..19: note = siRNA antisense sequence
  source 1..19: mol_type = other RNA
aagaaagattccaggtata

SEQ ID NO: 54588 - RNA, 19 nt, synthetic construct
  misc_feature 1..19: note = siRNA sense sequence
  source 1..19: mol_type = other RNA
ctttcttttgttaggttac

SEQ ID NO: 54589 - RNA, 19 nt, synthetic construct
  misc_feature 1..19: note = siRNA antisense sequence
  source 1..19: mol_type = other RNA
gtaacctaacaaaagaaag

SEQ ID NO: 54590 - RNA, 19 nt, synthetic construct
  misc_feature 1..19: note = siRNA sense sequence
  source 1..19: mol_type = other RNA
ttcttttgttaggttacac

SEQ ID NO: 54591 - RNA, 19 nt, synthetic construct
  misc_feature 1..19: note = siRNA antisense sequence
  source 1..19: mol_type = other RNA
gtgtaacctaacaaaagaa

SEQ ID NO: 54592 - RNA, 19 nt, synthetic construct
  misc_feature 1..19: note = siRNA sense sequence
  source 1..19: mol_type = other RNA
tcttttgttaggttacact

SEQ ID NO: 54593 - RNA, 19 nt, synthetic construct
  misc_feature 1..19: note = siRNA antisense sequence
  source 1..19: mol_type = other RNA
agtgtaacctaacaaaaga

SEQ ID NO: 54594 - RNA, 19 nt, synthetic construct
  misc_feature 1..19: note = siRNA sense sequence
  source 1..19: mol_type = other RNA
cttttgttaggttacactg

SEQ ID NO: 54595 - RNA, 19 nt, synthetic construct
  misc_feature 1..19: note = siRNA antisense sequence
  source 1..19: mol_type = other RNA
cagtgtaacctaacaaaag

SEQ ID NO: 54596 - RNA, 19 nt, synthetic construct
  misc_feature 1..19: note = siRNA sense sequence
  source 1..19: mol_type = other RNA
ttttgttaggttacactgt

SEQ ID NO: 54597 - RNA, 19 nt, synthetic construct
  misc_feature 1..19: note = siRNA antisense sequence
  source 1..19: mol_type = other RNA
acagtgtaacctaacaaaa

SEQ ID NO: 54598 - RNA, 19 nt, synthetic construct
  misc_feature 1..19: note = siRNA sense sequence
  source 1..19: mol_type = other RNA
tttgttaggttacactgta

SEQ ID NO: 54599 - RNA, 19 nt, synthetic construct
  misc_feature 1..19: note = siRNA antisense sequence
  source 1..19: mol_type = other RNA
tacagtgtaacctaacaaa

SEQ ID NO: 54600 - RNA, 19 nt, synthetic construct
  misc_feature 1..19: note = siRNA sense sequence
  source 1..19: mol_type = other RNA
aactctgctactgcttctt

SEQ ID NO: 54601 - RNA, 19 nt, synthetic construct
  misc_feature 1..19: note = siRNA antisense sequence
  source 1..19: mol_type = other RNA
aagaagcagtagcagagtt

SEQ ID NO: 54602 - RNA, 19 nt, synthetic construct
  misc_feature 1..19: note = siRNA sense sequence
  source 1..19: mol_type = other RNA
actctgctactgcttcttc

SEQ ID NO: 54603 - RNA, 19 nt, synthetic construct
  misc_feature 1..19: note = siRNA antisense sequence
  source 1..19: mol_type = other RNA
gaagaagcagtagcagagt

SEQ ID NO: 54604 - RNA, 19 nt, synthetic construct
  misc_feature 1..19: note = siRNA sense sequence
  source 1..19: mol_type = other RNA
tctgctactgcttcttctg

SEQ ID NO: 54605 - RNA, 19 nt, synthetic construct
  misc_feature 1..19: note = siRNA antisense sequence
  source 1..19: mol_type = other RNA
cagaagaagcagtagcaga

SEQ ID NO: 54606 - RNA, 19 nt, synthetic construct
  misc_feature 1..19: note = siRNA sense sequence
  source 1..19: mol_type = other RNA
gatgtgctctatattgctg

SEQ ID NO: 54607 - RNA, 19 nt, synthetic construct
  misc_feature 1..19: note = siRNA antisense sequence
  source 1..19: mol_type = other RNA
cagcaatatagagcacatc

SEQ ID NO: 54608 - RNA, 19 nt, synthetic construct
  misc_feature 1..19: note = siRNA sense sequence
  source 1..19: mol_type = other RNA
ctctatattgctggacagc

SEQ ID NO: 54609 - RNA, 19 nt, synthetic construct
  misc_feature 1..19: note = siRNA antisense sequence
  source 1..19: mol_type = other RNA
gctgtccagcaatatagag

SEQ ID NO: 54610 - RNA, 19 nt, synthetic construct
  misc_feature 1..19: note = siRNA sense sequence
  source 1..19: mol_type = other RNA
attgctggacagcctcggt

SEQ ID NO: 54611 - RNA, 19 nt, synthetic construct
  misc_feature 1..19: note = siRNA antisense sequence
  source 1..19: mol_type = other RNA
accgaggctgtccagcaat

SEQ ID NO: 54612 - RNA, 19 nt, synthetic construct
  misc_feature 1..19: note = siRNA sense sequence
  source 1..19: mol_type = other RNA
ttgctggacagcctcggta

SEQ ID NO: 54613 - RNA, 19 nt, synthetic construct
  misc_feature 1..19: note = siRNA antisense sequence
  source 1..19: mol_type = other RNA
taccgaggctgtccagcaa

SEQ ID NO: 54614 - RNA, 19 nt, synthetic construct
  misc_feature 1..19: note = siRNA sense sequence
  source 1..19: mol_type = other RNA
tgctggacagcctcggtac

SEQ ID NO: 54615 - RNA, 19 nt, synthetic construct
  misc_feature 1..19: note = siRNA antisense sequence
  source 1..19: mol_type = other RNA
gtaccgaggctgtccagca

SEQ ID NO: 54616 - RNA, 19 nt, synthetic construct
  misc_feature 1..19: note = siRNA sense sequence
  source 1..19: mol_type = other RNA
gctggacagcctcggtaca

SEQ ID NO: 54617 - RNA, 19 nt, synthetic construct
  misc_feature 1..19: note = siRNA antisense sequence
  source 1..19: mol_type = other RNA
tgtaccgaggctgtccagc

SEQ ID NO: 54618 - RNA, 19 nt, synthetic construct
  misc_feature 1..19: note = siRNA sense sequence
  source 1..19: mol_type = other RNA
catacaggccaggtcatta

SEQ ID NO: 54619 - RNA, 19 nt, synthetic construct
  misc_feature 1..19: note = siRNA antisense sequence
  source 1..19: mol_type = other RNA
taatgacctggcctgtatg

SEQ ID NO: 54620 - RNA, 19 nt, synthetic construct
  misc_feature 1..19: note = siRNA sense sequence
  source 1..19: mol_type = other RNA
atacaggccaggtcattat

SEQ ID NO: 54621 - RNA, 19 nt, synthetic construct
  misc_feature 1..19: note = siRNA antisense sequence
  source 1..19: mol_type = other RNA
ataatgacctggcctgtat

SEQ ID NO: 54622 - RNA, 19 nt, synthetic construct
  misc_feature 1..19: note = siRNA sense sequence
  source 1..19: mol_type = other RNA
tacaggccaggtcattatc

SEQ ID NO: 54623 - RNA, 19 nt, synthetic construct
  misc_feature 1..19: note = siRNA antisense sequence
  source 1..19: mol_type = other RNA
gataatgacctggcctgta

SEQ ID NO: 54624 - RNA, 19 nt, synthetic construct
  misc_feature 1..19: note = siRNA sense sequence
  source 1..19: mol_type = other RNA
acaggccaggtcattatct

SEQ ID NO: 54625 - RNA, 19 nt, synthetic construct
  misc_feature 1..19: note = siRNA antisense sequence
  source 1..19: mol_type = other RNA
agataatgacctggcctgt

SEQ ID NO: 54626 - RNA, 19 nt, synthetic construct
  misc_feature 1..19: note = siRNA sense sequence
  source 1..19: mol_type = other RNA
caggccaggtcattatcta

SEQ ID NO: 54627 - RNA, 19 nt, synthetic construct
  misc_feature 1..19: note = siRNA antisense sequence
  source 1..19: mol_type = other RNA
tagataatgacctggcctg

SEQ ID NO: 54628 - RNA, 19 nt, synthetic construct
  misc_feature 1..19: note = siRNA sense sequence
  source 1..19: mol_type = other RNA
ggtcattatctacaggatg

SEQ ID NO: 54629 - RNA, 19 nt, synthetic construct
  misc_feature 1..19: note = siRNA antisense sequence
  source 1..19: mol_type = other RNA
catcctgtagataatgacc

SEQ ID NO: 54630 - RNA, 19 nt, synthetic construct
  misc_feature 1..19: note = siRNA sense sequence
  source 1..19: mol_type = other RNA
gtcattatctacaggatgg

SEQ ID NO: 54631 - RNA, 19 nt, synthetic construct
  misc_feature 1..19: note = siRNA antisense sequence
  source 1..19: mol_type = other RNA
ccatcctgtagataatgac

SEQ ID NO: 54632 - RNA, 19 nt, synthetic construct
  misc_feature 1..19: note = siRNA sense sequence
  source 1..19: mol_type = other RNA
tcattatctacaggatgga

SEQ ID NO: 54633 - RNA, 19 nt, synthetic construct
  misc_feature 1..19: note = siRNA antisense sequence
  source 1..19: mol_type = other RNA
tccatcctgtagataatga

SEQ ID NO: 54634 - RNA, 19 nt, synthetic construct
  misc_feature 1..19: note = siRNA sense sequence
  source 1..19: mol_type = other RNA
cattatctacaggatggaa

SEQ ID NO: 54635 - RNA, 19 nt, synthetic construct
  misc_feature 1..19: note = siRNA antisense sequence
  source 1..19: mol_type = other RNA
ttccatcctgtagataatg

SEQ ID NO: 54636 - RNA, 19 nt, synthetic construct
  misc_feature 1..19: note = siRNA sense sequence
  source 1..19: mol_type = other RNA
attatctacaggatggaag

SEQ ID NO: 54637 - RNA, 19 nt, synthetic construct
  misc_feature 1..19: note = siRNA antisense sequence
  source 1..19: mol_type = other RNA
cttccatcctgtagataat

SEQ ID NO: 54638 - RNA, 19 nt, synthetic construct
  misc_feature 1..19: note = siRNA sense sequence
  source 1..19: mol_type = other RNA
atttactgtctattgtcct

SEQ ID NO: 54639 - RNA, 19 nt, synthetic construct
  misc_feature 1..19: note = siRNA antisense sequence
  source 1..19: mol_type = other RNA
aggacaatagacagtaaat

SEQ ID NO: 54640 - RNA, 19 nt, synthetic construct
  misc_feature 1..19: note = siRNA sense sequence
  source 1..19: mol_type = other RNA
tttactgtctattgtccta

SEQ ID NO: 54641 - RNA, 19 nt, synthetic construct
  misc_feature 1..19: note = siRNA antisense sequence
  source 1..19: mol_type = other RNA
taggacaatagacagtaaa

SEQ ID NO: 54642 - RNA, 19 nt, synthetic construct
  misc_feature 1..19: note = siRNA sense sequence
  source 1..19: mol_type = other RNA
ttactgtctattgtcctaa

SEQ ID NO: 54643 - RNA, 19 nt, synthetic construct
  misc_feature 1..19: note = siRNA antisense sequence
  source 1..19: mol_type = other RNA
ttaggacaatagacagtaa

SEQ ID NO: 54644 - RNA, 19 nt, synthetic construct
  misc_feature 1..19: note = siRNA sense sequence
  source 1..19: mol_type = other RNA
tactgtctattgtcctaaa

SEQ ID NO: 54645 - RNA, 19 nt, synthetic construct
  misc_feature 1..19: note = siRNA antisense sequence
  source 1..19: mol_type = other RNA
tttaggacaatagacagta

SEQ ID NO: 54646 - RNA, 19 nt, synthetic construct
  misc_feature 1..19: note = siRNA sense sequence
  source 1..19: mol_type = other RNA
atacccacatattcagtaa

SEQ ID NO: 54647 - RNA, 19 nt, synthetic construct
  misc_feature 1..19: note = siRNA antisense sequence
  source 1..19: mol_type = other RNA
ttactgaatatgtgggtat

SEQ ID NO: 54648 - RNA, 19 nt, synthetic construct
  misc_feature 1..19: note = siRNA sense sequence
  source 1..19: mol_type = other RNA
tacccacatattcagtaac

SEQ ID NO: 54649 - RNA, 19 nt, synthetic construct
  misc_feature 1..19: note = siRNA antisense sequence
  source 1..19: mol_type = other RNA
gttactgaatatgtgggta

SEQ ID NO: 54650 - RNA, 19 nt, synthetic construct
  misc_feature 1..19: note = siRNA sense sequence
  source 1..19: mol_type = other RNA
ggccctgtgttaggttctt

SEQ ID NO: 54651 - RNA, 19 nt, synthetic construct
  misc_feature 1..19: note = siRNA antisense sequence
  source 1..19: mol_type = other RNA
aagaacctaacacagggcc

SEQ ID NO: 54652 - RNA, 19 nt, synthetic construct
  misc_feature 1..19: note = siRNA sense sequence
  source 1..19: mol_type = other RNA
ctgtgttaggttctttgga

SEQ ID NO: 54653 - RNA, 19 nt, synthetic construct
  misc_feature 1..19: note = siRNA antisense sequence
  source 1..19: mol_type = other RNA
tccaaagaacctaacacag

SEQ ID NO: 54654 - RNA, 19 nt, synthetic construct
  misc_feature 1..19: note = siRNA sense sequence
  source 1..19: mol_type = other RNA
tgtgttaggttctttggaa

SEQ ID NO: 54655 - RNA, 19 nt, synthetic construct
  misc_feature 1..19: note = siRNA antisense sequence
  source 1..19: mol_type = other RNA
ttccaaagaacctaacaca

SEQ ID NO: 54656 - RNA, 19 nt, synthetic construct
  misc_feature 1..19: note = siRNA sense sequence
  source 1..19: mol_type = other RNA
tgttaggttctttggaagg

SEQ ID NO: 54657 - RNA, 19 nt, synthetic construct
  misc_feature 1..19: note = siRNA antisense sequence
  source 1..19: mol_type = other RNA
ccttccaaagaacctaaca

SEQ ID NO: 54658 - RNA, 19 nt, synthetic construct
  misc_feature 1..19: note = siRNA sense sequence
  source 1..19: mol_type = other RNA
gttaggttctttggaagga

SEQ ID NO: 54659 - RNA, 19 nt, synthetic construct
  misc_feature 1..19: note = siRNA antisense sequence
  source 1..19: mol_type = other RNA
tccttccaaagaacctaac

SEQ ID NO: 54660 - RNA, 19 nt, synthetic construct
  misc_feature 1..19: note = siRNA sense sequence
  source 1..19: mol_type = other RNA
gttctttggaaggatgtat

SEQ ID NO: 54661 - RNA, 19 nt, synthetic construct
  misc_feature 1..19: note = siRNA antisense sequence
  source 1..19: mol_type = other RNA
atacatccttccaaagaac

SEQ ID NO: 54662 - RNA, 19 nt, synthetic construct
  misc_feature 1..19: note = siRNA sense sequence
  source 1..19: mol_type = other RNA
tttggaaggatgtatagtg

SEQ ID NO: 54663 - RNA, 19 nt, synthetic construct
  misc_feature 1..19: note = siRNA antisense sequence
  source 1..19: mol_type = other RNA
cactatacatccttccaaa

SEQ ID NO: 54664 - RNA, 19 nt, synthetic construct
  misc_feature 1..19: note = siRNA sense sequence
  source 1..19: mol_type = other RNA
ttggaaggatgtatagtgt

SEQ ID NO: 54665 - RNA, 19 nt, synthetic construct
  misc_feature 1..19: note = siRNA antisense sequence
  source 1..19: mol_type = other RNA
acactatacatccttccaa

SEQ ID NO: 54666 - RNA, 19 nt, synthetic construct
  misc_feature 1..19: note = siRNA sense sequence
  source 1..19: mol_type = other RNA
tggaaggatgtatagtgtc

SEQ ID NO: 54667 - RNA, 19 nt, synthetic construct
  misc_feature 1..19: note = siRNA antisense sequence
  source 1..19: mol_type = other RNA
gacactatacatccttcca

SEQ ID NO: 54668 - RNA, 19 nt, synthetic construct
  misc_feature 1..19: note = siRNA sense sequence
  source 1..19: mol_type = other RNA
ggaaggatgtatagtgtct

SEQ ID NO: 54669 - RNA, 19 nt, synthetic construct
  misc_feature 1..19: note = siRNA antisense sequence
  source 1..19: mol_type = other RNA
agacactatacatccttcc

SEQ ID NO: 54670 - RNA, 19 nt, synthetic construct
  misc_feature 1..19: note = siRNA sense sequence
  source 1..19: mol_type = other RNA
tatctttgtcttcatgttg

SEQ ID NO: 54671 - RNA, 19 nt, synthetic construct
  misc_feature 1..19: note = siRNA antisense sequence
  source 1..19: mol_type = other RNA
caacatgaagacaaagata

SEQ ID NO: 54672 - RNA, 19 nt, synthetic construct
  misc_feature 1..19: note = siRNA sense sequence
  source 1..19: mol_type = other RNA
atctttgtcttcatgttgg

SEQ ID NO: 54673 - RNA, 19 nt, synthetic construct
  misc_feature 1..19: note = siRNA antisense sequence
  source 1..19: mol_type = other RNA
ccaacatgaagacaaagat

SEQ ID NO: 54674 - RNA, 19 nt, synthetic construct
  misc_feature 1..19: note = siRNA sense sequence
  source 1..19: mol_type = other RNA
ctttgtcttcatgttggat

SEQ ID NO: 54675 - RNA, 19 nt, synthetic construct
  misc_feature 1..19: note = siRNA antisense sequence
  source 1..19: mol_type = other RNA
atccaacatgaagacaaag

SEQ ID NO: 54676 - RNA, 19 nt, synthetic construct
  misc_feature 1..19: note = siRNA sense sequence
  source 1..19: mol_type = other RNA
tttgtcttcatgttggatg

SEQ ID NO: 54677 - RNA, 19 nt, synthetic construct
  misc_feature 1..19: note = siRNA antisense sequence
  source 1..19: mol_type = other RNA
catccaacatgaagacaaa

SEQ ID NO: 54678 - RNA, 19 nt, synthetic construct
  misc_feature 1..19: note = siRNA sense sequence
  source 1..19: mol_type = other RNA
ttgtcttcatgttggatgg

SEQ ID NO: 54679 - RNA, 19 nt, synthetic construct
  misc_feature 1..19: note = siRNA antisense sequence
  source 1..19: mol_type = other RNA
ccatccaacatgaagacaa

SEQ ID NO: 54680 - RNA, 19 nt, synthetic construct
  misc_feature 1..19: note = siRNA sense sequence
  source 1..19: mol_type = other RNA
tgtcttcatgttggatggg

SEQ ID NO: 54681 - RNA, 19 nt, synthetic construct
  misc_feature 1..19: note = siRNA antisense sequence
  source 1..19: mol_type = other RNA
cccatccaacatgaagaca

SEQ ID NO: 54682 - RNA, 19 nt, synthetic construct
  misc_feature 1..19: note = siRNA sense sequence
  source 1..19: mol_type = other RNA
gtcttcatgttggatgggt

SEQ ID NO: 54683 - RNA, 19 nt, synthetic construct
  misc_feature 1..19: note = siRNA antisense sequence
  source 1..19: mol_type = other RNA
acccatccaacatgaagac

SEQ ID NO: 54684 - RNA, 19 nt, synthetic construct
  misc_feature 1..19: note = siRNA sense sequence
  source 1..19: mol_type = other RNA
tcttcatgttggatgggtg

SEQ ID NO: 54685 - RNA, 19 nt, synthetic construct
  misc_feature 1..19: note = siRNA antisense sequence
  source 1..19: mol_type = other RNA
cacccatccaacatgaaga

SEQ ID NO: 54686 - RNA, 19 nt, synthetic construct
  misc_feature 1..19: note = siRNA sense sequence
  source 1..19: mol_type = other RNA
cttcatgttggatgggtgt

SEQ ID NO: 54687 - RNA, 19 nt, synthetic construct
  misc_feature 1..19: note = siRNA antisense sequence
  source 1..19: mol_type = other RNA
acacccatccaacatgaag

SEQ ID NO: 54688 - RNA, 19 nt, synthetic construct
  misc_feature 1..19: note = siRNA sense sequence
  source 1..19: mol_type = other RNA
caatagatgtggatacaga

SEQ ID NO: 54689 - RNA, 19 nt, synthetic construct
  misc_feature 1..19: note = siRNA antisense sequence
  source 1..19: mol_type = other RNA
tctgtatccacatctattg

SEQ ID NO: 54690 - RNA, 19 nt, synthetic construct
  misc_feature 1..19: note = siRNA sense sequence
  source 1..19: mol_type = other RNA
aatagatgtggatacagat

SEQ ID NO: 54691 - RNA, 19 nt, synthetic construct
  misc_feature 1..19: note = siRNA antisense sequence
  source 1..19: mol_type = other RNA
atctgtatccacatctatt

SEQ ID NO: 54692 - RNA, 19 nt, synthetic construct
  misc_feature 1..19: note = siRNA sense sequence
  source 1..19: mol_type = other RNA
atagatgtggatacagatg

SEQ ID NO: 54693 - RNA, 19 nt, synthetic construct
  misc_feature 1..19: note = siRNA antisense sequence
  source 1..19: mol_type = other RNA
catctgtatccacatctat

SEQ ID NO: 54694 - RNA, 19 nt, synthetic construct
  misc_feature 1..19: note = siRNA sense sequence
  source 1..19: mol_type = other RNA
tagatgtggatacagatgt

SEQ ID NO: 54695 - RNA, 19 nt, synthetic construct
  misc_feature 1..19: note = siRNA antisense sequence
  source 1..19: mol_type = other RNA
acatctgtatccacatcta

SEQ ID NO: 54696 - RNA, 19 nt, synthetic construct
  misc_feature 1..19: note = siRNA sense sequence
  source 1..19: mol_type = other RNA
agatgtggatacagatgta

SEQ ID NO: 54697 - RNA, 19 nt, synthetic construct
  misc_feature 1..19: note = siRNA antisense sequence
  source 1..19: mol_type = other RNA
tacatctgtatccacatct

SEQ ID NO: 54698 - RNA, 19 nt, synthetic construct
  misc_feature 1..19: note = siRNA sense sequence
  source 1..19: mol_type = other RNA
gatgtggatacagatgtac

SEQ ID NO: 54699 - RNA, 19 nt, synthetic construct
  misc_feature 1..19: note = siRNA antisense sequence
  source 1..19: mol_type = other RNA
gtacatctgtatccacatc

SEQ ID NO: 54700 - RNA, 19 nt, synthetic construct
  misc_feature 1..19: note = siRNA sense sequence
  source 1..19: mol_type = other RNA
aaattaccagtggcccaga

SEQ ID NO: 54701 - RNA, 19 nt, synthetic construct
  misc_feature 1..19: note = siRNA antisense sequence
  source 1..19: mol_type = other RNA
tctgggccactggtaattt

SEQ ID NO: 54702 - RNA, 19 nt, synthetic construct
  misc_feature 1..19: note = siRNA sense sequence
  source 1..19: mol_type = other RNA
aattaccagtggcccagac

SEQ ID NO: 54703 - RNA, 19 nt, synthetic construct
  misc_feature 1..19: note = siRNA antisense sequence
  source 1..19: mol_type = other RNA
gtctgggccactggtaatt

SEQ ID NO: 54704 - RNA, 19 nt, synthetic construct
  misc_feature 1..19: note = siRNA sense sequence
  source 1..19: mol_type = other RNA
attaccagtggcccagaca

SEQ ID NO: 54705 - RNA, 19 nt, synthetic construct
  misc_feature 1..19: note = siRNA antisense sequence
  source 1..19: mol_type = other RNA
tgtctgggccactggtaat

SEQ ID NO: 54706 - RNA, 19 nt, synthetic construct
  misc_feature 1..19: note = siRNA sense sequence
  source 1..19: mol_type = other RNA
caatacagtcagaatatga

SEQ ID NO: 54707 - RNA, 19 nt, synthetic construct
  misc_feature 1..19: note = siRNA antisense sequence
  source 1..19: mol_type = other RNA
tcatattctgactgtattg

SEQ ID NO: 54708 - RNA, 19 nt, synthetic construct
  misc_feature 1..19: note = siRNA sense sequence
  source 1..19: mol_type = other RNA
ttgctttaagctaggattg

SEQ ID NO: 54709 - RNA, 19 nt, synthetic construct
  misc_feature 1..19: note = siRNA antisense sequence
  source 1..19: mol_type = other RNA
caatcctagcttaaagcaa

SEQ ID NO: 54710 - RNA, 19 nt, synthetic construct
  misc_feature 1..19: note = siRNA sense sequence
  source 1..19: mol_type = other RNA
tgctttaagctaggattgg

SEQ ID NO: 54711 - RNA, 19 nt, synthetic construct
  misc_feature 1..19: note = siRNA antisense sequence
  source 1..19: mol_type = other RNA
ccaatcctagcttaaagca

SEQ ID NO: 54712 - RNA, 19 nt, synthetic construct
  misc_feature 1..19: note = siRNA sense sequence
  source 1..19: mol_type = other RNA
gctttaagctaggattggt

SEQ ID NO: 54713 - RNA, 19 nt, synthetic construct
  misc_feature 1..19: note = siRNA antisense sequence
  source 1..19: mol_type = other RNA
accaatcctagcttaaagc

SEQ ID NO: 54714 - RNA, 19 nt, synthetic construct
  misc_feature 1..19: note = siRNA sense sequence
  source 1..19: mol_type = other RNA
ctttaagctaggattggtg

SEQ ID NO: 54715 - RNA, 19 nt, synthetic construct
  misc_feature 1..19: note = siRNA antisense sequence
  source 1..19: mol_type = other RNA
caccaatcctagcttaaag

SEQ ID NO: 54716 - RNA, 19 nt, synthetic construct
  misc_feature 1..19: note = siRNA sense sequence
  source 1..19: mol_type = other RNA
agggatgatagaatgtgga

SEQ ID NO: 54717 - RNA, 19 nt, synthetic construct
  misc_feature 1..19: note = siRNA antisense sequence
  source 1..19: mol_type = other RNA
tccacattctatcatccct

SEQ ID NO: 54718 - RNA, 19 nt, synthetic construct
  misc_feature 1..19: note = siRNA sense sequence
  source 1..19: mol_type = other RNA
gggatgatagaatgtggat

SEQ ID NO: 54719 - RNA, 19 nt, synthetic construct
  misc_feature 1..19: note = siRNA antisense sequence
  source 1..19: mol_type = other RNA
atccacattctatcatccc

SEQ ID NO: 54720 - RNA, 19 nt, synthetic construct
  misc_feature 1..19: note = siRNA sense sequence
  source 1..19: mol_type = other RNA
ggatgatagaatgtggata

SEQ ID NO: 54721 - RNA, 19 nt, synthetic construct
  misc_feature 1..19: note = siRNA antisense sequence
  source 1..19: mol_type = other RNA
tatccacattctatcatcc

SEQ ID NO: 54722 - RNA, 19 nt, synthetic construct
  misc_feature 1..19: note = siRNA sense sequence
  source 1..19: mol_type = other RNA
gatgatagaatgtggatag

SEQ ID NO: 54723 - RNA, 19 nt, synthetic construct
  misc_feature 1..19: note = siRNA antisense sequence
  source 1..19: mol_type = other RNA
ctatccacattctatcatc

SEQ ID NO: 54724 - RNA, 19 nt, synthetic construct
  misc_feature 1..19: note = siRNA sense sequence
  source 1..19: mol_type = other RNA
atgatagaatgtggatagg

SEQ ID NO: 54725 - RNA, 19 nt, synthetic construct
  misc_feature 1..19: note = siRNA antisense sequence
  source 1..19: mol_type = other RNA
cctatccacattctatcat

SEQ ID NO: 54726 - RNA, 19 nt, synthetic construct
  misc_feature 1..19: note = siRNA sense sequence
  source 1..19: mol_type = other RNA
tgatagaatgtggataggt

SEQ ID NO: 54727 - RNA, 19 nt, synthetic construct
  misc_feature 1..19: note = siRNA antisense sequence
  source 1..19: mol_type = other RNA
acctatccacattctatca

SEQ ID NO: 54728 - RNA, 19 nt, synthetic construct
  misc_feature 1..19: note = siRNA sense sequence
  source 1..19: mol_type = other RNA
gatagaatgtggataggta

SEQ ID NO: 54729 - RNA, 19 nt, synthetic construct
  misc_feature 1..19: note = siRNA antisense sequence
  source 1..19: mol_type = other RNA
tacctatccacattctatc

SEQ ID NO: 54730 - RNA, 19 nt, synthetic construct
  misc_feature 1..19: note = siRNA sense sequence
  source 1..19: mol_type = other RNA
atagaatgtggataggtag

SEQ ID NO: 54731 - RNA, 19 nt, synthetic construct
  misc_feature 1..19: note = siRNA antisense sequence
  source 1..19: mol_type = other RNA
ctacctatccacattctat

SEQ ID NO: 54732 - RNA, 19 nt, synthetic construct
  misc_feature 1..19: note = siRNA sense sequence
  source 1..19: mol_type = other RNA
tagaatgtggataggtaga

SEQ ID NO: 54733 - RNA, 19 nt, synthetic construct
  misc_feature 1..19: note = siRNA antisense sequence
  source 1..19: mol_type = other RNA
tctacctatccacattcta

SEQ ID NO: 54734 - RNA, 19 nt, synthetic construct
  misc_feature 1..19: note = siRNA sense sequence
  source 1..19: mol_type = other RNA
agaatgtggataggtagaa

SEQ ID NO: 54735 - RNA, 19 nt, synthetic construct
  misc_feature 1..19: note = siRNA antisense sequence
  source 1..19: mol_type = other RNA
ttctacctatccacattct

SEQ ID NO: 54736 - RNA, 19 nt, synthetic construct
  misc_feature 1..19: note = siRNA sense sequence
  source 1..19: mol_type = other RNA
catggacccatatgatgtg

SEQ ID NO: 54737 - RNA, 19 nt, synthetic construct
  misc_feature 1..19: note = siRNA antisense sequence
  source 1..19: mol_type = other RNA
cacatcatatgggtccatg

SEQ ID NO: 54738 - RNA, 19 nt, synthetic construct
  misc_feature 1..19: note = siRNA sense sequence
  source 1..19: mol_type = other RNA
acccatatgatgtgaggtt

SEQ ID NO: 54739 - RNA, 19 nt, synthetic construct
  misc_feature 1..19: note = siRNA antisense sequence
  source 1..19: mol_type = other RNA
aacctcacatcatatgggt

SEQ ID NO: 54740 - RNA, 19 nt, synthetic construct
  misc_feature 1..19: note = siRNA sense sequence
  source 1..19: mol_type = other RNA
cccatatgatgtgaggttt

SEQ ID NO: 54741 - RNA, 19 nt, synthetic construct
  misc_feature 1..19: note = siRNA antisense sequence
  source 1..19: mol_type = other RNA
aaacctcacatcatatggg

SEQ ID NO: 54742 - RNA, 19 nt, synthetic construct
  misc_feature 1..19: note = siRNA sense sequence
  source 1..19: mol_type = other RNA
ccatatgatgtgaggtttt

SEQ ID NO: 54743 - RNA, 19 nt, synthetic construct
  misc_feature 1..19: note = siRNA antisense sequence
  source 1..19: mol_type = other RNA
aaaacctcacatcatatgg

SEQ ID NO: 54744 - RNA, 19 nt, synthetic construct
  misc_feature 1..19: note = siRNA sense sequence
  source 1..19: mol_type = other RNA
catatgatgtgaggttttg

SEQ ID NO: 54745 - RNA, 19 nt, synthetic construct
  misc_feature 1..19: note = siRNA antisense sequence
  source 1..19: mol_type = other RNA
caaaacctcacatcatatg

SEQ ID NO: 54746 - RNA, 19 nt, synthetic construct
  misc_feature 1..19: note = siRNA sense sequence
  source 1..19: mol_type = other RNA
atatgatgtgaggttttga

SEQ ID NO: 54747 - RNA, 19 nt, synthetic construct
  misc_feature 1..19: note = siRNA antisense sequence
  source 1..19: mol_type = other RNA
tcaaaacctcacatcatat

SEQ ID NO: 54748 - RNA, 19 nt, synthetic construct
  misc_feature 1..19: note = siRNA sense sequence
  source 1..19: mol_type = other RNA
tatgatgtgaggttttgaa

SEQ ID NO: 54749 - RNA, 19 nt, synthetic construct
  misc_feature 1..19: note = siRNA antisense sequence
  source 1..19: mol_type = other RNA
ttcaaaacctcacatcata

SEQ ID NO: 54750 - RNA, 19 nt, synthetic construct
  misc_feature 1..19: note = siRNA sense sequence
  source 1..19: mol_type = other RNA
atgatgtgaggttttgaat

SEQ ID NO: 54751 - RNA, 19 nt, synthetic construct
  misc_feature 1..19: note = siRNA antisense sequence
  source 1..19: mol_type = other RNA
attcaaaacctcacatcat

SEQ ID NO: 54752 - RNA, 19 nt, synthetic construct
  misc_feature 1..19: note = siRNA sense sequence
  source 1..19: mol_type = other RNA
tgatgtgaggttttgaatg

SEQ ID NO: 54753 - RNA, 19 nt, synthetic construct
  misc_feature 1..19: note = siRNA antisense sequence
  source 1..19: mol_type = other RNA
cattcaaaacctcacatca

SEQ ID NO: 54754 - RNA, 19 nt, synthetic construct
  misc_feature 1..19: note = siRNA sense sequence
  source 1..19: mol_type = other RNA
gatgtgaggttttgaatgg

SEQ ID NO: 54755 - RNA, 19 nt, synthetic construct
  misc_feature 1..19: note = siRNA antisense sequence
  source 1..19: mol_type = other RNA
ccattcaaaacctcacatc

SEQ ID NO: 54756 - RNA, 19 nt, synthetic construct
  misc_feature 1..19: note = siRNA sense sequence
  source 1..19: mol_type = other RNA
atgtgaggttttgaatggc

SEQ ID NO: 54757 - RNA, 19 nt, synthetic construct
  misc_feature 1..19: note = siRNA antisense sequence
  source 1..19: mol_type = other RNA
gccattcaaaacctcacat

SEQ ID NO: 54758 - RNA, 19 nt, synthetic construct
  misc_feature 1..19: note = siRNA sense sequence
  source 1..19: mol_type = other RNA
tgtgaggttttgaatggca

SEQ ID NO: 54759 - RNA, 19 nt, synthetic construct
  misc_feature 1..19: note = siRNA antisense sequence
  source 1..19: mol_type = other RNA
tgccattcaaaacctcaca

SEQ ID NO: 54760 - RNA, 19 nt, synthetic construct
  misc_feature 1..19: note = siRNA sense sequence
  source 1..19: mol_type = other RNA
gtgaggttttgaatggcaa

SEQ ID NO: 54761 - RNA, 19 nt, synthetic construct
  misc_feature 1..19: note = siRNA antisense sequence
  source 1..19: mol_type = other RNA
ttgccattcaaaacctcac

SEQ ID NO: 54762 - RNA, 19 nt, synthetic construct
  misc_feature 1..19: note = siRNA sense sequence
  source 1..19: mol_type = other RNA
ttgaatggcaaattaagag

SEQ ID NO: 54763 - RNA, 19 nt, synthetic construct
  misc_feature 1..19: note = siRNA antisense sequence
  source 1..19: mol_type = other RNA
ctcttaatttgccattcaa

SEQ ID NO: 54764 - RNA, 19 nt, synthetic construct
  misc_feature 1..19: note = siRNA sense sequence
  source 1..19: mol_type = other RNA
tgaatggcaaattaagagc

SEQ ID NO: 54765 - RNA, 19 nt, synthetic construct
  misc_feature 1..19: note = siRNA antisense sequence
  source 1..19: mol_type = other RNA
gctcttaatttgccattca

SEQ ID NO: 54766 - RNA, 19 nt, synthetic construct
  misc_feature 1..19: note = siRNA sense sequence
  source 1..19: mol_type = other RNA
gaatggcaaattaagagct

SEQ ID NO: 54767 - RNA, 19 nt, synthetic construct
  misc_feature 1..19: note = siRNA antisense sequence
  source 1..19: mol_type = other RNA
agctcttaatttgccattc

SEQ ID NO: 54768 - RNA, 19 nt, synthetic construct
  misc_feature 1..19: note = siRNA sense sequence
  source 1..19: mol_type = other RNA
gcaaattaagagcttggat

SEQ ID NO: 54769 - RNA, 19 nt, synthetic construct
  misc_feature 1..19: note = siRNA antisense sequence
  source 1..19: mol_type = other RNA
atccaagctcttaatttgc

SEQ ID NO: 54770 - RNA, 19 nt, synthetic construct
  misc_feature 1..19: note = siRNA sense sequence
  source 1..19: mol_type = other RNA
caaattaagagcttggatt

SEQ ID NO: 54771 - RNA, 19 nt, synthetic construct
  misc_feature 1..19: note = siRNA antisense sequence
  source 1..19: mol_type = other RNA
aatccaagctcttaatttg

SEQ ID NO: 54772 - RNA, 19 nt, synthetic construct
  misc_feature 1..19: note = siRNA sense sequence
  source 1..19: mol_type = other RNA
taagagcttggattttatc

SEQ ID NO: 54773 - RNA, 19 nt, synthetic construct
  misc_feature 1..19: note = siRNA antisense sequence
  source 1..19: mol_type = other RNA
gataaaatccaagctctta

SEQ ID NO: 54774 - RNA, 19 nt, synthetic construct
  misc_feature 1..19: note = siRNA sense sequence
  source 1..19: mol_type = other RNA
gattttatcctggaggtaa

SEQ ID NO: 54775 - RNA, 19 nt, synthetic construct
  misc_feature 1..19: note = siRNA antisense sequence
  source 1..19: mol_type = other RNA
ttacctccaggataaaatc

SEQ ID NO: 54776 - RNA, 19 nt, synthetic construct
  misc_feature 1..19: note = siRNA sense sequence
  source 1..19: mol_type = other RNA
ttatcctggaggtaatggg

SEQ ID NO: 54777 - RNA, 19 nt, synthetic construct
  misc_feature 1..19: note = siRNA antisense sequence
  source 1..19: mol_type = other RNA
cccattacctccaggataa

SEQ ID NO: 54778 - RNA, 19 nt, synthetic construct
  misc_feature 1..19: note = siRNA sense sequence
  source 1..19: mol_type = other RNA
tatcctggaggtaatggga

SEQ ID NO: 54779 - RNA, 19 nt, synthetic construct
  misc_feature 1..19: note = siRNA antisense sequence
  source 1..19: mol_type = other RNA
tcccattacctccaggata

SEQ ID NO: 54780 - RNA, 19 nt, synthetic construct
  misc_feature 1..19: note = siRNA sense sequence
  source 1..19: mol_type = other RNA
atcctggaggtaatgggaa

SEQ ID NO: 54781 - RNA, 19 nt, synthetic construct
  misc_feature 1..19: note = siRNA antisense sequence
  source 1..19: mol_type = other RNA
ttcccattacctccaggat

SEQ ID NO: 54782 - RNA, 19 nt, synthetic construct
  misc_feature 1..19: note = siRNA sense sequence
  source 1..19: mol_type = other RNA
tttgaattgtgatagcttg

SEQ ID NO: 54783 - RNA, 19 nt, synthetic construct
  misc_feature 1..19: note = siRNA antisense sequence
  source 1..19: mol_type = other RNA
caagctatcacaattcaaa

SEQ ID NO: 54784 - RNA, 19 nt, synthetic construct
  misc_feature 1..19: note = siRNA sense sequence
  source 1..19: mol_type = other RNA
ttgaattgtgatagcttgg

SEQ ID NO: 54785 - RNA, 19 nt, synthetic construct
  misc_feature 1..19: note = siRNA antisense sequence
  source 1..19: mol_type = other RNA
ccaagctatcacaattcaa

SEQ ID NO: 54786 - RNA, 19 nt, synthetic construct
  misc_feature 1..19: note = siRNA sense sequence
  source 1..19: mol_type = other RNA
tgaattgtgatagcttggg

SEQ ID NO: 54787 - RNA, 19 nt, synthetic construct
  misc_feature 1..19: note = siRNA antisense sequence
  source 1..19: mol_type = other RNA
cccaagctatcacaattca

SEQ ID NO: 54788 - RNA, 19 nt, synthetic construct
  misc_feature 1..19: note = siRNA sense sequence
  source 1..19: mol_type = other RNA
gaattgtgatagcttggga

SEQ ID NO: 54789 - RNA, 19 nt, synthetic construct
  misc_feature 1..19: note = siRNA antisense sequence
  source 1..19: mol_type = other RNA
tcccaagctatcacaattc

SEQ ID NO: 54790 - RNA, 19 nt, synthetic construct
  misc_feature 1..19: note = siRNA sense sequence
  source 1..19: mol_type = other RNA
aattgtgatagcttgggaa

SEQ ID NO: 54791 - RNA, 19 nt, synthetic construct
  misc_feature 1..19: note = siRNA antisense sequence
  source 1..19: mol_type = other RNA
ttcccaagctatcacaatt

SEQ ID NO: 54792 - RNA, 19 nt, synthetic construct
  misc_feature 1..19: note = siRNA sense sequence
  source 1..19: mol_type = other RNA
caaggaggatttattaact

SEQ ID NO: 54793 - RNA, 19 nt, synthetic construct
  misc_feature 1..19: note = siRNA antisense sequence
  source 1..19: mol_type = other RNA
agttaataaatcctccttg

SEQ ID NO: 54794 - RNA, 19 nt, synthetic construct
  misc_feature 1..19: note = siRNA sense sequence
  source 1..19: mol_type = other RNA
taactttattccacagtcc

SEQ ID NO: 54795 - RNA, 19 nt, synthetic construct
  misc_feature 1..19: note = siRNA antisense sequence
  source 1..19: mol_type = other RNA
ggactgtggaataaagtta

SEQ ID NO: 54796 - RNA, 19 nt, synthetic construct
  misc_feature 1..19: note = siRNA sense sequence
  source 1..19: mol_type = other RNA
aactttattccacagtcct

SEQ ID NO: 54797 - RNA, 19 nt, synthetic construct
  misc_feature 1..19: note = siRNA antisense sequence
  source 1..19: mol_type = other RNA
aggactgtggaataaagtt

SEQ ID NO: 54798 - RNA, 19 nt, synthetic construct
  misc_feature 1..19: note = siRNA sense sequence
  source 1..19: mol_type = other RNA
tttattccacagtcctttt

SEQ ID NO: 54799 - RNA, 19 nt, synthetic construct
  misc_feature 1..19: note = siRNA antisense sequence
  source 1..19: mol_type = other RNA
aaaaggactgtggaataaa

SEQ ID NO: 54800 - RNA, 19 nt, synthetic construct
  misc_feature 1..19: note = siRNA sense sequence
  source 1..19: mol_type = other RNA
ttattccacagtcctttta

SEQ ID NO: 54801 - RNA, 19 nt, synthetic construct
  misc_feature 1..19: note = siRNA antisense sequence
  source 1..19: mol_type = other RNA
taaaaggactgtggaataa

SEQ ID NO: 54802 - RNA, 19 nt, synthetic construct
  misc_feature 1..19: note = siRNA sense sequence
  source 1..19: mol_type = other RNA
tattccacagtccttttac

SEQ ID NO: 54803 - RNA, 19 nt, synthetic construct
  misc_feature 1..19: note = siRNA antisense sequence
  source 1..19: mol_type = other RNA
gtaaaaggactgtggaata

SEQ ID NO: 54804 - RNA, 19 nt, synthetic construct
  misc_feature 1..19: note = siRNA sense sequence
  source 1..19: mol_type = other RNA
attccacagtccttttaca

SEQ ID NO: 54805 - RNA, 19 nt, synthetic construct
  misc_feature 1..19: note = siRNA antisense sequence
  source 1..19: mol_type = other RNA
tgtaaaaggactgtggaat

SEQ ID NO: 54806 - RNA, 19 nt, synthetic construct
  misc_feature 1..19: note = siRNA sense sequence
  source 1..19: mol_type = other RNA
ttccacagtccttttacag

SEQ ID NO: 54807 - RNA, 19 nt, synthetic construct
  misc_feature 1..19: note = siRNA antisense sequence
  source 1..19: mol_type = other RNA
ctgtaaaaggactgtggaa

SEQ ID NO: 54808 - RNA, 19 nt, synthetic construct
  misc_feature 1..19: note = siRNA sense sequence
  source 1..19: mol_type = other RNA
tccacagtccttttacaga

SEQ ID NO: 54809 - RNA, 19 nt, synthetic construct
  misc_feature 1..19: note = siRNA antisense sequence
  source 1..19: mol_type = other RNA
tctgtaaaaggactgtgga

SEQ ID NO: 54810 - RNA, 19 nt, synthetic construct
  misc_feature 1..19: note = siRNA sense sequence
  source 1..19: mol_type = other RNA
ccacagtccttttacagag

SEQ ID NO: 54811 - RNA, 19 nt, synthetic construct
  misc_feature 1..19: note = siRNA antisense sequence
  source 1..19: mol_type = other RNA
ctctgtaaaaggactgtgg

SEQ ID NO: 54812 - RNA, 19 nt, synthetic construct
  misc_feature 1..19: note = siRNA sense sequence
  source 1..19: mol_type = other RNA
cacagtccttttacagagg

SEQ ID NO: 54813 - RNA, 19 nt, synthetic construct
  misc_feature 1..19: note = siRNA antisense sequence
  source 1..19: mol_type = other RNA
cctctgtaaaaggactgtg

SEQ ID NO: 54814 - RNA, 19 nt, synthetic construct
  misc_feature 1..19: note = siRNA sense sequence
  source 1..19: mol_type = other RNA
acagtccttttacagaggg

SEQ ID NO: 54815 - RNA, 19 nt, synthetic construct
  misc_feature 1..19: note = siRNA antisense sequence
  source 1..19: mol_type = other RNA
ccctctgtaaaaggactgt

SEQ ID NO: 54816 - RNA, 19 nt, synthetic construct
  misc_feature 1..19: note = siRNA sense sequence
  source 1..19: mol_type = other RNA
cagtccttttacagagggt

SEQ ID NO: 54817 - RNA, 19 nt, synthetic construct
  misc_feature 1..19: note = siRNA antisense sequence
  source 1..19: mol_type = other RNA
accctctgtaaaaggactg

SEQ ID NO: 54818 - RNA, 19 nt, synthetic construct
  misc_feature 1..19: note = siRNA sense sequence
  source 1..19: mol_type = other RNA
gggttcttcttagccttca

SEQ ID NO: 54819 - RNA, 19 nt, synthetic construct
  misc_feature 1..19: note = siRNA antisense sequence
  source 1..19: mol_type = other RNA
tgaaggctaagaagaaccc

SEQ ID NO: 54820 - RNA, 19 nt, synthetic construct
  misc_feature 1..19: note = siRNA sense sequence
  source 1..19: mol_type = other RNA
ggttcttcttagccttcac

SEQ ID NO: 54821 - RNA, 19 nt, synthetic construct
  misc_feature 1..19: note = siRNA antisense sequence
  source 1..19: mol_type = other RNA
gtgaaggctaagaagaacc

SEQ ID NO: 54822 - RNA, 19 nt, synthetic construct
  misc_feature 1..19: note = siRNA sense sequence
  source 1..19: mol_type = other RNA
gttcttcttagccttcact

SEQ ID NO: 54823 - RNA, 19 nt, synthetic construct
  misc_feature 1..19: note = siRNA antisense sequence
  source 1..19: mol_type = other RNA
agtgaaggctaagaagaac

SEQ ID NO: 54824 - RNA, 19 nt, synthetic construct
  misc_feature 1..19: note = siRNA sense sequence
  source 1..19: mol_type = other RNA
ttcttcttagccttcacta

SEQ ID NO: 54825 - RNA, 19 nt, synthetic construct
  misc_feature 1..19: note = siRNA antisense sequence
  source 1..19: mol_type = other RNA
tagtgaaggctaagaagaa

SEQ ID NO: 54826 - RNA, 19 nt, synthetic construct
  misc_feature 1..19: note = siRNA sense sequence
  source 1..19: mol_type = other RNA
tagccttcactaaatattc

SEQ ID NO: 54827 - RNA, 19 nt, synthetic construct
  misc_feature 1..19: note = siRNA antisense sequence
  source 1..19: mol_type = other RNA
gaatatttagtgaaggcta

SEQ ID NO: 54828 - RNA, 19 nt, synthetic construct
  misc_feature 1..19: note = siRNA sense sequence
  source 1..19: mol_type = other RNA
agccttcactaaatattcc

SEQ ID NO: 54829 - RNA, 19 nt, synthetic construct
  misc_feature 1..19: note = siRNA antisense sequence
  source 1..19: mol_type = other RNA
ggaatatttagtgaaggct

SEQ ID NO: 54830 - RNA, 19 nt, synthetic construct
  misc_feature 1..19: note = siRNA sense sequence
  source 1..19: mol_type = other RNA
gccttcactaaatattcca

SEQ ID NO: 54831 - RNA, 19 nt, synthetic construct
  misc_feature 1..19: note = siRNA antisense sequence
  source 1..19: mol_type = other RNA
tggaatatttagtgaaggc

SEQ ID NO: 54832 - RNA, 19 nt, synthetic construct
  misc_feature 1..19: note = siRNA sense sequence
  source 1..19: mol_type = other RNA
ccttcactaaatattccaa

SEQ ID NO: 54833 - RNA, 19 nt, synthetic construct
  misc_feature 1..19: note = siRNA antisense sequence
  source 1..19: mol_type = other RNA
ttggaatatttagtgaagg

SEQ ID NO: 54834 - RNA, 19 nt, synthetic construct
  misc_feature 1..19: note = siRNA sense sequence
  source 1..19: mol_type = other RNA
cttcactaaatattccaac

SEQ ID NO: 54835 - RNA, 19 nt, synthetic construct
  misc_feature 1..19: note = siRNA antisense sequence
  source 1..19: mol_type = other RNA
gttggaatatttagtgaag

SEQ ID NO: 54836 - RNA, 19 nt, synthetic construct
  misc_feature 1..19: note = siRNA sense sequence
  source 1..19: mol_type = other RNA
aaatattccaactctctag

SEQ ID NO: 54837 - RNA, 19 nt, synthetic construct
  misc_feature 1..19: note = siRNA antisense sequence
  source 1..19: mol_type = other RNA
ctagagagttggaatattt

SEQ ID NO: 54838 - RNA, 19 nt, synthetic construct
  misc_feature 1..19: note = siRNA sense sequence
  source 1..19: mol_type = other RNA
aatattccaactctctaga

SEQ ID NO: 54839 - RNA, 19 nt, synthetic construct
  misc_feature 1..19: note = siRNA antisense sequence
  source 1..19: mol_type = other RNA
tctagagagttggaatatt

SEQ ID NO: 54840 - RNA, 19 nt, synthetic construct
  misc_feature 1..19: note = siRNA sense sequence
  source 1..19: mol_type = other RNA
atattccaactctctagac

SEQ ID NO: 54841 - RNA, 19 nt, synthetic construct
  misc_feature 1..19: note = siRNA antisense sequence
  source 1..19: mol_type = other RNA
gtctagagagttggaatat

SEQ ID NO: 54842 - RNA, 19 nt, synthetic construct
  misc_feature 1..19: note = siRNA sense sequence
  source 1..19: mol_type = other RNA
tattccaactctctagact

SEQ ID NO: 54843 - RNA, 19 nt, synthetic construct
  misc_feature 1..19: note = siRNA antisense sequence
  source 1..19: mol_type = other RNA
agtctagagagttggaata

SEQ ID NO: 54844 - RNA, 19 nt, synthetic construct
  misc_feature 1..19: note = siRNA sense sequence
  source 1..19: mol_type = other RNA
attccaactctctagacta

SEQ ID NO: 54845 - RNA, 19 nt, synthetic construct
  misc_feature 1..19: note = siRNA antisense sequence
  source 1..19: mol_type = other RNA
tagtctagagagttggaat

SEQ ID NO: 54846 - RNA, 19 nt, synthetic construct
  misc_feature 1..19: note = siRNA sense sequence
  source 1..19: mol_type = other RNA
gcaggactgcatcagccct

SEQ ID NO: 54847 - RNA, 19 nt, synthetic construct
  misc_feature 1..19: note = siRNA antisense sequence
  source 1..19: mol_type = other RNA
agggctgatgcagtcctgc

SEQ ID NO: 54848 - RNA, 19 nt, synthetic construct
  misc_feature 1..19: note = siRNA sense sequence
  source 1..19: mol_type = other RNA
caggactgcatcagccctc

SEQ ID NO: 54849 - RNA, 19 nt, synthetic construct
  misc_feature 1..19: note = siRNA antisense sequence
  source 1..19: mol_type = other RNA
gagggctgatgcagtcctg

SEQ ID NO: 54850 - RNA, 19 nt, synthetic construct
  misc_feature 1..19: note = siRNA sense sequence
  source 1..19: mol_type = other RNA
aggactgcatcagccctcc

SEQ ID NO: 54851 - RNA, 19 nt, synthetic construct
  misc_feature 1..19: note = siRNA antisense sequence
  source 1..19: mol_type = other RNA
ggagggctgatgcagtcct

SEQ ID NO: 54852 - RNA, 19 nt, synthetic construct
  misc_feature 1..19: note = siRNA sense sequence
  source 1..19: mol_type = other RNA
ctgcatcagccctcctgct

SEQ ID NO: 54853 - RNA, 19 nt, synthetic construct
  misc_feature 1..19: note = siRNA antisense sequence
  source 1..19: mol_type = other RNA
agcaggagggctgatgcag

SEQ ID NO: 54854 - RNA, 19 nt, synthetic construct
  misc_feature 1..19: note = siRNA sense sequence
  source 1..19: mol_type = other RNA
gcatcagccctcctgctct

SEQ ID NO: 54855 - RNA, 19 nt, synthetic construct
  misc_feature 1..19: note = siRNA antisense sequence
  source 1..19: mol_type = other RNA
agagcaggagggctgatgc

SEQ ID NO: 54856 - RNA, 19 nt, synthetic construct
  misc_feature 1..19: note = siRNA sense sequence
  source 1..19: mol_type = other RNA
catcagccctcctgctctg

SEQ ID NO: 54857 - RNA, 19 nt, synthetic construct
  misc_feature 1..19: note = siRNA antisense sequence
  source 1..19: mol_type = other RNA
cagagcaggagggctgatg

SEQ ID NO: 54858 - RNA, 19 nt, synthetic construct
  misc_feature 1..19: note = siRNA sense sequence
  source 1..19: mol_type = other RNA
agccctcctgctctgcaag

SEQ ID NO: 54859 - RNA, 19 nt, synthetic construct
  misc_feature 1..19: note = siRNA antisense sequence
  source 1..19: mol_type = other RNA
cttgcagagcaggagggct

SEQ ID NO: 54860 - RNA, 19 nt, synthetic construct
  misc_feature 1..19: note = siRNA sense sequence
  source 1..19: mol_type = other RNA
tctgcaagagtccaagctg

SEQ ID NO: 54861 - RNA, 19 nt, synthetic construct
  misc_feature 1..19: note = siRNA antisense sequence
  source 1..19: mol_type = other RNA
cagcttggactcttgcaga

SEQ ID NO: 54862 - RNA, 19 nt, synthetic construct
  misc_feature 1..19: note = siRNA sense sequence
  source 1..19: mol_type = other RNA
ctgcaagagtccaagctgc

SEQ ID NO: 54863 - RNA, 19 nt, synthetic construct
  misc_feature 1..19: note = siRNA antisense sequence
  source 1..19: mol_type = other RNA
gcagcttggactcttgcag

SEQ ID NO: 54864 - RNA, 19 nt, synthetic construct
  misc_feature 1..19: note = siRNA sense sequence
  source 1..19: mol_type = other RNA
agtccaagctgcagcccag

SEQ ID NO: 54865 - RNA, 19 nt, synthetic construct
  misc_feature 1..19: note = siRNA antisense sequence
  source 1..19: mol_type = other RNA
ctgggctgcagcttggact

SEQ ID NO: 54866 - RNA, 19 nt, synthetic construct
  misc_feature 1..19: note = siRNA sense sequence
  source 1..19: mol_type = other RNA
cagcccagcgcagcagtaa

SEQ ID NO: 54867 - RNA, 19 nt, synthetic construct
  misc_feature 1..19: note = siRNA antisense sequence
  source 1..19: mol_type = other RNA
ttactgctgcgctgggctg

SEQ ID NO: 54868 - RNA, 19 nt, synthetic construct
  misc_feature 1..19: note = siRNA sense sequence
  source 1..19: mol_type = other RNA
agcccagcgcagcagtaaa

SEQ ID NO: 54869 - RNA, 19 nt, synthetic construct
  misc_feature 1..19: note = siRNA antisense sequence
  source 1..19: mol_type = other RNA
tttactgctgcgctgggct

SEQ ID NO: 54870 - RNA, 19 nt, synthetic construct
  misc_feature 1..19: note = siRNA sense sequence
  source 1..19: mol_type = other RNA
gcccagcgcagcagtaaag

SEQ ID NO: 54871 - RNA, 19 nt, synthetic construct
  misc_feature 1..19: note = siRNA antisense sequence
  source 1..19: mol_type = other RNA
ctttactgctgcgctgggc

SEQ ID NO: 54872 - RNA, 19 nt, synthetic construct
  misc_feature 1..19: note = siRNA sense sequence
  source 1..19: mol_type = other RNA
cccagcgcagcagtaaagc

SEQ ID NO: 54873 - RNA, 19 nt, synthetic construct
  misc_feature 1..19: note = siRNA antisense sequence
  source 1..19: mol_type = other RNA
gctttactgctgcgctggg

SEQ ID NO: 54874 - RNA, 19 nt, synthetic construct
  misc_feature 1..19: note = siRNA sense sequence
  source 1..19: mol_type = other RNA
cgcagcagtaaagctcagg

SEQ ID NO: 54875 - RNA, 19 nt, synthetic construct
  misc_feature 1..19: note = siRNA antisense sequence
  source 1..19: mol_type = other RNA
cctgagctttactgctgcg

SEQ ID NO: 54876 - RNA, 19 nt, synthetic construct
  misc_feature 1..19: note = siRNA sense sequence
  source 1..19: mol_type = other RNA
gcagcagtaaagctcaggt

SEQ ID NO: 54877 - RNA, 19 nt, synthetic construct
  misc_feature 1..19: note = siRNA antisense sequence
  source 1..19: mol_type = other RNA
acctgagctttactgctgc

SEQ ID NO: 54878 - RNA, 19 nt, synthetic construct
  misc_feature 1..19: note = siRNA sense sequence
  source 1..19: mol_type = other RNA
cagcagtaaagctcaggtg

SEQ ID NO: 54879 - RNA, 19 nt, synthetic construct
  misc_feature 1..19: note = siRNA antisense sequence
  source 1..19: mol_type = other RNA
cacctgagctttactgctg

SEQ ID NO: 54880 - RNA, 19 nt, synthetic construct
  misc_feature 1..19: note = siRNA sense sequence
  source 1..19: mol_type = other RNA
agcagtaaagctcaggtgc

SEQ ID NO: 54881 - RNA, 19 nt, synthetic construct
  misc_feature 1..19: note = siRNA antisense sequence
  source 1..19: mol_type = other RNA
gcacctgagctttactgct

SEQ ID NO: 54882 - RNA, 19 nt, synthetic construct
  misc_feature 1..19: note = siRNA sense sequence
  source 1..19: mol_type = other RNA
gcagtaaagctcaggtgca

SEQ ID NO: 54883 - RNA, 19 nt, synthetic construct
  misc_feature 1..19: note = siRNA antisense sequence
  source 1..19: mol_type = other RNA
tgcacctgagctttactgc

SEQ ID NO: 54884 - RNA, 19 nt, synthetic construct
  misc_feature 1..19: note = siRNA sense sequence
  source 1..19: mol_type = other RNA
gctcaggtgcagggatact

SEQ ID NO: 54885 - RNA, 19 nt, synthetic construct
  misc_feature 1..19: note = siRNA antisense sequence
  source 1..19: mol_type = other RNA
agtatccctgcacctgagc

SEQ ID NO: 54886 - RNA, 19 nt, synthetic construct
  misc_feature 1..19: note = siRNA sense sequence
  source 1..19: mol_type = other RNA
aggtgcagggatactcaca

SEQ ID NO: 54887 - RNA, 19 nt, synthetic construct
  misc_feature 1..19: note = siRNA antisense sequence
  source 1..19: mol_type = other RNA
tgtgagtatccctgcacct

SEQ ID NO: 54888 - RNA, 19 nt, synthetic construct
  misc_feature 1..19: note = siRNA sense sequence
  source 1..19: mol_type = other RNA
ggtgcagggatactcacat

SEQ ID NO: 54889 - RNA, 19 nt, synthetic construct
  misc_feature 1..19: note = siRNA antisense sequence
  source 1..19: mol_type = other RNA
atgtgagtatccctgcacc

SEQ ID NO: 54890 - RNA, 19 nt, synthetic construct
  misc_feature 1..19: note = siRNA sense sequence
  source 1..19: mol_type = other RNA
gtgcagggatactcacatt

SEQ ID NO: 54891 - RNA, 19 nt, synthetic construct
  misc_feature 1..19: note = siRNA antisense sequence
  source 1..19: mol_type = other RNA
aatgtgagtatccctgcac

SEQ ID NO: 54892 - RNA, 19 nt, synthetic construct
  misc_feature 1..19: note = siRNA sense sequence
  source 1..19: mol_type = other RNA
tgcagggatactcacatta

SEQ ID NO: 54893 - RNA, 19 nt, synthetic construct
  misc_feature 1..19: note = siRNA antisense sequence
  source 1..19: mol_type = other RNA
taatgtgagtatccctgca

SEQ ID NO: 54894 - RNA, 19 nt, synthetic construct
  misc_feature 1..19: note = siRNA sense sequence
  source 1..19: mol_type = other RNA
gcagggatactcacattag

SEQ ID NO: 54895 - RNA, 19 nt, synthetic construct
  misc_feature 1..19: note = siRNA antisense sequence
  source 1..19: mol_type = other RNA
ctaatgtgagtatccctgc

SEQ ID NO: 54896 - RNA, 19 nt, synthetic construct
  misc_feature 1..19: note = siRNA sense sequence
  source 1..19: mol_type = other RNA
cagggatactcacattagg

SEQ ID NO: 54897 - RNA, 19 nt, synthetic construct
  misc_feature 1..19: note = siRNA antisense sequence
  source 1..19: mol_type = other RNA
cctaatgtgagtatccctg

SEQ ID NO: 54898 - RNA, 19 nt, synthetic construct
  misc_feature 1..19: note = siRNA sense sequence
  source 1..19: mol_type = other RNA
agggatactcacattaggc

SEQ ID NO: 54899 - RNA, 19 nt, synthetic construct
  misc_feature 1..19: note = siRNA antisense sequence
  source 1..19: mol_type = other RNA
gcctaatgtgagtatccct

SEQ ID NO: 54900 - RNA, 19 nt, synthetic construct
  misc_feature 1..19: note = siRNA sense sequence
  source 1..19: mol_type = other RNA
gggatactcacattaggca

SEQ ID NO: 54901 - RNA, 19 nt, synthetic construct
  misc_feature 1..19: note = siRNA antisense sequence
  source 1..19: mol_type = other RNA
tgcctaatgtgagtatccc

SEQ ID NO: 54902 - RNA, 19 nt, synthetic construct
  misc_feature 1..19: note = siRNA sense sequence
  source 1..19: mol_type = other RNA
ggatactcacattaggcag

SEQ ID NO: 54903 - RNA, 19 nt, synthetic construct
  misc_feature 1..19: note = siRNA antisense sequence
  source 1..19: mol_type = other RNA
ctgcctaatgtgagtatcc

SEQ ID NO: 54904 - RNA, 19 nt, synthetic construct
  misc_feature 1..19: note = siRNA sense sequence
  source 1..19: mol_type = other RNA
gatactcacattaggcagg

SEQ ID NO: 54905 - RNA, 19 nt, synthetic construct
  misc_feature 1..19: note = siRNA antisense sequence
  source 1..19: mol_type = other RNA
cctgcctaatgtgagtatc

SEQ ID NO: 54906 - RNA, 19 nt, synthetic construct
  misc_feature 1..19: note = siRNA sense sequence
  source 1..19: mol_type = other RNA
atactcacattaggcaggt

SEQ ID NO: 54907 - RNA, 19 nt, synthetic construct
  misc_feature 1..19: note = siRNA antisense sequence
  source 1..19: mol_type = other RNA
acctgcctaatgtgagtat

SEQ ID NO: 54908 - RNA, 19 nt, synthetic construct
  misc_feature 1..19: note = siRNA sense sequence
  source 1..19: mol_type = other RNA
tactcacattaggcaggtc

SEQ ID NO: 54909 - RNA, 19 nt, synthetic construct
  misc_feature 1..19: note = siRNA antisense sequence
  source 1..19: mol_type = other RNA
gacctgcctaatgtgagta

SEQ ID NO: 54910 - RNA, 19 nt, synthetic construct
  misc_feature 1..19: note = siRNA sense sequence
  source 1..19: mol_type = other RNA
actcacattaggcaggtcc

SEQ ID NO: 54911 - RNA, 19 nt, synthetic construct
  misc_feature 1..19: note = siRNA antisense sequence
  source 1..19: mol_type = other RNA
ggacctgcctaatgtgagt

SEQ ID NO: 54912 - RNA, 19 nt, synthetic construct
  misc_feature 1..19: note = siRNA sense sequence
  source 1..19: mol_type = other RNA
ctcacattaggcaggtcca

SEQ ID NO: 54913 - RNA, 19 nt, synthetic construct
  misc_feature 1..19: note = siRNA antisense sequence
  source 1..19: mol_type = other RNA
tggacctgcctaatgtgag

SEQ ID NO: 54914 - RNA, 19 nt, synthetic construct
  misc_feature 1..19: note = siRNA sense sequence
  source 1..19: mol_type = other RNA
aactgcactcgctttaaag

SEQ ID NO: 54915 - RNA, 19 nt, synthetic construct
  misc_feature 1..19: note = siRNA antisense sequence
  source 1..19: mol_type = other RNA
ctttaaagcgagtgcagtt

SEQ ID NO: 54916 - RNA, 19 nt, synthetic construct
  misc_feature 1..19: note = siRNA sense sequence
  source 1..19: mol_type = other RNA
actgcactcgctttaaagc

SEQ ID NO: 54917 - RNA, 19 nt, synthetic construct
  misc_feature 1..19: note = siRNA antisense sequence
  source 1..19: mol_type = other RNA
gctttaaagcgagtgcagt

SEQ ID NO: 54918 - RNA, 19 nt, synthetic construct
  misc_feature 1..19: note = siRNA sense sequence
  source 1..19: mol_type = other RNA
ctgcactcgctttaaagcc

SEQ ID NO: 54919 - RNA, 19 nt, synthetic construct
  misc_feature 1..19: note = siRNA antisense sequence
  source 1..19: mol_type = other RNA
ggctttaaagcgagtgcag

SEQ ID NO: 54920 - RNA, 19 nt, synthetic construct
  misc_feature 1..19: note = siRNA sense sequence
  source 1..19: mol_type = other RNA
tgcaggagcagtatctttt

SEQ ID NO: 54921 - RNA, 19 nt, synthetic construct
  misc_feature 1..19: note = siRNA antisense sequence
  source 1..19: mol_type = other RNA
aaaagatactgctcctgca

SEQ ID NO: 54922 - RNA, 19 nt, synthetic construct
  misc_feature 1..19: note = siRNA sense sequence
  source 1..19: mol_type = other RNA
gcaggagcagtatctttta

SEQ ID NO: 54923 - RNA, 19 nt, synthetic construct
  misc_feature 1..19: note = siRNA antisense sequence
  source 1..19: mol_type = other RNA
taaaagatactgctcctgc

SEQ ID NO: 54924 - RNA, 19 nt, synthetic construct
  misc_feature 1..19: note = siRNA sense sequence
  source 1..19: mol_type = other RNA
caggagcagtatcttttat

SEQ ID NO: 54925 - RNA, 19 nt, synthetic construct
  misc_feature 1..19: note = siRNA antisense sequence
  source 1..19: mol_type = other RNA
ataaaagatactgctcctg

SEQ ID NO: 54926 - RNA, 19 nt, synthetic construct
  misc_feature 1..19: note = siRNA sense sequence
  source 1..19: mol_type = other RNA
aggagcagtatcttttatg

SEQ ID NO: 54927 - RNA, 19 nt, synthetic construct
  misc_feature 1..19: note = siRNA antisense sequence
  source 1..19: mol_type = other RNA
cataaaagatactgctcct

SEQ ID NO: 54928 - RNA, 19 nt, synthetic construct
  misc_feature 1..19: note = siRNA sense sequence
  source 1..19: mol_type = other RNA
ggagcagtatcttttatga

SEQ ID NO: 54929 - RNA, 19 nt, synthetic construct
  misc_feature 1..19: note = siRNA antisense sequence
  source 1..19: mol_type = other RNA
tcataaaagatactgctcc

SEQ ID NO: 54930 - RNA, 19 nt, synthetic construct
  misc_feature 1..19: note = siRNA sense sequence
  source 1..19: mol_type = other RNA
gagcagtatcttttatgac

SEQ ID NO: 54931 - RNA, 19 nt, synthetic construct
  misc_feature 1..19: note = siRNA antisense sequence
  source 1..19: mol_type = other RNA
gtcataaaagatactgctc

SEQ ID NO: 54932 - RNA, 19 nt, synthetic construct
  misc_feature 1..19: note = siRNA sense sequence
  source 1..19: mol_type = other RNA
agcagtatcttttatgaca

SEQ ID NO: 54933 - RNA, 19 nt, synthetic construct
  misc_feature 1..19: note = siRNA antisense sequence
  source 1..19: mol_type = other RNA
tgtcataaaagatactgct

SEQ ID NO: 54934 - RNA, 19 nt, synthetic construct
  misc_feature 1..19: note = siRNA sense sequence
  source 1..19: mol_type = other RNA
acaccatagacatagcttc

SEQ ID NO: 54935 - RNA, 19 nt, synthetic construct
  misc_feature 1..19: note = siRNA antisense sequence
  source 1..19: mol_type = other RNA
gaagctatgtctatggtgt

SEQ ID NO: 54936 - RNA, 19 nt, synthetic construct
  misc_feature 1..19: note = siRNA sense sequence
  source 1..19: mol_type = other RNA
caccatagacatagcttcc

SEQ ID NO: 54937 - RNA, 19 nt, synthetic construct
  misc_feature 1..19: note = siRNA antisense sequence
  source 1..19: mol_type = other RNA
ggaagctatgtctatggtg

SEQ ID NO: 54938 - RNA, 19 nt, synthetic construct
  misc_feature 1..19: note = siRNA sense sequence
  source 1..19: mol_type = other RNA
accatagacatagcttcca

SEQ ID NO: 54939 - RNA, 19 nt, synthetic construct
  misc_feature 1..19: note = siRNA antisense sequence
  source 1..19: mol_type = other RNA
tggaagctatgtctatggt

SEQ ID NO: 54940 - RNA, 19 nt, synthetic construct
  misc_feature 1..19: note = siRNA sense sequence
  source 1..19: mol_type = other RNA
ccatagacatagcttccag

SEQ ID NO: 54941 - RNA, 19 nt, synthetic construct
  misc_feature 1..19: note = siRNA antisense sequence
  source 1..19: mol_type = other RNA
ctggaagctatgtctatgg

SEQ ID NO: 54942 - RNA, 19 nt, synthetic construct
  misc_feature 1..19: note = siRNA sense sequence
  source 1..19: mol_type = other RNA
catagacatagcttccagg

SEQ ID NO: 54943 - RNA, 19 nt, synthetic construct
  misc_feature 1..19: note = siRNA antisense sequence
  source 1..19: mol_type = other RNA
cctggaagctatgtctatg

SEQ ID NO: 54944 - RNA, 19 nt, synthetic construct
  misc_feature 1..19: note = siRNA sense sequence
  source 1..19: mol_type = other RNA
atagacatagcttccaggg

SEQ ID NO: 54945 - RNA, 19 nt, synthetic construct
  misc_feature 1..19: note = siRNA antisense sequence
  source 1..19: mol_type = other RNA
ccctggaagctatgtctat

SEQ ID NO: 54946 - RNA, 19 nt, synthetic construct
  misc_feature 1..19: note = siRNA sense sequence
  source 1..19: mol_type = other RNA
catagcttccagggtgtct

SEQ ID NO: 54947 - RNA, 19 nt, synthetic construct
  misc_feature 1..19: note = siRNA antisense sequence
  source 1..19: mol_type = other RNA
agacaccctggaagctatg

SEQ ID NO: 54948 - RNA, 19 nt, synthetic construct
  misc_feature 1..19: note = siRNA sense sequence
  source 1..19: mol_type = other RNA
atagcttccagggtgtcta

SEQ ID NO: 54949 - RNA, 19 nt, synthetic construct
  misc_feature 1..19: note = siRNA antisense sequence
  source 1..19: mol_type = other RNA
tagacaccctggaagctat

SEQ ID NO: 54950 - RNA, 19 nt, synthetic construct
  misc_feature 1..19: note = siRNA sense sequence
  source 1..19: mol_type = other RNA
tagcttccagggtgtctac

SEQ ID NO: 54951 - RNA, 19 nt, synthetic construct
  misc_feature 1..19: note = siRNA antisense sequence
  source 1..19: mol_type = other RNA
gtagacaccctggaagcta

SEQ ID NO: 54952 - RNA, 19 nt, synthetic construct
  misc_feature 1..19: note = siRNA sense sequence
  source 1..19: mol_type = other RNA
agcttccagggtgtctaca

SEQ ID NO: 54953 - RNA, 19 nt, synthetic construct
  misc_feature 1..19: note = siRNA antisense sequence
  source 1..19: mol_type = other RNA
tgtagacaccctggaagct

SEQ ID NO: 54954 - RNA, 19 nt, synthetic construct
  misc_feature 1..19: note = siRNA sense sequence
  source 1..19: mol_type = other RNA
agtaactgcactctgggaa

SEQ ID NO: 54955 - RNA, 19 nt, synthetic construct
  misc_feature 1..19: note = siRNA antisense sequence
  source 1..19: mol_type = other RNA
ttcccagagtgcagttact

SEQ ID NO: 54956 - RNA, 19 nt, synthetic construct
  misc_feature 1..19: note = siRNA sense sequence
  source 1..19: mol_type = other RNA
gtaactgcactctgggaag

SEQ ID NO: 54957 - RNA, 19 nt, synthetic construct
  misc_feature 1..19: note = siRNA antisense sequence
  source 1..19: mol_type = other RNA
cttcccagagtgcagttac

SEQ ID NO: 54958 - RNA, 19 nt, synthetic construct
  misc_feature 1..19: note = siRNA sense sequence
  source 1..19: mol_type = other RNA
taactgcactctgggaagt

SEQ ID NO: 54959 - RNA, 19 nt, synthetic construct
  misc_feature 1..19: note = siRNA antisense sequence
  source 1..19: mol_type = other RNA
acttcccagagtgcagtta

SEQ ID NO: 54960 - RNA, 19 nt, synthetic construct
  misc_feature 1..19: note = siRNA sense sequence
  source 1..19: mol_type = other RNA
aactgcactctgggaagtc

SEQ ID NO: 54961 - RNA, 19 nt, synthetic construct
  misc_feature 1..19: note = siRNA antisense sequence
  source 1..19: mol_type = other RNA
gacttcccagagtgcagtt

SEQ ID NO: 54962 - RNA, 19 nt, synthetic construct
  misc_feature 1..19: note = siRNA sense sequence
  source 1..19: mol_type = other RNA
actgcactctgggaagtca

SEQ ID NO: 54963 - RNA, 19 nt, synthetic construct
  misc_feature 1..19: note = siRNA antisense sequence
  source 1..19: mol_type = other RNA
tgacttcccagagtgcagt

SEQ ID NO: 54964 - RNA, 19 nt, synthetic construct
  misc_feature 1..19: note = siRNA sense sequence
  source 1..19: mol_type = other RNA
atgtcatcttcatcaggta

SEQ ID NO: 54965 - RNA, 19 nt, synthetic construct
  misc_feature 1..19: note = siRNA antisense sequence
  source 1..19: mol_type = other RNA
tacctgatgaagatgacat

SEQ ID NO: 54966 - RNA, 19 nt, synthetic construct
  misc_feature 1..19: note = siRNA sense sequence
  source 1..19: mol_type = other RNA
tgtcatcttcatcaggtac

SEQ ID NO: 54967 - RNA, 19 nt, synthetic construct
  misc_feature 1..19: note = siRNA antisense sequence
  source 1..19: mol_type = other RNA
gtacctgatgaagatgaca

SEQ ID NO: 54968 - RNA, 19 nt, synthetic construct
  misc_feature 1..19: note = siRNA sense sequence
  source 1..19: mol_type = other RNA
gtcatcttcatcaggtact

SEQ ID NO: 54969 - RNA, 19 nt, synthetic construct
  misc_feature 1..19: note = siRNA antisense sequence
  source 1..19: mol_type = other RNA
agtacctgatgaagatgac

SEQ ID NO: 54970 - RNA, 19 nt, synthetic construct
  misc_feature 1..19: note = siRNA sense sequence
  source 1..19: mol_type = other RNA
tcatcttcatcaggtactt

SEQ ID NO: 54971 - RNA, 19 nt, synthetic construct
  misc_feature 1..19: note = siRNA antisense sequence
  source 1..19: mol_type = other RNA
aagtacctgatgaagatga

SEQ ID NO: 54972 - RNA, 19 nt, synthetic construct
  misc_feature 1..19: note = siRNA sense sequence
  source 1..19: mol_type = other RNA
catcttcatcaggtactta

SEQ ID NO: 54973 - RNA, 19 nt, synthetic construct
  misc_feature 1..19: note = siRNA antisense sequence
  source 1..19: mol_type = other RNA
taagtacctgatgaagatg

SEQ ID NO: 54974 - RNA, 19 nt, synthetic construct
  misc_feature 1..19: note = siRNA sense sequence
  source 1..19: mol_type = other RNA
atcttcatcaggtacttat

SEQ ID NO: 54975 - RNA, 19 nt, synthetic construct
  misc_feature 1..19: note = siRNA antisense sequence
  source 1..19: mol_type = other RNA
ataagtacctgatgaagat

SEQ ID NO: 54976 - RNA, 19 nt, synthetic construct
  misc_feature 1..19: note = siRNA sense sequence
  source 1..19: mol_type = other RNA
tcttcatcaggtacttata

SEQ ID NO: 54977 - RNA, 19 nt, synthetic construct
  misc_feature 1..19: note = siRNA antisense sequence
  source 1..19: mol_type = other RNA
tataagtacctgatgaaga

SEQ ID NO: 54978 - RNA, 19 nt, synthetic construct
  misc_feature 1..19: note = siRNA sense sequence
  source 1..19: mol_type = other RNA
cttcatcaggtacttataa

SEQ ID NO: 54979 - RNA, 19 nt, synthetic construct
  misc_feature 1..19: note = siRNA antisense sequence
  source 1..19: mol_type = other RNA
ttataagtacctgatgaag

SEQ ID NO: 54980 - RNA, 19 nt, synthetic construct
  misc_feature 1..19: note = siRNA sense sequence
  source 1..19: mol_type = other RNA
catcaggtacttataattc

SEQ ID NO: 54981 - RNA, 19 nt, synthetic construct
  misc_feature 1..19: note = siRNA antisense sequence
  source 1..19: mol_type = other RNA
gaattataagtacctgatg

SEQ ID NO: 54982 - RNA, 19 nt, synthetic construct
  misc_feature 1..19: note = siRNA sense sequence
  source 1..19: mol_type = other RNA
ttcatttatagttccacac

SEQ ID NO: 54983 - RNA, 19 nt, synthetic construct
  misc_feature 1..19: note = siRNA antisense sequence
  source 1..19: mol_type = other RNA
gtgtggaactataaatgaa

SEQ ID NO: 54984 - RNA, 19 nt, synthetic construct
  misc_feature 1..19: note = siRNA sense sequence
  source 1..19: mol_type = other RNA
caatattccagtaagaggt

SEQ ID NO: 54985 - RNA, 19 nt, synthetic construct
  misc_feature 1..19: note = siRNA antisense sequence
  source 1..19: mol_type = other RNA
acctcttactggaatattg

SEQ ID NO: 54986 - RNA, 19 nt, synthetic construct
  misc_feature 1..19: note = siRNA sense sequence
  source 1..19: mol_type = other RNA
aatattccagtaagaggtt

SEQ ID NO: 54987 - RNA, 19 nt, synthetic construct
  misc_feature 1..19: note = siRNA antisense sequence
  source 1..19: mol_type = other RNA
aacctcttactggaatatt

SEQ ID NO: 54988 - RNA, 19 nt, synthetic construct
  misc_feature 1..19: note = siRNA sense sequence
  source 1..19: mol_type = other RNA
atattccagtaagaggtta

SEQ ID NO: 54989 - RNA, 19 nt, synthetic construct
  misc_feature 1..19: note = siRNA antisense sequence
  source 1..19: mol_type = other RNA
taacctcttactggaatat

SEQ ID NO: 54990 - RNA, 19 nt, synthetic construct
  misc_feature 1..19: note = siRNA sense sequence
  source 1..19: mol_type = other RNA
tattccagtaagaggttat

SEQ ID NO: 54991 - RNA, 19 nt, synthetic construct
  misc_feature 1..19: note = siRNA antisense sequence
  source 1..19: mol_type = other RNA
ataacctcttactggaata

SEQ ID NO: 54992 - RNA, 19 nt, synthetic construct
  misc_feature 1..19: note = siRNA sense sequence
  source 1..19: mol_type = other RNA
ttccagtaagaggttattt

SEQ ID NO: 54993 - RNA, 19 nt, synthetic construct
  misc_feature 1..19: note = siRNA antisense sequence
  source 1..19: mol_type = other RNA
aaataacctcttactggaa

SEQ ID NO: 54994 - RNA, 19 nt, synthetic construct
  misc_feature 1..19: note = siRNA sense sequence
  source 1..19: mol_type = other RNA
tccagtaagaggttatttt

SEQ ID NO: 54995 - RNA, 19 nt, synthetic construct
  misc_feature 1..19: note = siRNA antisense sequence
  source 1..19: mol_type = other RNA
aaaataacctcttactgga

SEQ ID NO: 54996 - RNA, 19 nt, synthetic construct
  misc_feature 1..19: note = siRNA sense sequence
  source 1..19: mol_type = other RNA
ccctgtcagcgttgcttag

SEQ ID NO: 54997 - RNA, 19 nt, synthetic construct
  misc_feature 1..19: note = siRNA antisense sequence
  source 1..19: mol_type = other RNA
ctaagcaacgctgacaggg

SEQ ID NO: 54998 - RNA, 19 nt, synthetic construct
  misc_feature 1..19: note = siRNA sense sequence
  source 1..19: mol_type = other RNA
cctgtcagcgttgcttagc

SEQ ID NO: 54999 - RNA, 19 nt, synthetic construct
  misc_feature 1..19: note = siRNA antisense sequence
  source 1..19: mol_type = other RNA
gctaagcaacgctgacagg

SEQ ID NO: 55000 - RNA, 19 nt, synthetic construct
  misc_feature 1..19: note = siRNA sense sequence
  source 1..19: mol_type = other RNA
ctgtcagcgttgcttagcc

SEQ ID NO: 55001 - RNA, 19 nt, synthetic construct
  misc_feature 1..19: note = siRNA antisense sequence
  source 1..19: mol_type = other RNA
ggctaagcaacgctgacag

SEQ ID NO: 55002 - RNA, 19 nt, synthetic construct
  misc_feature 1..19: note = siRNA sense sequence
  source 1..19: mol_type = other RNA
tgtcagcgttgcttagcct

SEQ ID NO: 55003 - RNA, 19 nt, synthetic construct
  misc_feature 1..19: note = siRNA antisense sequence
  source 1..19: mol_type = other RNA
aggctaagcaacgctgaca

SEQ ID NO: 55004 - RNA, 19 nt, synthetic construct
  misc_feature 1..19: note = siRNA sense sequence
  source 1..19: mol_type = other RNA
gtcagcgttgcttagcctt

SEQ ID NO: 55005 - RNA, 19 nt, synthetic construct
  misc_feature 1..19: note = siRNA antisense sequence
  source 1..19: mol_type = other RNA
aaggctaagcaacgctgac

SEQ ID NO: 55006 - RNA, 19 nt, synthetic construct
  misc_feature 1..19: note = siRNA sense sequence
  source 1..19: mol_type = other RNA
tcagcgttgcttagcctta

SEQ ID NO: 55007 - RNA, 19 nt, synthetic construct
  misc_feature 1..19: note = siRNA antisense sequence
  source 1..19: mol_type = other RNA
taaggctaagcaacgctga

SEQ ID NO: 55008 - RNA, 19 nt, synthetic construct
  misc_feature 1..19: note = siRNA sense sequence
  source 1..19: mol_type = other RNA
cagcgttgcttagccttag

SEQ ID NO: 55009 - RNA, 19 nt, synthetic construct
  misc_feature 1..19: note = siRNA antisense sequence
  source 1..19: mol_type = other RNA
ctaaggctaagcaacgctg

SEQ ID NO: 55010 - RNA, 19 nt, synthetic construct
  misc_feature 1..19: note = siRNA sense sequence
  source 1..19: mol_type = other RNA
agcgttgcttagccttagt

SEQ ID NO: 55011 - RNA, 19 nt, synthetic construct
  misc_feature 1..19: note = siRNA antisense sequence
  source 1..19: mol_type = other RNA
actaaggctaagcaacgct

SEQ ID NO: 55012 - RNA, 19 nt, synthetic construct
  misc_feature 1..19: note = siRNA sense sequence
  source 1..19: mol_type = other RNA
gcgttgcttagccttagtg

SEQ ID NO: 55013 - RNA, 19 nt, synthetic construct
  misc_feature 1..19: note = siRNA antisense sequence
  source 1..19: mol_type = other RNA
cactaaggctaagcaacgc

SEQ ID NO: 55014 - RNA, 19 nt, synthetic construct
  misc_feature 1..19: note = siRNA sense sequence
  source 1..19: mol_type = other RNA
cgttgcttagccttagtgg

SEQ ID NO: 55015 - RNA, 19 nt, synthetic construct
  misc_feature 1..19: note = siRNA antisense sequence
  source 1..19: mol_type = other RNA
ccactaaggctaagcaacg

SEQ ID NO: 55016 - RNA, 19 nt, synthetic construct
  misc_feature 1..19: note = siRNA sense sequence
  source 1..19: mol_type = other RNA
gttgcttagccttagtggt

SEQ ID NO: 55017 - RNA, 19 nt, synthetic construct
  misc_feature 1..19: note = siRNA antisense sequence
  source 1..19: mol_type = other RNA
accactaaggctaagcaac

SEQ ID NO: 55018 - RNA, 19 nt, synthetic construct
  misc_feature 1..19: note = siRNA sense sequence
  source 1..19: mol_type = other RNA
ttgcttagccttagtggta

SEQ ID NO: 55019 - RNA, 19 nt, synthetic construct
  misc_feature 1..19: note = siRNA antisense sequence
  source 1..19: mol_type = other RNA
taccactaaggctaagcaa

SEQ ID NO: 55020 - RNA, 19 nt, synthetic construct
  misc_feature 1..19: note = siRNA sense sequence
  source 1..19: mol_type = other RNA
tgcttagccttagtggtaa

SEQ ID NO: 55021 - RNA, 19 nt, synthetic construct
  misc_feature 1..19: note = siRNA antisense sequence
  source 1..19: mol_type = other RNA
ttaccactaaggctaagca

SEQ ID NO: 55022 - RNA, 19 nt, synthetic construct
  misc_feature 1..19: note = siRNA sense sequence
  source 1..19: mol_type = other RNA
gcttagccttagtggtaaa

SEQ ID NO: 55023 - RNA, 19 nt, synthetic construct
  misc_feature 1..19: note = siRNA antisense sequence
  source 1..19: mol_type = other RNA
tttaccactaaggctaagc

SEQ ID NO: 55024 - RNA, 19 nt, synthetic construct
  misc_feature 1..19: note = siRNA sense sequence
  source 1..19: mol_type = other RNA
cttagccttagtggtaaag

SEQ ID NO: 55025 - RNA, 19 nt, synthetic construct
  misc_feature 1..19: note = siRNA antisense sequence
  source 1..19: mol_type = other RNA
ctttaccactaaggctaag

SEQ ID NO: 55026 - RNA, 19 nt, synthetic construct
  misc_feature 1..19: note = siRNA sense sequence
  source 1..19: mol_type = other RNA
ttagccttagtggtaaagt

SEQ ID NO: 55027 - RNA, 19 nt, synthetic construct
  misc_feature 1..19: note = siRNA antisense sequence
  source 1..19: mol_type = other RNA
actttaccactaaggctaa

SEQ ID NO: 55028 - RNA, 19 nt, synthetic construct
  misc_feature 1..19: note = siRNA sense sequence
  source 1..19: mol_type = other RNA
tagccttagtggtaaagtt

SEQ ID NO: 55029 - RNA, 19 nt, synthetic construct
  misc_feature 1..19: note = siRNA antisense sequence
  source 1..19: mol_type = other RNA
aactttaccactaaggcta

SEQ ID NO: 55030 - RNA, 19 nt, synthetic construct
  misc_feature 1..19: note = siRNA sense sequence
  source 1..19: mol_type = other RNA
agccttagtggtaaagttg

SEQ ID NO: 55031 - RNA, 19 nt, synthetic construct
  misc_feature 1..19: note = siRNA antisense sequence
  source 1..19: mol_type = other RNA
caactttaccactaaggct

SEQ ID NO: 55032 - RNA, 19 nt, synthetic construct
  misc_feature 1..19: note = siRNA sense sequence
  source 1..19: mol_type = other RNA
gccttagtggtaaagttga

SEQ ID NO: 55033 - RNA, 19 nt, synthetic construct
  misc_feature 1..19: note = siRNA antisense sequence
  source 1..19: mol_type = other RNA
tcaactttaccactaaggc

SEQ ID NO: 55034 - RNA, 19 nt, synthetic construct
  misc_feature 1..19: note = siRNA sense sequence
  source 1..19: mol_type = other RNA
atcccagccacagcagatt

SEQ ID NO: 55035 - RNA, 19 nt, synthetic construct
  misc_feature 1..19: note = siRNA antisense sequence
  source 1..19: mol_type = other RNA
aatctgctgtggctgggat

SEQ ID NO: 55036 - RNA, 19 nt, synthetic construct
  misc_feature 1..19: note = siRNA sense sequence
  source 1..19: mol_type = other RNA
tcccagccacagcagattc

SEQ ID NO: 55037 - RNA, 19 nt, synthetic construct
  misc_feature 1..19: note = siRNA antisense sequence
  source 1..19: mol_type = other RNA
gaatctgctgtggctggga

SEQ ID NO: 55038 - RNA, 19 nt, synthetic construct
  misc_feature 1..19: note = siRNA sense sequence
  source 1..19: mol_type = other RNA
ccagccacagcagattccc

SEQ ID NO: 55039 - RNA, 19 nt, synthetic construct
  misc_feature 1..19: note = siRNA antisense sequence
  source 1..19: mol_type = other RNA
gggaatctgctgtggctgg

SEQ ID NO: 55040 - RNA, 19 nt, synthetic construct
  misc_feature 1..19: note = siRNA sense sequence
  source 1..19: mol_type = other RNA
cagccacagcagattccca

SEQ ID NO: 55041 - RNA, 19 nt, synthetic construct
  misc_feature 1..19: note = siRNA antisense sequence
  source 1..19: mol_type = other RNA
tgggaatctgctgtggctg

SEQ ID NO: 55042 - RNA, 19 nt, synthetic construct
  misc_feature 1..19: note = siRNA sense sequence
  source 1..19: mol_type = other RNA
aaaggtcagctcctcaagt

SEQ ID NO: 55043 - RNA, 19 nt, synthetic construct
  misc_feature 1..19: note = siRNA antisense sequence
  source 1..19: mol_type = other RNA
acttgaggagctgaccttt

SEQ ID NO: 55044 - RNA, 19 nt, synthetic construct
  misc_feature 1..19: note = siRNA sense sequence
  source 1..19: mol_type = other RNA
aaggtcagctcctcaagta

SEQ ID NO: 55045 - RNA, 19 nt, synthetic construct
  misc_feature 1..19: note = siRNA antisense sequence
  source 1..19: mol_type = other RNA
tacttgaggagctgacctt

SEQ ID NO: 55046 - RNA, 19 nt, synthetic construct
  misc_feature 1..19: note = siRNA sense sequence
  source 1..19: mol_type = other RNA
aggtcagctcctcaagtat

SEQ ID NO: 55047 - RNA, 19 nt, synthetic construct
  misc_feature 1..19: note = siRNA antisense sequence
  source 1..19: mol_type = other RNA
atacttgaggagctgacct

SEQ ID NO: 55048 - RNA, 19 nt, synthetic construct
  misc_feature 1..19: note = siRNA sense sequence
  source 1..19: mol_type = other RNA
ggtcagctcctcaagtatc

SEQ ID NO: 55049 - RNA, 19 nt, synthetic construct
  misc_feature 1..19: note = siRNA antisense sequence
  source 1..19: mol_type = other RNA
gatacttgaggagctgacc

SEQ ID NO: 55050 - RNA, 19 nt, synthetic construct
  misc_feature 1..19: note = siRNA sense sequence
  source 1..19: mol_type = other RNA
gtcagctcctcaagtatca

SEQ ID NO: 55051 - RNA, 19 nt, synthetic construct
  misc_feature 1..19: note = siRNA antisense sequence
  source 1..19: mol_type = other RNA
tgatacttgaggagctgac

SEQ ID NO: 55052 - RNA, 19 nt, synthetic construct
  misc_feature 1..19: note = siRNA sense sequence
  source 1..19: mol_type = other RNA
tcagctcctcaagtatcag

SEQ ID NO: 55053 - RNA, 19 nt, synthetic construct
  misc_feature 1..19: note = siRNA antisense sequence
  source 1..19: mol_type = other RNA
ctgatacttgaggagctga

SEQ ID NO: 55054 - RNA, 19 nt, synthetic construct
  misc_feature 1..19: note = siRNA sense sequence
  source 1..19: mol_type = other RNA
cagctcctcaagtatcagg

SEQ ID NO: 55055 - RNA, 19 nt, synthetic construct
  misc_feature 1..19: note = siRNA antisense sequence
  source 1..19: mol_type = other RNA
cctgatacttgaggagctg

SEQ ID NO: 55056 - RNA, 19 nt, synthetic construct
  misc_feature 1..19: note = siRNA sense sequence
  source 1..19: mol_type = other RNA
agctcctcaagtatcaggt

SEQ ID NO: 55057 - RNA, 19 nt, synthetic construct
  misc_feature 1..19: note = siRNA antisense sequence
  source 1..19: mol_type = other RNA
acctgatacttgaggagct

SEQ ID NO: 55058 - RNA, 19 nt, synthetic construct
  misc_feature 1..19: note = siRNA sense sequence
  source 1..19: mol_type = other RNA
gctcctcaagtatcaggtg

SEQ ID NO: 55059 - RNA, 19 nt, synthetic construct
  misc_feature 1..19: note = siRNA antisense sequence
  source 1..19: mol_type = other RNA
cacctgatacttgaggagc

SEQ ID NO: 55060 - RNA, 19 nt, synthetic construct
  misc_feature 1..19: note = siRNA sense sequence
  source 1..19: mol_type = other RNA
ctcctcaagtatcaggtga

SEQ ID NO: 55061 - RNA, 19 nt, synthetic construct
  misc_feature 1..19: note = siRNA antisense sequence
  source 1..19: mol_type = other RNA
tcacctgatacttgaggag

SEQ ID NO: 55062 - RNA, 19 nt, synthetic construct
  misc_feature 1..19: note = siRNA sense sequence
  source 1..19: mol_type = other RNA
tcctcaagtatcaggtgaa

SEQ ID NO: 55063 - RNA, 19 nt, synthetic construct
  misc_feature 1..19: note = siRNA antisense sequence
  source 1..19: mol_type = other RNA
ttcacctgatacttgagga

SEQ ID NO: 55064 - RNA, 19 nt, synthetic construct
  misc_feature 1..19: note = siRNA sense sequence
  source 1..19: mol_type = other RNA
gggttttattaactctttg

SEQ ID NO: 55065 - RNA, 19 nt, synthetic construct
  misc_feature 1..19: note = siRNA antisense sequence
  source 1..19: mol_type = other RNA
caaagagttaataaaaccc

SEQ ID NO: 55066 - RNA, 19 nt, synthetic construct
  misc_feature 1..19: note = siRNA sense sequence
  source 1..19: mol_type = other RNA
gttttattaactctttgcc

SEQ ID NO: 55067 - RNA, 19 nt, synthetic construct
  misc_feature 1..19: note = siRNA antisense sequence
  source 1..19: mol_type = other RNA
ggcaaagagttaataaaac

SEQ ID NO: 55068 - RNA, 19 nt, synthetic construct
  misc_feature 1..19: note = siRNA sense sequence
  source 1..19: mol_type = other RNA
ttttattaactctttgccc

SEQ ID NO: 55069 - RNA, 19 nt, synthetic construct
  misc_feature 1..19: note = siRNA antisense sequence
  source 1..19: mol_type = other RNA
gggcaaagagttaataaaa

SEQ ID NO: 55070 - RNA, 19 nt, synthetic construct
  misc_feature 1..19: note = siRNA sense sequence
  source 1..19: mol_type = other RNA
tttattaactctttgccca

SEQ ID NO: 55071 - RNA, 19 nt, synthetic construct
  misc_feature 1..19: note = siRNA antisense sequence
  source 1..19: mol_type = other RNA
tgggcaaagagttaataaa

SEQ ID NO: 55072 - RNA, 19 nt, synthetic construct
  misc_feature 1..19: note = siRNA sense sequence
  source 1..19: mol_type = other RNA
ttattaactctttgcccac

SEQ ID NO: 55073 - RNA, 19 nt, synthetic construct
  misc_feature 1..19: note = siRNA antisense sequence
  source 1..19: mol_type = other RNA
gtgggcaaagagttaataa

SEQ ID NO: 55074 - RNA, 19 nt, synthetic construct
  misc_feature 1..19: note = siRNA sense sequence
  source 1..19: mol_type = other RNA
aactctttgcccacattta

SEQ ID NO: 55075 - RNA, 19 nt, synthetic construct
  misc_feature 1..19: note = siRNA antisense sequence
  source 1..19: mol_type = other RNA
taaatgtgggcaaagagtt

SEQ ID NO: 55076 - RNA, 19 nt, synthetic construct
  misc_feature 1..19: note = siRNA sense sequence
  source 1..19: mol_type = other RNA
ccatgacagatatcaataa

SEQ ID NO: 55077 - RNA, 19 nt, synthetic construct
  misc_feature 1..19: note = siRNA antisense sequence
  source 1..19: mol_type = other RNA
ttattgatatctgtcatgg

SEQ ID NO: 55078 - RNA, 19 nt, synthetic construct
  misc_feature 1..19: note = siRNA sense sequence
  source 1..19: mol_type = other RNA
caataataggaagttgaca

SEQ ID NO: 55079 - RNA, 19 nt, synthetic construct
  misc_feature 1..19: note = siRNA antisense sequence
  source 1..19: mol_type = other RNA
tgtcaacttcctattattg

SEQ ID NO: 55080 - RNA, 19 nt, synthetic construct
  misc_feature 1..19: note = siRNA sense sequence
  source 1..19: mol_type = other RNA
tccattatcactccattaa

SEQ ID NO: 55081 - RNA, 19 nt, synthetic construct
  misc_feature 1..19: note = siRNA antisense sequence
  source 1..19: mol_type = other RNA
ttaatggagtgataatgga

SEQ ID NO: 55082 - RNA, 19 nt, synthetic construct
  misc_feature 1..19: note = siRNA sense sequence
  source 1..19: mol_type = other RNA
ttcagtttcaagcctggga

SEQ ID NO: 55083 - RNA, 19 nt, synthetic construct
  misc_feature 1..19: note = siRNA antisense sequence
  source 1..19: mol_type = other RNA
tcccaggcttgaaactgaa

SEQ ID NO: 55084 - RNA, 19 nt, synthetic construct
  misc_feature 1..19: note = siRNA sense sequence
  source 1..19: mol_type = other RNA
tcagtttcaagcctgggaa

SEQ ID NO: 55085 - RNA, 19 nt, synthetic construct
  misc_feature 1..19: note = siRNA antisense sequence
  source 1..19: mol_type = other RNA
ttcccaggcttgaaactga

SEQ ID NO: 55086 - RNA, 19 nt, synthetic construct
  misc_feature 1..19: note = siRNA sense sequence
  source 1..19: mol_type = other RNA
cagtttcaagcctgggaat

SEQ ID NO: 55087 - RNA, 19 nt, synthetic construct
  misc_feature 1..19: note = siRNA antisense sequence
  source 1..19: mol_type = other RNA
attcccaggcttgaaactg

SEQ ID NO: 55088 - RNA, 19 nt, synthetic construct
  misc_feature 1..19: note = siRNA sense sequence
  source 1..19: mol_type = other RNA
agtttcaagcctgggaatc

SEQ ID NO: 55089 - RNA, 19 nt, synthetic construct
  misc_feature 1..19: note = siRNA antisense sequence
  source 1..19: mol_type = other RNA
gattcccaggcttgaaact

SEQ ID NO: 55090 - RNA, 19 nt, synthetic construct
  misc_feature 1..19: note = siRNA sense sequence
  source 1..19: mol_type = other RNA
gtttcaagcctgggaatct

SEQ ID NO: 55091 - RNA, 19 nt, synthetic construct
  misc_feature 1..19: note = siRNA antisense sequence
  source 1..19: mol_type = other RNA
agattcccaggcttgaaac

SEQ ID NO: 55092 - RNA, 19 nt, synthetic construct
  misc_feature 1..19: note = siRNA sense sequence
  source 1..19: mol_type = other RNA
ttcaagcctgggaatctga

SEQ ID NO: 55093 - RNA, 19 nt, synthetic construct
  misc_feature 1..19: note = siRNA antisense sequence
  source 1..19: mol_type = other RNA
tcagattcccaggcttgaa

SEQ ID NO: 55094 - RNA, 19 nt, synthetic construct
  misc_feature 1..19: note = siRNA sense sequence
  source 1..19: mol_type = other RNA
tcaagcctgggaatctgaa

SEQ ID NO: 55095 - RNA, 19 nt, synthetic construct
  misc_feature 1..19: note = siRNA antisense sequence
  source 1..19: mol_type = other RNA
ttcagattcccaggcttga

SEQ ID NO: 55096 - RNA, 19 nt, synthetic construct
  misc_feature 1..19: note = siRNA sense sequence
  source 1..19: mol_type = other RNA
aaaggtggctccatgatta

SEQ ID NO: 55097 - RNA, 19 nt, synthetic construct
  misc_feature 1..19: note = siRNA antisense sequence
  source 1..19: mol_type = other RNA
taatcatggagccaccttt

SEQ ID NO: 55098 - RNA, 19 nt, synthetic construct
  misc_feature 1..19: note = siRNA sense sequence
  source 1..19: mol_type = other RNA
aaggtggctccatgattag

SEQ ID NO: 55099 - RNA, 19 nt, synthetic construct
  misc_feature 1..19: note = siRNA antisense sequence
  source 1..19: mol_type = other RNA
ctaatcatggagccacctt

SEQ ID NO: 55100 - RNA, 19 nt, synthetic construct
  misc_feature 1..19: note = siRNA sense sequence
  source 1..19: mol_type = other RNA
aggtggctccatgattaga

SEQ ID NO: 55101 - RNA, 19 nt, synthetic construct
  misc_feature 1..19: note = siRNA antisense sequence
  source 1..19: mol_type = other RNA
tctaatcatggagccacct

SEQ ID NO: 55102 - RNA, 19 nt, synthetic construct
  misc_feature 1..19: note = siRNA sense sequence
  source 1..19: mol_type = other RNA
ggtggctccatgattagaa

SEQ ID NO: 55103 - RNA, 19 nt, synthetic construct
  misc_feature 1..19: note = siRNA antisense sequence
  source 1..19: mol_type = other RNA
ttctaatcatggagccacc

SEQ ID NO: 55104 - RNA, 19 nt, synthetic construct
  misc_feature 1..19: note = siRNA sense sequence
  source 1..19: mol_type = other RNA
gtggctccatgattagaat

SEQ ID NO: 55105 - RNA, 19 nt, synthetic construct
  misc_feature 1..19: note = siRNA antisense sequence
  source 1..19: mol_type = other RNA
attctaatcatggagccac

SEQ ID NO: 55106 - RNA, 19 nt, synthetic construct
  misc_feature 1..19: note = siRNA sense sequence
  source 1..19: mol_type = other RNA
tggctccatgattagaatg

SEQ ID NO: 55107 - RNA, 19 nt, synthetic construct
  misc_feature 1..19: note = siRNA antisense sequence
  source 1..19: mol_type = other RNA
cattctaatcatggagcca

SEQ ID NO: 55108 - RNA, 19 nt, synthetic construct
  misc_feature 1..19: note = siRNA sense sequence
  source 1..19: mol_type = other RNA
acacctcaagcaatttaga

SEQ ID NO: 55109 - RNA, 19 nt, synthetic construct
  misc_feature 1..19: note = siRNA antisense sequence
  source 1..19: mol_type = other RNA
tctaaattgcttgaggtgt

SEQ ID NO: 55110 - RNA, 19 nt, synthetic construct
  misc_feature 1..19: note = siRNA sense sequence
  source 1..19: mol_type = other RNA
cacctcaagcaatttagat

SEQ ID NO: 55111 - RNA, 19 nt, synthetic construct
  misc_feature 1..19: note = siRNA antisense sequence
  source 1..19: mol_type = other RNA
atctaaattgcttgaggtg

SEQ ID NO: 55112 - RNA, 19 nt, synthetic construct
  misc_feature 1..19: note = siRNA sense sequence
  source 1..19: mol_type = other RNA
acctcaagcaatttagata

SEQ ID NO: 55113 - RNA, 19 nt, synthetic construct
  misc_feature 1..19: note = siRNA antisense sequence
  source 1..19: mol_type = other RNA
tatctaaattgcttgaggt

SEQ ID NO: 55114 - RNA, 19 nt, synthetic construct
  misc_feature 1..19: note = siRNA sense sequence
  source 1..19: mol_type = other RNA
cctcaagcaatttagatat

SEQ ID NO: 55115 - RNA, 19 nt, synthetic construct
  misc_feature 1..19: note = siRNA antisense sequence
  source 1..19: mol_type = other RNA
atatctaaattgcttgagg

SEQ ID NO: 55116 - RNA, 19 nt, synthetic construct
  misc_feature 1..19: note = siRNA sense sequence
  source 1..19: mol_type = other RNA
caatgacgtttggctttta

SEQ ID NO: 55117 - RNA, 19 nt, synthetic construct
  misc_feature 1..19: note = siRNA antisense sequence
  source 1..19: mol_type = other RNA
taaaagccaaacgtcattg

SEQ ID NO: 55118 - RNA, 19 nt, synthetic construct
  misc_feature 1..19: note = siRNA sense sequence
  source 1..19: mol_type = other RNA
aatgacgtttggcttttag

SEQ ID NO: 55119 - RNA, 19 nt, synthetic construct
  misc_feature 1..19: note = siRNA antisense sequence
  source 1..19: mol_type = other RNA
ctaaaagccaaacgtcatt

SEQ ID NO: 55120 - RNA, 19 nt, synthetic construct
  misc_feature 1..19: note = siRNA sense sequence
  source 1..19: mol_type = other RNA
atgacgtttggcttttaga

SEQ ID NO: 55121 - RNA, 19 nt, synthetic construct
  misc_feature 1..19: note = siRNA antisense sequence
  source 1..19: mol_type = other RNA
tctaaaagccaaacgtcat

SEQ ID NO: 55122 - RNA, 19 nt, synthetic construct
  misc_feature 1..19: note = siRNA sense sequence
  source 1..19: mol_type = other RNA
tgacgtttggcttttagac

SEQ ID NO: 55123 - RNA, 19 nt, synthetic construct
  misc_feature 1..19: note = siRNA antisense sequence
  source 1..19: mol_type = other RNA
gtctaaaagccaaacgtca

SEQ ID NO: 55124 - RNA, 19 nt, synthetic construct
  misc_feature 1..19: note = siRNA sense sequence
  source 1..19: mol_type = other RNA
gacgtttggcttttagaca

SEQ ID NO: 55125 - RNA, 19 nt, synthetic construct
  misc_feature 1..19: note = siRNA antisense sequence
  source 1..19: mol_type = other RNA
tgtctaaaagccaaacgtc

SEQ ID NO: 55126 - RNA, 19 nt, synthetic construct
  misc_feature 1..19: note = siRNA sense sequence
  source 1..19: mol_type = other RNA
tttggcttttagacatgtt

SEQ ID NO: 55127 - RNA, 19 nt, synthetic construct
  misc_feature 1..19: note = siRNA antisense sequence
  source 1..19: mol_type = other RNA
aacatgtctaaaagccaaa

SEQ ID NO: 55128 - RNA, 19 nt, synthetic construct
  misc_feature 1..19: note = siRNA sense sequence
  source 1..19: mol_type = other RNA
ttggcttttagacatgttc

SEQ ID NO: 55129 - RNA, 19 nt, synthetic construct
  misc_feature 1..19: note = siRNA antisense sequence
  source 1..19: mol_type = other RNA
gaacatgtctaaaagccaa

SEQ ID NO: 55130 - RNA, 19 nt, synthetic construct
  misc_feature 1..19: note = siRNA sense sequence
  source 1..19: mol_type = other RNA
tggcttttagacatgttcc

SEQ ID NO: 55131 - RNA, 19 nt, synthetic construct
  misc_feature 1..19: note = siRNA antisense sequence
  source 1..19: mol_type = other RNA
ggaacatgtctaaaagcca

SEQ ID NO: 55132 - RNA, 19 nt, synthetic construct
  misc_feature 1..19: note = siRNA sense sequence
  source 1..19: mol_type = other RNA
ggcttttagacatgttcct

SEQ ID NO: 55133 - RNA, 19 nt, synthetic construct
  misc_feature 1..19: note = siRNA antisense sequence
  source 1..19: mol_type = other RNA
aggaacatgtctaaaagcc

SEQ ID NO: 55134 - RNA, 19 nt, synthetic construct
  misc_feature 1..19: note = siRNA sense sequence
  source 1..19: mol_type = other RNA
gcttttagacatgttcctt

SEQ ID NO: 55135 - RNA, 19 nt, synthetic construct
  misc_feature 1..19: note = siRNA antisense sequence
  source 1..19: mol_type = other RNA
aaggaacatgtctaaaagc

SEQ ID NO: 55136 - RNA, 19 nt, synthetic construct
  misc_feature 1..19: note = siRNA sense sequence
  source 1..19: mol_type = other RNA
cttttagacatgttccttg

SEQ ID NO: 55137 - RNA, 19 nt, synthetic construct
  misc_feature 1..19: note = siRNA antisense sequence
  source 1..19: mol_type = other RNA
caaggaacatgtctaaaag

SEQ ID NO: 55138 - RNA, 19 nt, synthetic construct
  misc_feature 1..19: note = siRNA sense sequence
  source 1..19: mol_type = other RNA
ttttagacatgttccttgt

SEQ ID NO: 55139 - RNA, 19 nt, synthetic construct
  misc_feature 1..19: note = siRNA antisense sequence
  source 1..19: mol_type = other RNA
acaaggaacatgtctaaaa

SEQ ID NO: 55140 - RNA, 19 nt, synthetic construct
  misc_feature 1..19: note = siRNA sense sequence
  source 1..19: mol_type = other RNA
tttagacatgttccttgta

SEQ ID NO: 55141 - RNA, 19 nt, synthetic construct
  misc_feature 1..19: note = siRNA antisense sequence
  source 1..19: mol_type = other RNA
tacaaggaacatgtctaaa

SEQ ID NO: 55142 - RNA, 19 nt, synthetic construct
  misc_feature 1..19: note = siRNA sense sequence
  source 1..19: mol_type = other RNA
ttagacatgttccttgtaa

SEQ ID NO: 55143 - RNA, 19 nt, synthetic construct
  misc_feature 1..19: note = siRNA antisense sequence
  source 1..19: mol_type = other RNA
ttacaaggaacatgtctaa

SEQ ID NO: 55144 - RNA, 19 nt, synthetic construct
  misc_feature 1..19: note = siRNA sense sequence
  source 1..19: mol_type = other RNA
tagacatgttccttgtaac

SEQ ID NO: 55145 - RNA, 19 nt, synthetic construct
  misc_feature 1..19: note = siRNA antisense sequence
  source 1..19: mol_type = other RNA
gttacaaggaacatgtcta

SEQ ID NO: 55146 - RNA, 19 nt, synthetic construct
  misc_feature 1..19: note = siRNA sense sequence
  source 1..19: mol_type = other RNA
tcagatatttgaaggtgcc

SEQ ID NO: 55147 - RNA, 19 nt, synthetic construct
  misc_feature 1..19: note = siRNA antisense sequence
  source 1..19: mol_type = other RNA
ggcaccttcaaatatctga

SEQ ID NO: 55148 - RNA, 19 nt, synthetic construct
  misc_feature 1..19: note = siRNA sense sequence
  source 1..19: mol_type = other RNA
cagatatttgaaggtgcca

SEQ ID NO: 55149 - RNA, 19 nt, synthetic construct
  misc_feature 1..19: note = siRNA antisense sequence
  source 1..19: mol_type = other RNA
tggcaccttcaaatatctg

SEQ ID NO: 55150 - RNA, 19 nt, synthetic construct
  misc_feature 1..19: note = siRNA sense sequence
  source 1..19: mol_type = other RNA
agatatttgaaggtgccag

SEQ ID NO: 55151 - RNA, 19 nt, synthetic construct
  misc_feature 1..19: note = siRNA antisense sequence
  source 1..19: mol_type = other RNA
ctggcaccttcaaatatct

SEQ ID NO: 55152 - RNA, 19 nt, synthetic construct
  misc_feature 1..19: note = siRNA sense sequence
  source 1..19: mol_type = other RNA
atttgaaggtgccagtaaa

SEQ ID NO: 55153 - RNA, 19 nt, synthetic construct
  misc_feature 1..19: note = siRNA antisense sequence
  source 1..19: mol_type = other RNA
tttactggcaccttcaaat

SEQ ID NO: 55154 - RNA, 19 nt, synthetic construct
  misc_feature 1..19: note = siRNA sense sequence
  source 1..19: mol_type = other RNA
tttgaaggtgccagtaaag

SEQ ID NO: 55155 - RNA, 19 nt, synthetic construct
  misc_feature 1..19: note = siRNA antisense sequence
  source 1..19: mol_type = other RNA
ctttactggcaccttcaaa

SEQ ID NO: 55156 - RNA, 19 nt, synthetic construct
  misc_feature 1..19: note = siRNA sense sequence
  source 1..19: mol_type = other RNA
ttgaaggtgccagtaaagt

SEQ ID NO: 55157 - RNA, 19 nt, synthetic construct
  misc_feature 1..19: note = siRNA antisense sequence
  source 1..19: mol_type = other RNA
actttactggcaccttcaa

SEQ ID NO: 55158 - RNA, 19 nt, synthetic construct
  misc_feature 1..19: note = siRNA sense sequence
  source 1..19: mol_type = other RNA
tgaaggtgccagtaaagta

SEQ ID NO: 55159 - RNA, 19 nt, synthetic construct
  misc_feature 1..19: note = siRNA antisense sequence
  source 1..19: mol_type = other RNA
tactttactggcaccttca

SEQ ID NO: 55160 - RNA, 19 nt, synthetic construct
  misc_feature 1..19: note = siRNA sense sequence
  source 1..19: mol_type = other RNA
gaaggtgccagtaaagtaa

SEQ ID NO: 55161 - RNA, 19 nt, synthetic construct
  misc_feature 1..19: note = siRNA antisense sequence
  source 1..19: mol_type = other RNA
ttactttactggcaccttc

SEQ ID NO: 55162 - RNA, 19 nt, synthetic construct
  misc_feature 1..19: note = siRNA sense sequence
  source 1..19: mol_type = other RNA
aaggtgccagtaaagtaaa

SEQ ID NO: 55163 - RNA, 19 nt, synthetic construct
  misc_feature 1..19: note = siRNA antisense sequence
  source 1..19: mol_type = other RNA
tttactttactggcacctt

SEQ ID NO: 55164 - RNA, 19 nt, synthetic construct
  misc_feature 1..19: note = siRNA sense sequence
  source 1..19: mol_type = other RNA
aggtgccagtaaagtaaaa

SEQ ID NO: 55165 - RNA, 19 nt, synthetic construct
  misc_feature 1..19: note = siRNA antisense sequence
  source 1..19: mol_type = other RNA
ttttactttactggcacct

SEQ ID NO: 55166 - RNA, 19 nt, synthetic construct
  misc_feature 1..19: note = siRNA sense sequence
  source 1..19: mol_type = other RNA
ggtgccagtaaagtaaaat

SEQ ID NO: 55167 - RNA, 19 nt, synthetic construct
  misc_feature 1..19: note = siRNA antisense sequence
  source 1..19: mol_type = other RNA
attttactttactggcacc

SEQ ID NO: 55168 - RNA, 19 nt, synthetic construct
  misc_feature 1..19: note = siRNA sense sequence
  source 1..19: mol_type = other RNA
gtgccagtaaagtaaaatc

SEQ ID NO: 55169 - RNA, 19 nt, synthetic construct
  misc_feature 1..19: note = siRNA antisense sequence
  source 1..19: mol_type = other RNA
gattttactttactggcac

SEQ ID NO: 55170 - RNA, 19 nt, synthetic construct
  misc_feature 1..19: note = siRNA sense sequence
  source 1..19: mol_type = other RNA
tgccagtaaagtaaaatca

SEQ ID NO: 55171 - RNA, 19 nt, synthetic construct
  misc_feature 1..19: note = siRNA antisense sequence
  source 1..19: mol_type = other RNA
tgattttactttactggca

SEQ ID NO: 55172 - RNA, 19 nt, synthetic construct
  misc_feature 1..19: note = siRNA sense sequence
  source 1..19: mol_type = other RNA
gccagtaaagtaaaatcaa

SEQ ID NO: 55173 - RNA, 19 nt, synthetic construct
  misc_feature 1..19: note = siRNA antisense sequence
  source 1..19: mol_type = other RNA
ttgattttactttactggc

SEQ ID NO: 55174 - RNA, 19 nt, synthetic construct
  misc_feature 1..19: note = siRNA sense sequence
  source 1..19: mol_type = other RNA
aataggtaaagtcaatgag

SEQ ID NO: 55175 - RNA, 19 nt, synthetic construct
  misc_feature 1..19: note = siRNA antisense sequence
  source 1..19: mol_type = other RNA
ctcattgactttacctatt

SEQ ID NO: 55176 - RNA, 19 nt, synthetic construct
  misc_feature 1..19: note = siRNA sense sequence
  source 1..19: mol_type = other RNA
ataggtaaagtcaatgagt

SEQ ID NO: 55177 - RNA, 19 nt, synthetic construct
  misc_feature 1..19: note = siRNA antisense sequence
  source 1..19: mol_type = other RNA
actcattgactttacctat

SEQ ID NO: 55178 - RNA, 19 nt, synthetic construct
  misc_feature 1..19: note = siRNA sense sequence
  source 1..19: mol_type = other RNA
taggtaaagtcaatgagta

SEQ ID NO: 55179 - RNA, 19 nt, synthetic construct
  misc_feature 1..19: note = siRNA antisense sequence
  source 1..19: mol_type = other RNA
tactcattgactttaccta

SEQ ID NO: 55180 - RNA, 19 nt, synthetic construct
  misc_feature 1..19: note = siRNA sense sequence
  source 1..19: mol_type = other RNA
tgagtaaagctgctgggca

SEQ ID NO: 55181 - RNA, 19 nt, synthetic construct
  misc_feature 1..19: note = siRNA antisense sequence
  source 1..19: mol_type = other RNA
tgcccagcagctttactca

SEQ ID NO: 55182 - RNA, 19 nt, synthetic construct
  misc_feature 1..19: note = siRNA sense sequence
  source 1..19: mol_type = other RNA
gagtaaagctgctgggcaa

SEQ ID NO: 55183 - RNA, 19 nt, synthetic construct
  misc_feature 1..19: note = siRNA antisense sequence
  source 1..19: mol_type = other RNA
ttgcccagcagctttactc

SEQ ID NO: 55184 - RNA, 19 nt, synthetic construct
  misc_feature 1..19: note = siRNA sense sequence
  source 1..19: mol_type = other RNA
agtaaagctgctgggcaaa

SEQ ID NO: 55185 - RNA, 19 nt, synthetic construct
  misc_feature 1..19: note = siRNA antisense sequence
  source 1..19: mol_type = other RNA
tttgcccagcagctttact

SEQ ID NO: 55186 - RNA, 19 nt, synthetic construct
  misc_feature 1..19: note = siRNA sense sequence
  source 1..19: mol_type = other RNA
gtaaagctgctgggcaaaa

SEQ ID NO: 55187 - RNA, 19 nt, synthetic construct
  misc_feature 1..19: note = siRNA antisense sequence
  source 1..19: mol_type = other RNA
ttttgcccagcagctttac

SEQ ID NO: 55188 - RNA, 19 nt, synthetic construct
  misc_feature 1..19: note = siRNA sense sequence
  source 1..19: mol_type = other RNA
atggccctgggcagcttgt

SEQ ID NO: 55189 - RNA, 19 nt, synthetic construct
  misc_feature 1..19: note = siRNA antisense sequence
  source 1..19: mol_type = other RNA
acaagctgcccagggccat

SEQ ID NO: 55190 - RNA, 19 nt, synthetic construct
  misc_feature 1..19: note = siRNA sense sequence
  source 1..19: mol_type = other RNA
ttgtgagcttccactgagc

SEQ ID NO: 55191 - RNA, 19 nt, synthetic construct
  misc_feature 1..19: note = siRNA antisense sequence
  source 1..19: mol_type = other RNA
gctcagtggaagctcacaa

SEQ ID NO: 55192 - RNA, 19 nt, synthetic construct
  misc_feature 1..19: note = siRNA sense sequence
  source 1..19: mol_type = other RNA
ctgagctccagttgacggt

SEQ ID NO: 55193 - RNA, 19 nt, synthetic construct
  misc_feature 1..19: note = siRNA antisense sequence
  source 1..19: mol_type = other RNA
accgtcaactggagctcag

SEQ ID NO: 55194 - RNA, 19 nt, synthetic construct
  misc_feature 1..19: note = siRNA sense sequence
  source 1..19: mol_type = other RNA
gctccagttgacggttgcc

SEQ ID NO: 55195 - RNA, 19 nt, synthetic construct
  misc_feature 1..19: note = siRNA antisense sequence
  source 1..19: mol_type = other RNA
ggcaaccgtcaactggagc

SEQ ID NO: 55196 - RNA, 19 nt, synthetic construct
  misc_feature 1..19: note = siRNA sense sequence
  source 1..19: mol_type = other RNA
ctccagttgacggttgcca

SEQ ID NO: 55197 - RNA, 19 nt, synthetic construct
  misc_feature 1..19: note = siRNA antisense sequence
  source 1..19: mol_type = other RNA
tggcaaccgtcaactggag

SEQ ID NO: 55198 - RNA, 19 nt, synthetic construct
  misc_feature 1..19: note = siRNA sense sequence
  source 1..19: mol_type = other RNA
agttgacggttgccatgtg

SEQ ID NO: 55199 - RNA, 19 nt, synthetic construct
  misc_feature 1..19: note = siRNA antisense sequence
  source 1..19: mol_type = other RNA
cacatggcaaccgtcaact

SEQ ID NO: 55200 - RNA, 19 nt, synthetic construct
  misc_feature 1..19: note = siRNA sense sequence
  source 1..19: mol_type = other RNA
gttgacggttgccatgtgg

SEQ ID NO: 55201 - RNA, 19 nt, synthetic construct
  misc_feature 1..19: note = siRNA antisense sequence
  source 1..19: mol_type = other RNA
ccacatggcaaccgtcaac

SEQ ID NO: 55202 - RNA, 19 nt, synthetic construct
  misc_feature 1..19: note = siRNA sense sequence
  source 1..19: mol_type = other RNA
ttgacggttgccatgtggg

SEQ ID NO: 55203 - RNA, 19 nt, synthetic construct
  misc_feature 1..19: note = siRNA antisense sequence
  source 1..19: mol_type = other RNA
cccacatggcaaccgtcaa

SEQ ID NO: 55204 - RNA, 19 nt, synthetic construct
  misc_feature 1..19: note = siRNA sense sequence
  source 1..19: mol_type = other RNA
aaagcccagagttgcaaga

SEQ ID NO: 55205 - RNA, 19 nt, synthetic construct
  misc_feature 1..19: note = siRNA antisense sequence
  source 1..19: mol_type = other RNA
tcttgcaactctgggcttt

SEQ ID NO: 55206 - RNA, 19 nt, synthetic construct
  misc_feature 1..19: note = siRNA sense sequence
  source 1..19: mol_type = other RNA
aagcccagagttgcaagat

SEQ ID NO: 55207 - RNA, 19 nt, synthetic construct
  misc_feature 1..19: note = siRNA antisense sequence
  source 1..19: mol_type = other RNA
atcttgcaactctgggctt

SEQ ID NO: 55208 - RNA, 19 nt, synthetic construct
  misc_feature 1..19: note = siRNA sense sequence
  source 1..19: mol_type = other RNA
agcccagagttgcaagatc

SEQ ID NO: 55209 - RNA, 19 nt, synthetic construct
  misc_feature 1..19: note = siRNA antisense sequence
  source 1..19: mol_type = other RNA
gatcttgcaactctgggct

SEQ ID NO: 55210 - RNA, 19 nt, synthetic construct
  misc_feature 1..19: note = siRNA sense sequence
  source 1..19: mol_type = other RNA
gcccagagttgcaagatct

SEQ ID NO: 55211 - RNA, 19 nt, synthetic construct
  misc_feature 1..19: note = siRNA antisense sequence
  source 1..19: mol_type = other RNA
agatcttgcaactctgggc

SEQ ID NO: 55212 - RNA, 19 nt, synthetic construct
  misc_feature 1..19: note = siRNA sense sequence
  source 1..19: mol_type = other RNA
cccagagttgcaagatctt

SEQ ID NO: 55213 - RNA, 19 nt, synthetic construct
  misc_feature 1..19: note = siRNA antisense sequence
  source 1..19: mol_type = other RNA
aagatcttgcaactctggg

SEQ ID NO: 55214 - RNA, 19 nt, synthetic construct
  misc_feature 1..19: note = siRNA sense sequence
  source 1..19: mol_type = other RNA
ccagagttgcaagatcttc

SEQ ID NO: 55215 - RNA, 19 nt, synthetic construct
  misc_feature 1..19: note = siRNA antisense sequence
  source 1..19: mol_type = other RNA
gaagatcttgcaactctgg

SEQ ID NO: 55216 - RNA, 19 nt, synthetic construct
  misc_feature 1..19: note = siRNA sense sequence
  source 1..19: mol_type = other RNA
cagagttgcaagatcttct

SEQ ID NO: 55217 - RNA, 19 nt, synthetic construct
  misc_feature 1..19: note = siRNA antisense sequence
  source 1..19: mol_type = other RNA
agaagatcttgcaactctg

SEQ ID NO: 55218 - RNA, 19 nt, synthetic construct
  misc_feature 1..19: note = siRNA sense sequence
  source 1..19: mol_type = other RNA
agagttgcaagatcttcta

SEQ ID NO: 55219 - RNA, 19 nt, synthetic construct
  misc_feature 1..19: note = siRNA antisense sequence
  source 1..19: mol_type = other RNA
tagaagatcttgcaactct

SEQ ID NO: 55220 - RNA, 19 nt, synthetic construct
  misc_feature 1..19: note = siRNA sense sequence
  source 1..19: mol_type = other RNA
gagttgcaagatcttctat

SEQ ID NO: 55221 - RNA, 19 nt, synthetic construct
  misc_feature 1..19: note = siRNA antisense sequence
  source 1..19: mol_type = other RNA
atagaagatcttgcaactc

SEQ ID NO: 55222 - RNA, 19 nt, synthetic construct
  misc_feature 1..19: note = siRNA sense sequence
  source 1..19: mol_type = other RNA
agttgcaagatcttctatt

SEQ ID NO: 55223 - RNA, 19 nt, synthetic construct
  misc_feature 1..19: note = siRNA antisense sequence
  source 1..19: mol_type = other RNA
aatagaagatcttgcaact

SEQ ID NO: 55224 - RNA, 19 nt, synthetic construct
  misc_feature 1..19: note = siRNA sense sequence
  source 1..19: mol_type = other RNA
aacctctcaaggccctcaa

SEQ ID NO: 55225 - RNA, 19 nt, synthetic construct
  misc_feature 1..19: note = siRNA antisense sequence
  source 1..19: mol_type = other RNA
ttgagggccttgagaggtt

SEQ ID NO: 55226 - RNA, 19 nt, synthetic construct
  misc_feature 1..19: note = siRNA sense sequence
  source 1..19: mol_type = other RNA
acctctcaaggccctcaaa

SEQ ID NO: 55227 - RNA, 19 nt, synthetic construct
  misc_feature 1..19: note = siRNA antisense sequence
  source 1..19: mol_type = other RNA
tttgagggccttgagaggt

SEQ ID NO: 55228 - RNA, 19 nt, synthetic construct
  misc_feature 1..19: note = siRNA sense sequence
  source 1..19: mol_type = other RNA
cctctcaaggccctcaaaa

SEQ ID NO: 55229 - RNA, 19 nt, synthetic construct
  misc_feature 1..19: note = siRNA antisense sequence
  source 1..19: mol_type = other RNA
ttttgagggccttgagagg

SEQ ID NO: 55230 - RNA, 19 nt, synthetic construct
  misc_feature 1..19: note = siRNA sense sequence
  source 1..19: mol_type = other RNA
ctctcaaggccctcaaaag

SEQ ID NO: 55231 - RNA, 19 nt, synthetic construct
  misc_feature 1..19: note = siRNA antisense sequence
  source 1..19: mol_type = other RNA
cttttgagggccttgagag

SEQ ID NO: 55232 - RNA, 19 nt, synthetic construct
  misc_feature 1..19: note = siRNA sense sequence
  source 1..19: mol_type = other RNA
ctcaaggccctcaaaagcc

SEQ ID NO: 55233 - RNA, 19 nt, synthetic construct
  misc_feature 1..19: note = siRNA antisense sequence
  source 1..19: mol_type = other RNA
ggcttttgagggccttgag

SEQ ID NO: 55234 - RNA, 19 nt, synthetic construct
  misc_feature 1..19: note = siRNA sense sequence
  source 1..19: mol_type = other RNA
aaaagtgcattcaaaagtc

SEQ ID NO: 55235 - RNA, 19 nt, synthetic construct
  misc_feature 1..19: note = siRNA antisense sequence
  source 1..19: mol_type = other RNA
gacttttgaatgcactttt

SEQ ID NO: 55236 - RNA, 19 nt, synthetic construct
  misc_feature 1..19: note = siRNA sense sequence
  source 1..19: mol_type = other RNA
aaagtgcattcaaaagtca

SEQ ID NO: 55237 - RNA, 19 nt, synthetic construct
  misc_feature 1..19: note = siRNA antisense sequence
  source 1..19: mol_type = other RNA
tgacttttgaatgcacttt

SEQ ID NO: 55238 - RNA, 19 nt, synthetic construct
  misc_feature 1..19: note = siRNA sense sequence
  source 1..19: mol_type = other RNA
tgcattcaaaagtcagtgt

SEQ ID NO: 55239 - RNA, 19 nt, synthetic construct
  misc_feature 1..19: note = siRNA antisense sequence
  source 1..19: mol_type = other RNA
acactgacttttgaatgca

SEQ ID NO: 55240 - RNA, 19 nt, synthetic construct
  misc_feature 1..19: note = siRNA sense sequence
  source 1..19: mol_type = other RNA
gcattcaaaagtcagtgtc

SEQ ID NO: 55241 - RNA, 19 nt, synthetic construct
  misc_feature 1..19: note = siRNA antisense sequence
  source 1..19: mol_type = other RNA
gacactgacttttgaatgc

SEQ ID NO: 55242 - RNA, 19 nt, synthetic construct
  misc_feature 1..19: note = siRNA sense sequence
  source 1..19: mol_type = other RNA
cattcaaaagtcagtgtct

SEQ ID NO: 55243 - RNA, 19 nt, synthetic construct
  misc_feature 1..19: note = siRNA antisense sequence
  source 1..19: mol_type = other RNA
agacactgacttttgaatg

SEQ ID NO: 55244 - RNA, 19 nt, synthetic construct
  misc_feature 1..19: note = siRNA sense sequence
  source 1..19: mol_type = other RNA
aagtcagtgtcttttgccc

SEQ ID NO: 55245 - RNA, 19 nt, synthetic construct
  misc_feature 1..19: note = siRNA antisense sequence
  source 1..19: mol_type = other RNA
gggcaaaagacactgactt

SEQ ID NO: 55246 - RNA, 19 nt, synthetic construct
  misc_feature 1..19: note = siRNA sense sequence
  source 1..19: mol_type = other RNA
agtcagtgtcttttgccca

SEQ ID NO: 55247 - RNA, 19 nt, synthetic construct
  misc_feature 1..19: note = siRNA antisense sequence
  source 1..19: mol_type = other RNA
tgggcaaaagacactgact

SEQ ID NO: 55248 - RNA, 19 nt, synthetic construct
  misc_feature 1..19: note = siRNA sense sequence
  source 1..19: mol_type = other RNA
gtcagtgtcttttgcccac

SEQ ID NO: 55249 - RNA, 19 nt, synthetic construct
  misc_feature 1..19: note = siRNA antisense sequence
  source 1..19: mol_type = other RNA
gtgggcaaaagacactgac

SEQ ID NO: 55250 - RNA, 19 nt, synthetic construct
  misc_feature 1..19: note = siRNA sense sequence
  source 1..19: mol_type = other RNA
agaagcaatgtctaggact

SEQ ID NO: 55251 - RNA, 19 nt, synthetic construct
  misc_feature 1..19: note = siRNA antisense sequence
  source 1..19: mol_type = other RNA
agtcctagacattgcttct

SEQ ID NO: 55252 - RNA, 19 nt, synthetic construct
  misc_feature 1..19: note = siRNA sense sequence
  source 1..19: mol_type = other RNA
aggaagacagaatgatgtt

SEQ ID NO: 55253 - RNA, 19 nt, synthetic construct
  misc_feature 1..19: note = siRNA antisense sequence
  source 1..19: mol_type = other RNA
aacatcattctgtcttcct

SEQ ID NO: 55254 - RNA, 19 nt, synthetic construct
  misc_feature 1..19: note = siRNA sense sequence
  source 1..19: mol_type = other RNA
ggaagacagaatgatgttt

SEQ ID NO: 55255 - RNA, 19 nt, synthetic construct
  misc_feature 1..19: note = siRNA antisense sequence
  source 1..19: mol_type = other RNA
aaacatcattctgtcttcc

SEQ ID NO: 55256 - RNA, 19 nt, synthetic construct
  misc_feature 1..19: note = siRNA sense sequence
  source 1..19: mol_type = other RNA
gaagacagaatgatgtttg

SEQ ID NO: 55257 - RNA, 19 nt, synthetic construct
  misc_feature 1..19: note = siRNA antisense sequence
  source 1..19: mol_type = other RNA
caaacatcattctgtcttc

SEQ ID NO: 55258 - RNA, 19 nt, synthetic construct
  misc_feature 1..19: note = siRNA sense sequence
  source 1..19: mol_type = other RNA
aagacagaatgatgtttgc

SEQ ID NO: 55259 - RNA, 19 nt, synthetic construct
  misc_feature 1..19: note = siRNA antisense sequence
  source 1..19: mol_type = other RNA
gcaaacatcattctgtctt

SEQ ID NO: 55260 - RNA, 19 nt, synthetic construct
  misc_feature 1..19: note = siRNA sense sequence
  source 1..19: mol_type = other RNA
agacagaatgatgtttgca

SEQ ID NO: 55261 - RNA, 19 nt, synthetic construct
  misc_feature 1..19: note = siRNA antisense sequence
  source 1..19: mol_type = other RNA
tgcaaacatcattctgtct

SEQ ID NO: 55262 - RNA, 19 nt, synthetic construct
  misc_feature 1..19: note = siRNA sense sequence
  source 1..19: mol_type = other RNA
gacagaatgatgtttgcaa

SEQ ID NO: 55263 - RNA, 19 nt, synthetic construct
  misc_feature 1..19: note = siRNA antisense sequence
  source 1..19: mol_type = other RNA
ttgcaaacatcattctgtc

SEQ ID NO: 55264 - RNA, 19 nt, synthetic construct
  misc_feature 1..19: note = siRNA sense sequence
  source 1..19: mol_type = other RNA
gaatgatgtttgcaattgc

SEQ ID NO: 55265 - RNA, 19 nt, synthetic construct
  misc_feature 1..19: note = siRNA antisense sequence
  source 1..19: mol_type = other RNA
gcaattgcaaacatcattc

SEQ ID NO: 55266 - RNA, 19 nt, synthetic construct
  misc_feature 1..19: note = siRNA sense sequence
  source 1..19: mol_type = other RNA
aatgatgtttgcaattgcc

SEQ ID NO: 55267 - RNA, 19 nt, synthetic construct
  misc_feature 1..19: note = siRNA antisense sequence
  source 1..19: mol_type = other RNA
ggcaattgcaaacatcatt

SEQ ID NO: 55268 - RNA, 19 nt, synthetic construct
  misc_feature 1..19: note = siRNA sense sequence
  source 1..19: mol_type = other RNA
atgatgtttgcaattgcct

SEQ ID NO: 55269 - RNA, 19 nt, synthetic construct
  misc_feature 1..19: note = siRNA antisense sequence
  source 1..19: mol_type = other RNA
aggcaattgcaaacatcat

SEQ ID NO: 55270 - RNA, 19 nt, synthetic construct
  misc_feature 1..19: note = siRNA sense sequence
  source 1..19: mol_type = other RNA
tgtttgcaattgccttagt

SEQ ID NO: 55271 - RNA, 19 nt, synthetic construct
  misc_feature 1..19: note = siRNA antisense sequence
  source 1..19: mol_type = other RNA
actaaggcaattgcaaaca

SEQ ID NO: 55272 - RNA, 19 nt, synthetic construct
  misc_feature 1..19: note = siRNA sense sequence
  source 1..19: mol_type = other RNA
gtttgcaattgccttagta

SEQ ID NO: 55273 - RNA, 19 nt, synthetic construct
  misc_feature 1..19: note = siRNA antisense sequence
  source 1..19: mol_type = other RNA
tactaaggcaattgcaaac

SEQ ID NO: 55274 - RNA, 19 nt, synthetic construct
  misc_feature 1..19: note = siRNA sense sequence
  source 1..19: mol_type = other RNA
tttgcaattgccttagtag

SEQ ID NO: 55275 - RNA, 19 nt, synthetic construct
  misc_feature 1..19: note = siRNA antisense sequence
  source 1..19: mol_type = other RNA
ctactaaggcaattgcaaa

SEQ ID NO: 55276 - RNA, 19 nt, synthetic construct
  misc_feature 1..19: note = siRNA sense sequence
  source 1..19: mol_type = other RNA
ttgcaattgccttagtaga

SEQ ID NO: 55277 - RNA, 19 nt, synthetic construct
  misc_feature 1..19: note = siRNA antisense sequence
  source 1..19: mol_type = other RNA
tctactaaggcaattgcaa

SEQ ID NO: 55278 - RNA, 19 nt, synthetic construct
  misc_feature 1..19: note = siRNA sense sequence
  source 1..19: mol_type = other RNA
tgcaattgccttagtagaa

SEQ ID NO: 55279 - RNA, 19 nt, synthetic construct
  misc_feature 1..19: note = siRNA antisense sequence
  source 1..19: mol_type = other RNA
ttctactaaggcaattgca

SEQ ID NO: 55280 - RNA, 19 nt, synthetic construct
  misc_feature 1..19: note = siRNA sense sequence
  source 1..19: mol_type = other RNA
ttttaagaaggattggtca

SEQ ID NO: 55281 - RNA, 19 nt, synthetic construct
  misc_feature 1..19: note = siRNA antisense sequence
  source 1..19: mol_type = other RNA
tgaccaatccttcttaaaa

SEQ ID NO: 55282 - RNA, 19 nt, synthetic construct
  misc_feature 1..19: note = siRNA sense sequence
  source 1..19: mol_type = other RNA
tttaagaaggattggtcat

SEQ ID NO: 55283 - RNA, 19 nt, synthetic construct
  misc_feature 1..19: note = siRNA antisense sequence
  source 1..19: mol_type = other RNA
atgaccaatccttcttaaa

SEQ ID NO: 55284 - RNA, 19 nt, synthetic construct
  misc_feature 1..19: note = siRNA sense sequence
  source 1..19: mol_type = other RNA
ttaagaaggattggtcatc

SEQ ID NO: 55285 - RNA, 19 nt, synthetic construct
  misc_feature 1..19: note = siRNA antisense sequence
  source 1..19: mol_type = other RNA
gatgaccaatccttcttaa

SEQ ID NO: 55286 - RNA, 19 nt, synthetic construct
  misc_feature 1..19: note = siRNA sense sequence
  source 1..19: mol_type = other RNA
taagaaggattggtcatct

SEQ ID NO: 55287 - RNA, 19 nt, synthetic construct
  misc_feature 1..19: note = siRNA antisense sequence
  source 1..19: mol_type = other RNA
agatgaccaatccttctta

SEQ ID NO: 55288 - RNA, 19 nt, synthetic construct
  misc_feature 1..19: note = siRNA sense sequence
  source 1..19: mol_type = other RNA
agaaggattggtcatctag

SEQ ID NO: 55289 - RNA, 19 nt, synthetic construct
  misc_feature 1..19: note = siRNA antisense sequence
  source 1..19: mol_type = other RNA
ctagatgaccaatccttct

SEQ ID NO: 55290 - RNA, 19 nt, synthetic construct
  misc_feature 1..19: note = siRNA sense sequence
  source 1..19: mol_type = other RNA
gaaggattggtcatctagg

SEQ ID NO: 55291 - RNA, 19 nt, synthetic construct
  misc_feature 1..19: note = siRNA antisense sequence
  source 1..19: mol_type = other RNA
cctagatgaccaatccttc

SEQ ID NO: 55292 - RNA, 19 nt, synthetic construct
  misc_feature 1..19: note = siRNA sense sequence
  source 1..19: mol_type = other RNA
aaggattggtcatctaggg

SEQ ID NO: 55293 - RNA, 19 nt, synthetic construct
  misc_feature 1..19: note = siRNA antisense sequence
  source 1..19: mol_type = other RNA
ccctagatgaccaatcctt

SEQ ID NO: 55294 - RNA, 19 nt, synthetic construct
  misc_feature 1..19: note = siRNA sense sequence
  source 1..19: mol_type = other RNA
aggattggtcatctagggt

SEQ ID NO: 55295 - RNA, 19 nt, synthetic construct
  misc_feature 1..19: note = siRNA antisense sequence
  source 1..19: mol_type = other RNA
accctagatgaccaatcct

SEQ ID NO: 55296 - RNA, 19 nt, synthetic construct
  misc_feature 1..19: note = siRNA sense sequence
  source 1..19: mol_type = other RNA
ggattggtcatctagggta

SEQ ID NO: 55297 - RNA, 19 nt, synthetic construct
  misc_feature 1..19: note = siRNA antisense sequence
  source 1..19: mol_type = other RNA
taccctagatgaccaatcc

SEQ ID NO: 55298 - RNA, 19 nt, synthetic construct
  misc_feature 1..19: note = siRNA sense sequence
  source 1..19: mol_type = other RNA
gattggtcatctagggtaa

SEQ ID NO: 55299 - RNA, 19 nt, synthetic construct
  misc_feature 1..19: note = siRNA antisense sequence
  source 1..19: mol_type = other RNA
ttaccctagatgaccaatc

SEQ ID NO: 55300 - RNA, 19 nt, synthetic construct
  misc_feature 1..19: note = siRNA sense sequence
  source 1..19: mol_type = other RNA
attggtcatctagggtaag

SEQ ID NO: 55301 - RNA, 19 nt, synthetic construct
  misc_feature 1..19: note = siRNA antisense sequence
  source 1..19: mol_type = other RNA
cttaccctagatgaccaat

SEQ ID NO: 55302 - RNA, 19 nt, synthetic construct
  misc_feature 1..19: note = siRNA sense sequence
  source 1..19: mol_type = other RNA
ttggtcatctagggtaaga

SEQ ID NO: 55303 - RNA, 19 nt, synthetic construct
  misc_feature 1..19: note = siRNA antisense sequence
  source 1..19: mol_type = other RNA
tcttaccctagatgaccaa

SEQ ID NO: 55304 - RNA, 19 nt, synthetic construct
  misc_feature 1..19: note = siRNA sense sequence
  source 1..19: mol_type = other RNA
tggtcatctagggtaagag

SEQ ID NO: 55305 - RNA, 19 nt, synthetic construct
  misc_feature 1..19: note = siRNA antisense sequence
  source 1..19: mol_type = other RNA
ctcttaccctagatgacca

SEQ ID NO: 55306 - RNA, 19 nt, synthetic construct
  misc_feature 1..19: note = siRNA sense sequence
  source 1..19: mol_type = other RNA
aaaaggctacaggtctgag

SEQ ID NO: 55307 - RNA, 19 nt, synthetic construct
  misc_feature 1..19: note = siRNA antisense sequence
  source 1..19: mol_type = other RNA
ctcagacctgtagcctttt

SEQ ID NO: 55308 - RNA, 19 nt, synthetic construct
  misc_feature 1..19: note = siRNA sense sequence
  source 1..19: mol_type = other RNA
aaaggctacaggtctgagc

SEQ ID NO: 55309 - RNA, 19 nt, synthetic construct
  misc_feature 1..19: note = siRNA antisense sequence
  source 1..19: mol_type = other RNA
gctcagacctgtagccttt

SEQ ID NO: 55310 - RNA, 19 nt, synthetic construct
  misc_feature 1..19: note = siRNA sense sequence
  source 1..19: mol_type = other RNA
aaggctacaggtctgagct

SEQ ID NO: 55311 - RNA, 19 nt, synthetic construct
  misc_feature 1..19: note = siRNA antisense sequence
  source 1..19: mol_type = other RNA
agctcagacctgtagcctt

SEQ ID NO: 55312 - RNA, 19 nt, synthetic construct
  misc_feature 1..19: note = siRNA sense sequence
  source 1..19: mol_type = other RNA
acaggtctgagctttagaa

SEQ ID NO: 55313 - RNA, 19 nt, synthetic construct
  misc_feature 1..19: note = siRNA antisense sequence
  source 1..19: mol_type = other RNA
ttctaaagctcagacctgt

SEQ ID NO: 55314 - RNA, 19 nt, synthetic construct
  misc_feature 1..19: note = siRNA sense sequence
  source 1..19: mol_type = other RNA
caggtctgagctttagaag

SEQ ID NO: 55315 - RNA, 19 nt, synthetic construct
  misc_feature 1..19: note = siRNA antisense sequence
  source 1..19: mol_type = other RNA
cttctaaagctcagacctg

SEQ ID NO: 55316 - RNA, 19 nt, synthetic construct
  misc_feature 1..19: note = siRNA sense sequence
  source 1..19: mol_type = other RNA
aggtctgagctttagaaga

SEQ ID NO: 55317 - RNA, 19 nt, synthetic construct
  misc_feature 1..19: note = siRNA antisense sequence
  source 1..19: mol_type = other RNA
tcttctaaagctcagacct

SEQ ID NO: 55318 - RNA, 19 nt, synthetic construct
  misc_feature 1..19: note = siRNA sense sequence
  source 1..19: mol_type = other RNA
ggtctgagctttagaagag

SEQ ID NO: 55319 - RNA, 19 nt, synthetic construct
  misc_feature 1..19: note = siRNA antisense sequence
  source 1..19: mol_type = other RNA
ctcttctaaagctcagacc

SEQ ID NO: 55320 - RNA, 19 nt, synthetic construct
  misc_feature 1..19: note = siRNA sense sequence
  source 1..19: mol_type = other RNA
gtctgagctttagaagagg

SEQ ID NO: 55321 - RNA, 19 nt, synthetic construct
  misc_feature 1..19: note = siRNA antisense sequence
  source 1..19: mol_type = other RNA
cctcttctaaagctcagac

SEQ ID NO: 55322 - RNA, 19 nt, synthetic construct
  misc_feature 1..19: note = siRNA sense sequence
  source 1..19: mol_type = other RNA
tctgagctttagaagaggc

SEQ ID NO: 55323 - RNA, 19 nt, synthetic construct
  misc_feature 1..19: note = siRNA antisense sequence
  source 1..19: mol_type = other RNA
gcctcttctaaagctcaga

SEQ ID NO: 55324 - RNA, 19 nt, synthetic construct
  misc_feature 1..19: note = siRNA sense sequence
  source 1..19: mol_type = other RNA
ctgagctttagaagaggcc

SEQ ID NO: 55325 - RNA, 19 nt, synthetic construct
  misc_feature 1..19: note = siRNA antisense sequence
  source 1..19: mol_type = other RNA
ggcctcttctaaagctcag

SEQ ID NO: 55326 - RNA, 19 nt, synthetic construct
  misc_feature 1..19: note = siRNA sense sequence
  source 1..19: mol_type = other RNA
tgagctttagaagaggcca

SEQ ID NO: 55327 - RNA, 19 nt, synthetic construct
  misc_feature 1..19: note = siRNA antisense sequence
  source 1..19: mol_type = other RNA
tggcctcttctaaagctca

SEQ ID NO: 55328 - RNA, 19 nt, synthetic construct
  misc_feature 1..19: note = siRNA sense sequence
  source 1..19: mol_type = other RNA
gagctttagaagaggccaa

SEQ ID NO: 55329 - RNA, 19 nt, synthetic construct
  misc_feature 1..19: note = siRNA antisense sequence
  source 1..19: mol_type = other RNA
ttggcctcttctaaagctc

SEQ ID NO: 55330 - RNA, 19 nt, synthetic construct
  misc_feature 1..19: note = siRNA sense sequence
  source 1..19: mol_type = other RNA
agctttagaagaggccaaa

SEQ ID NO: 55331 - RNA, 19 nt, synthetic construct
  misc_feature 1..19: note = siRNA antisense sequence
  source 1..19: mol_type = other RNA
tttggcctcttctaaagct

SEQ ID NO: 55332 - RNA, 19 nt, synthetic construct
  misc_feature 1..19: note = siRNA sense sequence
  source 1..19: mol_type = other RNA
gctttagaagaggccaaaa

SEQ ID NO: 55333 - RNA, 19 nt, synthetic construct
  misc_feature 1..19: note = siRNA antisense sequence
  source 1..19: mol_type = other RNA
ttttggcctcttctaaagc

SEQ ID NO: 55334 - RNA, 19 nt, synthetic construct
  misc_feature 1..19: note = siRNA sense sequence
  source 1..19: mol_type = other RNA
ctttagaagaggccaaaat

SEQ ID NO: 55335 - RNA, 19 nt, synthetic construct
  misc_feature 1..19: note = siRNA antisense sequence
  source 1..19: mol_type = other RNA
attttggcctcttctaaag

SEQ ID NO: 55336 - RNA, 19 nt, synthetic construct
  misc_feature 1..19: note = siRNA sense sequence
  source 1..19: mol_type = other RNA
tttagaagaggccaaaatt

SEQ ID NO: 55337 - RNA, 19 nt, synthetic construct
  misc_feature 1..19: note = siRNA antisense sequence
  source 1..19: mol_type = other RNA
aattttggcctcttctaaa

SEQ ID NO: 55338 - RNA, 19 nt, synthetic construct
  misc_feature 1..19: note = siRNA sense sequence
  source 1..19: mol_type = other RNA
ttagaagaggccaaaattc

SEQ ID NO: 55339 - RNA, 19 nt, synthetic construct
  misc_feature 1..19: note = siRNA antisense sequence
  source 1..19: mol_type = other RNA
gaattttggcctcttctaa

SEQ ID NO: 55340 - RNA, 19 nt, synthetic construct
  misc_feature 1..19: note = siRNA sense sequence
  source 1..19: mol_type = other RNA
tagaagaggccaaaattca

SEQ ID NO: 55341 - RNA, 19 nt, synthetic construct
  misc_feature 1..19: note = siRNA antisense sequence
  source 1..19: mol_type = other RNA
tgaattttggcctcttcta

SEQ ID NO: 55342 - RNA, 19 nt, synthetic construct
  misc_feature 1..19: note = siRNA sense sequence
  source 1..19: mol_type = other RNA
agaagaggccaaaattcag

SEQ ID NO: 55343 - RNA, 19 nt, synthetic construct
  misc_feature 1..19: note = siRNA antisense sequence
  source 1..19: mol_type = other RNA
ctgaattttggcctcttct

SEQ ID NO: 55344 - RNA, 19 nt, synthetic construct
  misc_feature 1..19: note = siRNA sense sequence
  source 1..19: mol_type = other RNA
gaagaggccaaaattcaga

SEQ ID NO: 55345 - RNA, 19 nt, synthetic construct
  misc_feature 1..19: note = siRNA antisense sequence
  source 1..19: mol_type = other RNA
tctgaattttggcctcttc

SEQ ID NO: 55346 - RNA, 19 nt, synthetic construct
  misc_feature 1..19: note = siRNA sense sequence
  source 1..19: mol_type = other RNA
gaagaagccagtaaatatg

SEQ ID NO: 55347 - RNA, 19 nt, synthetic construct
  misc_feature 1..19: note = siRNA antisense sequence
  source 1..19: mol_type = other RNA
catatttactggcttcttc

SEQ ID NO: 55348 - RNA, 19 nt, synthetic construct
  misc_feature 1..19: note = siRNA sense sequence
  source 1..19: mol_type = other RNA
aagaagccagtaaatatga

SEQ ID NO: 55349 - RNA, 19 nt, synthetic construct
  misc_feature 1..19: note = siRNA antisense sequence
  source 1..19: mol_type = other RNA
tcatatttactggcttctt

SEQ ID NO: 55350 - RNA, 19 nt, synthetic construct
  misc_feature 1..19: note = siRNA sense sequence
  source 1..19: mol_type = other RNA
agaagccagtaaatatgaa

SEQ ID NO: 55351 - RNA, 19 nt, synthetic construct
  misc_feature 1..19: note = siRNA antisense sequence
  source 1..19: mol_type = other RNA
ttcatatttactggcttct

SEQ ID NO: 55352 - RNA, 19 nt, synthetic construct
  misc_feature 1..19: note = siRNA sense sequence
  source 1..19: mol_type = other RNA
agagtaagagtaaaattgc

SEQ ID NO: 55353 - RNA, 19 nt, synthetic construct
  misc_feature 1..19: note = siRNA antisense sequence
  source 1..19: mol_type = other RNA
gcaattttactcttactct

SEQ ID NO: 55354 - RNA, 19 nt, synthetic construct
  misc_feature 1..19: note = siRNA sense sequence
  source 1..19: mol_type = other RNA
gagtaagagtaaaattgca

SEQ ID NO: 55355 - RNA, 19 nt, synthetic construct
  misc_feature 1..19: note = siRNA antisense sequence
  source 1..19: mol_type = other RNA
tgcaattttactcttactc

SEQ ID NO: 55356 - RNA, 19 nt, synthetic construct
  misc_feature 1..19: note = siRNA sense sequence
  source 1..19: mol_type = other RNA
agtaagagtaaaattgcag

SEQ ID NO: 55357 - RNA, 19 nt, synthetic construct
  misc_feature 1..19: note = siRNA antisense sequence
  source 1..19: mol_type = other RNA
ctgcaattttactcttact

SEQ ID NO: 55358 - RNA, 19 nt, synthetic construct
  misc_feature 1..19: note = siRNA sense sequence
  source 1..19: mol_type = other RNA
gtaagagtaaaattgcaga

SEQ ID NO: 55359 - RNA, 19 nt, synthetic construct
  misc_feature 1..19: note = siRNA antisense sequence
  source 1..19: mol_type = other RNA
tctgcaattttactcttac

SEQ ID NO: 55360 - RNA, 19 nt, synthetic construct
  misc_feature 1..19: note = siRNA sense sequence
  source 1..19: mol_type = other RNA
attgcagaagccagtacag

SEQ ID NO: 55361 - RNA, 19 nt, synthetic construct
  misc_feature 1..19: note = siRNA antisense sequence
  source 1..19: mol_type = other RNA
ctgtactggcttctgcaat

SEQ ID NO: 55362 - RNA, 19 nt, synthetic construct
  misc_feature 1..19: note = siRNA sense sequence
  source 1..19: mol_type = other RNA
gataattgttaagagcatc

SEQ ID NO: 55363 - RNA, 19 nt, synthetic construct
  misc_feature 1..19: note = siRNA antisense sequence
  source 1..19: mol_type = other RNA
gatgctcttaacaattatc

SEQ ID NO: 55364 - RNA, 19 nt, synthetic construct
  misc_feature 1..19: note = siRNA sense sequence
  source 1..19: mol_type = other RNA
ccctgcaatccttccatat

SEQ ID NO: 55365 - RNA, 19 nt, synthetic construct
  misc_feature 1..19: note = siRNA antisense sequence
  source 1..19: mol_type = other RNA
atatggaaggattgcaggg

SEQ ID NO: 55366 - RNA, 19 nt, synthetic construct
  misc_feature 1..19: note = siRNA sense sequence
  source 1..19: mol_type = other RNA
cctgcaatccttccatatt

SEQ ID NO: 55367 - RNA, 19 nt, synthetic construct
  misc_feature 1..19: note = siRNA antisense sequence
  source 1..19: mol_type = other RNA
aatatggaaggattgcagg

SEQ ID NO: 55368 - RNA, 19 nt, synthetic construct
  misc_feature 1..19: note = siRNA sense sequence
  source 1..19: mol_type = other RNA
ctgcaatccttccatattt

SEQ ID NO: 55369 - RNA, 19 nt, synthetic construct
  misc_feature 1..19: note = siRNA antisense sequence
  source 1..19: mol_type = other RNA
aaatatggaaggattgcag

SEQ ID NO: 55370 - RNA, 19 nt, synthetic construct
  misc_feature 1..19: note = siRNA sense sequence
  source 1..19: mol_type = other RNA
tgcaatccttccatatttt

SEQ ID NO: 55371 - RNA, 19 nt, synthetic construct
  misc_feature 1..19: note = siRNA antisense sequence
  source 1..19: mol_type = other RNA
aaaatatggaaggattgca

SEQ ID NO: 55372 - RNA, 19 nt, synthetic construct
  misc_feature 1..19: note = siRNA sense sequence
  source 1..19: mol_type = other RNA
ccatagctgctgggataag

SEQ ID NO: 55373 - RNA, 19 nt, synthetic construct
  misc_feature 1..19: note = siRNA antisense sequence
  source 1..19: mol_type = other RNA
cttatcccagcagctatgg

SEQ ID NO: 55374 - RNA, 19 nt, synthetic construct
  misc_feature 1..19: note = siRNA sense sequence
  source 1..19: mol_type = other RNA
catagctgctgggataagg

SEQ ID NO: 55375 - RNA, 19 nt, synthetic construct
  misc_feature 1..19: note = siRNA antisense sequence
  source 1..19: mol_type = other RNA
ccttatcccagcagctatg

SEQ ID NO: 55376 - RNA, 19 nt, synthetic construct
  misc_feature 1..19: note = siRNA sense sequence
  source 1..19: mol_type = other RNA
atagctgctgggataaggc

SEQ ID NO: 55377 - RNA, 19 nt, synthetic construct
  misc_feature 1..19: note = siRNA antisense sequence
  source 1..19: mol_type = other RNA
gccttatcccagcagctat

SEQ ID NO: 55378 - RNA, 19 nt, synthetic construct
  misc_feature 1..19: note = siRNA sense sequence
  source 1..19: mol_type = other RNA
tagctgctgggataaggct

SEQ ID NO: 55379 - RNA, 19 nt, synthetic construct
  misc_feature 1..19: note = siRNA antisense sequence
  source 1..19: mol_type = other RNA
agccttatcccagcagcta

SEQ ID NO: 55380 - RNA, 19 nt, synthetic construct
  misc_feature 1..19: note = siRNA sense sequence
  source 1..19: mol_type = other RNA
agctgctgggataaggctt

SEQ ID NO: 55381 - RNA, 19 nt, synthetic construct
  misc_feature 1..19: note = siRNA antisense sequence
  source 1..19: mol_type = other RNA
aagccttatcccagcagct

SEQ ID NO: 55382 - RNA, 19 nt, synthetic construct
  misc_feature 1..19: note = siRNA sense sequence
  source 1..19: mol_type = other RNA
gctgctgggataaggctta

SEQ ID NO: 55383 - RNA, 19 nt, synthetic construct
  misc_feature 1..19: note = siRNA antisense sequence
  source 1..19: mol_type = other RNA
taagccttatcccagcagc

SEQ ID NO: 55384 - RNA, 19 nt, synthetic construct
  misc_feature 1..19: note = siRNA sense sequence
  source 1..19: mol_type = other RNA
ctgctgggataaggcttaa

SEQ ID NO: 55385 - RNA, 19 nt, synthetic construct
  misc_feature 1..19: note = siRNA antisense sequence
  source 1..19: mol_type = other RNA
ttaagccttatcccagcag

SEQ ID NO: 55386 - RNA, 19 nt, synthetic construct
  misc_feature 1..19: note = siRNA sense sequence
  source 1..19: mol_type = other RNA
tgctgggataaggcttaac

SEQ ID NO: 55387 - RNA, 19 nt, synthetic construct
  misc_feature 1..19: note = siRNA antisense sequence
  source 1..19: mol_type = other RNA
gttaagccttatcccagca

SEQ ID NO: 55388 - RNA, 19 nt, synthetic construct
  misc_feature 1..19: note = siRNA sense sequence
  source 1..19: mol_type = other RNA
gctgggataaggcttaacc

SEQ ID NO: 55389 - RNA, 19 nt, synthetic construct
  misc_feature 1..19: note = siRNA antisense sequence
  source 1..19: mol_type = other RNA
ggttaagccttatcccagc

SEQ ID NO: 55390 - RNA, 19 nt, synthetic construct
  misc_feature 1..19: note = siRNA sense sequence
  source 1..19: mol_type = other RNA
ctgggataaggcttaacca

SEQ ID NO: 55391 - RNA, 19 nt, synthetic construct
  misc_feature 1..19: note = siRNA antisense sequence
  source 1..19: mol_type = other RNA
tggttaagccttatcccag

SEQ ID NO: 55392 - RNA, 19 nt, synthetic construct
  misc_feature 1..19: note = siRNA sense sequence
  source 1..19: mol_type = other RNA
gataaggcttaaccatttc

SEQ ID NO: 55393 - RNA, 19 nt, synthetic construct
  misc_feature 1..19: note = siRNA antisense sequence
  source 1..19: mol_type = other RNA
gaaatggttaagccttatc

SEQ ID NO: 55394 - RNA, 19 nt, synthetic construct
  misc_feature 1..19: note = siRNA sense sequence
  source 1..19: mol_type = other RNA
aggcttaaccatttcattg

SEQ ID NO: 55395 - RNA, 19 nt, synthetic construct
  misc_feature 1..19: note = siRNA antisense sequence
  source 1..19: mol_type = other RNA
caatgaaatggttaagcct

SEQ ID NO: 55396 - RNA, 19 nt, synthetic construct
  misc_feature 1..19: note = siRNA sense sequence
  source 1..19: mol_type = other RNA
ggcttaaccatttcattga

SEQ ID NO: 55397 - RNA, 19 nt, synthetic construct
  misc_feature 1..19: note = siRNA antisense sequence
  source 1..19: mol_type = other RNA
tcaatgaaatggttaagcc

SEQ ID NO: 55398 - RNA, 19 nt, synthetic construct
  misc_feature 1..19: note = siRNA sense sequence
  source 1..19: mol_type = other RNA
gcttaaccatttcattgag

SEQ ID NO: 55399 - RNA, 19 nt, synthetic construct
  misc_feature 1..19: note = siRNA antisense sequence
  source 1..19: mol_type = other RNA
ctcaatgaaatggttaagc

SEQ ID NO: 55400 - RNA, 19 nt, synthetic construct
  misc_feature 1..19: note = siRNA sense sequence
  source 1..19: mol_type = other RNA
tcttccaagactatgaggt

SEQ ID NO: 55401 - RNA, 19 nt, synthetic construct
  misc_feature 1..19: note = siRNA antisense sequence
  source 1..19: mol_type = other RNA
acctcatagtcttggaaga

SEQ ID NO: 55402 - RNA, 19 nt, synthetic construct
  misc_feature 1..19: note = siRNA sense sequence
  source 1..19: mol_type = other RNA
cttccaagactatgaggtg

SEQ ID NO: 55403 - RNA, 19 nt, synthetic construct
  misc_feature 1..19: note = siRNA antisense sequence
  source 1..19: mol_type = other RNA
cacctcatagtcttggaag

SEQ ID NO: 55404 - RNA, 19 nt, synthetic construct
  misc_feature 1..19: note = siRNA sense sequence
  source 1..19: mol_type = other RNA
ttccaagactatgaggtga

SEQ ID NO: 55405 - RNA, 19 nt, synthetic construct
  misc_feature 1..19: note = siRNA antisense sequence
  source 1..19: mol_type = other RNA
tcacctcatagtcttggaa

SEQ ID NO: 55406 - RNA, 19 nt, synthetic construct
  misc_feature 1..19: note = siRNA sense sequence
  source 1..19: mol_type = other RNA
tccaagactatgaggtgaa

SEQ ID NO: 55407 - RNA, 19 nt, synthetic construct
  misc_feature 1..19: note = siRNA antisense sequence
  source 1..19: mol_type = other RNA
ttcacctcatagtcttgga

SEQ ID NO: 55408 - RNA, 19 nt, synthetic construct
  misc_feature 1..19: note = siRNA sense sequence
  source 1..19: mol_type = other RNA
aaatatgccacaccagtat

SEQ ID NO: 55409 - RNA, 19 nt, synthetic construct
  misc_feature 1..19: note = siRNA antisense sequence
  source 1..19: mol_type = other RNA
atactggtgtggcatattt

SEQ ID NO: 55410 - RNA, 19 nt, synthetic construct
  misc_feature 1..19: note = siRNA sense sequence
  source 1..19: mol_type = other RNA
atgccacaccagtattcca

SEQ ID NO: 55411 - RNA, 19 nt, synthetic construct
  misc_feature 1..19: note = siRNA antisense sequence
  source 1..19: mol_type = other RNA
tggaatactggtgtggcat

SEQ ID NO: 55412 - RNA, 19 nt, synthetic construct
  misc_feature 1..19: note = siRNA sense sequence
  source 1..19: mol_type = other RNA
tgccacaccagtattccag

SEQ ID NO: 55413 - RNA, 19 nt, synthetic construct
  misc_feature 1..19: note = siRNA antisense sequence
  source 1..19: mol_type = other RNA
ctggaatactggtgtggca

SEQ ID NO: 55414 - RNA, 19 nt, synthetic construct
  misc_feature 1..19: note = siRNA sense sequence
  source 1..19: mol_type = other RNA
gccacaccagtattccagg

SEQ ID NO: 55415 - RNA, 19 nt, synthetic construct
  misc_feature 1..19: note = siRNA antisense sequence
  source 1..19: mol_type = other RNA
cctggaatactggtgtggc

SEQ ID NO: 55416 - RNA, 19 nt, synthetic construct
  misc_feature 1..19: note = siRNA sense sequence
  source 1..19: mol_type = other RNA
ccacaccagtattccagga

SEQ ID NO: 55417 - RNA, 19 nt, synthetic construct
  misc_feature 1..19: note = siRNA antisense sequence
  source 1..19: mol_type = other RNA
tcctggaatactggtgtgg

SEQ ID NO: 55418 - RNA, 19 nt, synthetic construct
  misc_feature 1..19: note = siRNA sense sequence
  source 1..19: mol_type = other RNA
cacaccagtattccaggac

SEQ ID NO: 55419 - RNA, 19 nt, synthetic construct
  misc_feature 1..19: note = siRNA antisense sequence
  source 1..19: mol_type = other RNA
gtcctggaatactggtgtg

SEQ ID NO: 55420 - RNA, 19 nt, synthetic construct
  misc_feature 1..19: note = siRNA sense sequence
  source 1..19: mol_type = other RNA
acaccagtattccaggaca

SEQ ID NO: 55421 - RNA, 19 nt, synthetic construct
  misc_feature 1..19: note = siRNA antisense sequence
  source 1..19: mol_type = other RNA
tgtcctggaatactggtgt

SEQ ID NO: 55422 - RNA, 19 nt, synthetic construct
  misc_feature 1..19: note = siRNA sense sequence
  source 1..19: mol_type = other RNA
caactcagctccttataat

SEQ ID NO: 55423 - RNA, 19 nt, synthetic construct
  misc_feature 1..19: note = siRNA antisense sequence
  source 1..19: mol_type = other RNA
attataaggagctgagttg

SEQ ID NO: 55424 - RNA, 19 nt, synthetic construct
  misc_feature 1..19: note = siRNA sense sequence
  source 1..19: mol_type = other RNA
aactcagctccttataatg

SEQ ID NO: 55425 - RNA, 19 nt, synthetic construct
  misc_feature 1..19: note = siRNA antisense sequence
  source 1..19: mol_type = other RNA
cattataaggagctgagtt

SEQ ID NO: 55426 - RNA, 19 nt, synthetic construct
  misc_feature 1..19: note = siRNA sense sequence
  source 1..19: mol_type = other RNA
cagctccttataatgtatt

SEQ ID NO: 55427 - RNA, 19 nt, synthetic construct
  misc_feature 1..19: note = siRNA antisense sequence
  source 1..19: mol_type = other RNA
aatacattataaggagctg

SEQ ID NO: 55428 - RNA, 19 nt, synthetic construct
  misc_feature 1..19: note = siRNA sense sequence
  source 1..19: mol_type = other RNA
acatatattcagccattgc

SEQ ID NO: 55429 - RNA, 19 nt, synthetic construct
  misc_feature 1..19: note = siRNA antisense sequence
  source 1..19: mol_type = other RNA
gcaatggctgaatatatgt

SEQ ID NO: 55430 - RNA, 19 nt, synthetic construct
  misc_feature 1..19: note = siRNA sense sequence
  source 1..19: mol_type = other RNA
catatattcagccattgca

SEQ ID NO: 55431 - RNA, 19 nt, synthetic construct
  misc_feature 1..19: note = siRNA antisense sequence
  source 1..19: mol_type = other RNA
tgcaatggctgaatatatg

SEQ ID NO: 55432 - RNA, 19 nt, synthetic construct
  misc_feature 1..19: note = siRNA sense sequence
  source 1..19: mol_type = other RNA
atatattcagccattgcag

SEQ ID NO: 55433 - RNA, 19 nt, synthetic construct
  misc_feature 1..19: note = siRNA antisense sequence
  source 1..19: mol_type = other RNA
ctgcaatggctgaatatat

SEQ ID NO: 55434 - RNA, 19 nt, synthetic construct
  misc_feature 1..19: note = siRNA sense sequence
  source 1..19: mol_type = other RNA
tatattcagccattgcagc

SEQ ID NO: 55435 - RNA, 19 nt, synthetic construct
  misc_feature 1..19: note = siRNA antisense sequence
  source 1..19: mol_type = other RNA
gctgcaatggctgaatata

SEQ ID NO: 55436 - RNA, 19 nt, synthetic construct
  misc_feature 1..19: note = siRNA sense sequence
  source 1..19: mol_type = other RNA
atattcagccattgcagca

SEQ ID NO: 55437 - RNA, 19 nt, synthetic construct
  misc_feature 1..19: note = siRNA antisense sequence
  source 1..19: mol_type = other RNA
tgctgcaatggctgaatat

SEQ ID NO: 55438 - RNA, 19 nt, synthetic construct
  misc_feature 1..19: note = siRNA sense sequence
  source 1..19: mol_type = other RNA
tattcagccattgcagcat

SEQ ID NO: 55439 - RNA, 19 nt, synthetic construct
  misc_feature 1..19: note = siRNA antisense sequence
  source 1..19: mol_type = other RNA
atgctgcaatggctgaata

SEQ ID NO: 55440 - RNA, 19 nt, synthetic construct
  misc_feature 1..19: note = siRNA sense sequence
  source 1..19: mol_type = other RNA
attcagccattgcagcatg

SEQ ID NO: 55441 - RNA, 19 nt, synthetic construct
  misc_feature 1..19: note = siRNA antisense sequence
  source 1..19: mol_type = other RNA
catgctgcaatggctgaat

SEQ ID NO: 55442 - RNA, 19 nt, synthetic construct
  misc_feature 1..19: note = siRNA sense sequence
  source 1..19: mol_type = other RNA
ttcagccattgcagcatgc

SEQ ID NO: 55443 - RNA, 19 nt, synthetic construct
  misc_feature 1..19: note = siRNA antisense sequence
  source 1..19: mol_type = other RNA
gcatgctgcaatggctgaa

SEQ ID NO: 55444 - RNA, 19 nt, synthetic construct
  misc_feature 1..19: note = siRNA sense sequence
  source 1..19: mol_type = other RNA
gcatgcattctactgctta

SEQ ID NO: 55445 - RNA, 19 nt, synthetic construct
  misc_feature 1..19: note = siRNA antisense sequence
  source 1..19: mol_type = other RNA
taagcagtagaatgcatgc

SEQ ID NO: 55446 - RNA, 19 nt, synthetic construct
  misc_feature 1..19: note = siRNA sense sequence
  source 1..19: mol_type = other RNA
catgcattctactgcttat

SEQ ID NO: 55447 - RNA, 19 nt, synthetic construct
  misc_feature 1..19: note = siRNA antisense sequence
  source 1..19: mol_type = other RNA
ataagcagtagaatgcatg

SEQ ID NO: 55448 - RNA, 19 nt, synthetic construct
  misc_feature 1..19: note = siRNA sense sequence
  source 1..19: mol_type = other RNA
atgcattctactgcttatc

SEQ ID NO: 55449 - RNA, 19 nt, synthetic construct
  misc_feature 1..19: note = siRNA antisense sequence
  source 1..19: mol_type = other RNA
gataagcagtagaatgcat

SEQ ID NO: 55450 - RNA, 19 nt, synthetic construct
  misc_feature 1..19: note = siRNA sense sequence
  source 1..19: mol_type = other RNA
tgcattctactgcttatct

SEQ ID NO: 55451 - RNA, 19 nt, synthetic construct
  misc_feature 1..19: note = siRNA antisense sequence
  source 1..19: mol_type = other RNA
agataagcagtagaatgca

SEQ ID NO: 55452 - RNA, 19 nt, synthetic construct
  misc_feature 1..19: note = siRNA sense sequence
  source 1..19: mol_type = other RNA
gcattctactgcttatcta

SEQ ID NO: 55453 - RNA, 19 nt, synthetic construct
  misc_feature 1..19: note = siRNA antisense sequence
  source 1..19: mol_type = other RNA
tagataagcagtagaatgc

SEQ ID NO: 55454 - RNA, 19 nt, synthetic construct
  misc_feature 1..19: note = siRNA sense sequence
  source 1..19: mol_type = other RNA
cattctactgcttatctaa

SEQ ID NO: 55455 - RNA, 19 nt, synthetic construct
  misc_feature 1..19: note = siRNA antisense sequence
  source 1..19: mol_type = other RNA
ttagataagcagtagaatg

SEQ ID NO: 55456 - RNA, 19 nt, synthetic construct
  misc_feature 1..19: note = siRNA sense sequence
  source 1..19: mol_type = other RNA
tagtattactgaccttttc

SEQ ID NO: 55457 - RNA, 19 nt, synthetic construct
  misc_feature 1..19: note = siRNA antisense sequence
  source 1..19: mol_type = other RNA
gaaaaggtcagtaatacta

SEQ ID NO: 55458 - RNA, 19 nt, synthetic construct
  misc_feature 1..19: note = siRNA sense sequence
  source 1..19: mol_type = other RNA
agtattactgaccttttct

SEQ ID NO: 55459 - RNA, 19 nt, synthetic construct
  misc_feature 1..19: note = siRNA antisense sequence
  source 1..19: mol_type = other RNA
agaaaaggtcagtaatact

SEQ ID NO: 55460 - RNA, 19 nt, synthetic construct
  misc_feature 1..19: note = siRNA sense sequence
  source 1..19: mol_type = other RNA
gtattactgaccttttctg

SEQ ID NO: 55461 - RNA, 19 nt, synthetic construct
  misc_feature 1..19: note = siRNA antisense sequence
  source 1..19: mol_type = other RNA
cagaaaaggtcagtaatac

SEQ ID NO: 55462 - RNA, 19 nt, synthetic construct
  misc_feature 1..19: note = siRNA sense sequence
  source 1..19: mol_type = other RNA
tattactgaccttttctga

SEQ ID NO: 55463 - RNA, 19 nt, synthetic construct
  misc_feature 1..19: note = siRNA antisense sequence
  source 1..19: mol_type = other RNA
tcagaaaaggtcagtaata

SEQ ID NO: 55464 - RNA, 19 nt, synthetic construct
  misc_feature 1..19: note = siRNA sense sequence
  source 1..19: mol_type = other RNA
attactgaccttttctgat

SEQ ID NO: 55465 - RNA, 19 nt, synthetic construct
  misc_feature 1..19: note = siRNA antisense sequence
  source 1..19: mol_type = other RNA
atcagaaaaggtcagtaat

SEQ ID NO: 55466 - RNA, 19 nt, synthetic construct
  misc_feature 1..19: note = siRNA sense sequence
  source 1..19: mol_type = other RNA
ttactgaccttttctgatt

SEQ ID NO: 55467 - RNA, 19 nt, synthetic construct
  misc_feature 1..19: note = siRNA antisense sequence
  source 1..19: mol_type = other RNA
aatcagaaaaggtcagtaa

SEQ ID NO: 55468 - RNA, 19 nt, synthetic construct
  misc_feature 1..19: note = siRNA sense sequence
  source 1..19: mol_type = other RNA
tgaccttttctgatttgtg

SEQ ID NO: 55469 - RNA, 19 nt, synthetic construct
  misc_feature 1..19: note = siRNA antisense sequence
  source 1..19: mol_type = other RNA
cacaaatcagaaaaggtca

SEQ ID NO: 55470 - RNA, 19 nt, synthetic construct
  misc_feature 1..19: note = siRNA sense sequence
  source 1..19: mol_type = other RNA
gaccttttctgatttgtgg

SEQ ID NO: 55471 - RNA, 19 nt, synthetic construct
  misc_feature 1..19: note = siRNA antisense sequence
  source 1..19: mol_type = other RNA
ccacaaatcagaaaaggtc

SEQ ID NO: 55472 - RNA, 19 nt, synthetic construct
  misc_feature 1..19: note = siRNA sense sequence
  source 1..19: mol_type = other RNA
ccttttctgatttgtggag

SEQ ID NO: 55473 - RNA, 19 nt, synthetic construct
  misc_feature 1..19: note = siRNA antisense sequence
  source 1..19: mol_type = other RNA
ctccacaaatcagaaaagg

SEQ ID NO: 55474 - RNA, 19 nt, synthetic construct
  misc_feature 1..19: note = siRNA sense sequence
  source 1..19: mol_type = other RNA
tcattttgttactgtcaag

SEQ ID NO: 55475 - RNA, 19 nt, synthetic construct
  misc_feature 1..19: note = siRNA antisense sequence
  source 1..19: mol_type = other RNA
cttgacagtaacaaaatga

SEQ ID NO: 55476 - RNA, 19 nt, synthetic construct
  misc_feature 1..19: note = siRNA sense sequence
  source 1..19: mol_type = other RNA
cattttgttactgtcaagc

SEQ ID NO: 55477 - RNA, 19 nt, synthetic construct
  misc_feature 1..19: note = siRNA antisense sequence
  source 1..19: mol_type = other RNA
gcttgacagtaacaaaatg

SEQ ID NO: 55478 - RNA, 19 nt, synthetic construct
  misc_feature 1..19: note = siRNA sense sequence
  source 1..19: mol_type = other RNA
attttgttactgtcaagcg

SEQ ID NO: 55479 - RNA, 19 nt, synthetic construct
  misc_feature 1..19: note = siRNA antisense sequence
  source 1..19: mol_type = other RNA
cgcttgacagtaacaaaat

SEQ ID NO: 55480 - RNA, 19 nt, synthetic construct
  misc_feature 1..19: note = siRNA sense sequence
  source 1..19: mol_type = other RNA
ttttgttactgtcaagcga

SEQ ID NO: 55481 - RNA, 19 nt, synthetic construct
  misc_feature 1..19: note = siRNA antisense sequence
  source 1..19: mol_type = other RNA
tcgcttgacagtaacaaaa

SEQ ID NO: 55482 - RNA, 19 nt, synthetic construct
  misc_feature 1..19: note = siRNA sense sequence
  source 1..19: mol_type = other RNA
tttgttactgtcaagcgat

SEQ ID NO: 55483 - RNA, 19 nt, synthetic construct
  misc_feature 1..19: note = siRNA antisense sequence
  source 1..19: mol_type = other RNA
atcgcttgacagtaacaaa

SEQ ID NO: 55484 - RNA, 19 nt, synthetic construct
  misc_feature 1..19: note = siRNA sense sequence
  source 1..19: mol_type = other RNA
ttgttactgtcaagcgatg

SEQ ID NO: 55485 - RNA, 19 nt, synthetic construct
  misc_feature 1..19: note = siRNA antisense sequence
  source 1..19: mol_type = other RNA
catcgcttgacagtaacaa

SEQ ID NO: 55486 - RNA, 19 nt, synthetic construct
  misc_feature 1..19: note = siRNA sense sequence
  source 1..19: mol_type = other RNA
tgttactgtcaagcgatga

SEQ ID NO: 55487 - RNA, 19 nt, synthetic construct
  misc_feature 1..19: note = siRNA antisense sequence
  source 1..19: mol_type = other RNA
tcatcgcttgacagtaaca

SEQ ID NO: 55488 - RNA, 19 nt, synthetic construct
  misc_feature 1..19: note = siRNA sense sequence
  source 1..19: mol_type = other RNA
gttactgtcaagcgatgaa

SEQ ID NO: 55489 - RNA, 19 nt, synthetic construct
  misc_feature 1..19: note = siRNA antisense sequence
  source 1..19: mol_type = other RNA
ttcatcgcttgacagtaac

SEQ ID NO: 55490 - RNA, 19 nt, synthetic construct
  misc_feature 1..19: note = siRNA sense sequence
  source 1..19: mol_type = other RNA
cagctgttcatcctcaaag

SEQ ID NO: 55491 - RNA, 19 nt, synthetic construct
  misc_feature 1..19: note = siRNA antisense sequence
  source 1..19: mol_type = other RNA
ctttgaggatgaacagctg

SEQ ID NO: 55492 - RNA, 19 nt, synthetic construct
  misc_feature 1..19: note = siRNA sense sequence
  source 1..19: mol_type = other RNA
agctgttcatcctcaaaga

SEQ ID NO: 55493 - RNA, 19 nt, synthetic construct
  misc_feature 1..19: note = siRNA antisense sequence
  source 1..19: mol_type = other RNA
tctttgaggatgaacagct

SEQ ID NO: 55494 - RNA, 19 nt, synthetic construct
  misc_feature 1..19: note = siRNA sense sequence
  source 1..19: mol_type = other RNA
gctgttcatcctcaaagat

SEQ ID NO: 55495 - RNA, 19 nt, synthetic construct
  misc_feature 1..19: note = siRNA antisense sequence
  source 1..19: mol_type = other RNA
atctttgaggatgaacagc

SEQ ID NO: 55496 - RNA, 19 nt, synthetic construct
  misc_feature 1..19: note = siRNA sense sequence
  source 1..19: mol_type = other RNA
aataactttcagggagcat

SEQ ID NO: 55497 - RNA, 19 nt, synthetic construct
  misc_feature 1..19: note = siRNA antisense sequence
  source 1..19: mol_type = other RNA
atgctccctgaaagttatt

SEQ ID NO: 55498 - RNA, 19 nt, synthetic construct
  misc_feature 1..19: note = siRNA sense sequence
  source 1..19: mol_type = other RNA
ataactttcagggagcatc

SEQ ID NO: 55499 - RNA, 19 nt, synthetic construct
  misc_feature 1..19: note = siRNA antisense sequence
  source 1..19: mol_type = other RNA
gatgctccctgaaagttat

SEQ ID NO: 55500 - RNA, 19 nt, synthetic construct
  misc_feature 1..19: note = siRNA sense sequence
  source 1..19: mol_type = other RNA
taactttcagggagcatca

SEQ ID NO: 55501 - RNA, 19 nt, synthetic construct
  misc_feature 1..19: note = siRNA antisense sequence
  source 1..19: mol_type = other RNA
tgatgctccctgaaagtta

SEQ ID NO: 55502 - RNA, 19 nt, synthetic construct
  misc_feature 1..19: note = siRNA sense sequence
  source 1..19: mol_type = other RNA
tttcagggagcatcaattt

SEQ ID NO: 55503 - RNA, 19 nt, synthetic construct
  misc_feature 1..19: note = siRNA antisense sequence
  source 1..19: mol_type = other RNA
aaattgatgctccctgaaa

SEQ ID NO: 55504 - RNA, 19 nt, synthetic construct
  misc_feature 1..19: note = siRNA sense sequence
  source 1..19: mol_type = other RNA
catttcctttgccaactag

SEQ ID NO: 55505 - RNA, 19 nt, synthetic construct
  misc_feature 1..19: note = siRNA antisense sequence
  source 1..19: mol_type = other RNA
ctagttggcaaaggaaatg

SEQ ID NO: 55506 - RNA, 19 nt, synthetic construct
  misc_feature 1..19: note = siRNA sense sequence
  source 1..19: mol_type = other RNA
tttcctttgccaactagct

SEQ ID NO: 55507 - RNA, 19 nt, synthetic construct
  misc_feature 1..19: note = siRNA antisense sequence
  source 1..19: mol_type = other RNA
agctagttggcaaaggaaa

SEQ ID NO: 55508 - RNA, 19 nt, synthetic construct
  misc_feature 1..19: note = siRNA sense sequence
  source 1..19: mol_type = other RNA
ttcctttgccaactagctc

SEQ ID NO: 55509 - RNA, 19 nt, synthetic construct
  misc_feature 1..19: note = siRNA antisense sequence
  source 1..19: mol_type = other RNA
gagctagttggcaaaggaa

SEQ ID NO: 55510 - RNA, 19 nt, synthetic construct
  misc_feature 1..19: note = siRNA sense sequence
  source 1..19: mol_type = other RNA
tcctttgccaactagctcc

SEQ ID NO: 55511 - RNA, 19 nt, synthetic construct
  misc_feature 1..19: note = siRNA antisense sequence
  source 1..19: mol_type = other RNA
ggagctagttggcaaagga

SEQ ID NO: 55512 - RNA, 19 nt, synthetic construct
  misc_feature 1..19: note = siRNA sense sequence
  source 1..19: mol_type = other RNA
ttgccaactagctcctctt

SEQ ID NO: 55513 - RNA, 19 nt, synthetic construct
  misc_feature 1..19: note = siRNA antisense sequence
  source 1..19: mol_type = other RNA
aagaggagctagttggcaa

SEQ ID NO: 55514 - RNA, 19 nt, synthetic construct
  misc_feature 1..19: note = siRNA sense sequence
  source 1..19: mol_type = other RNA
tgccaactagctcctcttc

SEQ ID NO: 55515 - RNA, 19 nt, synthetic construct
  misc_feature 1..19: note = siRNA antisense sequence
  source 1..19: mol_type = other RNA
gaagaggagctagttggca

SEQ ID NO: 55516 - RNA, 19 nt, synthetic construct
  misc_feature 1..19: note = siRNA sense sequence
  source 1..19: mol_type = other RNA
tagctcctcttctagattg

SEQ ID NO: 55517 - RNA, 19 nt, synthetic construct
  misc_feature 1..19: note = siRNA antisense sequence
  source 1..19: mol_type = other RNA
caatctagaagaggagcta

SEQ ID NO: 55518 - RNA, 19 nt, synthetic construct
  misc_feature 1..19: note = siRNA sense sequence
  source 1..19: mol_type = other RNA
gctcctcttctagattgct

SEQ ID NO: 55519 - RNA, 19 nt, synthetic construct
  misc_feature 1..19: note = siRNA antisense sequence
  source 1..19: mol_type = other RNA
agcaatctagaagaggagc

SEQ ID NO: 55520 - RNA, 19 nt, synthetic construct
  misc_feature 1..19: note = siRNA sense sequence
  source 1..19: mol_type = other RNA
aatgtagatttcagtttcc

SEQ ID NO: 55521 - RNA, 19 nt, synthetic construct
  misc_feature 1..19: note = siRNA antisense sequence
  source 1..19: mol_type = other RNA
ggaaactgaaatctacatt

SEQ ID NO: 55522 - RNA, 19 nt, synthetic construct
  misc_feature 1..19: note = siRNA sense sequence
  source 1..19: mol_type = other RNA
tagatttcagtttccttga

SEQ ID NO: 55523 - RNA, 19 nt, synthetic construct
  misc_feature 1..19: note = siRNA antisense sequence
  source 1..19: mol_type = other RNA
tcaaggaaactgaaatcta

SEQ ID NO: 55524 - RNA, 19 nt, synthetic construct
  misc_feature 1..19: note = siRNA sense sequence
  source 1..19: mol_type = other RNA
gaatttctgttgttcattg

SEQ ID NO: 55525 - RNA, 19 nt, synthetic construct
  misc_feature 1..19: note = siRNA antisense sequence
  source 1..19: mol_type = other RNA
caatgaacaacagaaattc

SEQ ID NO: 55526 - RNA, 19 nt, synthetic construct
  misc_feature 1..19: note = siRNA sense sequence
  source 1..19: mol_type = other RNA
aatttctgttgttcattgg

SEQ ID NO: 55527 - RNA, 19 nt, synthetic construct
  misc_feature 1..19: note = siRNA antisense sequence
  source 1..19: mol_type = other RNA
ccaatgaacaacagaaatt

SEQ ID NO: 55528 - RNA, 19 nt, synthetic construct
  misc_feature 1..19: note = siRNA sense sequence
  source 1..19: mol_type = other RNA
atttctgttgttcattggg

SEQ ID NO: 55529 - RNA, 19 nt, synthetic construct
  misc_feature 1..19: note = siRNA antisense sequence
  source 1..19: mol_type = other RNA
cccaatgaacaacagaaat

SEQ ID NO: 55530 - RNA, 19 nt, synthetic construct
  misc_feature 1..19: note = siRNA sense sequence
  source 1..19: mol_type = other RNA
tttctgttgttcattgggc

SEQ ID NO: 55531 - RNA, 19 nt, synthetic construct
  misc_feature 1..19: note = siRNA antisense sequence
  source 1..19: mol_type = other RNA
gcccaatgaacaacagaaa

SEQ ID NO: 55532 - RNA, 19 nt, synthetic construct
  misc_feature 1..19: note = siRNA sense sequence
  source 1..19: mol_type = other RNA
ttctgttgttcattgggct

SEQ ID NO: 55533 - RNA, 19 nt, synthetic construct
  misc_feature 1..19: note = siRNA antisense sequence
  source 1..19: mol_type = other RNA
agcccaatgaacaacagaa

SEQ ID NO: 55534 - RNA, 19 nt, synthetic construct
  misc_feature 1..19: note = siRNA sense sequence
  source 1..19: mol_type = other RNA
tctgttgttcattgggctg

SEQ ID NO: 55535 - RNA, 19 nt, synthetic construct
  misc_feature 1..19: note = siRNA antisense sequence
  source 1..19: mol_type = other RNA
cagcccaatgaacaacaga

SEQ ID NO: 55536 - RNA, 19 nt, synthetic construct
  misc_feature 1..19: note = siRNA sense sequence
  source 1..19: mol_type = other RNA
ctgttgttcattgggctgt

SEQ ID NO: 55537 - RNA, 19 nt, synthetic construct
  misc_feature 1..19: note = siRNA antisense sequence
  source 1..19: mol_type = other RNA
acagcccaatgaacaacag

SEQ ID NO: 55538 - RNA, 19 nt, synthetic construct
  misc_feature 1..19: note = siRNA sense sequence
  source 1..19: mol_type = other RNA
tgttgttcattgggctgtt

SEQ ID NO: 55539 - RNA, 19 nt, synthetic construct
  misc_feature 1..19: note = siRNA antisense sequence
  source 1..19: mol_type = other RNA
aacagcccaatgaacaaca

SEQ ID NO: 55540 - RNA, 19 nt, synthetic construct
  misc_feature 1..19: note = siRNA sense sequence
  source 1..19: mol_type = other RNA
gttgttcattgggctgttt

SEQ ID NO: 55541 - RNA, 19 nt, synthetic construct
  misc_feature 1..19: note = siRNA antisense sequence
  source 1..19: mol_type = other RNA
aaacagcccaatgaacaac

SEQ ID NO: 55542 - RNA, 19 nt, synthetic construct
  misc_feature 1..19: note = siRNA sense sequence
  source 1..19: mol_type = other RNA
ttgttcattgggctgtttt

SEQ ID NO: 55543 - RNA, 19 nt, synthetic construct
  misc_feature 1..19: note = siRNA antisense sequence
  source 1..19: mol_type = other RNA
aaaacagcccaatgaacaa

SEQ ID NO: 55544 - RNA, 19 nt, synthetic construct
  misc_feature 1..19: note = siRNA sense sequence
  source 1..19: mol_type = other RNA
gttcattgggctgttttgt

SEQ ID NO: 55545 - RNA, 19 nt, synthetic construct
  misc_feature 1..19: note = siRNA antisense sequence
  source 1..19: mol_type = other RNA
acaaaacagcccaatgaac

SEQ ID NO: 55546 - RNA, 19 nt, synthetic construct
  misc_feature 1..19: note = siRNA sense sequence
  source 1..19: mol_type = other RNA
tgggctgttttgtttcatt

SEQ ID NO: 55547 - RNA, 19 nt, synthetic construct
  misc_feature 1..19: note = siRNA antisense sequence
  source 1..19: mol_type = other RNA
aatgaaacaaaacagccca

SEQ ID NO: 55548 - RNA, 19 nt, synthetic construct
  misc_feature 1..19: note = siRNA sense sequence
  source 1..19: mol_type = other RNA
tgtttcattttgtgtccta

SEQ ID NO: 55549 - RNA, 19 nt, synthetic construct
  misc_feature 1..19: note = siRNA antisense sequence
  source 1..19: mol_type = other RNA
taggacacaaaatgaaaca

SEQ ID NO: 55550 - RNA, 19 nt, synthetic construct
  misc_feature 1..19: note = siRNA sense sequence
  source 1..19: mol_type = other RNA
gtttcattttgtgtcctag

SEQ ID NO: 55551 - RNA, 19 nt, synthetic construct
  misc_feature 1..19: note = siRNA antisense sequence
  source 1..19: mol_type = other RNA
ctaggacacaaaatgaaac

SEQ ID NO: 55552 - RNA, 19 nt, synthetic construct
  misc_feature 1..19: note = siRNA sense sequence
  source 1..19: mol_type = other RNA
ttcattttgtgtcctagat

SEQ ID NO: 55553 - RNA, 19 nt, synthetic construct
  misc_feature 1..19: note = siRNA antisense sequence
  source 1..19: mol_type = other RNA
atctaggacacaaaatgaa

SEQ ID NO: 55554 - RNA, 19 nt, synthetic construct
  misc_feature 1..19: note = siRNA sense sequence
  source 1..19: mol_type = other RNA
tcattttgtgtcctagatt

SEQ ID NO: 55555 - RNA, 19 nt, synthetic construct
  misc_feature 1..19: note = siRNA antisense sequence
  source 1..19: mol_type = other RNA
aatctaggacacaaaatga

SEQ ID NO: 55556 - RNA, 19 nt, synthetic construct
  misc_feature 1..19: note = siRNA sense sequence
  source 1..19: mol_type = other RNA
cattttgtgtcctagattg

SEQ ID NO: 55557 - RNA, 19 nt, synthetic construct
  misc_feature 1..19: note = siRNA antisense sequence
  source 1..19: mol_type = other RNA
caatctaggacacaaaatg

SEQ ID NO: 55558 - RNA, 19 nt, synthetic construct
  misc_feature 1..19: note = siRNA sense sequence
  source 1..19: mol_type = other RNA
tttgtgtcctagattggtt

SEQ ID NO: 55559 - RNA, 19 nt, synthetic construct
  misc_feature 1..19: note = siRNA antisense sequence
  source 1..19: mol_type = other RNA
aaccaatctaggacacaaa

SEQ ID NO: 55560 - RNA, 19 nt, synthetic construct
  misc_feature 1..19: note = siRNA sense sequence
  source 1..19: mol_type = other RNA
ttgtgtcctagattggttc

SEQ ID NO: 55561 - RNA, 19 nt, synthetic construct
  misc_feature 1..19: note = siRNA antisense sequence
  source 1..19: mol_type = other RNA
gaaccaatctaggacacaa

SEQ ID NO: 55562 - RNA, 19 nt, synthetic construct
  misc_feature 1..19: note = siRNA sense sequence
  source 1..19: mol_type = other RNA
tgtgtcctagattggttcc

SEQ ID NO: 55563 - RNA, 19 nt, synthetic construct
  misc_feature 1..19: note = siRNA antisense sequence
  source 1..19: mol_type = other RNA
ggaaccaatctaggacaca

SEQ ID NO: 55564 - RNA, 19 nt, synthetic construct
  misc_feature 1..19: note = siRNA sense sequence
  source 1..19: mol_type = other RNA
gtgtcctagattggttcct

SEQ ID NO: 55565 - RNA, 19 nt, synthetic construct
  misc_feature 1..19: note = siRNA antisense sequence
  source 1..19: mol_type = other RNA
aggaaccaatctaggacac

SEQ ID NO: 55566 - RNA, 19 nt, synthetic construct
  misc_feature 1..19: note = siRNA sense sequence
  source 1..19: mol_type = other RNA
gtcctagattggttcctac

SEQ ID NO: 55567 - RNA, 19 nt, synthetic construct
  misc_feature 1..19: note = siRNA antisense sequence
  source 1..19: mol_type = other RNA
gtaggaaccaatctaggac

SEQ ID NO: 55568 - RNA, 19 nt, synthetic construct
  misc_feature 1..19: note = siRNA sense sequence
  source 1..19: mol_type = other RNA
tcctagattggttcctact

SEQ ID NO: 55569 - RNA, 19 nt, synthetic construct
  misc_feature 1..19: note = siRNA antisense sequence
  source 1..19: mol_type = other RNA
agtaggaaccaatctagga

SEQ ID NO: 55570 - RNA, 19 nt, synthetic construct
  misc_feature 1..19: note = siRNA sense sequence
  source 1..19: mol_type = other RNA
cctagattggttcctactt

SEQ ID NO: 55571 - RNA, 19 nt, synthetic construct
  misc_feature 1..19: note = siRNA antisense sequence
  source 1..19: mol_type = other RNA
aagtaggaaccaatctagg

SEQ ID NO: 55572 - RNA, 19 nt, synthetic construct
  misc_feature 1..19: note = siRNA sense sequence
  source 1..19: mol_type = other RNA
ctagattggttcctacttt

SEQ ID NO: 55573 - RNA, 19 nt, synthetic construct
  misc_feature 1..19: note = siRNA antisense sequence
  source 1..19: mol_type = other RNA
aaagtaggaaccaatctag

SEQ ID NO: 55574 - RNA, 19 nt, synthetic construct
  misc_feature 1..19: note = siRNA sense sequence
  source 1..19: mol_type = other RNA
tagattggttcctactttg

SEQ ID NO: 55575 - RNA, 19 nt, synthetic construct
  misc_feature 1..19: note = siRNA antisense sequence
  source 1..19: mol_type = other RNA
caaagtaggaaccaatcta

SEQ ID NO: 55576 - RNA, 19 nt, synthetic construct
  misc_feature 1..19: note = siRNA sense sequence
  source 1..19: mol_type = other RNA
gattggttcctactttggc

SEQ ID NO: 55577 - RNA, 19 nt, synthetic construct
  misc_feature 1..19: note = siRNA antisense sequence
  source 1..19: mol_type = other RNA
gccaaagtaggaaccaatc

SEQ ID NO: 55578 - RNA, 19 nt, synthetic construct
  misc_feature 1..19: note = siRNA sense sequence
  source 1..19: mol_type = other RNA
ttggttcctactttggcag

SEQ ID NO: 55579 - RNA, 19 nt, synthetic construct
  misc_feature 1..19: note = siRNA antisense sequence
  source 1..19: mol_type = other RNA
ctgccaaagtaggaaccaa

SEQ ID NO: 55580 - RNA, 19 nt, synthetic construct
  misc_feature 1..19: note = siRNA sense sequence
  source 1..19: mol_type = other RNA
tggttcctactttggcagt

SEQ ID NO: 55581 - RNA, 19 nt, synthetic construct
  misc_feature 1..19: note = siRNA antisense sequence
  source 1..19: mol_type = other RNA
actgccaaagtaggaacca

SEQ ID NO: 55582 - RNA, 19 nt, synthetic construct
  misc_feature 1..19: note = siRNA sense sequence
  source 1..19: mol_type = other RNA
actttggcagtattttaac

SEQ ID NO: 55583 - RNA, 19 nt, synthetic construct
  misc_feature 1..19: note = siRNA antisense sequence
  source 1..19: mol_type = other RNA
gttaaaatactgccaaagt

SEQ ID NO: 55584 - RNA, 19 nt, synthetic construct
  misc_feature 1..19: note = siRNA sense sequence
  source 1..19: mol_type = other RNA
ggattctaatactgacatt

SEQ ID NO: 55585 - RNA, 19 nt, synthetic construct
  misc_feature 1..19: note = siRNA antisense sequence
  source 1..19: mol_type = other RNA
aatgtcagtattagaatcc

SEQ ID NO: 55586 - RNA, 19 nt, synthetic construct
  misc_feature 1..19: note = siRNA sense sequence
  source 1..19: mol_type = other RNA
gattctaatactgacattc

SEQ ID NO: 55587 - RNA, 19 nt, synthetic construct
  misc_feature 1..19: note = siRNA antisense sequence
  source 1..19: mol_type = other RNA
gaatgtcagtattagaatc

SEQ ID NO: 55588 - RNA, 19 nt, synthetic construct
  misc_feature 1..19: note = siRNA sense sequence
  source 1..19: mol_type = other RNA
ctaatactgacattcttct

SEQ ID NO: 55589 - RNA, 19 nt, synthetic construct
  misc_feature 1..19: note = siRNA antisense sequence
  source 1..19: mol_type = other RNA
agaagaatgtcagtattag

SEQ ID NO: 55590 - RNA, 19 nt, synthetic construct
  misc_feature 1..19: note = siRNA sense sequence
  source 1..19: mol_type = other RNA
aatactgacattcttctag

SEQ ID NO: 55591 - RNA, 19 nt, synthetic construct
  misc_feature 1..19: note = siRNA antisense sequence
  source 1..19: mol_type = other RNA
ctagaagaatgtcagtatt

SEQ ID NO: 55592 - RNA, 19 nt, synthetic construct
  misc_feature 1..19: note = siRNA sense sequence
  source 1..19: mol_type = other RNA
ctgacattcttctagtcgg

SEQ ID NO: 55593 - RNA, 19 nt, synthetic construct
  misc_feature 1..19: note = siRNA antisense sequence
  source 1..19: mol_type = other RNA
ccgactagaagaatgtcag

SEQ ID NO: 55594 - RNA, 19 nt, synthetic construct
  misc_feature 1..19: note = siRNA sense sequence
  source 1..19: mol_type = other RNA
tgacattcttctagtcgga

SEQ ID NO: 55595 - RNA, 19 nt, synthetic construct
  misc_feature 1..19: note = siRNA antisense sequence
  source 1..19: mol_type = other RNA
tccgactagaagaatgtca

SEQ ID NO: 55596 - RNA, 19 nt, synthetic construct
  misc_feature 1..19: note = siRNA sense sequence
  source 1..19: mol_type = other RNA
gacattcttctagtcggag

SEQ ID NO: 55597 - RNA, 19 nt, synthetic construct
  misc_feature 1..19: note = siRNA antisense sequence
  source 1..19: mol_type = other RNA
ctccgactagaagaatgtc

SEQ ID NO: 55598 - RNA, 19 nt, synthetic construct
  misc_feature 1..19: note = siRNA sense sequence
  source 1..19: mol_type = other RNA
acattcttctagtcggagc

SEQ ID NO: 55599 - RNA, 19 nt, synthetic construct
  misc_feature 1..19: note = siRNA antisense sequence
  source 1..19: mol_type = other RNA
gctccgactagaagaatgt

SEQ ID NO: 55600 - RNA, 19 nt, synthetic construct
  misc_feature 1..19: note = siRNA sense sequence
  source 1..19: mol_type = other RNA
cattcttctagtcggagcc

SEQ ID NO: 55601 - RNA, 19 nt, synthetic construct
  misc_feature 1..19: note = siRNA antisense sequence
  source 1..19: mol_type = other RNA
ggctccgactagaagaatg

SEQ ID NO: 55602 - RNA, 19 nt, synthetic construct
  misc_feature 1..19: note = siRNA sense sequence
  source 1..19: mol_type = other RNA
attcttctagtcggagccc

SEQ ID NO: 55603 - RNA, 19 nt, synthetic construct
  misc_feature 1..19: note = siRNA antisense sequence
  source 1..19: mol_type = other RNA
gggctccgactagaagaat

SEQ ID NO: 55604 - RNA, 19 nt, synthetic construct
  misc_feature 1..19: note = siRNA sense sequence
  source 1..19: mol_type = other RNA
aaagtgtatgtgtatgctc

SEQ ID NO: 55605 - RNA, 19 nt, synthetic construct
  misc_feature 1..19: note = siRNA antisense sequence
  source 1..19: mol_type = other RNA
gagcatacacatacacttt

SEQ ID NO: 55606 - RNA, 19 nt, synthetic construct
  misc_feature 1..19: note = siRNA sense sequence
  source 1..19: mol_type = other RNA
agtgtatgtgtatgctctc

SEQ ID NO: 55607 - RNA, 19 nt, synthetic construct
  misc_feature 1..19: note = siRNA antisense sequence
  source 1..19: mol_type = other RNA
gagagcatacacatacact

SEQ ID NO: 55608 - RNA, 19 nt, synthetic construct
  misc_feature 1..19: note = siRNA sense sequence
  source 1..19: mol_type = other RNA
gtgtatgtgtatgctctca

SEQ ID NO: 55609 - RNA, 19 nt, synthetic construct
  misc_feature 1..19: note = siRNA antisense sequence
  source 1..19: mol_type = other RNA
tgagagcatacacatacac

SEQ ID NO: 55610 - RNA, 19 nt, synthetic construct
  misc_feature 1..19: note = siRNA sense sequence
  source 1..19: mol_type = other RNA
tgtatgtgtatgctctcaa

SEQ ID NO: 55611 - RNA, 19 nt, synthetic construct
  misc_feature 1..19: note = siRNA antisense sequence
  source 1..19: mol_type = other RNA
ttgagagcatacacataca

SEQ ID NO: 55612 - RNA, 19 nt, synthetic construct
  misc_feature 1..19: note = siRNA sense sequence
  source 1..19: mol_type = other RNA
gtatgtgtatgctctcaat

SEQ ID NO: 55613 - RNA, 19 nt, synthetic construct
  misc_feature 1..19: note = siRNA antisense sequence
  source 1..19: mol_type = other RNA
attgagagcatacacatac

SEQ ID NO: 55614 - RNA, 19 nt, synthetic construct
  misc_feature 1..19: note = siRNA sense sequence
  source 1..19: mol_type = other RNA
tatgtgtatgctctcaatc

SEQ ID NO: 55615 - RNA, 19 nt, synthetic construct
  misc_feature 1..19: note = siRNA antisense sequence
  source 1..19: mol_type = other RNA
gattgagagcatacacata

SEQ ID NO: 55616 - RNA, 19 nt, synthetic construct
  misc_feature 1..19: note = siRNA sense sequence
  source 1..19: mol_type = other RNA
atgtgtatgctctcaatca

SEQ ID NO: 55617 - RNA, 19 nt, synthetic construct
  misc_feature 1..19: note = siRNA antisense sequence
  source 1..19: mol_type = other RNA
tgattgagagcatacacat

SEQ ID NO: 55618 - RNA, 19 nt, synthetic construct
  misc_feature 1..19: note = siRNA sense sequence
  source 1..19: mol_type = other RNA
gtatgctctcaatcaggta

SEQ ID NO: 55619 - RNA, 19 nt, synthetic construct
  misc_feature 1..19: note = siRNA antisense sequence
  source 1..19: mol_type = other RNA
tacctgattgagagcatac

SEQ ID NO: 55620 - RNA, 19 nt, synthetic construct
  misc_feature 1..19: note = siRNA sense sequence
  source 1..19: mol_type = other RNA
tatgctctcaatcaggtaa

SEQ ID NO: 55621 - RNA, 19 nt, synthetic construct
  misc_feature 1..19: note = siRNA antisense sequence
  source 1..19: mol_type = other RNA
ttacctgattgagagcata

SEQ ID NO: 55622 - RNA, 19 nt, synthetic construct
  misc_feature 1..19: note = siRNA sense sequence
  source 1..19: mol_type = other RNA
atgctctcaatcaggtaat

SEQ ID NO: 55623 - RNA, 19 nt, synthetic construct
  misc_feature 1..19: note = siRNA antisense sequence
  source 1..19: mol_type = other RNA
attacctgattgagagcat

SEQ ID NO: 55624 - RNA, 19 nt, synthetic construct
  misc_feature 1..19: note = siRNA sense sequence
  source 1..19: mol_type = other RNA
tgctctcaatcaggtaatg

SEQ ID NO: 55625 - RNA, 19 nt, synthetic construct
  misc_feature 1..19: note = siRNA antisense sequence
  source 1..19: mol_type = other RNA
cattacctgattgagagca

SEQ ID NO: 55626 - RNA, 19 nt, synthetic construct
  misc_feature 1..19: note = siRNA sense sequence
  source 1..19: mol_type = other RNA
gctctcaatcaggtaatgg

SEQ ID NO: 55627 - RNA, 19 nt, synthetic construct
  misc_feature 1..19: note = siRNA antisense sequence
  source 1..19: mol_type = other RNA
ccattacctgattgagagc

SEQ ID NO: 55628 - RNA, 19 nt, synthetic construct
  misc_feature 1..19: note = siRNA sense sequence
  source 1..19: mol_type = other RNA
ctctcaatcaggtaatggt

SEQ ID NO: 55629 - RNA, 19 nt, synthetic construct
  misc_feature 1..19: note = siRNA antisense sequence
  source 1..19: mol_type = other RNA
accattacctgattgagag

SEQ ID NO: 55630 - RNA, 19 nt, synthetic construct
  misc_feature 1..19: note = siRNA sense sequence
  source 1..19: mol_type = other RNA
tctcaatcaggtaatggtg

SEQ ID NO: 55631 - RNA, 19 nt, synthetic construct
  misc_feature 1..19: note = siRNA antisense sequence
  source 1..19: mol_type = other RNA
caccattacctgattgaga

SEQ ID NO: 55632 - RNA, 19 nt, synthetic construct
  misc_feature 1..19: note = siRNA sense sequence
  source 1..19: mol_type = other RNA
ctcaatcaggtaatggtgt

SEQ ID NO: 55633 - RNA, 19 nt, synthetic construct
  misc_feature 1..19: note = siRNA antisense sequence
  source 1..19: mol_type = other RNA
acaccattacctgattgag

SEQ ID NO: 55634 - RNA, 19 nt, synthetic construct
  misc_feature 1..19: note = siRNA sense sequence
  source 1..19: mol_type = other RNA
tcaatcaggtaatggtgtc

SEQ ID NO: 55635 - RNA, 19 nt, synthetic construct
  misc_feature 1..19: note = siRNA antisense sequence
  source 1..19: mol_type = other RNA
gacaccattacctgattga

SEQ ID NO: 55636 - RNA, 19 nt, synthetic construct
  misc_feature 1..19: note = siRNA sense sequence
  source 1..19: mol_type = other RNA
caatcaggtaatggtgtct

SEQ ID NO: 55637 - RNA, 19 nt, synthetic construct
  misc_feature 1..19: note = siRNA antisense sequence
  source 1..19: mol_type = other RNA
agacaccattacctgattg

SEQ ID NO: 55638 - RNA, 19 nt, synthetic construct
  misc_feature 1..19: note = siRNA sense sequence
  source 1..19: mol_type = other RNA
gtaatggtgtctgagtttg

SEQ ID NO: 55639 - RNA, 19 nt, synthetic construct
  misc_feature 1..19: note = siRNA antisense sequence
  source 1..19: mol_type = other RNA
caaactcagacaccattac

SEQ ID NO: 55640 - RNA, 19 nt, synthetic construct
  misc_feature 1..19: note = siRNA sense sequence
  source 1..19: mol_type = other RNA
taatggtgtctgagtttgg

SEQ ID NO: 55641 - RNA, 19 nt, synthetic construct
  misc_feature 1..19: note = siRNA antisense sequence
  source 1..19: mol_type = other RNA
ccaaactcagacaccatta

SEQ ID NO: 55642 - RNA, 19 nt, synthetic construct
  misc_feature 1..19: note = siRNA sense sequence
  source 1..19: mol_type = other RNA
aatggtgtctgagtttggt

SEQ ID NO: 55643 - RNA, 19 nt, synthetic construct
  misc_feature 1..19: note = siRNA antisense sequence
  source 1..19: mol_type = other RNA
accaaactcagacaccatt

SEQ ID NO: 55644 - RNA, 19 nt, synthetic construct
  misc_feature 1..19: note = siRNA sense sequence
  source 1..19: mol_type = other RNA
tggtgtctgagtttggtag

SEQ ID NO: 55645 - RNA, 19 nt, synthetic construct
  misc_feature 1..19: note = siRNA antisense sequence
  source 1..19: mol_type = other RNA
ctaccaaactcagacacca

SEQ ID NO: 55646 - RNA, 19 nt, synthetic construct
  misc_feature 1..19: note = siRNA sense sequence
  source 1..19: mol_type = other RNA
ggtgtctgagtttggtaga

SEQ ID NO: 55647 - RNA, 19 nt, synthetic construct
  misc_feature 1..19: note = siRNA antisense sequence
  source 1..19: mol_type = other RNA
tctaccaaactcagacacc

SEQ ID NO: 55648 - RNA, 19 nt, synthetic construct
  misc_feature 1..19: note = siRNA sense sequence
  source 1..19: mol_type = other RNA
gtgtctgagtttggtagaa

SEQ ID NO: 55649 - RNA, 19 nt, synthetic construct
  misc_feature 1..19: note = siRNA antisense sequence
  source 1..19: mol_type = other RNA
ttctaccaaactcagacac

SEQ ID NO: 55650 - RNA, 19 nt, synthetic construct
  misc_feature 1..19: note = siRNA sense sequence
  source 1..19: mol_type = other RNA
acagagcaaagaagctatc

SEQ ID NO: 55651 - RNA, 19 nt, synthetic construct
  misc_feature 1..19: note = siRNA antisense sequence
  source 1..19: mol_type = other RNA
gatagcttctttgctctgt

SEQ ID NO: 55652 - RNA, 19 nt, synthetic construct
  misc_feature 1..19: note = siRNA sense sequence
  source 1..19: mol_type = other RNA
cagagcaaagaagctatca

SEQ ID NO: 55653 - RNA, 19 nt, synthetic construct
  misc_feature 1..19: note = siRNA antisense sequence
  source 1..19: mol_type = other RNA
tgatagcttctttgctctg

SEQ ID NO: 55654 - RNA, 19 nt, synthetic construct
  misc_feature 1..19: note = siRNA sense sequence
  source 1..19: mol_type = other RNA
agagcaaagaagctatcag

SEQ ID NO: 55655 - RNA, 19 nt, synthetic construct
  misc_feature 1..19: note = siRNA antisense sequence
  source 1..19: mol_type = other RNA
ctgatagcttctttgctct

SEQ ID NO: 55656 - RNA, 19 nt, synthetic construct
  misc_feature 1..19: note = siRNA sense sequence
  source 1..19: mol_type = other RNA
gagcaaagaagctatcagg

SEQ ID NO: 55657 - RNA, 19 nt, synthetic construct
  misc_feature 1..19: note = siRNA antisense sequence
  source 1..19: mol_type = other RNA
cctgatagcttctttgctc

SEQ ID NO: 55658 - RNA, 19 nt, synthetic construct
  misc_feature 1..19: note = siRNA sense sequence
  source 1..19: mol_type = other RNA
aaagaagctatcaggattc

SEQ ID NO: 55659 - RNA, 19 nt, synthetic construct
  misc_feature 1..19: note = siRNA antisense sequence
  source 1..19: mol_type = other RNA
gaatcctgatagcttcttt

SEQ ID NO: 55660 - RNA, 19 nt, synthetic construct
  misc_feature 1..19: note = siRNA sense sequence
  source 1..19: mol_type = other RNA
aagaagctatcaggattca

SEQ ID NO: 55661 - RNA, 19 nt, synthetic construct
  misc_feature 1..19: note = siRNA antisense sequence
  source 1..19: mol_type = other RNA
tgaatcctgatagcttctt

SEQ ID NO: 55662 - RNA, 19 nt, synthetic construct
  misc_feature 1..19: note = siRNA sense sequence
  source 1..19: mol_type = other RNA
gaagctatcaggattcatt

SEQ ID NO: 55663 - RNA, 19 nt, synthetic construct
  misc_feature 1..19: note = siRNA antisense sequence
  source 1..19: mol_type = other RNA
aatgaatcctgatagcttc

SEQ ID NO: 55664 - RNA, 19 nt, synthetic construct
  misc_feature 1..19: note = siRNA sense sequence
  source 1..19: mol_type = other RNA
aagctatcaggattcattc

SEQ ID NO: 55665 - RNA, 19 nt, synthetic construct
  misc_feature 1..19: note = siRNA antisense sequence
  source 1..19: mol_type = other RNA
gaatgaatcctgatagctt

SEQ ID NO: 55666 - RNA, 19 nt, synthetic construct
  misc_feature 1..19: note = siRNA sense sequence
  source 1..19: mol_type = other RNA
agctatcaggattcattca

SEQ ID NO: 55667 - RNA, 19 nt, synthetic construct
  misc_feature 1..19: note = siRNA antisense sequence
  source 1..19: mol_type = other RNA
tgaatgaatcctgatagct

SEQ ID NO: 55668 - RNA, 19 nt, synthetic construct
  misc_feature 1..19: note = siRNA sense sequence
  source 1..19: mol_type = other RNA
ggattcattcactccacca

SEQ ID NO: 55669 - RNA, 19 nt, synthetic construct
  misc_feature 1..19: note = siRNA antisense sequence
  source 1..19: mol_type = other RNA
tggtggagtgaatgaatcc

SEQ ID NO: 55670 - RNA, 19 nt, synthetic construct
  misc_feature 1..19: note = siRNA sense sequence
  source 1..19: mol_type = other RNA
gattcattcactccaccaa

SEQ ID NO: 55671 - RNA, 19 nt, synthetic construct
  misc_feature 1..19: note = siRNA antisense sequence
  source 1..19: mol_type = other RNA
ttggtggagtgaatgaatc

SEQ ID NO: 55672 - RNA, 19 nt, synthetic construct
  misc_feature 1..19: note = siRNA sense sequence
  source 1..19: mol_type = other RNA
attctaataaagtagctcc

SEQ ID NO: 55673 - RNA, 19 nt, synthetic construct
  misc_feature 1..19: note = siRNA antisense sequence
  source 1..19: mol_type = other RNA
ggagctactttattagaat

SEQ ID NO: 55674 - RNA, 19 nt, synthetic construct
  misc_feature 1..19: note = siRNA sense sequence
  source 1..19: mol_type = other RNA
ttctaataaagtagctcca

SEQ ID NO: 55675 - RNA, 19 nt, synthetic construct
  misc_feature 1..19: note = siRNA antisense sequence
  source 1..19: mol_type = other RNA
tggagctactttattagaa

SEQ ID NO: 55676 - RNA, 19 nt, synthetic construct
  misc_feature 1..19: note = siRNA sense sequence
  source 1..19: mol_type = other RNA
tctaataaagtagctccaa

SEQ ID NO: 55677 - RNA, 19 nt, synthetic construct
  misc_feature 1..19: note = siRNA antisense sequence
  source 1..19: mol_type = other RNA
ttggagctactttattaga

SEQ ID NO: 55678 - RNA, 19 nt, synthetic construct
  misc_feature 1..19: note = siRNA sense sequence
  source 1..19: mol_type = other RNA
ctaataaagtagctccaac

SEQ ID NO: 55679 - RNA, 19 nt, synthetic construct
  misc_feature 1..19: note = siRNA antisense sequence
  source 1..19: mol_type = other RNA
gttggagctactttattag

SEQ ID NO: 55680 - RNA, 19 nt, synthetic construct
  misc_feature 1..19: note = siRNA sense sequence
  source 1..19: mol_type = other RNA
taataaagtagctccaact

SEQ ID NO: 55681 - RNA, 19 nt, synthetic construct
  misc_feature 1..19: note = siRNA antisense sequence
  source 1..19: mol_type = other RNA
agttggagctactttatta

SEQ ID NO: 55682 - RNA, 19 nt, synthetic construct
  misc_feature 1..19: note = siRNA sense sequence
  source 1..19: mol_type = other RNA
aaagtagctccaactctta

SEQ ID NO: 55683 - RNA, 19 nt, synthetic construct
  misc_feature 1..19: note = siRNA antisense sequence
  source 1..19: mol_type = other RNA
taagagttggagctacttt

SEQ ID NO: 55684 - RNA, 19 nt, synthetic construct
  misc_feature 1..19: note = siRNA sense sequence
  source 1..19: mol_type = other RNA
aagtagctccaactcttag

SEQ ID NO: 55685 - RNA, 19 nt, synthetic construct
  misc_feature 1..19: note = siRNA antisense sequence
  source 1..19: mol_type = other RNA
ctaagagttggagctactt

SEQ ID NO: 55686 - RNA, 19 nt, synthetic construct
  misc_feature 1..19: note = siRNA sense sequence
  source 1..19: mol_type = other RNA
agtagctccaactcttaga

SEQ ID NO: 55687 - RNA, 19 nt, synthetic construct
  misc_feature 1..19: note = siRNA antisense sequence
  source 1..19: mol_type = other RNA
tctaagagttggagctact

SEQ ID NO: 55688 - RNA, 19 nt, synthetic construct
  misc_feature 1..19: note = siRNA sense sequence
  source 1..19: mol_type = other RNA
gtagctccaactcttagat

SEQ ID NO: 55689 - RNA, 19 nt, synthetic construct
  misc_feature 1..19: note = siRNA antisense sequence
  source 1..19: mol_type = other RNA
atctaagagttggagctac

SEQ ID NO: 55690 - RNA, 19 nt, synthetic construct
  misc_feature 1..19: note = siRNA sense sequence
  source 1..19: mol_type = other RNA
tagctccaactcttagata

SEQ ID NO: 55691 - RNA, 19 nt, synthetic construct
  misc_feature 1..19: note = siRNA antisense sequence
  source 1..19: mol_type = other RNA
tatctaagagttggagcta

SEQ ID NO: 55692 - RNA, 19 nt, synthetic construct
  misc_feature 1..19: note = siRNA sense sequence
  source 1..19: mol_type = other RNA
agctccaactcttagatat

SEQ ID NO: 55693 - RNA, 19 nt, synthetic construct
  misc_feature 1..19: note = siRNA antisense sequence
  source 1..19: mol_type = other RNA
atatctaagagttggagct

SEQ ID NO: 55694 - RNA, 19 nt, synthetic construct
  misc_feature 1..19: note = siRNA sense sequence
  source 1..19: mol_type = other RNA
gctccaactcttagatatt

SEQ ID NO: 55695 - RNA, 19 nt, synthetic construct
  misc_feature 1..19: note = siRNA antisense sequence
  source 1..19: mol_type = other RNA
aatatctaagagttggagc

SEQ ID NO: 55696 - RNA, 19 nt, synthetic construct
  misc_feature 1..19: note = siRNA sense sequence
  source 1..19: mol_type = other RNA
ccaactcttagatattttc

SEQ ID NO: 55697 - RNA, 19 nt, synthetic construct
  misc_feature 1..19: note = siRNA antisense sequence
  source 1..19: mol_type = other RNA
gaaaatatctaagagttgg

SEQ ID NO: 55698 - RNA, 19 nt, synthetic construct
  misc_feature 1..19: note = siRNA sense sequence
  source 1..19: mol_type = other RNA
ctcttagatattttctgct

SEQ ID NO: 55699 - RNA, 19 nt, synthetic construct
  misc_feature 1..19: note = siRNA antisense sequence
  source 1..19: mol_type = other RNA
agcagaaaatatctaagag

SEQ ID NO: 55700 - RNA, 19 nt, synthetic construct
  misc_feature 1..19: note = siRNA sense sequence
  source 1..19: mol_type = other RNA
cttagatattttctgcttg

SEQ ID NO: 55701 - RNA, 19 nt, synthetic construct
  misc_feature 1..19: note = siRNA antisense sequence
  source 1..19: mol_type = other RNA
caagcagaaaatatctaag

SEQ ID NO: 55702 - RNA, 19 nt, synthetic construct
  misc_feature 1..19: note = siRNA sense sequence
  source 1..19: mol_type = other RNA
ttagatattttctgcttgg

SEQ ID NO: 55703 - RNA, 19 nt, synthetic construct
  misc_feature 1..19: note = siRNA antisense sequence
  source 1..19: mol_type = other RNA
ccaagcagaaaatatctaa

SEQ ID NO: 55704 - RNA, 19 nt, synthetic construct
  misc_feature 1..19: note = siRNA sense sequence
  source 1..19: mol_type = other RNA
tagatattttctgcttgga

SEQ ID NO: 55705 - RNA, 19 nt, synthetic construct
  misc_feature 1..19: note = siRNA antisense sequence
  source 1..19: mol_type = other RNA
tccaagcagaaaatatcta

SEQ ID NO: 55706 - RNA, 19 nt, synthetic construct
  misc_feature 1..19: note = siRNA sense sequence
  source 1..19: mol_type = other RNA
taggataaaggaggtaaat

SEQ ID NO: 55707 - RNA, 19 nt, synthetic construct
  misc_feature 1..19: note = siRNA antisense sequence
  source 1..19: mol_type = other RNA
atttacctcctttatccta

SEQ ID NO: 55708 - RNA, 19 nt, synthetic construct
  misc_feature 1..19: note = siRNA sense sequence
  source 1..19: mol_type = other RNA
aggataaaggaggtaaata

SEQ ID NO: 55709 - RNA, 19 nt, synthetic construct
  misc_feature 1..19: note = siRNA antisense sequence
  source 1..19: mol_type = other RNA
tatttacctcctttatcct

SEQ ID NO: 55710 - RNA, 19 nt, synthetic construct
  misc_feature 1..19: note = siRNA sense sequence
  source 1..19: mol_type = other RNA
ggaggtaaatataaatctc

SEQ ID NO: 55711 - RNA, 19 nt, synthetic construct
  misc_feature 1..19: note = siRNA antisense sequence
  source 1..19: mol_type = other RNA
gagatttatatttacctcc

SEQ ID NO: 55712 - RNA, 19 nt, synthetic construct
  misc_feature 1..19: note = siRNA sense sequence
  source 1..19: mol_type = other RNA
caaggcttatttaggctgg

SEQ ID NO: 55713 - RNA, 19 nt, synthetic construct
  misc_feature 1..19: note = siRNA antisense sequence
  source 1..19: mol_type = other RNA
ccagcctaaataagccttg

SEQ ID NO: 55714 - RNA, 19 nt, synthetic construct
  misc_feature 1..19: note = siRNA sense sequence
  source 1..19: mol_type = other RNA
aaggcttatttaggctggg

SEQ ID NO: 55715 - RNA, 19 nt, synthetic construct
  misc_feature 1..19: note = siRNA antisense sequence
  source 1..19: mol_type = other RNA
cccagcctaaataagcctt

SEQ ID NO: 55716 - RNA, 19 nt, synthetic construct
  misc_feature 1..19: note = siRNA sense sequence
  source 1..19: mol_type = other RNA
aggcttatttaggctggga

SEQ ID NO: 55717 - RNA, 19 nt, synthetic construct
  misc_feature 1..19: note = siRNA antisense sequence
  source 1..19: mol_type = other RNA
tcccagcctaaataagcct

SEQ ID NO: 55718 - RNA, 19 nt, synthetic construct
  misc_feature 1..19: note = siRNA sense sequence
  source 1..19: mol_type = other RNA
ttatttaggctgggaggct

SEQ ID NO: 55719 - RNA, 19 nt, synthetic construct
  misc_feature 1..19: note = siRNA antisense sequence
  source 1..19: mol_type = other RNA
agcctcccagcctaaataa

SEQ ID NO: 55720 - RNA, 19 nt, synthetic construct
  misc_feature 1..19: note = siRNA sense sequence
  source 1..19: mol_type = other RNA
tatttaggctgggaggctt

SEQ ID NO: 55721 - RNA, 19 nt, synthetic construct
  misc_feature 1..19: note = siRNA antisense sequence
  source 1..19: mol_type = other RNA
aagcctcccagcctaaata

SEQ ID NO: 55722 - RNA, 19 nt, synthetic construct
  misc_feature 1..19: note = siRNA sense sequence
  source 1..19: mol_type = other RNA
atttaggctgggaggctta

SEQ ID NO: 55723 - RNA, 19 nt, synthetic construct
  misc_feature 1..19: note = siRNA antisense sequence
  source 1..19: mol_type = other RNA
taagcctcccagcctaaat

SEQ ID NO: 55724 - RNA, 19 nt, synthetic construct
  misc_feature 1..19: note = siRNA sense sequence
  source 1..19: mol_type = other RNA
tttaggctgggaggcttat

SEQ ID NO: 55725 - RNA, 19 nt, synthetic construct
  misc_feature 1..19: note = siRNA antisense sequence
  source 1..19: mol_type = other RNA
ataagcctcccagcctaaa

SEQ ID NO: 55726 - RNA, 19 nt, synthetic construct
  misc_feature 1..19: note = siRNA sense sequence
  source 1..19: mol_type = other RNA
ttaggctgggaggcttatc

SEQ ID NO: 55727 - RNA, 19 nt, synthetic construct
  misc_feature 1..19: note = siRNA antisense sequence
  source 1..19: mol_type = other RNA
gataagcctcccagcctaa

SEQ ID NO: 55728 - RNA, 19 nt, synthetic construct
  misc_feature 1..19: note = siRNA sense sequence
  source 1..19: mol_type = other RNA
taggctgggaggcttatca

SEQ ID NO: 55729 - RNA, 19 nt, synthetic construct
  misc_feature 1..19: note = siRNA antisense sequence
  source 1..19: mol_type = other RNA
tgataagcctcccagccta

SEQ ID NO: 55730 - RNA, 19 nt, synthetic construct
  misc_feature 1..19: note = siRNA sense sequence
  source 1..19: mol_type = other RNA
aggctgggaggcttatcag

SEQ ID NO: 55731 - RNA, 19 nt, synthetic construct
  misc_feature 1..19: note = siRNA antisense sequence
  source 1..19: mol_type = other RNA
ctgataagcctcccagcct

SEQ ID NO: 55732 - RNA, 19 nt, synthetic construct
  misc_feature 1..19: note = siRNA sense sequence
  source 1..19: mol_type = other RNA
ctgggaggcttatcagctc

SEQ ID NO: 55733 - RNA, 19 nt, synthetic construct
  misc_feature 1..19: note = siRNA antisense sequence
  source 1..19: mol_type = other RNA
gagctgataagcctcccag

SEQ ID NO: 55734 - RNA, 19 nt, synthetic construct
  misc_feature 1..19: note = siRNA sense sequence
  source 1..19: mol_type = other RNA
tgggaggcttatcagctct

SEQ ID NO: 55735 - RNA, 19 nt, synthetic construct
  misc_feature 1..19: note = siRNA antisense sequence
  source 1..19: mol_type = other RNA
agagctgataagcctccca

SEQ ID NO: 55736 - RNA, 19 nt, synthetic construct
  misc_feature 1..19: note = siRNA sense sequence
  source 1..19: mol_type = other RNA
gggaggcttatcagctctg

SEQ ID NO: 55737 - RNA, 19 nt, synthetic construct
  misc_feature 1..19: note = siRNA antisense sequence
  source 1..19: mol_type = other RNA
cagagctgataagcctccc

SEQ ID NO: 55738 - RNA, 19 nt, synthetic construct
  misc_feature 1..19: note = siRNA sense sequence
  source 1..19: mol_type = other RNA
ggaggcttatcagctctgg

SEQ ID NO: 55739 - RNA, 19 nt, synthetic construct
  misc_feature 1..19: note = siRNA antisense sequence
  source 1..19: mol_type = other RNA
ccagagctgataagcctcc

SEQ ID NO: 55740 - RNA, 19 nt, synthetic construct
  misc_feature 1..19: note = siRNA sense sequence
  source 1..19: mol_type = other RNA
aggcttatcagctctggct

SEQ ID NO: 55741 - RNA, 19 nt, synthetic construct
  misc_feature 1..19: note = siRNA antisense sequence
  source 1..19: mol_type = other RNA
agccagagctgataagcct

SEQ ID NO: 55742 - RNA, 19 nt, synthetic construct
  misc_feature 1..19: note = siRNA sense sequence
  source 1..19: mol_type = other RNA
ggcttatcagctctggctt

SEQ ID NO: 55743 - RNA, 19 nt, synthetic construct
  misc_feature 1..19: note = siRNA antisense sequence
  source 1..19: mol_type = other RNA
aagccagagctgataagcc

SEQ ID NO: 55744 - RNA, 19 nt, synthetic construct
  misc_feature 1..19: note = siRNA sense sequence
  source 1..19: mol_type = other RNA
aacctcagcagttaaatcg

SEQ ID NO: 55745 - RNA, 19 nt, synthetic construct
  misc_feature 1..19: note = siRNA antisense sequence
  source 1..19: mol_type = other RNA
cgatttaactgctgaggtt

SEQ ID NO: 55746 - RNA, 19 nt, synthetic construct
  misc_feature 1..19: note = siRNA sense sequence
  source 1..19: mol_type = other RNA
acctcagcagttaaatcgg

SEQ ID NO: 55747 - RNA, 19 nt, synthetic construct
  misc_feature 1..19: note = siRNA antisense sequence
  source 1..19: mol_type = other RNA
ccgatttaactgctgaggt

SEQ ID NO: 55748 - RNA, 19 nt, synthetic construct
  misc_feature 1..19: note = siRNA sense sequence
  source 1..19: mol_type = other RNA
cctcagcagttaaatcgga

SEQ ID NO: 55749 - RNA, 19 nt, synthetic construct
  misc_feature 1..19: note = siRNA antisense sequence
  source 1..19: mol_type = other RNA
tccgatttaactgctgagg

SEQ ID NO: 55750 - RNA, 19 nt, synthetic construct
  misc_feature 1..19: note = siRNA sense sequence
  source 1..19: mol_type = other RNA
tcagcagttaaatcggata

SEQ ID NO: 55751 - RNA, 19 nt, synthetic construct
  misc_feature 1..19: note = siRNA antisense sequence
  source 1..19: mol_type = other RNA
tatccgatttaactgctga

SEQ ID NO: 55752 - RNA, 19 nt, synthetic construct
  misc_feature 1..19: note = siRNA sense sequence
  source 1..19: mol_type = other RNA
cagcagttaaatcggatag

SEQ ID NO: 55753 - RNA, 19 nt, synthetic construct
  misc_feature 1..19: note = siRNA antisense sequence
  source 1..19: mol_type = other RNA
ctatccgatttaactgctg

SEQ ID NO: 55754 - RNA, 19 nt, synthetic construct
  misc_feature 1..19: note = siRNA sense sequence
  source 1..19: mol_type = other RNA
agcagttaaatcggatagg

SEQ ID NO: 55755 - RNA, 19 nt, synthetic construct
  misc_feature 1..19: note = siRNA antisense sequence
  source 1..19: mol_type = other RNA
cctatccgatttaactgct

SEQ ID NO: 55756 - RNA, 19 nt, synthetic construct
  misc_feature 1..19: note = siRNA sense sequence
  source 1..19: mol_type = other RNA
gcagttaaatcggataggg

SEQ ID NO: 55757 - RNA, 19 nt, synthetic construct
  misc_feature 1..19: note = siRNA antisense sequence
  source 1..19: mol_type = other RNA
ccctatccgatttaactgc

SEQ ID NO: 55758 - RNA, 19 nt, synthetic construct
  misc_feature 1..19: note = siRNA sense sequence
  source 1..19: mol_type = other RNA
cagttaaatcggatagggt

SEQ ID NO: 55759 - RNA, 19 nt, synthetic construct
  misc_feature 1..19: note = siRNA antisense sequence
  source 1..19: mol_type = other RNA
accctatccgatttaactg

SEQ ID NO: 55760 - RNA, 19 nt, synthetic construct
  misc_feature 1..19: note = siRNA sense sequence
  source 1..19: mol_type = other RNA
taaatcggatagggtggag

SEQ ID NO: 55761 - RNA, 19 nt, synthetic construct
  misc_feature 1..19: note = siRNA antisense sequence
  source 1..19: mol_type = other RNA
ctccaccctatccgattta

SEQ ID NO: 55762 - RNA, 19 nt, synthetic construct
  misc_feature 1..19: note = siRNA sense sequence
  source 1..19: mol_type = other RNA
aaatcggatagggtggagg

SEQ ID NO: 55763 - RNA, 19 nt, synthetic construct
  misc_feature 1..19: note = siRNA antisense sequence
  source 1..19: mol_type = other RNA
cctccaccctatccgattt

SEQ ID NO: 55764 - RNA, 19 nt, synthetic construct
  misc_feature 1..19: note = siRNA sense sequence
  source 1..19: mol_type = other RNA
aatcggatagggtggaggg

SEQ ID NO: 55765 - RNA, 19 nt, synthetic construct
  misc_feature 1..19: note = siRNA antisense sequence
  source 1..19: mol_type = other RNA
ccctccaccctatccgatt

SEQ ID NO: 55766 - RNA, 19 nt, synthetic construct
  misc_feature 1..19: note = siRNA sense sequence
  source 1..19: mol_type = other RNA
agaagtcatgagtttcaag

SEQ ID NO: 55767 - RNA, 19 nt, synthetic construct
  misc_feature 1..19: note = siRNA antisense sequence
  source 1..19: mol_type = other RNA
cttgaaactcatgacttct

SEQ ID NO: 55768 - RNA, 19 nt, synthetic construct
  misc_feature 1..19: note = siRNA sense sequence
  source 1..19: mol_type = other RNA
gaagtcatgagtttcaagg

SEQ ID NO: 55769 - RNA, 19 nt, synthetic construct
  misc_feature 1..19: note = siRNA antisense sequence
  source 1..19: mol_type = other RNA
ccttgaaactcatgacttc

SEQ ID NO: 55770 - RNA, 19 nt, synthetic construct
  misc_feature 1..19: note = siRNA sense sequence
  source 1..19: mol_type = other RNA
aagtcatgagtttcaaggc

SEQ ID NO: 55771 - RNA, 19 nt, synthetic construct
  misc_feature 1..19: note = siRNA antisense sequence
  source 1..19: mol_type = other RNA
gccttgaaactcatgactt

SEQ ID NO: 55772 - RNA, 19 nt, synthetic construct
  misc_feature 1..19: note = siRNA sense sequence
  source 1..19: mol_type = other RNA
agtcatgagtttcaaggca

SEQ ID NO: 55773 - RNA, 19 nt, synthetic construct
  misc_feature 1..19: note = siRNA antisense sequence
  source 1..19: mol_type = other RNA
tgccttgaaactcatgact

SEQ ID NO: 55774 - RNA, 19 nt, synthetic construct
  misc_feature 1..19: note = siRNA sense sequence
  source 1..19: mol_type = other RNA
gtcatgagtttcaaggcag

SEQ ID NO: 55775 - RNA, 19 nt, synthetic construct
  misc_feature 1..19: note = siRNA antisense sequence
  source 1..19: mol_type = other RNA
ctgccttgaaactcatgac

SEQ ID NO: 55776 - RNA, 19 nt, synthetic construct
  misc_feature 1..19: note = siRNA sense sequence
  source 1..19: mol_type = other RNA
tcatgagtttcaaggcagc

SEQ ID NO: 55777 - RNA, 19 nt, synthetic construct
  misc_feature 1..19: note = siRNA antisense sequence
  source 1..19: mol_type = other RNA
gctgccttgaaactcatga

SEQ ID NO: 55778 - RNA, 19 nt, synthetic construct
  misc_feature 1..19: note = siRNA sense sequence
  source 1..19: mol_type = other RNA
atgagtttcaaggcagcaa

SEQ ID NO: 55779 - RNA, 19 nt, synthetic construct
  misc_feature 1..19: note = siRNA antisense sequence
  source 1..19: mol_type = other RNA
ttgctgccttgaaactcat

SEQ ID NO: 55780 - RNA, 19 nt, synthetic construct
  misc_feature 1..19: note = siRNA sense sequence
  source 1..19: mol_type = other RNA
tgagtttcaaggcagcaac

SEQ ID NO: 55781 - RNA, 19 nt, synthetic construct
  misc_feature 1..19: note = siRNA antisense sequence
  source 1..19: mol_type = other RNA
gttgctgccttgaaactca

SEQ ID NO: 55782 - RNA, 19 nt, synthetic construct
  misc_feature 1..19: note = siRNA sense sequence
  source 1..19: mol_type = other RNA
acactgcaggcttccagga

SEQ ID NO: 55783 - RNA, 19 nt, synthetic construct
  misc_feature 1..19: note = siRNA antisense sequence
  source 1..19: mol_type = other RNA
tcctggaagcctgcagtgt

SEQ ID NO: 55784 - RNA, 19 nt, synthetic construct
  misc_feature 1..19: note = siRNA sense sequence
  source 1..19: mol_type = other RNA
cactgcaggcttccaggaa

SEQ ID NO: 55785 - RNA, 19 nt, synthetic construct
  misc_feature 1..19: note = siRNA antisense sequence
  source 1..19: mol_type = other RNA
ttcctggaagcctgcagtg

SEQ ID NO: 55786 - RNA, 19 nt, synthetic construct
  misc_feature 1..19: note = siRNA sense sequence
  source 1..19: mol_type = other RNA
aaatacttcactgggctgg

SEQ ID NO: 55787 - RNA, 19 nt, synthetic construct
  misc_feature 1..19: note = siRNA antisense sequence
  source 1..19: mol_type = other RNA
ccagcccagtgaagtattt

SEQ ID NO: 55788 - RNA, 19 nt, synthetic construct
  misc_feature 1..19: note = siRNA sense sequence
  source 1..19: mol_type = other RNA
aatacttcactgggctgga

SEQ ID NO: 55789 - RNA, 19 nt, synthetic construct
  misc_feature 1..19: note = siRNA antisense sequence
  source 1..19: mol_type = other RNA
tccagcccagtgaagtatt

SEQ ID NO: 55790 - RNA, 19 nt, synthetic construct
  misc_feature 1..19: note = siRNA sense sequence
  source 1..19: mol_type = other RNA
atacttcactgggctggag

SEQ ID NO: 55791 - RNA, 19 nt, synthetic construct
  misc_feature 1..19: note = siRNA antisense sequence
  source 1..19: mol_type = other RNA
ctccagcccagtgaagtat

SEQ ID NO: 55792 - RNA, 19 nt, synthetic construct
  misc_feature 1..19: note = siRNA sense sequence
  source 1..19: mol_type = other RNA
agattttgtcttctgttcc

SEQ ID NO: 55793 - RNA, 19 nt, synthetic construct
  misc_feature 1..19: note = siRNA antisense sequence
  source 1..19: mol_type = other RNA
ggaacagaagacaaaatct

SEQ ID NO: 55794 - RNA, 19 nt, synthetic construct
  misc_feature 1..19: note = siRNA sense sequence
  source 1..19: mol_type = other RNA
gtcttctgttcctgacttt

SEQ ID NO: 55795 - RNA, 19 nt, synthetic construct
  misc_feature 1..19: note = siRNA antisense sequence
  source 1..19: mol_type = other RNA
aaagtcaggaacagaagac

SEQ ID NO: 55796 - RNA, 19 nt, synthetic construct
  misc_feature 1..19: note = siRNA sense sequence
  source 1..19: mol_type = other RNA
tcttctgttcctgacttta

SEQ ID NO: 55797 - RNA, 19 nt, synthetic construct
  misc_feature 1..19: note = siRNA antisense sequence
  source 1..19: mol_type = other RNA
taaagtcaggaacagaaga

SEQ ID NO: 55798 - RNA, 19 nt, synthetic construct
  misc_feature 1..19: note = siRNA sense sequence
  source 1..19: mol_type = other RNA
cttctgttcctgactttag

SEQ ID NO: 55799 - RNA, 19 nt, synthetic construct
  misc_feature 1..19: note = siRNA antisense sequence
  source 1..19: mol_type = other RNA
ctaaagtcaggaacagaag

SEQ ID NO: 55800 - RNA, 19 nt, synthetic construct
  misc_feature 1..19: note = siRNA sense sequence
  source 1..19: mol_type = other RNA
tctgttcctgactttagac

SEQ ID NO: 55801 - RNA, 19 nt, synthetic construct
  misc_feature 1..19: note = siRNA antisense sequence
  source 1..19: mol_type = other RNA
gtctaaagtcaggaacaga

SEQ ID NO: 55802 - RNA, 19 nt, synthetic construct
  misc_feature 1..19: note = siRNA sense sequence
  source 1..19: mol_type = other RNA
ctgttcctgactttagaca

SEQ ID NO: 55803 - RNA, 19 nt, synthetic construct
  misc_feature 1..19: note = siRNA antisense sequence
  source 1..19: mol_type = other RNA
tgtctaaagtcaggaacag

SEQ ID NO: 55804 - RNA, 19 nt, synthetic construct
  misc_feature 1..19: note = siRNA sense sequence
  source 1..19: mol_type = other RNA
cctgactttagacatcatt

SEQ ID NO: 55805 - RNA, 19 nt, synthetic construct
  misc_feature 1..19: note = siRNA antisense sequence
  source 1..19: mol_type = other RNA
aatgatgtctaaagtcagg

SEQ ID NO: 55806 - RNA, 19 nt, synthetic construct
  misc_feature 1..19: note = siRNA sense sequence
  source 1..19: mol_type = other RNA
ctgactttagacatcattt

SEQ ID NO: 55807 - RNA, 19 nt, synthetic construct
  misc_feature 1..19: note = siRNA antisense sequence
  source 1..19: mol_type = other RNA
aaatgatgtctaaagtcag

SEQ ID NO: 55808 - RNA, 19 nt, synthetic construct
  misc_feature 1..19: note = siRNA sense sequence
  source 1..19: mol_type = other RNA
cattagaagagtgttttgc

SEQ ID NO: 55809 - RNA, 19 nt, synthetic construct
  misc_feature 1..19: note = siRNA antisense sequence
  source 1..19: mol_type = other RNA
gcaaaacactcttctaatg

SEQ ID NO: 55810 - RNA, 19 nt, synthetic construct
  misc_feature 1..19: note = siRNA sense sequence
  source 1..19: mol_type = other RNA
attagaagagtgttttgct

SEQ ID NO: 55811 - RNA, 19 nt, synthetic construct
  misc_feature 1..19: note = siRNA antisense sequence
  source 1..19: mol_type = other RNA
agcaaaacactcttctaat

SEQ ID NO: 55812 - RNA, 19 nt, synthetic construct
  misc_feature 1..19: note = siRNA sense sequence
  source 1..19: mol_type = other RNA
tagcaaagccagtgtttat

SEQ ID NO: 55813 - RNA, 19 nt, synthetic construct
  misc_feature 1..19: note = siRNA antisense sequence
  source 1..19: mol_type = other RNA
ataaacactggctttgcta

SEQ ID NO: 55814 - RNA, 19 nt, synthetic construct
  misc_feature 1..19: note = siRNA sense sequence
  source 1..19: mol_type = other RNA
agcaaagccagtgtttatc

SEQ ID NO: 55815 - RNA, 19 nt, synthetic construct
  misc_feature 1..19: note = siRNA antisense sequence
  source 1..19: mol_type = other RNA
gataaacactggctttgct

SEQ ID NO: 55816 - RNA, 19 nt, synthetic construct
  misc_feature 1..19: note = siRNA sense sequence
  source 1..19: mol_type = other RNA
gcaaagccagtgtttatct

SEQ ID NO: 55817 - RNA, 19 nt, synthetic construct
  misc_feature 1..19: note = siRNA antisense sequence
  source 1..19: mol_type = other RNA
agataaacactggctttgc

SEQ ID NO: 55818 - RNA, 19 nt, synthetic construct
  misc_feature 1..19: note = siRNA sense sequence
  source 1..19: mol_type = other RNA
caaagccagtgtttatcta

SEQ ID NO: 55819 - RNA, 19 nt, synthetic construct
  misc_feature 1..19: note = siRNA antisense sequence
  source 1..19: mol_type = other RNA
tagataaacactggctttg

SEQ ID NO: 55820 - RNA, 19 nt, synthetic construct
  misc_feature 1..19: note = siRNA sense sequence
  source 1..19: mol_type = other RNA
aaagccagtgtttatctat

SEQ ID NO: 55821 - RNA, 19 nt, synthetic construct
  misc_feature 1..19: note = siRNA antisense sequence
  source 1..19: mol_type = other RNA
atagataaacactggcttt

SEQ ID NO: 55822 - RNA, 19 nt, synthetic construct
  misc_feature 1..19: note = siRNA sense sequence
  source 1..19: mol_type = other RNA
aagccagtgtttatctatt

SEQ ID NO: 55823 - RNA, 19 nt, synthetic construct
  misc_feature 1..19: note = siRNA antisense sequence
  source 1..19: mol_type = other RNA
aatagataaacactggctt

SEQ ID NO: 55824 - RNA, 19 nt, synthetic construct
  misc_feature 1..19: note = siRNA sense sequence
  source 1..19: mol_type = other RNA
agccagtgtttatctattt

SEQ ID NO: 55825 - RNA, 19 nt, synthetic construct
  misc_feature 1..19: note = siRNA antisense sequence
  source 1..19: mol_type = other RNA
aaatagataaacactggct

SEQ ID NO: 55826 - RNA, 19 nt, synthetic construct
  misc_feature 1..19: note = siRNA sense sequence
  source 1..19: mol_type = other RNA
gccagtgtttatctattta

SEQ ID NO: 55827 - RNA, 19 nt, synthetic construct
  misc_feature 1..19: note = siRNA antisense sequence
  source 1..19: mol_type = other RNA
taaatagataaacactggc

SEQ ID NO: 55828 - RNA, 19 nt, synthetic construct
  misc_feature 1..19: note = siRNA sense sequence
  source 1..19: mol_type = other RNA
ccagtgtttatctatttag

SEQ ID NO: 55829 - RNA, 19 nt, synthetic construct
  misc_feature 1..19: note = siRNA antisense sequence
  source 1..19: mol_type = other RNA
ctaaatagataaacactgg

SEQ ID NO: 55830 - RNA, 19 nt, synthetic construct
  misc_feature 1..19: note = siRNA sense sequence
  source 1..19: mol_type = other RNA
cagtgtttatctatttagc

SEQ ID NO: 55831 - RNA, 19 nt, synthetic construct
  misc_feature 1..19: note = siRNA antisense sequence
  source 1..19: mol_type = other RNA
gctaaatagataaacactg

SEQ ID NO: 55832 - RNA, 19 nt, synthetic construct
  misc_feature 1..19: note = siRNA sense sequence
  source 1..19: mol_type = other RNA
agcttttccaaatatgtac

SEQ ID NO: 55833 - RNA, 19 nt, synthetic construct
  misc_feature 1..19: note = siRNA antisense sequence
  source 1..19: mol_type = other RNA
gtacatatttggaaaagct

SEQ ID NO: 55834 - RNA, 19 nt, synthetic construct
  misc_feature 1..19: note = siRNA sense sequence
  source 1..19: mol_type = other RNA
tccaaatatgtacattctc

SEQ ID NO: 55835 - RNA, 19 nt, synthetic construct
  misc_feature 1..19: note = siRNA antisense sequence
  source 1..19: mol_type = other RNA
gagaatgtacatatttgga

SEQ ID NO: 55836 - RNA, 19 nt, synthetic construct
  misc_feature 1..19: note = siRNA sense sequence
  source 1..19: mol_type = other RNA
ccaaatatgtacattctct

SEQ ID NO: 55837 - RNA, 19 nt, synthetic construct
  misc_feature 1..19: note = siRNA antisense sequence
  source 1..19: mol_type = other RNA
agagaatgtacatatttgg

SEQ ID NO: 55838 - RNA, 19 nt, synthetic construct
  misc_feature 1..19: note = siRNA sense sequence
  source 1..19: mol_type = other RNA
caaatatgtacattctctc

SEQ ID NO: 55839 - RNA, 19 nt, synthetic construct
  misc_feature 1..19: note = siRNA antisense sequence
  source 1..19: mol_type = other RNA
gagagaatgtacatatttg

SEQ ID NO: 55840 - RNA, 19 nt, synthetic construct
  misc_feature 1..19: note = siRNA sense sequence
  source 1..19: mol_type = other RNA
tatgtacattctctcctaa

SEQ ID NO: 55841 - RNA, 19 nt, synthetic construct
  misc_feature 1..19: note = siRNA antisense sequence
  source 1..19: mol_type = other RNA
ttaggagagaatgtacata

SEQ ID NO: 55842 - RNA, 19 nt, synthetic construct
  misc_feature 1..19: note = siRNA sense sequence
  source 1..19: mol_type = other RNA
atgtacattctctcctaaa

SEQ ID NO: 55843 - RNA, 19 nt, synthetic construct
  misc_feature 1..19: note = siRNA antisense sequence
  source 1..19: mol_type = other RNA
tttaggagagaatgtacat

SEQ ID NO: 55844 - RNA, 19 nt, synthetic construct
  misc_feature 1..19: note = siRNA sense sequence
  source 1..19: mol_type = other RNA
tgtacattctctcctaaat

SEQ ID NO: 55845 - RNA, 19 nt, synthetic construct
  misc_feature 1..19: note = siRNA antisense sequence
  source 1..19: mol_type = other RNA
atttaggagagaatgtaca

SEQ ID NO: 55846 - RNA, 19 nt, synthetic construct
  misc_feature 1..19: note = siRNA sense sequence
  source 1..19: mol_type = other RNA
gtacattctctcctaaatt

SEQ ID NO: 55847 - RNA, 19 nt, synthetic construct
  misc_feature 1..19: note = siRNA antisense sequence
  source 1..19: mol_type = other RNA
aatttaggagagaatgtac

SEQ ID NO: 55848 - RNA, 19 nt, synthetic construct
  misc_feature 1..19: note = siRNA sense sequence
  source 1..19: mol_type = other RNA
tacattctctcctaaattg

SEQ ID NO: 55849 - RNA, 19 nt, synthetic construct
  misc_feature 1..19: note = siRNA antisense sequence
  source 1..19: mol_type = other RNA
caatttaggagagaatgta

SEQ ID NO: 55850 - RNA, 19 nt, synthetic construct
  misc_feature 1..19: note = siRNA sense sequence
  source 1..19: mol_type = other RNA
acattctctcctaaattga

SEQ ID NO: 55851 - RNA, 19 nt, synthetic construct
  misc_feature 1..19: note = siRNA antisense sequence
  source 1..19: mol_type = other RNA
tcaatttaggagagaatgt

SEQ ID NO: 55852 - RNA, 19 nt, synthetic construct
  misc_feature 1..19: note = siRNA sense sequence
  source 1..19: mol_type = other RNA
cattctctcctaaattgat

SEQ ID NO: 55853 - RNA, 19 nt, synthetic construct
  misc_feature 1..19: note = siRNA antisense sequence
  source 1..19: mol_type = other RNA
atcaatttaggagagaatg

SEQ ID NO: 55854 - RNA, 19 nt, synthetic construct
  misc_feature 1..19: note = siRNA sense sequence
  source 1..19: mol_type = other RNA
aaatcatgtgtctttcttc

SEQ ID NO: 55855 - RNA, 19 nt, synthetic construct
  misc_feature 1..19: note = siRNA antisense sequence
  source 1..19: mol_type = other RNA
gaagaaagacacatgattt

SEQ ID NO: 55856 - RNA, 19 nt, synthetic construct
  misc_feature 1..19: note = siRNA sense sequence
  source 1..19: mol_type = other RNA
catgtgtctttcttcctat

SEQ ID NO: 55857 - RNA, 19 nt, synthetic construct
  misc_feature 1..19: note = siRNA antisense sequence
  source 1..19: mol_type = other RNA
ataggaagaaagacacatg

SEQ ID NO: 55858 - RNA, 19 nt, synthetic construct
  misc_feature 1..19: note = siRNA sense sequence
  source 1..19: mol_type = other RNA
atgtgtctttcttcctatc

SEQ ID NO: 55859 - RNA, 19 nt, synthetic construct
  misc_feature 1..19: note = siRNA antisense sequence
  source 1..19: mol_type = other RNA
gataggaagaaagacacat

SEQ ID NO: 55860 - RNA, 19 nt, synthetic construct
  misc_feature 1..19: note = siRNA sense sequence
  source 1..19: mol_type = other RNA
tgtgtctttcttcctatca

SEQ ID NO: 55861 - RNA, 19 nt, synthetic construct
  misc_feature 1..19: note = siRNA antisense sequence
  source 1..19: mol_type = other RNA
tgataggaagaaagacaca

SEQ ID NO: 55862 - RNA, 19 nt, synthetic construct
  misc_feature 1..19: note = siRNA sense sequence
  source 1..19: mol_type = other RNA
gtgtctttcttcctatcat

SEQ ID NO: 55863 - RNA, 19 nt, synthetic construct
  misc_feature 1..19: note = siRNA antisense sequence
  source 1..19: mol_type = other RNA
atgataggaagaaagacac

SEQ ID NO: 55864 - RNA, 19 nt, synthetic construct
  misc_feature 1..19: note = siRNA sense sequence
  source 1..19: mol_type = other RNA
tgtctttcttcctatcatt

SEQ ID NO: 55865 - RNA, 19 nt, synthetic construct
  misc_feature 1..19: note = siRNA antisense sequence
  source 1..19: mol_type = other RNA
aatgataggaagaaagaca

SEQ ID NO: 55866 - RNA, 19 nt, synthetic construct
  misc_feature 1..19: note = siRNA sense sequence
  source 1..19: mol_type = other RNA
ttggcttcctcctgtcaac

SEQ ID NO: 55867 - RNA, 19 nt, synthetic construct
  misc_feature 1..19: note = siRNA antisense sequence
  source 1..19: mol_type = other RNA
gttgacaggaggaagccaa

SEQ ID NO: 55868 - RNA, 19 nt, synthetic construct
  misc_feature 1..19: note = siRNA sense sequence
  source 1..19: mol_type = other RNA
tggcttcctcctgtcaact

SEQ ID NO: 55869 - RNA, 19 nt, synthetic construct
  misc_feature 1..19: note = siRNA antisense sequence
  source 1..19: mol_type = other RNA
agttgacaggaggaagcca

SEQ ID NO: 55870 - RNA, 19 nt, synthetic construct
  misc_feature 1..19: note = siRNA sense sequence
  source 1..19: mol_type = other RNA
ttttgtcctgggctgtttt

SEQ ID NO: 55871 - RNA, 19 nt, synthetic construct
  misc_feature 1..19: note = siRNA antisense sequence
  source 1..19: mol_type = other RNA
aaaacagcccaggacaaaa

SEQ ID NO: 55872 - RNA, 19 nt, synthetic construct
  misc_feature 1..19: note = siRNA sense sequence
  source 1..19: mol_type = other RNA
tttgtcctgggctgttttg

SEQ ID NO: 55873 - RNA, 19 nt, synthetic construct
  misc_feature 1..19: note = siRNA antisense sequence
  source 1..19: mol_type = other RNA
caaaacagcccaggacaaa

SEQ ID NO: 55874 - RNA, 19 nt, synthetic construct
  misc_feature 1..19: note = siRNA sense sequence
  source 1..19: mol_type = other RNA
tgtcctgggctgttttgtc

SEQ ID NO: 55875 - RNA, 19 nt, synthetic construct
  misc_feature 1..19: note = siRNA antisense sequence
  source 1..19: mol_type = other RNA
gacaaaacagcccaggaca

SEQ ID NO: 55876 - RNA, 19 nt, synthetic construct
  misc_feature 1..19: note = siRNA sense sequence
  source 1..19: mol_type = other RNA
gtcctgggctgttttgtcc

SEQ ID NO: 55877 - RNA, 19 nt, synthetic construct
  misc_feature 1..19: note = siRNA antisense sequence
  source 1..19: mol_type = other RNA
ggacaaaacagcccaggac

SEQ ID NO: 55878 - RNA, 19 nt, synthetic construct
  misc_feature 1..19: note = siRNA sense sequence
  source 1..19: mol_type = other RNA
tcctgggctgttttgtcct

SEQ ID NO: 55879 - RNA, 19 nt, synthetic construct
  misc_feature 1..19: note = siRNA antisense sequence
  source 1..19: mol_type = other RNA
aggacaaaacagcccagga

SEQ ID NO: 55880 - RNA, 19 nt, synthetic construct
  misc_feature 1..19: note = siRNA sense sequence
  source 1..19: mol_type = other RNA
cctgggctgttttgtcctt

SEQ ID NO: 55881 - RNA, 19 nt, synthetic construct
  misc_feature 1..19: note = siRNA antisense sequence
  source 1..19: mol_type = other RNA
aaggacaaaacagcccagg

SEQ ID NO: 55882 - RNA, 19 nt, synthetic construct
  misc_feature 1..19: note = siRNA sense sequence
  source 1..19: mol_type = other RNA
ctgggctgttttgtccttt

SEQ ID NO: 55883 - RNA, 19 nt, synthetic construct
  misc_feature 1..19: note = siRNA antisense sequence
  source 1..19: mol_type = other RNA
aaaggacaaaacagcccag

SEQ ID NO: 55884 - RNA, 19 nt, synthetic construct
  misc_feature 1..19: note = siRNA sense sequence
  source 1..19: mol_type = other RNA
aagtgtattcttgattacc

SEQ ID NO: 55885 - RNA, 19 nt, synthetic construct
  misc_feature 1..19: note = siRNA antisense sequence
  source 1..19: mol_type = other RNA
ggtaatcaagaatacactt

SEQ ID NO: 55886 - RNA, 19 nt, synthetic construct
  misc_feature 1..19: note = siRNA sense sequence
  source 1..19: mol_type = other RNA
gtattcttgattacctttg

SEQ ID NO: 55887 - RNA, 19 nt, synthetic construct
  misc_feature 1..19: note = siRNA antisense sequence
  source 1..19: mol_type = other RNA
caaaggtaatcaagaatac

SEQ ID NO: 55888 - RNA, 19 nt, synthetic construct
  misc_feature 1..19: note = siRNA sense sequence
  source 1..19: mol_type = other RNA
tattcttgattacctttgc

SEQ ID NO: 55889 - RNA, 19 nt, synthetic construct
  misc_feature 1..19: note = siRNA antisense sequence
  source 1..19: mol_type = other RNA
gcaaaggtaatcaagaata

SEQ ID NO: 55890 - RNA, 19 nt, synthetic construct
  misc_feature 1..19: note = siRNA sense sequence
  source 1..19: mol_type = other RNA
attcttgattacctttgct

SEQ ID NO: 55891 - RNA, 19 nt, synthetic construct
  misc_feature 1..19: note = siRNA antisense sequence
  source 1..19: mol_type = other RNA
agcaaaggtaatcaagaat

SEQ ID NO: 55892 - RNA, 19 nt, synthetic construct
  misc_feature 1..19: note = siRNA sense sequence
  source 1..19: mol_type = other RNA
ttcttgattacctttgcta

SEQ ID NO: 55893 - RNA, 19 nt, synthetic construct
  misc_feature 1..19: note = siRNA antisense sequence
  source 1..19: mol_type = other RNA
tagcaaaggtaatcaagaa

SEQ ID NO: 55894 - RNA, 19 nt, synthetic construct
  misc_feature 1..19: note = siRNA sense sequence
  source 1..19: mol_type = other RNA
tcttgattacctttgctag

SEQ ID NO: 55895 - RNA, 19 nt, synthetic construct
  misc_feature 1..19: note = siRNA antisense sequence
  source 1..19: mol_type = other RNA
ctagcaaaggtaatcaaga

SEQ ID NO: 55896 - RNA, 19 nt, synthetic construct
  misc_feature 1..19: note = siRNA sense sequence
  source 1..19: mol_type = other RNA
cttgattacctttgctagt

SEQ ID NO: 55897 - RNA, 19 nt, synthetic construct
  misc_feature 1..19: note = siRNA antisense sequence
  source 1..19: mol_type = other RNA
actagcaaaggtaatcaag

SEQ ID NO: 55898 - RNA, 19 nt, synthetic construct
  misc_feature 1..19: note = siRNA sense sequence
  source 1..19: mol_type = other RNA
ttgattacctttgctagta

SEQ ID NO: 55899 - RNA, 19 nt, synthetic construct
  misc_feature 1..19: note = siRNA antisense sequence
  source 1..19: mol_type = other RNA
tactagcaaaggtaatcaa

SEQ ID NO: 55900 - RNA, 19 nt, synthetic construct
  misc_feature 1..19: note = siRNA sense sequence
  source 1..19: mol_type = other RNA
tgattacctttgctagtac

SEQ ID NO: 55901 - RNA, 19 nt, synthetic construct
  misc_feature 1..19: note = siRNA antisense sequence
  source 1..19: mol_type = other RNA
gtactagcaaaggtaatca

SEQ ID NO: 55902 - RNA, 19 nt, synthetic construct
  misc_feature 1..19: note = siRNA sense sequence
  source 1..19: mol_type = other RNA
gattacctttgctagtact

SEQ ID NO: 55903 - RNA, 19 nt, synthetic construct
  misc_feature 1..19: note = siRNA antisense sequence
  source 1..19: mol_type = other RNA
agtactagcaaaggtaatc

SEQ ID NO: 55904 - RNA, 19 nt, synthetic construct
  misc_feature 1..19: note = siRNA sense sequence
  source 1..19: mol_type = other RNA
attacctttgctagtactt

SEQ ID NO: 55905 - RNA, 19 nt, synthetic construct
  misc_feature 1..19: note = siRNA antisense sequence
  source 1..19: mol_type = other RNA
aagtactagcaaaggtaat

SEQ ID NO: 55906 - RNA, 19 nt, synthetic construct
  misc_feature 1..19: note = siRNA sense sequence
  source 1..19: mol_type = other RNA
tacctttgctagtactttc

SEQ ID NO: 55907 - RNA, 19 nt, synthetic construct
  misc_feature 1..19: note = siRNA antisense sequence
  source 1..19: mol_type = other RNA
gaaagtactagcaaaggta

SEQ ID NO: 55908 - RNA, 19 nt, synthetic construct
  misc_feature 1..19: note = siRNA sense sequence
  source 1..19: mol_type = other RNA
acctttgctagtactttct

SEQ ID NO: 55909 - RNA, 19 nt, synthetic construct
  misc_feature 1..19: note = siRNA antisense sequence
  source 1..19: mol_type = other RNA
agaaagtactagcaaaggt

SEQ ID NO: 55910 - RNA, 19 nt, synthetic construct
  misc_feature 1..19: note = siRNA sense sequence
  source 1..19: mol_type = other RNA
tttgctagtactttctgtc

SEQ ID NO: 55911 - RNA, 19 nt, synthetic construct
  misc_feature 1..19: note = siRNA antisense sequence
  source 1..19: mol_type = other RNA
gacagaaagtactagcaaa

SEQ ID NO: 55912 - RNA, 19 nt, synthetic construct
  misc_feature 1..19: note = siRNA sense sequence
  source 1..19: mol_type = other RNA
ttgctagtactttctgtct

SEQ ID NO: 55913 - RNA, 19 nt, synthetic construct
  misc_feature 1..19: note = siRNA antisense sequence
  source 1..19: mol_type = other RNA
agacagaaagtactagcaa

SEQ ID NO: 55914 - RNA, 19 nt, synthetic construct
  misc_feature 1..19: note = siRNA sense sequence
  source 1..19: mol_type = other RNA
tgctagtactttctgtctg

SEQ ID NO: 55915 - RNA, 19 nt, synthetic construct
  misc_feature 1..19: note = siRNA antisense sequence
  source 1..19: mol_type = other RNA
cagacagaaagtactagca

SEQ ID NO: 55916 - RNA, 19 nt, synthetic construct
  misc_feature 1..19: note = siRNA sense sequence
  source 1..19: mol_type = other RNA
gctagtactttctgtctgg

SEQ ID NO: 55917 - RNA, 19 nt, synthetic construct
  misc_feature 1..19: note = siRNA antisense sequence
  source 1..19: mol_type = other RNA
ccagacagaaagtactagc

SEQ ID NO: 55918 - RNA, 19 nt, synthetic construct
  misc_feature 1..19: note = siRNA sense sequence
  source 1..19: mol_type = other RNA
ctagtactttctgtctggg

SEQ ID NO: 55919 - RNA, 19 nt, synthetic construct
  misc_feature 1..19: note = siRNA antisense sequence
  source 1..19: mol_type = other RNA
cccagacagaaagtactag

SEQ ID NO: 55920 - RNA, 19 nt, synthetic construct
  misc_feature 1..19: note = siRNA sense sequence
  source 1..19: mol_type = other RNA
tagtactttctgtctgggt

SEQ ID NO: 55921 - RNA, 19 nt, synthetic construct
  misc_feature 1..19: note = siRNA antisense sequence
  source 1..19: mol_type = other RNA
acccagacagaaagtacta

SEQ ID NO: 55922 - RNA, 19 nt, synthetic construct
  misc_feature 1..19: note = siRNA sense sequence
  source 1..19: mol_type = other RNA
agtactttctgtctgggtt

SEQ ID NO: 55923 - RNA, 19 nt, synthetic construct
  misc_feature 1..19: note = siRNA antisense sequence
  source 1..19: mol_type = other RNA
aacccagacagaaagtact

SEQ ID NO: 55924 - RNA, 19 nt, synthetic construct
  misc_feature 1..19: note = siRNA sense sequence
  source 1..19: mol_type = other RNA
ttccttccactctaggcag

SEQ ID NO: 55925 - RNA, 19 nt, synthetic construct
  misc_feature 1..19: note = siRNA antisense sequence
  source 1..19: mol_type = other RNA
ctgcctagagtggaaggaa

SEQ ID NO: 55926 - RNA, 19 nt, synthetic construct
  misc_feature 1..19: note = siRNA sense sequence
  source 1..19: mol_type = other RNA
tccttccactctaggcagc

SEQ ID NO: 55927 - RNA, 19 nt, synthetic construct
  misc_feature 1..19: note = siRNA antisense sequence
  source 1..19: mol_type = other RNA
gctgcctagagtggaagga

SEQ ID NO: 55928 - RNA, 19 nt, synthetic construct
  misc_feature 1..19: note = siRNA sense sequence
  source 1..19: mol_type = other RNA
agtttcctttctgagcaga

SEQ ID NO: 55929 - RNA, 19 nt, synthetic construct
  misc_feature 1..19: note = siRNA antisense sequence
  source 1..19: mol_type = other RNA
tctgctcagaaaggaaact

SEQ ID NO: 55930 - RNA, 19 nt, synthetic construct
  misc_feature 1..19: note = siRNA sense sequence
  source 1..19: mol_type = other RNA
ctgagcagaataaattttc

SEQ ID NO: 55931 - RNA, 19 nt, synthetic construct
  misc_feature 1..19: note = siRNA antisense sequence
  source 1..19: mol_type = other RNA
gaaaatttattctgctcag

SEQ ID NO: 55932 - RNA, 19 nt, synthetic construct
  misc_feature 1..19: note = siRNA sense sequence
  source 1..19: mol_type = other RNA
tgagcagaataaattttcg

SEQ ID NO: 55933 - RNA, 19 nt, synthetic construct
  misc_feature 1..19: note = siRNA antisense sequence
  source 1..19: mol_type = other RNA
cgaaaatttattctgctca

SEQ ID NO: 55934 - RNA, 19 nt, synthetic construct
  misc_feature 1..19: note = siRNA sense sequence
  source 1..19: mol_type = other RNA
gagcagaataaattttcgc

SEQ ID NO: 55935 - RNA, 19 nt, synthetic construct
  misc_feature 1..19: note = siRNA antisense sequence
  source 1..19: mol_type = other RNA
gcgaaaatttattctgctc

SEQ ID NO: 55936 - RNA, 19 nt, synthetic construct
  misc_feature 1..19: note = siRNA sense sequence
  source 1..19: mol_type = other RNA
agcagaataaattttcgct

SEQ ID NO: 55937 - RNA, 19 nt, synthetic construct
  misc_feature 1..19: note = siRNA antisense sequence
  source 1..19: mol_type = other RNA
agcgaaaatttattctgct

SEQ ID NO: 55938 - RNA, 19 nt, synthetic construct
  misc_feature 1..19: note = siRNA sense sequence
  source 1..19: mol_type = other RNA
gcagaataaattttcgctt

SEQ ID NO: 55939 - RNA, 19 nt, synthetic construct
  misc_feature 1..19: note = siRNA antisense sequence
  source 1..19: mol_type = other RNA
aagcgaaaatttattctgc

SEQ ID NO: 55940 - RNA, 19 nt, synthetic construct
  misc_feature 1..19: note = siRNA sense sequence
  source 1..19: mol_type = other RNA
tgggtgaagaagggatagt

SEQ ID NO: 55941 - RNA, 19 nt, synthetic construct
  misc_feature 1..19: note = siRNA antisense sequence
  source 1..19: mol_type = other RNA
actatcccttcttcaccca

SEQ ID NO: 55942 - RNA, 19 nt, synthetic construct
  misc_feature 1..19: note = siRNA sense sequence
  source 1..19: mol_type = other RNA
gggtgaagaagggatagtg

SEQ ID NO: 55943 - RNA, 19 nt, synthetic construct
  misc_feature 1..19: note = siRNA antisense sequence
  source 1..19: mol_type = other RNA
cactatcccttcttcaccc

SEQ ID NO: 55944 - RNA, 19 nt, synthetic construct
  misc_feature 1..19: note = siRNA sense sequence
  source 1..19: mol_type = other RNA
ggtgaagaagggatagtgg

SEQ ID NO: 55945 - RNA, 19 nt, synthetic construct
  misc_feature 1..19: note = siRNA antisense sequence
  source 1..19: mol_type = other RNA
ccactatcccttcttcacc

SEQ ID NO: 55946 - RNA, 19 nt, synthetic construct
  misc_feature 1..19: note = siRNA sense sequence
  source 1..19: mol_type = other RNA
aagaagggatagtggcaca

SEQ ID NO: 55947 - RNA, 19 nt, synthetic construct
  misc_feature 1..19: note = siRNA antisense sequence
  source 1..19: mol_type = other RNA
tgtgccactatcccttctt

SEQ ID NO: 55948 - RNA, 19 nt, synthetic construct
  misc_feature 1..19: note = siRNA sense sequence
  source 1..19: mol_type = other RNA
aaaagatgctctgaattgt

SEQ ID NO: 55949 - RNA, 19 nt, synthetic construct
  misc_feature 1..19: note = siRNA antisense sequence
  source 1..19: mol_type = other RNA
acaattcagagcatctttt

SEQ ID NO: 55950 - RNA, 19 nt, synthetic construct
  misc_feature 1..19: note = siRNA sense sequence
  source 1..19: mol_type = other RNA
aaagatgctctgaattgta

SEQ ID NO: 55951 - RNA, 19 nt, synthetic construct
  misc_feature 1..19: note = siRNA antisense sequence
  source 1..19: mol_type = other RNA
tacaattcagagcatcttt

SEQ ID NO: 55952 - RNA, 19 nt, synthetic construct
  misc_feature 1..19: note = siRNA sense sequence
  source 1..19: mol_type = other RNA
tatgtctcccacacttcta

SEQ ID NO: 55953 - RNA, 19 nt, synthetic construct
  misc_feature 1..19: note = siRNA antisense sequence
  source 1..19: mol_type = other RNA
tagaagtgtgggagacata

SEQ ID NO: 55954 - RNA, 19 nt, synthetic construct
  misc_feature 1..19: note = siRNA sense sequence
  source 1..19: mol_type = other RNA
atgtctcccacacttctac

SEQ ID NO: 55955 - RNA, 19 nt, synthetic construct
  misc_feature 1..19: note = siRNA antisense sequence
  source 1..19: mol_type = other RNA
gtagaagtgtgggagacat

SEQ ID NO: 55956 - RNA, 19 nt, synthetic construct
  misc_feature 1..19: note = siRNA sense sequence
  source 1..19: mol_type = other RNA
ctcccacacttctaccatc

SEQ ID NO: 55957 - RNA, 19 nt, synthetic construct
  misc_feature 1..19: note = siRNA antisense sequence
  source 1..19: mol_type = other RNA
gatggtagaagtgtgggag

SEQ ID NO: 55958 - RNA, 19 nt, synthetic construct
  misc_feature 1..19: note = siRNA sense sequence
  source 1..19: mol_type = other RNA
tcccacacttctaccatct

SEQ ID NO: 55959 - RNA, 19 nt, synthetic construct
  misc_feature 1..19: note = siRNA antisense sequence
  source 1..19: mol_type = other RNA
agatggtagaagtgtggga

SEQ ID NO: 55960 - RNA, 19 nt, synthetic construct
  misc_feature 1..19: note = siRNA sense sequence
  source 1..19: mol_type = other RNA
cccacacttctaccatctg

SEQ ID NO: 55961 - RNA, 19 nt, synthetic construct
  misc_feature 1..19: note = siRNA antisense sequence
  source 1..19: mol_type = other RNA
cagatggtagaagtgtggg

SEQ ID NO: 55962 - RNA, 19 nt, synthetic construct
  misc_feature 1..19: note = siRNA sense sequence
  source 1..19: mol_type = other RNA
ccacacttctaccatctgc

SEQ ID NO: 55963 - RNA, 19 nt, synthetic construct
  misc_feature 1..19: note = siRNA antisense sequence
  source 1..19: mol_type = other RNA
gcagatggtagaagtgtgg

SEQ ID NO: 55964 - RNA, 19 nt, synthetic construct
  misc_feature 1..19: note = siRNA sense sequence
  source 1..19: mol_type = other RNA
cacacttctaccatctgct

SEQ ID NO: 55965 - RNA, 19 nt, synthetic construct
  misc_feature 1..19: note = siRNA antisense sequence
  source 1..19: mol_type = other RNA
agcagatggtagaagtgtg

SEQ ID NO: 55966 - RNA, 19 nt, synthetic construct
  misc_feature 1..19: note = siRNA sense sequence
  source 1..19: mol_type = other RNA
acacttctaccatctgctc

SEQ ID NO: 55967 - RNA, 19 nt, synthetic construct
  misc_feature 1..19: note = siRNA antisense sequence
  source 1..19: mol_type = other RNA
gagcagatggtagaagtgt

SEQ ID NO: 55968 - RNA, 19 nt, synthetic construct
  misc_feature 1..19: note = siRNA sense sequence
  source 1..19: mol_type = other RNA
cacttctaccatctgctct

SEQ ID NO: 55969 - RNA, 19 nt, synthetic construct
  misc_feature 1..19: note = siRNA antisense sequence
  source 1..19: mol_type = other RNA
agagcagatggtagaagtg

SEQ ID NO: 55970 - RNA, 19 nt, synthetic construct
  misc_feature 1..19: note = siRNA sense sequence
  source 1..19: mol_type = other RNA
acttctaccatctgctctt

SEQ ID NO: 55971 - RNA, 19 nt, synthetic construct
  misc_feature 1..19: note = siRNA antisense sequence
  source 1..19: mol_type = other RNA
aagagcagatggtagaagt

SEQ ID NO: 55972 - RNA, 19 nt, synthetic construct
  misc_feature 1..19: note = siRNA sense sequence
  source 1..19: mol_type = other RNA
ttctaccatctgctctttg

SEQ ID NO: 55973 - RNA, 19 nt, synthetic construct
  misc_feature 1..19: note = siRNA antisense sequence
  source 1..19: mol_type = other RNA
caaagagcagatggtagaa

SEQ ID NO: 55974 - RNA, 19 nt, synthetic construct
  misc_feature 1..19: note = siRNA sense sequence
  source 1..19: mol_type = other RNA
tctaccatctgctctttgg

SEQ ID NO: 55975 - RNA, 19 nt, synthetic construct
  misc_feature 1..19: note = siRNA antisense sequence
  source 1..19: mol_type = other RNA
ccaaagagcagatggtaga

SEQ ID NO: 55976 - RNA, 19 nt, synthetic construct
  misc_feature 1..19: note = siRNA sense sequence
  source 1..19: mol_type = other RNA
ctaccatctgctctttgga

SEQ ID NO: 55977 - RNA, 19 nt, synthetic construct
  misc_feature 1..19: note = siRNA antisense sequence
  source 1..19: mol_type = other RNA
tccaaagagcagatggtag

SEQ ID NO: 55978 - RNA, 19 nt, synthetic construct
  misc_feature 1..19: note = siRNA sense sequence
  source 1..19: mol_type = other RNA
taccatctgctctttggaa

SEQ ID NO: 55979 - RNA, 19 nt, synthetic construct
  misc_feature 1..19: note = siRNA antisense sequence
  source 1..19: mol_type = other RNA
ttccaaagagcagatggta

SEQ ID NO: 55980 - RNA, 19 nt, synthetic construct
  misc_feature 1..19: note = siRNA sense sequence
  source 1..19: mol_type = other RNA
catctgctctttggaatcc

SEQ ID NO: 55981 - RNA, 19 nt, synthetic construct
  misc_feature 1..19: note = siRNA antisense sequence
  source 1..19: mol_type = other RNA
ggattccaaagagcagatg

SEQ ID NO: 55982 - RNA, 19 nt, synthetic construct
  misc_feature 1..19: note = siRNA sense sequence
  source 1..19: mol_type = other RNA
atctgctctttggaatccc

SEQ ID NO: 55983 - RNA, 19 nt, synthetic construct
  misc_feature 1..19: note = siRNA antisense sequence
  source 1..19: mol_type = other RNA
gggattccaaagagcagat

SEQ ID NO: 55984 - RNA, 19 nt, synthetic construct
  misc_feature 1..19: note = siRNA sense sequence
  source 1..19: mol_type = other RNA
gctctttggaatccctaac

SEQ ID NO: 55985 - RNA, 19 nt, synthetic construct
  misc_feature 1..19: note = siRNA antisense sequence
  source 1..19: mol_type = other RNA
gttagggattccaaagagc

SEQ ID NO: 55986 - RNA, 19 nt, synthetic construct
  misc_feature 1..19: note = siRNA sense sequence
  source 1..19: mol_type = other RNA
ctctttggaatccctaact

SEQ ID NO: 55987 - RNA, 19 nt, synthetic construct
  misc_feature 1..19: note = siRNA antisense sequence
  source 1..19: mol_type = other RNA
agttagggattccaaagag

SEQ ID NO: 55988 - RNA, 19 nt, synthetic construct
  misc_feature 1..19: note = siRNA sense sequence
  source 1..19: mol_type = other RNA
tctttggaatccctaactt

SEQ ID NO: 55989 - RNA, 19 nt, synthetic construct
  misc_feature 1..19: note = siRNA antisense sequence
  source 1..19: mol_type = other RNA
aagttagggattccaaaga

SEQ ID NO: 55990 - RNA, 19 nt, synthetic construct
  misc_feature 1..19: note = siRNA sense sequence
  source 1..19: mol_type = other RNA
ctttggaatccctaacttt

SEQ ID NO: 55991 - RNA, 19 nt, synthetic construct
  misc_feature 1..19: note = siRNA antisense sequence
  source 1..19: mol_type = other RNA
aaagttagggattccaaag

SEQ ID NO: 55992 - RNA, 19 nt, synthetic construct
  misc_feature 1..19: note = siRNA sense sequence
  source 1..19: mol_type = other RNA
tttggaatccctaacttta

SEQ ID NO: 55993 - RNA, 19 nt, synthetic construct
  misc_feature 1..19: note = siRNA antisense sequence
  source 1..19: mol_type = other RNA
taaagttagggattccaaa

SEQ ID NO: 55994 - RNA, 19 nt, synthetic construct
  misc_feature 1..19: note = siRNA sense sequence
  source 1..19: mol_type = other RNA
ttggaatccctaactttac

SEQ ID NO: 55995 - RNA, 19 nt, synthetic construct
  misc_feature 1..19: note = siRNA antisense sequence
  source 1..19: mol_type = other RNA
gtaaagttagggattccaa

SEQ ID NO: 55996 - RNA, 19 nt, synthetic construct
  misc_feature 1..19: note = siRNA sense sequence
  source 1..19: mol_type = other RNA
tggaatccctaactttact

SEQ ID NO: 55997 - RNA, 19 nt, synthetic construct
  misc_feature 1..19: note = siRNA antisense sequence
  source 1..19: mol_type = other RNA
agtaaagttagggattcca

SEQ ID NO: 55998 - RNA, 19 nt, synthetic construct
  misc_feature 1..19: note = siRNA sense sequence
  source 1..19: mol_type = other RNA
ggaatccctaactttactc

SEQ ID NO: 55999 - RNA, 19 nt, synthetic construct
  misc_feature 1..19: note = siRNA antisense sequence
  source 1..19: mol_type = other RNA
gagtaaagttagggattcc

SEQ ID NO: 56000 - RNA, 19 nt, synthetic construct
  misc_feature 1..19: note = siRNA sense sequence
  source 1..19: mol_type = other RNA
gaatccctaactttactct

SEQ ID NO: 56001 - RNA, 19 nt, synthetic construct
  misc_feature 1..19: note = siRNA antisense sequence
  source 1..19: mol_type = other RNA
agagtaaagttagggattc

SEQ ID NO: 56002 - RNA, 19 nt, synthetic construct
  misc_feature 1..19: note = siRNA sense sequence
  source 1..19: mol_type = other RNA
aatccctaactttactctc

SEQ ID NO: 56003 - RNA, 19 nt, synthetic construct
  misc_feature 1..19: note = siRNA antisense sequence
  source 1..19: mol_type = other RNA
gagagtaaagttagggatt

SEQ ID NO: 56004 - RNA, 19 nt, synthetic construct
  misc_feature 1..19: note = siRNA sense sequence
  source 1..19: mol_type = other RNA
atccctaactttactctca

SEQ ID NO: 56005 - RNA, 19 nt, synthetic construct
  misc_feature 1..19: note = siRNA antisense sequence
  source 1..19: mol_type = other RNA
tgagagtaaagttagggat

SEQ ID NO: 56006 - RNA, 19 nt, synthetic construct
  misc_feature 1..19: note = siRNA sense sequence
  source 1..19: mol_type = other RNA
tccctaactttactctcag

SEQ ID NO: 56007 - RNA, 19 nt, synthetic construct
  misc_feature 1..19: note = siRNA antisense sequence
  source 1..19: mol_type = other RNA
ctgagagtaaagttaggga

SEQ ID NO: 56008 - RNA, 19 nt, synthetic construct
  misc_feature 1..19: note = siRNA sense sequence
  source 1..19: mol_type = other RNA
ccctaactttactctcaga

SEQ ID NO: 56009 - RNA, 19 nt, synthetic construct
  misc_feature 1..19: note = siRNA antisense sequence
  source 1..19: mol_type = other RNA
tctgagagtaaagttaggg

SEQ ID NO: 56010 - RNA, 19 nt, synthetic construct
  misc_feature 1..19: note = siRNA sense sequence
  source 1..19: mol_type = other RNA
cctaactttactctcagat

SEQ ID NO: 56011 - RNA, 19 nt, synthetic construct
  misc_feature 1..19: note = siRNA antisense sequence
  source 1..19: mol_type = other RNA
atctgagagtaaagttagg

SEQ ID NO: 56012 - RNA, 19 nt, synthetic construct
  misc_feature 1..19: note = siRNA sense sequence
  source 1..19: mol_type = other RNA
ctaactttactctcagata

SEQ ID NO: 56013 - RNA, 19 nt, synthetic construct
  misc_feature 1..19: note = siRNA antisense sequence
  source 1..19: mol_type = other RNA
tatctgagagtaaagttag

SEQ ID NO: 56014 - RNA, 19 nt, synthetic construct
  misc_feature 1..19: note = siRNA sense sequence
  source 1..19: mol_type = other RNA
taactttactctcagatag

SEQ ID NO: 56015 - RNA, 19 nt, synthetic construct
  misc_feature 1..19: note = siRNA antisense sequence
  source 1..19: mol_type = other RNA
ctatctgagagtaaagtta

SEQ ID NO: 56016 - RNA, 19 nt, synthetic construct
  misc_feature 1..19: note = siRNA sense sequence
  source 1..19: mol_type = other RNA
aactttactctcagatagg

SEQ ID NO: 56017 - RNA, 19 nt, synthetic construct
  misc_feature 1..19: note = siRNA antisense sequence
  source 1..19: mol_type = other RNA
cctatctgagagtaaagtt

SEQ ID NO: 56018 - RNA, 19 nt, synthetic construct
  misc_feature 1..19: note = siRNA sense sequence
  source 1..19: mol_type = other RNA
actttactctcagataggc

SEQ ID NO: 56019 - RNA, 19 nt, synthetic construct
  misc_feature 1..19: note = siRNA antisense sequence
  source 1..19: mol_type = other RNA
gcctatctgagagtaaagt

SEQ ID NO: 56020 - RNA, 19 nt, synthetic construct
  misc_feature 1..19: note = siRNA sense sequence
  source 1..19: mol_type = other RNA
ctttactctcagataggca

SEQ ID NO: 56021 - RNA, 19 nt, synthetic construct
  misc_feature 1..19: note = siRNA antisense sequence
  source 1..19: mol_type = other RNA
tgcctatctgagagtaaag

SEQ ID NO: 56022 - RNA, 19 nt, synthetic construct
  misc_feature 1..19: note = siRNA sense sequence
  source 1..19: mol_type = other RNA
tttactctcagataggcac

SEQ ID NO: 56023 - RNA, 19 nt, synthetic construct
  misc_feature 1..19: note = siRNA antisense sequence
  source 1..19: mol_type = other RNA
gtgcctatctgagagtaaa

SEQ ID NO: 56024 - RNA, 19 nt, synthetic construct
  misc_feature 1..19: note = siRNA sense sequence
  source 1..19: mol_type = other RNA
ttactctcagataggcaca

SEQ ID NO: 56025 - RNA, 19 nt, synthetic construct
  misc_feature 1..19: note = siRNA antisense sequence
  source 1..19: mol_type = other RNA
tgtgcctatctgagagtaa

SEQ ID NO: 56026 - RNA, 19 nt, synthetic construct
  misc_feature 1..19: note = siRNA sense sequence
  source 1..19: mol_type = other RNA
tactctcagataggcacac

SEQ ID NO: 56027 - RNA, 19 nt, synthetic construct
  misc_feature 1..19: note = siRNA antisense sequence
  source 1..19: mol_type = other RNA
gtgtgcctatctgagagta

SEQ ID NO: 56028 - RNA, 19 nt, synthetic construct
  misc_feature 1..19: note = siRNA sense sequence
  source 1..19: mol_type = other RNA
actctcagataggcacact

SEQ ID NO: 56029 - RNA, 19 nt, synthetic construct
  misc_feature 1..19: note = siRNA antisense sequence
  source 1..19: mol_type = other RNA
agtgtgcctatctgagagt

SEQ ID NO: 56030 - RNA, 19 nt, synthetic construct
  misc_feature 1..19: note = siRNA sense sequence
  source 1..19: mol_type = other RNA
ctctcagataggcacactt

SEQ ID NO: 56031 - RNA, 19 nt, synthetic construct
  misc_feature 1..19: note = siRNA antisense sequence
  source 1..19: mol_type = other RNA
aagtgtgcctatctgagag

SEQ ID NO: 56032 - RNA, 19 nt, synthetic construct
  misc_feature 1..19: note = siRNA sense sequence
  source 1..19: mol_type = other RNA
caaatggctgttaatagca

SEQ ID NO: 56033 - RNA, 19 nt, synthetic construct
  misc_feature 1..19: note = siRNA antisense sequence
  source 1..19: mol_type = other RNA
tgctattaacagccatttg

SEQ ID NO: 56034 - RNA, 19 nt, synthetic construct
  misc_feature 1..19: note = siRNA sense sequence
  source 1..19: mol_type = other RNA
aaatggctgttaatagcac

SEQ ID NO: 56035 - RNA, 19 nt, synthetic construct
  misc_feature 1..19: note = siRNA antisense sequence
  source 1..19: mol_type = other RNA
gtgctattaacagccattt

SEQ ID NO: 56036 - RNA, 19 nt, synthetic construct
  misc_feature 1..19: note = siRNA sense sequence
  source 1..19: mol_type = other RNA
tagcactgatttagtatac

SEQ ID NO: 56037 - RNA, 19 nt, synthetic construct
  misc_feature 1..19: note = siRNA antisense sequence
  source 1..19: mol_type = other RNA
gtatactaaatcagtgcta

SEQ ID NO: 56038 - RNA, 19 nt, synthetic construct
  misc_feature 1..19: note = siRNA sense sequence
  source 1..19: mol_type = other RNA
agcactgatttagtatact

SEQ ID NO: 56039 - RNA, 19 nt, synthetic construct
  misc_feature 1..19: note = siRNA antisense sequence
  source 1..19: mol_type = other RNA
agtatactaaatcagtgct

SEQ ID NO: 56040 - RNA, 19 nt, synthetic construct
  misc_feature 1..19: note = siRNA sense sequence
  source 1..19: mol_type = other RNA
gcactgatttagtatactt

SEQ ID NO: 56041 - RNA, 19 nt, synthetic construct
  misc_feature 1..19: note = siRNA antisense sequence
  source 1..19: mol_type = other RNA
aagtatactaaatcagtgc

SEQ ID NO: 56042 - RNA, 19 nt, synthetic construct
  misc_feature 1..19: note = siRNA sense sequence
  source 1..19: mol_type = other RNA
actctgctgtagtaatgat

SEQ ID NO: 56043 - RNA, 19 nt, synthetic construct
  misc_feature 1..19: note = siRNA antisense sequence
  source 1..19: mol_type = other RNA
atcattactacagcagagt

SEQ ID NO: 56044 - RNA, 19 nt, synthetic construct
  misc_feature 1..19: note = siRNA sense sequence
  source 1..19: mol_type = other RNA
ctctgctgtagtaatgatg

SEQ ID NO: 56045 - RNA, 19 nt, synthetic construct
  misc_feature 1..19: note = siRNA antisense sequence
  source 1..19: mol_type = other RNA
catcattactacagcagag

SEQ ID NO: 56046 - RNA, 19 nt, synthetic construct
  misc_feature 1..19: note = siRNA sense sequence
  source 1..19: mol_type = other RNA
tctgctgtagtaatgatgg

SEQ ID NO: 56047 - RNA, 19 nt, synthetic construct
  misc_feature 1..19: note = siRNA antisense sequence
  source 1..19: mol_type = other RNA
ccatcattactacagcaga

SEQ ID NO: 56048 - RNA, 19 nt, synthetic construct
  misc_feature 1..19: note = siRNA sense sequence
  source 1..19: mol_type = other RNA
ctgctgtagtaatgatgga

SEQ ID NO: 56049 - RNA, 19 nt, synthetic construct
  misc_feature 1..19: note = siRNA antisense sequence
  source 1..19: mol_type = other RNA
tccatcattactacagcag

SEQ ID NO: 56050 - RNA, 19 nt, synthetic construct
  misc_feature 1..19: note = siRNA sense sequence
  source 1..19: mol_type = other RNA
tgctgtagtaatgatggaa

SEQ ID NO: 56051 - RNA, 19 nt, synthetic construct
  misc_feature 1..19: note = siRNA antisense sequence
  source 1..19: mol_type = other RNA
ttccatcattactacagca

SEQ ID NO: 56052 - RNA, 19 nt, synthetic construct
  misc_feature 1..19: note = siRNA sense sequence
  source 1..19: mol_type = other RNA
atatcaaatgagcctggaa

SEQ ID NO: 56053 - RNA, 19 nt, synthetic construct
  misc_feature 1..19: note = siRNA antisense sequence
  source 1..19: mol_type = other RNA
ttccaggctcatttgatat

SEQ ID NO: 56054 - RNA, 19 nt, synthetic construct
  misc_feature 1..19: note = siRNA sense sequence
  source 1..19: mol_type = other RNA
aacctattaagcagacgtg

SEQ ID NO: 56055 - RNA, 19 nt, synthetic construct
  misc_feature 1..19: note = siRNA antisense sequence
  source 1..19: mol_type = other RNA
cacgtctgcttaataggtt

SEQ ID NO: 56056 - RNA, 19 nt, synthetic construct
  misc_feature 1..19: note = siRNA sense sequence
  source 1..19: mol_type = other RNA
acctattaagcagacgtgc

SEQ ID NO: 56057 - RNA, 19 nt, synthetic construct
  misc_feature 1..19: note = siRNA antisense sequence
  source 1..19: mol_type = other RNA
gcacgtctgcttaataggt

SEQ ID NO: 56058 - RNA, 19 nt, synthetic construct
  misc_feature 1..19: note = siRNA sense sequence
  source 1..19: mol_type = other RNA
gcagacgtgctgttcatct

SEQ ID NO: 56059 - RNA, 19 nt, synthetic construct
  misc_feature 1..19: note = siRNA antisense sequence
  source 1..19: mol_type = other RNA
agatgaacagcacgtctgc

SEQ ID NO: 56060 - RNA, 19 nt, synthetic construct
  misc_feature 1..19: note = siRNA sense sequence
  source 1..19: mol_type = other RNA
acgtgctgttcatctcggc

SEQ ID NO: 56061 - RNA, 19 nt, synthetic construct
  misc_feature 1..19: note = siRNA antisense sequence
  source 1..19: mol_type = other RNA
gccgagatgaacagcacgt

SEQ ID NO: 56062 - RNA, 19 nt, synthetic construct
  misc_feature 1..19: note = siRNA sense sequence
  source 1..19: mol_type = other RNA
cgtgctgttcatctcggca

SEQ ID NO: 56063 - RNA, 19 nt, synthetic construct
  misc_feature 1..19: note = siRNA antisense sequence
  source 1..19: mol_type = other RNA
tgccgagatgaacagcacg

SEQ ID NO: 56064 - RNA, 19 nt, synthetic construct
  misc_feature 1..19: note = siRNA sense sequence
  source 1..19: mol_type = other RNA
gtgctgttcatctcggcag

SEQ ID NO: 56065 - RNA, 19 nt, synthetic construct
  misc_feature 1..19: note = siRNA antisense sequence
  source 1..19: mol_type = other RNA
ctgccgagatgaacagcac

SEQ ID NO: 56066 - RNA, 19 nt, synthetic construct
  misc_feature 1..19: note = siRNA sense sequence
  source 1..19: mol_type = other RNA
ctgttcatctcggcagcac

SEQ ID NO: 56067 - RNA, 19 nt, synthetic construct
  misc_feature 1..19: note = siRNA antisense sequence
  source 1..19: mol_type = other RNA
gtgctgccgagatgaacag

SEQ ID NO: 56068 - RNA, 19 nt, synthetic construct
  misc_feature 1..19: note = siRNA sense sequence
  source 1..19: mol_type = other RNA
actgcaattgctgctgtaa

SEQ ID NO: 56069 - RNA, 19 nt, synthetic construct
  misc_feature 1..19: note = siRNA antisense sequence
  source 1..19: mol_type = other RNA
ttacagcagcaattgcagt

SEQ ID NO: 56070 - RNA, 19 nt, synthetic construct
  misc_feature 1..19: note = siRNA sense sequence
  source 1..19: mol_type = other RNA
ctgcaattgctgctgtaaa

SEQ ID NO: 56071 - RNA, 19 nt, synthetic construct
  misc_feature 1..19: note = siRNA antisense sequence
  source 1..19: mol_type = other RNA
tttacagcagcaattgcag

SEQ ID NO: 56072 - RNA, 19 nt, synthetic construct
  misc_feature 1..19: note = siRNA sense sequence
  source 1..19: mol_type = other RNA
gcaattgctgctgtaaaag

SEQ ID NO: 56073 - RNA, 19 nt, synthetic construct
  misc_feature 1..19: note = siRNA antisense sequence
  source 1..19: mol_type = other RNA
cttttacagcagcaattgc

SEQ ID NO: 56074 - RNA, 19 nt, synthetic construct
  misc_feature 1..19: note = siRNA sense sequence
  source 1..19: mol_type = other RNA
attgctgctgtaaaagacc

SEQ ID NO: 56075 - RNA, 19 nt, synthetic construct
  misc_feature 1..19: note = siRNA antisense sequence
  source 1..19: mol_type = other RNA
ggtcttttacagcagcaat

SEQ ID NO: 56076 - RNA, 19 nt, synthetic construct
  misc_feature 1..19: note = siRNA sense sequence
  source 1..19: mol_type = other RNA
tgctgctgtaaaagacctc

SEQ ID NO: 56077 - RNA, 19 nt, synthetic construct
  misc_feature 1..19: note = siRNA antisense sequence
  source 1..19: mol_type = other RNA
gaggtcttttacagcagca

SEQ ID NO: 56078 - RNA, 19 nt, synthetic construct
  misc_feature 1..19: note = siRNA sense sequence
  source 1..19: mol_type = other RNA
gctgctgtaaaagacctca

SEQ ID NO: 56079 - RNA, 19 nt, synthetic construct
  misc_feature 1..19: note = siRNA antisense sequence
  source 1..19: mol_type = other RNA
tgaggtcttttacagcagc

SEQ ID NO: 56080 - RNA, 19 nt, synthetic construct
  misc_feature 1..19: note = siRNA sense sequence
  source 1..19: mol_type = other RNA
ctgctgtaaaagacctcaa

SEQ ID NO: 56081 - RNA, 19 nt, synthetic construct
  misc_feature 1..19: note = siRNA antisense sequence
  source 1..19: mol_type = other RNA
ttgaggtcttttacagcag

SEQ ID NO: 56082 - RNA, 19 nt, synthetic construct
  misc_feature 1..19: note = siRNA sense sequence
  source 1..19: mol_type = other RNA
tgctgtaaaagacctcaat

SEQ ID NO: 56083 - RNA, 19 nt, synthetic construct
  misc_feature 1..19: note = siRNA antisense sequence
  source 1..19: mol_type = other RNA
attgaggtcttttacagca

SEQ ID NO: 56084 - RNA, 19 nt, synthetic construct
  misc_feature 1..19: note = siRNA sense sequence
  source 1..19: mol_type = other RNA
gctgtaaaagacctcaatc

SEQ ID NO: 56085 - RNA, 19 nt, synthetic construct
  misc_feature 1..19: note = siRNA antisense sequence
  source 1..19: mol_type = other RNA
gattgaggtcttttacagc

SEQ ID NO: 56086 - RNA, 19 nt, synthetic construct
  misc_feature 1..19: note = siRNA sense sequence
  source 1..19: mol_type = other RNA
ctgtaaaagacctcaatct

SEQ ID NO: 56087 - RNA, 19 nt, synthetic construct
  misc_feature 1..19: note = siRNA antisense sequence
  source 1..19: mol_type = other RNA
agattgaggtcttttacag

SEQ ID NO: 56088 - RNA, 19 nt, synthetic construct
  misc_feature 1..19: note = siRNA sense sequence
  source 1..19: mol_type = other RNA
agacctcaatcttgatgga

SEQ ID NO: 56089 - RNA, 19 nt, synthetic construct
  misc_feature 1..19: note = siRNA antisense sequence
  source 1..19: mol_type = other RNA
tccatcaagattgaggtct

SEQ ID NO: 56090 - RNA, 19 nt, synthetic construct
  misc_feature 1..19: note = siRNA sense sequence
  source 1..19: mol_type = other RNA
gacctcaatcttgatggat

SEQ ID NO: 56091 - RNA, 19 nt, synthetic construct
  misc_feature 1..19: note = siRNA antisense sequence
  source 1..19: mol_type = other RNA
atccatcaagattgaggtc

SEQ ID NO: 56092 - RNA, 19 nt, synthetic construct
  misc_feature 1..19: note = siRNA sense sequence
  source 1..19: mol_type = other RNA
tcttgatggatttaatgac

SEQ ID NO: 56093 - RNA, 19 nt, synthetic construct
  misc_feature 1..19: note = siRNA antisense sequence
  source 1..19: mol_type = other RNA
gtcattaaatccatcaaga

SEQ ID NO: 56094 - RNA, 19 nt, synthetic construct
  misc_feature 1..19: note = siRNA sense sequence
  source 1..19: mol_type = other RNA
cttgatggatttaatgaca

SEQ ID NO: 56095 - RNA, 19 nt, synthetic construct
  misc_feature 1..19: note = siRNA antisense sequence
  source 1..19: mol_type = other RNA
tgtcattaaatccatcaag

SEQ ID NO: 56096 - RNA, 19 nt, synthetic construct
  misc_feature 1..19: note = siRNA sense sequence
  source 1..19: mol_type = other RNA
tggatttaatgacatcgtg

SEQ ID NO: 56097 - RNA, 19 nt, synthetic construct
  misc_feature 1..19: note = siRNA antisense sequence
  source 1..19: mol_type = other RNA
cacgatgtcattaaatcca

SEQ ID NO: 56098 - RNA, 19 nt, synthetic construct
  misc_feature 1..19: note = siRNA sense sequence
  source 1..19: mol_type = other RNA
ggatttaatgacatcgtga

SEQ ID NO: 56099 - RNA, 19 nt, synthetic construct
  misc_feature 1..19: note = siRNA antisense sequence
  source 1..19: mol_type = other RNA
tcacgatgtcattaaatcc

SEQ ID NO: 56100 - RNA, 19 nt, synthetic construct
  misc_feature 1..19: note = siRNA sense sequence
  source 1..19: mol_type = other RNA
gatttaatgacatcgtgat

SEQ ID NO: 56101 - RNA, 19 nt, synthetic construct
  misc_feature 1..19: note = siRNA antisense sequence
  source 1..19: mol_type = other RNA
atcacgatgtcattaaatc

SEQ ID NO: 56102 - RNA, 19 nt, synthetic construct
  misc_feature 1..19: note = siRNA sense sequence
  source 1..19: mol_type = other RNA
tttaatgacatcgtgatag

SEQ ID NO: 56103 - RNA, 19 nt, synthetic construct
  misc_feature 1..19: note = siRNA antisense sequence
  source 1..19: mol_type = other RNA
ctatcacgatgtcattaaa

SEQ ID NO: 56104 - RNA, 19 nt, synthetic construct
  misc_feature 1..19: note = siRNA sense sequence
  source 1..19: mol_type = other RNA
ttaatgacatcgtgatagg

SEQ ID NO: 56105 - RNA, 19 nt, synthetic construct
  misc_feature 1..19: note = siRNA antisense sequence
  source 1..19: mol_type = other RNA
cctatcacgatgtcattaa

SEQ ID NO: 56106 - RNA, 19 nt, synthetic construct
  misc_feature 1..19: note = siRNA sense sequence
  source 1..19: mol_type = other RNA
tgacatcgtgataggagct

SEQ ID NO: 56107 - RNA, 19 nt, synthetic construct
  misc_feature 1..19: note = siRNA antisense sequence
  source 1..19: mol_type = other RNA
agctcctatcacgatgtca

SEQ ID NO: 56108 - RNA, 19 nt, synthetic construct
  misc_feature 1..19: note = siRNA sense sequence
  source 1..19: mol_type = other RNA
gacatcgtgataggagctc

SEQ ID NO: 56109 - RNA, 19 nt, synthetic construct
  misc_feature 1..19: note = siRNA antisense sequence
  source 1..19: mol_type = other RNA
gagctcctatcacgatgtc

SEQ ID NO: 56110 - RNA, 19 nt, synthetic construct
  misc_feature 1..19: note = siRNA sense sequence
  source 1..19: mol_type = other RNA
acatcgtgataggagctcc

SEQ ID NO: 56111 - RNA, 19 nt, synthetic construct
  misc_feature 1..19: note = siRNA antisense sequence
  source 1..19: mol_type = other RNA
ggagctcctatcacgatgt

SEQ ID NO: 56112 - RNA, 19 nt, synthetic construct
  misc_feature 1..19: note = siRNA sense sequence
  source 1..19: mol_type = other RNA
catcgtgataggagctccg

SEQ ID NO: 56113 - RNA, 19 nt, synthetic construct
  misc_feature 1..19: note = siRNA antisense sequence
  source 1..19: mol_type = other RNA
cggagctcctatcacgatg

SEQ ID NO: 56114 - RNA, 19 nt, synthetic construct
  misc_feature 1..19: note = siRNA sense sequence
  source 1..19: mol_type = other RNA
atcgtgataggagctccgc

SEQ ID NO: 56115 - RNA, 19 nt, synthetic construct
  misc_feature 1..19: note = siRNA antisense sequence
  source 1..19: mol_type = other RNA
gcggagctcctatcacgat

SEQ ID NO: 56116 - RNA, 19 nt, synthetic construct
  misc_feature 1..19: note = siRNA sense sequence
  source 1..19: mol_type = other RNA
tcgtgataggagctccgct

SEQ ID NO: 56117 - RNA, 19 nt, synthetic construct
  misc_feature 1..19: note = siRNA antisense sequence
  source 1..19: mol_type = other RNA
agcggagctcctatcacga

SEQ ID NO: 56118 - RNA, 19 nt, synthetic construct
  misc_feature 1..19: note = siRNA sense sequence
  source 1..19: mol_type = other RNA
cgtgataggagctccgctg

SEQ ID NO: 56119 - RNA, 19 nt, synthetic construct
  misc_feature 1..19: note = siRNA antisense sequence
  source 1..19: mol_type = other RNA
cagcggagctcctatcacg

SEQ ID NO: 56120 - RNA, 19 nt, synthetic construct
  misc_feature 1..19: note = siRNA sense sequence
  source 1..19: mol_type = other RNA
gtgataggagctccgctgg

SEQ ID NO: 56121 - RNA, 19 nt, synthetic construct
  misc_feature 1..19: note = siRNA antisense sequence
  source 1..19: mol_type = other RNA
ccagcggagctcctatcac

SEQ ID NO: 56122 - RNA, 19 nt, synthetic construct
  misc_feature 1..19: note = siRNA sense sequence
  source 1..19: mol_type = other RNA
tgataggagctccgctgga

SEQ ID NO: 56123 - RNA, 19 nt, synthetic construct
  misc_feature 1..19: note = siRNA antisense sequence
  source 1..19: mol_type = other RNA
tccagcggagctcctatca

SEQ ID NO: 56124 - RNA, 19 nt, synthetic construct
  misc_feature 1..19: note = siRNA sense sequence
  source 1..19: mol_type = other RNA
gataggagctccgctggaa

SEQ ID NO: 56125 - RNA, 19 nt, synthetic construct
  misc_feature 1..19: note = siRNA antisense sequence
  source 1..19: mol_type = other RNA
ttccagcggagctcctatc

SEQ ID NO: 56126 - RNA, 19 nt, synthetic construct
  misc_feature 1..19: note = siRNA sense sequence
  source 1..19: mol_type = other RNA
ataggagctccgctggaag

SEQ ID NO: 56127 - RNA, 19 nt, synthetic construct
  misc_feature 1..19: note = siRNA antisense sequence
  source 1..19: mol_type = other RNA
cttccagcggagctcctat

SEQ ID NO: 56128 - RNA, 19 nt, synthetic construct
  misc_feature 1..19: note = siRNA sense sequence
  source 1..19: mol_type = other RNA
taggagctccgctggaaga

SEQ ID NO: 56129 - RNA, 19 nt, synthetic construct
  misc_feature 1..19: note = siRNA antisense sequence
  source 1..19: mol_type = other RNA
tcttccagcggagctccta

SEQ ID NO: 56130 - RNA, 19 nt, synthetic construct
  misc_feature 1..19: note = siRNA sense sequence
  source 1..19: mol_type = other RNA
aggagctccgctggaagat

SEQ ID NO: 56131 - RNA, 19 nt, synthetic construct
  misc_feature 1..19: note = siRNA antisense sequence
  source 1..19: mol_type = other RNA
atcttccagcggagctcct

SEQ ID NO: 56132 - RNA, 19 nt, synthetic construct
  misc_feature 1..19: note = siRNA sense sequence
  source 1..19: mol_type = other RNA
ggagctccgctggaagatg

SEQ ID NO: 56133 - RNA, 19 nt, synthetic construct
  misc_feature 1..19: note = siRNA antisense sequence
  source 1..19: mol_type = other RNA
catcttccagcggagctcc

SEQ ID NO: 56134 - RNA, 19 nt, synthetic construct
  misc_feature 1..19: note = siRNA sense sequence
  source 1..19: mol_type = other RNA
gagctccgctggaagatga

SEQ ID NO: 56135 - RNA, 19 nt, synthetic construct
  misc_feature 1..19: note = siRNA antisense sequence
  source 1..19: mol_type = other RNA
tcatcttccagcggagctc

SEQ ID NO: 56136 - RNA, 19 nt, synthetic construct
  misc_feature 1..19: note = siRNA sense sequence
  source 1..19: mol_type = other RNA
agctccgctggaagatgat

SEQ ID NO: 56137 - RNA, 19 nt, synthetic construct
  misc_feature 1..19: note = siRNA antisense sequence
  source 1..19: mol_type = other RNA
atcatcttccagcggagct

SEQ ID NO: 56138 - RNA, 19 nt, synthetic construct
  misc_feature 1..19: note = siRNA sense sequence
  source 1..19: mol_type = other RNA
gctccgctggaagatgatc

SEQ ID NO: 56139 - RNA, 19 nt, synthetic construct
  misc_feature 1..19: note = siRNA antisense sequence
  source 1..19: mol_type = other RNA
gatcatcttccagcggagc

SEQ ID NO: 56140 - RNA, 19 nt, synthetic construct
  misc_feature 1..19: note = siRNA sense sequence
  source 1..19: mol_type = other RNA
ctccgctggaagatgatca

SEQ ID NO: 56141 - RNA, 19 nt, synthetic construct
  misc_feature 1..19: note = siRNA antisense sequence
  source 1..19: mol_type = other RNA
tgatcatcttccagcggag

SEQ ID NO: 56142 - RNA, 19 nt, synthetic construct
  misc_feature 1..19: note = siRNA sense sequence
  source 1..19: mol_type = other RNA
tccgctggaagatgatcac

SEQ ID NO: 56143 - RNA, 19 nt, synthetic construct
  misc_feature 1..19: note = siRNA antisense sequence
  source 1..19: mol_type = other RNA
gtgatcatcttccagcgga

SEQ ID NO: 56144 - RNA, 19 nt, synthetic construct
  misc_feature 1..19: note = siRNA sense sequence
  source 1..19: mol_type = other RNA
ccgctggaagatgatcacg

SEQ ID NO: 56145 - RNA, 19 nt, synthetic construct
  misc_feature 1..19: note = siRNA antisense sequence
  source 1..19: mol_type = other RNA
cgtgatcatcttccagcgg

SEQ ID NO: 56146 - RNA, 19 nt, synthetic construct
  misc_feature 1..19: note = siRNA sense sequence
  source 1..19: mol_type = other RNA
cgctggaagatgatcacgg

SEQ ID NO: 56147 - RNA, 19 nt, synthetic construct
  misc_feature 1..19: note = siRNA antisense sequence
  source 1..19: mol_type = other RNA
ccgtgatcatcttccagcg

SEQ ID NO: 56148 - RNA, 19 nt, synthetic construct
  misc_feature 1..19: note = siRNA sense sequence
  source 1..19: mol_type = other RNA
gctggaagatgatcacggg

SEQ ID NO: 56149 - RNA, 19 nt, synthetic construct
  misc_feature 1..19: note = siRNA antisense sequence
  source 1..19: mol_type = other RNA
cccgtgatcatcttccagc

SEQ ID NO: 56150 - RNA, 19 nt, synthetic construct
  misc_feature 1..19: note = siRNA sense sequence
  source 1..19: mol_type = other RNA
gggagctgtgtacatttat

SEQ ID NO: 56151 - RNA, 19 nt, synthetic construct
  misc_feature 1..19: note = siRNA antisense sequence
  source 1..19: mol_type = other RNA
ataaatgtacacagctccc

SEQ ID NO: 56152 - RNA, 19 nt, synthetic construct
  misc_feature 1..19: note = siRNA sense sequence
  source 1..19: mol_type = other RNA
ggagctgtgtacatttatc

SEQ ID NO: 56153 - RNA, 19 nt, synthetic construct
  misc_feature 1..19: note = siRNA antisense sequence
  source 1..19: mol_type = other RNA
gataaatgtacacagctcc

SEQ ID NO: 56154 - RNA, 19 nt, synthetic construct
  misc_feature 1..19: note = siRNA sense sequence
  source 1..19: mol_type = other RNA
gagctgtgtacatttatca

SEQ ID NO: 56155 - RNA, 19 nt, synthetic construct
  misc_feature 1..19: note = siRNA antisense sequence
  source 1..19: mol_type = other RNA
tgataaatgtacacagctc

SEQ ID NO: 56156 - RNA, 19 nt, synthetic construct
  misc_feature 1..19: note = siRNA sense sequence
  source 1..19: mol_type = other RNA
agctgtgtacatttatcat

SEQ ID NO: 56157 - RNA, 19 nt, synthetic construct
  misc_feature 1..19: note = siRNA antisense sequence
  source 1..19: mol_type = other RNA
atgataaatgtacacagct

SEQ ID NO: 56158 - RNA, 19 nt, synthetic construct
  misc_feature 1..19: note = siRNA sense sequence
  source 1..19: mol_type = other RNA
gctgtgtacatttatcatg

SEQ ID NO: 56159 - RNA, 19 nt, synthetic construct
  misc_feature 1..19: note = siRNA antisense sequence
  source 1..19: mol_type = other RNA
catgataaatgtacacagc

SEQ ID NO: 56160 - RNA, 19 nt, synthetic construct
  misc_feature 1..19: note = siRNA sense sequence
  source 1..19: mol_type = other RNA
ctgtgtacatttatcatgg

SEQ ID NO: 56161 - RNA, 19 nt, synthetic construct
  misc_feature 1..19: note = siRNA antisense sequence
  source 1..19: mol_type = other RNA
ccatgataaatgtacacag

SEQ ID NO: 56162 - RNA, 19 nt, synthetic construct
  misc_feature 1..19: note = siRNA sense sequence
  source 1..19: mol_type = other RNA
tgtacatttatcatggaag

SEQ ID NO: 56163 - RNA, 19 nt, synthetic construct
  misc_feature 1..19: note = siRNA antisense sequence
  source 1..19: mol_type = other RNA
cttccatgataaatgtaca

SEQ ID NO: 56164 - RNA, 19 nt, synthetic construct
  misc_feature 1..19: note = siRNA sense sequence
  source 1..19: mol_type = other RNA
gtacatttatcatggaagt

SEQ ID NO: 56165 - RNA, 19 nt, synthetic construct
  misc_feature 1..19: note = siRNA antisense sequence
  source 1..19: mol_type = other RNA
acttccatgataaatgtac

SEQ ID NO: 56166 - RNA, 19 nt, synthetic construct
  misc_feature 1..19: note = siRNA sense sequence
  source 1..19: mol_type = other RNA
tacatttatcatggaagtg

SEQ ID NO: 56167 - RNA, 19 nt, synthetic construct
  misc_feature 1..19: note = siRNA antisense sequence
  source 1..19: mol_type = other RNA
cacttccatgataaatgta

SEQ ID NO: 56168 - RNA, 19 nt, synthetic construct
  misc_feature 1..19: note = siRNA sense sequence
  source 1..19: mol_type = other RNA
acatttatcatggaagtgg

SEQ ID NO: 56169 - RNA, 19 nt, synthetic construct
  misc_feature 1..19: note = siRNA antisense sequence
  source 1..19: mol_type = other RNA
ccacttccatgataaatgt

SEQ ID NO: 56170 - RNA, 19 nt, synthetic construct
  misc_feature 1..19: note = siRNA sense sequence
  source 1..19: mol_type = other RNA
ttatcatggaagtggcaag

SEQ ID NO: 56171 - RNA, 19 nt, synthetic construct
  misc_feature 1..19: note = siRNA antisense sequence
  source 1..19: mol_type = other RNA
cttgccacttccatgataa

SEQ ID NO: 56172 - RNA, 19 nt, synthetic construct
  misc_feature 1..19: note = siRNA sense sequence
  source 1..19: mol_type = other RNA
atggaagtggcaagactat

SEQ ID NO: 56173 - RNA, 19 nt, synthetic construct
  misc_feature 1..19: note = siRNA antisense sequence
  source 1..19: mol_type = other RNA
atagtcttgccacttccat

SEQ ID NO: 56174 - RNA, 19 nt, synthetic construct
  misc_feature 1..19: note = siRNA sense sequence
  source 1..19: mol_type = other RNA
tggaagtggcaagactata

SEQ ID NO: 56175 - RNA, 19 nt, synthetic construct
  misc_feature 1..19: note = siRNA antisense sequence
  source 1..19: mol_type = other RNA
tatagtcttgccacttcca

SEQ ID NO: 56176 - RNA, 19 nt, synthetic construct
  misc_feature 1..19: note = siRNA sense sequence
  source 1..19: mol_type = other RNA
ggaagtggcaagactataa

SEQ ID NO: 56177 - RNA, 19 nt, synthetic construct
  misc_feature 1..19: note = siRNA antisense sequence
  source 1..19: mol_type = other RNA
ttatagtcttgccacttcc

SEQ ID NO: 56178 - RNA, 19 nt, synthetic construct
  misc_feature 1..19: note = siRNA sense sequence
  source 1..19: mol_type = other RNA
gaagtggcaagactataag

SEQ ID NO: 56179 - RNA, 19 nt, synthetic construct
  misc_feature 1..19: note = siRNA antisense sequence
  source 1..19: mol_type = other RNA
cttatagtcttgccacttc

SEQ ID NO: 56180 - RNA, 19 nt, synthetic construct
  misc_feature 1..19: note = siRNA sense sequence
  source 1..19: mol_type = other RNA
aagtggcaagactataagg

SEQ ID NO: 56181 - RNA, 19 nt, synthetic construct
  misc_feature 1..19: note = siRNA antisense sequence
  source 1..19: mol_type = other RNA
ccttatagtcttgccactt

SEQ ID NO: 56182 - RNA, 19 nt, synthetic construct
  misc_feature 1..19: note = siRNA sense sequence
  source 1..19: mol_type = other RNA
agtggcaagactataagga

SEQ ID NO: 56183 - RNA, 19 nt, synthetic construct
  misc_feature 1..19: note = siRNA antisense sequence
  source 1..19: mol_type = other RNA
tccttatagtcttgccact

SEQ ID NO: 56184 - RNA, 19 nt, synthetic construct
  misc_feature 1..19: note = siRNA sense sequence
  source 1..19: mol_type = other RNA
gtggcaagactataaggaa

SEQ ID NO: 56185 - RNA, 19 nt, synthetic construct
  misc_feature 1..19: note = siRNA antisense sequence
  source 1..19: mol_type = other RNA
ttccttatagtcttgccac

SEQ ID NO: 56186 - RNA, 19 nt, synthetic construct
  misc_feature 1..19: note = siRNA sense sequence
  source 1..19: mol_type = other RNA
ctacagattcccacccttc

SEQ ID NO: 56187 - RNA, 19 nt, synthetic construct
  misc_feature 1..19: note = siRNA antisense sequence
  source 1..19: mol_type = other RNA
gaagggtgggaatctgtag

SEQ ID NO: 56188 - RNA, 19 nt, synthetic construct
  misc_feature 1..19: note = siRNA sense sequence
  source 1..19: mol_type = other RNA
tacagattcccacccttca

SEQ ID NO: 56189 - RNA, 19 nt, synthetic construct
  misc_feature 1..19: note = siRNA antisense sequence
  source 1..19: mol_type = other RNA
tgaagggtgggaatctgta

SEQ ID NO: 56190 - RNA, 19 nt, synthetic construct
  misc_feature 1..19: note = siRNA sense sequence
  source 1..19: mol_type = other RNA
cagattcccacccttcagt

SEQ ID NO: 56191 - RNA, 19 nt, synthetic construct
  misc_feature 1..19: note = siRNA antisense sequence
  source 1..19: mol_type = other RNA
actgaagggtgggaatctg

SEQ ID NO: 56192 - RNA, 19 nt, synthetic construct
  misc_feature 1..19: note = siRNA sense sequence
  source 1..19: mol_type = other RNA
agattcccacccttcagtg

SEQ ID NO: 56193 - RNA, 19 nt, synthetic construct
  misc_feature 1..19: note = siRNA antisense sequence
  source 1..19: mol_type = other RNA
cactgaagggtgggaatct

SEQ ID NO: 56194 - RNA, 19 nt, synthetic construct
  misc_feature 1..19: note = siRNA sense sequence
  source 1..19: mol_type = other RNA
cccacccttcagtgataag

SEQ ID NO: 56195 - RNA, 19 nt, synthetic construct
  misc_feature 1..19: note = siRNA antisense sequence
  source 1..19: mol_type = other RNA
cttatcactgaagggtggg

SEQ ID NO: 56196 - RNA, 19 nt, synthetic construct
  misc_feature 1..19: note = siRNA sense sequence
  source 1..19: mol_type = other RNA
ccacccttcagtgataagt

SEQ ID NO: 56197 - RNA, 19 nt, synthetic construct
  misc_feature 1..19: note = siRNA antisense sequence
  source 1..19: mol_type = other RNA
acttatcactgaagggtgg

SEQ ID NO: 56198 - RNA, 19 nt, synthetic construct
  misc_feature 1..19: note = siRNA sense sequence
  source 1..19: mol_type = other RNA
cacccttcagtgataagtc

SEQ ID NO: 56199 - RNA, 19 nt, synthetic construct
  misc_feature 1..19: note = siRNA antisense sequence
  source 1..19: mol_type = other RNA
gacttatcactgaagggtg

SEQ ID NO: 56200 - RNA, 19 nt, synthetic construct
  misc_feature 1..19: note = siRNA sense sequence
  source 1..19: mol_type = other RNA
acccttcagtgataagtcg

SEQ ID NO: 56201 - RNA, 19 nt, synthetic construct
  misc_feature 1..19: note = siRNA antisense sequence
  source 1..19: mol_type = other RNA
cgacttatcactgaagggt

SEQ ID NO: 56202 - RNA, 19 nt, synthetic construct
  misc_feature 1..19: note = siRNA sense sequence
  source 1..19: mol_type = other RNA
cccttcagtgataagtcgg

SEQ ID NO: 56203 - RNA, 19 nt, synthetic construct
  misc_feature 1..19: note = siRNA antisense sequence
  source 1..19: mol_type = other RNA
ccgacttatcactgaaggg

SEQ ID NO: 56204 - RNA, 19 nt, synthetic construct
  misc_feature 1..19: note = siRNA sense sequence
  source 1..19: mol_type = other RNA
ccttcagtgataagtcggt

SEQ ID NO: 56205 - RNA, 19 nt, synthetic construct
  misc_feature 1..19: note = siRNA antisense sequence
  source 1..19: mol_type = other RNA
accgacttatcactgaagg

SEQ ID NO: 56206 - RNA, 19 nt, synthetic construct
  misc_feature 1..19: note = siRNA sense sequence
  source 1..19: mol_type = other RNA
cttcagtgataagtcggtt

SEQ ID NO: 56207 - RNA, 19 nt, synthetic construct
  misc_feature 1..19: note = siRNA antisense sequence
  source 1..19: mol_type = other RNA
aaccgacttatcactgaag

SEQ ID NO: 56208 - RNA, 19 nt, synthetic construct
  misc_feature 1..19: note = siRNA sense sequence
  source 1..19: mol_type = other RNA
ttcagtgataagtcggttc

SEQ ID NO: 56209 - RNA, 19 nt, synthetic construct
  misc_feature 1..19: note = siRNA antisense sequence
  source 1..19: mol_type = other RNA
gaaccgacttatcactgaa

SEQ ID NO: 56210 - RNA, 19 nt, synthetic construct
  misc_feature 1..19: note = siRNA sense sequence
  source 1..19: mol_type = other RNA
tcagtgataagtcggttca

SEQ ID NO: 56211 - RNA, 19 nt, synthetic construct
  misc_feature 1..19: note = siRNA antisense sequence
  source 1..19: mol_type = other RNA
tgaaccgacttatcactga

SEQ ID NO: 56212 - RNA, 19 nt, synthetic construct
  misc_feature 1..19: note = siRNA sense sequence
  source 1..19: mol_type = other RNA
cagtgataagtcggttcaa

SEQ ID NO: 56213 - RNA, 19 nt, synthetic construct
  misc_feature 1..19: note = siRNA antisense sequence
  source 1..19: mol_type = other RNA
ttgaaccgacttatcactg

SEQ ID NO: 56214 - RNA, 19 nt, synthetic construct
  misc_feature 1..19: note = siRNA sense sequence
  source 1..19: mol_type = other RNA
agtgataagtcggttcaat

SEQ ID NO: 56215 - RNA, 19 nt, synthetic construct
  misc_feature 1..19: note = siRNA antisense sequence
  source 1..19: mol_type = other RNA
attgaaccgacttatcact

SEQ ID NO: 56216 - RNA, 19 nt, synthetic construct
  misc_feature 1..19: note = siRNA sense sequence
  source 1..19: mol_type = other RNA
gtgataagtcggttcaatg

SEQ ID NO: 56217 - RNA, 19 nt, synthetic construct
  misc_feature 1..19: note = siRNA antisense sequence
  source 1..19: mol_type = other RNA
cattgaaccgacttatcac

SEQ ID NO: 56218 - RNA, 19 nt, synthetic construct
  misc_feature 1..19: note = siRNA sense sequence
  source 1..19: mol_type = other RNA
tgataagtcggttcaatgc

SEQ ID NO: 56219 - RNA, 19 nt, synthetic construct
  misc_feature 1..19: note = siRNA antisense sequence
  source 1..19: mol_type = other RNA
gcattgaaccgacttatca

SEQ ID NO: 56220 - RNA, 19 nt, synthetic construct
  misc_feature 1..19: note = siRNA sense sequence
  source 1..19: mol_type = other RNA
gataagtcggttcaatgcc

SEQ ID NO: 56221 - RNA, 19 nt, synthetic construct
  misc_feature 1..19: note = siRNA antisense sequence
  source 1..19: mol_type = other RNA
ggcattgaaccgacttatc

SEQ ID NO: 56222 - RNA, 19 nt, synthetic construct
  misc_feature 1..19: note = siRNA sense sequence
  source 1..19: mol_type = other RNA
ataagtcggttcaatgcca

SEQ ID NO: 56223 - RNA, 19 nt, synthetic construct
  misc_feature 1..19: note = siRNA antisense sequence
  source 1..19: mol_type = other RNA
tggcattgaaccgacttat

SEQ ID NO: 56224 - RNA, 19 nt, synthetic construct
  misc_feature 1..19: note = siRNA sense sequence
  source 1..19: mol_type = other RNA
taagtcggttcaatgccag

SEQ ID NO: 56225 - RNA, 19 nt, synthetic construct
  misc_feature 1..19: note = siRNA antisense sequence
  source 1..19: mol_type = other RNA
ctggcattgaaccgactta

SEQ ID NO: 56226 - RNA, 19 nt, synthetic construct
  misc_feature 1..19: note = siRNA sense sequence
  source 1..19: mol_type = other RNA
aggcattacctgtctaact

SEQ ID NO: 56227 - RNA, 19 nt, synthetic construct
  misc_feature 1..19: note = siRNA antisense sequence
  source 1..19: mol_type = other RNA
agttagacaggtaatgcct

SEQ ID NO: 56228 - RNA, 19 nt, synthetic construct
  misc_feature 1..19: note = siRNA sense sequence
  source 1..19: mol_type = other RNA
ggcattacctgtctaactt

SEQ ID NO: 56229 - RNA, 19 nt, synthetic construct
  misc_feature 1..19: note = siRNA antisense sequence
  source 1..19: mol_type = other RNA
aagttagacaggtaatgcc

SEQ ID NO: 56230 - RNA, 19 nt, synthetic construct
  misc_feature 1..19: note = siRNA sense sequence
  source 1..19: mol_type = other RNA
gcattacctgtctaacttc

SEQ ID NO: 56231 - RNA, 19 nt, synthetic construct
  misc_feature 1..19: note = siRNA antisense sequence
  source 1..19: mol_type = other RNA
gaagttagacaggtaatgc

SEQ ID NO: 56232 - RNA, 19 nt, synthetic construct
  misc_feature 1..19: note = siRNA sense sequence
  source 1..19: mol_type = other RNA
cattacctgtctaacttca

SEQ ID NO: 56233 - RNA, 19 nt, synthetic construct
  misc_feature 1..19: note = siRNA antisense sequence
  source 1..19: mol_type = other RNA
tgaagttagacaggtaatg

SEQ ID NO: 56234 - RNA, 19 nt, synthetic construct
  misc_feature 1..19: note = siRNA sense sequence
  source 1..19: mol_type = other RNA
attacctgtctaacttcat

SEQ ID NO: 56235 - RNA, 19 nt, synthetic construct
  misc_feature 1..19: note = siRNA antisense sequence
  source 1..19: mol_type = other RNA
atgaagttagacaggtaat

SEQ ID NO: 56236 - RNA, 19 nt, synthetic construct
  misc_feature 1..19: note = siRNA sense sequence
  source 1..19: mol_type = other RNA
ttacctgtctaacttcatg

SEQ ID NO: 56237 - RNA, 19 nt, synthetic construct
  misc_feature 1..19: note = siRNA antisense sequence
  source 1..19: mol_type = other RNA
catgaagttagacaggtaa

SEQ ID NO: 56238 - RNA, 19 nt, synthetic construct
  misc_feature 1..19: note = siRNA sense sequence
  source 1..19: mol_type = other RNA
ttaatttcttcctcctgac

SEQ ID NO: 56239 - RNA, 19 nt, synthetic construct
  misc_feature 1..19: note = siRNA antisense sequence
  source 1..19: mol_type = other RNA
gtcaggaggaagaaattaa

SEQ ID NO: 56240 - RNA, 19 nt, synthetic construct
  misc_feature 1..19: note = siRNA sense sequence
  source 1..19: mol_type = other RNA
ttcttcctcctgaccttat

SEQ ID NO: 56241 - RNA, 19 nt, synthetic construct
  misc_feature 1..19: note = siRNA antisense sequence
  source 1..19: mol_type = other RNA
ataaggtcaggaggaagaa

SEQ ID NO: 56242 - RNA, 19 nt, synthetic construct
  misc_feature 1..19: note = siRNA sense sequence
  source 1..19: mol_type = other RNA
tcttcctcctgaccttatt

SEQ ID NO: 56243 - RNA, 19 nt, synthetic construct
  misc_feature 1..19: note = siRNA antisense sequence
  source 1..19: mol_type = other RNA
aataaggtcaggaggaaga

SEQ ID NO: 56244 - RNA, 19 nt, synthetic construct
  misc_feature 1..19: note = siRNA sense sequence
  source 1..19: mol_type = other RNA
cttcctcctgaccttattg

SEQ ID NO: 56245 - RNA, 19 nt, synthetic construct
  misc_feature 1..19: note = siRNA antisense sequence
  source 1..19: mol_type = other RNA
caataaggtcaggaggaag

SEQ ID NO: 56246 - RNA, 19 nt, synthetic construct
  misc_feature 1..19: note = siRNA sense sequence
  source 1..19: mol_type = other RNA
ctcctgaccttattgggaa

SEQ ID NO: 56247 - RNA, 19 nt, synthetic construct
  misc_feature 1..19: note = siRNA antisense sequence
  source 1..19: mol_type = other RNA
ttcccaataaggtcaggag

SEQ ID NO: 56248 - RNA, 19 nt, synthetic construct
  misc_feature 1..19: note = siRNA sense sequence
  source 1..19: mol_type = other RNA
tagtatgtatagtgttcct

SEQ ID NO: 56249 - RNA, 19 nt, synthetic construct
  misc_feature 1..19: note = siRNA antisense sequence
  source 1..19: mol_type = other RNA
aggaacactatacatacta

SEQ ID NO: 56250 - RNA, 19 nt, synthetic construct
  misc_feature 1..19: note = siRNA sense sequence
  source 1..19: mol_type = other RNA
agtatgtatagtgttcctt

SEQ ID NO: 56251 - RNA, 19 nt, synthetic construct
  misc_feature 1..19: note = siRNA antisense sequence
  source 1..19: mol_type = other RNA
aaggaacactatacatact

SEQ ID NO: 56252 - RNA, 19 nt, synthetic construct
  misc_feature 1..19: note = siRNA sense sequence
  source 1..19: mol_type = other RNA
gtatgtatagtgttcctta

SEQ ID NO: 56253 - RNA, 19 nt, synthetic construct
  misc_feature 1..19: note = siRNA antisense sequence
  source 1..19: mol_type = other RNA
taaggaacactatacatac

SEQ ID NO: 56254 - RNA, 19 nt, synthetic construct
  misc_feature 1..19: note = siRNA sense sequence
  source 1..19: mol_type = other RNA
agtgtatatgtagtgtgca

SEQ ID NO: 56255 - RNA, 19 nt, synthetic construct
  misc_feature 1..19: note = siRNA antisense sequence
  source 1..19: mol_type = other RNA
tgcacactacatatacact

SEQ ID NO: 56256 - RNA, 19 nt, synthetic construct
  misc_feature 1..19: note = siRNA sense sequence
  source 1..19: mol_type = other RNA
atgtagtgtgcatatggta

SEQ ID NO: 56257 - RNA, 19 nt, synthetic construct
  misc_feature 1..19: note = siRNA antisense sequence
  source 1..19: mol_type = other RNA
taccatatgcacactacat

SEQ ID NO: 56258 - RNA, 19 nt, synthetic construct
  misc_feature 1..19: note = siRNA sense sequence
  source 1..19: mol_type = other RNA
tgtagtgtgcatatggtat

SEQ ID NO: 56259 - RNA, 19 nt, synthetic construct
  misc_feature 1..19: note = siRNA antisense sequence
  source 1..19: mol_type = other RNA
ataccatatgcacactaca

SEQ ID NO: 56260 - RNA, 19 nt, synthetic construct
  misc_feature 1..19: note = siRNA sense sequence
  source 1..19: mol_type = other RNA
gtagtgtgcatatggtata

SEQ ID NO: 56261 - RNA, 19 nt, synthetic construct
  misc_feature 1..19: note = siRNA antisense sequence
  source 1..19: mol_type = other RNA
tataccatatgcacactac

SEQ ID NO: 56262 - RNA, 19 nt, synthetic construct
  misc_feature 1..19: note = siRNA sense sequence
  source 1..19: mol_type = other RNA
tactatatatggtgtacct

SEQ ID NO: 56263 - RNA, 19 nt, synthetic construct
  misc_feature 1..19: note = siRNA antisense sequence
  source 1..19: mol_type = other RNA
aggtacaccatatatagta

SEQ ID NO: 56264 - RNA, 19 nt, synthetic construct
  misc_feature 1..19: note = siRNA sense sequence
  source 1..19: mol_type = other RNA
actatatatggtgtaccta

SEQ ID NO: 56265 - RNA, 19 nt, synthetic construct
  misc_feature 1..19: note = siRNA antisense sequence
  source 1..19: mol_type = other RNA
taggtacaccatatatagt

SEQ ID NO: 56266 - RNA, 19 nt, synthetic construct
  misc_feature 1..19: note = siRNA sense sequence
  source 1..19: mol_type = other RNA
ctatatatggtgtacctat

SEQ ID NO: 56267 - RNA, 19 nt, synthetic construct
  misc_feature 1..19: note = siRNA antisense sequence
  source 1..19: mol_type = other RNA
ataggtacaccatatatag

SEQ ID NO: 56268 - RNA, 19 nt, synthetic construct
  misc_feature 1..19: note = siRNA sense sequence
  source 1..19: mol_type = other RNA
tactgtatctagtgtatct

SEQ ID NO: 56269 - RNA, 19 nt, synthetic construct
  misc_feature 1..19: note = siRNA antisense sequence
  source 1..19: mol_type = other RNA
agatacactagatacagta

SEQ ID NO: 56270 - RNA, 19 nt, synthetic construct
  misc_feature 1..19: note = siRNA sense sequence
  source 1..19: mol_type = other RNA
actgtatctagtgtatcta

SEQ ID NO: 56271 - RNA, 19 nt, synthetic construct
  misc_feature 1..19: note = siRNA antisense sequence
  source 1..19: mol_type = other RNA
tagatacactagatacagt

SEQ ID NO: 56272 - RNA, 19 nt, synthetic construct
  misc_feature 1..19: note = siRNA sense sequence
  source 1..19: mol_type = other RNA
atagtgtatccagtatatg

SEQ ID NO: 56273 - RNA, 19 nt, synthetic construct
  misc_feature 1..19: note = siRNA antisense sequence
  source 1..19: mol_type = other RNA
catatactggatacactat

SEQ ID NO: 56274 - RNA, 19 nt, synthetic construct
  misc_feature 1..19: note = siRNA sense sequence
  source 1..19: mol_type = other RNA
tagtgtatccagtatatgt

SEQ ID NO: 56275 - RNA, 19 nt, synthetic construct
  misc_feature 1..19: note = siRNA antisense sequence
  source 1..19: mol_type = other RNA
acatatactggatacacta

SEQ ID NO: 56276 - RNA, 19 nt, synthetic construct
  misc_feature 1..19: note = siRNA sense sequence
  source 1..19: mol_type = other RNA
agtgtatccagtatatgta

SEQ ID NO: 56277 - RNA, 19 nt, synthetic construct
  misc_feature 1..19: note = siRNA antisense sequence
  source 1..19: mol_type = other RNA
tacatatactggatacact

SEQ ID NO: 56278 - RNA, 19 nt, synthetic construct
  misc_feature 1..19: note = siRNA sense sequence
  source 1..19: mol_type = other RNA
gtgtatccagtatatgtat

SEQ ID NO: 56279 - RNA, 19 nt, synthetic construct
  misc_feature 1..19: note = siRNA antisense sequence
  source 1..19: mol_type = other RNA
atacatatactggatacac

SEQ ID NO: 56280 - RNA, 19 nt, synthetic construct
  misc_feature 1..19: note = siRNA sense sequence
  source 1..19: mol_type = other RNA
atatatagtgtatccagtg

SEQ ID NO: 56281 - RNA, 19 nt, synthetic construct
  misc_feature 1..19: note = siRNA antisense sequence
  source 1..19: mol_type = other RNA
cactggatacactatatat

SEQ ID NO: 56282 - RNA, 19 nt, synthetic construct
  misc_feature 1..19: note = siRNA sense sequence
  source 1..19: mol_type = other RNA
tatatagtgtatccagtgt

SEQ ID NO: 56283 - RNA, 19 nt, synthetic construct
  misc_feature 1..19: note = siRNA antisense sequence
  source 1..19: mol_type = other RNA
acactggatacactatata

SEQ ID NO: 56284 - RNA, 19 nt, synthetic construct
  misc_feature 1..19: note = siRNA sense sequence
  source 1..19: mol_type = other RNA
atatagtgtatccagtgta

SEQ ID NO: 56285 - RNA, 19 nt, synthetic construct
  misc_feature 1..19: note = siRNA antisense sequence
  source 1..19: mol_type = other RNA
tacactggatacactatat

SEQ ID NO: 56286 - RNA, 19 nt, synthetic construct
  misc_feature 1..19: note = siRNA sense sequence
  source 1..19: mol_type = other RNA
tatagtgtatccagtgtat

SEQ ID NO: 56287 - RNA, 19 nt, synthetic construct
  misc_feature 1..19: note = siRNA antisense sequence
  source 1..19: mol_type = other RNA
atacactggatacactata

SEQ ID NO: 56288 - RNA, 19 nt, synthetic construct
  misc_feature 1..19: note = siRNA sense sequence
  source 1..19: mol_type = other RNA
atagtgtatccagtgtatg

SEQ ID NO: 56289 - RNA, 19 nt, synthetic construct
  misc_feature 1..19: note = siRNA antisense sequence
  source 1..19: mol_type = other RNA
catacactggatacactat

SEQ ID NO: 56290 - RNA, 19 nt, synthetic construct
  misc_feature 1..19: note = siRNA sense sequence
  source 1..19: mol_type = other RNA
tagtgtatccagtgtatgt

SEQ ID NO: 56291 - RNA, 19 nt, synthetic construct
  misc_feature 1..19: note = siRNA antisense sequence
  source 1..19: mol_type = other RNA
acatacactggatacacta

SEQ ID NO: 56292 - RNA, 19 nt, synthetic construct
  misc_feature 1..19: note = siRNA sense sequence
  source 1..19: mol_type = other RNA
agtgtatccagtgtatgta

SEQ ID NO: 56293 - RNA, 19 nt, synthetic construct
  misc_feature 1..19: note = siRNA antisense sequence
  source 1..19: mol_type = other RNA
tacatacactggatacact

SEQ ID NO: 56294 - RNA, 19 nt, synthetic construct
  misc_feature 1..19: note = siRNA sense sequence
  source 1..19: mol_type = other RNA
gtgtatccagtgtatgtat

SEQ ID NO: 56295 - RNA, 19 nt, synthetic construct
  misc_feature 1..19: note = siRNA antisense sequence
  source 1..19: mol_type = other RNA
atacatacactggatacac

SEQ ID NO: 56296 - RNA, 19 nt, synthetic construct
  misc_feature 1..19: note = siRNA sense sequence
  source 1..19: mol_type = other RNA
tgtatccagtgtatgtatt

SEQ ID NO: 56297 - RNA, 19 nt, synthetic construct
  misc_feature 1..19: note = siRNA antisense sequence
  source 1..19: mol_type = other RNA
aatacatacactggataca

SEQ ID NO: 56298 - RNA, 19 nt, synthetic construct
  misc_feature 1..19: note = siRNA sense sequence
  source 1..19: mol_type = other RNA
gtatccagtgtatgtatta

SEQ ID NO: 56299 - RNA, 19 nt, synthetic construct
  misc_feature 1..19: note = siRNA antisense sequence
  source 1..19: mol_type = other RNA
taatacatacactggatac

SEQ ID NO: 56300 - RNA, 19 nt, synthetic construct
  misc_feature 1..19: note = siRNA sense sequence
  source 1..19: mol_type = other RNA
atagtgtatccagtatatg

SEQ ID NO: 56301 - RNA, 19 nt, synthetic construct
  misc_feature 1..19: note = siRNA antisense sequence
  source 1..19: mol_type = other RNA
catatactggatacactat

SEQ ID NO: 56302 - RNA, 19 nt, synthetic construct
  misc_feature 1..19: note = siRNA sense sequence
  source 1..19: mol_type = other RNA
tctcagcttactgcacgct

SEQ ID NO: 56303 - RNA, 19 nt, synthetic construct
  misc_feature 1..19: note = siRNA antisense sequence
  source 1..19: mol_type = other RNA
agcgtgcagtaagctgaga

SEQ ID NO: 56304 - RNA, 19 nt, synthetic construct
  misc_feature 1..19: note = siRNA sense sequence
  source 1..19: mol_type = other RNA
ctcagcttactgcacgctc

SEQ ID NO: 56305 - RNA, 19 nt, synthetic construct
  misc_feature 1..19: note = siRNA antisense sequence
  source 1..19: mol_type = other RNA
gagcgtgcagtaagctgag

SEQ ID NO: 56306 - RNA, 19 nt, synthetic construct
  misc_feature 1..19: note = siRNA sense sequence
  source 1..19: mol_type = other RNA
tcagcttactgcacgctcc

SEQ ID NO: 56307 - RNA, 19 nt, synthetic construct
  misc_feature 1..19: note = siRNA antisense sequence
  source 1..19: mol_type = other RNA
ggagcgtgcagtaagctga

SEQ ID NO: 56308 - RNA, 19 nt, synthetic construct
  misc_feature 1..19: note = siRNA sense sequence
  source 1..19: mol_type = other RNA
cagcttactgcacgctcca

SEQ ID NO: 56309 - RNA, 19 nt, synthetic construct
  misc_feature 1..19: note = siRNA antisense sequence
  source 1..19: mol_type = other RNA
tggagcgtgcagtaagctg

SEQ ID NO: 56310 - RNA, 19 nt, synthetic construct
  misc_feature 1..19: note = siRNA sense sequence
  source 1..19: mol_type = other RNA
gcttactgcacgctccacc

SEQ ID NO: 56311 - RNA, 19 nt, synthetic construct
  misc_feature 1..19: note = siRNA antisense sequence
  source 1..19: mol_type = other RNA
ggtggagcgtgcagtaagc

SEQ ID NO: 56312 - RNA, 19 nt, synthetic construct
  misc_feature 1..19: note = siRNA sense sequence
  source 1..19: mol_type = other RNA
gggtttcaccgtgttagcc

SEQ ID NO: 56313 - RNA, 19 nt, synthetic construct
  misc_feature 1..19: note = siRNA antisense sequence
  source 1..19: mol_type = other RNA
ggctaacacggtgaaaccc

SEQ ID NO: 56314 - RNA, 19 nt, synthetic construct
  misc_feature 1..19: note = siRNA sense sequence
  source 1..19: mol_type = other RNA
ggtttcaccgtgttagcca

SEQ ID NO: 56315 - RNA, 19 nt, synthetic construct
  misc_feature 1..19: note = siRNA antisense sequence
  source 1..19: mol_type = other RNA
tggctaacacggtgaaacc

SEQ ID NO: 56316 - RNA, 19 nt, synthetic construct
  misc_feature 1..19: note = siRNA sense sequence
  source 1..19: mol_type = other RNA
cctcggcctcccaaagtgt

SEQ ID NO: 56317 - RNA, 19 nt, synthetic construct
  misc_feature 1..19: note = siRNA antisense sequence
  source 1..19: mol_type = other RNA
acactttgggaggccgagg

SEQ ID NO: 56318 - RNA, 19 nt, synthetic construct
  misc_feature 1..19: note = siRNA sense sequence
  source 1..19: mol_type = other RNA
caaagtgttgggattacag

SEQ ID NO: 56319 - RNA, 19 nt, synthetic construct
  misc_feature 1..19: note = siRNA antisense sequence
  source 1..19: mol_type = other RNA
ctgtaatcccaacactttg

SEQ ID NO: 56320 - RNA, 19 nt, synthetic construct
  misc_feature 1..19: note = siRNA sense sequence
  source 1..19: mol_type = other RNA
gtgttgggattacaggcgt

SEQ ID NO: 56321 - RNA, 19 nt, synthetic construct
  misc_feature 1..19: note = siRNA antisense sequence
  source 1..19: mol_type = other RNA
acgcctgtaatcccaacac

SEQ ID NO: 56322 - RNA, 19 nt, synthetic construct
  misc_feature 1..19: note = siRNA sense sequence
  source 1..19: mol_type = other RNA
tgttgggattacaggcgtg

SEQ ID NO: 56323 - RNA, 19 nt, synthetic construct
  misc_feature 1..19: note = siRNA antisense sequence
  source 1..19: mol_type = other RNA
cacgcctgtaatcccaaca

SEQ ID NO: 56324 - RNA, 19 nt, synthetic construct
  misc_feature 1..19: note = siRNA sense sequence
  source 1..19: mol_type = other RNA
gttgggattacaggcgtga

SEQ ID NO: 56325 - RNA, 19 nt, synthetic construct
  misc_feature 1..19: note = siRNA antisense sequence
  source 1..19: mol_type = other RNA
tcacgcctgtaatcccaac

SEQ ID NO: 56326 - RNA, 19 nt, synthetic construct
  misc_feature 1..19: note = siRNA sense sequence
  source 1..19: mol_type = other RNA
ttgggattacaggcgtgag

SEQ ID NO: 56327 - RNA, 19 nt, synthetic construct
  misc_feature 1..19: note = siRNA antisense sequence
  source 1..19: mol_type = other RNA
ctcacgcctgtaatcccaa

SEQ ID NO: 56328 - RNA, 19 nt, synthetic construct
  misc_feature 1..19: note = siRNA sense sequence
  source 1..19: mol_type = other RNA
tgggattacaggcgtgagc

SEQ ID NO: 56329 - RNA, 19 nt, synthetic construct
  misc_feature 1..19: note = siRNA antisense sequence
  source 1..19: mol_type = other RNA
gctcacgcctgtaatccca

SEQ ID NO: 56330 - RNA, 19 nt, synthetic construct
  misc_feature 1..19: note = siRNA sense sequence
  source 1..19: mol_type = other RNA
attacaggcgtgagccacc

SEQ ID NO: 56331 - RNA, 19 nt, synthetic construct
  misc_feature 1..19: note = siRNA antisense sequence
  source 1..19: mol_type = other RNA
ggtggctcacgcctgtaat

SEQ ID NO: 56332 - RNA, 19 nt, synthetic construct
  misc_feature 1..19: note = siRNA sense sequence
  source 1..19: mol_type = other RNA
ttacaggcgtgagccaccg

SEQ ID NO: 56333 - RNA, 19 nt, synthetic construct
  misc_feature 1..19: note = siRNA antisense sequence
  source 1..19: mol_type = other RNA
cggtggctcacgcctgtaa

SEQ ID NO: 56334 - RNA, 19 nt, synthetic construct
  misc_feature 1..19: note = siRNA sense sequence
  source 1..19: mol_type = other RNA
gcctggccgtaattacttt

SEQ ID NO: 56335 - RNA, 19 nt, synthetic construct
  misc_feature 1..19: note = siRNA antisense sequence
  source 1..19: mol_type = other RNA
aaagtaattacggccaggc

SEQ ID NO: 56336 - RNA, 19 nt, synthetic construct
  misc_feature 1..19: note = siRNA sense sequence
  source 1..19: mol_type = other RNA
cctggccgtaattacttta

SEQ ID NO: 56337 - RNA, 19 nt, synthetic construct
  misc_feature 1..19: note = siRNA antisense sequence
  source 1..19: mol_type = other RNA
taaagtaattacggccagg

SEQ ID NO: 56338 - RNA, 19 nt, synthetic construct
  misc_feature 1..19: note = siRNA sense sequence
  source 1..19: mol_type = other RNA
tatctagtttcctttctgt

SEQ ID NO: 56339 - RNA, 19 nt, synthetic construct
  misc_feature 1..19: note = siRNA antisense sequence
  source 1..19: mol_type = other RNA
acagaaaggaaactagata

SEQ ID NO: 56340 - RNA, 19 nt, synthetic construct
  misc_feature 1..19: note = siRNA sense sequence
  source 1..19: mol_type = other RNA
atctagtttcctttctgtt

SEQ ID NO: 56341 - RNA, 19 nt, synthetic construct
  misc_feature 1..19: note = siRNA antisense sequence
  source 1..19: mol_type = other RNA
aacagaaaggaaactagat

SEQ ID NO: 56342 - RNA, 19 nt, synthetic construct
  misc_feature 1..19: note = siRNA sense sequence
  source 1..19: mol_type = other RNA
ctagtttcctttctgttgt

SEQ ID NO: 56343 - RNA, 19 nt, synthetic construct
  misc_feature 1..19: note = siRNA antisense sequence
  source 1..19: mol_type = other RNA
acaacagaaaggaaactag

SEQ ID NO: 56344 - RNA, 19 nt, synthetic construct
  misc_feature 1..19: note = siRNA sense sequence
  source 1..19: mol_type = other RNA
tagtttcctttctgttgtt

SEQ ID NO: 56345 - RNA, 19 nt, synthetic construct
  misc_feature 1..19: note = siRNA antisense sequence
  source 1..19: mol_type = other RNA
aacaacagaaaggaaacta

SEQ ID NO: 56346 - RNA, 19 nt, synthetic construct
  misc_feature 1..19: note = siRNA sense sequence
  source 1..19: mol_type = other RNA
gtttcctttctgttgttat

SEQ ID NO: 56347 - RNA, 19 nt, synthetic construct
  misc_feature 1..19: note = siRNA antisense sequence
  source 1..19: mol_type = other RNA
ataacaacagaaaggaaac

SEQ ID NO: 56348 - RNA, 19 nt, synthetic construct
  misc_feature 1..19: note = siRNA sense sequence
  source 1..19: mol_type = other RNA
gttattttccatatctcca

SEQ ID NO: 56349 - RNA, 19 nt, synthetic construct
  misc_feature 1..19: note = siRNA antisense sequence
  source 1..19: mol_type = other RNA
tggagatatggaaaataac

SEQ ID NO: 56350 - RNA, 19 nt, synthetic construct
  misc_feature 1..19: note = siRNA sense sequence
  source 1..19: mol_type = other RNA
ttattttccatatctccag

SEQ ID NO: 56351 - RNA, 19 nt, synthetic construct
  misc_feature 1..19: note = siRNA antisense sequence
  source 1..19: mol_type = other RNA
ctggagatatggaaaataa

SEQ ID NO: 56352 - RNA, 19 nt, synthetic construct
  misc_feature 1..19: note = siRNA sense sequence
  source 1..19: mol_type = other RNA
tttccatatctccaggatt

SEQ ID NO: 56353 - RNA, 19 nt, synthetic construct
  misc_feature 1..19: note = siRNA antisense sequence
  source 1..19: mol_type = other RNA
aatcctggagatatggaaa

SEQ ID NO: 56354 - RNA, 19 nt, synthetic construct
  misc_feature 1..19: note = siRNA sense sequence
  source 1..19: mol_type = other RNA
ttccatatctccaggattt

SEQ ID NO: 56355 - RNA, 19 nt, synthetic construct
  misc_feature 1..19: note = siRNA antisense sequence
  source 1..19: mol_type = other RNA
aaatcctggagatatggaa

SEQ ID NO: 56356 - RNA, 19 nt, synthetic construct
  misc_feature 1..19: note = siRNA sense sequence
  source 1..19: mol_type = other RNA
tccatatctccaggatttg

SEQ ID NO: 56357 - RNA, 19 nt, synthetic construct
  misc_feature 1..19: note = siRNA antisense sequence
  source 1..19: mol_type = other RNA
caaatcctggagatatgga

SEQ ID NO: 56358 - RNA, 19 nt, synthetic construct
  misc_feature 1..19: note = siRNA sense sequence
  source 1..19: mol_type = other RNA
ccatatctccaggatttga

SEQ ID NO: 56359 - RNA, 19 nt, synthetic construct
  misc_feature 1..19: note = siRNA antisense sequence
  source 1..19: mol_type = other RNA
tcaaatcctggagatatgg

SEQ ID NO: 56360 - RNA, 19 nt, synthetic construct
  misc_feature 1..19: note = siRNA sense sequence
  source 1..19: mol_type = other RNA
atatctccaggatttgact

SEQ ID NO: 56361 - RNA, 19 nt, synthetic construct
  misc_feature 1..19: note = siRNA antisense sequence
  source 1..19: mol_type = other RNA
agtcaaatcctggagatat

SEQ ID NO: 56362 - RNA, 19 nt, synthetic construct
  misc_feature 1..19: note = siRNA sense sequence
  source 1..19: mol_type = other RNA
tatctccaggatttgactt

SEQ ID NO: 56363 - RNA, 19 nt, synthetic construct
  misc_feature 1..19: note = siRNA antisense sequence
  source 1..19: mol_type = other RNA
aagtcaaatcctggagata

SEQ ID NO: 56364 - RNA, 19 nt, synthetic construct
  misc_feature 1..19: note = siRNA sense sequence
  source 1..19: mol_type = other RNA
atctccaggatttgacttt

SEQ ID NO: 56365 - RNA, 19 nt, synthetic construct
  misc_feature 1..19: note = siRNA antisense sequence
  source 1..19: mol_type = other RNA
aaagtcaaatcctggagat

SEQ ID NO: 56366 - RNA, 19 nt, synthetic construct
  misc_feature 1..19: note = siRNA sense sequence
  source 1..19: mol_type = other RNA
tctccaggatttgactttt

SEQ ID NO: 56367 - RNA, 19 nt, synthetic construct
  misc_feature 1..19: note = siRNA antisense sequence
  source 1..19: mol_type = other RNA
aaaagtcaaatcctggaga

SEQ ID NO: 56368 - RNA, 19 nt, synthetic construct
  misc_feature 1..19: note = siRNA sense sequence
  source 1..19: mol_type = other RNA
ctgttaaatttagaatggg

SEQ ID NO: 56369 - RNA, 19 nt, synthetic construct
  misc_feature 1..19: note = siRNA antisense sequence
  source 1..19: mol_type = other RNA
cccattctaaatttaacag

SEQ ID NO: 56370 - RNA, 19 nt, synthetic construct
  misc_feature 1..19: note = siRNA sense sequence
  source 1..19: mol_type = other RNA
gttaaatttagaatgggac

SEQ ID NO: 56371 - RNA, 19 nt, synthetic construct
  misc_feature 1..19: note = siRNA antisense sequence
  source 1..19: mol_type = other RNA
gtcccattctaaatttaac

SEQ ID NO: 56372 - RNA, 19 nt, synthetic construct
  misc_feature 1..19: note = siRNA sense sequence
  source 1..19: mol_type = other RNA
acatttagtgtgtcccgtt

SEQ ID NO: 56373 - RNA, 19 nt, synthetic construct
  misc_feature 1..19: note = siRNA antisense sequence
  source 1..19: mol_type = other RNA
aacgggacacactaaatgt

SEQ ID NO: 56374 - RNA, 19 nt, synthetic construct
  misc_feature 1..19: note = siRNA sense sequence
  source 1..19: mol_type = other RNA
catttagtgtgtcccgttc

SEQ ID NO: 56375 - RNA, 19 nt, synthetic construct
  misc_feature 1..19: note = siRNA antisense sequence
  source 1..19: mol_type = other RNA
gaacgggacacactaaatg

SEQ ID NO: 56376 - RNA, 19 nt, synthetic construct
  misc_feature 1..19: note = siRNA sense sequence
  source 1..19: mol_type = other RNA
atttagtgtgtcccgttct

SEQ ID NO: 56377 - RNA, 19 nt, synthetic construct
  misc_feature 1..19: note = siRNA antisense sequence
  source 1..19: mol_type = other RNA
agaacgggacacactaaat

SEQ ID NO: 56378 - RNA, 19 nt, synthetic construct
  misc_feature 1..19: note = siRNA sense sequence
  source 1..19: mol_type = other RNA
tttagtgtgtcccgttcta

SEQ ID NO: 56379 - RNA, 19 nt, synthetic construct
  misc_feature 1..19: note = siRNA antisense sequence
  source 1..19: mol_type = other RNA
tagaacgggacacactaaa

SEQ ID NO: 56380 - RNA, 19 nt, synthetic construct
  misc_feature 1..19: note = siRNA sense sequence
  source 1..19: mol_type = other RNA
tagtgtgtcccgttctaaa

SEQ ID NO: 56381 - RNA, 19 nt, synthetic construct
  misc_feature 1..19: note = siRNA antisense sequence
  source 1..19: mol_type = other RNA
tttagaacgggacacacta

SEQ ID NO: 56382 - RNA, 19 nt, synthetic construct
  misc_feature 1..19: note = siRNA sense sequence
  source 1..19: mol_type = other RNA
agtgtgtcccgttctaaat

SEQ ID NO: 56383 - RNA, 19 nt, synthetic construct
  misc_feature 1..19: note = siRNA antisense sequence
  source 1..19: mol_type = other RNA
atttagaacgggacacact

SEQ ID NO: 56384 - RNA, 19 nt, synthetic construct
  misc_feature 1..19: note = siRNA sense sequence
  source 1..19: mol_type = other RNA
gtgtgtcccgttctaaata

SEQ ID NO: 56385 - RNA, 19 nt, synthetic construct
  misc_feature 1..19: note = siRNA antisense sequence
  source 1..19: mol_type = other RNA
tatttagaacgggacacac

SEQ ID NO: 56386 - RNA, 19 nt, synthetic construct
  misc_feature 1..19: note = siRNA sense sequence
  source 1..19: mol_type = other RNA
gtcccgttctaaatagagg

SEQ ID NO: 56387 - RNA, 19 nt, synthetic construct
  misc_feature 1..19: note = siRNA antisense sequence
  source 1..19: mol_type = other RNA
cctctatttagaacgggac

SEQ ID NO: 56388 - RNA, 19 nt, synthetic construct
  misc_feature 1..19: note = siRNA sense sequence
  source 1..19: mol_type = other RNA
tcccgttctaaatagaggg

SEQ ID NO: 56389 - RNA, 19 nt, synthetic construct
  misc_feature 1..19: note = siRNA antisense sequence
  source 1..19: mol_type = other RNA
ccctctatttagaacggga

SEQ ID NO: 56390 - RNA, 19 nt, synthetic construct
  misc_feature 1..19: note = siRNA sense sequence
  source 1..19: mol_type = other RNA
cccgttctaaatagagggc

SEQ ID NO: 56391 - RNA, 19 nt, synthetic construct
  misc_feature 1..19: note = siRNA antisense sequence
  source 1..19: mol_type = other RNA
gccctctatttagaacggg

SEQ ID NO: 56392 - RNA, 19 nt, synthetic construct
  misc_feature 1..19: note = siRNA sense sequence
  source 1..19: mol_type = other RNA
taaatagagggcactgctt

SEQ ID NO: 56393 - RNA, 19 nt, synthetic construct
  misc_feature 1..19: note = siRNA antisense sequence
  source 1..19: mol_type = other RNA
aagcagtgccctctattta

SEQ ID NO: 56394 - RNA, 19 nt, synthetic construct
  misc_feature 1..19: note = siRNA sense sequence
  source 1..19: mol_type = other RNA
aaatagagggcactgcttt

SEQ ID NO: 56395 - RNA, 19 nt, synthetic construct
  misc_feature 1..19: note = siRNA antisense sequence
  source 1..19: mol_type = other RNA
aaagcagtgccctctattt

SEQ ID NO: 56396 - RNA, 19 nt, synthetic construct
  misc_feature 1..19: note = siRNA sense sequence
  source 1..19: mol_type = other RNA
atagagggcactgctttct

SEQ ID NO: 56397 - RNA, 19 nt, synthetic construct
  misc_feature 1..19: note = siRNA antisense sequence
  source 1..19: mol_type = other RNA
agaaagcagtgccctctat

SEQ ID NO: 56398 - RNA, 19 nt, synthetic construct
  misc_feature 1..19: note = siRNA sense sequence
  source 1..19: mol_type = other RNA
gagggcactgctttctgaa

SEQ ID NO: 56399 - RNA, 19 nt, synthetic construct
  misc_feature 1..19: note = siRNA antisense sequence
  source 1..19: mol_type = other RNA
ttcagaaagcagtgccctc

SEQ ID NO: 56400 - RNA, 19 nt, synthetic construct
  misc_feature 1..19: note = siRNA sense sequence
  source 1..19: mol_type = other RNA
gcactgctttctgaataag

SEQ ID NO: 56401 - RNA, 19 nt, synthetic construct
  misc_feature 1..19: note = siRNA antisense sequence
  source 1..19: mol_type = other RNA
cttattcagaaagcagtgc

SEQ ID NO: 56402 - RNA, 19 nt, synthetic construct
  misc_feature 1..19: note = siRNA sense sequence
  source 1..19: mol_type = other RNA
actgctttctgaataaggc

SEQ ID NO: 56403 - RNA, 19 nt, synthetic construct
  misc_feature 1..19: note = siRNA antisense sequence
  source 1..19: mol_type = other RNA
gccttattcagaaagcagt

SEQ ID NO: 56404 - RNA, 19 nt, synthetic construct
  misc_feature 1..19: note = siRNA sense sequence
  source 1..19: mol_type = other RNA
ctgctttctgaataaggca

SEQ ID NO: 56405 - RNA, 19 nt, synthetic construct
  misc_feature 1..19: note = siRNA antisense sequence
  source 1..19: mol_type = other RNA
tgccttattcagaaagcag

SEQ ID NO: 56406 - RNA, 19 nt, synthetic construct
  misc_feature 1..19: note = siRNA sense sequence
  source 1..19: mol_type = other RNA
tgctttctgaataaggcaa

SEQ ID NO: 56407 - RNA, 19 nt, synthetic construct
  misc_feature 1..19: note = siRNA antisense sequence
  source 1..19: mol_type = other RNA
ttgccttattcagaaagca

SEQ ID NO: 56408 - RNA, 19 nt, synthetic construct
  misc_feature 1..19: note = siRNA sense sequence
  source 1..19: mol_type = other RNA
gctttctgaataaggcaaa

SEQ ID NO: 56409 - RNA, 19 nt, synthetic construct
  misc_feature 1..19: note = siRNA antisense sequence
  source 1..19: mol_type = other RNA
tttgccttattcagaaagc

SEQ ID NO: 56410 - RNA, 19 nt, synthetic construct
  misc_feature 1..19: note = siRNA sense sequence
  source 1..19: mol_type = other RNA
ctttctgaataaggcaaaa

SEQ ID NO: 56411 - RNA, 19 nt, synthetic construct
  misc_feature 1..19: note = siRNA antisense sequence
  source 1..19: mol_type = other RNA
ttttgccttattcagaaag

SEQ ID NO: 56412 - RNA, 19 nt, synthetic construct
  misc_feature 1..19: note = siRNA sense sequence
  source 1..19: mol_type = other RNA
atgacttaaccaataaagg

SEQ ID NO: 56413 - RNA, 19 nt, synthetic construct
  misc_feature 1..19: note = siRNA antisense sequence
  source 1..19: mol_type = other RNA
cctttattggttaagtcat

SEQ ID NO: 56414 - RNA, 19 nt, synthetic construct
  misc_feature 1..19: note = siRNA sense sequence
  source 1..19: mol_type = other RNA
tgacttaaccaataaagga

SEQ ID NO: 56415 - RNA, 19 nt, synthetic construct
  misc_feature 1..19: note = siRNA antisense sequence
  source 1..19: mol_type = other RNA
tcctttattggttaagtca

SEQ ID NO: 56416 - RNA, 19 nt, synthetic construct
  misc_feature 1..19: note = siRNA sense sequence
  source 1..19: mol_type = other RNA
gacttaaccaataaaggaa

SEQ ID NO: 56417 - RNA, 19 nt, synthetic construct
  misc_feature 1..19: note = siRNA antisense sequence
  source 1..19: mol_type = other RNA
ttcctttattggttaagtc

SEQ ID NO: 56418 - RNA, 19 nt, synthetic construct
  misc_feature 1..19: note = siRNA sense sequence
  source 1..19: mol_type = other RNA
atatttaatgtccatgctg

SEQ ID NO: 56419 - RNA, 19 nt, synthetic construct
  misc_feature 1..19: note = siRNA antisense sequence
  source 1..19: mol_type = other RNA
cagcatggacattaaatat

SEQ ID NO: 56420 - RNA, 19 nt, synthetic construct
  misc_feature 1..19: note = siRNA sense sequence
  source 1..19: mol_type = other RNA
atttaatgtccatgctgtt

SEQ ID NO: 56421 - RNA, 19 nt, synthetic construct
  misc_feature 1..19: note = siRNA antisense sequence
  source 1..19: mol_type = other RNA
aacagcatggacattaaat

SEQ ID NO: 56422 - RNA, 19 nt, synthetic construct
  misc_feature 1..19: note = siRNA sense sequence
  source 1..19: mol_type = other RNA
tttaatgtccatgctgtta

SEQ ID NO: 56423 - RNA, 19 nt, synthetic construct
  misc_feature 1..19: note = siRNA antisense sequence
  source 1..19: mol_type = other RNA
taacagcatggacattaaa

SEQ ID NO: 56424 - RNA, 19 nt, synthetic construct
  misc_feature 1..19: note = siRNA sense sequence
  source 1..19: mol_type = other RNA
ttaatgtccatgctgttat

SEQ ID NO: 56425 - RNA, 19 nt, synthetic construct
  misc_feature 1..19: note = siRNA antisense sequence
  source 1..19: mol_type = other RNA
ataacagcatggacattaa

SEQ ID NO: 56426 - RNA, 19 nt, synthetic construct
  misc_feature 1..19: note = siRNA sense sequence
  source 1..19: mol_type = other RNA
taatgtccatgctgttata

SEQ ID NO: 56427 - RNA, 19 nt, synthetic construct
  misc_feature 1..19: note = siRNA antisense sequence
  source 1..19: mol_type = other RNA
tataacagcatggacatta

SEQ ID NO: 56428 - RNA, 19 nt, synthetic construct
  misc_feature 1..19: note = siRNA sense sequence
  source 1..19: mol_type = other RNA
aatgtccatgctgttataa

SEQ ID NO: 56429 - RNA, 19 nt, synthetic construct
  misc_feature 1..19: note = siRNA antisense sequence
  source 1..19: mol_type = other RNA
ttataacagcatggacatt

SEQ ID NO: 56430 - RNA, 19 nt, synthetic construct
  misc_feature 1..19: note = siRNA sense sequence
  source 1..19: mol_type = other RNA
atgtccatgctgttataat

SEQ ID NO: 56431 - RNA, 19 nt, synthetic construct
  misc_feature 1..19: note = siRNA antisense sequence
  source 1..19: mol_type = other RNA
attataacagcatggacat

SEQ ID NO: 56432 - RNA, 19 nt, synthetic construct
  misc_feature 1..19: note = siRNA sense sequence
  source 1..19: mol_type = other RNA
tgtccatgctgttataata

SEQ ID NO: 56433 - RNA, 19 nt, synthetic construct
  misc_feature 1..19: note = siRNA antisense sequence
  source 1..19: mol_type = other RNA
tattataacagcatggaca

SEQ ID NO: 56434 - RNA, 19 nt, synthetic construct
  misc_feature 1..19: note = siRNA sense sequence
  source 1..19: mol_type = other RNA
gtccatgctgttataataa

SEQ ID NO: 56435 - RNA, 19 nt, synthetic construct
  misc_feature 1..19: note = siRNA antisense sequence
  source 1..19: mol_type = other RNA
ttattataacagcatggac

SEQ ID NO: 56436 - RNA, 19 nt, synthetic construct
  misc_feature 1..19: note = siRNA sense sequence
  source 1..19: mol_type = other RNA
tcaagtgaattacgatttc

SEQ ID NO: 56437 - RNA, 19 nt, synthetic construct
  misc_feature 1..19: note = siRNA antisense sequence
  source 1..19: mol_type = other RNA
gaaatcgtaattcacttga

SEQ ID NO: 56438 - RNA, 19 nt, synthetic construct
  misc_feature 1..19: note = siRNA sense sequence
  source 1..19: mol_type = other RNA
caagtgaattacgatttct

SEQ ID NO: 56439 - RNA, 19 nt, synthetic construct
  misc_feature 1..19: note = siRNA antisense sequence
  source 1..19: mol_type = other RNA
agaaatcgtaattcacttg

SEQ ID NO: 56440 - RNA, 19 nt, synthetic construct
  misc_feature 1..19: note = siRNA sense sequence
  source 1..19: mol_type = other RNA
gaattacgatttctaaagg

SEQ ID NO: 56441 - RNA, 19 nt, synthetic construct
  misc_feature 1..19: note = siRNA antisense sequence
  source 1..19: mol_type = other RNA
cctttagaaatcgtaattc

SEQ ID NO: 56442 - RNA, 19 nt, synthetic construct
  misc_feature 1..19: note = siRNA sense sequence
  source 1..19: mol_type = other RNA
ggtttataattttctcgca

SEQ ID NO: 56443 - RNA, 19 nt, synthetic construct
  misc_feature 1..19: note = siRNA antisense sequence
  source 1..19: mol_type = other RNA
tgcgagaaaattataaacc

SEQ ID NO: 56444 - RNA, 19 nt, synthetic construct
  misc_feature 1..19: note = siRNA sense sequence
  source 1..19: mol_type = other RNA
aattttctcgcaagtaatc

SEQ ID NO: 56445 - RNA, 19 nt, synthetic construct
  misc_feature 1..19: note = siRNA antisense sequence
  source 1..19: mol_type = other RNA
gattacttgcgagaaaatt

SEQ ID NO: 56446 - RNA, 19 nt, synthetic construct
  misc_feature 1..19: note = siRNA sense sequence
  source 1..19: mol_type = other RNA
attttctcgcaagtaatcc

SEQ ID NO: 56447 - RNA, 19 nt, synthetic construct
  misc_feature 1..19: note = siRNA antisense sequence
  source 1..19: mol_type = other RNA
ggattacttgcgagaaaat

SEQ ID NO: 56448 - RNA, 19 nt, synthetic construct
  misc_feature 1..19: note = siRNA sense sequence
  source 1..19: mol_type = other RNA
ttttctcgcaagtaatcct

SEQ ID NO: 56449 - RNA, 19 nt, synthetic construct
  misc_feature 1..19: note = siRNA antisense sequence
  source 1..19: mol_type = other RNA
aggattacttgcgagaaaa

SEQ ID NO: 56450 - RNA, 19 nt, synthetic construct
  misc_feature 1..19: note = siRNA sense sequence
  source 1..19: mol_type = other RNA
tttctcgcaagtaatcctt

SEQ ID NO: 56451 - RNA, 19 nt, synthetic construct
  misc_feature 1..19: note = siRNA antisense sequence
  source 1..19: mol_type = other RNA
aaggattacttgcgagaaa

SEQ ID NO: 56452 - RNA, 19 nt, synthetic construct
  misc_feature 1..19: note = siRNA sense sequence
  source 1..19: mol_type = other RNA
ttctcgcaagtaatcctta

SEQ ID NO: 56453 - RNA, 19 nt, synthetic construct
  misc_feature 1..19: note = siRNA antisense sequence
  source 1..19: mol_type = other RNA
taaggattacttgcgagaa

SEQ ID NO: 56454 - RNA, 19 nt, synthetic construct
  misc_feature 1..19: note = siRNA sense sequence
  source 1..19: mol_type = other RNA
tctcgcaagtaatccttag

SEQ ID NO: 56455 - RNA, 19 nt, synthetic construct
  misc_feature 1..19: note = siRNA antisense sequence
  source 1..19: mol_type = other RNA
ctaaggattacttgcgaga

SEQ ID NO: 56456 - RNA, 19 nt, synthetic construct
  misc_feature 1..19: note = siRNA sense sequence
  source 1..19: mol_type = other RNA
ctcgcaagtaatccttaga

SEQ ID NO: 56457 - RNA, 19 nt, synthetic construct
  misc_feature 1..19: note = siRNA antisense sequence
  source 1..19: mol_type = other RNA
tctaaggattacttgcgag

SEQ ID NO: 56458 - RNA, 19 nt, synthetic construct
  misc_feature 1..19: note = siRNA sense sequence
  source 1..19: mol_type = other RNA
tcgcaagtaatccttagaa

SEQ ID NO: 56459 - RNA, 19 nt, synthetic construct
  misc_feature 1..19: note = siRNA antisense sequence
  source 1..19: mol_type = other RNA
ttctaaggattacttgcga

SEQ ID NO: 56460 - RNA, 19 nt, synthetic construct
  misc_feature 1..19: note = siRNA sense sequence
  source 1..19: mol_type = other RNA
taagtttaagctgcaggga

SEQ ID NO: 56461 - RNA, 19 nt, synthetic construct
  misc_feature 1..19: note = siRNA antisense sequence
  source 1..19: mol_type = other RNA
tccctgcagcttaaactta

SEQ ID NO: 56462 - RNA, 19 nt, synthetic construct
  misc_feature 1..19: note = siRNA sense sequence
  source 1..19: mol_type = other RNA
aagtttaagctgcagggaa

SEQ ID NO: 56463 - RNA, 19 nt, synthetic construct
  misc_feature 1..19: note = siRNA antisense sequence
  source 1..19: mol_type = other RNA
ttccctgcagcttaaactt

SEQ ID NO: 56464 - RNA, 19 nt, synthetic construct
  misc_feature 1..19: note = siRNA sense sequence
  source 1..19: mol_type = other RNA
cttctgttattcctgtttg

SEQ ID NO: 56465 - RNA, 19 nt, synthetic construct
  misc_feature 1..19: note = siRNA antisense sequence
  source 1..19: mol_type = other RNA
caaacaggaataacagaag

SEQ ID NO: 56466 - RNA, 19 nt, synthetic construct
  misc_feature 1..19: note = siRNA sense sequence
  source 1..19: mol_type = other RNA
tctgttattcctgtttgta

SEQ ID NO: 56467 - RNA, 19 nt, synthetic construct
  misc_feature 1..19: note = siRNA antisense sequence
  source 1..19: mol_type = other RNA
tacaaacaggaataacaga

SEQ ID NO: 56468 - RNA, 19 nt, synthetic construct
  misc_feature 1..19: note = siRNA sense sequence
  source 1..19: mol_type = other RNA
ctgttattcctgtttgtaa

SEQ ID NO: 56469 - RNA, 19 nt, synthetic construct
  misc_feature 1..19: note = siRNA antisense sequence
  source 1..19: mol_type = other RNA
ttacaaacaggaataacag

SEQ ID NO: 56470 - RNA, 19 nt, synthetic construct
  misc_feature 1..19: note = siRNA sense sequence
  source 1..19: mol_type = other RNA
acagctctaatccataagt

SEQ ID NO: 56471 - RNA, 19 nt, synthetic construct
  misc_feature 1..19: note = siRNA antisense sequence
  source 1..19: mol_type = other RNA
acttatggattagagctgt

SEQ ID NO: 56472 - RNA, 19 nt, synthetic construct
  misc_feature 1..19: note = siRNA sense sequence
  source 1..19: mol_type = other RNA
cagctctaatccataagtg

SEQ ID NO: 56473 - RNA, 19 nt, synthetic construct
  misc_feature 1..19: note = siRNA antisense sequence
  source 1..19: mol_type = other RNA
cacttatggattagagctg

SEQ ID NO: 56474 - RNA, 19 nt, synthetic construct
  misc_feature 1..19: note = siRNA sense sequence
  source 1..19: mol_type = other RNA
agctctaatccataagtgt

SEQ ID NO: 56475 - RNA, 19 nt, synthetic construct
  misc_feature 1..19: note = siRNA antisense sequence
  source 1..19: mol_type = other RNA
acacttatggattagagct

SEQ ID NO: 56476 - RNA, 19 nt, synthetic construct
  misc_feature 1..19: note = siRNA sense sequence
  source 1..19: mol_type = other RNA
gctctaatccataagtgta

SEQ ID NO: 56477 - RNA, 19 nt, synthetic construct
  misc_feature 1..19: note = siRNA antisense sequence
  source 1..19: mol_type = other RNA
tacacttatggattagagc

SEQ ID NO: 56478 - RNA, 19 nt, synthetic construct
  misc_feature 1..19: note = siRNA sense sequence
  source 1..19: mol_type = other RNA
ctctaatccataagtgtat

SEQ ID NO: 56479 - RNA, 19 nt, synthetic construct
  misc_feature 1..19: note = siRNA antisense sequence
  source 1..19: mol_type = other RNA
atacacttatggattagag

SEQ ID NO: 56480 - RNA, 19 nt, synthetic construct
  misc_feature 1..19: note = siRNA sense sequence
  source 1..19: mol_type = other RNA
tgcttaatgcactacacta

SEQ ID NO: 56481 - RNA, 19 nt, synthetic construct
  misc_feature 1..19: note = siRNA antisense sequence
  source 1..19: mol_type = other RNA
tagtgtagtgcattaagca

SEQ ID NO: 56482 - RNA, 19 nt, synthetic construct
  misc_feature 1..19: note = siRNA sense sequence
  source 1..19: mol_type = other RNA
gcttaatgcactacactat

SEQ ID NO: 56483 - RNA, 19 nt, synthetic construct
  misc_feature 1..19: note = siRNA antisense sequence
  source 1..19: mol_type = other RNA
atagtgtagtgcattaagc

SEQ ID NO: 56484 - RNA, 19 nt, synthetic construct
  misc_feature 1..19: note = siRNA sense sequence
  source 1..19: mol_type = other RNA
cttaatgcactacactata

SEQ ID NO: 56485 - RNA, 19 nt, synthetic construct
  misc_feature 1..19: note = siRNA antisense sequence
  source 1..19: mol_type = other RNA
tatagtgtagtgcattaag

SEQ ID NO: 56486 - RNA, 19 nt, synthetic construct
  misc_feature 1..19: note = siRNA sense sequence
  source 1..19: mol_type = other RNA
aggagtttgaatgtaattg

SEQ ID NO: 56487 - RNA, 19 nt, synthetic construct
  misc_feature 1..19: note = siRNA antisense sequence
  source 1..19: mol_type = other RNA
caattacattcaaactcct

SEQ ID NO: 56488 - RNA, 19 nt, synthetic construct
  misc_feature 1..19: note = siRNA sense sequence
  source 1..19: mol_type = other RNA
gagtttgaatgtaattgtc

SEQ ID NO: 56489 - RNA, 19 nt, synthetic construct
  misc_feature 1..19: note = siRNA antisense sequence
  source 1..19: mol_type = other RNA
gacaattacattcaaactc

SEQ ID NO: 56490 - RNA, 19 nt, synthetic construct
  misc_feature 1..19: note = siRNA sense sequence
  source 1..19: mol_type = other RNA
gtttgaatgtaattgtctg

SEQ ID NO: 56491 - RNA, 19 nt, synthetic construct
  misc_feature 1..19: note = siRNA antisense sequence
  source 1..19: mol_type = other RNA
cagacaattacattcaaac

SEQ ID NO: 56492 - RNA, 19 nt, synthetic construct
  misc_feature 1..19: note = siRNA sense sequence
  source 1..19: mol_type = other RNA
tttgaatgtaattgtctgc

SEQ ID NO: 56493 - RNA, 19 nt, synthetic construct
  misc_feature 1..19: note = siRNA antisense sequence
  source 1..19: mol_type = other RNA
gcagacaattacattcaaa

SEQ ID NO: 56494 - RNA, 19 nt, synthetic construct
  misc_feature 1..19: note = siRNA sense sequence
  source 1..19: mol_type = other RNA
tgaatgtaattgtctgctc

SEQ ID NO: 56495 - RNA, 19 nt, synthetic construct
  misc_feature 1..19: note = siRNA antisense sequence
  source 1..19: mol_type = other RNA
gagcagacaattacattca

SEQ ID NO: 56496 - RNA, 19 nt, synthetic construct
  misc_feature 1..19: note = siRNA sense sequence
  source 1..19: mol_type = other RNA
gaatgtaattgtctgctct

SEQ ID NO: 56497 - RNA, 19 nt, synthetic construct
  misc_feature 1..19: note = siRNA antisense sequence
  source 1..19: mol_type = other RNA
agagcagacaattacattc

SEQ ID NO: 56498 - RNA, 19 nt, synthetic construct
  misc_feature 1..19: note = siRNA sense sequence
  source 1..19: mol_type = other RNA
aatgtaattgtctgctctc

SEQ ID NO: 56499 - RNA, 19 nt, synthetic construct
  misc_feature 1..19: note = siRNA antisense sequence
  source 1..19: mol_type = other RNA
gagagcagacaattacatt

SEQ ID NO: 56500 - RNA, 19 nt, synthetic construct
  misc_feature 1..19: note = siRNA sense sequence
  source 1..19: mol_type = other RNA
atgtaattgtctgctctca

SEQ ID NO: 56501 - RNA, 19 nt, synthetic construct
  misc_feature 1..19: note = siRNA antisense sequence
  source 1..19: mol_type = other RNA
tgagagcagacaattacat

SEQ ID NO: 56502 - RNA, 19 nt, synthetic construct
  misc_feature 1..19: note = siRNA sense sequence
  source 1..19: mol_type = other RNA
tgtaattgtctgctctcaa

SEQ ID NO: 56503 - RNA, 19 nt, synthetic construct
  misc_feature 1..19: note = siRNA antisense sequence
  source 1..19: mol_type = other RNA
ttgagagcagacaattaca

SEQ ID NO: 56504 - RNA, 19 nt, synthetic construct
  misc_feature 1..19: note = siRNA sense sequence
  source 1..19: mol_type = other RNA
gtaattgtctgctctcaag

SEQ ID NO: 56505 - RNA, 19 nt, synthetic construct
  misc_feature 1..19: note = siRNA antisense sequence
  source 1..19: mol_type = other RNA
cttgagagcagacaattac

SEQ ID NO: 56506 - RNA, 19 nt, synthetic construct
  misc_feature 1..19: note = siRNA sense sequence
  source 1..19: mol_type = other RNA
aattgtctgctctcaagta

SEQ ID NO: 56507 - RNA, 19 nt, synthetic construct
  misc_feature 1..19: note = siRNA antisense sequence
  source 1..19: mol_type = other RNA
tacttgagagcagacaatt

SEQ ID NO: 56508 - RNA, 19 nt, synthetic construct
  misc_feature 1..19: note = siRNA sense sequence
  source 1..19: mol_type = other RNA
attgtctgctctcaagtaa

SEQ ID NO: 56509 - RNA, 19 nt, synthetic construct
  misc_feature 1..19: note = siRNA antisense sequence
  source 1..19: mol_type = other RNA
ttacttgagagcagacaat

SEQ ID NO: 56510 - RNA, 19 nt, synthetic construct
  misc_feature 1..19: note = siRNA sense sequence
  source 1..19: mol_type = other RNA
ttgtctgctctcaagtaat

SEQ ID NO: 56511 - RNA, 19 nt, synthetic construct
  misc_feature 1..19: note = siRNA antisense sequence
  source 1..19: mol_type = other RNA
attacttgagagcagacaa

SEQ ID NO: 56512 - RNA, 19 nt, synthetic construct
  misc_feature 1..19: note = siRNA sense sequence
  source 1..19: mol_type = other RNA
tgtctgctctcaagtaatc

SEQ ID NO: 56513 - RNA, 19 nt, synthetic construct
  misc_feature 1..19: note = siRNA antisense sequence
  source 1..19: mol_type = other RNA
gattacttgagagcagaca

SEQ ID NO: 56514 - RNA, 19 nt, synthetic construct
  misc_feature 1..19: note = siRNA sense sequence
  source 1..19: mol_type = other RNA
gtctgctctcaagtaatca

SEQ ID NO: 56515 - RNA, 19 nt, synthetic construct
  misc_feature 1..19: note = siRNA antisense sequence
  source 1..19: mol_type = other RNA
tgattacttgagagcagac

SEQ ID NO: 56516 - RNA, 19 nt, synthetic construct
  misc_feature 1..19: note = siRNA sense sequence
  source 1..19: mol_type = other RNA
tctgctctcaagtaatcat

SEQ ID NO: 56517 - RNA, 19 nt, synthetic construct
  misc_feature 1..19: note = siRNA antisense sequence
  source 1..19: mol_type = other RNA
atgattacttgagagcaga

SEQ ID NO: 56518 - RNA, 19 nt, synthetic construct
  misc_feature 1..19: note = siRNA sense sequence
  source 1..19: mol_type = other RNA
ctgctctcaagtaatcata

SEQ ID NO: 56519 - RNA, 19 nt, synthetic construct
  misc_feature 1..19: note = siRNA antisense sequence
  source 1..19: mol_type = other RNA
tatgattacttgagagcag

SEQ ID NO: 56520 - RNA, 19 nt, synthetic construct
  misc_feature 1..19: note = siRNA sense sequence
  source 1..19: mol_type = other RNA
tgctctcaagtaatcatag

SEQ ID NO: 56521 - RNA, 19 nt, synthetic construct
  misc_feature 1..19: note = siRNA antisense sequence
  source 1..19: mol_type = other RNA
ctatgattacttgagagca

SEQ ID NO: 56522 - RNA, 19 nt, synthetic construct
  misc_feature 1..19: note = siRNA sense sequence
  source 1..19: mol_type = other RNA
gctctcaagtaatcatagt

SEQ ID NO: 56523 - RNA, 19 nt, synthetic construct
  misc_feature 1..19: note = siRNA antisense sequence
  source 1..19: mol_type = other RNA
actatgattacttgagagc

SEQ ID NO: 56524 - RNA, 19 nt, synthetic construct
  misc_feature 1..19: note = siRNA sense sequence
  source 1..19: mol_type = other RNA
ctctcaagtaatcatagtt

SEQ ID NO: 56525 - RNA, 19 nt, synthetic construct
  misc_feature 1..19: note = siRNA antisense sequence
  source 1..19: mol_type = other RNA
aactatgattacttgagag

SEQ ID NO: 56526 - RNA, 19 nt, synthetic construct
  misc_feature 1..19: note = siRNA sense sequence
  source 1..19: mol_type = other RNA
tctcaagtaatcatagttg

SEQ ID NO: 56527 - RNA, 19 nt, synthetic construct
  misc_feature 1..19: note = siRNA antisense sequence
  source 1..19: mol_type = other RNA
caactatgattacttgaga

SEQ ID NO: 56528 - RNA, 19 nt, synthetic construct
  misc_feature 1..19: note = siRNA sense sequence
  source 1..19: mol_type = other RNA
ctcaagtaatcatagttgg

SEQ ID NO: 56529 - RNA, 19 nt, synthetic construct
  misc_feature 1..19: note = siRNA antisense sequence
  source 1..19: mol_type = other RNA
ccaactatgattacttgag

SEQ ID NO: 56530 - RNA, 19 nt, synthetic construct
  misc_feature 1..19: note = siRNA sense sequence
  source 1..19: mol_type = other RNA
tcaagtaatcatagttggt

SEQ ID NO: 56531 - RNA, 19 nt, synthetic construct
  misc_feature 1..19: note = siRNA antisense sequence
  source 1..19: mol_type = other RNA
accaactatgattacttga

SEQ ID NO: 56532 - RNA, 19 nt, synthetic construct
  misc_feature 1..19: note = siRNA sense sequence
  source 1..19: mol_type = other RNA
caagtaatcatagttggtt

SEQ ID NO: 56533 - RNA, 19 nt, synthetic construct
  misc_feature 1..19: note = siRNA antisense sequence
  source 1..19: mol_type = other RNA
aaccaactatgattacttg

SEQ ID NO: 56534 - RNA, 19 nt, synthetic construct
  misc_feature 1..19: note = siRNA sense sequence
  source 1..19: mol_type = other RNA
agtaatcatagttggttag

SEQ ID NO: 56535 - RNA, 19 nt, synthetic construct
  misc_feature 1..19: note = siRNA antisense sequence
  source 1..19: mol_type = other RNA
ctaaccaactatgattact

SEQ ID NO: 56536 - RNA, 19 nt, synthetic construct
  misc_feature 1..19: note = siRNA sense sequence
  source 1..19: mol_type = other RNA
gtaatcatagttggttaga

SEQ ID NO: 56537 - RNA, 19 nt, synthetic construct
  misc_feature 1..19: note = siRNA antisense sequence
  source 1..19: mol_type = other RNA
tctaaccaactatgattac

SEQ ID NO: 56538 - RNA, 19 nt, synthetic construct
  misc_feature 1..19: note = siRNA sense sequence
  source 1..19: mol_type = other RNA
gaattcactaccttctagc

SEQ ID NO: 56539 - RNA, 19 nt, synthetic construct
  misc_feature 1..19: note = siRNA antisense sequence
  source 1..19: mol_type = other RNA
gctagaaggtagtgaattc

SEQ ID NO: 56540 - RNA, 19 nt, synthetic construct
  misc_feature 1..19: note = siRNA sense sequence
  source 1..19: mol_type = other RNA
aattcactaccttctagct

SEQ ID NO: 56541 - RNA, 19 nt, synthetic construct
  misc_feature 1..19: note = siRNA antisense sequence
  source 1..19: mol_type = other RNA
agctagaaggtagtgaatt

SEQ ID NO: 56542 - RNA, 19 nt, synthetic construct
  misc_feature 1..19: note = siRNA sense sequence
  source 1..19: mol_type = other RNA
attcactaccttctagctt

SEQ ID NO: 56543 - RNA, 19 nt, synthetic construct
  misc_feature 1..19: note = siRNA antisense sequence
  source 1..19: mol_type = other RNA
aagctagaaggtagtgaat

SEQ ID NO: 56544 - RNA, 19 nt, synthetic construct
  misc_feature 1..19: note = siRNA sense sequence
  source 1..19: mol_type = other RNA
ttcactaccttctagctta

SEQ ID NO: 56545 - RNA, 19 nt, synthetic construct
  misc_feature 1..19: note = siRNA antisense sequence
  source 1..19: mol_type = other RNA
taagctagaaggtagtgaa

SEQ ID NO: 56546 - RNA, 19 nt, synthetic construct
  misc_feature 1..19: note = siRNA sense sequence
  source 1..19: mol_type = other RNA
tcactaccttctagcttat

SEQ ID NO: 56547 - RNA, 19 nt, synthetic construct
  misc_feature 1..19: note = siRNA antisense sequence
  source 1..19: mol_type = other RNA
ataagctagaaggtagtga

SEQ ID NO: 56548 - RNA, 19 nt, synthetic construct
  misc_feature 1..19: note = siRNA sense sequence
  source 1..19: mol_type = other RNA
cactaccttctagcttata

SEQ ID NO: 56549 - RNA, 19 nt, synthetic construct
  misc_feature 1..19: note = siRNA antisense sequence
  source 1..19: mol_type = other RNA
tataagctagaaggtagtg

SEQ ID NO: 56550 - RNA, 19 nt, synthetic construct
  misc_feature 1..19: note = siRNA sense sequence
  source 1..19: mol_type = other RNA
tatttgagtgttctctttg

SEQ ID NO: 56551 - RNA, 19 nt, synthetic construct
  misc_feature 1..19: note = siRNA antisense sequence
  source 1..19: mol_type = other RNA
caaagagaacactcaaata

SEQ ID NO: 56552 - RNA, 19 nt, synthetic construct
  misc_feature 1..19: note = siRNA sense sequence
  source 1..19: mol_type = other RNA
atttgagtgttctctttgg

SEQ ID NO: 56553 - RNA, 19 nt, synthetic construct
  misc_feature 1..19: note = siRNA antisense sequence
  source 1..19: mol_type = other RNA
ccaaagagaacactcaaat

SEQ ID NO: 56554 - RNA, 19 nt, synthetic construct
  misc_feature 1..19: note = siRNA sense sequence
  source 1..19: mol_type = other RNA
tttgagtgttctctttggt

SEQ ID NO: 56555 - RNA, 19 nt, synthetic construct
  misc_feature 1..19: note = siRNA antisense sequence
  source 1..19: mol_type = other RNA
accaaagagaacactcaaa

SEQ ID NO: 56556 - RNA, 19 nt, synthetic construct
  misc_feature 1..19: note = siRNA sense sequence
  source 1..19: mol_type = other RNA
ttgagtgttctctttggtt

SEQ ID NO: 56557 - RNA, 19 nt, synthetic construct
  misc_feature 1..19: note = siRNA antisense sequence
  source 1..19: mol_type = other RNA
aaccaaagagaacactcaa

SEQ ID NO: 56558 - RNA, 19 nt, synthetic construct
  misc_feature 1..19: note = siRNA sense sequence
  source 1..19: mol_type = other RNA
gagtgttctctttggttct

SEQ ID NO: 56559 - RNA, 19 nt, synthetic construct
  misc_feature 1..19: note = siRNA antisense sequence
  source 1..19: mol_type = other RNA
agaaccaaagagaacactc

SEQ ID NO: 56560 - RNA, 19 nt, synthetic construct
  misc_feature 1..19: note = siRNA sense sequence
  source 1..19: mol_type = other RNA
agtgttctctttggttctg

SEQ ID NO: 56561 - RNA, 19 nt, synthetic construct
  misc_feature 1..19: note = siRNA antisense sequence
  source 1..19: mol_type = other RNA
cagaaccaaagagaacact

SEQ ID NO: 56562 - RNA, 19 nt, synthetic construct
  misc_feature 1..19: note = siRNA sense sequence
  source 1..19: mol_type = other RNA
gtgttctctttggttctgt

SEQ ID NO: 56563 - RNA, 19 nt, synthetic construct
  misc_feature 1..19: note = siRNA antisense sequence
  source 1..19: mol_type = other RNA
acagaaccaaagagaacac

SEQ ID NO: 56564 - RNA, 19 nt, synthetic construct
  misc_feature 1..19: note = siRNA sense sequence
  source 1..19: mol_type = other RNA
tgttctctttggttctgta

SEQ ID NO: 56565 - RNA, 19 nt, synthetic construct
  misc_feature 1..19: note = siRNA antisense sequence
  source 1..19: mol_type = other RNA
tacagaaccaaagagaaca

SEQ ID NO: 56566 - RNA, 19 nt, synthetic construct
  misc_feature 1..19: note = siRNA sense sequence
  source 1..19: mol_type = other RNA
ctctttggttctgtagtca

SEQ ID NO: 56567 - RNA, 19 nt, synthetic construct
  misc_feature 1..19: note = siRNA antisense sequence
  source 1..19: mol_type = other RNA
tgactacagaaccaaagag

SEQ ID NO: 56568 - RNA, 19 nt, synthetic construct
  misc_feature 1..19: note = siRNA sense sequence
  source 1..19: mol_type = other RNA
tctttggttctgtagtcaa

SEQ ID NO: 56569 - RNA, 19 nt, synthetic construct
  misc_feature 1..19: note = siRNA antisense sequence
  source 1..19: mol_type = other RNA
ttgactacagaaccaaaga

SEQ ID NO: 56570 - RNA, 19 nt, synthetic construct
  misc_feature 1..19: note = siRNA sense sequence
  source 1..19: mol_type = other RNA
ctttggttctgtagtcaac

SEQ ID NO: 56571 - RNA, 19 nt, synthetic construct
  misc_feature 1..19: note = siRNA antisense sequence
  source 1..19: mol_type = other RNA
gttgactacagaaccaaag

SEQ ID NO: 56572 - RNA, 19 nt, synthetic construct
  misc_feature 1..19: note = siRNA sense sequence
  source 1..19: mol_type = other RNA
acagagctctcaaaatcta

SEQ ID NO: 56573 - RNA, 19 nt, synthetic construct
  misc_feature 1..19: note = siRNA antisense sequence
  source 1..19: mol_type = other RNA
tagattttgagagctctgt

SEQ ID NO: 56574 - RNA, 19 nt, synthetic construct
  misc_feature 1..19: note = siRNA sense sequence
  source 1..19: mol_type = other RNA
gagctctcaaaatctattc

SEQ ID NO: 56575 - RNA, 19 nt, synthetic construct
  misc_feature 1..19: note = siRNA antisense sequence
  source 1..19: mol_type = other RNA
gaatagattttgagagctc

SEQ ID NO: 56576 - RNA, 19 nt, synthetic construct
  misc_feature 1..19: note = siRNA sense sequence
  source 1..19: mol_type = other RNA
agctctcaaaatctattca

SEQ ID NO: 56577 - RNA, 19 nt, synthetic construct
  misc_feature 1..19: note = siRNA antisense sequence
  source 1..19: mol_type = other RNA
tgaatagattttgagagct

SEQ ID NO: 56578 - RNA, 19 nt, synthetic construct
  misc_feature 1..19: note = siRNA sense sequence
  source 1..19: mol_type = other RNA
gctctcaaaatctattcat

SEQ ID NO: 56579 - RNA, 19 nt, synthetic construct
  misc_feature 1..19: note = siRNA antisense sequence
  source 1..19: mol_type = other RNA
atgaatagattttgagagc

SEQ ID NO: 56580 - RNA, 19 nt, synthetic construct
  misc_feature 1..19: note = siRNA sense sequence
  source 1..19: mol_type = other RNA
ctctcaaaatctattcatg

SEQ ID NO: 56581 - RNA, 19 nt, synthetic construct
  misc_feature 1..19: note = siRNA antisense sequence
  source 1..19: mol_type = other RNA
catgaatagattttgagag

SEQ ID NO: 56582 - RNA, 19 nt, synthetic construct
  misc_feature 1..19: note = siRNA sense sequence
  source 1..19: mol_type = other RNA
ttcaataagagcacttgta

SEQ ID NO: 56583 - RNA, 19 nt, synthetic construct
  misc_feature 1..19: note = siRNA antisense sequence
  source 1..19: mol_type = other RNA
tacaagtgctcttattgaa

SEQ ID NO: 56584 - RNA, 19 nt, synthetic construct
  misc_feature 1..19: note = siRNA sense sequence
  source 1..19: mol_type = other RNA
agagcacttgtatccattt

SEQ ID NO: 56585 - RNA, 19 nt, synthetic construct
  misc_feature 1..19: note = siRNA antisense sequence
  source 1..19: mol_type = other RNA
aaatggatacaagtgctct

SEQ ID NO: 56586 - RNA, 19 nt, synthetic construct
  misc_feature 1..19: note = siRNA sense sequence
  source 1..19: mol_type = other RNA
gagcacttgtatccatttg

SEQ ID NO: 56587 - RNA, 19 nt, synthetic construct
  misc_feature 1..19: note = siRNA antisense sequence
  source 1..19: mol_type = other RNA
caaatggatacaagtgctc

SEQ ID NO: 56588 - RNA, 19 nt, synthetic construct
  misc_feature 1..19: note = siRNA sense sequence
  source 1..19: mol_type = other RNA
agcacttgtatccatttga

SEQ ID NO: 56589 - RNA, 19 nt, synthetic construct
  misc_feature 1..19: note = siRNA antisense sequence
  source 1..19: mol_type = other RNA
tcaaatggatacaagtgct

SEQ ID NO: 56590 - RNA, 19 nt, synthetic construct
  misc_feature 1..19: note = siRNA sense sequence
  source 1..19: mol_type = other RNA
gcacttgtatccatttgat

SEQ ID NO: 56591 - RNA, 19 nt, synthetic construct
  misc_feature 1..19: note = siRNA antisense sequence
  source 1..19: mol_type = other RNA
atcaaatggatacaagtgc

SEQ ID NO: 56592 - RNA, 19 nt, synthetic construct
  misc_feature 1..19: note = siRNA sense sequence
  source 1..19: mol_type = other RNA
agacaggcaatattaatga

SEQ ID NO: 56593 - RNA, 19 nt, synthetic construct
  misc_feature 1..19: note = siRNA antisense sequence
  source 1..19: mol_type = other RNA
tcattaatattgcctgtct

SEQ ID NO: 56594 - RNA, 19 nt, synthetic construct
  misc_feature 1..19: note = siRNA sense sequence
  source 1..19: mol_type = other RNA
gacaggcaatattaatgac

SEQ ID NO: 56595 - RNA, 19 nt, synthetic construct
  misc_feature 1..19: note = siRNA antisense sequence
  source 1..19: mol_type = other RNA
gtcattaatattgcctgtc

SEQ ID NO: 56596 - RNA, 19 nt, synthetic construct
  misc_feature 1..19: note = siRNA sense sequence
  source 1..19: mol_type = other RNA
gggcatgatggaattagga

SEQ ID NO: 56597 - RNA, 19 nt, synthetic construct
  misc_feature 1..19: note = siRNA antisense sequence
  source 1..19: mol_type = other RNA
tcctaattccatcatgccc

SEQ ID NO: 56598 - RNA, 19 nt, synthetic construct
  misc_feature 1..19: note = siRNA sense sequence
  source 1..19: mol_type = other RNA
ctttattccttcagcatca

SEQ ID NO: 56599 - RNA, 19 nt, synthetic construct
  misc_feature 1..19: note = siRNA antisense sequence
  source 1..19: mol_type = other RNA
tgatgctgaaggaataaag

SEQ ID NO: 56600 - RNA, 19 nt, synthetic construct
  misc_feature 1..19: note = siRNA sense sequence
  source 1..19: mol_type = other RNA
ttattccttcagcatcaat

SEQ ID NO: 56601 - RNA, 19 nt, synthetic construct
  misc_feature 1..19: note = siRNA antisense sequence
  source 1..19: mol_type = other RNA
attgatgctgaaggaataa

SEQ ID NO: 56602 - RNA, 19 nt, synthetic construct
  misc_feature 1..19: note = siRNA sense sequence
  source 1..19: mol_type = other RNA
tattccttcagcatcaatc

SEQ ID NO: 56603 - RNA, 19 nt, synthetic construct
  misc_feature 1..19: note = siRNA antisense sequence
  source 1..19: mol_type = other RNA
gattgatgctgaaggaata

SEQ ID NO: 56604 - RNA, 19 nt, synthetic construct
  misc_feature 1..19: note = siRNA sense sequence
  source 1..19: mol_type = other RNA
attccttcagcatcaatcc

SEQ ID NO: 56605 - RNA, 19 nt, synthetic construct
  misc_feature 1..19: note = siRNA antisense sequence
  source 1..19: mol_type = other RNA
ggattgatgctgaaggaat

SEQ ID NO: 56606 - RNA, 19 nt, synthetic construct
  misc_feature 1..19: note = siRNA sense sequence
  source 1..19: mol_type = other RNA
tccttcagcatcaatcctg

SEQ ID NO: 56607 - RNA, 19 nt, synthetic construct
  misc_feature 1..19: note = siRNA antisense sequence
  source 1..19: mol_type = other RNA
caggattgatgctgaagga

SEQ ID NO: 56608 - RNA, 19 nt, synthetic construct
  misc_feature 1..19: note = siRNA sense sequence
  source 1..19: mol_type = other RNA
ccttcagcatcaatcctgt

SEQ ID NO: 56609 - RNA, 19 nt, synthetic construct
  misc_feature 1..19: note = siRNA antisense sequence
  source 1..19: mol_type = other RNA
acaggattgatgctgaagg

SEQ ID NO: 56610 - RNA, 19 nt, synthetic construct
  misc_feature 1..19: note = siRNA sense sequence
  source 1..19: mol_type = other RNA
cttcagcatcaatcctgta

SEQ ID NO: 56611 - RNA, 19 nt, synthetic construct
  misc_feature 1..19: note = siRNA antisense sequence
  source 1..19: mol_type = other RNA
tacaggattgatgctgaag

SEQ ID NO: 56612 - RNA, 19 nt, synthetic construct
  misc_feature 1..19: note = siRNA sense sequence
  source 1..19: mol_type = other RNA
ttcagcatcaatcctgtaa

SEQ ID NO: 56613 - RNA, 19 nt, synthetic construct
  misc_feature 1..19: note = siRNA antisense sequence
  source 1..19: mol_type = other RNA
ttacaggattgatgctgaa

SEQ ID NO: 56614 - RNA, 19 nt, synthetic construct
  misc_feature 1..19: note = siRNA sense sequence
  source 1..19: mol_type = other RNA
tcagcatcaatcctgtaaa

SEQ ID NO: 56615 - RNA, 19 nt, synthetic construct
  misc_feature 1..19: note = siRNA antisense sequence
  source 1..19: mol_type = other RNA
tttacaggattgatgctga

SEQ ID NO: 56616 - RNA, 19 nt, synthetic construct
  misc_feature 1..19: note = siRNA sense sequence
  source 1..19: mol_type = other RNA
cagcatcaatcctgtaaat

SEQ ID NO: 56617 - RNA, 19 nt, synthetic construct
  misc_feature 1..19: note = siRNA antisense sequence
  source 1..19: mol_type = other RNA
atttacaggattgatgctg

SEQ ID NO: 56618 - RNA, 19 nt, synthetic construct
  misc_feature 1..19: note = siRNA sense sequence
  source 1..19: mol_type = other RNA
gcatcaatcctgtaaattt

SEQ ID NO: 56619 - RNA, 19 nt, synthetic construct
  misc_feature 1..19: note = siRNA antisense sequence
  source 1..19: mol_type = other RNA
aaatttacaggattgatgc

SEQ ID NO: 56620 - RNA, 19 nt, synthetic construct
  misc_feature 1..19: note = siRNA sense sequence
  source 1..19: mol_type = other RNA
atcctgtaaatttaatggg

SEQ ID NO: 56621 - RNA, 19 nt, synthetic construct
  misc_feature 1..19: note = siRNA antisense sequence
  source 1..19: mol_type = other RNA
cccattaaatttacaggat

SEQ ID NO: 56622 - RNA, 19 nt, synthetic construct
  misc_feature 1..19: note = siRNA sense sequence
  source 1..19: mol_type = other RNA
gggtagcatttgaagtaga

SEQ ID NO: 56623 - RNA, 19 nt, synthetic construct
  misc_feature 1..19: note = siRNA antisense sequence
  source 1..19: mol_type = other RNA
tctacttcaaatgctaccc

SEQ ID NO: 56624 - RNA, 19 nt, synthetic construct
  misc_feature 1..19: note = siRNA sense sequence
  source 1..19: mol_type = other RNA
ggtagcatttgaagtagaa

SEQ ID NO: 56625 - RNA, 19 nt, synthetic construct
  misc_feature 1..19: note = siRNA antisense sequence
  source 1..19: mol_type = other RNA
ttctacttcaaatgctacc

SEQ ID NO: 56626 - RNA, 19 nt, synthetic construct
  misc_feature 1..19: note = siRNA sense sequence
  source 1..19: mol_type = other RNA
aaagctaaatcattgtcag

SEQ ID NO: 56627 - RNA, 19 nt, synthetic construct
  misc_feature 1..19: note = siRNA antisense sequence
  source 1..19: mol_type = other RNA
ctgacaatgatttagcttt

SEQ ID NO: 56628 - RNA, 19 nt, synthetic construct
  misc_feature 1..19: note = siRNA sense sequence
  source 1..19: mol_type = other RNA
caacttgttttctaaatgg

SEQ ID NO: 56629 - RNA, 19 nt, synthetic construct
  misc_feature 1..19: note = siRNA antisense sequence
  source 1..19: mol_type = other RNA
ccatttagaaaacaagttg

SEQ ID NO: 56630 - RNA, 19 nt, synthetic construct
  misc_feature 1..19: note = siRNA sense sequence
  source 1..19: mol_type = other RNA
acttgttttctaaatggtg

SEQ ID NO: 56631 - RNA, 19 nt, synthetic construct
  misc_feature 1..19: note = siRNA antisense sequence
  source 1..19: mol_type = other RNA
caccatttagaaaacaagt

SEQ ID NO: 56632 - RNA, 19 nt, synthetic construct
  misc_feature 1..19: note = siRNA sense sequence
  source 1..19: mol_type = other RNA
ttgttttctaaatggtggt

SEQ ID NO: 56633 - RNA, 19 nt, synthetic construct
  misc_feature 1..19: note = siRNA antisense sequence
  source 1..19: mol_type = other RNA
accaccatttagaaaacaa

SEQ ID NO: 56634 - RNA, 19 nt, synthetic construct
  misc_feature 1..19: note = siRNA sense sequence
  source 1..19: mol_type = other RNA
tgttttctaaatggtggta

SEQ ID NO: 56635 - RNA, 19 nt, synthetic construct
  misc_feature 1..19: note = siRNA antisense sequence
  source 1..19: mol_type = other RNA
taccaccatttagaaaaca

SEQ ID NO: 56636 - RNA, 19 nt, synthetic construct
  misc_feature 1..19: note = siRNA sense sequence
  source 1..19: mol_type = other RNA
gttttctaaatggtggtaa

SEQ ID NO: 56637 - RNA, 19 nt, synthetic construct
  misc_feature 1..19: note = siRNA antisense sequence
  source 1..19: mol_type = other RNA
ttaccaccatttagaaaac

SEQ ID NO: 56638 - RNA, 19 nt, synthetic construct
  misc_feature 1..19: note = siRNA sense sequence
  source 1..19: mol_type = other RNA
ttttccaaggaataggtga

SEQ ID NO: 56639 - RNA, 19 nt, synthetic construct
  misc_feature 1..19: note = siRNA antisense sequence
  source 1..19: mol_type = other RNA
tcacctattccttggaaaa

SEQ ID NO: 56640 - RNA, 19 nt, synthetic construct
  misc_feature 1..19: note = siRNA sense sequence
  source 1..19: mol_type = other RNA
tttccaaggaataggtgaa

SEQ ID NO: 56641 - RNA, 19 nt, synthetic construct
  misc_feature 1..19: note = siRNA antisense sequence
  source 1..19: mol_type = other RNA
ttcacctattccttggaaa

SEQ ID NO: 56642 - RNA, 19 nt, synthetic construct
  misc_feature 1..19: note = siRNA sense sequence
  source 1..19: mol_type = other RNA
ttccaaggaataggtgaag

SEQ ID NO: 56643 - RNA, 19 nt, synthetic construct
  misc_feature 1..19: note = siRNA antisense sequence
  source 1..19: mol_type = other RNA
cttcacctattccttggaa

SEQ ID NO: 56644 - RNA, 19 nt, synthetic construct
  misc_feature 1..19: note = siRNA sense sequence
  source 1..19: mol_type = other RNA
caaggaataggtgaagatg

SEQ ID NO: 56645 - RNA, 19 nt, synthetic construct
  misc_feature 1..19: note = siRNA antisense sequence
  source 1..19: mol_type = other RNA
catcttcacctattccttg

SEQ ID NO: 56646 - RNA, 19 nt, synthetic construct
  misc_feature 1..19: note = siRNA sense sequence
  source 1..19: mol_type = other RNA
ggaataggtgaagatgtgc

SEQ ID NO: 56647 - RNA, 19 nt, synthetic construct
  misc_feature 1..19: note = siRNA antisense sequence
  source 1..19: mol_type = other RNA
gcacatcttcacctattcc

SEQ ID NO: 56648 - RNA, 19 nt, synthetic construct
  misc_feature 1..19: note = siRNA sense sequence
  source 1..19: mol_type = other RNA
gaataggtgaagatgtgct

SEQ ID NO: 56649 - RNA, 19 nt, synthetic construct
  misc_feature 1..19: note = siRNA antisense sequence
  source 1..19: mol_type = other RNA
agcacatcttcacctattc

SEQ ID NO: 56650 - RNA, 19 nt, synthetic construct
  misc_feature 1..19: note = siRNA sense sequence
  source 1..19: mol_type = other RNA
aataggtgaagatgtgctt

SEQ ID NO: 56651 - RNA, 19 nt, synthetic construct
  misc_feature 1..19: note = siRNA antisense sequence
  source 1..19: mol_type = other RNA
aagcacatcttcacctatt

SEQ ID NO: 56652 - RNA, 19 nt, synthetic construct
  misc_feature 1..19: note = siRNA sense sequence
  source 1..19: mol_type = other RNA
ataggtgaagatgtgctta

SEQ ID NO: 56653 - RNA, 19 nt, synthetic construct
  misc_feature 1..19: note = siRNA antisense sequence
  source 1..19: mol_type = other RNA
taagcacatcttcacctat

SEQ ID NO: 56654 - RNA, 19 nt, synthetic construct
  misc_feature 1..19: note = siRNA sense sequence
  source 1..19: mol_type = other RNA
taggtgaagatgtgcttac

SEQ ID NO: 56655 - RNA, 19 nt, synthetic construct
  misc_feature 1..19: note = siRNA antisense sequence
  source 1..19: mol_type = other RNA
gtaagcacatcttcaccta

SEQ ID NO: 56656 - RNA, 19 nt, synthetic construct
  misc_feature 1..19: note = siRNA sense sequence
  source 1..19: mol_type = other RNA
ggtgaagatgtgcttactc

SEQ ID NO: 56657 - RNA, 19 nt, synthetic construct
  misc_feature 1..19: note = siRNA antisense sequence
  source 1..19: mol_type = other RNA
gagtaagcacatcttcacc

SEQ ID NO: 56658 - RNA, 19 nt, synthetic construct
  misc_feature 1..19: note = siRNA sense sequence
  source 1..19: mol_type = other RNA
gtgaagatgtgcttactca

SEQ ID NO: 56659 - RNA, 19 nt, synthetic construct
  misc_feature 1..19: note = siRNA antisense sequence
  source 1..19: mol_type = other RNA
tgagtaagcacatcttcac

SEQ ID NO: 56660 - RNA, 19 nt, synthetic construct
  misc_feature 1..19: note = siRNA sense sequence
  source 1..19: mol_type = other RNA
tgaagatgtgcttactcat

SEQ ID NO: 56661 - RNA, 19 nt, synthetic construct
  misc_feature 1..19: note = siRNA antisense sequence
  source 1..19: mol_type = other RNA
atgagtaagcacatcttca

SEQ ID NO: 56662 - RNA, 19 nt, synthetic construct
  misc_feature 1..19: note = siRNA sense sequence
  source 1..19: mol_type = other RNA
gaagatgtgcttactcatt

SEQ ID NO: 56663 - RNA, 19 nt, synthetic construct
  misc_feature 1..19: note = siRNA antisense sequence
  source 1..19: mol_type = other RNA
aatgagtaagcacatcttc

SEQ ID NO: 56664 - RNA, 19 nt, synthetic construct
  misc_feature 1..19: note = siRNA sense sequence
  source 1..19: mol_type = other RNA
agatgtgcttactcatttc

SEQ ID NO: 56665 - RNA, 19 nt, synthetic construct
  misc_feature 1..19: note = siRNA antisense sequence
  source 1..19: mol_type = other RNA
gaaatgagtaagcacatct

SEQ ID NO: 56666 - RNA, 19 nt, synthetic construct
  misc_feature 1..19: note = siRNA sense sequence
  source 1..19: mol_type = other RNA
gatgtgcttactcatttcc

SEQ ID NO: 56667 - RNA, 19 nt, synthetic construct
  misc_feature 1..19: note = siRNA antisense sequence
  source 1..19: mol_type = other RNA
ggaaatgagtaagcacatc

SEQ ID NO: 56668 - RNA, 19 nt, synthetic construct
  misc_feature 1..19: note = siRNA sense sequence
  source 1..19: mol_type = other RNA
atgtgcttactcatttcca

SEQ ID NO: 56669 - RNA, 19 nt, synthetic construct
  misc_feature 1..19: note = siRNA antisense sequence
  source 1..19: mol_type = other RNA
tggaaatgagtaagcacat

SEQ ID NO: 56670 - RNA, 19 nt, synthetic construct
  misc_feature 1..19: note = siRNA sense sequence
  source 1..19: mol_type = other RNA
tgtgcttactcatttccat

SEQ ID NO: 56671 - RNA, 19 nt, synthetic construct
  misc_feature 1..19: note = siRNA antisense sequence
  source 1..19: mol_type = other RNA
atggaaatgagtaagcaca

SEQ ID NO: 56672 - RNA, 19 nt, synthetic construct
  misc_feature 1..19: note = siRNA sense sequence
  source 1..19: mol_type = other RNA
agatgctgcttatgtatgg

SEQ ID NO: 56673 - RNA, 19 nt, synthetic construct
  misc_feature 1..19: note = siRNA antisense sequence
  source 1..19: mol_type = other RNA
ccatacataagcagcatct

SEQ ID NO: 56674 - RNA, 19 nt, synthetic construct
  misc_feature 1..19: note = siRNA sense sequence
  source 1..19: mol_type = other RNA
gatgctgcttatgtatggg

SEQ ID NO: 56675 - RNA, 19 nt, synthetic construct
  misc_feature 1..19: note = siRNA antisense sequence
  source 1..19: mol_type = other RNA
cccatacataagcagcatc

SEQ ID NO: 56676 - RNA, 19 nt, synthetic construct
  misc_feature 1..19: note = siRNA sense sequence
  source 1..19: mol_type = other RNA
tgctgcttatgtatgggat

SEQ ID NO: 56677 - RNA, 19 nt, synthetic construct
  misc_feature 1..19: note = siRNA antisense sequence
  source 1..19: mol_type = other RNA
atcccatacataagcagca

SEQ ID NO: 56678 - RNA, 19 nt, synthetic construct
  misc_feature 1..19: note = siRNA sense sequence
  source 1..19: mol_type = other RNA
tatgtatgggataatccag

SEQ ID NO: 56679 - RNA, 19 nt, synthetic construct
  misc_feature 1..19: note = siRNA antisense sequence
  source 1..19: mol_type = other RNA
ctggattatcccatacata

SEQ ID NO: 56680 - RNA, 19 nt, synthetic construct
  misc_feature 1..19: note = siRNA sense sequence
  source 1..19: mol_type = other RNA
atgtatgggataatccaga

SEQ ID NO: 56681 - RNA, 19 nt, synthetic construct
  misc_feature 1..19: note = siRNA antisense sequence
  source 1..19: mol_type = other RNA
tctggattatcccatacat

SEQ ID NO: 56682 - RNA, 19 nt, synthetic construct
  misc_feature 1..19: note = siRNA sense sequence
  source 1..19: mol_type = other RNA
tgtatgggataatccagaa

SEQ ID NO: 56683 - RNA, 19 nt, synthetic construct
  misc_feature 1..19: note = siRNA antisense sequence
  source 1..19: mol_type = other RNA
ttctggattatcccataca

SEQ ID NO: 56684 - RNA, 19 nt, synthetic construct
  misc_feature 1..19: note = siRNA sense sequence
  source 1..19: mol_type = other RNA
gtatgggataatccagaat

SEQ ID NO: 56685 - RNA, 19 nt, synthetic construct
  misc_feature 1..19: note = siRNA antisense sequence
  source 1..19: mol_type = other RNA
attctggattatcccatac

SEQ ID NO: 56686 - RNA, 19 nt, synthetic construct
  misc_feature 1..19: note = siRNA sense sequence
  source 1..19: mol_type = other RNA
tatgggataatccagaatc

SEQ ID NO: 56687 - RNA, 19 nt, synthetic construct
  misc_feature 1..19: note = siRNA antisense sequence
  source 1..19: mol_type = other RNA
gattctggattatcccata

SEQ ID NO: 56688 - RNA, 19 nt, synthetic construct
  misc_feature 1..19: note = siRNA sense sequence
  source 1..19: mol_type = other RNA
atgggataatccagaatca

SEQ ID NO: 56689 - RNA, 19 nt, synthetic construct
  misc_feature 1..19: note = siRNA antisense sequence
  source 1..19: mol_type = other RNA
tgattctggattatcccat

SEQ ID NO: 56690 - RNA, 19 nt, synthetic construct
  misc_feature 1..19: note = siRNA sense sequence
  source 1..19: mol_type = other RNA
tgggataatccagaatcaa

SEQ ID NO: 56691 - RNA, 19 nt, synthetic construct
  misc_feature 1..19: note = siRNA antisense sequence
  source 1..19: mol_type = other RNA
ttgattctggattatccca

SEQ ID NO: 56692 - RNA, 19 nt, synthetic construct
  misc_feature 1..19: note = siRNA sense sequence
  source 1..19: mol_type = other RNA
cagatatctcctgaattct

SEQ ID NO: 56693 - RNA, 19 nt, synthetic construct
  misc_feature 1..19: note = siRNA antisense sequence
  source 1..19: mol_type = other RNA
agaattcaggagatatctg

SEQ ID NO: 56694 - RNA, 19 nt, synthetic construct
  misc_feature 1..19: note = siRNA sense sequence
  source 1..19: mol_type = other RNA
gatatctcctgaattcttc

SEQ ID NO: 56695 - RNA, 19 nt, synthetic construct
  misc_feature 1..19: note = siRNA antisense sequence
  source 1..19: mol_type = other RNA
gaagaattcaggagatatc

SEQ ID NO: 56696 - RNA, 19 nt, synthetic construct
  misc_feature 1..19: note = siRNA sense sequence
  source 1..19: mol_type = other RNA
aaaatgaggaggattgctg

SEQ ID NO: 56697 - RNA, 19 nt, synthetic construct
  misc_feature 1..19: note = siRNA antisense sequence
  source 1..19: mol_type = other RNA
cagcaatcctcctcatttt

SEQ ID NO: 56698 - RNA, 19 nt, synthetic construct
  misc_feature 1..19: note = siRNA sense sequence
  source 1..19: mol_type = other RNA
tgaggaggattgctgggtg

SEQ ID NO: 56699 - RNA, 19 nt, synthetic construct
  misc_feature 1..19: note = siRNA antisense sequence
  source 1..19: mol_type = other RNA
cacccagcaatcctcctca

SEQ ID NO: 56700 - RNA, 19 nt, synthetic construct
  misc_feature 1..19: note = siRNA sense sequence
  source 1..19: mol_type = other RNA
gaggaggattgctgggtgc

SEQ ID NO: 56701 - RNA, 19 nt, synthetic construct
  misc_feature 1..19: note = siRNA antisense sequence
  source 1..19: mol_type = other RNA
gcacccagcaatcctcctc

SEQ ID NO: 56702 - RNA, 19 nt, synthetic construct
  misc_feature 1..19: note = siRNA sense sequence
  source 1..19: mol_type = other RNA
aggaggattgctgggtgcg

SEQ ID NO: 56703 - RNA, 19 nt, synthetic construct
  misc_feature 1..19: note = siRNA antisense sequence
  source 1..19: mol_type = other RNA
cgcacccagcaatcctcct

SEQ ID NO: 56704 - RNA, 19 nt, synthetic construct
  misc_feature 1..19: note = siRNA sense sequence
  source 1..19: mol_type = other RNA
aggattgctgggtgcggtg

SEQ ID NO: 56705 - RNA, 19 nt, synthetic construct
  misc_feature 1..19: note = siRNA antisense sequence
  source 1..19: mol_type = other RNA
caccgcacccagcaatcct

SEQ ID NO: 56706 - RNA, 19 nt, synthetic construct
  misc_feature 1..19: note = siRNA sense sequence
  source 1..19: mol_type = other RNA
tgcggtggctcatgcctgt

SEQ ID NO: 56707 - RNA, 19 nt, synthetic construct
  misc_feature 1..19: note = siRNA antisense sequence
  source 1..19: mol_type = other RNA
acaggcatgagccaccgca

SEQ ID NO: 56708 - RNA, 19 nt, synthetic construct
  misc_feature 1..19: note = siRNA sense sequence
  source 1..19: mol_type = other RNA
gcggtggctcatgcctgta

SEQ ID NO: 56709 - RNA, 19 nt, synthetic construct
  misc_feature 1..19: note = siRNA antisense sequence
  source 1..19: mol_type = other RNA
tacaggcatgagccaccgc

SEQ ID NO: 56710 - RNA, 19 nt, synthetic construct
  misc_feature 1..19: note = siRNA sense sequence
  source 1..19: mol_type = other RNA
cggtggctcatgcctgtaa

SEQ ID NO: 56711 - RNA, 19 nt, synthetic construct
  misc_feature 1..19: note = siRNA antisense sequence
  source 1..19: mol_type = other RNA
ttacaggcatgagccaccg

SEQ ID NO: 56712 - RNA, 19 nt, synthetic construct
  misc_feature 1..19: note = siRNA sense sequence
  source 1..19: mol_type = other RNA
ggtggctcatgcctgtaat

SEQ ID NO: 56713 - RNA, 19 nt, synthetic construct
  misc_feature 1..19: note = siRNA antisense sequence
  source 1..19: mol_type = other RNA
attacaggcatgagccacc

SEQ ID NO: 56714 - RNA, 19 nt, synthetic construct
  misc_feature 1..19: note = siRNA sense sequence
  source 1..19: mol_type = other RNA
gtggctcatgcctgtaatc

SEQ ID NO: 56715 - RNA, 19 nt, synthetic construct
  misc_feature 1..19: note = siRNA antisense sequence
  source 1..19: mol_type = other RNA
gattacaggcatgagccac

SEQ ID NO: 56716 - RNA, 19 nt, synthetic construct
  misc_feature 1..19: note = siRNA sense sequence
  source 1..19: mol_type = other RNA
tggctcatgcctgtaatcc

SEQ ID NO: 56717 - RNA, 19 nt, synthetic construct
  misc_feature 1..19: note = siRNA antisense sequence
  source 1..19: mol_type = other RNA
ggattacaggcatgagcca

SEQ ID NO: 56718 - RNA, 19 nt, synthetic construct
  misc_feature 1..19: note = siRNA sense sequence
  source 1..19: mol_type = other RNA
ggctcatgcctgtaatccc

SEQ ID NO: 56719 - RNA, 19 nt, synthetic construct
  misc_feature 1..19: note = siRNA antisense sequence
  source 1..19: mol_type = other RNA
gggattacaggcatgagcc

SEQ ID NO: 56720 - RNA, 19 nt, synthetic construct
  misc_feature 1..19: note = siRNA sense sequence
  source 1..19: mol_type = other RNA
atgcctgtaatcccagcac

SEQ ID NO: 56721 - RNA, 19 nt, synthetic construct
  misc_feature 1..19: note = siRNA antisense sequence
  source 1..19: mol_type = other RNA
gtgctgggattacaggcat

SEQ ID NO: 56722 - RNA, 19 nt, synthetic construct
  misc_feature 1..19: note = siRNA sense sequence
  source 1..19: mol_type = other RNA
gatcatgaggccaggagtt

SEQ ID NO: 56723 - RNA, 19 nt, synthetic construct
  misc_feature 1..19: note = siRNA antisense sequence
  source 1..19: mol_type = other RNA
aactcctggcctcatgatc

SEQ ID NO: 56724 - RNA, 19 nt, synthetic construct
  misc_feature 1..19: note = siRNA sense sequence
  source 1..19: mol_type = other RNA
atcatgaggccaggagttc

SEQ ID NO: 56725 - RNA, 19 nt, synthetic construct
  misc_feature 1..19: note = siRNA antisense sequence
  source 1..19: mol_type = other RNA
gaactcctggcctcatgat

SEQ ID NO: 56726 - RNA, 19 nt, synthetic construct
  misc_feature 1..19: note = siRNA sense sequence
  source 1..19: mol_type = other RNA
tcatgaggccaggagttcg

SEQ ID NO: 56727 - RNA, 19 nt, synthetic construct
  misc_feature 1..19: note = siRNA antisense sequence
  source 1..19: mol_type = other RNA
cgaactcctggcctcatga

SEQ ID NO: 56728 - RNA, 19 nt, synthetic construct
  misc_feature 1..19: note = siRNA sense sequence
  source 1..19: mol_type = other RNA
catgaggccaggagttcga

SEQ ID NO: 56729 - RNA, 19 nt, synthetic construct
  misc_feature 1..19: note = siRNA antisense sequence
  source 1..19: mol_type = other RNA
tcgaactcctggcctcatg

SEQ ID NO: 56730 - RNA, 19 nt, synthetic construct
  misc_feature 1..19: note = siRNA sense sequence
  source 1..19: mol_type = other RNA
atgaggccaggagttcgag

SEQ ID NO: 56731 - RNA, 19 nt, synthetic construct
  misc_feature 1..19: note = siRNA antisense sequence
  source 1..19: mol_type = other RNA
ctcgaactcctggcctcat

SEQ ID NO: 56732 - RNA, 19 nt, synthetic construct
  misc_feature 1..19: note = siRNA sense sequence
  source 1..19: mol_type = other RNA
agaccagcctggccaatgg

SEQ ID NO: 56733 - RNA, 19 nt, synthetic construct
  misc_feature 1..19: note = siRNA antisense sequence
  source 1..19: mol_type = other RNA
ccattggccaggctggtct

SEQ ID NO: 56734 - RNA, 19 nt, synthetic construct
  misc_feature 1..19: note = siRNA sense sequence
  source 1..19: mol_type = other RNA
ccagcctggccaatggtga

SEQ ID NO: 56735 - RNA, 19 nt, synthetic construct
  misc_feature 1..19: note = siRNA antisense sequence
  source 1..19: mol_type = other RNA
tcaccattggccaggctgg

SEQ ID NO: 56736 - RNA, 19 nt, synthetic construct
  misc_feature 1..19: note = siRNA sense sequence
  source 1..19: mol_type = other RNA
gcacctgtaatcccagcta

SEQ ID NO: 56737 - RNA, 19 nt, synthetic construct
  misc_feature 1..19: note = siRNA antisense sequence
  source 1..19: mol_type = other RNA
tagctgggattacaggtgc

SEQ ID NO: 56738 - RNA, 19 nt, synthetic construct
  misc_feature 1..19: note = siRNA sense sequence
  source 1..19: mol_type = other RNA
cacctgtaatcccagctat

SEQ ID NO: 56739 - RNA, 19 nt, synthetic construct
  misc_feature 1..19: note = siRNA antisense sequence
  source 1..19: mol_type = other RNA
atagctgggattacaggtg

SEQ ID NO: 56740 - RNA, 19 nt, synthetic construct
  misc_feature 1..19: note = siRNA sense sequence
  source 1..19: mol_type = other RNA
acctgtaatcccagctatt

SEQ ID NO: 56741 - RNA, 19 nt, synthetic construct
  misc_feature 1..19: note = siRNA antisense sequence
  source 1..19: mol_type = other RNA
aatagctgggattacaggt

SEQ ID NO: 56742 - RNA, 19 nt, synthetic construct
  misc_feature 1..19: note = siRNA sense sequence
  source 1..19: mol_type = other RNA
cctgtaatcccagctattc

SEQ ID NO: 56743 - RNA, 19 nt, synthetic construct
  misc_feature 1..19: note = siRNA antisense sequence
  source 1..19: mol_type = other RNA
gaatagctgggattacagg

SEQ ID NO: 56744 - RNA, 19 nt, synthetic construct
  misc_feature 1..19: note = siRNA sense sequence
  source 1..19: mol_type = other RNA
gtttccatttggtttgcct

SEQ ID NO: 56745 - RNA, 19 nt, synthetic construct
  misc_feature 1..19: note = siRNA antisense sequence
  source 1..19: mol_type = other RNA
aggcaaaccaaatggaaac

SEQ ID NO: 56746 - RNA, 19 nt, synthetic construct
  misc_feature 1..19: note = siRNA sense sequence
  source 1..19: mol_type = other RNA
ccatttggtttgccttagt

SEQ ID NO: 56747 - RNA, 19 nt, synthetic construct
  misc_feature 1..19: note = siRNA antisense sequence
  source 1..19: mol_type = other RNA
actaaggcaaaccaaatgg

SEQ ID NO: 56748 - RNA, 19 nt, synthetic construct
  misc_feature 1..19: note = siRNA sense sequence
  source 1..19: mol_type = other RNA
catttggtttgccttagta

SEQ ID NO: 56749 - RNA, 19 nt, synthetic construct
  misc_feature 1..19: note = siRNA antisense sequence
  source 1..19: mol_type = other RNA
tactaaggcaaaccaaatg

SEQ ID NO: 56750 - RNA, 19 nt, synthetic construct
  misc_feature 1..19: note = siRNA sense sequence
  source 1..19: mol_type = other RNA
caagaggctcagaagactt

SEQ ID NO: 56751 - RNA, 19 nt, synthetic construct
  misc_feature 1..19: note = siRNA antisense sequence
  source 1..19: mol_type = other RNA
aagtcttctgagcctcttg

SEQ ID NO: 56752 - RNA, 19 nt, synthetic construct
  misc_feature 1..19: note = siRNA sense sequence
  source 1..19: mol_type = other RNA
ggctcagaagacttgaagt

SEQ ID NO: 56753 - RNA, 19 nt, synthetic construct
  misc_feature 1..19: note = siRNA antisense sequence
  source 1..19: mol_type = other RNA
acttcaagtcttctgagcc

SEQ ID NO: 56754 - RNA, 19 nt, synthetic construct
  misc_feature 1..19: note = siRNA sense sequence
  source 1..19: mol_type = other RNA
gctcagaagacttgaagtt

SEQ ID NO: 56755 - RNA, 19 nt, synthetic construct
  misc_feature 1..19: note = siRNA antisense sequence
  source 1..19: mol_type = other RNA
aacttcaagtcttctgagc

SEQ ID NO: 56756 - RNA, 19 nt, synthetic construct
  misc_feature 1..19: note = siRNA sense sequence
  source 1..19: mol_type = other RNA
ctcagaagacttgaagttt

SEQ ID NO: 56757 - RNA, 19 nt, synthetic construct
  misc_feature 1..19: note = siRNA antisense sequence
  source 1..19: mol_type = other RNA
aaacttcaagtcttctgag

SEQ ID NO: 56758 - RNA, 19 nt, synthetic construct
  misc_feature 1..19: note = siRNA sense sequence
  source 1..19: mol_type = other RNA
tcagaagacttgaagttta

SEQ ID NO: 56759 - RNA, 19 nt, synthetic construct
  misc_feature 1..19: note = siRNA antisense sequence
  source 1..19: mol_type = other RNA
taaacttcaagtcttctga

SEQ ID NO: 56760 - RNA, 19 nt, synthetic construct
  misc_feature 1..19: note = siRNA sense sequence
  source 1..19: mol_type = other RNA
cagaagacttgaagtttag

SEQ ID NO: 56761 - RNA, 19 nt, synthetic construct
  misc_feature 1..19: note = siRNA antisense sequence
  source 1..19: mol_type = other RNA
ctaaacttcaagtcttctg

SEQ ID NO: 56762 - RNA, 19 nt, synthetic construct
  misc_feature 1..19: note = siRNA sense sequence
  source 1..19: mol_type = other RNA
agaagacttgaagtttagg

SEQ ID NO: 56763 - RNA, 19 nt, synthetic construct
  misc_feature 1..19: note = siRNA antisense sequence
  source 1..19: mol_type = other RNA
cctaaacttcaagtcttct

SEQ ID NO: 56764 - RNA, 19 nt, synthetic construct
  misc_feature 1..19: note = siRNA sense sequence
  source 1..19: mol_type = other RNA
gaagacttgaagtttaggg

SEQ ID NO: 56765 - RNA, 19 nt, synthetic construct
  misc_feature 1..19: note = siRNA antisense sequence
  source 1..19: mol_type = other RNA
ccctaaacttcaagtcttc

SEQ ID NO: 56766 - RNA, 19 nt, synthetic construct
  misc_feature 1..19: note = siRNA sense sequence
  source 1..19: mol_type = other RNA
aagacttgaagtttaggga

SEQ ID NO: 56767 - RNA, 19 nt, synthetic construct
  misc_feature 1..19: note = siRNA antisense sequence
  source 1..19: mol_type = other RNA
tccctaaacttcaagtctt

SEQ ID NO: 56768 - RNA, 19 nt, synthetic construct
  misc_feature 1..19: note = siRNA sense sequence
  source 1..19: mol_type = other RNA
cttgaagtttagggagggt

SEQ ID NO: 56769 - RNA, 19 nt, synthetic construct
  misc_feature 1..19: note = siRNA antisense sequence
  source 1..19: mol_type = other RNA
accctccctaaacttcaag

SEQ ID NO: 56770 - RNA, 19 nt, synthetic construct
  misc_feature 1..19: note = siRNA sense sequence
  source 1..19: mol_type = other RNA
tgaagtttagggagggttt

SEQ ID NO: 56771 - RNA, 19 nt, synthetic construct
  misc_feature 1..19: note = siRNA antisense sequence
  source 1..19: mol_type = other RNA
aaaccctccctaaacttca

SEQ ID NO: 56772 - RNA, 19 nt, synthetic construct
  misc_feature 1..19: note = siRNA sense sequence
  source 1..19: mol_type = other RNA
gtttagggagggtttgtaa

SEQ ID NO: 56773 - RNA, 19 nt, synthetic construct
  misc_feature 1..19: note = siRNA antisense sequence
  source 1..19: mol_type = other RNA
ttacaaaccctccctaaac

SEQ ID NO: 56774 - RNA, 19 nt, synthetic construct
  misc_feature 1..19: note = siRNA sense sequence
  source 1..19: mol_type = other RNA
tttagggagggtttgtaag

SEQ ID NO: 56775 - RNA, 19 nt, synthetic construct
  misc_feature 1..19: note = siRNA antisense sequence
  source 1..19: mol_type = other RNA
cttacaaaccctccctaaa

SEQ ID NO: 56776 - RNA, 19 nt, synthetic construct
  misc_feature 1..19: note = siRNA sense sequence
  source 1..19: mol_type = other RNA
ttagggagggtttgtaagt

SEQ ID NO: 56777 - RNA, 19 nt, synthetic construct
  misc_feature 1..19: note = siRNA antisense sequence
  source 1..19: mol_type = other RNA
acttacaaaccctccctaa

SEQ ID NO: 56778 - RNA, 19 nt, synthetic construct
  misc_feature 1..19: note = siRNA sense sequence
  source 1..19: mol_type = other RNA
tagggagggtttgtaagtc

SEQ ID NO: 56779 - RNA, 19 nt, synthetic construct
  misc_feature 1..19: note = siRNA antisense sequence
  source 1..19: mol_type = other RNA
gacttacaaaccctcccta

SEQ ID NO: 56780 - RNA, 19 nt, synthetic construct
  misc_feature 1..19: note = siRNA sense sequence
  source 1..19: mol_type = other RNA
agggagggtttgtaagtcc

SEQ ID NO: 56781 - RNA, 19 nt, synthetic construct
  misc_feature 1..19: note = siRNA antisense sequence
  source 1..19: mol_type = other RNA
ggacttacaaaccctccct

SEQ ID NO: 56782 - RNA, 19 nt, synthetic construct
  misc_feature 1..19: note = siRNA sense sequence
  source 1..19: mol_type = other RNA
gggagggtttgtaagtcct

SEQ ID NO: 56783 - RNA, 19 nt, synthetic construct
  misc_feature 1..19: note = siRNA antisense sequence
  source 1..19: mol_type = other RNA
aggacttacaaaccctccc

SEQ ID NO: 56784 - RNA, 19 nt, synthetic construct
  misc_feature 1..19: note = siRNA sense sequence
  source 1..19: mol_type = other RNA
ggagggtttgtaagtcctg

SEQ ID NO: 56785 - RNA, 19 nt, synthetic construct
  misc_feature 1..19: note = siRNA antisense sequence
  source 1..19: mol_type = other RNA
caggacttacaaaccctcc

SEQ ID NO: 56786 - RNA, 19 nt, synthetic construct
  misc_feature 1..19: note = siRNA sense sequence
  source 1..19: mol_type = other RNA
gagggtttgtaagtcctga

SEQ ID NO: 56787 - RNA, 19 nt, synthetic construct
  misc_feature 1..19: note = siRNA antisense sequence
  source 1..19: mol_type = other RNA
tcaggacttacaaaccctc

SEQ ID NO: 56788 - RNA, 19 nt, synthetic construct
  misc_feature 1..19: note = siRNA sense sequence
  source 1..19: mol_type = other RNA
agggtttgtaagtcctgac

SEQ ID NO: 56789 - RNA, 19 nt, synthetic construct
  misc_feature 1..19: note = siRNA antisense sequence
  source 1..19: mol_type = other RNA
gtcaggacttacaaaccct

SEQ ID NO: 56790 - RNA, 19 nt, synthetic construct
  misc_feature 1..19: note = siRNA sense sequence
  source 1..19: mol_type = other RNA
gggtttgtaagtcctgact

SEQ ID NO: 56791 - RNA, 19 nt, synthetic construct
  misc_feature 1..19: note = siRNA antisense sequence
  source 1..19: mol_type = other RNA
agtcaggacttacaaaccc

SEQ ID NO: 56792 - RNA, 19 nt, synthetic construct
  misc_feature 1..19: note = siRNA sense sequence
  source 1..19: mol_type = other RNA
gtttgtaagtcctgactgc

SEQ ID NO: 56793 - RNA, 19 nt, synthetic construct
  misc_feature 1..19: note = siRNA antisense sequence
  source 1..19: mol_type = other RNA
gcagtcaggacttacaaac

SEQ ID NO: 56794 - RNA, 19 nt, synthetic construct
  misc_feature 1..19: note = siRNA sense sequence
  source 1..19: mol_type = other RNA
tttgtaagtcctgactgct

SEQ ID NO: 56795 - RNA, 19 nt, synthetic construct
  misc_feature 1..19: note = siRNA antisense sequence
  source 1..19: mol_type = other RNA
agcagtcaggacttacaaa

SEQ ID NO: 56796 - RNA, 19 nt, synthetic construct
  misc_feature 1..19: note = siRNA sense sequence
  source 1..19: mol_type = other RNA
ttgtaagtcctgactgctt

SEQ ID NO: 56797 - RNA, 19 nt, synthetic construct
  misc_feature 1..19: note = siRNA antisense sequence
  source 1..19: mol_type = other RNA
aagcagtcaggacttacaa

SEQ ID NO: 56798 - RNA, 19 nt, synthetic construct
  misc_feature 1..19: note = siRNA sense sequence
  source 1..19: mol_type = other RNA
tgtaagtcctgactgcttg

SEQ ID NO: 56799 - RNA, 19 nt, synthetic construct
  misc_feature 1..19: note = siRNA antisense sequence
  source 1..19: mol_type = other RNA
caagcagtcaggacttaca

SEQ ID NO: 56800 - RNA, 19 nt, synthetic construct
  misc_feature 1..19: note = siRNA sense sequence
  source 1..19: mol_type = other RNA
gtaagtcctgactgcttgc

SEQ ID NO: 56801 - RNA, 19 nt, synthetic construct
  misc_feature 1..19: note = siRNA antisense sequence
  source 1..19: mol_type = other RNA
gcaagcagtcaggacttac

SEQ ID NO: 56802 - RNA, 19 nt, synthetic construct
  misc_feature 1..19: note = siRNA sense sequence
  source 1..19: mol_type = other RNA
cctgactgcttgccatggg

SEQ ID NO: 56803 - RNA, 19 nt, synthetic construct
  misc_feature 1..19: note = siRNA antisense sequence
  source 1..19: mol_type = other RNA
cccatggcaagcagtcagg

SEQ ID NO: 56804 - RNA, 19 nt, synthetic construct
  misc_feature 1..19: note = siRNA sense sequence
  source 1..19: mol_type = other RNA
ctgactgcttgccatgggc

SEQ ID NO: 56805 - RNA, 19 nt, synthetic construct
  misc_feature 1..19: note = siRNA antisense sequence
  source 1..19: mol_type = other RNA
gcccatggcaagcagtcag

SEQ ID NO: 56806 - RNA, 19 nt, synthetic construct
  misc_feature 1..19: note = siRNA sense sequence
  source 1..19: mol_type = other RNA
tgactgcttgccatgggct

SEQ ID NO: 56807 - RNA, 19 nt, synthetic construct
  misc_feature 1..19: note = siRNA antisense sequence
  source 1..19: mol_type = other RNA
agcccatggcaagcagtca

SEQ ID NO: 56808 - RNA, 19 nt, synthetic construct
  misc_feature 1..19: note = siRNA sense sequence
  source 1..19: mol_type = other RNA
ctgcttgccatgggcttct

SEQ ID NO: 56809 - RNA, 19 nt, synthetic construct
  misc_feature 1..19: note = siRNA antisense sequence
  source 1..19: mol_type = other RNA
agaagcccatggcaagcag

SEQ ID NO: 56810 - RNA, 19 nt, synthetic construct
  misc_feature 1..19: note = siRNA sense sequence
  source 1..19: mol_type = other RNA
tgcttgccatgggcttctg

SEQ ID NO: 56811 - RNA, 19 nt, synthetic construct
  misc_feature 1..19: note = siRNA antisense sequence
  source 1..19: mol_type = other RNA
cagaagcccatggcaagca

SEQ ID NO: 56812 - RNA, 19 nt, synthetic construct
  misc_feature 1..19: note = siRNA sense sequence
  source 1..19: mol_type = other RNA
gcttgccatgggcttctgt

SEQ ID NO: 56813 - RNA, 19 nt, synthetic construct
  misc_feature 1..19: note = siRNA antisense sequence
  source 1..19: mol_type = other RNA
acagaagcccatggcaagc

SEQ ID NO: 56814 - RNA, 19 nt, synthetic construct
  misc_feature 1..19: note = siRNA sense sequence
  source 1..19: mol_type = other RNA
tgccatgggcttctgttaa

SEQ ID NO: 56815 - RNA, 19 nt, synthetic construct
  misc_feature 1..19: note = siRNA antisense sequence
  source 1..19: mol_type = other RNA
ttaacagaagcccatggca

SEQ ID NO: 56816 - RNA, 19 nt, synthetic construct
  misc_feature 1..19: note = siRNA sense sequence
  source 1..19: mol_type = other RNA
gccatgggcttctgttaaa

SEQ ID NO: 56817 - RNA, 19 nt, synthetic construct
  misc_feature 1..19: note = siRNA antisense sequence
  source 1..19: mol_type = other RNA
tttaacagaagcccatggc

SEQ ID NO: 56818 - RNA, 19 nt, synthetic construct
  misc_feature 1..19: note = siRNA sense sequence
  source 1..19: mol_type = other RNA
ccatgggcttctgttaaaa

SEQ ID NO: 56819 - RNA, 19 nt, synthetic construct
  misc_feature 1..19: note = siRNA antisense sequence
  source 1..19: mol_type = other RNA
ttttaacagaagcccatgg

SEQ ID NO: 56820 - RNA, 19 nt, synthetic construct
  misc_feature 1..19: note = siRNA sense sequence
  source 1..19: mol_type = other RNA
catgggcttctgttaaaag

SEQ ID NO: 56821 - RNA, 19 nt, synthetic construct
  misc_feature 1..19: note = siRNA antisense sequence
  source 1..19: mol_type = other RNA
cttttaacagaagcccatg

SEQ ID NO: 56822 - RNA, 19 nt, synthetic construct
  misc_feature 1..19: note = siRNA sense sequence
  source 1..19: mol_type = other RNA
tctgttaaaagcattagct

SEQ ID NO: 56823 - RNA, 19 nt, synthetic construct
  misc_feature 1..19: note = siRNA antisense sequence
  source 1..19: mol_type = other RNA
agctaatgcttttaacaga

SEQ ID NO: 56824 - RNA, 19 nt, synthetic construct
  misc_feature 1..19: note = siRNA sense sequence
  source 1..19: mol_type = other RNA
agcattagcttaagcttga

SEQ ID NO: 56825 - RNA, 19 nt, synthetic construct
  misc_feature 1..19: note = siRNA antisense sequence
  source 1..19: mol_type = other RNA
tcaagcttaagctaatgct

SEQ ID NO: 56826 - RNA, 19 nt, synthetic construct
  misc_feature 1..19: note = siRNA sense sequence
  source 1..19: mol_type = other RNA
gcattagcttaagcttgaa

SEQ ID NO: 56827 - RNA, 19 nt, synthetic construct
  misc_feature 1..19: note = siRNA antisense sequence
  source 1..19: mol_type = other RNA
ttcaagcttaagctaatgc

SEQ ID NO: 56828 - RNA, 19 nt, synthetic construct
  misc_feature 1..19: note = siRNA sense sequence
  source 1..19: mol_type = other RNA
caatgctaagtcaggaagt

SEQ ID NO: 56829 - RNA, 19 nt, synthetic construct
  misc_feature 1..19: note = siRNA antisense sequence
  source 1..19: mol_type = other RNA
acttcctgacttagcattg

SEQ ID NO: 56830 - RNA, 19 nt, synthetic construct
  misc_feature 1..19: note = siRNA sense sequence
  source 1..19: mol_type = other RNA
tgctaagtcaggaagtaca

SEQ ID NO: 56831 - RNA, 19 nt, synthetic construct
  misc_feature 1..19: note = siRNA antisense sequence
  source 1..19: mol_type = other RNA
tgtacttcctgacttagca

SEQ ID NO: 56832 - RNA, 19 nt, synthetic construct
  misc_feature 1..19: note = siRNA sense sequence
  source 1..19: mol_type = other RNA
gctaagtcaggaagtacag

SEQ ID NO: 56833 - RNA, 19 nt, synthetic construct
  misc_feature 1..19: note = siRNA antisense sequence
  source 1..19: mol_type = other RNA
ctgtacttcctgacttagc

SEQ ID NO: 56834 - RNA, 19 nt, synthetic construct
  misc_feature 1..19: note = siRNA sense sequence
  source 1..19: mol_type = other RNA
ctaagtcaggaagtacaga

SEQ ID NO: 56835 - RNA, 19 nt, synthetic construct
  misc_feature 1..19: note = siRNA antisense sequence
  source 1..19: mol_type = other RNA
tctgtacttcctgacttag

SEQ ID NO: 56836 - RNA, 19 nt, synthetic construct
  misc_feature 1..19: note = siRNA sense sequence
  source 1..19: mol_type = other RNA
taagtcaggaagtacagat

SEQ ID NO: 56837 - RNA, 19 nt, synthetic construct
  misc_feature 1..19: note = siRNA antisense sequence
  source 1..19: mol_type = other RNA
atctgtacttcctgactta

SEQ ID NO: 56838 - RNA, 19 nt, synthetic construct
  misc_feature 1..19: note = siRNA sense sequence
  source 1..19: mol_type = other RNA
agtcaggaagtacagatat

SEQ ID NO: 56839 - RNA, 19 nt, synthetic construct
  misc_feature 1..19: note = siRNA antisense sequence
  source 1..19: mol_type = other RNA
atatctgtacttcctgact

SEQ ID NO: 56840 - RNA, 19 nt, synthetic construct
  misc_feature 1..19: note = siRNA sense sequence
  source 1..19: mol_type = other RNA
ctatgtatggtaatgtgca

SEQ ID NO: 56841 - RNA, 19 nt, synthetic construct
  misc_feature 1..19: note = siRNA antisense sequence
  source 1..19: mol_type = other RNA
tgcacattaccatacatag

SEQ ID NO: 56842 - RNA, 19 nt, synthetic construct
  misc_feature 1..19: note = siRNA sense sequence
  source 1..19: mol_type = other RNA
tatgtatggtaatgtgcac

SEQ ID NO: 56843 - RNA, 19 nt, synthetic construct
  misc_feature 1..19: note = siRNA antisense sequence
  source 1..19: mol_type = other RNA
gtgcacattaccatacata

SEQ ID NO: 56844 - RNA, 19 nt, synthetic construct
  misc_feature 1..19: note = siRNA sense sequence
  source 1..19: mol_type = other RNA
atgtatggtaatgtgcaca

SEQ ID NO: 56845 - RNA, 19 nt, synthetic construct
  misc_feature 1..19: note = siRNA antisense sequence
  source 1..19: mol_type = other RNA
tgtgcacattaccatacat

SEQ ID NO: 56846 - RNA, 19 nt, synthetic construct
  misc_feature 1..19: note = siRNA sense sequence
  source 1..19: mol_type = other RNA
tgtatggtaatgtgcacag

SEQ ID NO: 56847 - RNA, 19 nt, synthetic construct
  misc_feature 1..19: note = siRNA antisense sequence
  source 1..19: mol_type = other RNA
ctgtgcacattaccataca

SEQ ID NO: 56848 - RNA, 19 nt, synthetic construct
  misc_feature 1..19: note = siRNA sense sequence
  source 1..19: mol_type = other RNA
gtatggtaatgtgcacaga

SEQ ID NO: 56849 - RNA, 19 nt, synthetic construct
  misc_feature 1..19: note = siRNA antisense sequence
  source 1..19: mol_type = other RNA
tctgtgcacattaccatac

SEQ ID NO: 56850 - RNA, 19 nt, synthetic construct
  misc_feature 1..19: note = siRNA sense sequence
  source 1..19: mol_type = other RNA
tatggtaatgtgcacagat

SEQ ID NO: 56851 - RNA, 19 nt, synthetic construct
  misc_feature 1..19: note = siRNA antisense sequence
  source 1..19: mol_type = other RNA
atctgtgcacattaccata

SEQ ID NO: 56852 - RNA, 19 nt, synthetic construct
  misc_feature 1..19: note = siRNA sense sequence
  source 1..19: mol_type = other RNA
atggtaatgtgcacagatc

SEQ ID NO: 56853 - RNA, 19 nt, synthetic construct
  misc_feature 1..19: note = siRNA antisense sequence
  source 1..19: mol_type = other RNA
gatctgtgcacattaccat

SEQ ID NO: 56854 - RNA, 19 nt, synthetic construct
  misc_feature 1..19: note = siRNA sense sequence
  source 1..19: mol_type = other RNA
tggtaatgtgcacagatca

SEQ ID NO: 56855 - RNA, 19 nt, synthetic construct
  misc_feature 1..19: note = siRNA antisense sequence
  source 1..19: mol_type = other RNA
tgatctgtgcacattacca

SEQ ID NO: 56856 - RNA, 19 nt, synthetic construct
  misc_feature 1..19: note = siRNA sense sequence
  source 1..19: mol_type = other RNA
cacagatcagtcttcaaga

SEQ ID NO: 56857 - RNA, 19 nt, synthetic construct
  misc_feature 1..19: note = siRNA antisense sequence
  source 1..19: mol_type = other RNA
tcttgaagactgatctgtg

SEQ ID NO: 56858 - RNA, 19 nt, synthetic construct
  misc_feature 1..19: note = siRNA sense sequence
  source 1..19: mol_type = other RNA
tcttcaagacatactcatt

SEQ ID NO: 56859 - RNA, 19 nt, synthetic construct
  misc_feature 1..19: note = siRNA antisense sequence
  source 1..19: mol_type = other RNA
aatgagtatgtcttgaaga

SEQ ID NO: 56860 - RNA, 19 nt, synthetic construct
  misc_feature 1..19: note = siRNA sense sequence
  source 1..19: mol_type = other RNA
cttcaagacatactcattt

SEQ ID NO: 56861 - RNA, 19 nt, synthetic construct
  misc_feature 1..19: note = siRNA antisense sequence
  source 1..19: mol_type = other RNA
aaatgagtatgtcttgaag

SEQ ID NO: 56862 - RNA, 19 nt, synthetic construct
  misc_feature 1..19: note = siRNA sense sequence
  source 1..19: mol_type = other RNA
ttcaagacatactcatttg

SEQ ID NO: 56863 - RNA, 19 nt, synthetic construct
  misc_feature 1..19: note = siRNA antisense sequence
  source 1..19: mol_type = other RNA
caaatgagtatgtcttgaa

SEQ ID NO: 56864 - RNA, 19 nt, synthetic construct
  misc_feature 1..19: note = siRNA sense sequence
  source 1..19: mol_type = other RNA
tcaagacatactcatttgt

SEQ ID NO: 56865 - RNA, 19 nt, synthetic construct
  misc_feature 1..19: note = siRNA antisense sequence
  source 1..19: mol_type = other RNA
acaaatgagtatgtcttga

SEQ ID NO: 56866 - RNA, 19 nt, synthetic construct
  misc_feature 1..19: note = siRNA sense sequence
  source 1..19: mol_type = other RNA
aagacatactcatttgtgc

SEQ ID NO: 56867 - RNA, 19 nt, synthetic construct
  misc_feature 1..19: note = siRNA antisense sequence
  source 1..19: mol_type = other RNA
gcacaaatgagtatgtctt

SEQ ID NO: 56868 - RNA, 19 nt, synthetic construct
  misc_feature 1..19: note = siRNA sense sequence
  source 1..19: mol_type = other RNA
agacatactcatttgtgcc

SEQ ID NO: 56869 - RNA, 19 nt, synthetic construct
  misc_feature 1..19: note = siRNA antisense sequence
  source 1..19: mol_type = other RNA
ggcacaaatgagtatgtct

SEQ ID NO: 56870 - RNA, 19 nt, synthetic construct
  misc_feature 1..19: note = siRNA sense sequence
  source 1..19: mol_type = other RNA
gacatactcatttgtgcca

SEQ ID NO: 56871 - RNA, 19 nt, synthetic construct
  misc_feature 1..19: note = siRNA antisense sequence
  source 1..19: mol_type = other RNA
tggcacaaatgagtatgtc

SEQ ID NO: 56872 - RNA, 19 nt, synthetic construct
  misc_feature 1..19: note = siRNA sense sequence
  source 1..19: mol_type = other RNA
tcatttgtgccatctcaac

SEQ ID NO: 56873 - RNA, 19 nt, synthetic construct
  misc_feature 1..19: note = siRNA antisense sequence
  source 1..19: mol_type = other RNA
gttgagatggcacaaatga

SEQ ID NO: 56874 - RNA, 19 nt, synthetic construct
  misc_feature 1..19: note = siRNA sense sequence
  source 1..19: mol_type = other RNA
catttgtgccatctcaacg

SEQ ID NO: 56875 - RNA, 19 nt, synthetic construct
  misc_feature 1..19: note = siRNA antisense sequence
  source 1..19: mol_type = other RNA
cgttgagatggcacaaatg

SEQ ID NO: 56876 - RNA, 19 nt, synthetic construct
  misc_feature 1..19: note = siRNA sense sequence
  source 1..19: mol_type = other RNA
atttgtgccatctcaacgt

SEQ ID NO: 56877 - RNA, 19 nt, synthetic construct
  misc_feature 1..19: note = siRNA antisense sequence
  source 1..19: mol_type = other RNA
acgttgagatggcacaaat

SEQ ID NO: 56878 - RNA, 19 nt, synthetic construct
  misc_feature 1..19: note = siRNA sense sequence
  source 1..19: mol_type = other RNA
tttgtgccatctcaacgtt

SEQ ID NO: 56879 - RNA, 19 nt, synthetic construct
  misc_feature 1..19: note = siRNA antisense sequence
  source 1..19: mol_type = other RNA
aacgttgagatggcacaaa

SEQ ID NO: 56880 - RNA, 19 nt, synthetic construct
  misc_feature 1..19: note = siRNA sense sequence
  source 1..19: mol_type = other RNA
ttgtgccatctcaacgttg

SEQ ID NO: 56881 - RNA, 19 nt, synthetic construct
  misc_feature 1..19: note = siRNA antisense sequence
  source 1..19: mol_type = other RNA
caacgttgagatggcacaa

SEQ ID NO: 56882 - RNA, 19 nt, synthetic construct
  misc_feature 1..19: note = siRNA sense sequence
  source 1..19: mol_type = other RNA
catctcaacgttgtgaata

SEQ ID NO: 56883 - RNA, 19 nt, synthetic construct
  misc_feature 1..19: note = siRNA antisense sequence
  source 1..19: mol_type = other RNA
tattcacaacgttgagatg

SEQ ID NO: 56884 - RNA, 19 nt, synthetic construct
  misc_feature 1..19: note = siRNA sense sequence
  source 1..19: mol_type = other RNA
atctcaacgttgtgaatac

SEQ ID NO: 56885 - RNA, 19 nt, synthetic construct
  misc_feature 1..19: note = siRNA antisense sequence
  source 1..19: mol_type = other RNA
gtattcacaacgttgagat

SEQ ID NO: 56886 - RNA, 19 nt, synthetic construct
  misc_feature 1..19: note = siRNA sense sequence
  source 1..19: mol_type = other RNA
tctcaacgttgtgaataca

SEQ ID NO: 56887 - RNA, 19 nt, synthetic construct
  misc_feature 1..19: note = siRNA antisense sequence
  source 1..19: mol_type = other RNA
tgtattcacaacgttgaga

SEQ ID NO: 56888 - RNA, 19 nt, synthetic construct
  misc_feature 1..19: note = siRNA sense sequence
  source 1..19: mol_type = other RNA
ctcaacgttgtgaatacat

SEQ ID NO: 56889 - RNA, 19 nt, synthetic construct
  misc_feature 1..19: note = siRNA antisense sequence
  source 1..19: mol_type = other RNA
atgtattcacaacgttgag

SEQ ID NO: 56890 - RNA, 19 nt, synthetic construct
  misc_feature 1..19: note = siRNA sense sequence
  source 1..19: mol_type = other RNA
tcaacgttgtgaatacatc

SEQ ID NO: 56891 - RNA, 19 nt, synthetic construct
  misc_feature 1..19: note = siRNA antisense sequence
  source 1..19: mol_type = other RNA
gatgtattcacaacgttga

SEQ ID NO: 56892 - RNA, 19 nt, synthetic construct
  misc_feature 1..19: note = siRNA sense sequence
  source 1..19: mol_type = other RNA
caacgttgtgaatacatct

SEQ ID NO: 56893 - RNA, 19 nt, synthetic construct
  misc_feature 1..19: note = siRNA antisense sequence
  source 1..19: mol_type = other RNA
agatgtattcacaacgttg

SEQ ID NO: 56894 - RNA, 19 nt, synthetic construct
  misc_feature 1..19: note = siRNA sense sequence
  source 1..19: mol_type = other RNA
aacgttgtgaatacatctg

SEQ ID NO: 56895 - RNA, 19 nt, synthetic construct
  misc_feature 1..19: note = siRNA antisense sequence
  source 1..19: mol_type = other RNA
cagatgtattcacaacgtt

SEQ ID NO: 56896 - RNA, 19 nt, synthetic construct
  misc_feature 1..19: note = siRNA sense sequence
  source 1..19: mol_type = other RNA
acgttgtgaatacatctga

SEQ ID NO: 56897 - RNA, 19 nt, synthetic construct
  misc_feature 1..19: note = siRNA antisense sequence
  source 1..19: mol_type = other RNA
tcagatgtattcacaacgt

SEQ ID NO: 56898 - RNA, 19 nt, synthetic construct
  misc_feature 1..19: note = siRNA sense sequence
  source 1..19: mol_type = other RNA
cgttgtgaatacatctgag

SEQ ID NO: 56899 - RNA, 19 nt, synthetic construct
  misc_feature 1..19: note = siRNA antisense sequence
  source 1..19: mol_type = other RNA
ctcagatgtattcacaacg

SEQ ID NO: 56900 - RNA, 19 nt, synthetic construct
  misc_feature 1..19: note = siRNA sense sequence
  source 1..19: mol_type = other RNA
gtgaatacatctgagtgga

SEQ ID NO: 56901 - RNA, 19 nt, synthetic construct
  misc_feature 1..19: note = siRNA antisense sequence
  source 1..19: mol_type = other RNA
tccactcagatgtattcac

SEQ ID NO: 56902 - RNA, 19 nt, synthetic construct
  misc_feature 1..19: note = siRNA sense sequence
  source 1..19: mol_type = other RNA
tgaatacatctgagtggaa

SEQ ID NO: 56903 - RNA, 19 nt, synthetic construct
  misc_feature 1..19: note = siRNA antisense sequence
  source 1..19: mol_type = other RNA
ttccactcagatgtattca

SEQ ID NO: 56904 - RNA, 19 nt, synthetic construct
  misc_feature 1..19: note = siRNA sense sequence
  source 1..19: mol_type = other RNA
gaatacatctgagtggaat

SEQ ID NO: 56905 - RNA, 19 nt, synthetic construct
  misc_feature 1..19: note = siRNA antisense sequence
  source 1..19: mol_type = other RNA
attccactcagatgtattc

SEQ ID NO: 56906 - RNA, 19 nt, synthetic construct
  misc_feature 1..19: note = siRNA sense sequence
  source 1..19: mol_type = other RNA
aatacatctgagtggaatt

SEQ ID NO: 56907 - RNA, 19 nt, synthetic construct
  misc_feature 1..19: note = siRNA antisense sequence
  source 1..19: mol_type = other RNA
aattccactcagatgtatt

SEQ ID NO: 56908 - RNA, 19 nt, synthetic construct
  misc_feature 1..19: note = siRNA sense sequence
  source 1..19: mol_type = other RNA
atacatctgagtggaattg

SEQ ID NO: 56909 - RNA, 19 nt, synthetic construct
  misc_feature 1..19: note = siRNA antisense sequence
  source 1..19: mol_type = other RNA
caattccactcagatgtat

SEQ ID NO: 56910 - RNA, 19 nt, synthetic construct
  misc_feature 1..19: note = siRNA sense sequence
  source 1..19: mol_type = other RNA
tacatctgagtggaattga

SEQ ID NO: 56911 - RNA, 19 nt, synthetic construct
  misc_feature 1..19: note = siRNA antisense sequence
  source 1..19: mol_type = other RNA
tcaattccactcagatgta

SEQ ID NO: 56912 - RNA, 19 nt, synthetic construct
  misc_feature 1..19: note = siRNA sense sequence
  source 1..19: mol_type = other RNA
acatctgagtggaattgag

SEQ ID NO: 56913 - RNA, 19 nt, synthetic construct
  misc_feature 1..19: note = siRNA antisense sequence
  source 1..19: mol_type = other RNA
ctcaattccactcagatgt

SEQ ID NO: 56914 - RNA, 19 nt, synthetic construct
  misc_feature 1..19: note = siRNA sense sequence
  source 1..19: mol_type = other RNA
catctgagtggaattgagt

SEQ ID NO: 56915 - RNA, 19 nt, synthetic construct
  misc_feature 1..19: note = siRNA antisense sequence
  source 1..19: mol_type = other RNA
actcaattccactcagatg

SEQ ID NO: 56916 - RNA, 19 nt, synthetic construct
  misc_feature 1..19: note = siRNA sense sequence
  source 1..19: mol_type = other RNA
atctgagtggaattgagtc

SEQ ID NO: 56917 - RNA, 19 nt, synthetic construct
  misc_feature 1..19: note = siRNA antisense sequence
  source 1..19: mol_type = other RNA
gactcaattccactcagat

SEQ ID NO: 56918 - RNA, 19 nt, synthetic construct
  misc_feature 1..19: note = siRNA sense sequence
  source 1..19: mol_type = other RNA
tctgagtggaattgagtct

SEQ ID NO: 56919 - RNA, 19 nt, synthetic construct
  misc_feature 1..19: note = siRNA antisense sequence
  source 1..19: mol_type = other RNA
agactcaattccactcaga

SEQ ID NO: 56920 - RNA, 19 nt, synthetic construct
  misc_feature 1..19: note = siRNA sense sequence
  source 1..19: mol_type = other RNA
ctgagtggaattgagtctc

SEQ ID NO: 56921 - RNA, 19 nt, synthetic construct
  misc_feature 1..19: note = siRNA antisense sequence
  source 1..19: mol_type = other RNA
gagactcaattccactcag

SEQ ID NO: 56922 - RNA, 19 nt, synthetic construct
  misc_feature 1..19: note = siRNA sense sequence
  source 1..19: mol_type = other RNA
tgagtggaattgagtctct

SEQ ID NO: 56923 - RNA, 19 nt, synthetic construct
  misc_feature 1..19: note = siRNA antisense sequence
  source 1..19: mol_type = other RNA
agagactcaattccactca

SEQ ID NO: 56924 - RNA, 19 nt, synthetic construct
  misc_feature 1..19: note = siRNA sense sequence
  source 1..19: mol_type = other RNA
gagtggaattgagtctctt

SEQ ID NO: 56925 - RNA, 19 nt, synthetic construct
  misc_feature 1..19: note = siRNA antisense sequence
  source 1..19: mol_type = other RNA
aagagactcaattccactc

SEQ ID NO: 56926 - RNA, 19 nt, synthetic construct
  misc_feature 1..19: note = siRNA sense sequence
  source 1..19: mol_type = other RNA
ggaattgagtctcttgtgc

SEQ ID NO: 56927 - RNA, 19 nt, synthetic construct
  misc_feature 1..19: note = siRNA antisense sequence
  source 1..19: mol_type = other RNA
gcacaagagactcaattcc

SEQ ID NO: 56928 - RNA, 19 nt, synthetic construct
  misc_feature 1..19: note = siRNA sense sequence
  source 1..19: mol_type = other RNA
gaattgagtctcttgtgcc

SEQ ID NO: 56929 - RNA, 19 nt, synthetic construct
  misc_feature 1..19: note = siRNA antisense sequence
  source 1..19: mol_type = other RNA
ggcacaagagactcaattc

SEQ ID NO: 56930 - RNA, 19 nt, synthetic construct
  misc_feature 1..19: note = siRNA sense sequence
  source 1..19: mol_type = other RNA
aattgagtctcttgtgccc

SEQ ID NO: 56931 - RNA, 19 nt, synthetic construct
  misc_feature 1..19: note = siRNA antisense sequence
  source 1..19: mol_type = other RNA
gggcacaagagactcaatt

SEQ ID NO: 56932 - RNA, 19 nt, synthetic construct
  misc_feature 1..19: note = siRNA sense sequence
  source 1..19: mol_type = other RNA
attgagtctcttgtgccct

SEQ ID NO: 56933 - RNA, 19 nt, synthetic construct
  misc_feature 1..19: note = siRNA antisense sequence
  source 1..19: mol_type = other RNA
agggcacaagagactcaat

SEQ ID NO: 56934 - RNA, 19 nt, synthetic construct
  misc_feature 1..19: note = siRNA sense sequence
  source 1..19: mol_type = other RNA
ttgagtctcttgtgccctc

SEQ ID NO: 56935 - RNA, 19 nt, synthetic construct
  misc_feature 1..19: note = siRNA antisense sequence
  source 1..19: mol_type = other RNA
gagggcacaagagactcaa

SEQ ID NO: 56936 - RNA, 19 nt, synthetic construct
  misc_feature 1..19: note = siRNA sense sequence
  source 1..19: mol_type = other RNA
gagtctcttgtgccctcaa

SEQ ID NO: 56937 - RNA, 19 nt, synthetic construct
  misc_feature 1..19: note = siRNA antisense sequence
  source 1..19: mol_type = other RNA
ttgagggcacaagagactc

SEQ ID NO: 56938 - RNA, 19 nt, synthetic construct
  misc_feature 1..19: note = siRNA sense sequence
  source 1..19: mol_type = other RNA
agtctcttgtgccctcaac

SEQ ID NO: 56939 - RNA, 19 nt, synthetic construct
  misc_feature 1..19: note = siRNA antisense sequence
  source 1..19: mol_type = other RNA
gttgagggcacaagagact

SEQ ID NO: 56940 - RNA, 19 nt, synthetic construct
  misc_feature 1..19: note = siRNA sense sequence
  source 1..19: mol_type = other RNA
gtctcttgtgccctcaact

SEQ ID NO: 56941 - RNA, 19 nt, synthetic construct
  misc_feature 1..19: note = siRNA antisense sequence
  source 1..19: mol_type = other RNA
agttgagggcacaagagac

SEQ ID NO: 56942 - RNA, 19 nt, synthetic construct
  misc_feature 1..19: note = siRNA sense sequence
  source 1..19: mol_type = other RNA
cttgtgccctcaactttta

SEQ ID NO: 56943 - RNA, 19 nt, synthetic construct
  misc_feature 1..19: note = siRNA antisense sequence
  source 1..19: mol_type = other RNA
taaaagttgagggcacaag

SEQ ID NO: 56944 - RNA, 19 nt, synthetic construct
  misc_feature 1..19: note = siRNA sense sequence
  source 1..19: mol_type = other RNA
ttgtgccctcaacttttag

SEQ ID NO: 56945 - RNA, 19 nt, synthetic construct
  misc_feature 1..19: note = siRNA antisense sequence
  source 1..19: mol_type = other RNA
ctaaaagttgagggcacaa

SEQ ID NO: 56946 - RNA, 19 nt, synthetic construct
  misc_feature 1..19: note = siRNA sense sequence
  source 1..19: mol_type = other RNA
tgtgccctcaacttttagg

SEQ ID NO: 56947 - RNA, 19 nt, synthetic construct
  misc_feature 1..19: note = siRNA antisense sequence
  source 1..19: mol_type = other RNA
cctaaaagttgagggcaca

SEQ ID NO: 56948 - RNA, 19 nt, synthetic construct
  misc_feature 1..19: note = siRNA sense sequence
  source 1..19: mol_type = other RNA
gtgccctcaacttttagga

SEQ ID NO: 56949 - RNA, 19 nt, synthetic construct
  misc_feature 1..19: note = siRNA antisense sequence
  source 1..19: mol_type = other RNA
tcctaaaagttgagggcac

SEQ ID NO: 56950 - RNA, 19 nt, synthetic construct
  misc_feature 1..19: note = siRNA sense sequence
  source 1..19: mol_type = other RNA
tgccctcaacttttaggac

SEQ ID NO: 56951 - RNA, 19 nt, synthetic construct
  misc_feature 1..19: note = siRNA antisense sequence
  source 1..19: mol_type = other RNA
gtcctaaaagttgagggca

SEQ ID NO: 56952 - RNA, 19 nt, synthetic construct
  misc_feature 1..19: note = siRNA sense sequence
  source 1..19: mol_type = other RNA
gccctcaacttttaggaca

SEQ ID NO: 56953 - RNA, 19 nt, synthetic construct
  misc_feature 1..19: note = siRNA antisense sequence
  source 1..19: mol_type = other RNA
tgtcctaaaagttgagggc

SEQ ID NO: 56954 - RNA, 19 nt, synthetic construct
  misc_feature 1..19: note = siRNA sense sequence
  source 1..19: mol_type = other RNA
aatgtatttgatgggatgt

SEQ ID NO: 56955 - RNA, 19 nt, synthetic construct
  misc_feature 1..19: note = siRNA antisense sequence
  source 1..19: mol_type = other RNA
acatcccatcaaatacatt

SEQ ID NO: 56956 - RNA, 19 nt, synthetic construct
  misc_feature 1..19: note = siRNA sense sequence
  source 1..19: mol_type = other RNA
atgtatttgatgggatgtg

SEQ ID NO: 56957 - RNA, 19 nt, synthetic construct
  misc_feature 1..19: note = siRNA antisense sequence
  source 1..19: mol_type = other RNA
cacatcccatcaaatacat

SEQ ID NO: 56958 - RNA, 19 nt, synthetic construct
  misc_feature 1..19: note = siRNA sense sequence
  source 1..19: mol_type = other RNA
tgtatttgatgggatgtgt

SEQ ID NO: 56959 - RNA, 19 nt, synthetic construct
  misc_feature 1..19: note = siRNA antisense sequence
  source 1..19: mol_type = other RNA
acacatcccatcaaataca

SEQ ID NO: 56960 - RNA, 19 nt, synthetic construct
  misc_feature 1..19: note = siRNA sense sequence
  source 1..19: mol_type = other RNA
gtatttgatgggatgtgtt

SEQ ID NO: 56961 - RNA, 19 nt, synthetic construct
  misc_feature 1..19: note = siRNA antisense sequence
  source 1..19: mol_type = other RNA
aacacatcccatcaaatac

SEQ ID NO: 56962 - RNA, 19 nt, synthetic construct
  misc_feature 1..19: note = siRNA sense sequence
  source 1..19: mol_type = other RNA
tatttgatgggatgtgtta

SEQ ID NO: 56963 - RNA, 19 nt, synthetic construct
  misc_feature 1..19: note = siRNA antisense sequence
  source 1..19: mol_type = other RNA
taacacatcccatcaaata

SEQ ID NO: 56964 - RNA, 19 nt, synthetic construct
  misc_feature 1..19: note = siRNA sense sequence
  source 1..19: mol_type = other RNA
atttgatgggatgtgttat

SEQ ID NO: 56965 - RNA, 19 nt, synthetic construct
  misc_feature 1..19: note = siRNA antisense sequence
  source 1..19: mol_type = other RNA
ataacacatcccatcaaat

SEQ ID NO: 56966 - RNA, 19 nt, synthetic construct
  misc_feature 1..19: note = siRNA sense sequence
  source 1..19: mol_type = other RNA
tttgatgggatgtgttatt

SEQ ID NO: 56967 - RNA, 19 nt, synthetic construct
  misc_feature 1..19: note = siRNA antisense sequence
  source 1..19: mol_type = other RNA
aataacacatcccatcaaa

SEQ ID NO: 56968 - RNA, 19 nt, synthetic construct
  misc_feature 1..19: note = siRNA sense sequence
  source 1..19: mol_type = other RNA
ttgatgggatgtgttattt

SEQ ID NO: 56969 - RNA, 19 nt, synthetic construct
  misc_feature 1..19: note = siRNA antisense sequence
  source 1..19: mol_type = other RNA
aaataacacatcccatcaa

SEQ ID NO: 56970 - RNA, 19 nt, synthetic construct
  misc_feature 1..19: note = siRNA sense sequence
  source 1..19: mol_type = other RNA
tgatgggatgtgttattta

SEQ ID NO: 56971 - RNA, 19 nt, synthetic construct
  misc_feature 1..19: note = siRNA antisense sequence
  source 1..19: mol_type = other RNA
taaataacacatcccatca

SEQ ID NO: 56972 - RNA, 19 nt, synthetic construct
  misc_feature 1..19: note = siRNA sense sequence
  source 1..19: mol_type = other RNA
ggatgtgttatttataccc

SEQ ID NO: 56973 - RNA, 19 nt, synthetic construct
  misc_feature 1..19: note = siRNA antisense sequence
  source 1..19: mol_type = other RNA
gggtataaataacacatcc

SEQ ID NO: 56974 - RNA, 19 nt, synthetic construct
  misc_feature 1..19: note = siRNA sense sequence
  source 1..19: mol_type = other RNA
gatgtgttatttataccca

SEQ ID NO: 56975 - RNA, 19 nt, synthetic construct
  misc_feature 1..19: note = siRNA antisense sequence
  source 1..19: mol_type = other RNA
tgggtataaataacacatc

SEQ ID NO: 56976 - RNA, 19 nt, synthetic construct
  misc_feature 1..19: note = siRNA sense sequence
  source 1..19: mol_type = other RNA
atgtgttatttatacccag

SEQ ID NO: 56977 - RNA, 19 nt, synthetic construct
  misc_feature 1..19: note = siRNA antisense sequence
  source 1..19: mol_type = other RNA
ctgggtataaataacacat

SEQ ID NO: 56978 - RNA, 19 nt, synthetic construct
  misc_feature 1..19: note = siRNA sense sequence
  source 1..19: mol_type = other RNA
tgtgttatttatacccagc

SEQ ID NO: 56979 - RNA, 19 nt, synthetic construct
  misc_feature 1..19: note = siRNA antisense sequence
  source 1..19: mol_type = other RNA
gctgggtataaataacaca

SEQ ID NO: 56980 - RNA, 19 nt, synthetic construct
  misc_feature 1..19: note = siRNA sense sequence
  source 1..19: mol_type = other RNA
ttcaagatttccagtacct

SEQ ID NO: 56981 - RNA, 19 nt, synthetic construct
  misc_feature 1..19: note = siRNA antisense sequence
  source 1..19: mol_type = other RNA
aggtactggaaatcttgaa

SEQ ID NO: 56982 - RNA, 19 nt, synthetic construct
  misc_feature 1..19: note = siRNA sense sequence
  source 1..19: mol_type = other RNA
tcaagatttccagtacctt

SEQ ID NO: 56983 - RNA, 19 nt, synthetic construct
  misc_feature 1..19: note = siRNA antisense sequence
  source 1..19: mol_type = other RNA
aaggtactggaaatcttga

SEQ ID NO: 56984 - RNA, 19 nt, synthetic construct
  misc_feature 1..19: note = siRNA sense sequence
  source 1..19: mol_type = other RNA
caagatttccagtaccttt

SEQ ID NO: 56985 - RNA, 19 nt, synthetic construct
  misc_feature 1..19: note = siRNA antisense sequence
  source 1..19: mol_type = other RNA
aaaggtactggaaatcttg

SEQ ID NO: 56986 - RNA, 19 nt, synthetic construct
  misc_feature 1..19: note = siRNA sense sequence
  source 1..19: mol_type = other RNA
aagatttccagtaccttta

SEQ ID NO: 56987 - RNA, 19 nt, synthetic construct
  misc_feature 1..19: note = siRNA antisense sequence
  source 1..19: mol_type = other RNA
taaaggtactggaaatctt

SEQ ID NO: 56988 - RNA, 19 nt, synthetic construct
  misc_feature 1..19: note = siRNA sense sequence
  source 1..19: mol_type = other RNA
agatttccagtacctttag

SEQ ID NO: 56989 - RNA, 19 nt, synthetic construct
  misc_feature 1..19: note = siRNA antisense sequence
  source 1..19: mol_type = other RNA
ctaaaggtactggaaatct

SEQ ID NO: 56990 - RNA, 19 nt, synthetic construct
  misc_feature 1..19: note = siRNA sense sequence
  source 1..19: mol_type = other RNA
gatttccagtacctttaga

SEQ ID NO: 56991 - RNA, 19 nt, synthetic construct
  misc_feature 1..19: note = siRNA antisense sequence
  source 1..19: mol_type = other RNA
tctaaaggtactggaaatc

SEQ ID NO: 56992 - RNA, 19 nt, synthetic construct
  misc_feature 1..19: note = siRNA sense sequence
  source 1..19: mol_type = other RNA
atttccagtacctttagat

SEQ ID NO: 56993 - RNA, 19 nt, synthetic construct
  misc_feature 1..19: note = siRNA antisense sequence
  source 1..19: mol_type = other RNA
atctaaaggtactggaaat

SEQ ID NO: 56994 - RNA, 19 nt, synthetic construct
  misc_feature 1..19: note = siRNA sense sequence
  source 1..19: mol_type = other RNA
tttccagtacctttagata

SEQ ID NO: 56995 - RNA, 19 nt, synthetic construct
  misc_feature 1..19: note = siRNA antisense sequence
  source 1..19: mol_type = other RNA
tatctaaaggtactggaaa

SEQ ID NO: 56996 - RNA, 19 nt, synthetic construct
  misc_feature 1..19: note = siRNA sense sequence
  source 1..19: mol_type = other RNA
ttccagtacctttagatat

SEQ ID NO: 56997 - RNA, 19 nt, synthetic construct
  misc_feature 1..19: note = siRNA antisense sequence
  source 1..19: mol_type = other RNA
atatctaaaggtactggaa

SEQ ID NO: 56998 - RNA, 19 nt, synthetic construct
  misc_feature 1..19: note = siRNA sense sequence
  source 1..19: mol_type = other RNA
tccagtacctttagatatg

SEQ ID NO: 56999 - RNA, 19 nt, synthetic construct
  misc_feature 1..19: note = siRNA antisense sequence
  source 1..19: mol_type = other RNA
catatctaaaggtactgga

SEQ ID NO: 57000 - RNA, 19 nt, synthetic construct
  misc_feature 1..19: note = siRNA sense sequence
  source 1..19: mol_type = other RNA
ccagtacctttagatatgt

SEQ ID NO: 57001 - RNA, 19 nt, synthetic construct
  misc_feature 1..19: note = siRNA antisense sequence
  source 1..19: mol_type = other RNA
acatatctaaaggtactgg

SEQ ID NO: 57002 - RNA, 19 nt, synthetic construct
  misc_feature 1..19: note = siRNA sense sequence
  source 1..19: mol_type = other RNA
agtacctttagatatgtct

SEQ ID NO: 57003 - RNA, 19 nt, synthetic construct
  misc_feature 1..19: note = siRNA antisense sequence
  source 1..19: mol_type = other RNA
agacatatctaaaggtact

SEQ ID NO: 57004 - RNA, 19 nt, synthetic construct
  misc_feature 1..19: note = siRNA sense sequence
  source 1..19: mol_type = other RNA
gtacctttagatatgtctg

SEQ ID NO: 57005 - RNA, 19 nt, synthetic construct
  misc_feature 1..19: note = siRNA antisense sequence
  source 1..19: mol_type = other RNA
cagacatatctaaaggtac

SEQ ID NO: 57006 - RNA, 19 nt, synthetic construct
  misc_feature 1..19: note = siRNA sense sequence
  source 1..19: mol_type = other RNA
tacctttagatatgtctgt

SEQ ID NO: 57007 - RNA, 19 nt, synthetic construct
  misc_feature 1..19: note = siRNA antisense sequence
  source 1..19: mol_type = other RNA
acagacatatctaaaggta

SEQ ID NO: 57008 - RNA, 19 nt, synthetic construct
  misc_feature 1..19: note = siRNA sense sequence
  source 1..19: mol_type = other RNA
acctttagatatgtctgtg

SEQ ID NO: 57009 - RNA, 19 nt, synthetic construct
  misc_feature 1..19: note = siRNA antisense sequence
  source 1..19: mol_type = other RNA
cacagacatatctaaaggt

SEQ ID NO: 57010 - RNA, 19 nt, synthetic construct
  misc_feature 1..19: note = siRNA sense sequence
  source 1..19: mol_type = other RNA
cctttagatatgtctgtgt

SEQ ID NO: 57011 - RNA, 19 nt, synthetic construct
  misc_feature 1..19: note = siRNA antisense sequence
  source 1..19: mol_type = other RNA
acacagacatatctaaagg

SEQ ID NO: 57012 - RNA, 19 nt, synthetic construct
  misc_feature 1..19: note = siRNA sense sequence
  source 1..19: mol_type = other RNA
ctttagatatgtctgtgtg

SEQ ID NO: 57013 - RNA, 19 nt, synthetic construct
  misc_feature 1..19: note = siRNA antisense sequence
  source 1..19: mol_type = other RNA
cacacagacatatctaaag

SEQ ID NO: 57014 - RNA, 19 nt, synthetic construct
  misc_feature 1..19: note = siRNA sense sequence
  source 1..19: mol_type = other RNA
tttagatatgtctgtgtga

SEQ ID NO: 57015 - RNA, 19 nt, synthetic construct
  misc_feature 1..19: note = siRNA antisense sequence
  source 1..19: mol_type = other RNA
tcacacagacatatctaaa

SEQ ID NO: 57016 - RNA, 19 nt, synthetic construct
  misc_feature 1..19: note = siRNA sense sequence
  source 1..19: mol_type = other RNA
ttagatatgtctgtgtgat

SEQ ID NO: 57017 - RNA, 19 nt, synthetic construct
  misc_feature 1..19: note = siRNA antisense sequence
  source 1..19: mol_type = other RNA
atcacacagacatatctaa

SEQ ID NO: 57018 - RNA, 19 nt, synthetic construct
  misc_feature 1..19: note = siRNA sense sequence
  source 1..19: mol_type = other RNA
tagatatgtctgtgtgatg

SEQ ID NO: 57019 - RNA, 19 nt, synthetic construct
  misc_feature 1..19: note = siRNA antisense sequence
  source 1..19: mol_type = other RNA
catcacacagacatatcta

SEQ ID NO: 57020 - RNA, 19 nt, synthetic construct
  misc_feature 1..19: note = siRNA sense sequence
  source 1..19: mol_type = other RNA
agatatgtctgtgtgatgg

SEQ ID NO: 57021 - RNA, 19 nt, synthetic construct
  misc_feature 1..19: note = siRNA antisense sequence
  source 1..19: mol_type = other RNA
ccatcacacagacatatct

SEQ ID NO: 57022 - RNA, 19 nt, synthetic construct
  misc_feature 1..19: note = siRNA sense sequence
  source 1..19: mol_type = other RNA
gatatgtctgtgtgatggg

SEQ ID NO: 57023 - RNA, 19 nt, synthetic construct
  misc_feature 1..19: note = siRNA antisense sequence
  source 1..19: mol_type = other RNA
cccatcacacagacatatc

SEQ ID NO: 57024 - RNA, 19 nt, synthetic construct
  misc_feature 1..19: note = siRNA sense sequence
  source 1..19: mol_type = other RNA
atgtctgtgtgatgggatt

SEQ ID NO: 57025 - RNA, 19 nt, synthetic construct
  misc_feature 1..19: note = siRNA antisense sequence
  source 1..19: mol_type = other RNA
aatcccatcacacagacat

SEQ ID NO: 57026 - RNA, 19 nt, synthetic construct
  misc_feature 1..19: note = siRNA sense sequence
  source 1..19: mol_type = other RNA
tgtctgtgtgatgggattg

SEQ ID NO: 57027 - RNA, 19 nt, synthetic construct
  misc_feature 1..19: note = siRNA antisense sequence
  source 1..19: mol_type = other RNA
caatcccatcacacagaca

SEQ ID NO: 57028 - RNA, 19 nt, synthetic construct
  misc_feature 1..19: note = siRNA sense sequence
  source 1..19: mol_type = other RNA
gtctgtgtgatgggattgg

SEQ ID NO: 57029 - RNA, 19 nt, synthetic construct
  misc_feature 1..19: note = siRNA antisense sequence
  source 1..19: mol_type = other RNA
ccaatcccatcacacagac

SEQ ID NO: 57030 - RNA, 19 nt, synthetic construct
  misc_feature 1..19: note = siRNA sense sequence
  source 1..19: mol_type = other RNA
tctgtgtgatgggattggc

SEQ ID NO: 57031 - RNA, 19 nt, synthetic construct
  misc_feature 1..19: note = siRNA antisense sequence
  source 1..19: mol_type = other RNA
gccaatcccatcacacaga

SEQ ID NO: 57032 - RNA, 19 nt, synthetic construct
  misc_feature 1..19: note = siRNA sense sequence
  source 1..19: mol_type = other RNA
ctgtgtgatgggattggct

SEQ ID NO: 57033 - RNA, 19 nt, synthetic construct
  misc_feature 1..19: note = siRNA antisense sequence
  source 1..19: mol_type = other RNA
agccaatcccatcacacag

SEQ ID NO: 57034 - RNA, 19 nt, synthetic construct
  misc_feature 1..19: note = siRNA sense sequence
  source 1..19: mol_type = other RNA
tgtgtgatgggattggcta

SEQ ID NO: 57035 - RNA, 19 nt, synthetic construct
  misc_feature 1..19: note = siRNA antisense sequence
  source 1..19: mol_type = other RNA
tagccaatcccatcacaca

SEQ ID NO: 57036 - RNA, 19 nt, synthetic construct
  misc_feature 1..19: note = siRNA sense sequence
  source 1..19: mol_type = other RNA
gtgtgatgggattggctag

SEQ ID NO: 57037 - RNA, 19 nt, synthetic construct
  misc_feature 1..19: note = siRNA antisense sequence
  source 1..19: mol_type = other RNA
ctagccaatcccatcacac

SEQ ID NO: 57038 - RNA, 19 nt, synthetic construct
  misc_feature 1..19: note = siRNA sense sequence
  source 1..19: mol_type = other RNA
tgtgatgggattggctagg

SEQ ID NO: 57039 - RNA, 19 nt, synthetic construct
  misc_feature 1..19: note = siRNA antisense sequence
  source 1..19: mol_type = other RNA
cctagccaatcccatcaca

SEQ ID NO: 57040 - RNA, 19 nt, synthetic construct
  misc_feature 1..19: note = siRNA sense sequence
  source 1..19: mol_type = other RNA
gtgatgggattggctagga

SEQ ID NO: 57041 - RNA, 19 nt, synthetic construct
  misc_feature 1..19: note = siRNA antisense sequence
  source 1..19: mol_type = other RNA
tcctagccaatcccatcac

SEQ ID NO: 57042 - RNA, 19 nt, synthetic construct
  misc_feature 1..19: note = siRNA sense sequence
  source 1..19: mol_type = other RNA
tgggattggctaggaagca

SEQ ID NO: 57043 - RNA, 19 nt, synthetic construct
  misc_feature 1..19: note = siRNA antisense sequence
  source 1..19: mol_type = other RNA
tgcttcctagccaatccca

SEQ ID NO: 57044 - RNA, 19 nt, synthetic construct
  misc_feature 1..19: note = siRNA sense sequence
  source 1..19: mol_type = other RNA
gggattggctaggaagcag

SEQ ID NO: 57045 - RNA, 19 nt, synthetic construct
  misc_feature 1..19: note = siRNA antisense sequence
  source 1..19: mol_type = other RNA
ctgcttcctagccaatccc

SEQ ID NO: 57046 - RNA, 19 nt, synthetic construct
  misc_feature 1..19: note = siRNA sense sequence
  source 1..19: mol_type = other RNA
ggattggctaggaagcaga

SEQ ID NO: 57047 - RNA, 19 nt, synthetic construct
  misc_feature 1..19: note = siRNA antisense sequence
  source 1..19: mol_type = other RNA
tctgcttcctagccaatcc

SEQ ID NO: 57048 - RNA, 19 nt, synthetic construct
  misc_feature 1..19: note = siRNA sense sequence
  source 1..19: mol_type = other RNA
actcatactgtttcctttg

SEQ ID NO: 57049 - RNA, 19 nt, synthetic construct
  misc_feature 1..19: note = siRNA antisense sequence
  source 1..19: mol_type = other RNA
caaaggaaacagtatgagt

SEQ ID NO: 57050 - RNA, 19 nt, synthetic construct
  misc_feature 1..19: note = siRNA sense sequence
  source 1..19: mol_type = other RNA
ctcatactgtttcctttga

SEQ ID NO: 57051 - RNA, 19 nt, synthetic construct
  misc_feature 1..19: note = siRNA antisense sequence
  source 1..19: mol_type = other RNA
tcaaaggaaacagtatgag

SEQ ID NO: 57052 - RNA, 19 nt, synthetic construct
  misc_feature 1..19: note = siRNA sense sequence
  source 1..19: mol_type = other RNA
tttccctctctctggtgtc

SEQ ID NO: 57053 - RNA, 19 nt, synthetic construct
  misc_feature 1..19: note = siRNA antisense sequence
  source 1..19: mol_type = other RNA
gacaccagagagagggaaa

SEQ ID NO: 57054 - RNA, 19 nt, synthetic construct
  misc_feature 1..19: note = siRNA sense sequence
  source 1..19: mol_type = other RNA
tccctctctctggtgtcag

SEQ ID NO: 57055 - RNA, 19 nt, synthetic construct
  misc_feature 1..19: note = siRNA antisense sequence
  source 1..19: mol_type = other RNA
ctgacaccagagagaggga

SEQ ID NO: 57056 - RNA, 19 nt, synthetic construct
  misc_feature 1..19: note = siRNA sense sequence
  source 1..19: mol_type = other RNA
ctggtgtcagtgaccttgt

SEQ ID NO: 57057 - RNA, 19 nt, synthetic construct
  misc_feature 1..19: note = siRNA antisense sequence
  source 1..19: mol_type = other RNA
acaaggtcactgacaccag

SEQ ID NO: 57058 - RNA, 19 nt, synthetic construct
  misc_feature 1..19: note = siRNA sense sequence
  source 1..19: mol_type = other RNA
tggtgtcagtgaccttgta

SEQ ID NO: 57059 - RNA, 19 nt, synthetic construct
  misc_feature 1..19: note = siRNA antisense sequence
  source 1..19: mol_type = other RNA
tacaaggtcactgacacca

SEQ ID NO: 57060 - RNA, 19 nt, synthetic construct
  misc_feature 1..19: note = siRNA sense sequence
  source 1..19: mol_type = other RNA
ggtgtcagtgaccttgtaa

SEQ ID NO: 57061 - RNA, 19 nt, synthetic construct
  misc_feature 1..19: note = siRNA antisense sequence
  source 1..19: mol_type = other RNA
ttacaaggtcactgacacc

SEQ ID NO: 57062 - RNA, 19 nt, synthetic construct
  misc_feature 1..19: note = siRNA sense sequence
  source 1..19: mol_type = other RNA
gtgtcagtgaccttgtaat

SEQ ID NO: 57063 - RNA, 19 nt, synthetic construct
  misc_feature 1..19: note = siRNA antisense sequence
  source 1..19: mol_type = other RNA
attacaaggtcactgacac

SEQ ID NO: 57064 - RNA, 19 nt, synthetic construct
  misc_feature 1..19: note = siRNA sense sequence
  source 1..19: mol_type = other RNA
tgtcagtgaccttgtaatg

SEQ ID NO: 57065 - RNA, 19 nt, synthetic construct
  misc_feature 1..19: note = siRNA antisense sequence
  source 1..19: mol_type = other RNA
cattacaaggtcactgaca

SEQ ID NO: 57066 - RNA, 19 nt, synthetic construct
  misc_feature 1..19: note = siRNA sense sequence
  source 1..19: mol_type = other RNA
gtcagtgaccttgtaatga

SEQ ID NO: 57067 - RNA, 19 nt, synthetic construct
  misc_feature 1..19: note = siRNA antisense sequence
  source 1..19: mol_type = other RNA
tcattacaaggtcactgac

SEQ ID NO: 57068 - RNA, 19 nt, synthetic construct
  misc_feature 1..19: note = siRNA sense sequence
  source 1..19: mol_type = other RNA
tcagtgaccttgtaatgat

SEQ ID NO: 57069 - RNA, 19 nt, synthetic construct
  misc_feature 1..19: note = siRNA antisense sequence
  source 1..19: mol_type = other RNA
atcattacaaggtcactga

SEQ ID NO: 57070 - RNA, 19 nt, synthetic construct
  misc_feature 1..19: note = siRNA sense sequence
  source 1..19: mol_type = other RNA
cagtgaccttgtaatgatt

SEQ ID NO: 57071 - RNA, 19 nt, synthetic construct
  misc_feature 1..19: note = siRNA antisense sequence
  source 1..19: mol_type = other RNA
aatcattacaaggtcactg

SEQ ID NO: 57072 - RNA, 19 nt, synthetic construct
  misc_feature 1..19: note = siRNA sense sequence
  source 1..19: mol_type = other RNA
gaccttgtaatgattttgt

SEQ ID NO: 57073 - RNA, 19 nt, synthetic construct
  misc_feature 1..19: note = siRNA antisense sequence
  source 1..19: mol_type = other RNA
acaaaatcattacaaggtc

SEQ ID NO: 57074 - RNA, 19 nt, synthetic construct
  misc_feature 1..19: note = siRNA sense sequence
  source 1..19: mol_type = other RNA
accttgtaatgattttgtc

SEQ ID NO: 57075 - RNA, 19 nt, synthetic construct
  misc_feature 1..19: note = siRNA antisense sequence
  source 1..19: mol_type = other RNA
gacaaaatcattacaaggt

SEQ ID NO: 57076 - RNA, 19 nt, synthetic construct
  misc_feature 1..19: note = siRNA sense sequence
  source 1..19: mol_type = other RNA
ccttgtaatgattttgtct

SEQ ID NO: 57077 - RNA, 19 nt, synthetic construct
  misc_feature 1..19: note = siRNA antisense sequence
  source 1..19: mol_type = other RNA
agacaaaatcattacaagg

SEQ ID NO: 57078 - RNA, 19 nt, synthetic construct
  misc_feature 1..19: note = siRNA sense sequence
  source 1..19: mol_type = other RNA
gtaatgattttgtctgtac

SEQ ID NO: 57079 - RNA, 19 nt, synthetic construct
  misc_feature 1..19: note = siRNA antisense sequence
  source 1..19: mol_type = other RNA
gtacagacaaaatcattac

SEQ ID NO: 57080 - RNA, 19 nt, synthetic construct
  misc_feature 1..19: note = siRNA sense sequence
  source 1..19: mol_type = other RNA
acagcaatatcctctggga

SEQ ID NO: 57081 - RNA, 19 nt, synthetic construct
  misc_feature 1..19: note = siRNA antisense sequence
  source 1..19: mol_type = other RNA
tcccagaggatattgctgt

SEQ ID NO: 57082 - RNA, 19 nt, synthetic construct
  misc_feature 1..19: note = siRNA sense sequence
  source 1..19: mol_type = other RNA
cagcaatatcctctgggaa

SEQ ID NO: 57083 - RNA, 19 nt, synthetic construct
  misc_feature 1..19: note = siRNA antisense sequence
  source 1..19: mol_type = other RNA
ttcccagaggatattgctg

SEQ ID NO: 57084 - RNA, 19 nt, synthetic construct
  misc_feature 1..19: note = siRNA sense sequence
  source 1..19: mol_type = other RNA
atctgagtatttcctctta

SEQ ID NO: 57085 - RNA, 19 nt, synthetic construct
  misc_feature 1..19: note = siRNA antisense sequence
  source 1..19: mol_type = other RNA
taagaggaaatactcagat

SEQ ID NO: 57086 - RNA, 19 nt, synthetic construct
  misc_feature 1..19: note = siRNA sense sequence
  source 1..19: mol_type = other RNA
ctgagtatttcctcttatc

SEQ ID NO: 57087 - RNA, 19 nt, synthetic construct
  misc_feature 1..19: note = siRNA antisense sequence
  source 1..19: mol_type = other RNA
gataagaggaaatactcag

SEQ ID NO: 57088 - RNA, 19 nt, synthetic construct
  misc_feature 1..19: note = siRNA sense sequence
  source 1..19: mol_type = other RNA
catgagggacctcttgggc

SEQ ID NO: 57089 - RNA, 19 nt, synthetic construct
  misc_feature 1..19: note = siRNA antisense sequence
  source 1..19: mol_type = other RNA
gcccaagaggtccctcatg

SEQ ID NO: 57090 - RNA, 19 nt, synthetic construct
  misc_feature 1..19: note = siRNA sense sequence
  source 1..19: mol_type = other RNA
atgagggacctcttgggcg

SEQ ID NO: 57091 - RNA, 19 nt, synthetic construct
  misc_feature 1..19: note = siRNA antisense sequence
  source 1..19: mol_type = other RNA
cgcccaagaggtccctcat

SEQ ID NO: 57092 - RNA, 19 nt, synthetic construct
  misc_feature 1..19: note = siRNA sense sequence
  source 1..19: mol_type = other RNA
ggcggattcccaaattaac

SEQ ID NO: 57093 - RNA, 19 nt, synthetic construct
  misc_feature 1..19: note = siRNA antisense sequence
  source 1..19: mol_type = other RNA
gttaatttgggaatccgcc

SEQ ID NO: 57094 - RNA, 19 nt, synthetic construct
  misc_feature 1..19: note = siRNA sense sequence
  source 1..19: mol_type = other RNA
acagactcttctcatatga

SEQ ID NO: 57095 - RNA, 19 nt, synthetic construct
  misc_feature 1..19: note = siRNA antisense sequence
  source 1..19: mol_type = other RNA
tcatatgagaagagtctgt

SEQ ID NO: 57096 - RNA, 19 nt, synthetic construct
  misc_feature 1..19: note = siRNA sense sequence
  source 1..19: mol_type = other RNA
cagactcttctcatatgaa

SEQ ID NO: 57097 - RNA, 19 nt, synthetic construct
  misc_feature 1..19: note = siRNA antisense sequence
  source 1..19: mol_type = other RNA
ttcatatgagaagagtctg

SEQ ID NO: 57098 - RNA, 19 nt, synthetic construct
  misc_feature 1..19: note = siRNA sense sequence
  source 1..19: mol_type = other RNA
ttttggattctcacagcgt

SEQ ID NO: 57099 - RNA, 19 nt, synthetic construct
  misc_feature 1..19: note = siRNA antisense sequence
  source 1..19: mol_type = other RNA
acgctgtgagaatccaaaa

SEQ ID NO: 57100 - RNA, 19 nt, synthetic construct
  misc_feature 1..19: note = siRNA sense sequence
  source 1..19: mol_type = other RNA
tttggattctcacagcgta

SEQ ID NO: 57101 - RNA, 19 nt, synthetic construct
  misc_feature 1..19: note = siRNA antisense sequence
  source 1..19: mol_type = other RNA
tacgctgtgagaatccaaa

SEQ ID NO: 57102 - RNA, 19 nt, synthetic construct
  misc_feature 1..19: note = siRNA sense sequence
  source 1..19: mol_type = other RNA
ttggattctcacagcgtat

SEQ ID NO: 57103 - RNA, 19 nt, synthetic construct
  misc_feature 1..19: note = siRNA antisense sequence
  source 1..19: mol_type = other RNA
atacgctgtgagaatccaa

SEQ ID NO: 57104 - RNA, 19 nt, synthetic construct
  misc_feature 1..19: note = siRNA sense sequence
  source 1..19: mol_type = other RNA
tggattctcacagcgtatt

SEQ ID NO: 57105 - RNA, 19 nt, synthetic construct
  misc_feature 1..19: note = siRNA antisense sequence
  source 1..19: mol_type = other RNA
aatacgctgtgagaatcca

SEQ ID NO: 57106 - RNA, 19 nt, synthetic construct
  misc_feature 1..19: note = siRNA sense sequence
  source 1..19: mol_type = other RNA
ggattctcacagcgtattc

SEQ ID NO: 57107 - RNA, 19 nt, synthetic construct
  misc_feature 1..19: note = siRNA antisense sequence
  source 1..19: mol_type = other RNA
gaatacgctgtgagaatcc

SEQ ID NO: 57108 - RNA, 19 nt, synthetic construct
  misc_feature 1..19: note = siRNA sense sequence
  source 1..19: mol_type = other RNA
gattctcacagcgtattcc

SEQ ID NO: 57109 - RNA, 19 nt, synthetic construct
  misc_feature 1..19: note = siRNA antisense sequence
  source 1..19: mol_type = other RNA
ggaatacgctgtgagaatc

SEQ ID NO: 57110 - RNA, 19 nt, synthetic construct
  misc_feature 1..19: note = siRNA sense sequence
  source 1..19: mol_type = other RNA
attctcacagcgtattcca

SEQ ID NO: 57111 - RNA, 19 nt, synthetic construct
  misc_feature 1..19: note = siRNA antisense sequence
  source 1..19: mol_type = other RNA
tggaatacgctgtgagaat

SEQ ID NO: 57112 - RNA, 19 nt, synthetic construct
  misc_feature 1..19: note = siRNA sense sequence
  source 1..19: mol_type = other RNA
ttctcacagcgtattccat

SEQ ID NO: 57113 - RNA, 19 nt, synthetic construct
  misc_feature 1..19: note = siRNA antisense sequence
  source 1..19: mol_type = other RNA
atggaatacgctgtgagaa

SEQ ID NO: 57114 - RNA, 19 nt, synthetic construct
  misc_feature 1..19: note = siRNA sense sequence
  source 1..19: mol_type = other RNA
tctcacagcgtattccatc

SEQ ID NO: 57115 - RNA, 19 nt, synthetic construct
  misc_feature 1..19: note = siRNA antisense sequence
  source 1..19: mol_type = other RNA
gatggaatacgctgtgaga

SEQ ID NO: 57116 - RNA, 19 nt, synthetic construct
  misc_feature 1..19: note = siRNA sense sequence
  source 1..19: mol_type = other RNA
ctcacagcgtattccatca

SEQ ID NO: 57117 - RNA, 19 nt, synthetic construct
  misc_feature 1..19: note = siRNA antisense sequence
  source 1..19: mol_type = other RNA
tgatggaatacgctgtgag

SEQ ID NO: 57118 - RNA, 19 nt, synthetic construct
  misc_feature 1..19: note = siRNA sense sequence
  source 1..19: mol_type = other RNA
cagcgtattccatcaggtg

SEQ ID NO: 57119 - RNA, 19 nt, synthetic construct
  misc_feature 1..19: note = siRNA antisense sequence
  source 1..19: mol_type = other RNA
cacctgatggaatacgctg

SEQ ID NO: 57120 - RNA, 19 nt, synthetic construct
  misc_feature 1..19: note = siRNA sense sequence
  source 1..19: mol_type = other RNA
agcgtattccatcaggtgg

SEQ ID NO: 57121 - RNA, 19 nt, synthetic construct
  misc_feature 1..19: note = siRNA antisense sequence
  source 1..19: mol_type = other RNA
ccacctgatggaatacgct

SEQ ID NO: 57122 - RNA, 19 nt, synthetic construct
  misc_feature 1..19: note = siRNA sense sequence
  source 1..19: mol_type = other RNA
gcgtattccatcaggtggg

SEQ ID NO: 57123 - RNA, 19 nt, synthetic construct
  misc_feature 1..19: note = siRNA antisense sequence
  source 1..19: mol_type = other RNA
cccacctgatggaatacgc

SEQ ID NO: 57124 - RNA, 19 nt, synthetic construct
  misc_feature 1..19: note = siRNA sense sequence
  source 1..19: mol_type = other RNA
gggatggtaagacactgaa

SEQ ID NO: 57125 - RNA, 19 nt, synthetic construct
  misc_feature 1..19: note = siRNA antisense sequence
  source 1..19: mol_type = other RNA
ttcagtgtcttaccatccc

SEQ ID NO: 57126 - RNA, 19 nt, synthetic construct
  misc_feature 1..19: note = siRNA sense sequence
  source 1..19: mol_type = other RNA
aatggatttaaatggtgac

SEQ ID NO: 57127 - RNA, 19 nt, synthetic construct
  misc_feature 1..19: note = siRNA antisense sequence
  source 1..19: mol_type = other RNA
gtcaccatttaaatccatt

SEQ ID NO: 57128 - RNA, 19 nt, synthetic construct
  misc_feature 1..19: note = siRNA sense sequence
  source 1..19: mol_type = other RNA
atggatttaaatggtgacg

SEQ ID NO: 57129 - RNA, 19 nt, synthetic construct
  misc_feature 1..19: note = siRNA antisense sequence
  source 1..19: mol_type = other RNA
cgtcaccatttaaatccat

SEQ ID NO: 57130 - RNA, 19 nt, synthetic construct
  misc_feature 1..19: note = siRNA sense sequence
  source 1..19: mol_type = other RNA
tggatttaaatggtgacgg

SEQ ID NO: 57131 - RNA, 19 nt, synthetic construct
  misc_feature 1..19: note = siRNA antisense sequence
  source 1..19: mol_type = other RNA
ccgtcaccatttaaatcca

SEQ ID NO: 57132 - RNA, 19 nt, synthetic construct
  misc_feature 1..19: note = siRNA sense sequence
  source 1..19: mol_type = other RNA
ggatttaaatggtgacggt

SEQ ID NO: 57133 - RNA, 19 nt, synthetic construct
  misc_feature 1..19: note = siRNA antisense sequence
  source 1..19: mol_type = other RNA
accgtcaccatttaaatcc

SEQ ID NO: 57134 - RNA, 19 nt, synthetic construct
  misc_feature 1..19: note = siRNA sense sequence
  source 1..19: mol_type = other RNA
gatttaaatggtgacggtc

SEQ ID NO: 57135 - RNA, 19 nt, synthetic construct
  misc_feature 1..19: note = siRNA antisense sequence
  source 1..19: mol_type = other RNA
gaccgtcaccatttaaatc

SEQ ID NO: 57136 - RNA, 19 nt, synthetic construct
  misc_feature 1..19: note = siRNA sense sequence
  source 1..19: mol_type = other RNA
atttaaatggtgacggtct

SEQ ID NO: 57137 - RNA, 19 nt, synthetic construct
  misc_feature 1..19: note = siRNA antisense sequence
  source 1..19: mol_type = other RNA
agaccgtcaccatttaaat

SEQ ID NO: 57138 - RNA, 19 nt, synthetic construct
  misc_feature 1..19: note = siRNA sense sequence
  source 1..19: mol_type = other RNA
tttaaatggtgacggtctg

SEQ ID NO: 57139 - RNA, 19 nt, synthetic construct
  misc_feature 1..19: note = siRNA antisense sequence
  source 1..19: mol_type = other RNA
cagaccgtcaccatttaaa

SEQ ID NO: 57140 - RNA, 19 nt, synthetic construct
  misc_feature 1..19: note = siRNA sense sequence
  source 1..19: mol_type = other RNA
ttaaatggtgacggtctga

SEQ ID NO: 57141 - RNA, 19 nt, synthetic construct
  misc_feature 1..19: note = siRNA antisense sequence
  source 1..19: mol_type = other RNA
tcagaccgtcaccatttaa

SEQ ID NO: 57142 - RNA, 19 nt, synthetic construct
  misc_feature 1..19: note = siRNA sense sequence
  source 1..19: mol_type = other RNA
taaatggtgacggtctgac

SEQ ID NO: 57143 - RNA, 19 nt, synthetic construct
  misc_feature 1..19: note = siRNA antisense sequence
  source 1..19: mol_type = other RNA
gtcagaccgtcaccattta

SEQ ID NO: 57144 - RNA, 19 nt, synthetic construct
  misc_feature 1..19: note = siRNA sense sequence
  source 1..19: mol_type = other RNA
aaatggtgacggtctgaca

SEQ ID NO: 57145 - RNA, 19 nt, synthetic construct
  misc_feature 1..19: note = siRNA antisense sequence
  source 1..19: mol_type = other RNA
tgtcagaccgtcaccattt

SEQ ID NO: 57146 - RNA, 19 nt, synthetic construct
  misc_feature 1..19: note = siRNA sense sequence
  source 1..19: mol_type = other RNA
aatggtgacggtctgacag

SEQ ID NO: 57147 - RNA, 19 nt, synthetic construct
  misc_feature 1..19: note = siRNA antisense sequence
  source 1..19: mol_type = other RNA
ctgtcagaccgtcaccatt

SEQ ID NO: 57148 - RNA, 19 nt, synthetic construct
  misc_feature 1..19: note = siRNA sense sequence
  source 1..19: mol_type = other RNA
atggtgacggtctgacaga

SEQ ID NO: 57149 - RNA, 19 nt, synthetic construct
  misc_feature 1..19: note = siRNA antisense sequence
  source 1..19: mol_type = other RNA
tctgtcagaccgtcaccat

SEQ ID NO: 57150 - RNA, 19 nt, synthetic construct
  misc_feature 1..19: note = siRNA sense sequence
  source 1..19: mol_type = other RNA
tggtgacggtctgacagat

SEQ ID NO: 57151 - RNA, 19 nt, synthetic construct
  misc_feature 1..19: note = siRNA antisense sequence
  source 1..19: mol_type = other RNA
atctgtcagaccgtcacca

SEQ ID NO: 57152 - RNA, 19 nt, synthetic construct
  misc_feature 1..19: note = siRNA sense sequence
  source 1..19: mol_type = other RNA
ggtgacggtctgacagatg

SEQ ID NO: 57153 - RNA, 19 nt, synthetic construct
  misc_feature 1..19: note = siRNA antisense sequence
  source 1..19: mol_type = other RNA
catctgtcagaccgtcacc

SEQ ID NO: 57154 - RNA, 19 nt, synthetic construct
  misc_feature 1..19: note = siRNA sense sequence
  source 1..19: mol_type = other RNA
gtgacggtctgacagatgt

SEQ ID NO: 57155 - RNA, 19 nt, synthetic construct
  misc_feature 1..19: note = siRNA antisense sequence
  source 1..19: mol_type = other RNA
acatctgtcagaccgtcac

SEQ ID NO: 57156 - RNA, 19 nt, synthetic construct
  misc_feature 1..19: note = siRNA sense sequence
  source 1..19: mol_type = other RNA
tgacggtctgacagatgtg

SEQ ID NO: 57157 - RNA, 19 nt, synthetic construct
  misc_feature 1..19: note = siRNA antisense sequence
  source 1..19: mol_type = other RNA
cacatctgtcagaccgtca

SEQ ID NO: 57158 - RNA, 19 nt, synthetic construct
  misc_feature 1..19: note = siRNA sense sequence
  source 1..19: mol_type = other RNA
ggtctgacagatgtgacta

SEQ ID NO: 57159 - RNA, 19 nt, synthetic construct
  misc_feature 1..19: note = siRNA antisense sequence
  source 1..19: mol_type = other RNA
tagtcacatctgtcagacc

SEQ ID NO: 57160 - RNA, 19 nt, synthetic construct
  misc_feature 1..19: note = siRNA sense sequence
  source 1..19: mol_type = other RNA
gtctgacagatgtgactat

SEQ ID NO: 57161 - RNA, 19 nt, synthetic construct
  misc_feature 1..19: note = siRNA antisense sequence
  source 1..19: mol_type = other RNA
atagtcacatctgtcagac

SEQ ID NO: 57162 - RNA, 19 nt, synthetic construct
  misc_feature 1..19: note = siRNA sense sequence
  source 1..19: mol_type = other RNA
tctgacagatgtgactatt

SEQ ID NO: 57163 - RNA, 19 nt, synthetic construct
  misc_feature 1..19: note = siRNA antisense sequence
  source 1..19: mol_type = other RNA
aatagtcacatctgtcaga

SEQ ID NO: 57164 - RNA, 19 nt, synthetic construct
  misc_feature 1..19: note = siRNA sense sequence
  source 1..19: mol_type = other RNA
ctgacagatgtgactattg

SEQ ID NO: 57165 - RNA, 19 nt, synthetic construct
  misc_feature 1..19: note = siRNA antisense sequence
  source 1..19: mol_type = other RNA
caatagtcacatctgtcag

SEQ ID NO: 57166 - RNA, 19 nt, synthetic construct
  misc_feature 1..19: note = siRNA sense sequence
  source 1..19: mol_type = other RNA
cttggtggtgctgccctct

SEQ ID NO: 57167 - RNA, 19 nt, synthetic construct
  misc_feature 1..19: note = siRNA antisense sequence
  source 1..19: mol_type = other RNA
agagggcagcaccaccaag

SEQ ID NO: 57168 - RNA, 19 nt, synthetic construct
  misc_feature 1..19: note = siRNA sense sequence
  source 1..19: mol_type = other RNA
ttggtggtgctgccctctt

SEQ ID NO: 57169 - RNA, 19 nt, synthetic construct
  misc_feature 1..19: note = siRNA antisense sequence
  source 1..19: mol_type = other RNA
aagagggcagcaccaccaa

SEQ ID NO: 57170 - RNA, 19 nt, synthetic construct
  misc_feature 1..19: note = siRNA sense sequence
  source 1..19: mol_type = other RNA
gtggtgctgccctcttctg

SEQ ID NO: 57171 - RNA, 19 nt, synthetic construct
  misc_feature 1..19: note = siRNA antisense sequence
  source 1..19: mol_type = other RNA
cagaagagggcagcaccac

SEQ ID NO: 57172 - RNA, 19 nt, synthetic construct
  misc_feature 1..19: note = siRNA sense sequence
  source 1..19: mol_type = other RNA
tggtgctgccctcttctgg

SEQ ID NO: 57173 - RNA, 19 nt, synthetic construct
  misc_feature 1..19: note = siRNA antisense sequence
  source 1..19: mol_type = other RNA
ccagaagagggcagcacca

SEQ ID NO: 57174 - RNA, 19 nt, synthetic construct
  misc_feature 1..19: note = siRNA sense sequence
  source 1..19: mol_type = other RNA
ggtgctgccctcttctggt

SEQ ID NO: 57175 - RNA, 19 nt, synthetic construct
  misc_feature 1..19: note = siRNA antisense sequence
  source 1..19: mol_type = other RNA
accagaagagggcagcacc

SEQ ID NO: 57176 - RNA, 19 nt, synthetic construct
  misc_feature 1..19: note = siRNA sense sequence
  source 1..19: mol_type = other RNA
gtgctgccctcttctggta

SEQ ID NO: 57177 - RNA, 19 nt, synthetic construct
  misc_feature 1..19: note = siRNA antisense sequence
  source 1..19: mol_type = other RNA
taccagaagagggcagcac

SEQ ID NO: 57178 - RNA, 19 nt, synthetic construct
  misc_feature 1..19: note = siRNA sense sequence
  source 1..19: mol_type = other RNA
ctgccctcttctggtatgt

SEQ ID NO: 57179 - RNA, 19 nt, synthetic construct
  misc_feature 1..19: note = siRNA antisense sequence
  source 1..19: mol_type = other RNA
acataccagaagagggcag

SEQ ID NO: 57180 - RNA, 19 nt, synthetic construct
  misc_feature 1..19: note = siRNA sense sequence
  source 1..19: mol_type = other RNA
tgccctcttctggtatgta

SEQ ID NO: 57181 - RNA, 19 nt, synthetic construct
  misc_feature 1..19: note = siRNA antisense sequence
  source 1..19: mol_type = other RNA
tacataccagaagagggca

SEQ ID NO: 57182 - RNA, 19 nt, synthetic construct
  misc_feature 1..19: note = siRNA sense sequence
  source 1..19: mol_type = other RNA
gccctcttctggtatgtat

SEQ ID NO: 57183 - RNA, 19 nt, synthetic construct
  misc_feature 1..19: note = siRNA antisense sequence
  source 1..19: mol_type = other RNA
atacataccagaagagggc

SEQ ID NO: 57184 - RNA, 19 nt, synthetic construct
  misc_feature 1..19: note = siRNA sense sequence
  source 1..19: mol_type = other RNA
ccctcttctggtatgtatt

SEQ ID NO: 57185 - RNA, 19 nt, synthetic construct
  misc_feature 1..19: note = siRNA antisense sequence
  source 1..19: mol_type = other RNA
aatacataccagaagaggg

SEQ ID NO: 57186 - RNA, 19 nt, synthetic construct
  misc_feature 1..19: note = siRNA sense sequence
  source 1..19: mol_type = other RNA
cctcttctggtatgtattt

SEQ ID NO: 57187 - RNA, 19 nt, synthetic construct
  misc_feature 1..19: note = siRNA antisense sequence
  source 1..19: mol_type = other RNA
aaatacataccagaagagg

SEQ ID NO: 57188 - RNA, 19 nt, synthetic construct
  misc_feature 1..19: note = siRNA sense sequence
  source 1..19: mol_type = other RNA
ctcttctggtatgtatttt

SEQ ID NO: 57189 - RNA, 19 nt, synthetic construct
  misc_feature 1..19: note = siRNA antisense sequence
  source 1..19: mol_type = other RNA
aaaatacataccagaagag

SEQ ID NO: 57190 - RNA, 19 nt, synthetic construct
  misc_feature 1..19: note = siRNA sense sequence
  source 1..19: mol_type = other RNA
agactgggtcacttgcaga

SEQ ID NO: 57191 - RNA, 19 nt, synthetic construct
  misc_feature 1..19: note = siRNA antisense sequence
  source 1..19: mol_type = other RNA
tctgcaagtgacccagtct

SEQ ID NO: 57192 - RNA, 19 nt, synthetic construct
  misc_feature 1..19: note = siRNA sense sequence
  source 1..19: mol_type = other RNA
gactgggtcacttgcagag

SEQ ID NO: 57193 - RNA, 19 nt, synthetic construct
  misc_feature 1..19: note = siRNA antisense sequence
  source 1..19: mol_type = other RNA
ctctgcaagtgacccagtc

SEQ ID NO: 57194 - RNA, 19 nt, synthetic construct
  misc_feature 1..19: note = siRNA sense sequence
  source 1..19: mol_type = other RNA
actgggtcacttgcagagc

SEQ ID NO: 57195 - RNA, 19 nt, synthetic construct
  misc_feature 1..19: note = siRNA antisense sequence
  source 1..19: mol_type = other RNA
gctctgcaagtgacccagt

SEQ ID NO: 57196 - RNA, 19 nt, synthetic construct
  misc_feature 1..19: note = siRNA sense sequence
  source 1..19: mol_type = other RNA
ctgggtcacttgcagagct

SEQ ID NO: 57197 - RNA, 19 nt, synthetic construct
  misc_feature 1..19: note = siRNA antisense sequence
  source 1..19: mol_type = other RNA
agctctgcaagtgacccag

SEQ ID NO: 57198 - RNA, 19 nt, synthetic construct
  misc_feature 1..19: note = siRNA sense sequence
  source 1..19: mol_type = other RNA
tgggtcacttgcagagctc

SEQ ID NO: 57199 - RNA, 19 nt, synthetic construct
  misc_feature 1..19: note = siRNA antisense sequence
  source 1..19: mol_type = other RNA
gagctctgcaagtgaccca

SEQ ID NO: 57200 - RNA, 19 nt, synthetic construct
  misc_feature 1..19: note = siRNA sense sequence
  source 1..19: mol_type = other RNA
gggtcacttgcagagctcc

SEQ ID NO: 57201 - RNA, 19 nt, synthetic construct
  misc_feature 1..19: note = siRNA antisense sequence
  source 1..19: mol_type = other RNA
ggagctctgcaagtgaccc

SEQ ID NO: 57202 - RNA, 19 nt, synthetic construct
  misc_feature 1..19: note = siRNA sense sequence
  source 1..19: mol_type = other RNA
ggtcacttgcagagctccc

SEQ ID NO: 57203 - RNA, 19 nt, synthetic construct
  misc_feature 1..19: note = siRNA antisense sequence
  source 1..19: mol_type = other RNA
gggagctctgcaagtgacc

SEQ ID NO: 57204 - RNA, 19 nt, synthetic construct
  misc_feature 1..19: note = siRNA sense sequence
  source 1..19: mol_type = other RNA
cttgcagagctcccagtgt

SEQ ID NO: 57205 - RNA, 19 nt, synthetic construct
  misc_feature 1..19: note = siRNA antisense sequence
  source 1..19: mol_type = other RNA
acactgggagctctgcaag

SEQ ID NO: 57206 - RNA, 19 nt, synthetic construct
  misc_feature 1..19: note = siRNA sense sequence
  source 1..19: mol_type = other RNA
agagctcccagtgtgattg

SEQ ID NO: 57207 - RNA, 19 nt, synthetic construct
  misc_feature 1..19: note = siRNA antisense sequence
  source 1..19: mol_type = other RNA
caatcacactgggagctct

SEQ ID NO: 57208 - RNA, 19 nt, synthetic construct
  misc_feature 1..19: note = siRNA sense sequence
  source 1..19: mol_type = other RNA
gagctcccagtgtgattgg

SEQ ID NO: 57209 - RNA, 19 nt, synthetic construct
  misc_feature 1..19: note = siRNA antisense sequence
  source 1..19: mol_type = other RNA
ccaatcacactgggagctc

SEQ ID NO: 57210 - RNA, 19 nt, synthetic construct
  misc_feature 1..19: note = siRNA sense sequence
  source 1..19: mol_type = other RNA
agctcccagtgtgattgga

SEQ ID NO: 57211 - RNA, 19 nt, synthetic construct
  misc_feature 1..19: note = siRNA antisense sequence
  source 1..19: mol_type = other RNA
tccaatcacactgggagct

SEQ ID NO: 57212 - RNA, 19 nt, synthetic construct
  misc_feature 1..19: note = siRNA sense sequence
  source 1..19: mol_type = other RNA
tcccagtgtgattggagct

SEQ ID NO: 57213 - RNA, 19 nt, synthetic construct
  misc_feature 1..19: note = siRNA antisense sequence
  source 1..19: mol_type = other RNA
agctccaatcacactggga

SEQ ID NO: 57214 - RNA, 19 nt, synthetic construct
  misc_feature 1..19: note = siRNA sense sequence
  source 1..19: mol_type = other RNA
cagtgtgattggagctcat

SEQ ID NO: 57215 - RNA, 19 nt, synthetic construct
  misc_feature 1..19: note = siRNA antisense sequence
  source 1..19: mol_type = other RNA
atgagctccaatcacactg

SEQ ID NO: 57216 - RNA, 19 nt, synthetic construct
  misc_feature 1..19: note = siRNA sense sequence
  source 1..19: mol_type = other RNA
agtgtgattggagctcatg

SEQ ID NO: 57217 - RNA, 19 nt, synthetic construct
  misc_feature 1..19: note = siRNA antisense sequence
  source 1..19: mol_type = other RNA
catgagctccaatcacact

SEQ ID NO: 57218 - RNA, 19 nt, synthetic construct
  misc_feature 1..19: note = siRNA sense sequence
  source 1..19: mol_type = other RNA
gtgtgattggagctcatgt

SEQ ID NO: 57219 - RNA, 19 nt, synthetic construct
  misc_feature 1..19: note = siRNA antisense sequence
  source 1..19: mol_type = other RNA
acatgagctccaatcacac

SEQ ID NO: 57220 - RNA, 19 nt, synthetic construct
  misc_feature 1..19: note = siRNA sense sequence
  source 1..19: mol_type = other RNA
tgtgattggagctcatgtc

SEQ ID NO: 57221 - RNA, 19 nt, synthetic construct
  misc_feature 1..19: note = siRNA antisense sequence
  source 1..19: mol_type = other RNA
gacatgagctccaatcaca

SEQ ID NO: 57222 - RNA, 19 nt, synthetic construct
  misc_feature 1..19: note = siRNA sense sequence
  source 1..19: mol_type = other RNA
gtgattggagctcatgtca

SEQ ID NO: 57223 - RNA, 19 nt, synthetic construct
  misc_feature 1..19: note = siRNA antisense sequence
  source 1..19: mol_type = other RNA
tgacatgagctccaatcac

SEQ ID NO: 57224 - RNA, 19 nt, synthetic construct
  misc_feature 1..19: note = siRNA sense sequence
  source 1..19: mol_type = other RNA
ttggagctcatgtcatacc

SEQ ID NO: 57225 - RNA, 19 nt, synthetic construct
  misc_feature 1..19: note = siRNA antisense sequence
  source 1..19: mol_type = other RNA
ggtatgacatgagctccaa

SEQ ID NO: 57226 - RNA, 19 nt, synthetic construct
  misc_feature 1..19: note = siRNA sense sequence
  source 1..19: mol_type = other RNA
tggagctcatgtcatacca

SEQ ID NO: 57227 - RNA, 19 nt, synthetic construct
  misc_feature 1..19: note = siRNA antisense sequence
  source 1..19: mol_type = other RNA
tggtatgacatgagctcca

SEQ ID NO: 57228 - RNA, 19 nt, synthetic construct
  misc_feature 1..19: note = siRNA sense sequence
  source 1..19: mol_type = other RNA
ggagctcatgtcataccaa

SEQ ID NO: 57229 - RNA, 19 nt, synthetic construct
  misc_feature 1..19: note = siRNA antisense sequence
  source 1..19: mol_type = other RNA
ttggtatgacatgagctcc

SEQ ID NO: 57230 - RNA, 19 nt, synthetic construct
  misc_feature 1..19: note = siRNA sense sequence
  source 1..19: mol_type = other RNA
gagctcatgtcataccaaa

SEQ ID NO: 57231 - RNA, 19 nt, synthetic construct
  misc_feature 1..19: note = siRNA antisense sequence
  source 1..19: mol_type = other RNA
tttggtatgacatgagctc

SEQ ID NO: 57232 - RNA, 19 nt, synthetic construct
  misc_feature 1..19: note = siRNA sense sequence
  source 1..19: mol_type = other RNA
agctcatgtcataccaaat

SEQ ID NO: 57233 - RNA, 19 nt, synthetic construct
  misc_feature 1..19: note = siRNA antisense sequence
  source 1..19: mol_type = other RNA
atttggtatgacatgagct

SEQ ID NO: 57234 - RNA, 19 nt, synthetic construct
  misc_feature 1..19: note = siRNA sense sequence
  source 1..19: mol_type = other RNA
gctcatgtcataccaaata

SEQ ID NO: 57235 - RNA, 19 nt, synthetic construct
  misc_feature 1..19: note = siRNA antisense sequence
  source 1..19: mol_type = other RNA
tatttggtatgacatgagc

SEQ ID NO: 57236 - RNA, 19 nt, synthetic construct
  misc_feature 1..19: note = siRNA sense sequence
  source 1..19: mol_type = other RNA
ctcatgtcataccaaatat

SEQ ID NO: 57237 - RNA, 19 nt, synthetic construct
  misc_feature 1..19: note = siRNA antisense sequence
  source 1..19: mol_type = other RNA
atatttggtatgacatgag

SEQ ID NO: 57238 - RNA, 19 nt, synthetic construct
  misc_feature 1..19: note = siRNA sense sequence
  source 1..19: mol_type = other RNA
ctatttccttttgtgttcc

SEQ ID NO: 57239 - RNA, 19 nt, synthetic construct
  misc_feature 1..19: note = siRNA antisense sequence
  source 1..19: mol_type = other RNA
ggaacacaaaaggaaatag

SEQ ID NO: 57240 - RNA, 19 nt, synthetic construct
  misc_feature 1..19: note = siRNA sense sequence
  source 1..19: mol_type = other RNA
tatttccttttgtgttcca

SEQ ID NO: 57241 - RNA, 19 nt, synthetic construct
  misc_feature 1..19: note = siRNA antisense sequence
  source 1..19: mol_type = other RNA
tggaacacaaaaggaaata

SEQ ID NO: 57242 - RNA, 19 nt, synthetic construct
  misc_feature 1..19: note = siRNA sense sequence
  source 1..19: mol_type = other RNA
atttccttttgtgttccac

SEQ ID NO: 57243 - RNA, 19 nt, synthetic construct
  misc_feature 1..19: note = siRNA antisense sequence
  source 1..19: mol_type = other RNA
gtggaacacaaaaggaaat

SEQ ID NO: 57244 - RNA, 19 nt, synthetic construct
  misc_feature 1..19: note = siRNA sense sequence
  source 1..19: mol_type = other RNA
cttttgtgttccactatgc

SEQ ID NO: 57245 - RNA, 19 nt, synthetic construct
  misc_feature 1..19: note = siRNA antisense sequence
  source 1..19: mol_type = other RNA
gcatagtggaacacaaaag

SEQ ID NO: 57246 - RNA, 19 nt, synthetic construct
  misc_feature 1..19: note = siRNA sense sequence
  source 1..19: mol_type = other RNA
tgtgttccactatgcaaat

SEQ ID NO: 57247 - RNA, 19 nt, synthetic construct
  misc_feature 1..19: note = siRNA antisense sequence
  source 1..19: mol_type = other RNA
atttgcatagtggaacaca

SEQ ID NO: 57248 - RNA, 19 nt, synthetic construct
  misc_feature 1..19: note = siRNA sense sequence
  source 1..19: mol_type = other RNA
gtgttccactatgcaaata

SEQ ID NO: 57249 - RNA, 19 nt, synthetic construct
  misc_feature 1..19: note = siRNA antisense sequence
  source 1..19: mol_type = other RNA
tatttgcatagtggaacac

SEQ ID NO: 57250 - RNA, 19 nt, synthetic construct
  misc_feature 1..19: note = siRNA sense sequence
  source 1..19: mol_type = other RNA
tgttccactatgcaaatac

SEQ ID NO: 57251 - RNA, 19 nt, synthetic construct
  misc_feature 1..19: note = siRNA antisense sequence
  source 1..19: mol_type = other RNA
gtatttgcatagtggaaca

SEQ ID NO: 57252 - RNA, 19 nt, synthetic construct
  misc_feature 1..19: note = siRNA sense sequence
  source 1..19: mol_type = other RNA
gttccactatgcaaataca

SEQ ID NO: 57253 - RNA, 19 nt, synthetic construct
  misc_feature 1..19: note = siRNA antisense sequence
  source 1..19: mol_type = other RNA
tgtatttgcatagtggaac

SEQ ID NO: 57254 - RNA, 19 nt, synthetic construct
  misc_feature 1..19: note = siRNA sense sequence
  source 1..19: mol_type = other RNA
caagttattcagttgagtg

SEQ ID NO: 57255 - RNA, 19 nt, synthetic construct
  misc_feature 1..19: note = siRNA antisense sequence
  source 1..19: mol_type = other RNA
cactcaactgaataacttg

SEQ ID NO: 57256 - RNA, 19 nt, synthetic construct
  misc_feature 1..19: note = siRNA sense sequence
  source 1..19: mol_type = other RNA
aagttattcagttgagtga

SEQ ID NO: 57257 - RNA, 19 nt, synthetic construct
  misc_feature 1..19: note = siRNA antisense sequence
  source 1..19: mol_type = other RNA
tcactcaactgaataactt

SEQ ID NO: 57258 - RNA, 19 nt, synthetic construct
  misc_feature 1..19: note = siRNA sense sequence
  source 1..19: mol_type = other RNA
agttattcagttgagtgag

SEQ ID NO: 57259 - RNA, 19 nt, synthetic construct
  misc_feature 1..19: note = siRNA antisense sequence
  source 1..19: mol_type = other RNA
ctcactcaactgaataact

SEQ ID NO: 57260 - RNA, 19 nt, synthetic construct
  misc_feature 1..19: note = siRNA sense sequence
  source 1..19: mol_type = other RNA
gttattcagttgagtgagc

SEQ ID NO: 57261 - RNA, 19 nt, synthetic construct
  misc_feature 1..19: note = siRNA antisense sequence
  source 1..19: mol_type = other RNA
gctcactcaactgaataac

SEQ ID NO: 57262 - RNA, 19 nt, synthetic construct
  misc_feature 1..19: note = siRNA sense sequence
  source 1..19: mol_type = other RNA
tattcagttgagtgagctg

SEQ ID NO: 57263 - RNA, 19 nt, synthetic construct
  misc_feature 1..19: note = siRNA antisense sequence
  source 1..19: mol_type = other RNA
cagctcactcaactgaata

SEQ ID NO: 57264 - RNA, 19 nt, synthetic construct
  misc_feature 1..19: note = siRNA sense sequence
  source 1..19: mol_type = other RNA
attcagttgagtgagctgg

SEQ ID NO: 57265 - RNA, 19 nt, synthetic construct
  misc_feature 1..19: note = siRNA antisense sequence
  source 1..19: mol_type = other RNA
ccagctcactcaactgaat

SEQ ID NO: 57266 - RNA, 19 nt, synthetic construct
  misc_feature 1..19: note = siRNA sense sequence
  source 1..19: mol_type = other RNA
tcagttgagtgagctggaa

SEQ ID NO: 57267 - RNA, 19 nt, synthetic construct
  misc_feature 1..19: note = siRNA antisense sequence
  source 1..19: mol_type = other RNA
ttccagctcactcaactga

SEQ ID NO: 57268 - RNA, 19 nt, synthetic construct
  misc_feature 1..19: note = siRNA sense sequence
  source 1..19: mol_type = other RNA
gttgagtgagctggaagag

SEQ ID NO: 57269 - RNA, 19 nt, synthetic construct
  misc_feature 1..19: note = siRNA antisense sequence
  source 1..19: mol_type = other RNA
ctcttccagctcactcaac

SEQ ID NO: 57270 - RNA, 19 nt, synthetic construct
  misc_feature 1..19: note = siRNA sense sequence
  source 1..19: mol_type = other RNA
ttgagtgagctggaagagt

SEQ ID NO: 57271 - RNA, 19 nt, synthetic construct
  misc_feature 1..19: note = siRNA antisense sequence
  source 1..19: mol_type = other RNA
actcttccagctcactcaa

SEQ ID NO: 57272 - RNA, 19 nt, synthetic construct
  misc_feature 1..19: note = siRNA sense sequence
  source 1..19: mol_type = other RNA
gtgagctggaagagtcaat

SEQ ID NO: 57273 - RNA, 19 nt, synthetic construct
  misc_feature 1..19: note = siRNA antisense sequence
  source 1..19: mol_type = other RNA
attgactcttccagctcac

SEQ ID NO: 57274 - RNA, 19 nt, synthetic construct
  misc_feature 1..19: note = siRNA sense sequence
  source 1..19: mol_type = other RNA
gagctggaagagtcaatac

SEQ ID NO: 57275 - RNA, 19 nt, synthetic construct
  misc_feature 1..19: note = siRNA antisense sequence
  source 1..19: mol_type = other RNA
gtattgactcttccagctc

SEQ ID NO: 57276 - RNA, 19 nt, synthetic construct
  misc_feature 1..19: note = siRNA sense sequence
  source 1..19: mol_type = other RNA
gctggaagagtcaatacat

SEQ ID NO: 57277 - RNA, 19 nt, synthetic construct
  misc_feature 1..19: note = siRNA antisense sequence
  source 1..19: mol_type = other RNA
atgtattgactcttccagc

SEQ ID NO: 57278 - RNA, 19 nt, synthetic construct
  misc_feature 1..19: note = siRNA sense sequence
  source 1..19: mol_type = other RNA
ctggaagagtcaatacatc

SEQ ID NO: 57279 - RNA, 19 nt, synthetic construct
  misc_feature 1..19: note = siRNA antisense sequence
  source 1..19: mol_type = other RNA
gatgtattgactcttccag

SEQ ID NO: 57280 - RNA, 19 nt, synthetic construct
  misc_feature 1..19: note = siRNA sense sequence
  source 1..19: mol_type = other RNA
tggaagagtcaatacatct

SEQ ID NO: 57281 - RNA, 19 nt, synthetic construct
  misc_feature 1..19: note = siRNA antisense sequence
  source 1..19: mol_type = other RNA
agatgtattgactcttcca

SEQ ID NO: 57282 - RNA, 19 nt, synthetic construct
  misc_feature 1..19: note = siRNA sense sequence
  source 1..19: mol_type = other RNA
tcttaatttggtgtgtcta

SEQ ID NO: 57283 - RNA, 19 nt, synthetic construct
  misc_feature 1..19: note = siRNA antisense sequence
  source 1..19: mol_type = other RNA
tagacacaccaaattaaga

SEQ ID NO: 57284 - RNA, 19 nt, synthetic construct
  misc_feature 1..19: note = siRNA sense sequence
  source 1..19: mol_type = other RNA
tatccctaatatttggttg

SEQ ID NO: 57285 - RNA, 19 nt, synthetic construct
  misc_feature 1..19: note = siRNA antisense sequence
  source 1..19: mol_type = other RNA
caaccaaatattagggata

SEQ ID NO: 57286 - RNA, 19 nt, synthetic construct
  misc_feature 1..19: note = siRNA sense sequence
  source 1..19: mol_type = other RNA
atccctaatatttggttgc

SEQ ID NO: 57287 - RNA, 19 nt, synthetic construct
  misc_feature 1..19: note = siRNA antisense sequence
  source 1..19: mol_type = other RNA
gcaaccaaatattagggat

SEQ ID NO: 57288 - RNA, 19 nt, synthetic construct
  misc_feature 1..19: note = siRNA sense sequence
  source 1..19: mol_type = other RNA
ccctaatatttggttgctt

SEQ ID NO: 57289 - RNA, 19 nt, synthetic construct
  misc_feature 1..19: note = siRNA antisense sequence
  source 1..19: mol_type = other RNA
aagcaaccaaatattaggg

SEQ ID NO: 57290 - RNA, 19 nt, synthetic construct
  misc_feature 1..19: note = siRNA sense sequence
  source 1..19: mol_type = other RNA
cctaatatttggttgctta

SEQ ID NO: 57291 - RNA, 19 nt, synthetic construct
  misc_feature 1..19: note = siRNA antisense sequence
  source 1..19: mol_type = other RNA
taagcaaccaaatattagg

SEQ ID NO: 57292 - RNA, 19 nt, synthetic construct
  misc_feature 1..19: note = siRNA sense sequence
  source 1..19: mol_type = other RNA
ctaatatttggttgcttac

SEQ ID NO: 57293 - RNA, 19 nt, synthetic construct
  misc_feature 1..19: note = siRNA antisense sequence
  source 1..19: mol_type = other RNA
gtaagcaaccaaatattag

SEQ ID NO: 57294 - RNA, 19 nt, synthetic construct
  misc_feature 1..19: note = siRNA sense sequence
  source 1..19: mol_type = other RNA
cgactttgtattcatttac

SEQ ID NO: 57295 - RNA, 19 nt, synthetic construct
  misc_feature 1..19: note = siRNA antisense sequence
  source 1..19: mol_type = other RNA
gtaaatgaatacaaagtcg

SEQ ID NO: 57296 - RNA, 19 nt, synthetic construct
  misc_feature 1..19: note = siRNA sense sequence
  source 1..19: mol_type = other RNA
gactttgtattcatttacc

SEQ ID NO: 57297 - RNA, 19 nt, synthetic construct
  misc_feature 1..19: note = siRNA antisense sequence
  source 1..19: mol_type = other RNA
ggtaaatgaatacaaagtc

SEQ ID NO: 57298 - RNA, 19 nt, synthetic construct
  misc_feature 1..19: note = siRNA sense sequence
  source 1..19: mol_type = other RNA
ctttgtattcatttacctg

SEQ ID NO: 57299 - RNA, 19 nt, synthetic construct
  misc_feature 1..19: note = siRNA antisense sequence
  source 1..19: mol_type = other RNA
caggtaaatgaatacaaag

SEQ ID NO: 57300 - RNA, 19 nt, synthetic construct
  misc_feature 1..19: note = siRNA sense sequence
  source 1..19: mol_type = other RNA
tcatttacctgatacatag

SEQ ID NO: 57301 - RNA, 19 nt, synthetic construct
  misc_feature 1..19: note = siRNA antisense sequence
  source 1..19: mol_type = other RNA
ctatgtatcaggtaaatga

SEQ ID NO: 57302 - RNA, 19 nt, synthetic construct
  misc_feature 1..19: note = siRNA sense sequence
  source 1..19: mol_type = other RNA
catttacctgatacataga

SEQ ID NO: 57303 - RNA, 19 nt, synthetic construct
  misc_feature 1..19: note = siRNA antisense sequence
  source 1..19: mol_type = other RNA
tctatgtatcaggtaaatg

SEQ ID NO: 57304 - RNA, 19 nt, synthetic construct
  misc_feature 1..19: note = siRNA sense sequence
  source 1..19: mol_type = other RNA
gcactctctgactctgttt

SEQ ID NO: 57305 - RNA, 19 nt, synthetic construct
  misc_feature 1..19: note = siRNA antisense sequence
  source 1..19: mol_type = other RNA
aaacagagtcagagagtgc

SEQ ID NO: 57306 - RNA, 19 nt, synthetic construct
  misc_feature 1..19: note = siRNA sense sequence
  source 1..19: mol_type = other RNA
actctctgactctgtttat

SEQ ID NO: 57307 - RNA, 19 nt, synthetic construct
  misc_feature 1..19: note = siRNA antisense sequence
  source 1..19: mol_type = other RNA
ataaacagagtcagagagt

SEQ ID NO: 57308 - RNA, 19 nt, synthetic construct
  misc_feature 1..19: note = siRNA sense sequence
  source 1..19: mol_type = other RNA
tctgtttatattgttggtc

SEQ ID NO: 57309 - RNA, 19 nt, synthetic construct
  misc_feature 1..19: note = siRNA antisense sequence
  source 1..19: mol_type = other RNA
gaccaacaatataaacaga

SEQ ID NO: 57310 - RNA, 19 nt, synthetic construct
  misc_feature 1..19: note = siRNA sense sequence
  source 1..19: mol_type = other RNA
ctgtttatattgttggtca

SEQ ID NO: 57311 - RNA, 19 nt, synthetic construct
  misc_feature 1..19: note = siRNA antisense sequence
  source 1..19: mol_type = other RNA
tgaccaacaatataaacag

SEQ ID NO: 57312 - RNA, 19 nt, synthetic construct
  misc_feature 1..19: note = siRNA sense sequence
  source 1..19: mol_type = other RNA
gtttatattgttggtcaag

SEQ ID NO: 57313 - RNA, 19 nt, synthetic construct
  misc_feature 1..19: note = siRNA antisense sequence
  source 1..19: mol_type = other RNA
cttgaccaacaatataaac

SEQ ID NO: 57314 - RNA, 19 nt, synthetic construct
  misc_feature 1..19: note = siRNA sense sequence
  source 1..19: mol_type = other RNA
tttatattgttggtcaagc

SEQ ID NO: 57315 - RNA, 19 nt, synthetic construct
  misc_feature 1..19: note = siRNA antisense sequence
  source 1..19: mol_type = other RNA
gcttgaccaacaatataaa

SEQ ID NO: 57316 - RNA, 19 nt, synthetic construct
  misc_feature 1..19: note = siRNA sense sequence
  source 1..19: mol_type = other RNA
ttatattgttggtcaagcc

SEQ ID NO: 57317 - RNA, 19 nt, synthetic construct
  misc_feature 1..19: note = siRNA antisense sequence
  source 1..19: mol_type = other RNA
ggcttgaccaacaatataa

SEQ ID NO: 57318 - RNA, 19 nt, synthetic construct
  misc_feature 1..19: note = siRNA sense sequence
  source 1..19: mol_type = other RNA
tatattgttggtcaagcct

SEQ ID NO: 57319 - RNA, 19 nt, synthetic construct
  misc_feature 1..19: note = siRNA antisense sequence
  source 1..19: mol_type = other RNA
aggcttgaccaacaatata

SEQ ID NO: 57320 - RNA, 19 nt, synthetic construct
  misc_feature 1..19: note = siRNA sense sequence
  source 1..19: mol_type = other RNA
atattgttggtcaagccta

SEQ ID NO: 57321 - RNA, 19 nt, synthetic construct
  misc_feature 1..19: note = siRNA antisense sequence
  source 1..19: mol_type = other RNA
taggcttgaccaacaatat

SEQ ID NO: 57322 - RNA, 19 nt, synthetic construct
  misc_feature 1..19: note = siRNA sense sequence
  source 1..19: mol_type = other RNA
tattgttggtcaagcctag

SEQ ID NO: 57323 - RNA, 19 nt, synthetic construct
  misc_feature 1..19: note = siRNA antisense sequence
  source 1..19: mol_type = other RNA
ctaggcttgaccaacaata

SEQ ID NO: 57324 - RNA, 19 nt, synthetic construct
  misc_feature 1..19: note = siRNA sense sequence
  source 1..19: mol_type = other RNA
attgttggtcaagcctaga

SEQ ID NO: 57325 - RNA, 19 nt, synthetic construct
  misc_feature 1..19: note = siRNA antisense sequence
  source 1..19: mol_type = other RNA
tctaggcttgaccaacaat

SEQ ID NO: 57326 - RNA, 19 nt, synthetic construct
  misc_feature 1..19: note = siRNA sense sequence
  source 1..19: mol_type = other RNA
tgttggtcaagcctagagg

SEQ ID NO: 57327 - RNA, 19 nt, synthetic construct
  misc_feature 1..19: note = siRNA antisense sequence
  source 1..19: mol_type = other RNA
cctctaggcttgaccaaca

SEQ ID NO: 57328 - RNA, 19 nt, synthetic construct
  misc_feature 1..19: note = siRNA sense sequence
  source 1..19: mol_type = other RNA
gttggtcaagcctagaggc

SEQ ID NO: 57329 - RNA, 19 nt, synthetic construct
  misc_feature 1..19: note = siRNA antisense sequence
  source 1..19: mol_type = other RNA
gcctctaggcttgaccaac

SEQ ID NO: 57330 - RNA, 19 nt, synthetic construct
  misc_feature 1..19: note = siRNA sense sequence
  source 1..19: mol_type = other RNA
ttggtcaagcctagaggca

SEQ ID NO: 57331 - RNA, 19 nt, synthetic construct
  misc_feature 1..19: note = siRNA antisense sequence
  source 1..19: mol_type = other RNA
tgcctctaggcttgaccaa

SEQ ID NO: 57332 - RNA, 19 nt, synthetic construct
  misc_feature 1..19: note = siRNA sense sequence
  source 1..19: mol_type = other RNA
tcaagcctagaggcatctt

SEQ ID NO: 57333 - RNA, 19 nt, synthetic construct
  misc_feature 1..19: note = siRNA antisense sequence
  source 1..19: mol_type = other RNA
aagatgcctctaggcttga

SEQ ID NO: 57334 - RNA, 19 nt, synthetic construct
  misc_feature 1..19: note = siRNA sense sequence
  source 1..19: mol_type = other RNA
caagcctagaggcatctta

SEQ ID NO: 57335 - RNA, 19 nt, synthetic construct
  misc_feature 1..19: note = siRNA antisense sequence
  source 1..19: mol_type = other RNA
taagatgcctctaggcttg

SEQ ID NO: 57336 - RNA, 19 nt, synthetic construct
  misc_feature 1..19: note = siRNA sense sequence
  source 1..19: mol_type = other RNA
aagcctagaggcatcttaa

SEQ ID NO: 57337 - RNA, 19 nt, synthetic construct
  misc_feature 1..19: note = siRNA antisense sequence
  source 1..19: mol_type = other RNA
ttaagatgcctctaggctt

SEQ ID NO: 57338 - RNA, 19 nt, synthetic construct
  misc_feature 1..19: note = siRNA sense sequence
  source 1..19: mol_type = other RNA
agcctagaggcatcttaag

SEQ ID NO: 57339 - RNA, 19 nt, synthetic construct
  misc_feature 1..19: note = siRNA antisense sequence
  source 1..19: mol_type = other RNA
cttaagatgcctctaggct

SEQ ID NO: 57340 - RNA, 19 nt, synthetic construct
  misc_feature 1..19: note = siRNA sense sequence
  source 1..19: mol_type = other RNA
gcctagaggcatcttaagt

SEQ ID NO: 57341 - RNA, 19 nt, synthetic construct
  misc_feature 1..19: note = siRNA antisense sequence
  source 1..19: mol_type = other RNA
acttaagatgcctctaggc

SEQ ID NO: 57342 - RNA, 19 nt, synthetic construct
  misc_feature 1..19: note = siRNA sense sequence
  source 1..19: mol_type = other RNA
cctagaggcatcttaagta

SEQ ID NO: 57343 - RNA, 19 nt, synthetic construct
  misc_feature 1..19: note = siRNA antisense sequence
  source 1..19: mol_type = other RNA
tacttaagatgcctctagg

SEQ ID NO: 57344 - RNA, 19 nt, synthetic construct
  misc_feature 1..19: note = siRNA sense sequence
  source 1..19: mol_type = other RNA
ctagaggcatcttaagtaa

SEQ ID NO: 57345 - RNA, 19 nt, synthetic construct
  misc_feature 1..19: note = siRNA antisense sequence
  source 1..19: mol_type = other RNA
ttacttaagatgcctctag

SEQ ID NO: 57346 - RNA, 19 nt, synthetic construct
  misc_feature 1..19: note = siRNA sense sequence
  source 1..19: mol_type = other RNA
tagaggcatcttaagtaat

SEQ ID NO: 57347 - RNA, 19 nt, synthetic construct
  misc_feature 1..19: note = siRNA antisense sequence
  source 1..19: mol_type = other RNA
attacttaagatgcctcta

SEQ ID NO: 57348 - RNA, 19 nt, synthetic construct
  misc_feature 1..19: note = siRNA sense sequence
  source 1..19: mol_type = other RNA
gaggcatcttaagtaatat

SEQ ID NO: 57349 - RNA, 19 nt, synthetic construct
  misc_feature 1..19: note = siRNA antisense sequence
  source 1..19: mol_type = other RNA
atattacttaagatgcctc

SEQ ID NO: 57350 - RNA, 19 nt, synthetic construct
  misc_feature 1..19: note = siRNA sense sequence
  source 1..19: mol_type = other RNA
aggcatcttaagtaatatc

SEQ ID NO: 57351 - RNA, 19 nt, synthetic construct
  misc_feature 1..19: note = siRNA antisense sequence
  source 1..19: mol_type = other RNA
gatattacttaagatgcct

SEQ ID NO: 57352 - RNA, 19 nt, synthetic construct
  misc_feature 1..19: note = siRNA sense sequence
  source 1..19: mol_type = other RNA
ggcatcttaagtaatatct

SEQ ID NO: 57353 - RNA, 19 nt, synthetic construct
  misc_feature 1..19: note = siRNA antisense sequence
  source 1..19: mol_type = other RNA
agatattacttaagatgcc

SEQ ID NO: 57354 - RNA, 19 nt, synthetic construct
  misc_feature 1..19: note = siRNA sense sequence
  source 1..19: mol_type = other RNA
gctcagcctttaaaatgcc

SEQ ID NO: 57355 - RNA, 19 nt, synthetic construct
  misc_feature 1..19: note = siRNA antisense sequence
  source 1..19: mol_type = other RNA
ggcattttaaaggctgagc

SEQ ID NO: 57356 - RNA, 19 nt, synthetic construct
  misc_feature 1..19: note = siRNA sense sequence
  source 1..19: mol_type = other RNA
ctcagcctttaaaatgcct

SEQ ID NO: 57357 - RNA, 19 nt, synthetic construct
  misc_feature 1..19: note = siRNA antisense sequence
  source 1..19: mol_type = other RNA
aggcattttaaaggctgag

SEQ ID NO: 57358 - RNA, 19 nt, synthetic construct
  misc_feature 1..19: note = siRNA sense sequence
  source 1..19: mol_type = other RNA
tcagcctttaaaatgccta

SEQ ID NO: 57359 - RNA, 19 nt, synthetic construct
  misc_feature 1..19: note = siRNA antisense sequence
  source 1..19: mol_type = other RNA
taggcattttaaaggctga

SEQ ID NO: 57360 - RNA, 19 nt, synthetic construct
  misc_feature 1..19: note = siRNA sense sequence
  source 1..19: mol_type = other RNA
ccaaattggcccagttctt

SEQ ID NO: 57361 - RNA, 19 nt, synthetic construct
  misc_feature 1..19: note = siRNA antisense sequence
  source 1..19: mol_type = other RNA
aagaactgggccaatttgg

SEQ ID NO: 57362 - RNA, 19 nt, synthetic construct
  misc_feature 1..19: note = siRNA sense sequence
  source 1..19: mol_type = other RNA
tggcccagttctttcagat

SEQ ID NO: 57363 - RNA, 19 nt, synthetic construct
  misc_feature 1..19: note = siRNA antisense sequence
  source 1..19: mol_type = other RNA
atctgaaagaactgggcca

SEQ ID NO: 57364 - RNA, 19 nt, synthetic construct
  misc_feature 1..19: note = siRNA sense sequence
  source 1..19: mol_type = other RNA
ggcccagttctttcagata

SEQ ID NO: 57365 - RNA, 19 nt, synthetic construct
  misc_feature 1..19: note = siRNA antisense sequence
  source 1..19: mol_type = other RNA
tatctgaaagaactgggcc

SEQ ID NO: 57366 - RNA, 19 nt, synthetic construct
  misc_feature 1..19: note = siRNA sense sequence
  source 1..19: mol_type = other RNA
gcccagttctttcagatac

SEQ ID NO: 57367 - RNA, 19 nt, synthetic construct
  misc_feature 1..19: note = siRNA antisense sequence
  source 1..19: mol_type = other RNA
gtatctgaaagaactgggc

SEQ ID NO: 57368 - RNA, 19 nt, synthetic construct
  misc_feature 1..19: note = siRNA sense sequence
  source 1..19: mol_type = other RNA
cccagttctttcagataca

SEQ ID NO: 57369 - RNA, 19 nt, synthetic construct
  misc_feature 1..19: note = siRNA antisense sequence
  source 1..19: mol_type = other RNA
tgtatctgaaagaactggg

SEQ ID NO: 57370 - RNA, 19 nt, synthetic construct
  misc_feature 1..19: note = siRNA sense sequence
  source 1..19: mol_type = other RNA
ccagttctttcagatacat

SEQ ID NO: 57371 - RNA, 19 nt, synthetic construct
  misc_feature 1..19: note = siRNA antisense sequence
  source 1..19: mol_type = other RNA
atgtatctgaaagaactgg

SEQ ID NO: 57372 - RNA, 19 nt, synthetic construct
  misc_feature 1..19: note = siRNA sense sequence
  source 1..19: mol_type = other RNA
cagttctttcagatacata

SEQ ID NO: 57373 - RNA, 19 nt, synthetic construct
  misc_feature 1..19: note = siRNA antisense sequence
  source 1..19: mol_type = other RNA
tatgtatctgaaagaactg

SEQ ID NO: 57374 - RNA, 19 nt, synthetic construct
  misc_feature 1..19: note = siRNA sense sequence
  source 1..19: mol_type = other RNA
agttctttcagatacatac

SEQ ID NO: 57375 - RNA, 19 nt, synthetic construct
  misc_feature 1..19: note = siRNA antisense sequence
  source 1..19: mol_type = other RNA
gtatgtatctgaaagaact

SEQ ID NO: 57376 - RNA, 19 nt, synthetic construct
  misc_feature 1..19: note = siRNA sense sequence
  source 1..19: mol_type = other RNA
ctttcagatacatacattc

SEQ ID NO: 57377 - RNA, 19 nt, synthetic construct
  misc_feature 1..19: note = siRNA antisense sequence
  source 1..19: mol_type = other RNA
gaatgtatgtatctgaaag

SEQ ID NO: 57378 - RNA, 19 nt, synthetic construct
  misc_feature 1..19: note = siRNA sense sequence
  source 1..19: mol_type = other RNA
aaattactaggaagtcaag

SEQ ID NO: 57379 - RNA, 19 nt, synthetic construct
  misc_feature 1..19: note = siRNA antisense sequence
  source 1..19: mol_type = other RNA
cttgacttcctagtaattt

SEQ ID NO: 57380 - RNA, 19 nt, synthetic construct
  misc_feature 1..19: note = siRNA sense sequence
  source 1..19: mol_type = other RNA
aattactaggaagtcaaga

SEQ ID NO: 57381 - RNA, 19 nt, synthetic construct
  misc_feature 1..19: note = siRNA antisense sequence
  source 1..19: mol_type = other RNA
tcttgacttcctagtaatt

SEQ ID NO: 57382 - RNA, 19 nt, synthetic construct
  misc_feature 1..19: note = siRNA sense sequence
  source 1..19: mol_type = other RNA
attactaggaagtcaagaa

SEQ ID NO: 57383 - RNA, 19 nt, synthetic construct
  misc_feature 1..19: note = siRNA antisense sequence
  source 1..19: mol_type = other RNA
ttcttgacttcctagtaat

SEQ ID NO: 57384 - RNA, 19 nt, synthetic construct
  misc_feature 1..19: note = siRNA sense sequence
  source 1..19: mol_type = other RNA
ttactaggaagtcaagaat

SEQ ID NO: 57385 - RNA, 19 nt, synthetic construct
  misc_feature 1..19: note = siRNA antisense sequence
  source 1..19: mol_type = other RNA
attcttgacttcctagtaa

SEQ ID NO: 57386 - RNA, 19 nt, synthetic construct
  misc_feature 1..19: note = siRNA sense sequence
  source 1..19: mol_type = other RNA
tactaggaagtcaagaatc

SEQ ID NO: 57387 - RNA, 19 nt, synthetic construct
  misc_feature 1..19: note = siRNA antisense sequence
  source 1..19: mol_type = other RNA
gattcttgacttcctagta

SEQ ID NO: 57388 - RNA, 19 nt, synthetic construct
  misc_feature 1..19: note = siRNA sense sequence
  source 1..19: mol_type = other RNA
actaggaagtcaagaatca

SEQ ID NO: 57389 - RNA, 19 nt, synthetic construct
  misc_feature 1..19: note = siRNA antisense sequence
  source 1..19: mol_type = other RNA
tgattcttgacttcctagt

SEQ ID NO: 57390 - RNA, 19 nt, synthetic construct
  misc_feature 1..19: note = siRNA sense sequence
  source 1..19: mol_type = other RNA
ctaggaagtcaagaatcaa

SEQ ID NO: 57391 - RNA, 19 nt, synthetic construct
  misc_feature 1..19: note = siRNA antisense sequence
  source 1..19: mol_type = other RNA
ttgattcttgacttcctag

SEQ ID NO: 57392 - RNA, 19 nt, synthetic construct
  misc_feature 1..19: note = siRNA sense sequence
  source 1..19: mol_type = other RNA
taggaagtcaagaatcaac

SEQ ID NO: 57393 - RNA, 19 nt, synthetic construct
  misc_feature 1..19: note = siRNA antisense sequence
  source 1..19: mol_type = other RNA
gttgattcttgacttccta

SEQ ID NO: 57394 - RNA, 19 nt, synthetic construct
  misc_feature 1..19: note = siRNA sense sequence
  source 1..19: mol_type = other RNA
aggaagtcaagaatcaact

SEQ ID NO: 57395 - RNA, 19 nt, synthetic construct
  misc_feature 1..19: note = siRNA antisense sequence
  source 1..19: mol_type = other RNA
agttgattcttgacttcct

SEQ ID NO: 57396 - RNA, 19 nt, synthetic construct
  misc_feature 1..19: note = siRNA sense sequence
  source 1..19: mol_type = other RNA
gtcaagaatcaacttaatg

SEQ ID NO: 57397 - RNA, 19 nt, synthetic construct
  misc_feature 1..19: note = siRNA antisense sequence
  source 1..19: mol_type = other RNA
cattaagttgattcttgac

SEQ ID NO: 57398 - RNA, 19 nt, synthetic construct
  misc_feature 1..19: note = siRNA sense sequence
  source 1..19: mol_type = other RNA
aatataaaggaagggtttc

SEQ ID NO: 57399 - RNA, 19 nt, synthetic construct
  misc_feature 1..19: note = siRNA antisense sequence
  source 1..19: mol_type = other RNA
gaaacccttcctttatatt

SEQ ID NO: 57400 - RNA, 19 nt, synthetic construct
  misc_feature 1..19: note = siRNA sense sequence
  source 1..19: mol_type = other RNA
atataaaggaagggtttca

SEQ ID NO: 57401 - RNA, 19 nt, synthetic construct
  misc_feature 1..19: note = siRNA antisense sequence
  source 1..19: mol_type = other RNA
tgaaacccttcctttatat

SEQ ID NO: 57402 - RNA, 19 nt, synthetic construct
  misc_feature 1..19: note = siRNA sense sequence
  source 1..19: mol_type = other RNA
tataaaggaagggtttcat

SEQ ID NO: 57403 - RNA, 19 nt, synthetic construct
  misc_feature 1..19: note = siRNA antisense sequence
  source 1..19: mol_type = other RNA
atgaaacccttcctttata

SEQ ID NO: 57404 - RNA, 19 nt, synthetic construct
  misc_feature 1..19: note = siRNA sense sequence
  source 1..19: mol_type = other RNA
ataaaggaagggtttcata

SEQ ID NO: 57405 - RNA, 19 nt, synthetic construct
  misc_feature 1..19: note = siRNA antisense sequence
  source 1..19: mol_type = other RNA
tatgaaacccttcctttat

SEQ ID NO: 57406 - RNA, 19 nt, synthetic construct
  misc_feature 1..19: note = siRNA sense sequence
  source 1..19: mol_type = other RNA
aaggaagggtttcataaat

SEQ ID NO: 57407 - RNA, 19 nt, synthetic construct
  misc_feature 1..19: note = siRNA antisense sequence
  source 1..19: mol_type = other RNA
atttatgaaacccttcctt

SEQ ID NO: 57408 - RNA, 19 nt, synthetic construct
  misc_feature 1..19: note = siRNA sense sequence
  source 1..19: mol_type = other RNA
aggaagggtttcataaata

SEQ ID NO: 57409 - RNA, 19 nt, synthetic construct
  misc_feature 1..19: note = siRNA antisense sequence
  source 1..19: mol_type = other RNA
tatttatgaaacccttcct

SEQ ID NO: 57410 - RNA, 19 nt, synthetic construct
  misc_feature 1..19: note = siRNA sense sequence
  source 1..19: mol_type = other RNA
ggaagggtttcataaataa

SEQ ID NO: 57411 - RNA, 19 nt, synthetic construct
  misc_feature 1..19: note = siRNA antisense sequence
  source 1..19: mol_type = other RNA
ttatttatgaaacccttcc

SEQ ID NO: 57412 - RNA, 19 nt, synthetic construct
  misc_feature 1..19: note = siRNA sense sequence
  source 1..19: mol_type = other RNA
atctatttatgccaggtga

SEQ ID NO: 57413 - RNA, 19 nt, synthetic construct
  misc_feature 1..19: note = siRNA antisense sequence
  source 1..19: mol_type = other RNA
tcacctggcataaatagat

SEQ ID NO: 57414 - RNA, 19 nt, synthetic construct
  misc_feature 1..19: note = siRNA sense sequence
  source 1..19: mol_type = other RNA
tctatttatgccaggtgac

SEQ ID NO: 57415 - RNA, 19 nt, synthetic construct
  misc_feature 1..19: note = siRNA antisense sequence
  source 1..19: mol_type = other RNA
gtcacctggcataaataga

SEQ ID NO: 57416 - RNA, 19 nt, synthetic construct
  misc_feature 1..19: note = siRNA sense sequence
  source 1..19: mol_type = other RNA
ctatttatgccaggtgact

SEQ ID NO: 57417 - RNA, 19 nt, synthetic construct
  misc_feature 1..19: note = siRNA antisense sequence
  source 1..19: mol_type = other RNA
agtcacctggcataaatag

SEQ ID NO: 57418 - RNA, 19 nt, synthetic construct
  misc_feature 1..19: note = siRNA sense sequence
  source 1..19: mol_type = other RNA
tatttatgccaggtgactt

SEQ ID NO: 57419 - RNA, 19 nt, synthetic construct
  misc_feature 1..19: note = siRNA antisense sequence
  source 1..19: mol_type = other RNA
aagtcacctggcataaata

SEQ ID NO: 57420 - RNA, 19 nt, synthetic construct
  misc_feature 1..19: note = siRNA sense sequence
  source 1..19: mol_type = other RNA
tgccaggtgactttatggg

SEQ ID NO: 57421 - RNA, 19 nt, synthetic construct
  misc_feature 1..19: note = siRNA antisense sequence
  source 1..19: mol_type = other RNA
cccataaagtcacctggca

SEQ ID NO: 57422 - RNA, 19 nt, synthetic construct
  misc_feature 1..19: note = siRNA sense sequence
  source 1..19: mol_type = other RNA
gccaggtgactttatggga

SEQ ID NO: 57423 - RNA, 19 nt, synthetic construct
  misc_feature 1..19: note = siRNA antisense sequence
  source 1..19: mol_type = other RNA
tcccataaagtcacctggc

SEQ ID NO: 57424 - RNA, 19 nt, synthetic construct
  misc_feature 1..19: note = siRNA sense sequence
  source 1..19: mol_type = other RNA
ccaggtgactttatgggaa

SEQ ID NO: 57425 - RNA, 19 nt, synthetic construct
  misc_feature 1..19: note = siRNA antisense sequence
  source 1..19: mol_type = other RNA
ttcccataaagtcacctgg

SEQ ID NO: 57426 - RNA, 19 nt, synthetic construct
  misc_feature 1..19: note = siRNA sense sequence
  source 1..19: mol_type = other RNA
tgcattggtttactgtaat

SEQ ID NO: 57427 - RNA, 19 nt, synthetic construct
  misc_feature 1..19: note = siRNA antisense sequence
  source 1..19: mol_type = other RNA
attacagtaaaccaatgca

SEQ ID NO: 57428 - RNA, 19 nt, synthetic construct
  misc_feature 1..19: note = siRNA sense sequence
  source 1..19: mol_type = other RNA
gcattggtttactgtaatt

SEQ ID NO: 57429 - RNA, 19 nt, synthetic construct
  misc_feature 1..19: note = siRNA antisense sequence
  source 1..19: mol_type = other RNA
aattacagtaaaccaatgc

SEQ ID NO: 57430 - RNA, 19 nt, synthetic construct
  misc_feature 1..19: note = siRNA sense sequence
  source 1..19: mol_type = other RNA
cattggtttactgtaattc

SEQ ID NO: 57431 - RNA, 19 nt, synthetic construct
  misc_feature 1..19: note = siRNA antisense sequence
  source 1..19: mol_type = other RNA
gaattacagtaaaccaatg

SEQ ID NO: 57432 - RNA, 19 nt, synthetic construct
  misc_feature 1..19: note = siRNA sense sequence
  source 1..19: mol_type = other RNA
attggtttactgtaattcg

SEQ ID NO: 57433 - RNA, 19 nt, synthetic construct
  misc_feature 1..19: note = siRNA antisense sequence
  source 1..19: mol_type = other RNA
cgaattacagtaaaccaat

SEQ ID NO: 57434 - RNA, 19 nt, synthetic construct
  misc_feature 1..19: note = siRNA sense sequence
  source 1..19: mol_type = other RNA
ttggtttactgtaattcgg

SEQ ID NO: 57435 - RNA, 19 nt, synthetic construct
  misc_feature 1..19: note = siRNA antisense sequence
  source 1..19: mol_type = other RNA
ccgaattacagtaaaccaa

SEQ ID NO: 57436 - RNA, 19 nt, synthetic construct
  misc_feature 1..19: note = siRNA sense sequence
  source 1..19: mol_type = other RNA
tggtttactgtaattcggg

SEQ ID NO: 57437 - RNA, 19 nt, synthetic construct
  misc_feature 1..19: note = siRNA antisense sequence
  source 1..19: mol_type = other RNA
cccgaattacagtaaacca

SEQ ID NO: 57438 - RNA, 19 nt, synthetic construct
  misc_feature 1..19: note = siRNA sense sequence
  source 1..19: mol_type = other RNA
ggtttactgtaattcgggt

SEQ ID NO: 57439 - RNA, 19 nt, synthetic construct
  misc_feature 1..19: note = siRNA antisense sequence
  source 1..19: mol_type = other RNA
acccgaattacagtaaacc

SEQ ID NO: 57440 - RNA, 19 nt, synthetic construct
  misc_feature 1..19: note = siRNA sense sequence
  source 1..19: mol_type = other RNA
gtttactgtaattcgggtg

SEQ ID NO: 57441 - RNA, 19 nt, synthetic construct
  misc_feature 1..19: note = siRNA antisense sequence
  source 1..19: mol_type = other RNA
cacccgaattacagtaaac

SEQ ID NO: 57442 - RNA, 19 nt, synthetic construct
  misc_feature 1..19: note = siRNA sense sequence
  source 1..19: mol_type = other RNA
tttactgtaattcgggtgg

SEQ ID NO: 57443 - RNA, 19 nt, synthetic construct
  misc_feature 1..19: note = siRNA antisense sequence
  source 1..19: mol_type = other RNA
ccacccgaattacagtaaa

SEQ ID NO: 57444 - RNA, 19 nt, synthetic construct
  misc_feature 1..19: note = siRNA sense sequence
  source 1..19: mol_type = other RNA
ttactgtaattcgggtgga

SEQ ID NO: 57445 - RNA, 19 nt, synthetic construct
  misc_feature 1..19: note = siRNA antisense sequence
  source 1..19: mol_type = other RNA
tccacccgaattacagtaa

SEQ ID NO: 57446 - RNA, 19 nt, synthetic construct
  misc_feature 1..19: note = siRNA sense sequence
  source 1..19: mol_type = other RNA
tactgtaattcgggtggaa

SEQ ID NO: 57447 - RNA, 19 nt, synthetic construct
  misc_feature 1..19: note = siRNA antisense sequence
  source 1..19: mol_type = other RNA
ttccacccgaattacagta

SEQ ID NO: 57448 - RNA, 19 nt, synthetic construct
  misc_feature 1..19: note = siRNA sense sequence
  source 1..19: mol_type = other RNA
acatacatcaatgctcttt

SEQ ID NO: 57449 - RNA, 19 nt, synthetic construct
  misc_feature 1..19: note = siRNA antisense sequence
  source 1..19: mol_type = other RNA
aaagagcattgatgtatgt

SEQ ID NO: 57450 - RNA, 19 nt, synthetic construct
  misc_feature 1..19: note = siRNA sense sequence
  source 1..19: mol_type = other RNA
catacatcaatgctctttt

SEQ ID NO: 57451 - RNA, 19 nt, synthetic construct
  misc_feature 1..19: note = siRNA antisense sequence
  source 1..19: mol_type = other RNA
aaaagagcattgatgtatg

SEQ ID NO: 57452 - RNA, 19 nt, synthetic construct
  misc_feature 1..19: note = siRNA sense sequence
  source 1..19: mol_type = other RNA
aaaatctacctagaagagt

SEQ ID NO: 57453 - RNA, 19 nt, synthetic construct
  misc_feature 1..19: note = siRNA antisense sequence
  source 1..19: mol_type = other RNA
actcttctaggtagatttt

SEQ ID NO: 57454 - RNA, 19 nt, synthetic construct
  misc_feature 1..19: note = siRNA sense sequence
  source 1..19: mol_type = other RNA
aaatctacctagaagagta

SEQ ID NO: 57455 - RNA, 19 nt, synthetic construct
  misc_feature 1..19: note = siRNA antisense sequence
  source 1..19: mol_type = other RNA
tactcttctaggtagattt

SEQ ID NO: 57456 - RNA, 19 nt, synthetic construct
  misc_feature 1..19: note = siRNA sense sequence
  source 1..19: mol_type = other RNA
aatctacctagaagagtaa

SEQ ID NO: 57457 - RNA, 19 nt, synthetic construct
  misc_feature 1..19: note = siRNA antisense sequence
  source 1..19: mol_type = other RNA
ttactcttctaggtagatt

SEQ ID NO: 57458 - RNA, 19 nt, synthetic construct
  misc_feature 1..19: note = siRNA sense sequence
  source 1..19: mol_type = other RNA
atctacctagaagagtaat

SEQ ID NO: 57459 - RNA, 19 nt, synthetic construct
  misc_feature 1..19: note = siRNA antisense sequence
  source 1..19: mol_type = other RNA
attactcttctaggtagat

SEQ ID NO: 57460 - RNA, 19 nt, synthetic construct
  misc_feature 1..19: note = siRNA sense sequence
  source 1..19: mol_type = other RNA
tctacctagaagagtaata

SEQ ID NO: 57461 - RNA, 19 nt, synthetic construct
  misc_feature 1..19: note = siRNA antisense sequence
  source 1..19: mol_type = other RNA
tattactcttctaggtaga

SEQ ID NO: 57462 - RNA, 19 nt, synthetic construct
  misc_feature 1..19: note = siRNA sense sequence
  source 1..19: mol_type = other RNA
ctacctagaagagtaataa

SEQ ID NO: 57463 - RNA, 19 nt, synthetic construct
  misc_feature 1..19: note = siRNA antisense sequence
  source 1..19: mol_type = other RNA
ttattactcttctaggtag

SEQ ID NO: 57464 - RNA, 19 nt, synthetic construct
  misc_feature 1..19: note = siRNA sense sequence
  source 1..19: mol_type = other RNA
cctagaagagtaataaagt

SEQ ID NO: 57465 - RNA, 19 nt, synthetic construct
  misc_feature 1..19: note = siRNA antisense sequence
  source 1..19: mol_type = other RNA
actttattactcttctagg

SEQ ID NO: 57466 - RNA, 19 nt, synthetic construct
  misc_feature 1..19: note = siRNA sense sequence
  source 1..19: mol_type = other RNA
aatggtacagtaaattgtg

SEQ ID NO: 57467 - RNA, 19 nt, synthetic construct
  misc_feature 1..19: note = siRNA antisense sequence
  source 1..19: mol_type = other RNA
cacaatttactgtaccatt

SEQ ID NO: 57468 - RNA, 19 nt, synthetic construct
  misc_feature 1..19: note = siRNA sense sequence
  source 1..19: mol_type = other RNA
atggtacagtaaattgtgc

SEQ ID NO: 57469 - RNA, 19 nt, synthetic construct
  misc_feature 1..19: note = siRNA antisense sequence
  source 1..19: mol_type = other RNA
gcacaatttactgtaccat

SEQ ID NO: 57470 - RNA, 19 nt, synthetic construct
  misc_feature 1..19: note = siRNA sense sequence
  source 1..19: mol_type = other RNA
tggtacagtaaattgtgca

SEQ ID NO: 57471 - RNA, 19 nt, synthetic construct
  misc_feature 1..19: note = siRNA antisense sequence
  source 1..19: mol_type = other RNA
tgcacaatttactgtacca

SEQ ID NO: 57472 - RNA, 19 nt, synthetic construct
  misc_feature 1..19: note = siRNA sense sequence
  source 1..19: mol_type = other RNA
agaagactgaagggtgata

SEQ ID NO: 57473 - RNA, 19 nt, synthetic construct
  misc_feature 1..19: note = siRNA antisense sequence
  source 1..19: mol_type = other RNA
tatcacccttcagtcttct

SEQ ID NO: 57474 - RNA, 19 nt, synthetic construct
  misc_feature 1..19: note = siRNA sense sequence
  source 1..19: mol_type = other RNA
gaagactgaagggtgatac

SEQ ID NO: 57475 - RNA, 19 nt, synthetic construct
  misc_feature 1..19: note = siRNA antisense sequence
  source 1..19: mol_type = other RNA
gtatcacccttcagtcttc

SEQ ID NO: 57476 - RNA, 19 nt, synthetic construct
  misc_feature 1..19: note = siRNA sense sequence
  source 1..19: mol_type = other RNA
aagactgaagggtgatacc

SEQ ID NO: 57477 - RNA, 19 nt, synthetic construct
  misc_feature 1..19: note = siRNA antisense sequence
  source 1..19: mol_type = other RNA
ggtatcacccttcagtctt

SEQ ID NO: 57478 - RNA, 19 nt, synthetic construct
  misc_feature 1..19: note = siRNA sense sequence
  source 1..19: mol_type = other RNA
agactgaagggtgatacct

SEQ ID NO: 57479 - RNA, 19 nt, synthetic construct
  misc_feature 1..19: note = siRNA antisense sequence
  source 1..19: mol_type = other RNA
aggtatcacccttcagtct

SEQ ID NO: 57480 - RNA, 19 nt, synthetic construct
  misc_feature 1..19: note = siRNA sense sequence
  source 1..19: mol_type = other RNA
gactgaagggtgataccta

SEQ ID NO: 57481 - RNA, 19 nt, synthetic construct
  misc_feature 1..19: note = siRNA antisense sequence
  source 1..19: mol_type = other RNA
taggtatcacccttcagtc

SEQ ID NO: 57482 - RNA, 19 nt, synthetic construct
  misc_feature 1..19: note = siRNA sense sequence
  source 1..19: mol_type = other RNA
actgaagggtgatacctaa

SEQ ID NO: 57483 - RNA, 19 nt, synthetic construct
  misc_feature 1..19: note = siRNA antisense sequence
  source 1..19: mol_type = other RNA
ttaggtatcacccttcagt

SEQ ID NO: 57484 - RNA, 19 nt, synthetic construct
  misc_feature 1..19: note = siRNA sense sequence
  source 1..19: mol_type = other RNA
ctgaagggtgatacctaag

SEQ ID NO: 57485 - RNA, 19 nt, synthetic construct
  misc_feature 1..19: note = siRNA antisense sequence
  source 1..19: mol_type = other RNA
cttaggtatcacccttcag

SEQ ID NO: 57486 - RNA, 19 nt, synthetic construct
  misc_feature 1..19: note = siRNA sense sequence
  source 1..19: mol_type = other RNA
tgaagggtgatacctaaga

SEQ ID NO: 57487 - RNA, 19 nt, synthetic construct
  misc_feature 1..19: note = siRNA antisense sequence
  source 1..19: mol_type = other RNA
tcttaggtatcacccttca

SEQ ID NO: 57488 - RNA, 19 nt, synthetic construct
  misc_feature 1..19: note = siRNA sense sequence
  source 1..19: mol_type = other RNA
gaagggtgatacctaagaa

SEQ ID NO: 57489 - RNA, 19 nt, synthetic construct
  misc_feature 1..19: note = siRNA antisense sequence
  source 1..19: mol_type = other RNA
ttcttaggtatcacccttc

SEQ ID NO: 57490 - RNA, 19 nt, synthetic construct
  misc_feature 1..19: note = siRNA sense sequence
  source 1..19: mol_type = other RNA
aaaagggaatattaggcag

SEQ ID NO: 57491 - RNA, 19 nt, synthetic construct
  misc_feature 1..19: note = siRNA antisense sequence
  source 1..19: mol_type = other RNA
ctgcctaatattccctttt

SEQ ID NO: 57492 - RNA, 19 nt, synthetic construct
  misc_feature 1..19: note = siRNA sense sequence
  source 1..19: mol_type = other RNA
aaagggaatattaggcagc

SEQ ID NO: 57493 - RNA, 19 nt, synthetic construct
  misc_feature 1..19: note = siRNA antisense sequence
  source 1..19: mol_type = other RNA
gctgcctaatattcccttt

SEQ ID NO: 57494 - RNA, 19 nt, synthetic construct
  misc_feature 1..19: note = siRNA sense sequence
  source 1..19: mol_type = other RNA
cagtggctgggactttggg

SEQ ID NO: 57495 - RNA, 19 nt, synthetic construct
  misc_feature 1..19: note = siRNA antisense sequence
  source 1..19: mol_type = other RNA
cccaaagtcccagccactg

SEQ ID NO: 57496 - RNA, 19 nt, synthetic construct
  misc_feature 1..19: note = siRNA sense sequence
  source 1..19: mol_type = other RNA
caccagaagccaaggctca

SEQ ID NO: 57497 - RNA, 19 nt, synthetic construct
  misc_feature 1..19: note = siRNA antisense sequence
  source 1..19: mol_type = other RNA
tgagccttggcttctggtg

SEQ ID NO: 57498 - RNA, 19 nt, synthetic construct
  misc_feature 1..19: note = siRNA sense sequence
  source 1..19: mol_type = other RNA
accagaagccaaggctcaa

SEQ ID NO: 57499 - RNA, 19 nt, synthetic construct
  misc_feature 1..19: note = siRNA antisense sequence
  source 1..19: mol_type = other RNA
ttgagccttggcttctggt

SEQ ID NO: 57500 - RNA, 19 nt, synthetic construct
  misc_feature 1..19: note = siRNA sense sequence
  source 1..19: mol_type = other RNA
cagaagccaaggctcaaaa

SEQ ID NO: 57501 - RNA, 19 nt, synthetic construct
  misc_feature 1..19: note = siRNA antisense sequence
  source 1..19: mol_type = other RNA
ttttgagccttggcttctg

SEQ ID NO: 57502 - RNA, 19 nt, synthetic construct
  misc_feature 1..19: note = siRNA sense sequence
  source 1..19: mol_type = other RNA
ccagaagtcagcagtgtca

SEQ ID NO: 57503 - RNA, 19 nt, synthetic construct
  misc_feature 1..19: note = siRNA antisense sequence
  source 1..19: mol_type = other RNA
tgacactgctgacttctgg

SEQ ID NO: 57504 - RNA, 19 nt, synthetic construct
  misc_feature 1..19: note = siRNA sense sequence
  source 1..19: mol_type = other RNA
cagaagtcagcagtgtcag

SEQ ID NO: 57505 - RNA, 19 nt, synthetic construct
  misc_feature 1..19: note = siRNA antisense sequence
  source 1..19: mol_type = other RNA
ctgacactgctgacttctg

SEQ ID NO: 57506 - RNA, 19 nt, synthetic construct
  misc_feature 1..19: note = siRNA sense sequence
  source 1..19: mol_type = other RNA
agaagtcagcagtgtcagg

SEQ ID NO: 57507 - RNA, 19 nt, synthetic construct
  misc_feature 1..19: note = siRNA antisense sequence
  source 1..19: mol_type = other RNA
cctgacactgctgacttct

SEQ ID NO: 57508 - RNA, 19 nt, synthetic construct
  misc_feature 1..19: note = siRNA sense sequence
  source 1..19: mol_type = other RNA
attagtttattatgctccc

SEQ ID NO: 57509 - RNA, 19 nt, synthetic construct
  misc_feature 1..19: note = siRNA antisense sequence
  source 1..19: mol_type = other RNA
gggagcataataaactaat

SEQ ID NO: 57510 - RNA, 19 nt, synthetic construct
  misc_feature 1..19: note = siRNA sense sequence
  source 1..19: mol_type = other RNA
ttagtttattatgctccct

SEQ ID NO: 57511 - RNA, 19 nt, synthetic construct
  misc_feature 1..19: note = siRNA antisense sequence
  source 1..19: mol_type = other RNA
agggagcataataaactaa

SEQ ID NO: 57512 - RNA, 19 nt, synthetic construct
  misc_feature 1..19: note = siRNA sense sequence
  source 1..19: mol_type = other RNA
tagtttattatgctccctt

SEQ ID NO: 57513 - RNA, 19 nt, synthetic construct
  misc_feature 1..19: note = siRNA antisense sequence
  source 1..19: mol_type = other RNA
aagggagcataataaacta

SEQ ID NO: 57514 - RNA, 19 nt, synthetic construct
  misc_feature 1..19: note = siRNA sense sequence
  source 1..19: mol_type = other RNA
agtttattatgctcccttt

SEQ ID NO: 57515 - RNA, 19 nt, synthetic construct
  misc_feature 1..19: note = siRNA antisense sequence
  source 1..19: mol_type = other RNA
aaagggagcataataaact

SEQ ID NO: 57516 - RNA, 19 nt, synthetic construct
  misc_feature 1..19: note = siRNA sense sequence
  source 1..19: mol_type = other RNA
gtttattatgctcccttta

SEQ ID NO: 57517 - RNA, 19 nt, synthetic construct
  misc_feature 1..19: note = siRNA antisense sequence
  source 1..19: mol_type = other RNA
taaagggagcataataaac

SEQ ID NO: 57518 - RNA, 19 nt, synthetic construct
  misc_feature 1..19: note = siRNA sense sequence
  source 1..19: mol_type = other RNA
tttattatgctccctttag

SEQ ID NO: 57519 - RNA, 19 nt, synthetic construct
  misc_feature 1..19: note = siRNA antisense sequence
  source 1..19: mol_type = other RNA
ctaaagggagcataataaa

SEQ ID NO: 57520 - RNA, 19 nt, synthetic construct
  misc_feature 1..19: note = siRNA sense sequence
  source 1..19: mol_type = other RNA
ttattatgctccctttagc

SEQ ID NO: 57521 - RNA, 19 nt, synthetic construct
  misc_feature 1..19: note = siRNA antisense sequence
  source 1..19: mol_type = other RNA
gctaaagggagcataataa

SEQ ID NO: 57522 - RNA, 19 nt, synthetic construct
  misc_feature 1..19: note = siRNA sense sequence
  source 1..19: mol_type = other RNA
tattatgctccctttagct

SEQ ID NO: 57523 - RNA, 19 nt, synthetic construct
  misc_feature 1..19: note = siRNA antisense sequence
  source 1..19: mol_type = other RNA
agctaaagggagcataata

SEQ ID NO: 57524 - RNA, 19 nt, synthetic construct
  misc_feature 1..19: note = siRNA sense sequence
  source 1..19: mol_type = other RNA
attatgctccctttagctc

SEQ ID NO: 57525 - RNA, 19 nt, synthetic construct
  misc_feature 1..19: note = siRNA antisense sequence
  source 1..19: mol_type = other RNA
gagctaaagggagcataat

SEQ ID NO: 57526 - RNA, 19 nt, synthetic construct
  misc_feature 1..19: note = siRNA sense sequence
  source 1..19: mol_type = other RNA
ttatgctccctttagctca

SEQ ID NO: 57527 - RNA, 19 nt, synthetic construct
  misc_feature 1..19: note = siRNA antisense sequence
  source 1..19: mol_type = other RNA
tgagctaaagggagcataa

SEQ ID NO: 57528 - RNA, 19 nt, synthetic construct
  misc_feature 1..19: note = siRNA sense sequence
  source 1..19: mol_type = other RNA
tatgctccctttagctcac

SEQ ID NO: 57529 - RNA, 19 nt, synthetic construct
  misc_feature 1..19: note = siRNA antisense sequence
  source 1..19: mol_type = other RNA
gtgagctaaagggagcata

SEQ ID NO: 57530 - RNA, 19 nt, synthetic construct
  misc_feature 1..19: note = siRNA sense sequence
  source 1..19: mol_type = other RNA
atgctccctttagctcaca

SEQ ID NO: 57531 - RNA, 19 nt, synthetic construct
  misc_feature 1..19: note = siRNA antisense sequence
  source 1..19: mol_type = other RNA
tgtgagctaaagggagcat

SEQ ID NO: 57532 - RNA, 19 nt, synthetic construct
  misc_feature 1..19: note = siRNA sense sequence
  source 1..19: mol_type = other RNA
gctccagttttgtttcaag

SEQ ID NO: 57533 - RNA, 19 nt, synthetic construct
  misc_feature 1..19: note = siRNA antisense sequence
  source 1..19: mol_type = other RNA
cttgaaacaaaactggagc

SEQ ID NO: 57534 - RNA, 19 nt, synthetic construct
  misc_feature 1..19: note = siRNA sense sequence
  source 1..19: mol_type = other RNA
ctccagttttgtttcaagg

SEQ ID NO: 57535 - RNA, 19 nt, synthetic construct
  misc_feature 1..19: note = siRNA antisense sequence
  source 1..19: mol_type = other RNA
ccttgaaacaaaactggag

SEQ ID NO: 57536 - RNA, 19 nt, synthetic construct
  misc_feature 1..19: note = siRNA sense sequence
  source 1..19: mol_type = other RNA
ccagttttgtttcaaggct

SEQ ID NO: 57537 - RNA, 19 nt, synthetic construct
  misc_feature 1..19: note = siRNA antisense sequence
  source 1..19: mol_type = other RNA
agccttgaaacaaaactgg

SEQ ID NO: 57538 - RNA, 19 nt, synthetic construct
  misc_feature 1..19: note = siRNA sense sequence
  source 1..19: mol_type = other RNA
agttttgtttcaaggcttt

SEQ ID NO: 57539 - RNA, 19 nt, synthetic construct
  misc_feature 1..19: note = siRNA antisense sequence
  source 1..19: mol_type = other RNA
aaagccttgaaacaaaact

SEQ ID NO: 57540 - RNA, 19 nt, synthetic construct
  misc_feature 1..19: note = siRNA sense sequence
  source 1..19: mol_type = other RNA
gttttgtttcaaggctttc

SEQ ID NO: 57541 - RNA, 19 nt, synthetic construct
  misc_feature 1..19: note = siRNA antisense sequence
  source 1..19: mol_type = other RNA
gaaagccttgaaacaaaac

SEQ ID NO: 57542 - RNA, 19 nt, synthetic construct
  misc_feature 1..19: note = siRNA sense sequence
  source 1..19: mol_type = other RNA
tttgtttcaaggctttctt

SEQ ID NO: 57543 - RNA, 19 nt, synthetic construct
  misc_feature 1..19: note = siRNA antisense sequence
  source 1..19: mol_type = other RNA
aagaaagccttgaaacaaa

SEQ ID NO: 57544 - RNA, 19 nt, synthetic construct
  misc_feature 1..19: note = siRNA sense sequence
  source 1..19: mol_type = other RNA
aacttatttatggcctctc

SEQ ID NO: 57545 - RNA, 19 nt, synthetic construct
  misc_feature 1..19: note = siRNA antisense sequence
  source 1..19: mol_type = other RNA
gagaggccataaataagtt

SEQ ID NO: 57546 - RNA, 19 nt, synthetic construct
  misc_feature 1..19: note = siRNA sense sequence
  source 1..19: mol_type = other RNA
tatttatggcctctcctgc

SEQ ID NO: 57547 - RNA, 19 nt, synthetic construct
  misc_feature 1..19: note = siRNA antisense sequence
  source 1..19: mol_type = other RNA
gcaggagaggccataaata

SEQ ID NO: 57548 - RNA, 19 nt, synthetic construct
  misc_feature 1..19: note = siRNA sense sequence
  source 1..19: mol_type = other RNA
atttatggcctctcctgcc

SEQ ID NO: 57549 - RNA, 19 nt, synthetic construct
  misc_feature 1..19: note = siRNA antisense sequence
  source 1..19: mol_type = other RNA
ggcaggagaggccataaat

SEQ ID NO: 57550 - RNA, 19 nt, synthetic construct
  misc_feature 1..19: note = siRNA sense sequence
  source 1..19: mol_type = other RNA
tttatggcctctcctgccc

SEQ ID NO: 57551 - RNA, 19 nt, synthetic construct
  misc_feature 1..19: note = siRNA antisense sequence
  source 1..19: mol_type = other RNA
gggcaggagaggccataaa

SEQ ID NO: 57552 - RNA, 19 nt, synthetic construct
  misc_feature 1..19: note = siRNA sense sequence
  source 1..19: mol_type = other RNA
caaggcattgatggcccaa

SEQ ID NO: 57553 - RNA, 19 nt, synthetic construct
  misc_feature 1..19: note = siRNA antisense sequence
  source 1..19: mol_type = other RNA
ttgggccatcaatgccttg

SEQ ID NO: 57554 - RNA, 19 nt, synthetic construct
  misc_feature 1..19: note = siRNA sense sequence
  source 1..19: mol_type = other RNA
aaggcattgatggcccaaa

SEQ ID NO: 57555 - RNA, 19 nt, synthetic construct
  misc_feature 1..19: note = siRNA antisense sequence
  source 1..19: mol_type = other RNA
tttgggccatcaatgcctt

SEQ ID NO: 57556 - RNA, 19 nt, synthetic construct
  misc_feature 1..19: note = siRNA sense sequence
  source 1..19: mol_type = other RNA
aggcattgatggcccaaaa

SEQ ID NO: 57557 - RNA, 19 nt, synthetic construct
  misc_feature 1..19: note = siRNA antisense sequence
  source 1..19: mol_type = other RNA
ttttgggccatcaatgcct

SEQ ID NO: 57558 - RNA, 19 nt, synthetic construct
  misc_feature 1..19: note = siRNA sense sequence
  source 1..19: mol_type = other RNA
ggcattgatggcccaaaat

SEQ ID NO: 57559 - RNA, 19 nt, synthetic construct
  misc_feature 1..19: note = siRNA antisense sequence
  source 1..19: mol_type = other RNA
attttgggccatcaatgcc

SEQ ID NO: 57560 - RNA, 19 nt, synthetic construct
  misc_feature 1..19: note = siRNA sense sequence
  source 1..19: mol_type = other RNA
tgatggcccaaaatgatag

SEQ ID NO: 57561 - RNA, 19 nt, synthetic construct
  misc_feature 1..19: note = siRNA antisense sequence
  source 1..19: mol_type = other RNA
ctatcattttgggccatca

SEQ ID NO: 57562 - RNA, 19 nt, synthetic construct
  misc_feature 1..19: note = siRNA sense sequence
  source 1..19: mol_type = other RNA
gatggcccaaaatgatagt

SEQ ID NO: 57563 - RNA, 19 nt, synthetic construct
  misc_feature 1..19: note = siRNA antisense sequence
  source 1..19: mol_type = other RNA
actatcattttgggccatc

SEQ ID NO: 57564 - RNA, 19 nt, synthetic construct
  misc_feature 1..19: note = siRNA sense sequence
  source 1..19: mol_type = other RNA
atggcccaaaatgatagtc

SEQ ID NO: 57565 - RNA, 19 nt, synthetic construct
  misc_feature 1..19: note = siRNA antisense sequence
  source 1..19: mol_type = other RNA
gactatcattttgggccat

SEQ ID NO: 57566 - RNA, 19 nt, synthetic construct
  misc_feature 1..19: note = siRNA sense sequence
  source 1..19: mol_type = other RNA
tggcccaaaatgatagtca

SEQ ID NO: 57567 - RNA, 19 nt, synthetic construct
  misc_feature 1..19: note = siRNA antisense sequence
  source 1..19: mol_type = other RNA
tgactatcattttgggcca

SEQ ID NO: 57568 - RNA, 19 nt, synthetic construct
  misc_feature 1..19: note = siRNA sense sequence
  source 1..19: mol_type = other RNA
agtcatttccctatcatag

SEQ ID NO: 57569 - RNA, 19 nt, synthetic construct
  misc_feature 1..19: note = siRNA antisense sequence
  source 1..19: mol_type = other RNA
ctatgatagggaaatgact

SEQ ID NO: 57570 - RNA, 19 nt, synthetic construct
  misc_feature 1..19: note = siRNA sense sequence
  source 1..19: mol_type = other RNA
gtcatttccctatcatagt

SEQ ID NO: 57571 - RNA, 19 nt, synthetic construct
  misc_feature 1..19: note = siRNA antisense sequence
  source 1..19: mol_type = other RNA
actatgatagggaaatgac

SEQ ID NO: 57572 - RNA, 19 nt, synthetic construct
  misc_feature 1..19: note = siRNA sense sequence
  source 1..19: mol_type = other RNA
tcatttccctatcatagtc

SEQ ID NO: 57573 - RNA, 19 nt, synthetic construct
  misc_feature 1..19: note = siRNA antisense sequence
  source 1..19: mol_type = other RNA
gactatgatagggaaatga

SEQ ID NO: 57574 - RNA, 19 nt, synthetic construct
  misc_feature 1..19: note = siRNA sense sequence
  source 1..19: mol_type = other RNA
catttccctatcatagtcc

SEQ ID NO: 57575 - RNA, 19 nt, synthetic construct
  misc_feature 1..19: note = siRNA antisense sequence
  source 1..19: mol_type = other RNA
ggactatgatagggaaatg

SEQ ID NO: 57576 - RNA, 19 nt, synthetic construct
  misc_feature 1..19: note = siRNA sense sequence
  source 1..19: mol_type = other RNA
atttccctatcatagtcca

SEQ ID NO: 57577 - RNA, 19 nt, synthetic construct
  misc_feature 1..19: note = siRNA antisense sequence
  source 1..19: mol_type = other RNA
tggactatgatagggaaat

SEQ ID NO: 57578 - RNA, 19 nt, synthetic construct
  misc_feature 1..19: note = siRNA sense sequence
  source 1..19: mol_type = other RNA
ccctatcatagtccaggct

SEQ ID NO: 57579 - RNA, 19 nt, synthetic construct
  misc_feature 1..19: note = siRNA antisense sequence
  source 1..19: mol_type = other RNA
agcctggactatgataggg

SEQ ID NO: 57580 - RNA, 19 nt, synthetic construct
  misc_feature 1..19: note = siRNA sense sequence
  source 1..19: mol_type = other RNA
cctatcatagtccaggctc

SEQ ID NO: 57581 - RNA, 19 nt, synthetic construct
  misc_feature 1..19: note = siRNA antisense sequence
  source 1..19: mol_type = other RNA
gagcctggactatgatagg

SEQ ID NO: 57582 - RNA, 19 nt, synthetic construct
  misc_feature 1..19: note = siRNA sense sequence
  source 1..19: mol_type = other RNA
tcatagtccaggctccact

SEQ ID NO: 57583 - RNA, 19 nt, synthetic construct
  misc_feature 1..19: note = siRNA antisense sequence
  source 1..19: mol_type = other RNA
agtggagcctggactatga

SEQ ID NO: 57584 - RNA, 19 nt, synthetic construct
  misc_feature 1..19: note = siRNA sense sequence
  source 1..19: mol_type = other RNA
atatactgggacacgaaga

SEQ ID NO: 57585 - RNA, 19 nt, synthetic construct
  misc_feature 1..19: note = siRNA antisense sequence
  source 1..19: mol_type = other RNA
tcttcgtgtcccagtatat

SEQ ID NO: 57586 - RNA, 19 nt, synthetic construct
  misc_feature 1..19: note = siRNA sense sequence
  source 1..19: mol_type = other RNA
tatactgggacacgaagac

SEQ ID NO: 57587 - RNA, 19 nt, synthetic construct
  misc_feature 1..19: note = siRNA antisense sequence
  source 1..19: mol_type = other RNA
gtcttcgtgtcccagtata

SEQ ID NO: 57588 - RNA, 19 nt, synthetic construct
  misc_feature 1..19: note = siRNA sense sequence
  source 1..19: mol_type = other RNA
atactgggacacgaagact

SEQ ID NO: 57589 - RNA, 19 nt, synthetic construct
  misc_feature 1..19: note = siRNA antisense sequence
  source 1..19: mol_type = other RNA
agtcttcgtgtcccagtat

SEQ ID NO: 57590 - RNA, 19 nt, synthetic construct
  misc_feature 1..19: note = siRNA sense sequence
  source 1..19: mol_type = other RNA
tactgggacacgaagacta

SEQ ID NO: 57591 - RNA, 19 nt, synthetic construct
  misc_feature 1..19: note = siRNA antisense sequence
  source 1..19: mol_type = other RNA
tagtcttcgtgtcccagta

SEQ ID NO: 57592 - RNA, 19 nt, synthetic construct
  misc_feature 1..19: note = siRNA sense sequence
  source 1..19: mol_type = other RNA
actgggacacgaagactaa

SEQ ID NO: 57593 - RNA, 19 nt, synthetic construct
  misc_feature 1..19: note = siRNA antisense sequence
  source 1..19: mol_type = other RNA
ttagtcttcgtgtcccagt

SEQ ID NO: 57594 - RNA, 19 nt, synthetic construct
  misc_feature 1..19: note = siRNA sense sequence
  source 1..19: mol_type = other RNA
ctgggacacgaagactaag

SEQ ID NO: 57595 - RNA, 19 nt, synthetic construct
  misc_feature 1..19: note = siRNA antisense sequence
  source 1..19: mol_type = other RNA
cttagtcttcgtgtcccag

SEQ ID NO: 57596 - RNA, 19 nt, synthetic construct
  misc_feature 1..19: note = siRNA sense sequence
  source 1..19: mol_type = other RNA
tgggacacgaagactaaga

SEQ ID NO: 57597 - RNA, 19 nt, synthetic construct
  misc_feature 1..19: note = siRNA antisense sequence
  source 1..19: mol_type = other RNA
tcttagtcttcgtgtccca

SEQ ID NO: 57598 - RNA, 19 nt, synthetic construct
  misc_feature 1..19: note = siRNA sense sequence
  source 1..19: mol_type = other RNA
acacgaagactaagattca

SEQ ID NO: 57599 - RNA, 19 nt, synthetic construct
  misc_feature 1..19: note = siRNA antisense sequence
  source 1..19: mol_type = other RNA
tgaatcttagtcttcgtgt

SEQ ID NO: 57600 - RNA, 19 nt, synthetic construct
  misc_feature 1..19: note = siRNA sense sequence
  source 1..19: mol_type = other RNA
cctggactgactcccaaga

SEQ ID NO: 57601 - RNA, 19 nt, synthetic construct
  misc_feature 1..19: note = siRNA antisense sequence
  source 1..19: mol_type = other RNA
tcttgggagtcagtccagg

SEQ ID NO: 57602 - RNA, 19 nt, synthetic construct
  misc_feature 1..19: note = siRNA sense sequence
  source 1..19: mol_type = other RNA
ctggactgactcccaagaa

SEQ ID NO: 57603 - RNA, 19 nt, synthetic construct
  misc_feature 1..19: note = siRNA antisense sequence
  source 1..19: mol_type = other RNA
ttcttgggagtcagtccag

SEQ ID NO: 57604 - RNA, 19 nt, synthetic construct
  misc_feature 1..19: note = siRNA sense sequence
  source 1..19: mol_type = other RNA
ggtcgaggcagcttcatgc

SEQ ID NO: 57605 - RNA, 19 nt, synthetic construct
  misc_feature 1..19: note = siRNA antisense sequence
  source 1..19: mol_type = other RNA
gcatgaagctgcctcgacc

SEQ ID NO: 57606 - RNA, 19 nt, synthetic construct
  misc_feature 1..19: note = siRNA sense sequence
  source 1..19: mol_type = other RNA
agaatccatattactaagc

SEQ ID NO: 57607 - RNA, 19 nt, synthetic construct
  misc_feature 1..19: note = siRNA antisense sequence
  source 1..19: mol_type = other RNA
gcttagtaatatggattct

SEQ ID NO: 57608 - RNA, 19 nt, synthetic construct
  misc_feature 1..19: note = siRNA sense sequence
  source 1..19: mol_type = other RNA
gaatccatattactaagca

SEQ ID NO: 57609 - RNA, 19 nt, synthetic construct
  misc_feature 1..19: note = siRNA antisense sequence
  source 1..19: mol_type = other RNA
tgcttagtaatatggattc

SEQ ID NO: 57610 - RNA, 19 nt, synthetic construct
  misc_feature 1..19: note = siRNA sense sequence
  source 1..19: mol_type = other RNA
aatccatattactaagcag

SEQ ID NO: 57611 - RNA, 19 nt, synthetic construct
  misc_feature 1..19: note = siRNA antisense sequence
  source 1..19: mol_type = other RNA
ctgcttagtaatatggatt

SEQ ID NO: 57612 - RNA, 19 nt, synthetic construct
  misc_feature 1..19: note = siRNA sense sequence
  source 1..19: mol_type = other RNA
aactaggcatgttcattca

SEQ ID NO: 57613 - RNA, 19 nt, synthetic construct
  misc_feature 1..19: note = siRNA antisense sequence
  source 1..19: mol_type = other RNA
tgaatgaacatgcctagtt

SEQ ID NO: 57614 - RNA, 19 nt, synthetic construct
  misc_feature 1..19: note = siRNA sense sequence
  source 1..19: mol_type = other RNA
actaggcatgttcattcat

SEQ ID NO: 57615 - RNA, 19 nt, synthetic construct
  misc_feature 1..19: note = siRNA antisense sequence
  source 1..19: mol_type = other RNA
atgaatgaacatgcctagt

SEQ ID NO: 57616 - RNA, 19 nt, synthetic construct
  misc_feature 1..19: note = siRNA sense sequence
  source 1..19: mol_type = other RNA
aggcatgttcattcattgc

SEQ ID NO: 57617 - RNA, 19 nt, synthetic construct
  misc_feature 1..19: note = siRNA antisense sequence
  source 1..19: mol_type = other RNA
gcaatgaatgaacatgcct

SEQ ID NO: 57618 - RNA, 19 nt, synthetic construct
  misc_feature 1..19: note = siRNA sense sequence
  source 1..19: mol_type = other RNA
aaagcattccaatgttcct

SEQ ID NO: 57619 - RNA, 19 nt, synthetic construct
  misc_feature 1..19: note = siRNA antisense sequence
  source 1..19: mol_type = other RNA
aggaacattggaatgcttt

SEQ ID NO: 57620 - RNA, 19 nt, synthetic construct
  misc_feature 1..19: note = siRNA sense sequence
  source 1..19: mol_type = other RNA
aagcattccaatgttccta

SEQ ID NO: 57621 - RNA, 19 nt, synthetic construct
  misc_feature 1..19: note = siRNA antisense sequence
  source 1..19: mol_type = other RNA
taggaacattggaatgctt

SEQ ID NO: 57622 - RNA, 19 nt, synthetic construct
  misc_feature 1..19: note = siRNA sense sequence
  source 1..19: mol_type = other RNA
agcattccaatgttcctac

SEQ ID NO: 57623 - RNA, 19 nt, synthetic construct
  misc_feature 1..19: note = siRNA antisense sequence
  source 1..19: mol_type = other RNA
gtaggaacattggaatgct

SEQ ID NO: 57624 - RNA, 19 nt, synthetic construct
  misc_feature 1..19: note = siRNA sense sequence
  source 1..19: mol_type = other RNA
gcattccaatgttcctact

SEQ ID NO: 57625 - RNA, 19 nt, synthetic construct
  misc_feature 1..19: note = siRNA antisense sequence
  source 1..19: mol_type = other RNA
agtaggaacattggaatgc

SEQ ID NO: 57626 - RNA, 19 nt, synthetic construct
  misc_feature 1..19: note = siRNA sense sequence
  source 1..19: mol_type = other RNA
cattccaatgttcctactt

SEQ ID NO: 57627 - RNA, 19 nt, synthetic construct
  misc_feature 1..19: note = siRNA antisense sequence
  source 1..19: mol_type = other RNA
aagtaggaacattggaatg

SEQ ID NO: 57628 - RNA, 19 nt, synthetic construct
  misc_feature 1..19: note = siRNA sense sequence
  source 1..19: mol_type = other RNA
caattaaaggtgtcatcac

SEQ ID NO: 57629 - RNA, 19 nt, synthetic construct
  misc_feature 1..19: note = siRNA antisense sequence
  source 1..19: mol_type = other RNA
gtgatgacacctttaattg

SEQ ID NO: 57630 - RNA, 19 nt, synthetic construct
  misc_feature 1..19: note = siRNA sense sequence
  source 1..19: mol_type = other RNA
aattaaaggtgtcatcaca

SEQ ID NO: 57631 - RNA, 19 nt, synthetic construct
  misc_feature 1..19: note = siRNA antisense sequence
  source 1..19: mol_type = other RNA
tgtgatgacacctttaatt

SEQ ID NO: 57632 - RNA, 19 nt, synthetic construct
  misc_feature 1..19: note = siRNA sense sequence
  source 1..19: mol_type = other RNA
attaaaggtgtcatcacag

SEQ ID NO: 57633 - RNA, 19 nt, synthetic construct
  misc_feature 1..19: note = siRNA antisense sequence
  source 1..19: mol_type = other RNA
ctgtgatgacacctttaat

SEQ ID NO: 57634 - RNA, 19 nt, synthetic construct
  misc_feature 1..19: note = siRNA sense sequence
  source 1..19: mol_type = other RNA
ttaaaggtgtcatcacagc

SEQ ID NO: 57635 - RNA, 19 nt, synthetic construct
  misc_feature 1..19: note = siRNA antisense sequence
  source 1..19: mol_type = other RNA
gctgtgatgacacctttaa

SEQ ID NO: 57636 - RNA, 19 nt, synthetic construct
  misc_feature 1..19: note = siRNA sense sequence
  source 1..19: mol_type = other RNA
aaaggtgtcatcacagcac

SEQ ID NO: 57637 - RNA, 19 nt, synthetic construct
  misc_feature 1..19: note = siRNA antisense sequence
  source 1..19: mol_type = other RNA
gtgctgtgatgacaccttt

SEQ ID NO: 57638 - RNA, 19 nt, synthetic construct
  misc_feature 1..19: note = siRNA sense sequence
  source 1..19: mol_type = other RNA
tgtcatcacagcactgtat

SEQ ID NO: 57639 - RNA, 19 nt, synthetic construct
  misc_feature 1..19: note = siRNA antisense sequence
  source 1..19: mol_type = other RNA
atacagtgctgtgatgaca

SEQ ID NO: 57640 - RNA, 19 nt, synthetic construct
  misc_feature 1..19: note = siRNA sense sequence
  source 1..19: mol_type = other RNA
gtcatcacagcactgtatg

SEQ ID NO: 57641 - RNA, 19 nt, synthetic construct
  misc_feature 1..19: note = siRNA antisense sequence
  source 1..19: mol_type = other RNA
catacagtgctgtgatgac

SEQ ID NO: 57642 - RNA, 19 nt, synthetic construct
  misc_feature 1..19: note = siRNA sense sequence
  source 1..19: mol_type = other RNA
tcatcacagcactgtatgt

SEQ ID NO: 57643 - RNA, 19 nt, synthetic construct
  misc_feature 1..19: note = siRNA antisense sequence
  source 1..19: mol_type = other RNA
acatacagtgctgtgatga

SEQ ID NO: 57644 - RNA, 19 nt, synthetic construct
  misc_feature 1..19: note = siRNA sense sequence
  source 1..19: mol_type = other RNA
catcacagcactgtatgta

SEQ ID NO: 57645 - RNA, 19 nt, synthetic construct
  misc_feature 1..19: note = siRNA antisense sequence
  source 1..19: mol_type = other RNA
tacatacagtgctgtgatg

SEQ ID NO: 57646 - RNA, 19 nt, synthetic construct
  misc_feature 1..19: note = siRNA sense sequence
  source 1..19: mol_type = other RNA
cacagcactgtatgtaata

SEQ ID NO: 57647 - RNA, 19 nt, synthetic construct
  misc_feature 1..19: note = siRNA antisense sequence
  source 1..19: mol_type = other RNA
tattacatacagtgctgtg

SEQ ID NO: 57648 - RNA, 19 nt, synthetic construct
  misc_feature 1..19: note = siRNA sense sequence
  source 1..19: mol_type = other RNA
aagctaaatatccaatgag

SEQ ID NO: 57649 - RNA, 19 nt, synthetic construct
  misc_feature 1..19: note = siRNA antisense sequence
  source 1..19: mol_type = other RNA
ctcattggatatttagctt

SEQ ID NO: 57650 - RNA, 19 nt, synthetic construct
  misc_feature 1..19: note = siRNA sense sequence
  source 1..19: mol_type = other RNA
gatgggattgaatgcatag

SEQ ID NO: 57651 - RNA, 19 nt, synthetic construct
  misc_feature 1..19: note = siRNA antisense sequence
  source 1..19: mol_type = other RNA
ctatgcattcaatcccatc

SEQ ID NO: 57652 - RNA, 19 nt, synthetic construct
  misc_feature 1..19: note = siRNA sense sequence
  source 1..19: mol_type = other RNA
atgggattgaatgcataga

SEQ ID NO: 57653 - RNA, 19 nt, synthetic construct
  misc_feature 1..19: note = siRNA antisense sequence
  source 1..19: mol_type = other RNA
tctatgcattcaatcccat

SEQ ID NO: 57654 - RNA, 19 nt, synthetic construct
  misc_feature 1..19: note = siRNA sense sequence
  source 1..19: mol_type = other RNA
tgggattgaatgcatagat

SEQ ID NO: 57655 - RNA, 19 nt, synthetic construct
  misc_feature 1..19: note = siRNA antisense sequence
  source 1..19: mol_type = other RNA
atctatgcattcaatccca

SEQ ID NO: 57656 - RNA, 19 nt, synthetic construct
  misc_feature 1..19: note = siRNA sense sequence
  source 1..19: mol_type = other RNA
gggattgaatgcatagatt

SEQ ID NO: 57657 - RNA, 19 nt, synthetic construct
  misc_feature 1..19: note = siRNA antisense sequence
  source 1..19: mol_type = other RNA
aatctatgcattcaatccc

SEQ ID NO: 57658 - RNA, 19 nt, synthetic construct
  misc_feature 1..19: note = siRNA sense sequence
  source 1..19: mol_type = other RNA
ggattgaatgcatagatta

SEQ ID NO: 57659 - RNA, 19 nt, synthetic construct
  misc_feature 1..19: note = siRNA antisense sequence
  source 1..19: mol_type = other RNA
taatctatgcattcaatcc

SEQ ID NO: 57660 - RNA, 19 nt, synthetic construct
  misc_feature 1..19: note = siRNA sense sequence
  source 1..19: mol_type = other RNA
atagattatggtatgtgca

SEQ ID NO: 57661 - RNA, 19 nt, synthetic construct
  misc_feature 1..19: note = siRNA antisense sequence
  source 1..19: mol_type = other RNA
tgcacataccataatctat

SEQ ID NO: 57662 - RNA, 19 nt, synthetic construct
  misc_feature 1..19: note = siRNA sense sequence
  source 1..19: mol_type = other RNA
atggtatgtgcatatgctg

SEQ ID NO: 57663 - RNA, 19 nt, synthetic construct
  misc_feature 1..19: note = siRNA antisense sequence
  source 1..19: mol_type = other RNA
cagcatatgcacataccat

SEQ ID NO: 57664 - RNA, 19 nt, synthetic construct
  misc_feature 1..19: note = siRNA sense sequence
  source 1..19: mol_type = other RNA
tatgtgcatatgctggtat

SEQ ID NO: 57665 - RNA, 19 nt, synthetic construct
  misc_feature 1..19: note = siRNA antisense sequence
  source 1..19: mol_type = other RNA
ataccagcatatgcacata

SEQ ID NO: 57666 - RNA, 19 nt, synthetic construct
  misc_feature 1..19: note = siRNA sense sequence
  source 1..19: mol_type = other RNA
atgtgcatatgctggtata

SEQ ID NO: 57667 - RNA, 19 nt, synthetic construct
  misc_feature 1..19: note = siRNA antisense sequence
  source 1..19: mol_type = other RNA
tataccagcatatgcacat

SEQ ID NO: 57668 - RNA, 19 nt, synthetic construct
  misc_feature 1..19: note = siRNA sense sequence
  source 1..19: mol_type = other RNA
tgtgcatatgctggtatag

SEQ ID NO: 57669 - RNA, 19 nt, synthetic construct
  misc_feature 1..19: note = siRNA antisense sequence
  source 1..19: mol_type = other RNA
ctataccagcatatgcaca

SEQ ID NO: 57670 - RNA, 19 nt, synthetic construct
  misc_feature 1..19: note = siRNA sense sequence
  source 1..19: mol_type = other RNA
gtgcatatgctggtatagt

SEQ ID NO: 57671 - RNA, 19 nt, synthetic construct
  misc_feature 1..19: note = siRNA antisense sequence
  source 1..19: mol_type = other RNA
actataccagcatatgcac

SEQ ID NO: 57672 - RNA, 19 nt, synthetic construct
  misc_feature 1..19: note = siRNA sense sequence
  source 1..19: mol_type = other RNA
tgcatatgctggtatagtc

SEQ ID NO: 57673 - RNA, 19 nt, synthetic construct
  misc_feature 1..19: note = siRNA antisense sequence
  source 1..19: mol_type = other RNA
gactataccagcatatgca

SEQ ID NO: 57674 - RNA, 19 nt, synthetic construct
  misc_feature 1..19: note = siRNA sense sequence
  source 1..19: mol_type = other RNA
gcatatgctggtatagtct

SEQ ID NO: 57675 - RNA, 19 nt, synthetic construct
  misc_feature 1..19: note = siRNA antisense sequence
  source 1..19: mol_type = other RNA
agactataccagcatatgc

SEQ ID NO: 57676 - RNA, 19 nt, synthetic construct
  misc_feature 1..19: note = siRNA sense sequence
  source 1..19: mol_type = other RNA
catatgctggtatagtctg

SEQ ID NO: 57677 - RNA, 19 nt, synthetic construct
  misc_feature 1..19: note = siRNA antisense sequence
  source 1..19: mol_type = other RNA
cagactataccagcatatg

SEQ ID NO: 57678 - RNA, 19 nt, synthetic construct
  misc_feature 1..19: note = siRNA sense sequence
  source 1..19: mol_type = other RNA
atatgctggtatagtctgc

SEQ ID NO: 57679 - RNA, 19 nt, synthetic construct
  misc_feature 1..19: note = siRNA antisense sequence
  source 1..19: mol_type = other RNA
gcagactataccagcatat

SEQ ID NO: 57680 - RNA, 19 nt, synthetic construct
  misc_feature 1..19: note = siRNA sense sequence
  source 1..19: mol_type = other RNA
tatgctggtatagtctgct

SEQ ID NO: 57681 - RNA, 19 nt, synthetic construct
  misc_feature 1..19: note = siRNA antisense sequence
  source 1..19: mol_type = other RNA
agcagactataccagcata

SEQ ID NO: 57682 - RNA, 19 nt, synthetic construct
  misc_feature 1..19: note = siRNA sense sequence
  source 1..19: mol_type = other RNA
atgctggtatagtctgctt

SEQ ID NO: 57683 - RNA, 19 nt, synthetic construct
  misc_feature 1..19: note = siRNA antisense sequence
  source 1..19: mol_type = other RNA
aagcagactataccagcat

SEQ ID NO: 57684 - RNA, 19 nt, synthetic construct
  misc_feature 1..19: note = siRNA sense sequence
  source 1..19: mol_type = other RNA
tgctggtatagtctgcttc

SEQ ID NO: 57685 - RNA, 19 nt, synthetic construct
  misc_feature 1..19: note = siRNA antisense sequence
  source 1..19: mol_type = other RNA
gaagcagactataccagca

SEQ ID NO: 57686 - RNA, 19 nt, synthetic construct
  misc_feature 1..19: note = siRNA sense sequence
  source 1..19: mol_type = other RNA
gctggtatagtctgcttcc

SEQ ID NO: 57687 - RNA, 19 nt, synthetic construct
  misc_feature 1..19: note = siRNA antisense sequence
  source 1..19: mol_type = other RNA
ggaagcagactataccagc

SEQ ID NO: 57688 - RNA, 19 nt, synthetic construct
  misc_feature 1..19: note = siRNA sense sequence
  source 1..19: mol_type = other RNA
ctggtatagtctgcttcca

SEQ ID NO: 57689 - RNA, 19 nt, synthetic construct
  misc_feature 1..19: note = siRNA antisense sequence
  source 1..19: mol_type = other RNA
tggaagcagactataccag

SEQ ID NO: 57690 - RNA, 19 nt, synthetic construct
  misc_feature 1..19: note = siRNA sense sequence
  source 1..19: mol_type = other RNA
tggtatagtctgcttccat

SEQ ID NO: 57691 - RNA, 19 nt, synthetic construct
  misc_feature 1..19: note = siRNA antisense sequence
  source 1..19: mol_type = other RNA
atggaagcagactatacca

SEQ ID NO: 57692 - RNA, 19 nt, synthetic construct
  misc_feature 1..19: note = siRNA sense sequence
  source 1..19: mol_type = other RNA
ggtatagtctgcttccatt

SEQ ID NO: 57693 - RNA, 19 nt, synthetic construct
  misc_feature 1..19: note = siRNA antisense sequence
  source 1..19: mol_type = other RNA
aatggaagcagactatacc

SEQ ID NO: 57694 - RNA, 19 nt, synthetic construct
  misc_feature 1..19: note = siRNA sense sequence
  source 1..19: mol_type = other RNA
gtatagtctgcttccatta

SEQ ID NO: 57695 - RNA, 19 nt, synthetic construct
  misc_feature 1..19: note = siRNA antisense sequence
  source 1..19: mol_type = other RNA
taatggaagcagactatac

SEQ ID NO: 57696 - RNA, 19 nt, synthetic construct
  misc_feature 1..19: note = siRNA sense sequence
  source 1..19: mol_type = other RNA
tatagtctgcttccattaa

SEQ ID NO: 57697 - RNA, 19 nt, synthetic construct
  misc_feature 1..19: note = siRNA antisense sequence
  source 1..19: mol_type = other RNA
ttaatggaagcagactata

SEQ ID NO: 57698 - RNA, 19 nt, synthetic construct
  misc_feature 1..19: note = siRNA sense sequence
  source 1..19: mol_type = other RNA
atagtctgcttccattaaa

SEQ ID NO: 57699 - RNA, 19 nt, synthetic construct
  misc_feature 1..19: note = siRNA antisense sequence
  source 1..19: mol_type = other RNA
tttaatggaagcagactat

SEQ ID NO: 57700 - RNA, 19 nt, synthetic construct
  misc_feature 1..19: note = siRNA sense sequence
  source 1..19: mol_type = other RNA
tagtctgcttccattaaaa

SEQ ID NO: 57701 - RNA, 19 nt, synthetic construct
  misc_feature 1..19: note = siRNA antisense sequence
  source 1..19: mol_type = other RNA
ttttaatggaagcagacta

SEQ ID NO: 57702 - RNA, 19 nt, synthetic construct
  misc_feature 1..19: note = siRNA sense sequence
  source 1..19: mol_type = other RNA
gtaggcatacatatgaaga

SEQ ID NO: 57703 - RNA, 19 nt, synthetic construct
  misc_feature 1..19: note = siRNA antisense sequence
  source 1..19: mol_type = other RNA
tcttcatatgtatgcctac

SEQ ID NO: 57704 - RNA, 19 nt, synthetic construct
  misc_feature 1..19: note = siRNA sense sequence
  source 1..19: mol_type = other RNA
taggcatacatatgaagat

SEQ ID NO: 57705 - RNA, 19 nt, synthetic construct
  misc_feature 1..19: note = siRNA antisense sequence
  source 1..19: mol_type = other RNA
atcttcatatgtatgccta

SEQ ID NO: 57706 - RNA, 19 nt, synthetic construct
  misc_feature 1..19: note = siRNA sense sequence
  source 1..19: mol_type = other RNA
atatgaagatgtgcttttg

SEQ ID NO: 57707 - RNA, 19 nt, synthetic construct
  misc_feature 1..19: note = siRNA antisense sequence
  source 1..19: mol_type = other RNA
caaaagcacatcttcatat

SEQ ID NO: 57708 - RNA, 19 nt, synthetic construct
  misc_feature 1..19: note = siRNA sense sequence
  source 1..19: mol_type = other RNA
tatgaagatgtgcttttgt

SEQ ID NO: 57709 - RNA, 19 nt, synthetic construct
  misc_feature 1..19: note = siRNA antisense sequence
  source 1..19: mol_type = other RNA
acaaaagcacatcttcata

SEQ ID NO: 57710 - RNA, 19 nt, synthetic construct
  misc_feature 1..19: note = siRNA sense sequence
  source 1..19: mol_type = other RNA
atgaagatgtgcttttgta

SEQ ID NO: 57711 - RNA, 19 nt, synthetic construct
  misc_feature 1..19: note = siRNA antisense sequence
  source 1..19: mol_type = other RNA
tacaaaagcacatcttcat

SEQ ID NO: 57712 - RNA, 19 nt, synthetic construct
  misc_feature 1..19: note = siRNA sense sequence
  source 1..19: mol_type = other RNA
gtatgcatgttttcttctg

SEQ ID NO: 57713 - RNA, 19 nt, synthetic construct
  misc_feature 1..19: note = siRNA antisense sequence
  source 1..19: mol_type = other RNA
cagaagaaaacatgcatac

SEQ ID NO: 57714 - RNA, 19 nt, synthetic construct
  misc_feature 1..19: note = siRNA sense sequence
  source 1..19: mol_type = other RNA
tatgcatgttttcttctgt

SEQ ID NO: 57715 - RNA, 19 nt, synthetic construct
  misc_feature 1..19: note = siRNA antisense sequence
  source 1..19: mol_type = other RNA
acagaagaaaacatgcata

SEQ ID NO: 57716 - RNA, 19 nt, synthetic construct
  misc_feature 1..19: note = siRNA sense sequence
  source 1..19: mol_type = other RNA
catgttttcttctgtaaag

SEQ ID NO: 57717 - RNA, 19 nt, synthetic construct
  misc_feature 1..19: note = siRNA antisense sequence
  source 1..19: mol_type = other RNA
ctttacagaagaaaacatg

SEQ ID NO: 57718 - RNA, 19 nt, synthetic construct
  misc_feature 1..19: note = siRNA sense sequence
  source 1..19: mol_type = other RNA
accactgagtgtactaaat

SEQ ID NO: 57719 - RNA, 19 nt, synthetic construct
  misc_feature 1..19: note = siRNA antisense sequence
  source 1..19: mol_type = other RNA
atttagtacactcagtggt

SEQ ID NO: 57720 - RNA, 19 nt, synthetic construct
  misc_feature 1..19: note = siRNA sense sequence
  source 1..19: mol_type = other RNA
ccactgagtgtactaaatg

SEQ ID NO: 57721 - RNA, 19 nt, synthetic construct
  misc_feature 1..19: note = siRNA antisense sequence
  source 1..19: mol_type = other RNA
catttagtacactcagtgg

SEQ ID NO: 57722 - RNA, 19 nt, synthetic construct
  misc_feature 1..19: note = siRNA sense sequence
  source 1..19: mol_type = other RNA
cactgagtgtactaaatgt

SEQ ID NO: 57723 - RNA, 19 nt, synthetic construct
  misc_feature 1..19: note = siRNA antisense sequence
  source 1..19: mol_type = other RNA
acatttagtacactcagtg

SEQ ID NO: 57724 - RNA, 19 nt, synthetic construct
  misc_feature 1..19: note = siRNA sense sequence
  source 1..19: mol_type = other RNA
aatgatgattattgctgag

SEQ ID NO: 57725 - RNA, 19 nt, synthetic construct
  misc_feature 1..19: note = siRNA antisense sequence
  source 1..19: mol_type = other RNA
ctcagcaataatcatcatt

SEQ ID NO: 57726 - RNA, 19 nt, synthetic construct
  misc_feature 1..19: note = siRNA sense sequence
  source 1..19: mol_type = other RNA
attgctgagtggtagtata

SEQ ID NO: 57727 - RNA, 19 nt, synthetic construct
  misc_feature 1..19: note = siRNA antisense sequence
  source 1..19: mol_type = other RNA
tatactaccactcagcaat

SEQ ID NO: 57728 - RNA, 19 nt, synthetic construct
  misc_feature 1..19: note = siRNA sense sequence
  source 1..19: mol_type = other RNA
ttgctgagtggtagtataa

SEQ ID NO: 57729 - RNA, 19 nt, synthetic construct
  misc_feature 1..19: note = siRNA antisense sequence
  source 1..19: mol_type = other RNA
ttatactaccactcagcaa

SEQ ID NO: 57730 - RNA, 19 nt, synthetic construct
  misc_feature 1..19: note = siRNA sense sequence
  source 1..19: mol_type = other RNA
tgctgagtggtagtataac

SEQ ID NO: 57731 - RNA, 19 nt, synthetic construct
  misc_feature 1..19: note = siRNA antisense sequence
  source 1..19: mol_type = other RNA
gttatactaccactcagca

SEQ ID NO: 57732 - RNA, 19 nt, synthetic construct
  misc_feature 1..19: note = siRNA sense sequence
  source 1..19: mol_type = other RNA
attttctatgagtccattg

SEQ ID NO: 57733 - RNA, 19 nt, synthetic construct
  misc_feature 1..19: note = siRNA antisense sequence
  source 1..19: mol_type = other RNA
caatggactcatagaaaat

SEQ ID NO: 57734 - RNA, 19 nt, synthetic construct
  misc_feature 1..19: note = siRNA sense sequence
  source 1..19: mol_type = other RNA
ttttctatgagtccattgt

SEQ ID NO: 57735 - RNA, 19 nt, synthetic construct
  misc_feature 1..19: note = siRNA antisense sequence
  source 1..19: mol_type = other RNA
acaatggactcatagaaaa

SEQ ID NO: 57736 - RNA, 19 nt, synthetic construct
  misc_feature 1..19: note = siRNA sense sequence
  source 1..19: mol_type = other RNA
tttctatgagtccattgtt

SEQ ID NO: 57737 - RNA, 19 nt, synthetic construct
  misc_feature 1..19: note = siRNA antisense sequence
  source 1..19: mol_type = other RNA
aacaatggactcatagaaa

SEQ ID NO: 57738 - RNA, 19 nt, synthetic construct
  misc_feature 1..19: note = siRNA sense sequence
  source 1..19: mol_type = other RNA
ttctatgagtccattgttt

SEQ ID NO: 57739 - RNA, 19 nt, synthetic construct
  misc_feature 1..19: note = siRNA antisense sequence
  source 1..19: mol_type = other RNA
aaacaatggactcatagaa

SEQ ID NO: 57740 - RNA, 19 nt, synthetic construct
  misc_feature 1..19: note = siRNA sense sequence
  source 1..19: mol_type = other RNA
tctatgagtccattgtttt

SEQ ID NO: 57741 - RNA, 19 nt, synthetic construct
  misc_feature 1..19: note = siRNA antisense sequence
  source 1..19: mol_type = other RNA
aaaacaatggactcataga

SEQ ID NO: 57742 - RNA, 19 nt, synthetic construct
  misc_feature 1..19: note = siRNA sense sequence
  source 1..19: mol_type = other RNA
ctatgagtccattgtttta

SEQ ID NO: 57743 - RNA, 19 nt, synthetic construct
  misc_feature 1..19: note = siRNA antisense sequence
  source 1..19: mol_type = other RNA
taaaacaatggactcatag

SEQ ID NO: 57744 - RNA, 19 nt, synthetic construct
  misc_feature 1..19: note = siRNA sense sequence
  source 1..19: mol_type = other RNA
tgcaaaagcataagtagtg

SEQ ID NO: 57745 - RNA, 19 nt, synthetic construct
  misc_feature 1..19: note = siRNA antisense sequence
  source 1..19: mol_type = other RNA
cactacttatgcttttgca

SEQ ID NO: 57746 - RNA, 19 nt, synthetic construct
  misc_feature 1..19: note = siRNA sense sequence
  source 1..19: mol_type = other RNA
gcaaaagcataagtagtga

SEQ ID NO: 57747 - RNA, 19 nt, synthetic construct
  misc_feature 1..19: note = siRNA antisense sequence
  source 1..19: mol_type = other RNA
tcactacttatgcttttgc

SEQ ID NO: 57748 - RNA, 19 nt, synthetic construct
  misc_feature 1..19: note = siRNA sense sequence
  source 1..19: mol_type = other RNA
gcataagtagtgacctcat

SEQ ID NO: 57749 - RNA, 19 nt, synthetic construct
  misc_feature 1..19: note = siRNA antisense sequence
  source 1..19: mol_type = other RNA
atgaggtcactacttatgc

SEQ ID NO: 57750 - RNA, 19 nt, synthetic construct
  misc_feature 1..19: note = siRNA sense sequence
  source 1..19: mol_type = other RNA
taagtagtgacctcattat

SEQ ID NO: 57751 - RNA, 19 nt, synthetic construct
  misc_feature 1..19: note = siRNA antisense sequence
  source 1..19: mol_type = other RNA
ataatgaggtcactactta

SEQ ID NO: 57752 - RNA, 19 nt, synthetic construct
  misc_feature 1..19: note = siRNA sense sequence
  source 1..19: mol_type = other RNA
aagtagtgacctcattatt

SEQ ID NO: 57753 - RNA, 19 nt, synthetic construct
  misc_feature 1..19: note = siRNA antisense sequence
  source 1..19: mol_type = other RNA
aataatgaggtcactactt

SEQ ID NO: 57754 - RNA, 19 nt, synthetic construct
  misc_feature 1..19: note = siRNA sense sequence
  source 1..19: mol_type = other RNA
agtagtgacctcattattc

SEQ ID NO: 57755 - RNA, 19 nt, synthetic construct
  misc_feature 1..19: note = siRNA antisense sequence
  source 1..19: mol_type = other RNA
gaataatgaggtcactact

SEQ ID NO: 57756 - RNA, 19 nt, synthetic construct
  misc_feature 1..19: note = siRNA sense sequence
  source 1..19: mol_type = other RNA
gtagtgacctcattattca

SEQ ID NO: 57757 - RNA, 19 nt, synthetic construct
  misc_feature 1..19: note = siRNA antisense sequence
  source 1..19: mol_type = other RNA
tgaataatgaggtcactac

SEQ ID NO: 57758 - RNA, 19 nt, synthetic construct
  misc_feature 1..19: note = siRNA sense sequence
  source 1..19: mol_type = other RNA
aaatgtgcagtaattgttc

SEQ ID NO: 57759 - RNA, 19 nt, synthetic construct
  misc_feature 1..19: note = siRNA antisense sequence
  source 1..19: mol_type = other RNA
gaacaattactgcacattt

SEQ ID NO: 57760 - RNA, 19 nt, synthetic construct
  misc_feature 1..19: note = siRNA sense sequence
  source 1..19: mol_type = other RNA
aatgtgcagtaattgttcc

SEQ ID NO: 57761 - RNA, 19 nt, synthetic construct
  misc_feature 1..19: note = siRNA antisense sequence
  source 1..19: mol_type = other RNA
ggaacaattactgcacatt

SEQ ID NO: 57762 - RNA, 19 nt, synthetic construct
  misc_feature 1..19: note = siRNA sense sequence
  source 1..19: mol_type = other RNA
atgtgcagtaattgttccg

SEQ ID NO: 57763 - RNA, 19 nt, synthetic construct
  misc_feature 1..19: note = siRNA antisense sequence
  source 1..19: mol_type = other RNA
cggaacaattactgcacat

SEQ ID NO: 57764 - RNA, 19 nt, synthetic construct
  misc_feature 1..19: note = siRNA sense sequence
  source 1..19: mol_type = other RNA
tgtgcagtaattgttccgg

SEQ ID NO: 57765 - RNA, 19 nt, synthetic construct
  misc_feature 1..19: note = siRNA antisense sequence
  source 1..19: mol_type = other RNA
ccggaacaattactgcaca

SEQ ID NO: 57766 - RNA, 19 nt, synthetic construct
  misc_feature 1..19: note = siRNA sense sequence
  source 1..19: mol_type = other RNA
gtgcagtaattgttccggc

SEQ ID NO: 57767 - RNA, 19 nt, synthetic construct
  misc_feature 1..19: note = siRNA antisense sequence
  source 1..19: mol_type = other RNA
gccggaacaattactgcac

SEQ ID NO: 57768 - RNA, 19 nt, synthetic construct
  misc_feature 1..19: note = siRNA sense sequence
  source 1..19: mol_type = other RNA
tgcagtaattgttccggct

SEQ ID NO: 57769 - RNA, 19 nt, synthetic construct
  misc_feature 1..19: note = siRNA antisense sequence
  source 1..19: mol_type = other RNA
agccggaacaattactgca

SEQ ID NO: 57770 - RNA, 19 nt, synthetic construct
  misc_feature 1..19: note = siRNA sense sequence
  source 1..19: mol_type = other RNA
gcagtaattgttccggctt

SEQ ID NO: 57771 - RNA, 19 nt, synthetic construct
  misc_feature 1..19: note = siRNA antisense sequence
  source 1..19: mol_type = other RNA
aagccggaacaattactgc

SEQ ID NO: 57772 - RNA, 19 nt, synthetic construct
  misc_feature 1..19: note = siRNA sense sequence
  source 1..19: mol_type = other RNA
cagtaattgttccggcttg

SEQ ID NO: 57773 - RNA, 19 nt, synthetic construct
  misc_feature 1..19: note = siRNA antisense sequence
  source 1..19: mol_type = other RNA
caagccggaacaattactg

SEQ ID NO: 57774 - RNA, 19 nt, synthetic construct
  misc_feature 1..19: note = siRNA sense sequence
  source 1..19: mol_type = other RNA
agtaattgttccggcttgg

SEQ ID NO: 57775 - RNA, 19 nt, synthetic construct
  misc_feature 1..19: note = siRNA antisense sequence
  source 1..19: mol_type = other RNA
ccaagccggaacaattact

SEQ ID NO: 57776 - RNA, 19 nt, synthetic construct
  misc_feature 1..19: note = siRNA sense sequence
  source 1..19: mol_type = other RNA
gtaattgttccggcttgga

SEQ ID NO: 57777 - RNA, 19 nt, synthetic construct
  misc_feature 1..19: note = siRNA antisense sequence
  source 1..19: mol_type = other RNA
tccaagccggaacaattac

SEQ ID NO: 57778 - RNA, 19 nt, synthetic construct
  misc_feature 1..19: note = siRNA sense sequence
  source 1..19: mol_type = other RNA
taattgttccggcttggat

SEQ ID NO: 57779 - RNA, 19 nt, synthetic construct
  misc_feature 1..19: note = siRNA antisense sequence
  source 1..19: mol_type = other RNA
atccaagccggaacaatta

SEQ ID NO: 57780 - RNA, 19 nt, synthetic construct
  misc_feature 1..19: note = siRNA sense sequence
  source 1..19: mol_type = other RNA
aattgttccggcttggatc

SEQ ID NO: 57781 - RNA, 19 nt, synthetic construct
  misc_feature 1..19: note = siRNA antisense sequence
  source 1..19: mol_type = other RNA
gatccaagccggaacaatt

SEQ ID NO: 57782 - RNA, 19 nt, synthetic construct
  misc_feature 1..19: note = siRNA sense sequence
  source 1..19: mol_type = other RNA
attgttccggcttggatct

SEQ ID NO: 57783 - RNA, 19 nt, synthetic construct
  misc_feature 1..19: note = siRNA antisense sequence
  source 1..19: mol_type = other RNA
agatccaagccggaacaat

SEQ ID NO: 57784 - RNA, 19 nt, synthetic construct
  misc_feature 1..19: note = siRNA sense sequence
  source 1..19: mol_type = other RNA
ttgttccggcttggatcta

SEQ ID NO: 57785 - RNA, 19 nt, synthetic construct
  misc_feature 1..19: note = siRNA antisense sequence
  source 1..19: mol_type = other RNA
tagatccaagccggaacaa

SEQ ID NO: 57786 - RNA, 19 nt, synthetic construct
  misc_feature 1..19: note = siRNA sense sequence
  source 1..19: mol_type = other RNA
tgttccggcttggatctaa

SEQ ID NO: 57787 - RNA, 19 nt, synthetic construct
  misc_feature 1..19: note = siRNA antisense sequence
  source 1..19: mol_type = other RNA
ttagatccaagccggaaca

SEQ ID NO: 57788 - RNA, 19 nt, synthetic construct
  misc_feature 1..19: note = siRNA sense sequence
  source 1..19: mol_type = other RNA
gttccggcttggatctaag

SEQ ID NO: 57789 - RNA, 19 nt, synthetic construct
  misc_feature 1..19: note = siRNA antisense sequence
  source 1..19: mol_type = other RNA
cttagatccaagccggaac

SEQ ID NO: 57790 - RNA, 19 nt, synthetic construct
  misc_feature 1..19: note = siRNA sense sequence
  source 1..19: mol_type = other RNA
ttccggcttggatctaaga

SEQ ID NO: 57791 - RNA, 19 nt, synthetic construct
  misc_feature 1..19: note = siRNA antisense sequence
  source 1..19: mol_type = other RNA
tcttagatccaagccggaa

SEQ ID NO: 57792 - RNA, 19 nt, synthetic construct
  misc_feature 1..19: note = siRNA sense sequence
  source 1..19: mol_type = other RNA
atatattctccatgtctga

SEQ ID NO: 57793 - RNA, 19 nt, synthetic construct
  misc_feature 1..19: note = siRNA antisense sequence
  source 1..19: mol_type = other RNA
tcagacatggagaatatat

SEQ ID NO: 57794 - RNA, 19 nt, synthetic construct
  misc_feature 1..19: note = siRNA sense sequence
  source 1..19: mol_type = other RNA
tatattctccatgtctgag

SEQ ID NO: 57795 - RNA, 19 nt, synthetic construct
  misc_feature 1..19: note = siRNA antisense sequence
  source 1..19: mol_type = other RNA
ctcagacatggagaatata

SEQ ID NO: 57796 - RNA, 19 nt, synthetic construct
  misc_feature 1..19: note = siRNA sense sequence
  source 1..19: mol_type = other RNA
atcttactctgatctcatt

SEQ ID NO: 57797 - RNA, 19 nt, synthetic construct
  misc_feature 1..19: note = siRNA antisense sequence
  source 1..19: mol_type = other RNA
aatgagatcagagtaagat

SEQ ID NO: 57798 - RNA, 19 nt, synthetic construct
  misc_feature 1..19: note = siRNA sense sequence
  source 1..19: mol_type = other RNA
cttactctgatctcatttt

SEQ ID NO: 57799 - RNA, 19 nt, synthetic construct
  misc_feature 1..19: note = siRNA antisense sequence
  source 1..19: mol_type = other RNA
aaaatgagatcagagtaag

SEQ ID NO: 57800 - RNA, 19 nt, synthetic construct
  misc_feature 1..19: note = siRNA sense sequence
  source 1..19: mol_type = other RNA
ttactctgatctcattttg

SEQ ID NO: 57801 - RNA, 19 nt, synthetic construct
  misc_feature 1..19: note = siRNA antisense sequence
  source 1..19: mol_type = other RNA
caaaatgagatcagagtaa

SEQ ID NO: 57802 - RNA, 19 nt, synthetic construct
  misc_feature 1..19: note = siRNA sense sequence
  source 1..19: mol_type = other RNA
tactctgatctcattttgg

SEQ ID NO: 57803 - RNA, 19 nt, synthetic construct
  misc_feature 1..19: note = siRNA antisense sequence
  source 1..19: mol_type = other RNA
ccaaaatgagatcagagta

SEQ ID NO: 57804 - RNA, 19 nt, synthetic construct
  misc_feature 1..19: note = siRNA sense sequence
  source 1..19: mol_type = other RNA
actctgatctcattttgga

SEQ ID NO: 57805 - RNA, 19 nt, synthetic construct
  misc_feature 1..19: note = siRNA antisense sequence
  source 1..19: mol_type = other RNA
tccaaaatgagatcagagt

SEQ ID NO: 57806 - RNA, 19 nt, synthetic construct
  misc_feature 1..19: note = siRNA sense sequence
  source 1..19: mol_type = other RNA
ctctgatctcattttggat

SEQ ID NO: 57807 - RNA, 19 nt, synthetic construct
  misc_feature 1..19: note = siRNA antisense sequence
  source 1..19: mol_type = other RNA
atccaaaatgagatcagag

SEQ ID NO: 57808 - RNA, 19 nt, synthetic construct
  misc_feature 1..19: note = siRNA sense sequence
  source 1..19: mol_type = other RNA
tctgatctcattttggatt

SEQ ID NO: 57809 - RNA, 19 nt, synthetic construct
  misc_feature 1..19: note = siRNA antisense sequence
  source 1..19: mol_type = other RNA
aatccaaaatgagatcaga

SEQ ID NO: 57810 - RNA, 19 nt, synthetic construct
  misc_feature 1..19: note = siRNA sense sequence
  source 1..19: mol_type = other RNA
ctgatctcattttggatta

SEQ ID NO: 57811 - RNA, 19 nt, synthetic construct
  misc_feature 1..19: note = siRNA antisense sequence
  source 1..19: mol_type = other RNA
taatccaaaatgagatcag

SEQ ID NO: 57812 - RNA, 19 nt, synthetic construct
  misc_feature 1..19: note = siRNA sense sequence
  source 1..19: mol_type = other RNA
tgatctcattttggattag

SEQ ID NO: 57813 - RNA, 19 nt, synthetic construct
  misc_feature 1..19: note = siRNA antisense sequence
  source 1..19: mol_type = other RNA
ctaatccaaaatgagatca

SEQ ID NO: 57814 - RNA, 19 nt, synthetic construct
  misc_feature 1..19: note = siRNA sense sequence
  source 1..19: mol_type = other RNA
gatctcattttggattagt

SEQ ID NO: 57815 - RNA, 19 nt, synthetic construct
  misc_feature 1..19: note = siRNA antisense sequence
  source 1..19: mol_type = other RNA
actaatccaaaatgagatc

SEQ ID NO: 57816 - RNA, 19 nt, synthetic construct
  misc_feature 1..19: note = siRNA sense sequence
  source 1..19: mol_type = other RNA
tctcattttggattagtag

SEQ ID NO: 57817 - RNA, 19 nt, synthetic construct
  misc_feature 1..19: note = siRNA antisense sequence
  source 1..19: mol_type = other RNA
ctactaatccaaaatgaga

SEQ ID NO: 57818 - RNA, 19 nt, synthetic construct
  misc_feature 1..19: note = siRNA sense sequence
  source 1..19: mol_type = other RNA
ctcattttggattagtaga

SEQ ID NO: 57819 - RNA, 19 nt, synthetic construct
  misc_feature 1..19: note = siRNA antisense sequence
  source 1..19: mol_type = other RNA
tctactaatccaaaatgag

SEQ ID NO: 57820 - RNA, 19 nt, synthetic construct
  misc_feature 1..19: note = siRNA sense sequence
  source 1..19: mol_type = other RNA
tcattttggattagtagac

SEQ ID NO: 57821 - RNA, 19 nt, synthetic construct
  misc_feature 1..19: note = siRNA antisense sequence
  source 1..19: mol_type = other RNA
gtctactaatccaaaatga

SEQ ID NO: 57822 - RNA, 19 nt, synthetic construct
  misc_feature 1..19: note = siRNA sense sequence
  source 1..19: mol_type = other RNA
cattttggattagtagaca

SEQ ID NO: 57823 - RNA, 19 nt, synthetic construct
  misc_feature 1..19: note = siRNA antisense sequence
  source 1..19: mol_type = other RNA
tgtctactaatccaaaatg

SEQ ID NO: 57824 - RNA, 19 nt, synthetic construct
  misc_feature 1..19: note = siRNA sense sequence
  source 1..19: mol_type = other RNA
ttggattagtagacattac

SEQ ID NO: 57825 - RNA, 19 nt, synthetic construct
  misc_feature 1..19: note = siRNA antisense sequence
  source 1..19: mol_type = other RNA
gtaatgtctactaatccaa

SEQ ID NO: 57826 - RNA, 19 nt, synthetic construct
  misc_feature 1..19: note = siRNA sense sequence
  source 1..19: mol_type = other RNA
gtagacattactgggcttt

SEQ ID NO: 57827 - RNA, 19 nt, synthetic construct
  misc_feature 1..19: note = siRNA antisense sequence
  source 1..19: mol_type = other RNA
aaagcccagtaatgtctac

SEQ ID NO: 57828 - RNA, 19 nt, synthetic construct
  misc_feature 1..19: note = siRNA sense sequence
  source 1..19: mol_type = other RNA
tagacattactgggctttc

SEQ ID NO: 57829 - RNA, 19 nt, synthetic construct
  misc_feature 1..19: note = siRNA antisense sequence
  source 1..19: mol_type = other RNA
gaaagcccagtaatgtcta

SEQ ID NO: 57830 - RNA, 19 nt, synthetic construct
  misc_feature 1..19: note = siRNA sense sequence
  source 1..19: mol_type = other RNA
agacattactgggctttcg

SEQ ID NO: 57831 - RNA, 19 nt, synthetic construct
  misc_feature 1..19: note = siRNA antisense sequence
  source 1..19: mol_type = other RNA
cgaaagcccagtaatgtct

SEQ ID NO: 57832 - RNA, 19 nt, synthetic construct
  misc_feature 1..19: note = siRNA sense sequence
  source 1..19: mol_type = other RNA
gacattactgggctttcga

SEQ ID NO: 57833 - RNA, 19 nt, synthetic construct
  misc_feature 1..19: note = siRNA antisense sequence
  source 1..19: mol_type = other RNA
tcgaaagcccagtaatgtc

SEQ ID NO: 57834 - RNA, 19 nt, synthetic construct
  misc_feature 1..19: note = siRNA sense sequence
  source 1..19: mol_type = other RNA
acattactgggctttcgag

SEQ ID NO: 57835 - RNA, 19 nt, synthetic construct
  misc_feature 1..19: note = siRNA antisense sequence
  source 1..19: mol_type = other RNA
ctcgaaagcccagtaatgt

SEQ ID NO: 57836 - RNA, 19 nt, synthetic construct
  misc_feature 1..19: note = siRNA sense sequence
  source 1..19: mol_type = other RNA
cattactgggctttcgagt

SEQ ID NO: 57837 - RNA, 19 nt, synthetic construct
  misc_feature 1..19: note = siRNA antisense sequence
  source 1..19: mol_type = other RNA
actcgaaagcccagtaatg

SEQ ID NO: 57838 - RNA, 19 nt, synthetic construct
  misc_feature 1..19: note = siRNA sense sequence
  source 1..19: mol_type = other RNA
attactgggctttcgagtt

SEQ ID NO: 57839 - RNA, 19 nt, synthetic construct
  misc_feature 1..19: note = siRNA antisense sequence
  source 1..19: mol_type = other RNA
aactcgaaagcccagtaat

SEQ ID NO: 57840 - RNA, 19 nt, synthetic construct
  misc_feature 1..19: note = siRNA sense sequence
  source 1..19: mol_type = other RNA
ttactgggctttcgagtta

SEQ ID NO: 57841 - RNA, 19 nt, synthetic construct
  misc_feature 1..19: note = siRNA antisense sequence
  source 1..19: mol_type = other RNA
taactcgaaagcccagtaa

SEQ ID NO: 57842 - RNA, 19 nt, synthetic construct
  misc_feature 1..19: note = siRNA sense sequence
  source 1..19: mol_type = other RNA
tactgggctttcgagttaa

SEQ ID NO: 57843 - RNA, 19 nt, synthetic construct
  misc_feature 1..19: note = siRNA antisense sequence
  source 1..19: mol_type = other RNA
ttaactcgaaagcccagta

SEQ ID NO: 57844 - RNA, 19 nt, synthetic construct
  misc_feature 1..19: note = siRNA sense sequence
  source 1..19: mol_type = other RNA
actgggctttcgagttaaa

SEQ ID NO: 57845 - RNA, 19 nt, synthetic construct
  misc_feature 1..19: note = siRNA antisense sequence
  source 1..19: mol_type = other RNA
tttaactcgaaagcccagt

SEQ ID NO: 57846 - RNA, 19 nt, synthetic construct
  misc_feature 1..19: note = siRNA sense sequence
  source 1..19: mol_type = other RNA
ctgggctttcgagttaaaa

SEQ ID NO: 57847 - RNA, 19 nt, synthetic construct
  misc_feature 1..19: note = siRNA antisense sequence
  source 1..19: mol_type = other RNA
ttttaactcgaaagcccag

SEQ ID NO: 57848 - RNA, 19 nt, synthetic construct
  misc_feature 1..19: note = siRNA sense sequence
  source 1..19: mol_type = other RNA
aacgactgagtttaaaatc

SEQ ID NO: 57849 - RNA, 19 nt, synthetic construct
  misc_feature 1..19: note = siRNA antisense sequence
  source 1..19: mol_type = other RNA
gattttaaactcagtcgtt

SEQ ID NO: 57850 - RNA, 19 nt, synthetic construct
  misc_feature 1..19: note = siRNA sense sequence
  source 1..19: mol_type = other RNA
tcctcttaatagcttttga

SEQ ID NO: 57851 - RNA, 19 nt, synthetic construct
  misc_feature 1..19: note = siRNA antisense sequence
  source 1..19: mol_type = other RNA
tcaaaagctattaagagga

SEQ ID NO: 57852 - RNA, 19 nt, synthetic construct
  misc_feature 1..19: note = siRNA sense sequence
  source 1..19: mol_type = other RNA
ctcttaatagcttttgacc

SEQ ID NO: 57853 - RNA, 19 nt, synthetic construct
  misc_feature 1..19: note = siRNA antisense sequence
  source 1..19: mol_type = other RNA
ggtcaaaagctattaagag

SEQ ID NO: 57854 - RNA, 19 nt, synthetic construct
  misc_feature 1..19: note = siRNA sense sequence
  source 1..19: mol_type = other RNA
taatagcttttgacctggc

SEQ ID NO: 57855 - RNA, 19 nt, synthetic construct
  misc_feature 1..19: note = siRNA antisense sequence
  source 1..19: mol_type = other RNA
gccaggtcaaaagctatta

SEQ ID NO: 57856 - RNA, 19 nt, synthetic construct
  misc_feature 1..19: note = siRNA sense sequence
  source 1..19: mol_type = other RNA
aatagcttttgacctggca

SEQ ID NO: 57857 - RNA, 19 nt, synthetic construct
  misc_feature 1..19: note = siRNA antisense sequence
  source 1..19: mol_type = other RNA
tgccaggtcaaaagctatt

SEQ ID NO: 57858 - RNA, 19 nt, synthetic construct
  misc_feature 1..19: note = siRNA sense sequence
  source 1..19: mol_type = other RNA
atagcttttgacctggcat

SEQ ID NO: 57859 - RNA, 19 nt, synthetic construct
  misc_feature 1..19: note = siRNA antisense sequence
  source 1..19: mol_type = other RNA
atgccaggtcaaaagctat

SEQ ID NO: 57860 - RNA, 19 nt, synthetic construct
  misc_feature 1..19: note = siRNA sense sequence
  source 1..19: mol_type = other RNA
tagcttttgacctggcata

SEQ ID NO: 57861 - RNA, 19 nt, synthetic construct
  misc_feature 1..19: note = siRNA antisense sequence
  source 1..19: mol_type = other RNA
tatgccaggtcaaaagcta

SEQ ID NO: 57862 - RNA, 19 nt, synthetic construct
  misc_feature 1..19: note = siRNA sense sequence
  source 1..19: mol_type = other RNA
agcttttgacctggcataa

SEQ ID NO: 57863 - RNA, 19 nt, synthetic construct
  misc_feature 1..19: note = siRNA antisense sequence
  source 1..19: mol_type = other RNA
ttatgccaggtcaaaagct

SEQ ID NO: 57864 - RNA, 19 nt, synthetic construct
  misc_feature 1..19: note = siRNA sense sequence
  source 1..19: mol_type = other RNA
gcttttgacctggcataaa

SEQ ID NO: 57865 - RNA, 19 nt, synthetic construct
  misc_feature 1..19: note = siRNA antisense sequence
  source 1..19: mol_type = other RNA
tttatgccaggtcaaaagc

SEQ ID NO: 57866 - RNA, 19 nt, synthetic construct
  misc_feature 1..19: note = siRNA sense sequence
  source 1..19: mol_type = other RNA
tgacctggcataaaatatt

SEQ ID NO: 57867 - RNA, 19 nt, synthetic construct
  misc_feature 1..19: note = siRNA antisense sequence
  source 1..19: mol_type = other RNA
aatattttatgccaggtca

SEQ ID NO: 57868 - RNA, 19 nt, synthetic construct
  misc_feature 1..19: note = siRNA sense sequence
  source 1..19: mol_type = other RNA
gacctggcataaaatattt

SEQ ID NO: 57869 - RNA, 19 nt, synthetic construct
  misc_feature 1..19: note = siRNA antisense sequence
  source 1..19: mol_type = other RNA
aaatattttatgccaggtc

SEQ ID NO: 57870 - RNA, 19 nt, synthetic construct
  misc_feature 1..19: note = siRNA sense sequence
  source 1..19: mol_type = other RNA
aaatagcatccatgtctag

SEQ ID NO: 57871 - RNA, 19 nt, synthetic construct
  misc_feature 1..19: note = siRNA antisense sequence
  source 1..19: mol_type = other RNA
ctagacatggatgctattt

SEQ ID NO: 57872 - RNA, 19 nt, synthetic construct
  misc_feature 1..19: note = siRNA sense sequence
  source 1..19: mol_type = other RNA
aatagcatccatgtctagc

SEQ ID NO: 57873 - RNA, 19 nt, synthetic construct
  misc_feature 1..19: note = siRNA antisense sequence
  source 1..19: mol_type = other RNA
gctagacatggatgctatt

SEQ ID NO: 57874 - RNA, 19 nt, synthetic construct
  misc_feature 1..19: note = siRNA sense sequence
  source 1..19: mol_type = other RNA
atagcatccatgtctagca

SEQ ID NO: 57875 - RNA, 19 nt, synthetic construct
  misc_feature 1..19: note = siRNA antisense sequence
  source 1..19: mol_type = other RNA
tgctagacatggatgctat

SEQ ID NO: 57876 - RNA, 19 nt, synthetic construct
  misc_feature 1..19: note = siRNA sense sequence
  source 1..19: mol_type = other RNA
tagcatccatgtctagcac

SEQ ID NO: 57877 - RNA, 19 nt, synthetic construct
  misc_feature 1..19: note = siRNA antisense sequence
  source 1..19: mol_type = other RNA
gtgctagacatggatgcta

SEQ ID NO: 57878 - RNA, 19 nt, synthetic construct
  misc_feature 1..19: note = siRNA sense sequence
  source 1..19: mol_type = other RNA
tttgcttttccttcctaga

SEQ ID NO: 57879 - RNA, 19 nt, synthetic construct
  misc_feature 1..19: note = siRNA antisense sequence
  source 1..19: mol_type = other RNA
tctaggaaggaaaagcaaa

SEQ ID NO: 57880 - RNA, 19 nt, synthetic construct
  misc_feature 1..19: note = siRNA sense sequence
  source 1..19: mol_type = other RNA
ttgcttttccttcctagaa

SEQ ID NO: 57881 - RNA, 19 nt, synthetic construct
  misc_feature 1..19: note = siRNA antisense sequence
  source 1..19: mol_type = other RNA
ttctaggaaggaaaagcaa

SEQ ID NO: 57882 - RNA, 19 nt, synthetic construct
  misc_feature 1..19: note = siRNA sense sequence
  source 1..19: mol_type = other RNA
caatattacagtccagaca

SEQ ID NO: 57883 - RNA, 19 nt, synthetic construct
  misc_feature 1..19: note = siRNA antisense sequence
  source 1..19: mol_type = other RNA
tgtctggactgtaatattg

SEQ ID NO: 57884 - RNA, 19 nt, synthetic construct
  misc_feature 1..19: note = siRNA sense sequence
  source 1..19: mol_type = other RNA
tacgggctgttcagggacc

SEQ ID NO: 57885 - RNA, 19 nt, synthetic construct
  misc_feature 1..19: note = siRNA antisense sequence
  source 1..19: mol_type = other RNA
ggtccctgaacagcccgta

SEQ ID NO: 57886 - RNA, 19 nt, synthetic construct
  misc_feature 1..19: note = siRNA sense sequence
  source 1..19: mol_type = other RNA
acgggctgttcagggacct

SEQ ID NO: 57887 - RNA, 19 nt, synthetic construct
  misc_feature 1..19: note = siRNA antisense sequence
  source 1..19: mol_type = other RNA
aggtccctgaacagcccgt

SEQ ID NO: 57888 - RNA, 19 nt, synthetic construct
  misc_feature 1..19: note = siRNA sense sequence
  source 1..19: mol_type = other RNA
cgggctgttcagggacctt

SEQ ID NO: 57889 - RNA, 19 nt, synthetic construct
  misc_feature 1..19: note = siRNA antisense sequence
  source 1..19: mol_type = other RNA
aaggtccctgaacagcccg

SEQ ID NO: 57890 - RNA, 19 nt, synthetic construct
  misc_feature 1..19: note = siRNA sense sequence
  source 1..19: mol_type = other RNA
gggctgttcagggaccttt

SEQ ID NO: 57891 - RNA, 19 nt, synthetic construct
  misc_feature 1..19: note = siRNA antisense sequence
  source 1..19: mol_type = other RNA
aaaggtccctgaacagccc

SEQ ID NO: 57892 - RNA, 19 nt, synthetic construct
  misc_feature 1..19: note = siRNA sense sequence
  source 1..19: mol_type = other RNA
ggctgttcagggaccttta

SEQ ID NO: 57893 - RNA, 19 nt, synthetic construct
  misc_feature 1..19: note = siRNA antisense sequence
  source 1..19: mol_type = other RNA
taaaggtccctgaacagcc

SEQ ID NO: 57894 - RNA, 19 nt, synthetic construct
  misc_feature 1..19: note = siRNA sense sequence
  source 1..19: mol_type = other RNA
gctgttcagggacctttag

SEQ ID NO: 57895 - RNA, 19 nt, synthetic construct
  misc_feature 1..19: note = siRNA antisense sequence
  source 1..19: mol_type = other RNA
ctaaaggtccctgaacagc

SEQ ID NO: 57896 - RNA, 19 nt, synthetic construct
  misc_feature 1..19: note = siRNA sense sequence
  source 1..19: mol_type = other RNA
ctgttcagggacctttaga

SEQ ID NO: 57897 - RNA, 19 nt, synthetic construct
  misc_feature 1..19: note = siRNA antisense sequence
  source 1..19: mol_type = other RNA
tctaaaggtccctgaacag

SEQ ID NO: 57898 - RNA, 19 nt, synthetic construct
  misc_feature 1..19: note = siRNA sense sequence
  source 1..19: mol_type = other RNA
tgttcagggacctttagac

SEQ ID NO: 57899 - RNA, 19 nt, synthetic construct
  misc_feature 1..19: note = siRNA antisense sequence
  source 1..19: mol_type = other RNA
gtctaaaggtccctgaaca

SEQ ID NO: 57900 - RNA, 19 nt, synthetic construct
  misc_feature 1..19: note = siRNA sense sequence
  source 1..19: mol_type = other RNA
gttcagggacctttagact

SEQ ID NO: 57901 - RNA, 19 nt, synthetic construct
  misc_feature 1..19: note = siRNA antisense sequence
  source 1..19: mol_type = other RNA
agtctaaaggtccctgaac

SEQ ID NO: 57902 - RNA, 19 nt, synthetic construct
  misc_feature 1..19: note = siRNA sense sequence
  source 1..19: mol_type = other RNA
ttcagggacctttagactt

SEQ ID NO: 57903 - RNA, 19 nt, synthetic construct
  misc_feature 1..19: note = siRNA antisense sequence
  source 1..19: mol_type = other RNA
aagtctaaaggtccctgaa

SEQ ID NO: 57904 - RNA, 19 nt, synthetic construct
  misc_feature 1..19: note = siRNA sense sequence
  source 1..19: mol_type = other RNA
tcagggacctttagacttc

SEQ ID NO: 57905 - RNA, 19 nt, synthetic construct
  misc_feature 1..19: note = siRNA antisense sequence
  source 1..19: mol_type = other RNA
gaagtctaaaggtccctga

SEQ ID NO: 57906 - RNA, 19 nt, synthetic construct
  misc_feature 1..19: note = siRNA sense sequence
  source 1..19: mol_type = other RNA
cagggacctttagacttct

SEQ ID NO: 57907 - RNA, 19 nt, synthetic construct
  misc_feature 1..19: note = siRNA antisense sequence
  source 1..19: mol_type = other RNA
agaagtctaaaggtccctg

SEQ ID NO: 57908 - RNA, 19 nt, synthetic construct
  misc_feature 1..19: note = siRNA sense sequence
  source 1..19: mol_type = other RNA
agggacctttagacttctt

SEQ ID NO: 57909 - RNA, 19 nt, synthetic construct
  misc_feature 1..19: note = siRNA antisense sequence
  source 1..19: mol_type = other RNA
aagaagtctaaaggtccct

SEQ ID NO: 57910 - RNA, 19 nt, synthetic construct
  misc_feature 1..19: note = siRNA sense sequence
  source 1..19: mol_type = other RNA
gggtttcacctggacactt

SEQ ID NO: 57911 - RNA, 19 nt, synthetic construct
  misc_feature 1..19: note = siRNA antisense sequence
  source 1..19: mol_type = other RNA
aagtgtccaggtgaaaccc

SEQ ID NO: 57912 - RNA, 19 nt, synthetic construct
  misc_feature 1..19: note = siRNA sense sequence
  source 1..19: mol_type = other RNA
cacttgattccatctcttt

SEQ ID NO: 57913 - RNA, 19 nt, synthetic construct
  misc_feature 1..19: note = siRNA antisense sequence
  source 1..19: mol_type = other RNA
aaagagatggaatcaagtg

SEQ ID NO: 57914 - RNA, 19 nt, synthetic construct
  misc_feature 1..19: note = siRNA sense sequence
  source 1..19: mol_type = other RNA
acttgattccatctctttt

SEQ ID NO: 57915 - RNA, 19 nt, synthetic construct
  misc_feature 1..19: note = siRNA antisense sequence
  source 1..19: mol_type = other RNA
aaaagagatggaatcaagt

SEQ ID NO: 57916 - RNA, 19 nt, synthetic construct
  misc_feature 1..19: note = siRNA sense sequence
  source 1..19: mol_type = other RNA
cttgattccatctcttttc

SEQ ID NO: 57917 - RNA, 19 nt, synthetic construct
  misc_feature 1..19: note = siRNA antisense sequence
  source 1..19: mol_type = other RNA
gaaaagagatggaatcaag

SEQ ID NO: 57918 - RNA, 19 nt, synthetic construct
  misc_feature 1..19: note = siRNA sense sequence
  source 1..19: mol_type = other RNA
ttgattccatctcttttcc

SEQ ID NO: 57919 - RNA, 19 nt, synthetic construct
  misc_feature 1..19: note = siRNA antisense sequence
  source 1..19: mol_type = other RNA
ggaaaagagatggaatcaa

SEQ ID NO: 57920 - RNA, 19 nt, synthetic construct
  misc_feature 1..19: note = siRNA sense sequence
  source 1..19: mol_type = other RNA
tgattccatctcttttcca

SEQ ID NO: 57921 - RNA, 19 nt, synthetic construct
  misc_feature 1..19: note = siRNA antisense sequence
  source 1..19: mol_type = other RNA
tggaaaagagatggaatca

SEQ ID NO: 57922 - RNA, 19 nt, synthetic construct
  misc_feature 1..19: note = siRNA sense sequence
  source 1..19: mol_type = other RNA
gattccatctcttttccat

SEQ ID NO: 57923 - RNA, 19 nt, synthetic construct
  misc_feature 1..19: note = siRNA antisense sequence
  source 1..19: mol_type = other RNA
atggaaaagagatggaatc

SEQ ID NO: 57924 - RNA, 19 nt, synthetic construct
  misc_feature 1..19: note = siRNA sense sequence
  source 1..19: mol_type = other RNA
attccatctcttttccatc

SEQ ID NO: 57925 - RNA, 19 nt, synthetic construct
  misc_feature 1..19: note = siRNA antisense sequence
  source 1..19: mol_type = other RNA
gatggaaaagagatggaat

SEQ ID NO: 57926 - RNA, 19 nt, synthetic construct
  misc_feature 1..19: note = siRNA sense sequence
  source 1..19: mol_type = other RNA
ttccatctcttttccatca

SEQ ID NO: 57927 - RNA, 19 nt, synthetic construct
  misc_feature 1..19: note = siRNA antisense sequence
  source 1..19: mol_type = other RNA
tgatggaaaagagatggaa

SEQ ID NO: 57928 - RNA, 19 nt, synthetic construct
  misc_feature 1..19: note = siRNA sense sequence
  source 1..19: mol_type = other RNA
tccatctcttttccatcac

SEQ ID NO: 57929 - RNA, 19 nt, synthetic construct
  misc_feature 1..19: note = siRNA antisense sequence
  source 1..19: mol_type = other RNA
gtgatggaaaagagatgga

SEQ ID NO: 57930 - RNA, 19 nt, synthetic construct
  misc_feature 1..19: note = siRNA sense sequence
  source 1..19: mol_type = other RNA
ccatctcttttccatcaca

SEQ ID NO: 57931 - RNA, 19 nt, synthetic construct
  misc_feature 1..19: note = siRNA antisense sequence
  source 1..19: mol_type = other RNA
tgtgatggaaaagagatgg

SEQ ID NO: 57932 - RNA, 19 nt, synthetic construct
  misc_feature 1..19: note = siRNA sense sequence
  source 1..19: mol_type = other RNA
atctcttttccatcacagg

SEQ ID NO: 57933 - RNA, 19 nt, synthetic construct
  misc_feature 1..19: note = siRNA antisense sequence
  source 1..19: mol_type = other RNA
cctgtgatggaaaagagat

SEQ ID NO: 57934 - RNA, 19 nt, synthetic construct
  misc_feature 1..19: note = siRNA sense sequence
  source 1..19: mol_type = other RNA
tctcttttccatcacagga

SEQ ID NO: 57935 - RNA, 19 nt, synthetic construct
  misc_feature 1..19: note = siRNA antisense sequence
  source 1..19: mol_type = other RNA
tcctgtgatggaaaagaga

SEQ ID NO: 57936 - RNA, 19 nt, synthetic construct
  misc_feature 1..19: note = siRNA sense sequence
  source 1..19: mol_type = other RNA
aactagatctttggtgttt

SEQ ID NO: 57937 - RNA, 19 nt, synthetic construct
  misc_feature 1..19: note = siRNA antisense sequence
  source 1..19: mol_type = other RNA
aaacaccaaagatctagtt

SEQ ID NO: 57938 - RNA, 19 nt, synthetic construct
  misc_feature 1..19: note = siRNA sense sequence
  source 1..19: mol_type = other RNA
actagatctttggtgtttg

SEQ ID NO: 57939 - RNA, 19 nt, synthetic construct
  misc_feature 1..19: note = siRNA antisense sequence
  source 1..19: mol_type = other RNA
caaacaccaaagatctagt

SEQ ID NO: 57940 - RNA, 19 nt, synthetic construct
  misc_feature 1..19: note = siRNA sense sequence
  source 1..19: mol_type = other RNA
ctagatctttggtgtttga

SEQ ID NO: 57941 - RNA, 19 nt, synthetic construct
  misc_feature 1..19: note = siRNA antisense sequence
  source 1..19: mol_type = other RNA
tcaaacaccaaagatctag

SEQ ID NO: 57942 - RNA, 19 nt, synthetic construct
  misc_feature 1..19: note = siRNA sense sequence
  source 1..19: mol_type = other RNA
tagatctttggtgtttgaa

SEQ ID NO: 57943 - RNA, 19 nt, synthetic construct
  misc_feature 1..19: note = siRNA antisense sequence
  source 1..19: mol_type = other RNA
ttcaaacaccaaagatcta

SEQ ID NO: 57944 - RNA, 19 nt, synthetic construct
  misc_feature 1..19: note = siRNA sense sequence
  source 1..19: mol_type = other RNA
aaatggagtcctgagcgct

SEQ ID NO: 57945 - RNA, 19 nt, synthetic construct
  misc_feature 1..19: note = siRNA antisense sequence
  source 1..19: mol_type = other RNA
agcgctcaggactccattt

SEQ ID NO: 57946 - RNA, 19 nt, synthetic construct
  misc_feature 1..19: note = siRNA sense sequence
  source 1..19: mol_type = other RNA
aatggagtcctgagcgctg

SEQ ID NO: 57947 - RNA, 19 nt, synthetic construct
  misc_feature 1..19: note = siRNA antisense sequence
  source 1..19: mol_type = other RNA
cagcgctcaggactccatt

SEQ ID NO: 57948 - RNA, 19 nt, synthetic construct
  misc_feature 1..19: note = siRNA sense sequence
  source 1..19: mol_type = other RNA
atggagtcctgagcgctgt

SEQ ID NO: 57949 - RNA, 19 nt, synthetic construct
  misc_feature 1..19: note = siRNA antisense sequence
  source 1..19: mol_type = other RNA
acagcgctcaggactccat

SEQ ID NO: 57950 - RNA, 19 nt, synthetic construct
  misc_feature 1..19: note = siRNA sense sequence
  source 1..19: mol_type = other RNA
tggagtcctgagcgctgta

SEQ ID NO: 57951 - RNA, 19 nt, synthetic construct
  misc_feature 1..19: note = siRNA antisense sequence
  source 1..19: mol_type = other RNA
tacagcgctcaggactcca

SEQ ID NO: 57952 - RNA, 19 nt, synthetic construct
  misc_feature 1..19: note = siRNA sense sequence
  source 1..19: mol_type = other RNA
ggagtcctgagcgctgtat

SEQ ID NO: 57953 - RNA, 19 nt, synthetic construct
  misc_feature 1..19: note = siRNA antisense sequence
  source 1..19: mol_type = other RNA
atacagcgctcaggactcc

SEQ ID NO: 57954 - RNA, 19 nt, synthetic construct
  misc_feature 1..19: note = siRNA sense sequence
  source 1..19: mol_type = other RNA
gagtcctgagcgctgtatt

SEQ ID NO: 57955 - RNA, 19 nt, synthetic construct
  misc_feature 1..19: note = siRNA antisense sequence
  source 1..19: mol_type = other RNA
aatacagcgctcaggactc

SEQ ID NO: 57956 - RNA, 19 nt, synthetic construct
  misc_feature 1..19: note = siRNA sense sequence
  source 1..19: mol_type = other RNA
agtcctgagcgctgtatta

SEQ ID NO: 57957 - RNA, 19 nt, synthetic construct
  misc_feature 1..19: note = siRNA antisense sequence
  source 1..19: mol_type = other RNA
taatacagcgctcaggact

SEQ ID NO: 57958 - RNA, 19 nt, synthetic construct
  misc_feature 1..19: note = siRNA sense sequence
  source 1..19: mol_type = other RNA
gtattatacatgaagcaga

SEQ ID NO: 57959 - RNA, 19 nt, synthetic construct
  misc_feature 1..19: note = siRNA antisense sequence
  source 1..19: mol_type = other RNA
tctgcttcatgtataatac

SEQ ID NO: 57960 - RNA, 19 nt, synthetic construct
  misc_feature 1..19: note = siRNA sense sequence
  source 1..19: mol_type = other RNA
ctcttccatgcactcactt

SEQ ID NO: 57961 - RNA, 19 nt, synthetic construct
  misc_feature 1..19: note = siRNA antisense sequence
  source 1..19: mol_type = other RNA
aagtgagtgcatggaagag

SEQ ID NO: 57962 - RNA, 19 nt, synthetic construct
  misc_feature 1..19: note = siRNA sense sequence
  source 1..19: mol_type = other RNA
ctttgcactcccaagttga

SEQ ID NO: 57963 - RNA, 19 nt, synthetic construct
  misc_feature 1..19: note = siRNA antisense sequence
  source 1..19: mol_type = other RNA
tcaacttgggagtgcaaag

SEQ ID NO: 57964 - RNA, 19 nt, synthetic construct
  misc_feature 1..19: note = siRNA sense sequence
  source 1..19: mol_type = other RNA
tttgcactcccaagttgat

SEQ ID NO: 57965 - RNA, 19 nt, synthetic construct
  misc_feature 1..19: note = siRNA antisense sequence
  source 1..19: mol_type = other RNA
atcaacttgggagtgcaaa

SEQ ID NO: 57966 - RNA, 19 nt, synthetic construct
  misc_feature 1..19: note = siRNA sense sequence
  source 1..19: mol_type = other RNA
ttgcactcccaagttgatg

SEQ ID NO: 57967 - RNA, 19 nt, synthetic construct
  misc_feature 1..19: note = siRNA antisense sequence
  source 1..19: mol_type = other RNA
catcaacttgggagtgcaa

SEQ ID NO: 57968 - RNA, 19 nt, synthetic construct
  misc_feature 1..19: note = siRNA sense sequence
  source 1..19: mol_type = other RNA
tgcactcccaagttgatga

SEQ ID NO: 57969 - RNA, 19 nt, synthetic construct
  misc_feature 1..19: note = siRNA antisense sequence
  source 1..19: mol_type = other RNA
tcatcaacttgggagtgca

SEQ ID NO: 57970 - RNA, 19 nt, synthetic construct
  misc_feature 1..19: note = siRNA sense sequence
  source 1..19: mol_type = other RNA
gcactcccaagttgatgac

SEQ ID NO: 57971 - RNA, 19 nt, synthetic construct
  misc_feature 1..19: note = siRNA antisense sequence
  source 1..19: mol_type = other RNA
gtcatcaacttgggagtgc

SEQ ID NO: 57972 - RNA, 19 nt, synthetic construct
  misc_feature 1..19: note = siRNA sense sequence
  source 1..19: mol_type = other RNA
cactcccaagttgatgaca

SEQ ID NO: 57973 - RNA, 19 nt, synthetic construct
  misc_feature 1..19: note = siRNA antisense sequence
  source 1..19: mol_type = other RNA
tgtcatcaacttgggagtg

SEQ ID NO: 57974 - RNA, 19 nt, synthetic construct
  misc_feature 1..19: note = siRNA sense sequence
  source 1..19: mol_type = other RNA
actcccaagttgatgacat

SEQ ID NO: 57975 - RNA, 19 nt, synthetic construct
  misc_feature 1..19: note = siRNA antisense sequence
  source 1..19: mol_type = other RNA
atgtcatcaacttgggagt

SEQ ID NO: 57976 - RNA, 19 nt, synthetic construct
  misc_feature 1..19: note = siRNA sense sequence
  source 1..19: mol_type = other RNA
ctcccaagttgatgacatt

SEQ ID NO: 57977 - RNA, 19 nt, synthetic construct
  misc_feature 1..19: note = siRNA antisense sequence
  source 1..19: mol_type = other RNA
aatgtcatcaacttgggag

SEQ ID NO: 57978 - RNA, 19 nt, synthetic construct
  misc_feature 1..19: note = siRNA sense sequence
  source 1..19: mol_type = other RNA
tcccaagttgatgacattc

SEQ ID NO: 57979 - RNA, 19 nt, synthetic construct
  misc_feature 1..19: note = siRNA antisense sequence
  source 1..19: mol_type = other RNA
gaatgtcatcaacttggga

SEQ ID NO: 57980 - RNA, 19 nt, synthetic construct
  misc_feature 1..19: note = siRNA sense sequence
  source 1..19: mol_type = other RNA
cccaagttgatgacattca

SEQ ID NO: 57981 - RNA, 19 nt, synthetic construct
  misc_feature 1..19: note = siRNA antisense sequence
  source 1..19: mol_type = other RNA
tgaatgtcatcaacttggg

SEQ ID NO: 57982 - RNA, 19 nt, synthetic construct
  misc_feature 1..19: note = siRNA sense sequence
  source 1..19: mol_type = other RNA
aaaatgtgtgagtaatccc

SEQ ID NO: 57983 - RNA, 19 nt, synthetic construct
  misc_feature 1..19: note = siRNA antisense sequence
  source 1..19: mol_type = other RNA
gggattactcacacatttt

SEQ ID NO: 57984 - RNA, 19 nt, synthetic construct
  misc_feature 1..19: note = siRNA sense sequence
  source 1..19: mol_type = other RNA
tgtgtgagtaatcccattg

SEQ ID NO: 57985 - RNA, 19 nt, synthetic construct
  misc_feature 1..19: note = siRNA antisense sequence
  source 1..19: mol_type = other RNA
caatgggattactcacaca

SEQ ID NO: 57986 - RNA, 19 nt, synthetic construct
  misc_feature 1..19: note = siRNA sense sequence
  source 1..19: mol_type = other RNA
gtgtgagtaatcccattgt

SEQ ID NO: 57987 - RNA, 19 nt, synthetic construct
  misc_feature 1..19: note = siRNA antisense sequence
  source 1..19: mol_type = other RNA
acaatgggattactcacac

SEQ ID NO: 57988 - RNA, 19 nt, synthetic construct
  misc_feature 1..19: note = siRNA sense sequence
  source 1..19: mol_type = other RNA
tgtgagtaatcccattgtt

SEQ ID NO: 57989 - RNA, 19 nt, synthetic construct
  misc_feature 1..19: note = siRNA antisense sequence
  source 1..19: mol_type = other RNA
aacaatgggattactcaca

SEQ ID NO: 57990 - RNA, 19 nt, synthetic construct
  misc_feature 1..19: note = siRNA sense sequence
  source 1..19: mol_type = other RNA
gtgagtaatcccattgttt

SEQ ID NO: 57991 - RNA, 19 nt, synthetic construct
  misc_feature 1..19: note = siRNA antisense sequence
  source 1..19: mol_type = other RNA
aaacaatgggattactcac

SEQ ID NO: 57992 - RNA, 19 nt, synthetic construct
  misc_feature 1..19: note = siRNA sense sequence
  source 1..19: mol_type = other RNA
tgagtaatcccattgtttt

SEQ ID NO: 57993 - RNA, 19 nt, synthetic construct
  misc_feature 1..19: note = siRNA antisense sequence
  source 1..19: mol_type = other RNA
aaaacaatgggattactca

SEQ ID NO: 57994 - RNA, 19 nt, synthetic construct
  misc_feature 1..19: note = siRNA sense sequence
  source 1..19: mol_type = other RNA
aagtgaccatgaattttga

SEQ ID NO: 57995 - RNA, 19 nt, synthetic construct
  misc_feature 1..19: note = siRNA antisense sequence
  source 1..19: mol_type = other RNA
tcaaaattcatggtcactt

SEQ ID NO: 57996 - RNA, 19 nt, synthetic construct
  misc_feature 1..19: note = siRNA sense sequence
  source 1..19: mol_type = other RNA
ttgagccaaataaagtgaa

SEQ ID NO: 57997 - RNA, 19 nt, synthetic construct
  misc_feature 1..19: note = siRNA antisense sequence
  source 1..19: mol_type = other RNA
ttcactttatttggctcaa

SEQ ID NO: 57998 - RNA, 19 nt, synthetic construct
  misc_feature 1..19: note = siRNA sense sequence
  source 1..19: mol_type = other RNA
tgagccaaataaagtgaat

SEQ ID NO: 57999 - RNA, 19 nt, synthetic construct
  misc_feature 1..19: note = siRNA antisense sequence
  source 1..19: mol_type = other RNA
attcactttatttggctca

SEQ ID NO: 58000 - RNA, 19 nt, synthetic construct
  misc_feature 1..19: note = siRNA sense sequence
  source 1..19: mol_type = other RNA
gagccaaataaagtgaata

SEQ ID NO: 58001 - RNA, 19 nt, synthetic construct
  misc_feature 1..19: note = siRNA antisense sequence
  source 1..19: mol_type = other RNA
tattcactttatttggctc

SEQ ID NO: 58002 - RNA, 19 nt, synthetic construct
  misc_feature 1..19: note = siRNA sense sequence
  source 1..19: mol_type = other RNA
aactgccatatggagggaa

SEQ ID NO: 58003 - RNA, 19 nt, synthetic construct
  misc_feature 1..19: note = siRNA antisense sequence
  source 1..19: mol_type = other RNA
ttccctccatatggcagtt

SEQ ID NO: 58004 - RNA, 19 nt, synthetic construct
  misc_feature 1..19: note = siRNA sense sequence
  source 1..19: mol_type = other RNA
acagtatgcataaatgcta

SEQ ID NO: 58005 - RNA, 19 nt, synthetic construct
  misc_feature 1..19: note = siRNA antisense sequence
  source 1..19: mol_type = other RNA
tagcatttatgcatactgt

SEQ ID NO: 58006 - RNA, 19 nt, synthetic construct
  misc_feature 1..19: note = siRNA sense sequence
  source 1..19: mol_type = other RNA
cagtatgcataaatgctac

SEQ ID NO: 58007 - RNA, 19 nt, synthetic construct
  misc_feature 1..19: note = siRNA antisense sequence
  source 1..19: mol_type = other RNA
gtagcatttatgcatactg

SEQ ID NO: 58008 - RNA, 19 nt, synthetic construct
  misc_feature 1..19: note = siRNA sense sequence
  source 1..19: mol_type = other RNA
agtatgcataaatgctaca

SEQ ID NO: 58009 - RNA, 19 nt, synthetic construct
  misc_feature 1..19: note = siRNA antisense sequence
  source 1..19: mol_type = other RNA
tgtagcatttatgcatact

SEQ ID NO: 58010 - RNA, 19 nt, synthetic construct
  misc_feature 1..19: note = siRNA sense sequence
  source 1..19: mol_type = other RNA
gtatgcataaatgctacag

SEQ ID NO: 58011 - RNA, 19 nt, synthetic construct
  misc_feature 1..19: note = siRNA antisense sequence
  source 1..19: mol_type = other RNA
ctgtagcatttatgcatac

SEQ ID NO: 58012 - RNA, 19 nt, synthetic construct
  misc_feature 1..19: note = siRNA sense sequence
  source 1..19: mol_type = other RNA
atgcataaatgctacagtg

SEQ ID NO: 58013 - RNA, 19 nt, synthetic construct
  misc_feature 1..19: note = siRNA antisense sequence
  source 1..19: mol_type = other RNA
cactgtagcatttatgcat

SEQ ID NO: 58014 - RNA, 19 nt, synthetic construct
  misc_feature 1..19: note = siRNA sense sequence
  source 1..19: mol_type = other RNA
tgcataaatgctacagtgt

SEQ ID NO: 58015 - RNA, 19 nt, synthetic construct
  misc_feature 1..19: note = siRNA antisense sequence
  source 1..19: mol_type = other RNA
acactgtagcatttatgca

SEQ ID NO: 58016 - RNA, 19 nt, synthetic construct
  misc_feature 1..19: note = siRNA sense sequence
  source 1..19: mol_type = other RNA
gcataaatgctacagtgtg

SEQ ID NO: 58017 - RNA, 19 nt, synthetic construct
  misc_feature 1..19: note = siRNA antisense sequence
  source 1..19: mol_type = other RNA
cacactgtagcatttatgc

SEQ ID NO: 58018 - RNA, 19 nt, synthetic construct
  misc_feature 1..19: note = siRNA sense sequence
  source 1..19: mol_type = other RNA
aaatgctacagtgtgtttt

SEQ ID NO: 58019 - RNA, 19 nt, synthetic construct
  misc_feature 1..19: note = siRNA antisense sequence
  source 1..19: mol_type = other RNA
aaaacacactgtagcattt

SEQ ID NO: 58020 - RNA, 19 nt, synthetic construct
  misc_feature 1..19: note = siRNA sense sequence
  source 1..19: mol_type = other RNA
aatgctacagtgtgttttg

SEQ ID NO: 58021 - RNA, 19 nt, synthetic construct
  misc_feature 1..19: note = siRNA antisense sequence
  source 1..19: mol_type = other RNA
caaaacacactgtagcatt

SEQ ID NO: 58022 - RNA, 19 nt, synthetic construct
  misc_feature 1..19: note = siRNA sense sequence
  source 1..19: mol_type = other RNA
gctacagtgtgttttgatg

SEQ ID NO: 58023 - RNA, 19 nt, synthetic construct
  misc_feature 1..19: note = siRNA antisense sequence
  source 1..19: mol_type = other RNA
catcaaaacacactgtagc

SEQ ID NO: 58024 - RNA, 19 nt, synthetic construct
  misc_feature 1..19: note = siRNA sense sequence
  source 1..19: mol_type = other RNA
ctacagtgtgttttgatgt

SEQ ID NO: 58025 - RNA, 19 nt, synthetic construct
  misc_feature 1..19: note = siRNA antisense sequence
  source 1..19: mol_type = other RNA
acatcaaaacacactgtag

SEQ ID NO: 58026 - RNA, 19 nt, synthetic construct
  misc_feature 1..19: note = siRNA sense sequence
  source 1..19: mol_type = other RNA
tctaaagaagacacgattt

SEQ ID NO: 58027 - RNA, 19 nt, synthetic construct
  misc_feature 1..19: note = siRNA antisense sequence
  source 1..19: mol_type = other RNA
aaatcgtgtcttctttaga

SEQ ID NO: 58028 - RNA, 19 nt, synthetic construct
  misc_feature 1..19: note = siRNA sense sequence
  source 1..19: mol_type = other RNA
aaagaagacacgatttatg

SEQ ID NO: 58029 - RNA, 19 nt, synthetic construct
  misc_feature 1..19: note = siRNA antisense sequence
  source 1..19: mol_type = other RNA
cataaatcgtgtcttcttt

SEQ ID NO: 58030 - RNA, 19 nt, synthetic construct
  misc_feature 1..19: note = siRNA sense sequence
  source 1..19: mol_type = other RNA
aagaagacacgatttatga

SEQ ID NO: 58031 - RNA, 19 nt, synthetic construct
  misc_feature 1..19: note = siRNA antisense sequence
  source 1..19: mol_type = other RNA
tcataaatcgtgtcttctt

SEQ ID NO: 58032 - RNA, 19 nt, synthetic construct
  misc_feature 1..19: note = siRNA sense sequence
  source 1..19: mol_type = other RNA
agaagacacgatttatgaa

SEQ ID NO: 58033 - RNA, 19 nt, synthetic construct
  misc_feature 1..19: note = siRNA antisense sequence
  source 1..19: mol_type = other RNA
ttcataaatcgtgtcttct

SEQ ID NO: 58034 - RNA, 19 nt, synthetic construct
  misc_feature 1..19: note = siRNA sense sequence
  source 1..19: mol_type = other RNA
gaagacacgatttatgaag

SEQ ID NO: 58035 - RNA, 19 nt, synthetic construct
  misc_feature 1..19: note = siRNA antisense sequence
  source 1..19: mol_type = other RNA
cttcataaatcgtgtcttc

SEQ ID NO: 58036 - RNA, 19 nt, synthetic construct
  misc_feature 1..19: note = siRNA sense sequence
  source 1..19: mol_type = other RNA
aagacacgatttatgaagc

SEQ ID NO: 58037 - RNA, 19 nt, synthetic construct
  misc_feature 1..19: note = siRNA antisense sequence
  source 1..19: mol_type = other RNA
gcttcataaatcgtgtctt

SEQ ID NO: 58038 - RNA, 19 nt, synthetic construct
  misc_feature 1..19: note = siRNA sense sequence
  source 1..19: mol_type = other RNA
agacacgatttatgaagct

SEQ ID NO: 58039 - RNA, 19 nt, synthetic construct
  misc_feature 1..19: note = siRNA antisense sequence
  source 1..19: mol_type = other RNA
agcttcataaatcgtgtct

SEQ ID NO: 58040 - RNA, 19 nt, synthetic construct
  misc_feature 1..19: note = siRNA sense sequence
  source 1..19: mol_type = other RNA
gacacgatttatgaagctg

SEQ ID NO: 58041 - RNA, 19 nt, synthetic construct
  misc_feature 1..19: note = siRNA antisense sequence
  source 1..19: mol_type = other RNA
cagcttcataaatcgtgtc

SEQ ID NO: 58042 - RNA, 19 nt, synthetic construct
  misc_feature 1..19: note = siRNA sense sequence
  source 1..19: mol_type = other RNA
acacgatttatgaagctgg

SEQ ID NO: 58043 - RNA, 19 nt, synthetic construct
  misc_feature 1..19: note = siRNA antisense sequence
  source 1..19: mol_type = other RNA
ccagcttcataaatcgtgt

SEQ ID NO: 58044 - RNA, 19 nt, synthetic construct
  misc_feature 1..19: note = siRNA sense sequence
  source 1..19: mol_type = other RNA
cacgatttatgaagctggt

SEQ ID NO: 58045 - RNA, 19 nt, synthetic construct
  misc_feature 1..19: note = siRNA antisense sequence
  source 1..19: mol_type = other RNA
accagcttcataaatcgtg

SEQ ID NO: 58046 - RNA, 19 nt, synthetic construct
  misc_feature 1..19: note = siRNA sense sequence
  source 1..19: mol_type = other RNA
acgatttatgaagctggta

SEQ ID NO: 58047 - RNA, 19 nt, synthetic construct
  misc_feature 1..19: note = siRNA antisense sequence
  source 1..19: mol_type = other RNA
taccagcttcataaatcgt

SEQ ID NO: 58048 - RNA, 19 nt, synthetic construct
  misc_feature 1..19: note = siRNA sense sequence
  source 1..19: mol_type = other RNA
cgatttatgaagctggtaa

SEQ ID NO: 58049 - RNA, 19 nt, synthetic construct
  misc_feature 1..19: note = siRNA antisense sequence
  source 1..19: mol_type = other RNA
ttaccagcttcataaatcg

SEQ ID NO: 58050 - RNA, 19 nt, synthetic construct
  misc_feature 1..19: note = siRNA sense sequence
  source 1..19: mol_type = other RNA
gatttatgaagctggtaag

SEQ ID NO: 58051 - RNA, 19 nt, synthetic construct
  misc_feature 1..19: note = siRNA antisense sequence
  source 1..19: mol_type = other RNA
cttaccagcttcataaatc

SEQ ID NO: 58052 - RNA, 19 nt, synthetic construct
  misc_feature 1..19: note = siRNA sense sequence
  source 1..19: mol_type = other RNA
tttatgaagctggtaagca

SEQ ID NO: 58053 - RNA, 19 nt, synthetic construct
  misc_feature 1..19: note = siRNA antisense sequence
  source 1..19: mol_type = other RNA
tgcttaccagcttcataaa

SEQ ID NO: 58054 - RNA, 19 nt, synthetic construct
  misc_feature 1..19: note = siRNA sense sequence
  source 1..19: mol_type = other RNA
ttatgaagctggtaagcaa

SEQ ID NO: 58055 - RNA, 19 nt, synthetic construct
  misc_feature 1..19: note = siRNA antisense sequence
  source 1..19: mol_type = other RNA
ttgcttaccagcttcataa

SEQ ID NO: 58056 - RNA, 19 nt, synthetic construct
  misc_feature 1..19: note = siRNA sense sequence
  source 1..19: mol_type = other RNA
tatgaagctggtaagcaaa

SEQ ID NO: 58057 - RNA, 19 nt, synthetic construct
  misc_feature 1..19: note = siRNA antisense sequence
  source 1..19: mol_type = other RNA
tttgcttaccagcttcata

SEQ ID NO: 58058 - RNA, 19 nt, synthetic construct
  misc_feature 1..19: note = siRNA sense sequence
  source 1..19: mol_type = other RNA
atgaagctggtaagcaaaa

SEQ ID NO: 58059 - RNA, 19 nt, synthetic construct
  misc_feature 1..19: note = siRNA antisense sequence
  source 1..19: mol_type = other RNA
ttttgcttaccagcttcat

SEQ ID NO: 58060 - RNA, 19 nt, synthetic construct
  misc_feature 1..19: note = siRNA sense sequence
  source 1..19: mol_type = other RNA
tgaagctggtaagcaaaat

SEQ ID NO: 58061 - RNA, 19 nt, synthetic construct
  misc_feature 1..19: note = siRNA antisense sequence
  source 1..19: mol_type = other RNA
attttgcttaccagcttca

SEQ ID NO: 58062 - RNA, 19 nt, synthetic construct
  misc_feature 1..19: note = siRNA sense sequence
  source 1..19: mol_type = other RNA
gaagctggtaagcaaaata

SEQ ID NO: 58063 - RNA, 19 nt, synthetic construct
  misc_feature 1..19: note = siRNA antisense sequence
  source 1..19: mol_type = other RNA
tattttgcttaccagcttc

SEQ ID NO: 58064 - RNA, 19 nt, synthetic construct
  misc_feature 1..19: note = siRNA sense sequence
  source 1..19: mol_type = other RNA
aagctggtaagcaaaataa

SEQ ID NO: 58065 - RNA, 19 nt, synthetic construct
  misc_feature 1..19: note = siRNA antisense sequence
  source 1..19: mol_type = other RNA
ttattttgcttaccagctt

SEQ ID NO: 58066 - RNA, 19 nt, synthetic construct
  misc_feature 1..19: note = siRNA sense sequence
  source 1..19: mol_type = other RNA
ttatagcaagtacttttgg

SEQ ID NO: 58067 - RNA, 19 nt, synthetic construct
  misc_feature 1..19: note = siRNA antisense sequence
  source 1..19: mol_type = other RNA
ccaaaagtacttgctataa

SEQ ID NO: 58068 - RNA, 19 nt, synthetic construct
  misc_feature 1..19: note = siRNA sense sequence
  source 1..19: mol_type = other RNA
tatagcaagtacttttggg

SEQ ID NO: 58069 - RNA, 19 nt, synthetic construct
  misc_feature 1..19: note = siRNA antisense sequence
  source 1..19: mol_type = other RNA
cccaaaagtacttgctata

SEQ ID NO: 58070 - RNA, 19 nt, synthetic construct
  misc_feature 1..19: note = siRNA sense sequence
  source 1..19: mol_type = other RNA
atagcaagtacttttgggt

SEQ ID NO: 58071 - RNA, 19 nt, synthetic construct
  misc_feature 1..19: note = siRNA antisense sequence
  source 1..19: mol_type = other RNA
acccaaaagtacttgctat

SEQ ID NO: 58072 - RNA, 19 nt, synthetic construct
  misc_feature 1..19: note = siRNA sense sequence
  source 1..19: mol_type = other RNA
tagcaagtacttttgggta

SEQ ID NO: 58073 - RNA, 19 nt, synthetic construct
  misc_feature 1..19: note = siRNA antisense sequence
  source 1..19: mol_type = other RNA
tacccaaaagtacttgcta

SEQ ID NO: 58074 - RNA, 19 nt, synthetic construct
  misc_feature 1..19: note = siRNA sense sequence
  source 1..19: mol_type = other RNA
agcaagtacttttgggtag

SEQ ID NO: 58075 - RNA, 19 nt, synthetic construct
  misc_feature 1..19: note = siRNA antisense sequence
  source 1..19: mol_type = other RNA
ctacccaaaagtacttgct

SEQ ID NO: 58076 - RNA, 19 nt, synthetic construct
  misc_feature 1..19: note = siRNA sense sequence
  source 1..19: mol_type = other RNA
gcaagtacttttgggtaga

SEQ ID NO: 58077 - RNA, 19 nt, synthetic construct
  misc_feature 1..19: note = siRNA antisense sequence
  source 1..19: mol_type = other RNA
tctacccaaaagtacttgc

SEQ ID NO: 58078 - RNA, 19 nt, synthetic construct
  misc_feature 1..19: note = siRNA sense sequence
  source 1..19: mol_type = other RNA
caagtacttttgggtagag

SEQ ID NO: 58079 - RNA, 19 nt, synthetic construct
  misc_feature 1..19: note = siRNA antisense sequence
  source 1..19: mol_type = other RNA
ctctacccaaaagtacttg

SEQ ID NO: 58080 - RNA, 19 nt, synthetic construct
  misc_feature 1..19: note = siRNA sense sequence
  source 1..19: mol_type = other RNA
aagtacttttgggtagagg

SEQ ID NO: 58081 - RNA, 19 nt, synthetic construct
  misc_feature 1..19: note = siRNA antisense sequence
  source 1..19: mol_type = other RNA
cctctacccaaaagtactt

SEQ ID NO: 58082 - RNA, 19 nt, synthetic construct
  misc_feature 1..19: note = siRNA sense sequence
  source 1..19: mol_type = other RNA
agtacttttgggtagagga

SEQ ID NO: 58083 - RNA, 19 nt, synthetic construct
  misc_feature 1..19: note = siRNA antisense sequence
  source 1..19: mol_type = other RNA
tcctctacccaaaagtact

SEQ ID NO: 58084 - RNA, 19 nt, synthetic construct
  misc_feature 1..19: note = siRNA sense sequence
  source 1..19: mol_type = other RNA
gtacttttgggtagaggac

SEQ ID NO: 58085 - RNA, 19 nt, synthetic construct
  misc_feature 1..19: note = siRNA antisense sequence
  source 1..19: mol_type = other RNA
gtcctctacccaaaagtac

SEQ ID NO: 58086 - RNA, 19 nt, synthetic construct
  misc_feature 1..19: note = siRNA sense sequence
  source 1..19: mol_type = other RNA
tacttttgggtagaggaca

SEQ ID NO: 58087 - RNA, 19 nt, synthetic construct
  misc_feature 1..19: note = siRNA antisense sequence
  source 1..19: mol_type = other RNA
tgtcctctacccaaaagta

SEQ ID NO: 58088 - RNA, 19 nt, synthetic construct
  misc_feature 1..19: note = siRNA sense sequence
  source 1..19: mol_type = other RNA
atatatttgctctagcatg

SEQ ID NO: 58089 - RNA, 19 nt, synthetic construct
  misc_feature 1..19: note = siRNA antisense sequence
  source 1..19: mol_type = other RNA
catgctagagcaaatatat

SEQ ID NO: 58090 - RNA, 19 nt, synthetic construct
  misc_feature 1..19: note = siRNA sense sequence
  source 1..19: mol_type = other RNA
tatatttgctctagcatga

SEQ ID NO: 58091 - RNA, 19 nt, synthetic construct
  misc_feature 1..19: note = siRNA antisense sequence
  source 1..19: mol_type = other RNA
tcatgctagagcaaatata

SEQ ID NO: 58092 - RNA, 19 nt, synthetic construct
  misc_feature 1..19: note = siRNA sense sequence
  source 1..19: mol_type = other RNA
atatttgctctagcatgat

SEQ ID NO: 58093 - RNA, 19 nt, synthetic construct
  misc_feature 1..19: note = siRNA antisense sequence
  source 1..19: mol_type = other RNA
atcatgctagagcaaatat

SEQ ID NO: 58094 - RNA, 19 nt, synthetic construct
  misc_feature 1..19: note = siRNA sense sequence
  source 1..19: mol_type = other RNA
tatttgctctagcatgatg

SEQ ID NO: 58095 - RNA, 19 nt, synthetic construct
  misc_feature 1..19: note = siRNA antisense sequence
  source 1..19: mol_type = other RNA
catcatgctagagcaaata

SEQ ID NO: 58096 - RNA, 19 nt, synthetic construct
  misc_feature 1..19: note = siRNA sense sequence
  source 1..19: mol_type = other RNA
atttgctctagcatgatga

SEQ ID NO: 58097 - RNA, 19 nt, synthetic construct
  misc_feature 1..19: note = siRNA antisense sequence
  source 1..19: mol_type = other RNA
tcatcatgctagagcaaat

SEQ ID NO: 58098 - RNA, 19 nt, synthetic construct
  misc_feature 1..19: note = siRNA sense sequence
  source 1..19: mol_type = other RNA
tttgctctagcatgatgaa

SEQ ID NO: 58099 - RNA, 19 nt, synthetic construct
  misc_feature 1..19: note = siRNA antisense sequence
  source 1..19: mol_type = other RNA
ttcatcatgctagagcaaa

SEQ ID NO: 58100 - RNA, 19 nt, synthetic construct
  misc_feature 1..19: note = siRNA sense sequence
  source 1..19: mol_type = other RNA
ttgctctagcatgatgaag

SEQ ID NO: 58101 - RNA, 19 nt, synthetic construct
  misc_feature 1..19: note = siRNA antisense sequence
  source 1..19: mol_type = other RNA
cttcatcatgctagagcaa

SEQ ID NO: 58102 - RNA, 19 nt, synthetic construct
  misc_feature 1..19: note = siRNA sense sequence
  source 1..19: mol_type = other RNA
tgctctagcatgatgaagt

SEQ ID NO: 58103 - RNA, 19 nt, synthetic construct
  misc_feature 1..19: note = siRNA antisense sequence
  source 1..19: mol_type = other RNA
acttcatcatgctagagca

SEQ ID NO: 58104 - RNA, 19 nt, synthetic construct
  misc_feature 1..19: note = siRNA sense sequence
  source 1..19: mol_type = other RNA
gctctagcatgatgaagtc

SEQ ID NO: 58105 - RNA, 19 nt, synthetic construct
  misc_feature 1..19: note = siRNA antisense sequence
  source 1..19: mol_type = other RNA
gacttcatcatgctagagc

SEQ ID NO: 58106 - RNA, 19 nt, synthetic construct
  misc_feature 1..19: note = siRNA sense sequence
  source 1..19: mol_type = other RNA
ctctagcatgatgaagtcc

SEQ ID NO: 58107 - RNA, 19 nt, synthetic construct
  misc_feature 1..19: note = siRNA antisense sequence
  source 1..19: mol_type = other RNA
ggacttcatcatgctagag

SEQ ID NO: 58108 - RNA, 19 nt, synthetic construct
  misc_feature 1..19: note = siRNA sense sequence
  source 1..19: mol_type = other RNA
acatggtgagctgcacgtc

SEQ ID NO: 58109 - RNA, 19 nt, synthetic construct
  misc_feature 1..19: note = siRNA antisense sequence
  source 1..19: mol_type = other RNA
gacgtgcagctcaccatgt

SEQ ID NO: 58110 - RNA, 19 nt, synthetic construct
  misc_feature 1..19: note = siRNA sense sequence
  source 1..19: mol_type = other RNA
catggtgagctgcacgtca

SEQ ID NO: 58111 - RNA, 19 nt, synthetic construct
  misc_feature 1..19: note = siRNA antisense sequence
  source 1..19: mol_type = other RNA
tgacgtgcagctcaccatg

SEQ ID NO: 58112 - RNA, 19 nt, synthetic construct
  misc_feature 1..19: note = siRNA sense sequence
  source 1..19: mol_type = other RNA
atggtgagctgcacgtcat

SEQ ID NO: 58113 - RNA, 19 nt, synthetic construct
  misc_feature 1..19: note = siRNA antisense sequence
  source 1..19: mol_type = other RNA
atgacgtgcagctcaccat

SEQ ID NO: 58114 - RNA, 19 nt, synthetic construct
  misc_feature 1..19: note = siRNA sense sequence
  source 1..19: mol_type = other RNA
tggtgagctgcacgtcata

SEQ ID NO: 58115 - RNA, 19 nt, synthetic construct
  misc_feature 1..19: note = siRNA antisense sequence
  source 1..19: mol_type = other RNA
tatgacgtgcagctcacca

SEQ ID NO: 58116 - RNA, 19 nt, synthetic construct
  misc_feature 1..19: note = siRNA sense sequence
  source 1..19: mol_type = other RNA
ggtgagctgcacgtcatat

SEQ ID NO: 58117 - RNA, 19 nt, synthetic construct
  misc_feature 1..19: note = siRNA antisense sequence
  source 1..19: mol_type = other RNA
atatgacgtgcagctcacc

SEQ ID NO: 58118 - RNA, 19 nt, synthetic construct
  misc_feature 1..19: note = siRNA sense sequence
  source 1..19: mol_type = other RNA
gtgagctgcacgtcatatt

SEQ ID NO: 58119 - RNA, 19 nt, synthetic construct
  misc_feature 1..19: note = siRNA antisense sequence
  source 1..19: mol_type = other RNA
aatatgacgtgcagctcac

SEQ ID NO: 58120 - RNA, 19 nt, synthetic construct
  misc_feature 1..19: note = siRNA sense sequence
  source 1..19: mol_type = other RNA
tgagctgcacgtcatattt

SEQ ID NO: 58121 - RNA, 19 nt, synthetic construct
  misc_feature 1..19: note = siRNA antisense sequence
  source 1..19: mol_type = other RNA
aaatatgacgtgcagctca

SEQ ID NO: 58122 - RNA, 19 nt, synthetic construct
  misc_feature 1..19: note = siRNA sense sequence
  source 1..19: mol_type = other RNA
gagctgcacgtcatatttg

SEQ ID NO: 58123 - RNA, 19 nt, synthetic construct
  misc_feature 1..19: note = siRNA antisense sequence
  source 1..19: mol_type = other RNA
caaatatgacgtgcagctc

SEQ ID NO: 58124 - RNA, 19 nt, synthetic construct
  misc_feature 1..19: note = siRNA sense sequence
  source 1..19: mol_type = other RNA
agctgcacgtcatatttgc

SEQ ID NO: 58125 - RNA, 19 nt, synthetic construct
  misc_feature 1..19: note = siRNA antisense sequence
  source 1..19: mol_type = other RNA
gcaaatatgacgtgcagct

SEQ ID NO: 58126 - RNA, 19 nt, synthetic construct
  misc_feature 1..19: note = siRNA sense sequence
  source 1..19: mol_type = other RNA
aaaattctgttgcaaaagg

SEQ ID NO: 58127 - RNA, 19 nt, synthetic construct
  misc_feature 1..19: note = siRNA antisense sequence
  source 1..19: mol_type = other RNA
ccttttgcaacagaatttt

SEQ ID NO: 58128 - RNA, 19 nt, synthetic construct
  misc_feature 1..19: note = siRNA sense sequence
  source 1..19: mol_type = other RNA
aaattctgttgcaaaagga

SEQ ID NO: 58129 - RNA, 19 nt, synthetic construct
  misc_feature 1..19: note = siRNA antisense sequence
  source 1..19: mol_type = other RNA
tccttttgcaacagaattt

SEQ ID NO: 58130 - RNA, 19 nt, synthetic construct
  misc_feature 1..19: note = siRNA sense sequence
  source 1..19: mol_type = other RNA
aattctgttgcaaaaggaa

SEQ ID NO: 58131 - RNA, 19 nt, synthetic construct
  misc_feature 1..19: note = siRNA antisense sequence
  source 1..19: mol_type = other RNA
ttccttttgcaacagaatt

SEQ ID NO: 58132 - RNA, 19 nt, synthetic construct
  misc_feature 1..19: note = siRNA sense sequence
  source 1..19: mol_type = other RNA
ttctgttgcaaaaggaata

SEQ ID NO: 58133 - RNA, 19 nt, synthetic construct
  misc_feature 1..19: note = siRNA antisense sequence
  source 1..19: mol_type = other RNA
tattccttttgcaacagaa

SEQ ID NO: 58134 - RNA, 19 nt, synthetic construct
  misc_feature 1..19: note = siRNA sense sequence
  source 1..19: mol_type = other RNA
ttgcaaaaggaataggtta

SEQ ID NO: 58135 - RNA, 19 nt, synthetic construct
  misc_feature 1..19: note = siRNA antisense sequence
  source 1..19: mol_type = other RNA
taacctattccttttgcaa

SEQ ID NO: 58136 - RNA, 19 nt, synthetic construct
  misc_feature 1..19: note = siRNA sense sequence
  source 1..19: mol_type = other RNA
tgcaaaaggaataggttat

SEQ ID NO: 58137 - RNA, 19 nt, synthetic construct
  misc_feature 1..19: note = siRNA antisense sequence
  source 1..19: mol_type = other RNA
ataacctattccttttgca

SEQ ID NO: 58138 - RNA, 19 nt, synthetic construct
  misc_feature 1..19: note = siRNA sense sequence
  source 1..19: mol_type = other RNA
gcaaaaggaataggttatg

SEQ ID NO: 58139 - RNA, 19 nt, synthetic construct
  misc_feature 1..19: note = siRNA antisense sequence
  source 1..19: mol_type = other RNA
cataacctattccttttgc

SEQ ID NO: 58140 - RNA, 19 nt, synthetic construct
  misc_feature 1..19: note = siRNA sense sequence
  source 1..19: mol_type = other RNA
caaaaggaataggttatgg

SEQ ID NO: 58141 - RNA, 19 nt, synthetic construct
  misc_feature 1..19: note = siRNA antisense sequence
  source 1..19: mol_type = other RNA
ccataacctattccttttg

SEQ ID NO: 58142 - RNA, 19 nt, synthetic construct
  misc_feature 1..19: note = siRNA sense sequence
  source 1..19: mol_type = other RNA
aaaaggaataggttatgga

SEQ ID NO: 58143 - RNA, 19 nt, synthetic construct
  misc_feature 1..19: note = siRNA antisense sequence
  source 1..19: mol_type = other RNA
tccataacctattcctttt

SEQ ID NO: 58144 - RNA, 19 nt, synthetic construct
  misc_feature 1..19: note = siRNA sense sequence
  source 1..19: mol_type = other RNA
aaaggaataggttatggaa

SEQ ID NO: 58145 - RNA, 19 nt, synthetic construct
  misc_feature 1..19: note = siRNA antisense sequence
  source 1..19: mol_type = other RNA
ttccataacctattccttt

SEQ ID NO: 58146 - RNA, 19 nt, synthetic construct
  misc_feature 1..19: note = siRNA sense sequence
  source 1..19: mol_type = other RNA
atgtttgtatgcagtgccc

SEQ ID NO: 58147 - RNA, 19 nt, synthetic construct
  misc_feature 1..19: note = siRNA antisense sequence
  source 1..19: mol_type = other RNA
gggcactgcatacaaacat

SEQ ID NO: 58148 - RNA, 19 nt, synthetic construct
  misc_feature 1..19: note = siRNA sense sequence
  source 1..19: mol_type = other RNA
tgtttgtatgcagtgccct

SEQ ID NO: 58149 - RNA, 19 nt, synthetic construct
  misc_feature 1..19: note = siRNA antisense sequence
  source 1..19: mol_type = other RNA
agggcactgcatacaaaca

SEQ ID NO: 58150 - RNA, 19 nt, synthetic construct
  misc_feature 1..19: note = siRNA sense sequence
  source 1..19: mol_type = other RNA
gtttgtatgcagtgccctc

SEQ ID NO: 58151 - RNA, 19 nt, synthetic construct
  misc_feature 1..19: note = siRNA antisense sequence
  source 1..19: mol_type = other RNA
gagggcactgcatacaaac

SEQ ID NO: 58152 - RNA, 19 nt, synthetic construct
  misc_feature 1..19: note = siRNA sense sequence
  source 1..19: mol_type = other RNA
tttgtatgcagtgccctca

SEQ ID NO: 58153 - RNA, 19 nt, synthetic construct
  misc_feature 1..19: note = siRNA antisense sequence
  source 1..19: mol_type = other RNA
tgagggcactgcatacaaa

SEQ ID NO: 58154 - RNA, 19 nt, synthetic construct
  misc_feature 1..19: note = siRNA sense sequence
  source 1..19: mol_type = other RNA
ttgtatgcagtgccctcaa

SEQ ID NO: 58155 - RNA, 19 nt, synthetic construct
  misc_feature 1..19: note = siRNA antisense sequence
  source 1..19: mol_type = other RNA
ttgagggcactgcatacaa

SEQ ID NO: 58156 - RNA, 19 nt, synthetic construct
  misc_feature 1..19: note = siRNA sense sequence
  source 1..19: mol_type = other RNA
tgtatgcagtgccctcaac

SEQ ID NO: 58157 - RNA, 19 nt, synthetic construct
  misc_feature 1..19: note = siRNA antisense sequence
  source 1..19: mol_type = other RNA
gttgagggcactgcataca

SEQ ID NO: 58158 - RNA, 19 nt, synthetic construct
  misc_feature 1..19: note = siRNA sense sequence
  source 1..19: mol_type = other RNA
acactccatagtttctgtc

SEQ ID NO: 58159 - RNA, 19 nt, synthetic construct
  misc_feature 1..19: note = siRNA antisense sequence
  source 1..19: mol_type = other RNA
gacagaaactatggagtgt

SEQ ID NO: 58160 - RNA, 19 nt, synthetic construct
  misc_feature 1..19: note = siRNA sense sequence
  source 1..19: mol_type = other RNA
cactccatagtttctgtct

SEQ ID NO: 58161 - RNA, 19 nt, synthetic construct
  misc_feature 1..19: note = siRNA antisense sequence
  source 1..19: mol_type = other RNA
agacagaaactatggagtg

SEQ ID NO: 58162 - RNA, 19 nt, synthetic construct
  misc_feature 1..19: note = siRNA sense sequence
  source 1..19: mol_type = other RNA
actccatagtttctgtctg

SEQ ID NO: 58163 - RNA, 19 nt, synthetic construct
  misc_feature 1..19: note = siRNA antisense sequence
  source 1..19: mol_type = other RNA
cagacagaaactatggagt

SEQ ID NO: 58164 - RNA, 19 nt, synthetic construct
  misc_feature 1..19: note = siRNA sense sequence
  source 1..19: mol_type = other RNA
tccatagtttctgtctggc

SEQ ID NO: 58165 - RNA, 19 nt, synthetic construct
  misc_feature 1..19: note = siRNA antisense sequence
  source 1..19: mol_type = other RNA
gccagacagaaactatgga

SEQ ID NO: 58166 - RNA, 19 nt, synthetic construct
  misc_feature 1..19: note = siRNA sense sequence
  source 1..19: mol_type = other RNA
ccatagtttctgtctggct

SEQ ID NO: 58167 - RNA, 19 nt, synthetic construct
  misc_feature 1..19: note = siRNA antisense sequence
  source 1..19: mol_type = other RNA
agccagacagaaactatgg

SEQ ID NO: 58168 - RNA, 19 nt, synthetic construct
  misc_feature 1..19: note = siRNA sense sequence
  source 1..19: mol_type = other RNA
tagtttctgtctggctctc

SEQ ID NO: 58169 - RNA, 19 nt, synthetic construct
  misc_feature 1..19: note = siRNA antisense sequence
  source 1..19: mol_type = other RNA
gagagccagacagaaacta

SEQ ID NO: 58170 - RNA, 19 nt, synthetic construct
  misc_feature 1..19: note = siRNA sense sequence
  source 1..19: mol_type = other RNA
ttctgtctggctctcctac

SEQ ID NO: 58171 - RNA, 19 nt, synthetic construct
  misc_feature 1..19: note = siRNA antisense sequence
  source 1..19: mol_type = other RNA
gtaggagagccagacagaa

SEQ ID NO: 58172 - RNA, 19 nt, synthetic construct
  misc_feature 1..19: note = siRNA sense sequence
  source 1..19: mol_type = other RNA
tctgtctggctctcctact

SEQ ID NO: 58173 - RNA, 19 nt, synthetic construct
  misc_feature 1..19: note = siRNA antisense sequence
  source 1..19: mol_type = other RNA
agtaggagagccagacaga

SEQ ID NO: 58174 - RNA, 19 nt, synthetic construct
  misc_feature 1..19: note = siRNA sense sequence
  source 1..19: mol_type = other RNA
ctgtctggctctcctactt

SEQ ID NO: 58175 - RNA, 19 nt, synthetic construct
  misc_feature 1..19: note = siRNA antisense sequence
  source 1..19: mol_type = other RNA
aagtaggagagccagacag

SEQ ID NO: 58176 - RNA, 19 nt, synthetic construct
  misc_feature 1..19: note = siRNA sense sequence
  source 1..19: mol_type = other RNA
tgtctggctctcctacttg

SEQ ID NO: 58177 - RNA, 19 nt, synthetic construct
  misc_feature 1..19: note = siRNA antisense sequence
  source 1..19: mol_type = other RNA
caagtaggagagccagaca

SEQ ID NO: 58178 - RNA, 19 nt, synthetic construct
  misc_feature 1..19: note = siRNA sense sequence
  source 1..19: mol_type = other RNA
gtctggctctcctacttgc

SEQ ID NO: 58179 - RNA, 19 nt, synthetic construct
  misc_feature 1..19: note = siRNA antisense sequence
  source 1..19: mol_type = other RNA
gcaagtaggagagccagac

SEQ ID NO: 58180 - RNA, 19 nt, synthetic construct
  misc_feature 1..19: note = siRNA sense sequence
  source 1..19: mol_type = other RNA
tggctctcctacttgctat

SEQ ID NO: 58181 - RNA, 19 nt, synthetic construct
  misc_feature 1..19: note = siRNA antisense sequence
  source 1..19: mol_type = other RNA
atagcaagtaggagagcca

SEQ ID NO: 58182 - RNA, 19 nt, synthetic construct
  misc_feature 1..19: note = siRNA sense sequence
  source 1..19: mol_type = other RNA
ggctctcctacttgctatg

SEQ ID NO: 58183 - RNA, 19 nt, synthetic construct
  misc_feature 1..19: note = siRNA antisense sequence
  source 1..19: mol_type = other RNA
catagcaagtaggagagcc

SEQ ID NO: 58184 - RNA, 19 nt, synthetic construct
  misc_feature 1..19: note = siRNA sense sequence
  source 1..19: mol_type = other RNA
gttttccttcctgtaggtt

SEQ ID NO: 58185 - RNA, 19 nt, synthetic construct
  misc_feature 1..19: note = siRNA antisense sequence
  source 1..19: mol_type = other RNA
aacctacaggaaggaaaac

SEQ ID NO: 58186 - RNA, 19 nt, synthetic construct
  misc_feature 1..19: note = siRNA sense sequence
  source 1..19: mol_type = other RNA
ttttccttcctgtaggttt

SEQ ID NO: 58187 - RNA, 19 nt, synthetic construct
  misc_feature 1..19: note = siRNA antisense sequence
  source 1..19: mol_type = other RNA
aaacctacaggaaggaaaa

SEQ ID NO: 58188 - RNA, 19 nt, synthetic construct
  misc_feature 1..19: note = siRNA sense sequence
  source 1..19: mol_type = other RNA
ttccttcctgtaggtttct

SEQ ID NO: 58189 - RNA, 19 nt, synthetic construct
  misc_feature 1..19: note = siRNA antisense sequence
  source 1..19: mol_type = other RNA
agaaacctacaggaaggaa

SEQ ID NO: 58190 - RNA, 19 nt, synthetic construct
  misc_feature 1..19: note = siRNA sense sequence
  source 1..19: mol_type = other RNA
tccttcctgtaggtttcta

SEQ ID NO: 58191 - RNA, 19 nt, synthetic construct
  misc_feature 1..19: note = siRNA antisense sequence
  source 1..19: mol_type = other RNA
tagaaacctacaggaagga

SEQ ID NO: 58192 - RNA, 19 nt, synthetic construct
  misc_feature 1..19: note = siRNA sense sequence
  source 1..19: mol_type = other RNA
taggtttctaccatgactc

SEQ ID NO: 58193 - RNA, 19 nt, synthetic construct
  misc_feature 1..19: note = siRNA antisense sequence
  source 1..19: mol_type = other RNA
gagtcatggtagaaaccta

SEQ ID NO: 58194 - RNA, 19 nt, synthetic construct
  misc_feature 1..19: note = siRNA sense sequence
  source 1..19: mol_type = other RNA
aggtttctaccatgactct

SEQ ID NO: 58195 - RNA, 19 nt, synthetic construct
  misc_feature 1..19: note = siRNA antisense sequence
  source 1..19: mol_type = other RNA
agagtcatggtagaaacct

SEQ ID NO: 58196 - RNA, 19 nt, synthetic construct
  misc_feature 1..19: note = siRNA sense sequence
  source 1..19: mol_type = other RNA
ggtttctaccatgactctt

SEQ ID NO: 58197 - RNA, 19 nt, synthetic construct
  misc_feature 1..19: note = siRNA antisense sequence
  source 1..19: mol_type = other RNA
aagagtcatggtagaaacc

SEQ ID NO: 58198 - RNA, 19 nt, synthetic construct
  misc_feature 1..19: note = siRNA sense sequence
  source 1..19: mol_type = other RNA
gtttctaccatgactcttc

SEQ ID NO: 58199 - RNA, 19 nt, synthetic construct
  misc_feature 1..19: note = siRNA antisense sequence
  source 1..19: mol_type = other RNA
gaagagtcatggtagaaac

SEQ ID NO: 58200 - RNA, 19 nt, synthetic construct
  misc_feature 1..19: note = siRNA sense sequence
  source 1..19: mol_type = other RNA
tttctaccatgactcttct

SEQ ID NO: 58201 - RNA, 19 nt, synthetic construct
  misc_feature 1..19: note = siRNA antisense sequence
  source 1..19: mol_type = other RNA
agaagagtcatggtagaaa

SEQ ID NO: 58202 - RNA, 19 nt, synthetic construct
  misc_feature 1..19: note = siRNA sense sequence
  source 1..19: mol_type = other RNA
tctaccatgactcttctct

SEQ ID NO: 58203 - RNA, 19 nt, synthetic construct
  misc_feature 1..19: note = siRNA antisense sequence
  source 1..19: mol_type = other RNA
agagaagagtcatggtaga

SEQ ID NO: 58204 - RNA, 19 nt, synthetic construct
  misc_feature 1..19: note = siRNA sense sequence
  source 1..19: mol_type = other RNA
ctaccatgactcttctctc

SEQ ID NO: 58205 - RNA, 19 nt, synthetic construct
  misc_feature 1..19: note = siRNA antisense sequence
  source 1..19: mol_type = other RNA
gagagaagagtcatggtag

SEQ ID NO: 58206 - RNA, 19 nt, synthetic construct
  misc_feature 1..19: note = siRNA sense sequence
  source 1..19: mol_type = other RNA
catgactcttctctccctt

SEQ ID NO: 58207 - RNA, 19 nt, synthetic construct
  misc_feature 1..19: note = siRNA antisense sequence
  source 1..19: mol_type = other RNA
aagggagagaagagtcatg

SEQ ID NO: 58208 - RNA, 19 nt, synthetic construct
  misc_feature 1..19: note = siRNA sense sequence
  source 1..19: mol_type = other RNA
aaagactgatattgcagag

SEQ ID NO: 58209 - RNA, 19 nt, synthetic construct
  misc_feature 1..19: note = siRNA antisense sequence
  source 1..19: mol_type = other RNA
ctctgcaatatcagtcttt

SEQ ID NO: 58210 - RNA, 19 nt, synthetic construct
  misc_feature 1..19: note = siRNA sense sequence
  source 1..19: mol_type = other RNA
aaccctaatactttaccat

SEQ ID NO: 58211 - RNA, 19 nt, synthetic construct
  misc_feature 1..19: note = siRNA antisense sequence
  source 1..19: mol_type = other RNA
atggtaaagtattagggtt

SEQ ID NO: 58212 - RNA, 19 nt, synthetic construct
  misc_feature 1..19: note = siRNA sense sequence
  source 1..19: mol_type = other RNA
accctaatactttaccatt

SEQ ID NO: 58213 - RNA, 19 nt, synthetic construct
  misc_feature 1..19: note = siRNA antisense sequence
  source 1..19: mol_type = other RNA
aatggtaaagtattagggt

SEQ ID NO: 58214 - RNA, 19 nt, synthetic construct
  misc_feature 1..19: note = siRNA sense sequence
  source 1..19: mol_type = other RNA
ccctaatactttaccattc

SEQ ID NO: 58215 - RNA, 19 nt, synthetic construct
  misc_feature 1..19: note = siRNA antisense sequence
  source 1..19: mol_type = other RNA
gaatggtaaagtattaggg

SEQ ID NO: 58216 - RNA, 19 nt, synthetic construct
  misc_feature 1..19: note = siRNA sense sequence
  source 1..19: mol_type = other RNA
aatactttaccattcccac

SEQ ID NO: 58217 - RNA, 19 nt, synthetic construct
  misc_feature 1..19: note = siRNA antisense sequence
  source 1..19: mol_type = other RNA
gtgggaatggtaaagtatt

SEQ ID NO: 58218 - RNA, 19 nt, synthetic construct
  misc_feature 1..19: note = siRNA sense sequence
  source 1..19: mol_type = other RNA
tttaccattcccacatttc

SEQ ID NO: 58219 - RNA, 19 nt, synthetic construct
  misc_feature 1..19: note = siRNA antisense sequence
  source 1..19: mol_type = other RNA
gaaatgtgggaatggtaaa

SEQ ID NO: 58220 - RNA, 19 nt, synthetic construct
  misc_feature 1..19: note = siRNA sense sequence
  source 1..19: mol_type = other RNA
agatcctttgttccattga

SEQ ID NO: 58221 - RNA, 19 nt, synthetic construct
  misc_feature 1..19: note = siRNA antisense sequence
  source 1..19: mol_type = other RNA
tcaatggaacaaaggatct

SEQ ID NO: 58222 - RNA, 19 nt, synthetic construct
  misc_feature 1..19: note = siRNA sense sequence
  source 1..19: mol_type = other RNA
gatcctttgttccattgag

SEQ ID NO: 58223 - RNA, 19 nt, synthetic construct
  misc_feature 1..19: note = siRNA antisense sequence
  source 1..19: mol_type = other RNA
ctcaatggaacaaaggatc

SEQ ID NO: 58224 - RNA, 19 nt, synthetic construct
  misc_feature 1..19: note = siRNA sense sequence
  source 1..19: mol_type = other RNA
atcctttgttccattgagg

SEQ ID NO: 58225 - RNA, 19 nt, synthetic construct
  misc_feature 1..19: note = siRNA antisense sequence
  source 1..19: mol_type = other RNA
cctcaatggaacaaaggat

SEQ ID NO: 58226 - RNA, 19 nt, synthetic construct
  misc_feature 1..19: note = siRNA sense sequence
  source 1..19: mol_type = other RNA
cctttgttccattgaggtg

SEQ ID NO: 58227 - RNA, 19 nt, synthetic construct
  misc_feature 1..19: note = siRNA antisense sequence
  source 1..19: mol_type = other RNA
cacctcaatggaacaaagg

SEQ ID NO: 58228 - RNA, 19 nt, synthetic construct
  misc_feature 1..19: note = siRNA sense sequence
  source 1..19: mol_type = other RNA
tttgttccattgaggtgac

SEQ ID NO: 58229 - RNA, 19 nt, synthetic construct
  misc_feature 1..19: note = siRNA antisense sequence
  source 1..19: mol_type = other RNA
gtcacctcaatggaacaaa

SEQ ID NO: 58230 - RNA, 19 nt, synthetic construct
  misc_feature 1..19: note = siRNA sense sequence
  source 1..19: mol_type = other RNA
ttgttccattgaggtgacc

SEQ ID NO: 58231 - RNA, 19 nt, synthetic construct
  misc_feature 1..19: note = siRNA antisense sequence
  source 1..19: mol_type = other RNA
ggtcacctcaatggaacaa

SEQ ID NO: 58232 - RNA, 19 nt, synthetic construct
  misc_feature 1..19: note = siRNA sense sequence
  source 1..19: mol_type = other RNA
tgttccattgaggtgaccc

SEQ ID NO: 58233 - RNA, 19 nt, synthetic construct
  misc_feature 1..19: note = siRNA antisense sequence
  source 1..19: mol_type = other RNA
gggtcacctcaatggaaca

SEQ ID NO: 58234 - RNA, 19 nt, synthetic construct
  misc_feature 1..19: note = siRNA sense sequence
  source 1..19: mol_type = other RNA
gttccattgaggtgaccct

SEQ ID NO: 58235 - RNA, 19 nt, synthetic construct
  misc_feature 1..19: note = siRNA antisense sequence
  source 1..19: mol_type = other RNA
agggtcacctcaatggaac

SEQ ID NO: 58236 - RNA, 19 nt, synthetic construct
  misc_feature 1..19: note = siRNA sense sequence
  source 1..19: mol_type = other RNA
ttccattgaggtgacccta

SEQ ID NO: 58237 - RNA, 19 nt, synthetic construct
  misc_feature 1..19: note = siRNA antisense sequence
  source 1..19: mol_type = other RNA
tagggtcacctcaatggaa

SEQ ID NO: 58238 - RNA, 19 nt, synthetic construct
  misc_feature 1..19: note = siRNA sense sequence
  source 1..19: mol_type = other RNA
tccattgaggtgaccctag

SEQ ID NO: 58239 - RNA, 19 nt, synthetic construct
  misc_feature 1..19: note = siRNA antisense sequence
  source 1..19: mol_type = other RNA
ctagggtcacctcaatgga

SEQ ID NO: 58240 - RNA, 19 nt, synthetic construct
  misc_feature 1..19: note = siRNA sense sequence
  source 1..19: mol_type = other RNA
ccattgaggtgaccctagt

SEQ ID NO: 58241 - RNA, 19 nt, synthetic construct
  misc_feature 1..19: note = siRNA antisense sequence
  source 1..19: mol_type = other RNA
actagggtcacctcaatgg

SEQ ID NO: 58242 - RNA, 19 nt, synthetic construct
  misc_feature 1..19: note = siRNA sense sequence
  source 1..19: mol_type = other RNA
tgaggtgaccctagtttcc

SEQ ID NO: 58243 - RNA, 19 nt, synthetic construct
  misc_feature 1..19: note = siRNA antisense sequence
  source 1..19: mol_type = other RNA
ggaaactagggtcacctca

SEQ ID NO: 58244 - RNA, 19 nt, synthetic construct
  misc_feature 1..19: note = siRNA sense sequence
  source 1..19: mol_type = other RNA
gaggtgaccctagtttccg

SEQ ID NO: 58245 - RNA, 19 nt, synthetic construct
  misc_feature 1..19: note = siRNA antisense sequence
  source 1..19: mol_type = other RNA
cggaaactagggtcacctc

SEQ ID NO: 58246 - RNA, 19 nt, synthetic construct
  misc_feature 1..19: note = siRNA sense sequence
  source 1..19: mol_type = other RNA
aggtgaccctagtttccga

SEQ ID NO: 58247 - RNA, 19 nt, synthetic construct
  misc_feature 1..19: note = siRNA antisense sequence
  source 1..19: mol_type = other RNA
tcggaaactagggtcacct

SEQ ID NO: 58248 - RNA, 19 nt, synthetic construct
  misc_feature 1..19: note = siRNA sense sequence
  source 1..19: mol_type = other RNA
ggtgaccctagtttccgag

SEQ ID NO: 58249 - RNA, 19 nt, synthetic construct
  misc_feature 1..19: note = siRNA antisense sequence
  source 1..19: mol_type = other RNA
ctcggaaactagggtcacc

SEQ ID NO: 58250 - RNA, 19 nt, synthetic construct
  misc_feature 1..19: note = siRNA sense sequence
  source 1..19: mol_type = other RNA
tgttctgtgtgtgtgttct

SEQ ID NO: 58251 - RNA, 19 nt, synthetic construct
  misc_feature 1..19: note = siRNA antisense sequence
  source 1..19: mol_type = other RNA
agaacacacacacagaaca

SEQ ID NO: 58252 - RNA, 19 nt, synthetic construct
  misc_feature 1..19: note = siRNA sense sequence
  source 1..19: mol_type = other RNA
ctgtgtgtgtgttctcagg

SEQ ID NO: 58253 - RNA, 19 nt, synthetic construct
  misc_feature 1..19: note = siRNA antisense sequence
  source 1..19: mol_type = other RNA
cctgagaacacacacacag

SEQ ID NO: 58254 - RNA, 19 nt, synthetic construct
  misc_feature 1..19: note = siRNA sense sequence
  source 1..19: mol_type = other RNA
gtgtgtgtgttctcaggtg

SEQ ID NO: 58255 - RNA, 19 nt, synthetic construct
  misc_feature 1..19: note = siRNA antisense sequence
  source 1..19: mol_type = other RNA
cacctgagaacacacacac

SEQ ID NO: 58256 - RNA, 19 nt, synthetic construct
  misc_feature 1..19: note = siRNA sense sequence
  source 1..19: mol_type = other RNA
tgtgtgtgttctcaggtgc

SEQ ID NO: 58257 - RNA, 19 nt, synthetic construct
  misc_feature 1..19: note = siRNA antisense sequence
  source 1..19: mol_type = other RNA
gcacctgagaacacacaca

SEQ ID NO: 58258 - RNA, 19 nt, synthetic construct
  misc_feature 1..19: note = siRNA sense sequence
  source 1..19: mol_type = other RNA
gtgtgtgttctcaggtgca

SEQ ID NO: 58259 - RNA, 19 nt, synthetic construct
  misc_feature 1..19: note = siRNA antisense sequence
  source 1..19: mol_type = other RNA
tgcacctgagaacacacac

SEQ ID NO: 58260 - RNA, 19 nt, synthetic construct
  misc_feature 1..19: note = siRNA sense sequence
  source 1..19: mol_type = other RNA
ttctcaggtgcatcaggtc

SEQ ID NO: 58261 - RNA, 19 nt, synthetic construct
  misc_feature 1..19: note = siRNA antisense sequence
  source 1..19: mol_type = other RNA
gacctgatgcacctgagaa

SEQ ID NO: 58262 - RNA, 19 nt, synthetic construct
  misc_feature 1..19: note = siRNA sense sequence
  source 1..19: mol_type = other RNA
caggtgcatcaggtcagcc

SEQ ID NO: 58263 - RNA, 19 nt, synthetic construct
  misc_feature 1..19: note = siRNA antisense sequence
  source 1..19: mol_type = other RNA
ggctgacctgatgcacctg

SEQ ID NO: 58264 - RNA, 19 nt, synthetic construct
  misc_feature 1..19: note = siRNA sense sequence
  source 1..19: mol_type = other RNA
aggtcagcctgtgcttcct

SEQ ID NO: 58265 - RNA, 19 nt, synthetic construct
  misc_feature 1..19: note = siRNA antisense sequence
  source 1..19: mol_type = other RNA
aggaagcacaggctgacct

SEQ ID NO: 58266 - RNA, 19 nt, synthetic construct
  misc_feature 1..19: note = siRNA sense sequence
  source 1..19: mol_type = other RNA
ggtcagcctgtgcttcctc

SEQ ID NO: 58267 - RNA, 19 nt, synthetic construct
  misc_feature 1..19: note = siRNA antisense sequence
  source 1..19: mol_type = other RNA
gaggaagcacaggctgacc

SEQ ID NO: 58268 - RNA, 19 nt, synthetic construct
  misc_feature 1..19: note = siRNA sense sequence
  source 1..19: mol_type = other RNA
gtcagcctgtgcttcctct

SEQ ID NO: 58269 - RNA, 19 nt, synthetic construct
  misc_feature 1..19: note = siRNA antisense sequence
  source 1..19: mol_type = other RNA
agaggaagcacaggctgac

SEQ ID NO: 58270 - RNA, 19 nt, synthetic construct
  misc_feature 1..19: note = siRNA sense sequence
  source 1..19: mol_type = other RNA
tcagcctgtgcttcctctt

SEQ ID NO: 58271 - RNA, 19 nt, synthetic construct
  misc_feature 1..19: note = siRNA antisense sequence
  source 1..19: mol_type = other RNA
aagaggaagcacaggctga

SEQ ID NO: 58272 - RNA, 19 nt, synthetic construct
  misc_feature 1..19: note = siRNA sense sequence
  source 1..19: mol_type = other RNA
cagcctgtgcttcctcttc

SEQ ID NO: 58273 - RNA, 19 nt, synthetic construct
  misc_feature 1..19: note = siRNA antisense sequence
  source 1..19: mol_type = other RNA
gaagaggaagcacaggctg

SEQ ID NO: 58274 - RNA, 19 nt, synthetic construct
  misc_feature 1..19: note = siRNA sense sequence
  source 1..19: mol_type = other RNA
tcctccctccgttctccac

SEQ ID NO: 58275 - RNA, 19 nt, synthetic construct
  misc_feature 1..19: note = siRNA antisense sequence
  source 1..19: mol_type = other RNA
gtggagaacggagggagga

SEQ ID NO: 58276 - RNA, 19 nt, synthetic construct
  misc_feature 1..19: note = siRNA sense sequence
  source 1..19: mol_type = other RNA
cctccctccgttctccact

SEQ ID NO: 58277 - RNA, 19 nt, synthetic construct
  misc_feature 1..19: note = siRNA antisense sequence
  source 1..19: mol_type = other RNA
agtggagaacggagggagg

SEQ ID NO: 58278 - RNA, 19 nt, synthetic construct
  misc_feature 1..19: note = siRNA sense sequence
  source 1..19: mol_type = other RNA
ctccctccgttctccactt

SEQ ID NO: 58279 - RNA, 19 nt, synthetic construct
  misc_feature 1..19: note = siRNA antisense sequence
  source 1..19: mol_type = other RNA
aagtggagaacggagggag

SEQ ID NO: 58280 - RNA, 19 nt, synthetic construct
  misc_feature 1..19: note = siRNA sense sequence
  source 1..19: mol_type = other RNA
ctccgttctccactttcta

SEQ ID NO: 58281 - RNA, 19 nt, synthetic construct
  misc_feature 1..19: note = siRNA antisense sequence
  source 1..19: mol_type = other RNA
tagaaagtggagaacggag

SEQ ID NO: 58282 - RNA, 19 nt, synthetic construct
  misc_feature 1..19: note = siRNA sense sequence
  source 1..19: mol_type = other RNA
tccgttctccactttctaa

SEQ ID NO: 58283 - RNA, 19 nt, synthetic construct
  misc_feature 1..19: note = siRNA antisense sequence
  source 1..19: mol_type = other RNA
ttagaaagtggagaacgga

SEQ ID NO: 58284 - RNA, 19 nt, synthetic construct
  misc_feature 1..19: note = siRNA sense sequence
  source 1..19: mol_type = other RNA
cgttctccactttctaagg

SEQ ID NO: 58285 - RNA, 19 nt, synthetic construct
  misc_feature 1..19: note = siRNA antisense sequence
  source 1..19: mol_type = other RNA
ccttagaaagtggagaacg

SEQ ID NO: 58286 - RNA, 19 nt, synthetic construct
  misc_feature 1..19: note = siRNA sense sequence
  source 1..19: mol_type = other RNA
gttctccactttctaaggc

SEQ ID NO: 58287 - RNA, 19 nt, synthetic construct
  misc_feature 1..19: note = siRNA antisense sequence
  source 1..19: mol_type = other RNA
gccttagaaagtggagaac

SEQ ID NO: 58288 - RNA, 19 nt, synthetic construct
  misc_feature 1..19: note = siRNA sense sequence
  source 1..19: mol_type = other RNA
ttctccactttctaaggca

SEQ ID NO: 58289 - RNA, 19 nt, synthetic construct
  misc_feature 1..19: note = siRNA antisense sequence
  source 1..19: mol_type = other RNA
tgccttagaaagtggagaa

SEQ ID NO: 58290 - RNA, 19 nt, synthetic construct
  misc_feature 1..19: note = siRNA sense sequence
  source 1..19: mol_type = other RNA
tctccactttctaaggcag

SEQ ID NO: 58291 - RNA, 19 nt, synthetic construct
  misc_feature 1..19: note = siRNA antisense sequence
  source 1..19: mol_type = other RNA
ctgccttagaaagtggaga

SEQ ID NO: 58292 - RNA, 19 nt, synthetic construct
  misc_feature 1..19: note = siRNA sense sequence
  source 1..19: mol_type = other RNA
ctccactttctaaggcagc

SEQ ID NO: 58293 - RNA, 19 nt, synthetic construct
  misc_feature 1..19: note = siRNA antisense sequence
  source 1..19: mol_type = other RNA
gctgccttagaaagtggag

SEQ ID NO: 58294 - RNA, 19 nt, synthetic construct
  misc_feature 1..19: note = siRNA sense sequence
  source 1..19: mol_type = other RNA
aaatatgctcgaatcaaag

SEQ ID NO: 58295 - RNA, 19 nt, synthetic construct
  misc_feature 1..19: note = siRNA antisense sequence
  source 1..19: mol_type = other RNA
ctttgattcgagcatattt

SEQ ID NO: 58296 - RNA, 19 nt, synthetic construct
  misc_feature 1..19: note = siRNA sense sequence
  source 1..19: mol_type = other RNA
aatatgctcgaatcaaagc

SEQ ID NO: 58297 - RNA, 19 nt, synthetic construct
  misc_feature 1..19: note = siRNA antisense sequence
  source 1..19: mol_type = other RNA
gctttgattcgagcatatt

SEQ ID NO: 58298 - RNA, 19 nt, synthetic construct
  misc_feature 1..19: note = siRNA sense sequence
  source 1..19: mol_type = other RNA
aaggccattggctaaagaa

SEQ ID NO: 58299 - RNA, 19 nt, synthetic construct
  misc_feature 1..19: note = siRNA antisense sequence
  source 1..19: mol_type = other RNA
ttctttagccaatggcctt

SEQ ID NO: 58300 - RNA, 19 nt, synthetic construct
  misc_feature 1..19: note = siRNA sense sequence
  source 1..19: mol_type = other RNA
aggccattggctaaagaag

SEQ ID NO: 58301 - RNA, 19 nt, synthetic construct
  misc_feature 1..19: note = siRNA antisense sequence
  source 1..19: mol_type = other RNA
cttctttagccaatggcct

SEQ ID NO: 58302 - RNA, 19 nt, synthetic construct
  misc_feature 1..19: note = siRNA sense sequence
  source 1..19: mol_type = other RNA
gccattggctaaagaagag

SEQ ID NO: 58303 - RNA, 19 nt, synthetic construct
  misc_feature 1..19: note = siRNA antisense sequence
  source 1..19: mol_type = other RNA
ctcttctttagccaatggc

SEQ ID NO: 58304 - RNA, 19 nt, synthetic construct
  misc_feature 1..19: note = siRNA sense sequence
  source 1..19: mol_type = other RNA
tcttgatttgttccatatg

SEQ ID NO: 58305 - RNA, 19 nt, synthetic construct
  misc_feature 1..19: note = siRNA antisense sequence
  source 1..19: mol_type = other RNA
catatggaacaaatcaaga

SEQ ID NO: 58306 - RNA, 19 nt, synthetic construct
  misc_feature 1..19: note = siRNA sense sequence
  source 1..19: mol_type = other RNA
cttgatttgttccatatgt

SEQ ID NO: 58307 - RNA, 19 nt, synthetic construct
  misc_feature 1..19: note = siRNA antisense sequence
  source 1..19: mol_type = other RNA
acatatggaacaaatcaag

SEQ ID NO: 58308 - RNA, 19 nt, synthetic construct
  misc_feature 1..19: note = siRNA sense sequence
  source 1..19: mol_type = other RNA
ttgatttgttccatatgtg

SEQ ID NO: 58309 - RNA, 19 nt, synthetic construct
  misc_feature 1..19: note = siRNA antisense sequence
  source 1..19: mol_type = other RNA
cacatatggaacaaatcaa

SEQ ID NO: 58310 - RNA, 19 nt, synthetic construct
  misc_feature 1..19: note = siRNA sense sequence
  source 1..19: mol_type = other RNA
tgatttgttccatatgtgc

SEQ ID NO: 58311 - RNA, 19 nt, synthetic construct
  misc_feature 1..19: note = siRNA antisense sequence
  source 1..19: mol_type = other RNA
gcacatatggaacaaatca

SEQ ID NO: 58312 - RNA, 19 nt, synthetic construct
  misc_feature 1..19: note = siRNA sense sequence
  source 1..19: mol_type = other RNA
aaatagcctcctgactaga

SEQ ID NO: 58313 - RNA, 19 nt, synthetic construct
  misc_feature 1..19: note = siRNA antisense sequence
  source 1..19: mol_type = other RNA
tctagtcaggaggctattt

SEQ ID NO: 58314 - RNA, 19 nt, synthetic construct
  misc_feature 1..19: note = siRNA sense sequence
  source 1..19: mol_type = other RNA
aatagcctcctgactagaa

SEQ ID NO: 58315 - RNA, 19 nt, synthetic construct
  misc_feature 1..19: note = siRNA antisense sequence
  source 1..19: mol_type = other RNA
ttctagtcaggaggctatt

SEQ ID NO: 58316 - RNA, 19 nt, synthetic construct
  misc_feature 1..19: note = siRNA sense sequence
  source 1..19: mol_type = other RNA
aagatcaatgaggtataag

SEQ ID NO: 58317 - RNA, 19 nt, synthetic construct
  misc_feature 1..19: note = siRNA antisense sequence
  source 1..19: mol_type = other RNA
cttatacctcattgatctt

SEQ ID NO: 58318 - RNA, 19 nt, synthetic construct
  misc_feature 1..19: note = siRNA sense sequence
  source 1..19: mol_type = other RNA
agatcaatgaggtataaga

SEQ ID NO: 58319 - RNA, 19 nt, synthetic construct
  misc_feature 1..19: note = siRNA antisense sequence
  source 1..19: mol_type = other RNA
tcttatacctcattgatct

SEQ ID NO: 58320 - RNA, 19 nt, synthetic construct
  misc_feature 1..19: note = siRNA sense sequence
  source 1..19: mol_type = other RNA
gatcaatgaggtataagaa

SEQ ID NO: 58321 - RNA, 19 nt, synthetic construct
  misc_feature 1..19: note = siRNA antisense sequence
  source 1..19: mol_type = other RNA
ttcttatacctcattgatc

SEQ ID NO: 58322 - RNA, 19 nt, synthetic construct
  misc_feature 1..19: note = siRNA sense sequence
  source 1..19: mol_type = other RNA
aggaatattgtagccttca

SEQ ID NO: 58323 - RNA, 19 nt, synthetic construct
  misc_feature 1..19: note = siRNA antisense sequence
  source 1..19: mol_type = other RNA
tgaaggctacaatattcct

SEQ ID NO: 58324 - RNA, 19 nt, synthetic construct
  misc_feature 1..19: note = siRNA sense sequence
  source 1..19: mol_type = other RNA
ggaatattgtagccttcat

SEQ ID NO: 58325 - RNA, 19 nt, synthetic construct
  misc_feature 1..19: note = siRNA antisense sequence
  source 1..19: mol_type = other RNA
atgaaggctacaatattcc

SEQ ID NO: 58326 - RNA, 19 nt, synthetic construct
  misc_feature 1..19: note = siRNA sense sequence
  source 1..19: mol_type = other RNA
gaatattgtagccttcata

SEQ ID NO: 58327 - RNA, 19 nt, synthetic construct
  misc_feature 1..19: note = siRNA antisense sequence
  source 1..19: mol_type = other RNA
tatgaaggctacaatattc

SEQ ID NO: 58328 - RNA, 19 nt, synthetic construct
  misc_feature 1..19: note = siRNA sense sequence
  source 1..19: mol_type = other RNA
tattgtagccttcatatac

SEQ ID NO: 58329 - RNA, 19 nt, synthetic construct
  misc_feature 1..19: note = siRNA antisense sequence
  source 1..19: mol_type = other RNA
gtatatgaaggctacaata

SEQ ID NO: 58330 - RNA, 19 nt, synthetic construct
  misc_feature 1..19: note = siRNA sense sequence
  source 1..19: mol_type = other RNA
gtagccttcatatacagtg

SEQ ID NO: 58331 - RNA, 19 nt, synthetic construct
  misc_feature 1..19: note = siRNA antisense sequence
  source 1..19: mol_type = other RNA
cactgtatatgaaggctac

SEQ ID NO: 58332 - RNA, 19 nt, synthetic construct
  misc_feature 1..19: note = siRNA sense sequence
  source 1..19: mol_type = other RNA
tagccttcatatacagtgt

SEQ ID NO: 58333 - RNA, 19 nt, synthetic construct
  misc_feature 1..19: note = siRNA antisense sequence
  source 1..19: mol_type = other RNA
acactgtatatgaaggcta

SEQ ID NO: 58334 - RNA, 19 nt, synthetic construct
  misc_feature 1..19: note = siRNA sense sequence
  source 1..19: mol_type = other RNA
agccttcatatacagtgta

SEQ ID NO: 58335 - RNA, 19 nt, synthetic construct
  misc_feature 1..19: note = siRNA antisense sequence
  source 1..19: mol_type = other RNA
tacactgtatatgaaggct

SEQ ID NO: 58336 - RNA, 19 nt, synthetic construct
  misc_feature 1..19: note = siRNA sense sequence
  source 1..19: mol_type = other RNA
gccttcatatacagtgtaa

SEQ ID NO: 58337 - RNA, 19 nt, synthetic construct
  misc_feature 1..19: note = siRNA antisense sequence
  source 1..19: mol_type = other RNA
ttacactgtatatgaaggc

SEQ ID NO: 58338 - RNA, 19 nt, synthetic construct
  misc_feature 1..19: note = siRNA sense sequence
  source 1..19: mol_type = other RNA
ccttcatatacagtgtaag

SEQ ID NO: 58339 - RNA, 19 nt, synthetic construct
  misc_feature 1..19: note = siRNA antisense sequence
  source 1..19: mol_type = other RNA
cttacactgtatatgaagg

SEQ ID NO: 58340 - RNA, 19 nt, synthetic construct
  misc_feature 1..19: note = siRNA sense sequence
  source 1..19: mol_type = other RNA
cttcatatacagtgtaaga

SEQ ID NO: 58341 - RNA, 19 nt, synthetic construct
  misc_feature 1..19: note = siRNA antisense sequence
  source 1..19: mol_type = other RNA
tcttacactgtatatgaag

SEQ ID NO: 58342 - RNA, 19 nt, synthetic construct
  misc_feature 1..19: note = siRNA sense sequence
  source 1..19: mol_type = other RNA
tctttattgtggtatgctt

SEQ ID NO: 58343 - RNA, 19 nt, synthetic construct
  misc_feature 1..19: note = siRNA antisense sequence
  source 1..19: mol_type = other RNA
aagcataccacaataaaga

SEQ ID NO: 58344 - RNA, 19 nt, synthetic construct
  misc_feature 1..19: note = siRNA sense sequence
  source 1..19: mol_type = other RNA
ccttaatagtggtttgacc

SEQ ID NO: 58345 - RNA, 19 nt, synthetic construct
  misc_feature 1..19: note = siRNA antisense sequence
  source 1..19: mol_type = other RNA
ggtcaaaccactattaagg

SEQ ID NO: 58346 - RNA, 19 nt, synthetic construct
  misc_feature 1..19: note = siRNA sense sequence
  source 1..19: mol_type = other RNA
ggtttgaccataagctgag

SEQ ID NO: 58347 - RNA, 19 nt, synthetic construct
  misc_feature 1..19: note = siRNA antisense sequence
  source 1..19: mol_type = other RNA
ctcagcttatggtcaaacc

SEQ ID NO: 58348 - RNA, 19 nt, synthetic construct
  misc_feature 1..19: note = siRNA sense sequence
  source 1..19: mol_type = other RNA
atattctaagcagggttcc

SEQ ID NO: 58349 - RNA, 19 nt, synthetic construct
  misc_feature 1..19: note = siRNA antisense sequence
  source 1..19: mol_type = other RNA
ggaaccctgcttagaatat

SEQ ID NO: 58350 - RNA, 19 nt, synthetic construct
  misc_feature 1..19: note = siRNA sense sequence
  source 1..19: mol_type = other RNA
tattctaagcagggttcca

SEQ ID NO: 58351 - RNA, 19 nt, synthetic construct
  misc_feature 1..19: note = siRNA antisense sequence
  source 1..19: mol_type = other RNA
tggaaccctgcttagaata

SEQ ID NO: 58352 - RNA, 19 nt, synthetic construct
  misc_feature 1..19: note = siRNA sense sequence
  source 1..19: mol_type = other RNA
attctaagcagggttccaa

SEQ ID NO: 58353 - RNA, 19 nt, synthetic construct
  misc_feature 1..19: note = siRNA antisense sequence
  source 1..19: mol_type = other RNA
ttggaaccctgcttagaat

SEQ ID NO: 58354 - RNA, 19 nt, synthetic construct
  misc_feature 1..19: note = siRNA sense sequence
  source 1..19: mol_type = other RNA
ttctaagcagggttccaac

SEQ ID NO: 58355 - RNA, 19 nt, synthetic construct
  misc_feature 1..19: note = siRNA antisense sequence
  source 1..19: mol_type = other RNA
gttggaaccctgcttagaa

SEQ ID NO: 58356 - RNA, 19 nt, synthetic construct
  misc_feature 1..19: note = siRNA sense sequence
  source 1..19: mol_type = other RNA
ataataaatacagtggtgg

SEQ ID NO: 58357 - RNA, 19 nt, synthetic construct
  misc_feature 1..19: note = siRNA antisense sequence
  source 1..19: mol_type = other RNA
ccaccactgtatttattat

SEQ ID NO: 58358 - RNA, 19 nt, synthetic construct
  misc_feature 1..19: note = siRNA sense sequence
  source 1..19: mol_type = other RNA
taataaatacagtggtggc

SEQ ID NO: 58359 - RNA, 19 nt, synthetic construct
  misc_feature 1..19: note = siRNA antisense sequence
  source 1..19: mol_type = other RNA
gccaccactgtatttatta

SEQ ID NO: 58360 - RNA, 19 nt, synthetic construct
  misc_feature 1..19: note = siRNA sense sequence
  source 1..19: mol_type = other RNA
aataaatacagtggtggcc

SEQ ID NO: 58361 - RNA, 19 nt, synthetic construct
  misc_feature 1..19: note = siRNA antisense sequence
  source 1..19: mol_type = other RNA
ggccaccactgtatttatt

SEQ ID NO: 58362 - RNA, 19 nt, synthetic construct
  misc_feature 1..19: note = siRNA sense sequence
  source 1..19: mol_type = other RNA
ataaatacagtggtggcct

SEQ ID NO: 58363 - RNA, 19 nt, synthetic construct
  misc_feature 1..19: note = siRNA antisense sequence
  source 1..19: mol_type = other RNA
aggccaccactgtatttat

SEQ ID NO: 58364 - RNA, 19 nt, synthetic construct
  misc_feature 1..19: note = siRNA sense sequence
  source 1..19: mol_type = other RNA
taaatacagtggtggcctg

SEQ ID NO: 58365 - RNA, 19 nt, synthetic construct
  misc_feature 1..19: note = siRNA antisense sequence
  source 1..19: mol_type = other RNA
caggccaccactgtattta

SEQ ID NO: 58366 - RNA, 19 nt, synthetic construct
  misc_feature 1..19: note = siRNA sense sequence
  source 1..19: mol_type = other RNA
aaatacagtggtggcctgg

SEQ ID NO: 58367 - RNA, 19 nt, synthetic construct
  misc_feature 1..19: note = siRNA antisense sequence
  source 1..19: mol_type = other RNA
ccaggccaccactgtattt

SEQ ID NO: 58368 - RNA, 19 nt, synthetic construct
  misc_feature 1..19: note = siRNA sense sequence
  source 1..19: mol_type = other RNA
atacagtggtggcctggca

SEQ ID NO: 58369 - RNA, 19 nt, synthetic construct
  misc_feature 1..19: note = siRNA antisense sequence
  source 1..19: mol_type = other RNA
tgccaggccaccactgtat

SEQ ID NO: 58370 - RNA, 19 nt, synthetic construct
  misc_feature 1..19: note = siRNA sense sequence
  source 1..19: mol_type = other RNA
tacagtggtggcctggcaa

SEQ ID NO: 58371 - RNA, 19 nt, synthetic construct
  misc_feature 1..19: note = siRNA antisense sequence
  source 1..19: mol_type = other RNA
ttgccaggccaccactgta

SEQ ID NO: 58372 - RNA, 19 nt, synthetic construct
  misc_feature 1..19: note = siRNA sense sequence
  source 1..19: mol_type = other RNA
acagtggtggcctggcaat

SEQ ID NO: 58373 - RNA, 19 nt, synthetic construct
  misc_feature 1..19: note = siRNA antisense sequence
  source 1..19: mol_type = other RNA
attgccaggccaccactgt

SEQ ID NO: 58374 - RNA, 19 nt, synthetic construct
  misc_feature 1..19: note = siRNA sense sequence
  source 1..19: mol_type = other RNA
cagtggtggcctggcaatt

SEQ ID NO: 58375 - RNA, 19 nt, synthetic construct
  misc_feature 1..19: note = siRNA antisense sequence
  source 1..19: mol_type = other RNA
aattgccaggccaccactg

SEQ ID NO: 58376 - RNA, 19 nt, synthetic construct
  misc_feature 1..19: note = siRNA sense sequence
  source 1..19: mol_type = other RNA
agtggtggcctggcaatta

SEQ ID NO: 58377 - RNA, 19 nt, synthetic construct
  misc_feature 1..19: note = siRNA antisense sequence
  source 1..19: mol_type = other RNA
taattgccaggccaccact

SEQ ID NO: 58378 - RNA, 19 nt, synthetic construct
  misc_feature 1..19: note = siRNA sense sequence
  source 1..19: mol_type = other RNA
gtggtggcctggcaattag

SEQ ID NO: 58379 - RNA, 19 nt, synthetic construct
  misc_feature 1..19: note = siRNA antisense sequence
  source 1..19: mol_type = other RNA
ctaattgccaggccaccac

SEQ ID NO: 58380 - RNA, 19 nt, synthetic construct
  misc_feature 1..19: note = siRNA sense sequence
  source 1..19: mol_type = other RNA
tggtggcctggcaattaga

SEQ ID NO: 58381 - RNA, 19 nt, synthetic construct
  misc_feature 1..19: note = siRNA antisense sequence
  source 1..19: mol_type = other RNA
tctaattgccaggccacca

SEQ ID NO: 58382 - RNA, 19 nt, synthetic construct
  misc_feature 1..19: note = siRNA sense sequence
  source 1..19: mol_type = other RNA
ggtggcctggcaattagat

SEQ ID NO: 58383 - RNA, 19 nt, synthetic construct
  misc_feature 1..19: note = siRNA antisense sequence
  source 1..19: mol_type = other RNA
atctaattgccaggccacc

SEQ ID NO: 58384 - RNA, 19 nt, synthetic construct
  misc_feature 1..19: note = siRNA sense sequence
  source 1..19: mol_type = other RNA
gtggcctggcaattagatg

SEQ ID NO: 58385 - RNA, 19 nt, synthetic construct
  misc_feature 1..19: note = siRNA antisense sequence
  source 1..19: mol_type = other RNA
catctaattgccaggccac

SEQ ID NO: 58386 - RNA, 19 nt, synthetic construct
  misc_feature 1..19: note = siRNA sense sequence
  source 1..19: mol_type = other RNA
tggcctggcaattagatga

SEQ ID NO: 58387 - RNA, 19 nt, synthetic construct
  misc_feature 1..19: note = siRNA antisense sequence
  source 1..19: mol_type = other RNA
tcatctaattgccaggcca

SEQ ID NO: 58388 - RNA, 19 nt, synthetic construct
  misc_feature 1..19: note = siRNA sense sequence
  source 1..19: mol_type = other RNA
ggcctggcaattagatgat

SEQ ID NO: 58389 - RNA, 19 nt, synthetic construct
  misc_feature 1..19: note = siRNA antisense sequence
  source 1..19: mol_type = other RNA
atcatctaattgccaggcc

SEQ ID NO: 58390 - RNA, 19 nt, synthetic construct
  misc_feature 1..19: note = siRNA sense sequence
  source 1..19: mol_type = other RNA
gcctggcaattagatgata

SEQ ID NO: 58391 - RNA, 19 nt, synthetic construct
  misc_feature 1..19: note = siRNA antisense sequence
  source 1..19: mol_type = other RNA
tatcatctaattgccaggc

SEQ ID NO: 58392 - RNA, 19 nt, synthetic construct
  misc_feature 1..19: note = siRNA sense sequence
  source 1..19: mol_type = other RNA
cctggcaattagatgatag

SEQ ID NO: 58393 - RNA, 19 nt, synthetic construct
  misc_feature 1..19: note = siRNA antisense sequence
  source 1..19: mol_type = other RNA
ctatcatctaattgccagg

SEQ ID NO: 58394 - RNA, 19 nt, synthetic construct
  misc_feature 1..19: note = siRNA sense sequence
  source 1..19: mol_type = other RNA
ctggcaattagatgatagg

SEQ ID NO: 58395 - RNA, 19 nt, synthetic construct
  misc_feature 1..19: note = siRNA antisense sequence
  source 1..19: mol_type = other RNA
cctatcatctaattgccag

SEQ ID NO: 58396 - RNA, 19 nt, synthetic construct
  misc_feature 1..19: note = siRNA sense sequence
  source 1..19: mol_type = other RNA
tggcaattagatgataggc

SEQ ID NO: 58397 - RNA, 19 nt, synthetic construct
  misc_feature 1..19: note = siRNA antisense sequence
  source 1..19: mol_type = other RNA
gcctatcatctaattgcca

SEQ ID NO: 58398 - RNA, 19 nt, synthetic construct
  misc_feature 1..19: note = siRNA sense sequence
  source 1..19: mol_type = other RNA
ggcaattagatgataggca

SEQ ID NO: 58399 - RNA, 19 nt, synthetic construct
  misc_feature 1..19: note = siRNA antisense sequence
  source 1..19: mol_type = other RNA
tgcctatcatctaattgcc

SEQ ID NO: 58400 - RNA, 19 nt, synthetic construct
  misc_feature 1..19: note = siRNA sense sequence
  source 1..19: mol_type = other RNA
gcaattagatgataggcag

SEQ ID NO: 58401 - RNA, 19 nt, synthetic construct
  misc_feature 1..19: note = siRNA antisense sequence
  source 1..19: mol_type = other RNA
ctgcctatcatctaattgc

SEQ ID NO: 58402 - RNA, 19 nt, synthetic construct
  misc_feature 1..19: note = siRNA sense sequence
  source 1..19: mol_type = other RNA
caattagatgataggcagg

SEQ ID NO: 58403 - RNA, 19 nt, synthetic construct
  misc_feature 1..19: note = siRNA antisense sequence
  source 1..19: mol_type = other RNA
cctgcctatcatctaattg

SEQ ID NO: 58404 - RNA, 19 nt, synthetic construct
  misc_feature 1..19: note = siRNA sense sequence
  source 1..19: mol_type = other RNA
aattagatgataggcaggt

SEQ ID NO: 58405 - RNA, 19 nt, synthetic construct
  misc_feature 1..19: note = siRNA antisense sequence
  source 1..19: mol_type = other RNA
acctgcctatcatctaatt

SEQ ID NO: 58406 - RNA, 19 nt, synthetic construct
  misc_feature 1..19: note = siRNA sense sequence
  source 1..19: mol_type = other RNA
attagatgataggcaggtg

SEQ ID NO: 58407 - RNA, 19 nt, synthetic construct
  misc_feature 1..19: note = siRNA antisense sequence
  source 1..19: mol_type = other RNA
cacctgcctatcatctaat

SEQ ID NO: 58408 - RNA, 19 nt, synthetic construct
  misc_feature 1..19: note = siRNA sense sequence
  source 1..19: mol_type = other RNA
ttagatgataggcaggtgt

SEQ ID NO: 58409 - RNA, 19 nt, synthetic construct
  misc_feature 1..19: note = siRNA antisense sequence
  source 1..19: mol_type = other RNA
acacctgcctatcatctaa

SEQ ID NO: 58410 - RNA, 19 nt, synthetic construct
  misc_feature 1..19: note = siRNA sense sequence
  source 1..19: mol_type = other RNA
tagatgataggcaggtgtg

SEQ ID NO: 58411 - RNA, 19 nt, synthetic construct
  misc_feature 1..19: note = siRNA antisense sequence
  source 1..19: mol_type = other RNA
cacacctgcctatcatcta

SEQ ID NO: 58412 - RNA, 19 nt, synthetic construct
  misc_feature 1..19: note = siRNA sense sequence
  source 1..19: mol_type = other RNA
agatgataggcaggtgtgc

SEQ ID NO: 58413 - RNA, 19 nt, synthetic construct
  misc_feature 1..19: note = siRNA antisense sequence
  source 1..19: mol_type = other RNA
gcacacctgcctatcatct

SEQ ID NO: 58414 - RNA, 19 nt, synthetic construct
  misc_feature 1..19: note = siRNA sense sequence
  source 1..19: mol_type = other RNA
gatgataggcaggtgtgca

SEQ ID NO: 58415 - RNA, 19 nt, synthetic construct
  misc_feature 1..19: note = siRNA antisense sequence
  source 1..19: mol_type = other RNA
tgcacacctgcctatcatc

SEQ ID NO: 58416 - RNA, 19 nt, synthetic construct
  misc_feature 1..19: note = siRNA sense sequence
  source 1..19: mol_type = other RNA
ataggcaggtgtgcatgtg

SEQ ID NO: 58417 - RNA, 19 nt, synthetic construct
  misc_feature 1..19: note = siRNA antisense sequence
  source 1..19: mol_type = other RNA
cacatgcacacctgcctat

SEQ ID NO: 58418 - RNA, 19 nt, synthetic construct
  misc_feature 1..19: note = siRNA sense sequence
  source 1..19: mol_type = other RNA
taggcaggtgtgcatgtgt

SEQ ID NO: 58419 - RNA, 19 nt, synthetic construct
  misc_feature 1..19: note = siRNA antisense sequence
  source 1..19: mol_type = other RNA
acacatgcacacctgccta

SEQ ID NO: 58420 - RNA, 19 nt, synthetic construct
  misc_feature 1..19: note = siRNA sense sequence
  source 1..19: mol_type = other RNA
tgtgcatgtgtgtataaga

SEQ ID NO: 58421 - RNA, 19 nt, synthetic construct
  misc_feature 1..19: note = siRNA antisense sequence
  source 1..19: mol_type = other RNA
tcttatacacacatgcaca

SEQ ID NO: 58422 - RNA, 19 nt, synthetic construct
  misc_feature 1..19: note = siRNA sense sequence
  source 1..19: mol_type = other RNA
gtgcatgtgtgtataagaa

SEQ ID NO: 58423 - RNA, 19 nt, synthetic construct
  misc_feature 1..19: note = siRNA antisense sequence
  source 1..19: mol_type = other RNA
ttcttatacacacatgcac

SEQ ID NO: 58424 - RNA, 19 nt, synthetic construct
  misc_feature 1..19: note = siRNA sense sequence
  source 1..19: mol_type = other RNA
tgcatgtgtgtataagaat

SEQ ID NO: 58425 - RNA, 19 nt, synthetic construct
  misc_feature 1..19: note = siRNA antisense sequence
  source 1..19: mol_type = other RNA
attcttatacacacatgca

SEQ ID NO: 58426 - RNA, 19 nt, synthetic construct
  misc_feature 1..19: note = siRNA sense sequence
  source 1..19: mol_type = other RNA
gcatgtgtgtataagaatt

SEQ ID NO: 58427 - RNA, 19 nt, synthetic construct
  misc_feature 1..19: note = siRNA antisense sequence
  source 1..19: mol_type = other RNA
aattcttatacacacatgc

SEQ ID NO: 58428 - RNA, 19 nt, synthetic construct
  misc_feature 1..19: note = siRNA sense sequence
  source 1..19: mol_type = other RNA
agaccagttctatagagtt

SEQ ID NO: 58429 - RNA, 19 nt, synthetic construct
  misc_feature 1..19: note = siRNA antisense sequence
  source 1..19: mol_type = other RNA
aactctatagaactggtct

SEQ ID NO: 58430 - RNA, 19 nt, synthetic construct
  misc_feature 1..19: note = siRNA sense sequence
  source 1..19: mol_type = other RNA
gaccagttctatagagttc

SEQ ID NO: 58431 - RNA, 19 nt, synthetic construct
  misc_feature 1..19: note = siRNA antisense sequence
  source 1..19: mol_type = other RNA
gaactctatagaactggtc

SEQ ID NO: 58432 - RNA, 19 nt, synthetic construct
  misc_feature 1..19: note = siRNA sense sequence
  source 1..19: mol_type = other RNA
accagttctatagagttcc

SEQ ID NO: 58433 - RNA, 19 nt, synthetic construct
  misc_feature 1..19: note = siRNA antisense sequence
  source 1..19: mol_type = other RNA
ggaactctatagaactggt

SEQ ID NO: 58434 - RNA, 19 nt, synthetic construct
  misc_feature 1..19: note = siRNA sense sequence
  source 1..19: mol_type = other RNA
ccagttctatagagttcct

SEQ ID NO: 58435 - RNA, 19 nt, synthetic construct
  misc_feature 1..19: note = siRNA antisense sequence
  source 1..19: mol_type = other RNA
aggaactctatagaactgg

SEQ ID NO: 58436 - RNA, 19 nt, synthetic construct
  misc_feature 1..19: note = siRNA sense sequence
  source 1..19: mol_type = other RNA
cagttctatagagttcctc

SEQ ID NO: 58437 - RNA, 19 nt, synthetic construct
  misc_feature 1..19: note = siRNA antisense sequence
  source 1..19: mol_type = other RNA
gaggaactctatagaactg

SEQ ID NO: 58438 - RNA, 19 nt, synthetic construct
  misc_feature 1..19: note = siRNA sense sequence
  source 1..19: mol_type = other RNA
tctatagagttcctcaagg

SEQ ID NO: 58439 - RNA, 19 nt, synthetic construct
  misc_feature 1..19: note = siRNA antisense sequence
  source 1..19: mol_type = other RNA
ccttgaggaactctataga

SEQ ID NO: 58440 - RNA, 19 nt, synthetic construct
  misc_feature 1..19: note = siRNA sense sequence
  source 1..19: mol_type = other RNA
ctatagagttcctcaaggt

SEQ ID NO: 58441 - RNA, 19 nt, synthetic construct
  misc_feature 1..19: note = siRNA antisense sequence
  source 1..19: mol_type = other RNA
accttgaggaactctatag

SEQ ID NO: 58442 - RNA, 19 nt, synthetic construct
  misc_feature 1..19: note = siRNA sense sequence
  source 1..19: mol_type = other RNA
tatagagttcctcaaggtt

SEQ ID NO: 58443 - RNA, 19 nt, synthetic construct
  misc_feature 1..19: note = siRNA antisense sequence
  source 1..19: mol_type = other RNA
aaccttgaggaactctata

SEQ ID NO: 58444 - RNA, 19 nt, synthetic construct
  misc_feature 1..19: note = siRNA sense sequence
  source 1..19: mol_type = other RNA
atagagttcctcaaggtta

SEQ ID NO: 58445 - RNA, 19 nt, synthetic construct
  misc_feature 1..19: note = siRNA antisense sequence
  source 1..19: mol_type = other RNA
taaccttgaggaactctat

SEQ ID NO: 58446 - RNA, 19 nt, synthetic construct
  misc_feature 1..19: note = siRNA sense sequence
  source 1..19: mol_type = other RNA
tagagttcctcaaggttat

SEQ ID NO: 58447 - RNA, 19 nt, synthetic construct
  misc_feature 1..19: note = siRNA antisense sequence
  source 1..19: mol_type = other RNA
ataaccttgaggaactcta

SEQ ID NO: 58448 - RNA, 19 nt, synthetic construct
  misc_feature 1..19: note = siRNA sense sequence
  source 1..19: mol_type = other RNA
agagttcctcaaggttatc

SEQ ID NO: 58449 - RNA, 19 nt, synthetic construct
  misc_feature 1..19: note = siRNA antisense sequence
  source 1..19: mol_type = other RNA
gataaccttgaggaactct

SEQ ID NO: 58450 - RNA, 19 nt, synthetic construct
  misc_feature 1..19: note = siRNA sense sequence
  source 1..19: mol_type = other RNA
gagttcctcaaggttatct

SEQ ID NO: 58451 - RNA, 19 nt, synthetic construct
  misc_feature 1..19: note = siRNA antisense sequence
  source 1..19: mol_type = other RNA
agataaccttgaggaactc

SEQ ID NO: 58452 - RNA, 19 nt, synthetic construct
  misc_feature 1..19: note = siRNA sense sequence
  source 1..19: mol_type = other RNA
agttcctcaaggttatctt

SEQ ID NO: 58453 - RNA, 19 nt, synthetic construct
  misc_feature 1..19: note = siRNA antisense sequence
  source 1..19: mol_type = other RNA
aagataaccttgaggaact

SEQ ID NO: 58454 - RNA, 19 nt, synthetic construct
  misc_feature 1..19: note = siRNA sense sequence
  source 1..19: mol_type = other RNA
gttcctcaaggttatcttc

SEQ ID NO: 58455 - RNA, 19 nt, synthetic construct
  misc_feature 1..19: note = siRNA antisense sequence
  source 1..19: mol_type = other RNA
gaagataaccttgaggaac

SEQ ID NO: 58456 - RNA, 19 nt, synthetic construct
  misc_feature 1..19: note = siRNA sense sequence
  source 1..19: mol_type = other RNA
aaggttatcttcatgactg

SEQ ID NO: 58457 - RNA, 19 nt, synthetic construct
  misc_feature 1..19: note = siRNA antisense sequence
  source 1..19: mol_type = other RNA
cagtcatgaagataacctt

SEQ ID NO: 58458 - RNA, 19 nt, synthetic construct
  misc_feature 1..19: note = siRNA sense sequence
  source 1..19: mol_type = other RNA
aggttatcttcatgactgc

SEQ ID NO: 58459 - RNA, 19 nt, synthetic construct
  misc_feature 1..19: note = siRNA antisense sequence
  source 1..19: mol_type = other RNA
gcagtcatgaagataacct

SEQ ID NO: 58460 - RNA, 19 nt, synthetic construct
  misc_feature 1..19: note = siRNA sense sequence
  source 1..19: mol_type = other RNA
ggttatcttcatgactgct

SEQ ID NO: 58461 - RNA, 19 nt, synthetic construct
  misc_feature 1..19: note = siRNA antisense sequence
  source 1..19: mol_type = other RNA
agcagtcatgaagataacc

SEQ ID NO: 58462 - RNA, 19 nt, synthetic construct
  misc_feature 1..19: note = siRNA sense sequence
  source 1..19: mol_type = other RNA
gttatcttcatgactgcta

SEQ ID NO: 58463 - RNA, 19 nt, synthetic construct
  misc_feature 1..19: note = siRNA antisense sequence
  source 1..19: mol_type = other RNA
tagcagtcatgaagataac

SEQ ID NO: 58464 - RNA, 19 nt, synthetic construct
  misc_feature 1..19: note = siRNA sense sequence
  source 1..19: mol_type = other RNA
ttatcttcatgactgctaa

SEQ ID NO: 58465 - RNA, 19 nt, synthetic construct
  misc_feature 1..19: note = siRNA antisense sequence
  source 1..19: mol_type = other RNA
ttagcagtcatgaagataa

SEQ ID NO: 58466 - RNA, 19 nt, synthetic construct
  misc_feature 1..19: note = siRNA sense sequence
  source 1..19: mol_type = other RNA
tatcttcatgactgctaat

SEQ ID NO: 58467 - RNA, 19 nt, synthetic construct
  misc_feature 1..19: note = siRNA antisense sequence
  source 1..19: mol_type = other RNA
attagcagtcatgaagata

SEQ ID NO: 58468 - RNA, 19 nt, synthetic construct
  misc_feature 1..19: note = siRNA sense sequence
  source 1..19: mol_type = other RNA
tcttcatgactgctaatat

SEQ ID NO: 58469 - RNA, 19 nt, synthetic construct
  misc_feature 1..19: note = siRNA antisense sequence
  source 1..19: mol_type = other RNA
atattagcagtcatgaaga

SEQ ID NO: 58470 - RNA, 19 nt, synthetic construct
  misc_feature 1..19: note = siRNA sense sequence
  source 1..19: mol_type = other RNA
ttcatgactgctaatatca

SEQ ID NO: 58471 - RNA, 19 nt, synthetic construct
  misc_feature 1..19: note = siRNA antisense sequence
  source 1..19: mol_type = other RNA
tgatattagcagtcatgaa

SEQ ID NO: 58472 - RNA, 19 nt, synthetic construct
  misc_feature 1..19: note = siRNA sense sequence
  source 1..19: mol_type = other RNA
tgactgctaatatcattgt

SEQ ID NO: 58473 - RNA, 19 nt, synthetic construct
  misc_feature 1..19: note = siRNA antisense sequence
  source 1..19: mol_type = other RNA
acaatgatattagcagtca

SEQ ID NO: 58474 - RNA, 19 nt, synthetic construct
  misc_feature 1..19: note = siRNA sense sequence
  source 1..19: mol_type = other RNA
gactgctaatatcattgtt

SEQ ID NO: 58475 - RNA, 19 nt, synthetic construct
  misc_feature 1..19: note = siRNA antisense sequence
  source 1..19: mol_type = other RNA
aacaatgatattagcagtc

SEQ ID NO: 58476 - RNA, 19 nt, synthetic construct
  misc_feature 1..19: note = siRNA sense sequence
  source 1..19: mol_type = other RNA
tttgtagatttgcagtacc

SEQ ID NO: 58477 - RNA, 19 nt, synthetic construct
  misc_feature 1..19: note = siRNA antisense sequence
  source 1..19: mol_type = other RNA
ggtactgcaaatctacaaa

SEQ ID NO: 58478 - RNA, 19 nt, synthetic construct
  misc_feature 1..19: note = siRNA sense sequence
  source 1..19: mol_type = other RNA
ttgtagatttgcagtaccg

SEQ ID NO: 58479 - RNA, 19 nt, synthetic construct
  misc_feature 1..19: note = siRNA antisense sequence
  source 1..19: mol_type = other RNA
cggtactgcaaatctacaa

SEQ ID NO: 58480 - RNA, 19 nt, synthetic construct
  misc_feature 1..19: note = siRNA sense sequence
  source 1..19: mol_type = other RNA
tgtagatttgcagtaccgt

SEQ ID NO: 58481 - RNA, 19 nt, synthetic construct
  misc_feature 1..19: note = siRNA antisense sequence
  source 1..19: mol_type = other RNA
acggtactgcaaatctaca

SEQ ID NO: 58482 - RNA, 19 nt, synthetic construct
  misc_feature 1..19: note = siRNA sense sequence
  source 1..19: mol_type = other RNA
gtagatttgcagtaccgtg

SEQ ID NO: 58483 - RNA, 19 nt, synthetic construct
  misc_feature 1..19: note = siRNA antisense sequence
  source 1..19: mol_type = other RNA
cacggtactgcaaatctac

SEQ ID NO: 58484 - RNA, 19 nt, synthetic construct
  misc_feature 1..19: note = siRNA sense sequence
  source 1..19: mol_type = other RNA
tagatttgcagtaccgtgt

SEQ ID NO: 58485 - RNA, 19 nt, synthetic construct
  misc_feature 1..19: note = siRNA antisense sequence
  source 1..19: mol_type = other RNA
acacggtactgcaaatcta

SEQ ID NO: 58486 - RNA, 19 nt, synthetic construct
  misc_feature 1..19: note = siRNA sense sequence
  source 1..19: mol_type = other RNA
agatttgcagtaccgtgtc

SEQ ID NO: 58487 - RNA, 19 nt, synthetic construct
  misc_feature 1..19: note = siRNA antisense sequence
  source 1..19: mol_type = other RNA
gacacggtactgcaaatct

SEQ ID NO: 58488 - RNA, 19 nt, synthetic construct
  misc_feature 1..19: note = siRNA sense sequence
  source 1..19: mol_type = other RNA
gatttgcagtaccgtgtca

SEQ ID NO: 58489 - RNA, 19 nt, synthetic construct
  misc_feature 1..19: note = siRNA antisense sequence
  source 1..19: mol_type = other RNA
tgacacggtactgcaaatc

SEQ ID NO: 58490 - RNA, 19 nt, synthetic construct
  misc_feature 1..19: note = siRNA sense sequence
  source 1..19: mol_type = other RNA
tgcagtaccgtgtcaccct

SEQ ID NO: 58491 - RNA, 19 nt, synthetic construct
  misc_feature 1..19: note = siRNA antisense sequence
  source 1..19: mol_type = other RNA
agggtgacacggtactgca

SEQ ID NO: 58492 - RNA, 19 nt, synthetic construct
  misc_feature 1..19: note = siRNA sense sequence
  source 1..19: mol_type = other RNA
gcagtaccgtgtcacccta

SEQ ID NO: 58493 - RNA, 19 nt, synthetic construct
  misc_feature 1..19: note = siRNA antisense sequence
  source 1..19: mol_type = other RNA
tagggtgacacggtactgc

SEQ ID NO: 58494 - RNA, 19 nt, synthetic construct
  misc_feature 1..19: note = siRNA sense sequence
  source 1..19: mol_type = other RNA
cagtaccgtgtcaccctag

SEQ ID NO: 58495 - RNA, 19 nt, synthetic construct
  misc_feature 1..19: note = siRNA antisense sequence
  source 1..19: mol_type = other RNA
ctagggtgacacggtactg

SEQ ID NO: 58496 - RNA, 19 nt, synthetic construct
  misc_feature 1..19: note = siRNA sense sequence
  source 1..19: mol_type = other RNA
agtaccgtgtcaccctaga

SEQ ID NO: 58497 - RNA, 19 nt, synthetic construct
  misc_feature 1..19: note = siRNA antisense sequence
  source 1..19: mol_type = other RNA
tctagggtgacacggtact

SEQ ID NO: 58498 - RNA, 19 nt, synthetic construct
  misc_feature 1..19: note = siRNA sense sequence
  source 1..19: mol_type = other RNA
gtaccgtgtcaccctagat

SEQ ID NO: 58499 - RNA, 19 nt, synthetic construct
  misc_feature 1..19: note = siRNA antisense sequence
  source 1..19: mol_type = other RNA
atctagggtgacacggtac

SEQ ID NO: 58500 - RNA, 19 nt, synthetic construct
  misc_feature 1..19: note = siRNA sense sequence
  source 1..19: mol_type = other RNA
taccgtgtcaccctagatt

SEQ ID NO: 58501 - RNA, 19 nt, synthetic construct
  misc_feature 1..19: note = siRNA antisense sequence
  source 1..19: mol_type = other RNA
aatctagggtgacacggta

SEQ ID NO: 58502 - RNA, 19 nt, synthetic construct
  misc_feature 1..19: note = siRNA sense sequence
  source 1..19: mol_type = other RNA
accgtgtcaccctagattc

SEQ ID NO: 58503 - RNA, 19 nt, synthetic construct
  misc_feature 1..19: note = siRNA antisense sequence
  source 1..19: mol_type = other RNA
gaatctagggtgacacggt

SEQ ID NO: 58504 - RNA, 19 nt, synthetic construct
  misc_feature 1..19: note = siRNA sense sequence
  source 1..19: mol_type = other RNA
ccgtgtcaccctagattca

SEQ ID NO: 58505 - RNA, 19 nt, synthetic construct
  misc_feature 1..19: note = siRNA antisense sequence
  source 1..19: mol_type = other RNA
tgaatctagggtgacacgg

SEQ ID NO: 58506 - RNA, 19 nt, synthetic construct
  misc_feature 1..19: note = siRNA sense sequence
  source 1..19: mol_type = other RNA
gtcaccctagattcactaa

SEQ ID NO: 58507 - RNA, 19 nt, synthetic construct
  misc_feature 1..19: note = siRNA antisense sequence
  source 1..19: mol_type = other RNA
ttagtgaatctagggtgac

SEQ ID NO: 58508 - RNA, 19 nt, synthetic construct
  misc_feature 1..19: note = siRNA sense sequence
  source 1..19: mol_type = other RNA
tcaccctagattcactaag

SEQ ID NO: 58509 - RNA, 19 nt, synthetic construct
  misc_feature 1..19: note = siRNA antisense sequence
  source 1..19: mol_type = other RNA
cttagtgaatctagggtga

SEQ ID NO: 58510 - RNA, 19 nt, synthetic construct
  misc_feature 1..19: note = siRNA sense sequence
  source 1..19: mol_type = other RNA
caccctagattcactaaga

SEQ ID NO: 58511 - RNA, 19 nt, synthetic construct
  misc_feature 1..19: note = siRNA antisense sequence
  source 1..19: mol_type = other RNA
tcttagtgaatctagggtg

SEQ ID NO: 58512 - RNA, 19 nt, synthetic construct
  misc_feature 1..19: note = siRNA sense sequence
  source 1..19: mol_type = other RNA
aaaatcagaatgcactaag

SEQ ID NO: 58513 - RNA, 19 nt, synthetic construct
  misc_feature 1..19: note = siRNA antisense sequence
  source 1..19: mol_type = other RNA
cttagtgcattctgatttt

SEQ ID NO: 58514 - RNA, 19 nt, synthetic construct
  misc_feature 1..19: note = siRNA sense sequence
  source 1..19: mol_type = other RNA
aaatcagaatgcactaagc

SEQ ID NO: 58515 - RNA, 19 nt, synthetic construct
  misc_feature 1..19: note = siRNA antisense sequence
  source 1..19: mol_type = other RNA
gcttagtgcattctgattt

SEQ ID NO: 58516 - RNA, 19 nt, synthetic construct
  misc_feature 1..19: note = siRNA sense sequence
  source 1..19: mol_type = other RNA
aatcagaatgcactaagca

SEQ ID NO: 58517 - RNA, 19 nt, synthetic construct
  misc_feature 1..19: note = siRNA antisense sequence
  source 1..19: mol_type = other RNA
tgcttagtgcattctgatt

SEQ ID NO: 58518 - RNA, 19 nt, synthetic construct
  misc_feature 1..19: note = siRNA sense sequence
  source 1..19: mol_type = other RNA
atcagaatgcactaagcac

SEQ ID NO: 58519 - RNA, 19 nt, synthetic construct
  misc_feature 1..19: note = siRNA antisense sequence
  source 1..19: mol_type = other RNA
gtgcttagtgcattctgat

SEQ ID NO: 58520 - RNA, 19 nt, synthetic construct
  misc_feature 1..19: note = siRNA sense sequence
  source 1..19: mol_type = other RNA
atgcactaagcactccttc

SEQ ID NO: 58521 - RNA, 19 nt, synthetic construct
  misc_feature 1..19: note = siRNA antisense sequence
  source 1..19: mol_type = other RNA
gaaggagtgcttagtgcat

SEQ ID NO: 58522 - RNA, 19 nt, synthetic construct
  misc_feature 1..19: note = siRNA sense sequence
  source 1..19: mol_type = other RNA
tgcactaagcactccttct

SEQ ID NO: 58523 - RNA, 19 nt, synthetic construct
  misc_feature 1..19: note = siRNA antisense sequence
  source 1..19: mol_type = other RNA
agaaggagtgcttagtgca

SEQ ID NO: 58524 - RNA, 19 nt, synthetic construct
  misc_feature 1..19: note = siRNA sense sequence
  source 1..19: mol_type = other RNA
gcactaagcactccttcta

SEQ ID NO: 58525 - RNA, 19 nt, synthetic construct
  misc_feature 1..19: note = siRNA antisense sequence
  source 1..19: mol_type = other RNA
tagaaggagtgcttagtgc

SEQ ID NO: 58526 - RNA, 19 nt, synthetic construct
  misc_feature 1..19: note = siRNA sense sequence
  source 1..19: mol_type = other RNA
cactaagcactccttctac

SEQ ID NO: 58527 - RNA, 19 nt, synthetic construct
  misc_feature 1..19: note = siRNA antisense sequence
  source 1..19: mol_type = other RNA
gtagaaggagtgcttagtg

SEQ ID NO: 58528 - RNA, 19 nt, synthetic construct
  misc_feature 1..19: note = siRNA sense sequence
  source 1..19: mol_type = other RNA
actaagcactccttctaca

SEQ ID NO: 58529 - RNA, 19 nt, synthetic construct
  misc_feature 1..19: note = siRNA antisense sequence
  source 1..19: mol_type = other RNA
tgtagaaggagtgcttagt

SEQ ID NO: 58530 - RNA, 19 nt, synthetic construct
  misc_feature 1..19: note = siRNA sense sequence
  source 1..19: mol_type = other RNA
agcactccttctacatgtt

SEQ ID NO: 58531 - RNA, 19 nt, synthetic construct
  misc_feature 1..19: note = siRNA antisense sequence
  source 1..19: mol_type = other RNA
aacatgtagaaggagtgct

SEQ ID NO: 58532 - RNA, 19 nt, synthetic construct
  misc_feature 1..19: note = siRNA sense sequence
  source 1..19: mol_type = other RNA
gcactccttctacatgttg

SEQ ID NO: 58533 - RNA, 19 nt, synthetic construct
  misc_feature 1..19: note = siRNA antisense sequence
  source 1..19: mol_type = other RNA
caacatgtagaaggagtgc

SEQ ID NO: 58534 - RNA, 19 nt, synthetic construct
  misc_feature 1..19: note = siRNA sense sequence
  source 1..19: mol_type = other RNA
cactccttctacatgttgg

SEQ ID NO: 58535 - RNA, 19 nt, synthetic construct
  misc_feature 1..19: note = siRNA antisense sequence
  source 1..19: mol_type = other RNA
ccaacatgtagaaggagtg

SEQ ID NO: 58536 - RNA, 19 nt, synthetic construct
  misc_feature 1..19: note = siRNA sense sequence
  source 1..19: mol_type = other RNA
actccttctacatgttggc

SEQ ID NO: 58537 - RNA, 19 nt, synthetic construct
  misc_feature 1..19: note = siRNA antisense sequence
  source 1..19: mol_type = other RNA
gccaacatgtagaaggagt

SEQ ID NO: 58538 - RNA, 19 nt, synthetic construct
  misc_feature 1..19: note = siRNA sense sequence
  source 1..19: mol_type = other RNA
ctccttctacatgttggca

SEQ ID NO: 58539 - RNA, 19 nt, synthetic construct
  misc_feature 1..19: note = siRNA antisense sequence
  source 1..19: mol_type = other RNA
tgccaacatgtagaaggag

SEQ ID NO: 58540 - RNA, 19 nt, synthetic construct
  misc_feature 1..19: note = siRNA sense sequence
  source 1..19: mol_type = other RNA
tccttctacatgttggcaa

SEQ ID NO: 58541 - RNA, 19 nt, synthetic construct
  misc_feature 1..19: note = siRNA antisense sequence
  source 1..19: mol_type = other RNA
ttgccaacatgtagaagga

SEQ ID NO: 58542 - RNA, 19 nt, synthetic construct
  misc_feature 1..19: note = siRNA sense sequence
  source 1..19: mol_type = other RNA
ccttctacatgttggcaag

SEQ ID NO: 58543 - RNA, 19 nt, synthetic construct
  misc_feature 1..19: note = siRNA antisense sequence
  source 1..19: mol_type = other RNA
cttgccaacatgtagaagg

SEQ ID NO: 58544 - RNA, 19 nt, synthetic construct
  misc_feature 1..19: note = siRNA sense sequence
  source 1..19: mol_type = other RNA
cttctacatgttggcaagt

SEQ ID NO: 58545 - RNA, 19 nt, synthetic construct
  misc_feature 1..19: note = siRNA antisense sequence
  source 1..19: mol_type = other RNA
acttgccaacatgtagaag

SEQ ID NO: 58546 - RNA, 19 nt, synthetic construct
  misc_feature 1..19: note = siRNA sense sequence
  source 1..19: mol_type = other RNA
ttctacatgttggcaagta

SEQ ID NO: 58547 - RNA, 19 nt, synthetic construct
  misc_feature 1..19: note = siRNA antisense sequence
  source 1..19: mol_type = other RNA
tacttgccaacatgtagaa

SEQ ID NO: 58548 - RNA, 19 nt, synthetic construct
  misc_feature 1..19: note = siRNA sense sequence
  source 1..19: mol_type = other RNA
tctacatgttggcaagtaa

SEQ ID NO: 58549 - RNA, 19 nt, synthetic construct
  misc_feature 1..19: note = siRNA antisense sequence
  source 1..19: mol_type = other RNA
ttacttgccaacatgtaga

SEQ ID NO: 58550 - RNA, 19 nt, synthetic construct
  misc_feature 1..19: note = siRNA sense sequence
  source 1..19: mol_type = other RNA
ctacatgttggcaagtaaa

SEQ ID NO: 58551 - RNA, 19 nt, synthetic construct
  misc_feature 1..19: note = siRNA antisense sequence
  source 1..19: mol_type = other RNA
tttacttgccaacatgtag

SEQ ID NO: 58552 - RNA, 19 nt, synthetic construct
  misc_feature 1..19: note = siRNA sense sequence
  source 1..19: mol_type = other RNA
tacatgttggcaagtaaat

SEQ ID NO: 58553 - RNA, 19 nt, synthetic construct
  misc_feature 1..19: note = siRNA antisense sequence
  source 1..19: mol_type = other RNA
atttacttgccaacatgta

SEQ ID NO: 58554 - RNA, 19 nt, synthetic construct
  misc_feature 1..19: note = siRNA sense sequence
  source 1..19: mol_type = other RNA
catgttggcaagtaaatca

SEQ ID NO: 58555 - RNA, 19 nt, synthetic construct
  misc_feature 1..19: note = siRNA antisense sequence
  source 1..19: mol_type = other RNA
tgatttacttgccaacatg

SEQ ID NO: 58556 - RNA, 19 nt, synthetic construct
  misc_feature 1..19: note = siRNA sense sequence
  source 1..19: mol_type = other RNA
atgttggcaagtaaatcat

SEQ ID NO: 58557 - RNA, 19 nt, synthetic construct
  misc_feature 1..19: note = siRNA antisense sequence
  source 1..19: mol_type = other RNA
atgatttacttgccaacat

SEQ ID NO: 58558 - RNA, 19 nt, synthetic construct
  misc_feature 1..19: note = siRNA sense sequence
  source 1..19: mol_type = other RNA
tgttggcaagtaaatcata

SEQ ID NO: 58559 - RNA, 19 nt, synthetic construct
  misc_feature 1..19: note = siRNA antisense sequence
  source 1..19: mol_type = other RNA
tatgatttacttgccaaca

SEQ ID NO: 58560 - RNA, 19 nt, synthetic construct
  misc_feature 1..19: note = siRNA sense sequence
  source 1..19: mol_type = other RNA
gttggcaagtaaatcatat

SEQ ID NO: 58561 - RNA, 19 nt, synthetic construct
  misc_feature 1..19: note = siRNA antisense sequence
  source 1..19: mol_type = other RNA
atatgatttacttgccaac

SEQ ID NO: 58562 - RNA, 19 nt, synthetic construct
  misc_feature 1..19: note = siRNA sense sequence
  source 1..19: mol_type = other RNA
ggcaagtaaatcatatatc

SEQ ID NO: 58563 - RNA, 19 nt, synthetic construct
  misc_feature 1..19: note = siRNA antisense sequence
  source 1..19: mol_type = other RNA
gatatatgatttacttgcc

SEQ ID NO: 58564 - RNA, 19 nt, synthetic construct
  misc_feature 1..19: note = siRNA sense sequence
  source 1..19: mol_type = other RNA
gcaagtaaatcatatatcg

SEQ ID NO: 58565 - RNA, 19 nt, synthetic construct
  misc_feature 1..19: note = siRNA antisense sequence
  source 1..19: mol_type = other RNA
cgatatatgatttacttgc

SEQ ID NO: 58566 - RNA, 19 nt, synthetic construct
  misc_feature 1..19: note = siRNA sense sequence
  source 1..19: mol_type = other RNA
gtaaatcatatatcgttgc

SEQ ID NO: 58567 - RNA, 19 nt, synthetic construct
  misc_feature 1..19: note = siRNA antisense sequence
  source 1..19: mol_type = other RNA
gcaacgatatatgatttac

SEQ ID NO: 58568 - RNA, 19 nt, synthetic construct
  misc_feature 1..19: note = siRNA sense sequence
  source 1..19: mol_type = other RNA
aaatcatatatcgttgctg

SEQ ID NO: 58569 - RNA, 19 nt, synthetic construct
  misc_feature 1..19: note = siRNA antisense sequence
  source 1..19: mol_type = other RNA
cagcaacgatatatgattt

SEQ ID NO: 58570 - RNA, 19 nt, synthetic construct
  misc_feature 1..19: note = siRNA sense sequence
  source 1..19: mol_type = other RNA
atatcgttgctgccttatt

SEQ ID NO: 58571 - RNA, 19 nt, synthetic construct
  misc_feature 1..19: note = siRNA antisense sequence
  source 1..19: mol_type = other RNA
aataaggcagcaacgatat

SEQ ID NO: 58572 - RNA, 19 nt, synthetic construct
  misc_feature 1..19: note = siRNA sense sequence
  source 1..19: mol_type = other RNA
tatcgttgctgccttattc

SEQ ID NO: 58573 - RNA, 19 nt, synthetic construct
  misc_feature 1..19: note = siRNA antisense sequence
  source 1..19: mol_type = other RNA
gaataaggcagcaacgata

SEQ ID NO: 58574 - RNA, 19 nt, synthetic construct
  misc_feature 1..19: note = siRNA sense sequence
  source 1..19: mol_type = other RNA
atcgttgctgccttattcc

SEQ ID NO: 58575 - RNA, 19 nt, synthetic construct
  misc_feature 1..19: note = siRNA antisense sequence
  source 1..19: mol_type = other RNA
ggaataaggcagcaacgat

SEQ ID NO: 58576 - RNA, 19 nt, synthetic construct
  misc_feature 1..19: note = siRNA sense sequence
  source 1..19: mol_type = other RNA
tcgttgctgccttattcca

SEQ ID NO: 58577 - RNA, 19 nt, synthetic construct
  misc_feature 1..19: note = siRNA antisense sequence
  source 1..19: mol_type = other RNA
tggaataaggcagcaacga

SEQ ID NO: 58578 - RNA, 19 nt, synthetic construct
  misc_feature 1..19: note = siRNA sense sequence
  source 1..19: mol_type = other RNA
cgttgctgccttattccaa

SEQ ID NO: 58579 - RNA, 19 nt, synthetic construct
  misc_feature 1..19: note = siRNA antisense sequence
  source 1..19: mol_type = other RNA
ttggaataaggcagcaacg

SEQ ID NO: 58580 - RNA, 19 nt, synthetic construct
  misc_feature 1..19: note = siRNA sense sequence
  source 1..19: mol_type = other RNA
gttgctgccttattccaaa

SEQ ID NO: 58581 - RNA, 19 nt, synthetic construct
  misc_feature 1..19: note = siRNA antisense sequence
  source 1..19: mol_type = other RNA
tttggaataaggcagcaac

SEQ ID NO: 58582 - RNA, 19 nt, synthetic construct
  misc_feature 1..19: note = siRNA sense sequence
  source 1..19: mol_type = other RNA
ttgctgccttattccaaat

SEQ ID NO: 58583 - RNA, 19 nt, synthetic construct
  misc_feature 1..19: note = siRNA antisense sequence
  source 1..19: mol_type = other RNA
atttggaataaggcagcaa

SEQ ID NO: 58584 - RNA, 19 nt, synthetic construct
  misc_feature 1..19: note = siRNA sense sequence
  source 1..19: mol_type = other RNA
tgctgccttattccaaatc

SEQ ID NO: 58585 - RNA, 19 nt, synthetic construct
  misc_feature 1..19: note = siRNA antisense sequence
  source 1..19: mol_type = other RNA
gatttggaataaggcagca

SEQ ID NO: 58586 - RNA, 19 nt, synthetic construct
  misc_feature 1..19: note = siRNA sense sequence
  source 1..19: mol_type = other RNA
gctgccttattccaaatca

SEQ ID NO: 58587 - RNA, 19 nt, synthetic construct
  misc_feature 1..19: note = siRNA antisense sequence
  source 1..19: mol_type = other RNA
tgatttggaataaggcagc

SEQ ID NO: 58588 - RNA, 19 nt, synthetic construct
  misc_feature 1..19: note = siRNA sense sequence
  source 1..19: mol_type = other RNA
ctgccttattccaaatcaa

SEQ ID NO: 58589 - RNA, 19 nt, synthetic construct
  misc_feature 1..19: note = siRNA antisense sequence
  source 1..19: mol_type = other RNA
ttgatttggaataaggcag

SEQ ID NO: 58590 - RNA, 19 nt, synthetic construct
  misc_feature 1..19: note = siRNA sense sequence
  source 1..19: mol_type = other RNA
tgccttattccaaatcaag

SEQ ID NO: 58591 - RNA, 19 nt, synthetic construct
  misc_feature 1..19: note = siRNA antisense sequence
  source 1..19: mol_type = other RNA
cttgatttggaataaggca

SEQ ID NO: 58592 - RNA, 19 nt, synthetic construct
  misc_feature 1..19: note = siRNA sense sequence
  source 1..19: mol_type = other RNA
gccttattccaaatcaaga

SEQ ID NO: 58593 - RNA, 19 nt, synthetic construct
  misc_feature 1..19: note = siRNA antisense sequence
  source 1..19: mol_type = other RNA
tcttgatttggaataaggc

SEQ ID NO: 58594 - RNA, 19 nt, synthetic construct
  misc_feature 1..19: note = siRNA sense sequence
  source 1..19: mol_type = other RNA
ccttattccaaatcaagaa

SEQ ID NO: 58595 - RNA, 19 nt, synthetic construct
  misc_feature 1..19: note = siRNA antisense sequence
  source 1..19: mol_type = other RNA
ttcttgatttggaataagg

SEQ ID NO: 58596 - RNA, 19 nt, synthetic construct
  misc_feature 1..19: note = siRNA sense sequence
  source 1..19: mol_type = other RNA
ttccaaatcaagaatacag

SEQ ID NO: 58597 - RNA, 19 nt, synthetic construct
  misc_feature 1..19: note = siRNA antisense sequence
  source 1..19: mol_type = other RNA
ctgtattcttgatttggaa

SEQ ID NO: 58598 - RNA, 19 nt, synthetic construct
  misc_feature 1..19: note = siRNA sense sequence
  source 1..19: mol_type = other RNA
caaatcaagaatacagtag

SEQ ID NO: 58599 - RNA, 19 nt, synthetic construct
  misc_feature 1..19: note = siRNA antisense sequence
  source 1..19: mol_type = other RNA
ctactgtattcttgatttg

SEQ ID NO: 58600 - RNA, 19 nt, synthetic construct
  misc_feature 1..19: note = siRNA sense sequence
  source 1..19: mol_type = other RNA
aatcaagaatacagtagag

SEQ ID NO: 58601 - RNA, 19 nt, synthetic construct
  misc_feature 1..19: note = siRNA antisense sequence
  source 1..19: mol_type = other RNA
ctctactgtattcttgatt

SEQ ID NO: 58602 - RNA, 19 nt, synthetic construct
  misc_feature 1..19: note = siRNA sense sequence
  source 1..19: mol_type = other RNA
aaatgcacttatgatgtca

SEQ ID NO: 58603 - RNA, 19 nt, synthetic construct
  misc_feature 1..19: note = siRNA antisense sequence
  source 1..19: mol_type = other RNA
tgacatcataagtgcattt

SEQ ID NO: 58604 - RNA, 19 nt, synthetic construct
  misc_feature 1..19: note = siRNA sense sequence
  source 1..19: mol_type = other RNA
ttatcataaaatcgcaggt

SEQ ID NO: 58605 - RNA, 19 nt, synthetic construct
  misc_feature 1..19: note = siRNA antisense sequence
  source 1..19: mol_type = other RNA
acctgcgattttatgataa

SEQ ID NO: 58606 - RNA, 19 nt, synthetic construct
  misc_feature 1..19: note = siRNA sense sequence
  source 1..19: mol_type = other RNA
tatcataaaatcgcaggtc

SEQ ID NO: 58607 - RNA, 19 nt, synthetic construct
  misc_feature 1..19: note = siRNA antisense sequence
  source 1..19: mol_type = other RNA
gacctgcgattttatgata

SEQ ID NO: 58608 - RNA, 19 nt, synthetic construct
  misc_feature 1..19: note = siRNA sense sequence
  source 1..19: mol_type = other RNA
atcataaaatcgcaggtct

SEQ ID NO: 58609 - RNA, 19 nt, synthetic construct
  misc_feature 1..19: note = siRNA antisense sequence
  source 1..19: mol_type = other RNA
agacctgcgattttatgat

SEQ ID NO: 58610 - RNA, 19 nt, synthetic construct
  misc_feature 1..19: note = siRNA sense sequence
  source 1..19: mol_type = other RNA
tcataaaatcgcaggtcta

SEQ ID NO: 58611 - RNA, 19 nt, synthetic construct
  misc_feature 1..19: note = siRNA antisense sequence
  source 1..19: mol_type = other RNA
tagacctgcgattttatga

SEQ ID NO: 58612 - RNA, 19 nt, synthetic construct
  misc_feature 1..19: note = siRNA sense sequence
  source 1..19: mol_type = other RNA
cataaaatcgcaggtctaa

SEQ ID NO: 58613 - RNA, 19 nt, synthetic construct
  misc_feature 1..19: note = siRNA antisense sequence
  source 1..19: mol_type = other RNA
ttagacctgcgattttatg

SEQ ID NO: 58614 - RNA, 19 nt, synthetic construct
  misc_feature 1..19: note = siRNA sense sequence
  source 1..19: mol_type = other RNA
ataaaatcgcaggtctaat

SEQ ID NO: 58615 - RNA, 19 nt, synthetic construct
  misc_feature 1..19: note = siRNA antisense sequence
  source 1..19: mol_type = other RNA
attagacctgcgattttat

SEQ ID NO: 58616 - RNA, 19 nt, synthetic construct
  misc_feature 1..19: note = siRNA sense sequence
  source 1..19: mol_type = other RNA
taaaatcgcaggtctaatt

SEQ ID NO: 58617 - RNA, 19 nt, synthetic construct
  misc_feature 1..19: note = siRNA antisense sequence
  source 1..19: mol_type = other RNA
aattagacctgcgatttta

SEQ ID NO: 58618 - RNA, 19 nt, synthetic construct
  misc_feature 1..19: note = siRNA sense sequence
  source 1..19: mol_type = other RNA
aatcgcaggtctaattttc

SEQ ID NO: 58619 - RNA, 19 nt, synthetic construct
  misc_feature 1..19: note = siRNA antisense sequence
  source 1..19: mol_type = other RNA
gaaaattagacctgcgatt

SEQ ID NO: 58620 - RNA, 19 nt, synthetic construct
  misc_feature 1..19: note = siRNA sense sequence
  source 1..19: mol_type = other RNA
atcgcaggtctaattttct

SEQ ID NO: 58621 - RNA, 19 nt, synthetic construct
  misc_feature 1..19: note = siRNA antisense sequence
  source 1..19: mol_type = other RNA
agaaaattagacctgcgat

SEQ ID NO: 58622 - RNA, 19 nt, synthetic construct
  misc_feature 1..19: note = siRNA sense sequence
  source 1..19: mol_type = other RNA
gtctaattttctcatttcc

SEQ ID NO: 58623 - RNA, 19 nt, synthetic construct
  misc_feature 1..19: note = siRNA antisense sequence
  source 1..19: mol_type = other RNA
ggaaatgagaaaattagac

SEQ ID NO: 58624 - RNA, 19 nt, synthetic construct
  misc_feature 1..19: note = siRNA sense sequence
  source 1..19: mol_type = other RNA
cacagtgttctagttgaca

SEQ ID NO: 58625 - RNA, 19 nt, synthetic construct
  misc_feature 1..19: note = siRNA antisense sequence
  source 1..19: mol_type = other RNA
tgtcaactagaacactgtg

SEQ ID NO: 58626 - RNA, 19 nt, synthetic construct
  misc_feature 1..19: note = siRNA sense sequence
  source 1..19: mol_type = other RNA
gtcttcatttctttcactc

SEQ ID NO: 58627 - RNA, 19 nt, synthetic construct
  misc_feature 1..19: note = siRNA antisense sequence
  source 1..19: mol_type = other RNA
gagtgaaagaaatgaagac

SEQ ID NO: 58628 - RNA, 19 nt, synthetic construct
  misc_feature 1..19: note = siRNA sense sequence
  source 1..19: mol_type = other RNA
gggccttgtctgtcagttg

SEQ ID NO: 58629 - RNA, 19 nt, synthetic construct
  misc_feature 1..19: note = siRNA antisense sequence
  source 1..19: mol_type = other RNA
caactgacagacaaggccc

SEQ ID NO: 58630 - RNA, 19 nt, synthetic construct
  misc_feature 1..19: note = siRNA sense sequence
  source 1..19: mol_type = other RNA
ggccttgtctgtcagttgt

SEQ ID NO: 58631 - RNA, 19 nt, synthetic construct
  misc_feature 1..19: note = siRNA antisense sequence
  source 1..19: mol_type = other RNA
acaactgacagacaaggcc

SEQ ID NO: 58632 - RNA, 19 nt, synthetic construct
  misc_feature 1..19: note = siRNA sense sequence
  source 1..19: mol_type = other RNA
gccttgtctgtcagttgtg

SEQ ID NO: 58633 - RNA, 19 nt, synthetic construct
  misc_feature 1..19: note = siRNA antisense sequence
  source 1..19: mol_type = other RNA
cacaactgacagacaaggc

SEQ ID NO: 58634 - RNA, 19 nt, synthetic construct
  misc_feature 1..19: note = siRNA sense sequence
  source 1..19: mol_type = other RNA
ccttgtctgtcagttgtgg

SEQ ID NO: 58635 - RNA, 19 nt, synthetic construct
  misc_feature 1..19: note = siRNA antisense sequence
  source 1..19: mol_type = other RNA
ccacaactgacagacaagg

SEQ ID NO: 58636 - RNA, 19 nt, synthetic construct
  misc_feature 1..19: note = siRNA sense sequence
  source 1..19: mol_type = other RNA
gtctgtcagttgtggttgg

SEQ ID NO: 58637 - RNA, 19 nt, synthetic construct
  misc_feature 1..19: note = siRNA antisense sequence
  source 1..19: mol_type = other RNA
ccaaccacaactgacagac

SEQ ID NO: 58638 - RNA, 19 nt, synthetic construct
  misc_feature 1..19: note = siRNA sense sequence
  source 1..19: mol_type = other RNA
tctgtcagttgtggttggt

SEQ ID NO: 58639 - RNA, 19 nt, synthetic construct
  misc_feature 1..19: note = siRNA antisense sequence
  source 1..19: mol_type = other RNA
accaaccacaactgacaga

SEQ ID NO: 58640 - RNA, 19 nt, synthetic construct
  misc_feature 1..19: note = siRNA sense sequence
  source 1..19: mol_type = other RNA
ctgtcagttgtggttggta

SEQ ID NO: 58641 - RNA, 19 nt, synthetic construct
  misc_feature 1..19: note = siRNA antisense sequence
  source 1..19: mol_type = other RNA
taccaaccacaactgacag

SEQ ID NO: 58642 - RNA, 19 nt, synthetic construct
  misc_feature 1..19: note = siRNA sense sequence
  source 1..19: mol_type = other RNA
tgtcagttgtggttggtaa

SEQ ID NO: 58643 - RNA, 19 nt, synthetic construct
  misc_feature 1..19: note = siRNA antisense sequence
  source 1..19: mol_type = other RNA
ttaccaaccacaactgaca

SEQ ID NO: 58644 - RNA, 19 nt, synthetic construct
  misc_feature 1..19: note = siRNA sense sequence
  source 1..19: mol_type = other RNA
gtcagttgtggttggtaag

SEQ ID NO: 58645 - RNA, 19 nt, synthetic construct
  misc_feature 1..19: note = siRNA antisense sequence
  source 1..19: mol_type = other RNA
cttaccaaccacaactgac

SEQ ID NO: 58646 - RNA, 19 nt, synthetic construct
  misc_feature 1..19: note = siRNA sense sequence
  source 1..19: mol_type = other RNA
tcagttgtggttggtaagt

SEQ ID NO: 58647 - RNA, 19 nt, synthetic construct
  misc_feature 1..19: note = siRNA antisense sequence
  source 1..19: mol_type = other RNA
acttaccaaccacaactga

SEQ ID NO: 58648 - RNA, 19 nt, synthetic construct
  misc_feature 1..19: note = siRNA sense sequence
  source 1..19: mol_type = other RNA
cagttgtggttggtaagtg

SEQ ID NO: 58649 - RNA, 19 nt, synthetic construct
  misc_feature 1..19: note = siRNA antisense sequence
  source 1..19: mol_type = other RNA
cacttaccaaccacaactg

SEQ ID NO: 58650 - RNA, 19 nt, synthetic construct
  misc_feature 1..19: note = siRNA sense sequence
  source 1..19: mol_type = other RNA
agttgtggttggtaagtga

SEQ ID NO: 58651 - RNA, 19 nt, synthetic construct
  misc_feature 1..19: note = siRNA antisense sequence
  source 1..19: mol_type = other RNA
tcacttaccaaccacaact

SEQ ID NO: 58652 - RNA, 19 nt, synthetic construct
  misc_feature 1..19: note = siRNA sense sequence
  source 1..19: mol_type = other RNA
gtggttggtaagtgattaa

SEQ ID NO: 58653 - RNA, 19 nt, synthetic construct
  misc_feature 1..19: note = siRNA antisense sequence
  source 1..19: mol_type = other RNA
ttaatcacttaccaaccac

SEQ ID NO: 58654 - RNA, 19 nt, synthetic construct
  misc_feature 1..19: note = siRNA sense sequence
  source 1..19: mol_type = other RNA
tggttggtaagtgattaac

SEQ ID NO: 58655 - RNA, 19 nt, synthetic construct
  misc_feature 1..19: note = siRNA antisense sequence
  source 1..19: mol_type = other RNA
gttaatcacttaccaacca

SEQ ID NO: 58656 - RNA, 19 nt, synthetic construct
  misc_feature 1..19: note = siRNA sense sequence
  source 1..19: mol_type = other RNA
ggttggtaagtgattaact

SEQ ID NO: 58657 - RNA, 19 nt, synthetic construct
  misc_feature 1..19: note = siRNA antisense sequence
  source 1..19: mol_type = other RNA
agttaatcacttaccaacc

SEQ ID NO: 58658 - RNA, 19 nt, synthetic construct
  misc_feature 1..19: note = siRNA sense sequence
  source 1..19: mol_type = other RNA
ggtaagtgattaactgctc

SEQ ID NO: 58659 - RNA, 19 nt, synthetic construct
  misc_feature 1..19: note = siRNA antisense sequence
  source 1..19: mol_type = other RNA
gagcagttaatcacttacc

SEQ ID NO: 58660 - RNA, 19 nt, synthetic construct
  misc_feature 1..19: note = siRNA sense sequence
  source 1..19: mol_type = other RNA
gtaagtgattaactgctct

SEQ ID NO: 58661 - RNA, 19 nt, synthetic construct
  misc_feature 1..19: note = siRNA antisense sequence
  source 1..19: mol_type = other RNA
agagcagttaatcacttac

SEQ ID NO: 58662 - RNA, 19 nt, synthetic construct
  misc_feature 1..19: note = siRNA sense sequence
  source 1..19: mol_type = other RNA
aagtgattaactgctctgg

SEQ ID NO: 58663 - RNA, 19 nt, synthetic construct
  misc_feature 1..19: note = siRNA antisense sequence
  source 1..19: mol_type = other RNA
ccagagcagttaatcactt

SEQ ID NO: 58664 - RNA, 19 nt, synthetic construct
  misc_feature 1..19: note = siRNA sense sequence
  source 1..19: mol_type = other RNA
agtgattaactgctctggg

SEQ ID NO: 58665 - RNA, 19 nt, synthetic construct
  misc_feature 1..19: note = siRNA antisense sequence
  source 1..19: mol_type = other RNA
cccagagcagttaatcact

SEQ ID NO: 58666 - RNA, 19 nt, synthetic construct
  misc_feature 1..19: note = siRNA sense sequence
  source 1..19: mol_type = other RNA
ctgctgggctgtatgcttt

SEQ ID NO: 58667 - RNA, 19 nt, synthetic construct
  misc_feature 1..19: note = siRNA antisense sequence
  source 1..19: mol_type = other RNA
aaagcatacagcccagcag

SEQ ID NO: 58668 - RNA, 19 nt, synthetic construct
  misc_feature 1..19: note = siRNA sense sequence
  source 1..19: mol_type = other RNA
tgctgggctgtatgctttc

SEQ ID NO: 58669 - RNA, 19 nt, synthetic construct
  misc_feature 1..19: note = siRNA antisense sequence
  source 1..19: mol_type = other RNA
gaaagcatacagcccagca

SEQ ID NO: 58670 - RNA, 19 nt, synthetic construct
  misc_feature 1..19: note = siRNA sense sequence
  source 1..19: mol_type = other RNA
gctgggctgtatgctttct

SEQ ID NO: 58671 - RNA, 19 nt, synthetic construct
  misc_feature 1..19: note = siRNA antisense sequence
  source 1..19: mol_type = other RNA
agaaagcatacagcccagc

SEQ ID NO: 58672 - RNA, 19 nt, synthetic construct
  misc_feature 1..19: note = siRNA sense sequence
  source 1..19: mol_type = other RNA
tgggctgtatgctttctgg

SEQ ID NO: 58673 - RNA, 19 nt, synthetic construct
  misc_feature 1..19: note = siRNA antisense sequence
  source 1..19: mol_type = other RNA
ccagaaagcatacagccca

SEQ ID NO: 58674 - RNA, 19 nt, synthetic construct
  misc_feature 1..19: note = siRNA sense sequence
  source 1..19: mol_type = other RNA
gggctgtatgctttctggg

SEQ ID NO: 58675 - RNA, 19 nt, synthetic construct
  misc_feature 1..19: note = siRNA antisense sequence
  source 1..19: mol_type = other RNA
cccagaaagcatacagccc

SEQ ID NO: 58676 - RNA, 19 nt, synthetic construct
  misc_feature 1..19: note = siRNA sense sequence
  source 1..19: mol_type = other RNA
gctgtatgctttctgggat

SEQ ID NO: 58677 - RNA, 19 nt, synthetic construct
  misc_feature 1..19: note = siRNA antisense sequence
  source 1..19: mol_type = other RNA
atcccagaaagcatacagc

SEQ ID NO: 58678 - RNA, 19 nt, synthetic construct
  misc_feature 1..19: note = siRNA sense sequence
  source 1..19: mol_type = other RNA
tgtatgctttctgggatcc

SEQ ID NO: 58679 - RNA, 19 nt, synthetic construct
  misc_feature 1..19: note = siRNA antisense sequence
  source 1..19: mol_type = other RNA
ggatcccagaaagcataca

SEQ ID NO: 58680 - RNA, 19 nt, synthetic construct
  misc_feature 1..19: note = siRNA sense sequence
  source 1..19: mol_type = other RNA
gtatgctttctgggatcca

SEQ ID NO: 58681 - RNA, 19 nt, synthetic construct
  misc_feature 1..19: note = siRNA antisense sequence
  source 1..19: mol_type = other RNA
tggatcccagaaagcatac

SEQ ID NO: 58682 - RNA, 19 nt, synthetic construct
  misc_feature 1..19: note = siRNA sense sequence
  source 1..19: mol_type = other RNA
tatgctttctgggatccat

SEQ ID NO: 58683 - RNA, 19 nt, synthetic construct
  misc_feature 1..19: note = siRNA antisense sequence
  source 1..19: mol_type = other RNA
atggatcccagaaagcata

SEQ ID NO: 58684 - RNA, 19 nt, synthetic construct
  misc_feature 1..19: note = siRNA sense sequence
  source 1..19: mol_type = other RNA
ctttctgggatccatgtaa

SEQ ID NO: 58685 - RNA, 19 nt, synthetic construct
  misc_feature 1..19: note = siRNA antisense sequence
  source 1..19: mol_type = other RNA
ttacatggatcccagaaag

SEQ ID NO: 58686 - RNA, 19 nt, synthetic construct
  misc_feature 1..19: note = siRNA sense sequence
  source 1..19: mol_type = other RNA
ttctgggatccatgtaact

SEQ ID NO: 58687 - RNA, 19 nt, synthetic construct
  misc_feature 1..19: note = siRNA antisense sequence
  source 1..19: mol_type = other RNA
agttacatggatcccagaa

SEQ ID NO: 58688 - RNA, 19 nt, synthetic construct
  misc_feature 1..19: note = siRNA sense sequence
  source 1..19: mol_type = other RNA
ctgggatccatgtaactac

SEQ ID NO: 58689 - RNA, 19 nt, synthetic construct
  misc_feature 1..19: note = siRNA antisense sequence
  source 1..19: mol_type = other RNA
gtagttacatggatcccag

SEQ ID NO: 58690 - RNA, 19 nt, synthetic construct
  misc_feature 1..19: note = siRNA sense sequence
  source 1..19: mol_type = other RNA
tgggatccatgtaactaca

SEQ ID NO: 58691 - RNA, 19 nt, synthetic construct
  misc_feature 1..19: note = siRNA antisense sequence
  source 1..19: mol_type = other RNA
tgtagttacatggatccca

SEQ ID NO: 58692 - RNA, 19 nt, synthetic construct
  misc_feature 1..19: note = siRNA sense sequence
  source 1..19: mol_type = other RNA
tttgattttagagcgaagg

SEQ ID NO: 58693 - RNA, 19 nt, synthetic construct
  misc_feature 1..19: note = siRNA antisense sequence
  source 1..19: mol_type = other RNA
ccttcgctctaaaatcaaa

SEQ ID NO: 58694 - RNA, 19 nt, synthetic construct
  misc_feature 1..19: note = siRNA sense sequence
  source 1..19: mol_type = other RNA
ttgattttagagcgaaggg

SEQ ID NO: 58695 - RNA, 19 nt, synthetic construct
  misc_feature 1..19: note = siRNA antisense sequence
  source 1..19: mol_type = other RNA
cccttcgctctaaaatcaa

SEQ ID NO: 58696 - RNA, 19 nt, synthetic construct
  misc_feature 1..19: note = siRNA sense sequence
  source 1..19: mol_type = other RNA
tctggtattttctatcatc

SEQ ID NO: 58697 - RNA, 19 nt, synthetic construct
  misc_feature 1..19: note = siRNA antisense sequence
  source 1..19: mol_type = other RNA
gatgatagaaaataccaga

SEQ ID NO: 58698 - RNA, 19 nt, synthetic construct
  misc_feature 1..19: note = siRNA sense sequence
  source 1..19: mol_type = other RNA
ctggtattttctatcatct

SEQ ID NO: 58699 - RNA, 19 nt, synthetic construct
  misc_feature 1..19: note = siRNA antisense sequence
  source 1..19: mol_type = other RNA
agatgatagaaaataccag

SEQ ID NO: 58700 - RNA, 19 nt, synthetic construct
  misc_feature 1..19: note = siRNA sense sequence
  source 1..19: mol_type = other RNA
tggtattttctatcatctg

SEQ ID NO: 58701 - RNA, 19 nt, synthetic construct
  misc_feature 1..19: note = siRNA antisense sequence
  source 1..19: mol_type = other RNA
cagatgatagaaaatacca

SEQ ID NO: 58702 - RNA, 19 nt, synthetic construct
  misc_feature 1..19: note = siRNA sense sequence
  source 1..19: mol_type = other RNA
ggtattttctatcatctgt

SEQ ID NO: 58703 - RNA, 19 nt, synthetic construct
  misc_feature 1..19: note = siRNA antisense sequence
  source 1..19: mol_type = other RNA
acagatgatagaaaatacc

SEQ ID NO: 58704 - RNA, 19 nt, synthetic construct
  misc_feature 1..19: note = siRNA sense sequence
  source 1..19: mol_type = other RNA
ttctatcatctgtaggctt

SEQ ID NO: 58705 - RNA, 19 nt, synthetic construct
  misc_feature 1..19: note = siRNA antisense sequence
  source 1..19: mol_type = other RNA
aagcctacagatgatagaa

SEQ ID NO: 58706 - RNA, 19 nt, synthetic construct
  misc_feature 1..19: note = siRNA sense sequence
  source 1..19: mol_type = other RNA
tctatcatctgtaggcttt

SEQ ID NO: 58707 - RNA, 19 nt, synthetic construct
  misc_feature 1..19: note = siRNA antisense sequence
  source 1..19: mol_type = other RNA
aaagcctacagatgataga

SEQ ID NO: 58708 - RNA, 19 nt, synthetic construct
  misc_feature 1..19: note = siRNA sense sequence
  source 1..19: mol_type = other RNA
tcatctgtaggctttgtgc

SEQ ID NO: 58709 - RNA, 19 nt, synthetic construct
  misc_feature 1..19: note = siRNA antisense sequence
  source 1..19: mol_type = other RNA
gcacaaagcctacagatga

SEQ ID NO: 58710 - RNA, 19 nt, synthetic construct
  misc_feature 1..19: note = siRNA sense sequence
  source 1..19: mol_type = other RNA
catctgtaggctttgtgct

SEQ ID NO: 58711 - RNA, 19 nt, synthetic construct
  misc_feature 1..19: note = siRNA antisense sequence
  source 1..19: mol_type = other RNA
agcacaaagcctacagatg

SEQ ID NO: 58712 - RNA, 19 nt, synthetic construct
  misc_feature 1..19: note = siRNA sense sequence
  source 1..19: mol_type = other RNA
atctgtaggctttgtgcta

SEQ ID NO: 58713 - RNA, 19 nt, synthetic construct
  misc_feature 1..19: note = siRNA antisense sequence
  source 1..19: mol_type = other RNA
tagcacaaagcctacagat

SEQ ID NO: 58714 - RNA, 19 nt, synthetic construct
  misc_feature 1..19: note = siRNA sense sequence
  source 1..19: mol_type = other RNA
aggctttgtgctacttcag

SEQ ID NO: 58715 - RNA, 19 nt, synthetic construct
  misc_feature 1..19: note = siRNA antisense sequence
  source 1..19: mol_type = other RNA
ctgaagtagcacaaagcct

SEQ ID NO: 58716 - RNA, 19 nt, synthetic construct
  misc_feature 1..19: note = siRNA sense sequence
  source 1..19: mol_type = other RNA
ggctttgtgctacttcagt

SEQ ID NO: 58717 - RNA, 19 nt, synthetic construct
  misc_feature 1..19: note = siRNA antisense sequence
  source 1..19: mol_type = other RNA
actgaagtagcacaaagcc

SEQ ID NO: 58718 - RNA, 19 nt, synthetic construct
  misc_feature 1..19: note = siRNA sense sequence
  source 1..19: mol_type = other RNA
gctttgtgctacttcagtt

SEQ ID NO: 58719 - RNA, 19 nt, synthetic construct
  misc_feature 1..19: note = siRNA antisense sequence
  source 1..19: mol_type = other RNA
aactgaagtagcacaaagc

SEQ ID NO: 58720 - RNA, 19 nt, synthetic construct
  misc_feature 1..19: note = siRNA sense sequence
  source 1..19: mol_type = other RNA
ctttgtgctacttcagttt

SEQ ID NO: 58721 - RNA, 19 nt, synthetic construct
  misc_feature 1..19: note = siRNA antisense sequence
  source 1..19: mol_type = other RNA
aaactgaagtagcacaaag

SEQ ID NO: 58722 - RNA, 19 nt, synthetic construct
  misc_feature 1..19: note = siRNA sense sequence
  source 1..19: mol_type = other RNA
tttgtgctacttcagtttt

SEQ ID NO: 58723 - RNA, 19 nt, synthetic construct
  misc_feature 1..19: note = siRNA antisense sequence
  source 1..19: mol_type = other RNA
aaaactgaagtagcacaaa

SEQ ID NO: 58724 - RNA, 19 nt, synthetic construct
  misc_feature 1..19: note = siRNA sense sequence
  source 1..19: mol_type = other RNA
ttaattttagtggatgagg

SEQ ID NO: 58725 - RNA, 19 nt, synthetic construct
  misc_feature 1..19: note = siRNA antisense sequence
  source 1..19: mol_type = other RNA
cctcatccactaaaattaa

SEQ ID NO: 58726 - RNA, 19 nt, synthetic construct
  misc_feature 1..19: note = siRNA sense sequence
  source 1..19: mol_type = other RNA
taattttagtggatgaggg

SEQ ID NO: 58727 - RNA, 19 nt, synthetic construct
  misc_feature 1..19: note = siRNA antisense sequence
  source 1..19: mol_type = other RNA
ccctcatccactaaaatta

SEQ ID NO: 58728 - RNA, 19 nt, synthetic construct
  misc_feature 1..19: note = siRNA sense sequence
  source 1..19: mol_type = other RNA
aattttagtggatgaggga

SEQ ID NO: 58729 - RNA, 19 nt, synthetic construct
  misc_feature 1..19: note = siRNA antisense sequence
  source 1..19: mol_type = other RNA
tccctcatccactaaaatt

SEQ ID NO: 58730 - RNA, 19 nt, synthetic construct
  misc_feature 1..19: note = siRNA sense sequence
  source 1..19: mol_type = other RNA
ttagtggatgagggagttt

SEQ ID NO: 58731 - RNA, 19 nt, synthetic construct
  misc_feature 1..19: note = siRNA antisense sequence
  source 1..19: mol_type = other RNA
aaactccctcatccactaa

SEQ ID NO: 58732 - RNA, 19 nt, synthetic construct
  misc_feature 1..19: note = siRNA sense sequence
  source 1..19: mol_type = other RNA
tagtggatgagggagtttt

SEQ ID NO: 58733 - RNA, 19 nt, synthetic construct
  misc_feature 1..19: note = siRNA antisense sequence
  source 1..19: mol_type = other RNA
aaaactccctcatccacta

SEQ ID NO: 58734 - RNA, 19 nt, synthetic construct
  misc_feature 1..19: note = siRNA sense sequence
  source 1..19: mol_type = other RNA
agtggatgagggagttttg

SEQ ID NO: 58735 - RNA, 19 nt, synthetic construct
  misc_feature 1..19: note = siRNA antisense sequence
  source 1..19: mol_type = other RNA
caaaactccctcatccact

SEQ ID NO: 58736 - RNA, 19 nt, synthetic construct
  misc_feature 1..19: note = siRNA sense sequence
  source 1..19: mol_type = other RNA
gtggatgagggagttttgg

SEQ ID NO: 58737 - RNA, 19 nt, synthetic construct
  misc_feature 1..19: note = siRNA antisense sequence
  source 1..19: mol_type = other RNA
ccaaaactccctcatccac

SEQ ID NO: 58738 - RNA, 19 nt, synthetic construct
  misc_feature 1..19: note = siRNA sense sequence
  source 1..19: mol_type = other RNA
tggatgagggagttttgga

SEQ ID NO: 58739 - RNA, 19 nt, synthetic construct
  misc_feature 1..19: note = siRNA antisense sequence
  source 1..19: mol_type = other RNA
tccaaaactccctcatcca

SEQ ID NO: 58740 - RNA, 19 nt, synthetic construct
  misc_feature 1..19: note = siRNA sense sequence
  source 1..19: mol_type = other RNA
ggatgagggagttttggaa

SEQ ID NO: 58741 - RNA, 19 nt, synthetic construct
  misc_feature 1..19: note = siRNA antisense sequence
  source 1..19: mol_type = other RNA
ttccaaaactccctcatcc

SEQ ID NO: 58742 - RNA, 19 nt, synthetic construct
  misc_feature 1..19: note = siRNA sense sequence
  source 1..19: mol_type = other RNA
tggtaagccagtgtgaatc

SEQ ID NO: 58743 - RNA, 19 nt, synthetic construct
  misc_feature 1..19: note = siRNA antisense sequence
  source 1..19: mol_type = other RNA
gattcacactggcttacca

SEQ ID NO: 58744 - RNA, 19 nt, synthetic construct
  misc_feature 1..19: note = siRNA sense sequence
  source 1..19: mol_type = other RNA
gtaagccagtgtgaatcat

SEQ ID NO: 58745 - RNA, 19 nt, synthetic construct
  misc_feature 1..19: note = siRNA antisense sequence
  source 1..19: mol_type = other RNA
atgattcacactggcttac

SEQ ID NO: 58746 - RNA, 19 nt, synthetic construct
  misc_feature 1..19: note = siRNA sense sequence
  source 1..19: mol_type = other RNA
taagccagtgtgaatcatt

SEQ ID NO: 58747 - RNA, 19 nt, synthetic construct
  misc_feature 1..19: note = siRNA antisense sequence
  source 1..19: mol_type = other RNA
aatgattcacactggctta

SEQ ID NO: 58748 - RNA, 19 nt, synthetic construct
  misc_feature 1..19: note = siRNA sense sequence
  source 1..19: mol_type = other RNA
aagccagtgtgaatcattt

SEQ ID NO: 58749 - RNA, 19 nt, synthetic construct
  misc_feature 1..19: note = siRNA antisense sequence
  source 1..19: mol_type = other RNA
aaatgattcacactggctt

SEQ ID NO: 58750 - RNA, 19 nt, synthetic construct
  misc_feature 1..19: note = siRNA sense sequence
  source 1..19: mol_type = other RNA
agccagtgtgaatcattta

SEQ ID NO: 58751 - RNA, 19 nt, synthetic construct
  misc_feature 1..19: note = siRNA antisense sequence
  source 1..19: mol_type = other RNA
taaatgattcacactggct

SEQ ID NO: 58752 - RNA, 19 nt, synthetic construct
  misc_feature 1..19: note = siRNA sense sequence
  source 1..19: mol_type = other RNA
gccagtgtgaatcatttaa

SEQ ID NO: 58753 - RNA, 19 nt, synthetic construct
  misc_feature 1..19: note = siRNA antisense sequence
  source 1..19: mol_type = other RNA
ttaaatgattcacactggc

SEQ ID NO: 58754 - RNA, 19 nt, synthetic construct
  misc_feature 1..19: note = siRNA sense sequence
  source 1..19: mol_type = other RNA
ccagtgtgaatcatttaaa

SEQ ID NO: 58755 - RNA, 19 nt, synthetic construct
  misc_feature 1..19: note = siRNA antisense sequence
  source 1..19: mol_type = other RNA
tttaaatgattcacactgg

SEQ ID NO: 58756 - RNA, 19 nt, synthetic construct
  misc_feature 1..19: note = siRNA sense sequence
  source 1..19: mol_type = other RNA
aaatgtattttgttgggac

SEQ ID NO: 58757 - RNA, 19 nt, synthetic construct
  misc_feature 1..19: note = siRNA antisense sequence
  source 1..19: mol_type = other RNA
gtcccaacaaaatacattt

SEQ ID NO: 58758 - RNA, 19 nt, synthetic construct
  misc_feature 1..19: note = siRNA sense sequence
  source 1..19: mol_type = other RNA
aatgtattttgttgggaca

SEQ ID NO: 58759 - RNA, 19 nt, synthetic construct
  misc_feature 1..19: note = siRNA antisense sequence
  source 1..19: mol_type = other RNA
tgtcccaacaaaatacatt

SEQ ID NO: 58760 - RNA, 19 nt, synthetic construct
  misc_feature 1..19: note = siRNA sense sequence
  source 1..19: mol_type = other RNA
atgtattttgttgggacac

SEQ ID NO: 58761 - RNA, 19 nt, synthetic construct
  misc_feature 1..19: note = siRNA antisense sequence
  source 1..19: mol_type = other RNA
gtgtcccaacaaaatacat

SEQ ID NO: 58762 - RNA, 19 nt, synthetic construct
  misc_feature 1..19: note = siRNA sense sequence
  source 1..19: mol_type = other RNA
tgtattttgttgggacact

SEQ ID NO: 58763 - RNA, 19 nt, synthetic construct
  misc_feature 1..19: note = siRNA antisense sequence
  source 1..19: mol_type = other RNA
agtgtcccaacaaaataca

SEQ ID NO: 58764 - RNA, 19 nt, synthetic construct
  misc_feature 1..19: note = siRNA sense sequence
  source 1..19: mol_type = other RNA
gtattttgttgggacactg

SEQ ID NO: 58765 - RNA, 19 nt, synthetic construct
  misc_feature 1..19: note = siRNA antisense sequence
  source 1..19: mol_type = other RNA
cagtgtcccaacaaaatac

SEQ ID NO: 58766 - RNA, 19 nt, synthetic construct
  misc_feature 1..19: note = siRNA sense sequence
  source 1..19: mol_type = other RNA
tattttgttgggacactgt

SEQ ID NO: 58767 - RNA, 19 nt, synthetic construct
  misc_feature 1..19: note = siRNA antisense sequence
  source 1..19: mol_type = other RNA
acagtgtcccaacaaaata

SEQ ID NO: 58768 - RNA, 19 nt, synthetic construct
  misc_feature 1..19: note = siRNA sense sequence
  source 1..19: mol_type = other RNA
ttgttgggacactgtgtat

SEQ ID NO: 58769 - RNA, 19 nt, synthetic construct
  misc_feature 1..19: note = siRNA antisense sequence
  source 1..19: mol_type = other RNA
atacacagtgtcccaacaa

SEQ ID NO: 58770 - RNA, 19 nt, synthetic construct
  misc_feature 1..19: note = siRNA sense sequence
  source 1..19: mol_type = other RNA
tgggacactgtgtatatgg

SEQ ID NO: 58771 - RNA, 19 nt, synthetic construct
  misc_feature 1..19: note = siRNA antisense sequence
  source 1..19: mol_type = other RNA
ccatatacacagtgtccca

SEQ ID NO: 58772 - RNA, 19 nt, synthetic construct
  misc_feature 1..19: note = siRNA sense sequence
  source 1..19: mol_type = other RNA
gggacactgtgtatatggg

SEQ ID NO: 58773 - RNA, 19 nt, synthetic construct
  misc_feature 1..19: note = siRNA antisense sequence
  source 1..19: mol_type = other RNA
cccatatacacagtgtccc

SEQ ID NO: 58774 - RNA, 19 nt, synthetic construct
  misc_feature 1..19: note = siRNA sense sequence
  source 1..19: mol_type = other RNA
agaagcagcatgaaggtaa

SEQ ID NO: 58775 - RNA, 19 nt, synthetic construct
  misc_feature 1..19: note = siRNA antisense sequence
  source 1..19: mol_type = other RNA
ttaccttcatgctgcttct

SEQ ID NO: 58776 - RNA, 19 nt, synthetic construct
  misc_feature 1..19: note = siRNA sense sequence
  source 1..19: mol_type = other RNA
agcagcatgaaggtaatga

SEQ ID NO: 58777 - RNA, 19 nt, synthetic construct
  misc_feature 1..19: note = siRNA antisense sequence
  source 1..19: mol_type = other RNA
tcattaccttcatgctgct

SEQ ID NO: 58778 - RNA, 19 nt, synthetic construct
  misc_feature 1..19: note = siRNA sense sequence
  source 1..19: mol_type = other RNA
gcagcatgaaggtaatgag

SEQ ID NO: 58779 - RNA, 19 nt, synthetic construct
  misc_feature 1..19: note = siRNA antisense sequence
  source 1..19: mol_type = other RNA
ctcattaccttcatgctgc

SEQ ID NO: 58780 - RNA, 19 nt, synthetic construct
  misc_feature 1..19: note = siRNA sense sequence
  source 1..19: mol_type = other RNA
cagcatgaaggtaatgagg

SEQ ID NO: 58781 - RNA, 19 nt, synthetic construct
  misc_feature 1..19: note = siRNA antisense sequence
  source 1..19: mol_type = other RNA
cctcattaccttcatgctg

SEQ ID NO: 58782 - RNA, 19 nt, synthetic construct
  misc_feature 1..19: note = siRNA sense sequence
  source 1..19: mol_type = other RNA
agcatgaaggtaatgagga

SEQ ID NO: 58783 - RNA, 19 nt, synthetic construct
  misc_feature 1..19: note = siRNA antisense sequence
  source 1..19: mol_type = other RNA
tcctcattaccttcatgct

SEQ ID NO: 58784 - RNA, 19 nt, synthetic construct
  misc_feature 1..19: note = siRNA sense sequence
  source 1..19: mol_type = other RNA
aactgacattaagacttag

SEQ ID NO: 58785 - RNA, 19 nt, synthetic construct
  misc_feature 1..19: note = siRNA antisense sequence
  source 1..19: mol_type = other RNA
ctaagtcttaatgtcagtt

SEQ ID NO: 58786 - RNA, 19 nt, synthetic construct
  misc_feature 1..19: note = siRNA sense sequence
  source 1..19: mol_type = other RNA
actgacattaagacttaga

SEQ ID NO: 58787 - RNA, 19 nt, synthetic construct
  misc_feature 1..19: note = siRNA antisense sequence
  source 1..19: mol_type = other RNA
tctaagtcttaatgtcagt

SEQ ID NO: 58788 - RNA, 19 nt, synthetic construct
  misc_feature 1..19: note = siRNA sense sequence
  source 1..19: mol_type = other RNA
ctgacattaagacttagag

SEQ ID NO: 58789 - RNA, 19 nt, synthetic construct
  misc_feature 1..19: note = siRNA antisense sequence
  source 1..19: mol_type = other RNA
ctctaagtcttaatgtcag

SEQ ID NO: 58790 - RNA, 19 nt, synthetic construct
  misc_feature 1..19: note = siRNA sense sequence
  source 1..19: mol_type = other RNA
caggccaattttcctactt

SEQ ID NO: 58791 - RNA, 19 nt, synthetic construct
  misc_feature 1..19: note = siRNA antisense sequence
  source 1..19: mol_type = other RNA
aagtaggaaaattggcctg

SEQ ID NO: 58792 - RNA, 19 nt, synthetic construct
  misc_feature 1..19: note = siRNA sense sequence
  source 1..19: mol_type = other RNA
aggccaattttcctacttc

SEQ ID NO: 58793 - RNA, 19 nt, synthetic construct
  misc_feature 1..19: note = siRNA antisense sequence
  source 1..19: mol_type = other RNA
gaagtaggaaaattggcct

SEQ ID NO: 58794 - RNA, 19 nt, synthetic construct
  misc_feature 1..19: note = siRNA sense sequence
  source 1..19: mol_type = other RNA
ggccaattttcctacttct

SEQ ID NO: 58795 - RNA, 19 nt, synthetic construct
  misc_feature 1..19: note = siRNA antisense sequence
  source 1..19: mol_type = other RNA
agaagtaggaaaattggcc

SEQ ID NO: 58796 - RNA, 19 nt, synthetic construct
  misc_feature 1..19: note = siRNA sense sequence
  source 1..19: mol_type = other RNA
gccaattttcctacttctg

SEQ ID NO: 58797 - RNA, 19 nt, synthetic construct
  misc_feature 1..19: note = siRNA antisense sequence
  source 1..19: mol_type = other RNA
cagaagtaggaaaattggc

SEQ ID NO: 58798 - RNA, 19 nt, synthetic construct
  misc_feature 1..19: note = siRNA sense sequence
  source 1..19: mol_type = other RNA
ccaattttcctacttctga

SEQ ID NO: 58799 - RNA, 19 nt, synthetic construct
  misc_feature 1..19: note = siRNA antisense sequence
  source 1..19: mol_type = other RNA
tcagaagtaggaaaattgg

SEQ ID NO: 58800 - RNA, 19 nt, synthetic construct
  misc_feature 1..19: note = siRNA sense sequence
  source 1..19: mol_type = other RNA
aattttcctacttctgact

SEQ ID NO: 58801 - RNA, 19 nt, synthetic construct
  misc_feature 1..19: note = siRNA antisense sequence
  source 1..19: mol_type = other RNA
agtcagaagtaggaaaatt

SEQ ID NO: 58802 - RNA, 19 nt, synthetic construct
  misc_feature 1..19: note = siRNA sense sequence
  source 1..19: mol_type = other RNA
attttcctacttctgactt

SEQ ID NO: 58803 - RNA, 19 nt, synthetic construct
  misc_feature 1..19: note = siRNA antisense sequence
  source 1..19: mol_type = other RNA
aagtcagaagtaggaaaat

SEQ ID NO: 58804 - RNA, 19 nt, synthetic construct
  misc_feature 1..19: note = siRNA sense sequence
  source 1..19: mol_type = other RNA
tttcctacttctgacttat

SEQ ID NO: 58805 - RNA, 19 nt, synthetic construct
  misc_feature 1..19: note = siRNA antisense sequence
  source 1..19: mol_type = other RNA
ataagtcagaagtaggaaa

SEQ ID NO: 58806 - RNA, 19 nt, synthetic construct
  misc_feature 1..19: note = siRNA sense sequence
  source 1..19: mol_type = other RNA
ttcctacttctgacttatt

SEQ ID NO: 58807 - RNA, 19 nt, synthetic construct
  misc_feature 1..19: note = siRNA antisense sequence
  source 1..19: mol_type = other RNA
aataagtcagaagtaggaa

SEQ ID NO: 58808 - RNA, 19 nt, synthetic construct
  misc_feature 1..19: note = siRNA sense sequence
  source 1..19: mol_type = other RNA
tcctacttctgacttattt

SEQ ID NO: 58809 - RNA, 19 nt, synthetic construct
  misc_feature 1..19: note = siRNA antisense sequence
  source 1..19: mol_type = other RNA
aaataagtcagaagtagga

SEQ ID NO: 58810 - RNA, 19 nt, synthetic construct
  misc_feature 1..19: note = siRNA sense sequence
  source 1..19: mol_type = other RNA
cctacttctgacttatttc

SEQ ID NO: 58811 - RNA, 19 nt, synthetic construct
  misc_feature 1..19: note = siRNA antisense sequence
  source 1..19: mol_type = other RNA
gaaataagtcagaagtagg

SEQ ID NO: 58812 - RNA, 19 nt, synthetic construct
  misc_feature 1..19: note = siRNA sense sequence
  source 1..19: mol_type = other RNA
aaatgtgcacccttttgtg

SEQ ID NO: 58813 - RNA, 19 nt, synthetic construct
  misc_feature 1..19: note = siRNA antisense sequence
  source 1..19: mol_type = other RNA
cacaaaagggtgcacattt

SEQ ID NO: 58814 - RNA, 19 nt, synthetic construct
  misc_feature 1..19: note = siRNA sense sequence
  source 1..19: mol_type = other RNA
cccttttgtgccacatttg

SEQ ID NO: 58815 - RNA, 19 nt, synthetic construct
  misc_feature 1..19: note = siRNA antisense sequence
  source 1..19: mol_type = other RNA
caaatgtggcacaaaaggg

SEQ ID NO: 58816 - RNA, 19 nt, synthetic construct
  misc_feature 1..19: note = siRNA sense sequence
  source 1..19: mol_type = other RNA
ccttttgtgccacatttgt

SEQ ID NO: 58817 - RNA, 19 nt, synthetic construct
  misc_feature 1..19: note = siRNA antisense sequence
  source 1..19: mol_type = other RNA
acaaatgtggcacaaaagg

SEQ ID NO: 58818 - RNA, 19 nt, synthetic construct
  misc_feature 1..19: note = siRNA sense sequence
  source 1..19: mol_type = other RNA
tgtgccacatttgttcttc

SEQ ID NO: 58819 - RNA, 19 nt, synthetic construct
  misc_feature 1..19: note = siRNA antisense sequence
  source 1..19: mol_type = other RNA
gaagaacaaatgtggcaca

SEQ ID NO: 58820 - RNA, 19 nt, synthetic construct
  misc_feature 1..19: note = siRNA sense sequence
  source 1..19: mol_type = other RNA
catttgttcttcctcagtg

SEQ ID NO: 58821 - RNA, 19 nt, synthetic construct
  misc_feature 1..19: note = siRNA antisense sequence
  source 1..19: mol_type = other RNA
cactgaggaagaacaaatg

SEQ ID NO: 58822 - RNA, 19 nt, synthetic construct
  misc_feature 1..19: note = siRNA sense sequence
  source 1..19: mol_type = other RNA
cttcctcagtgattttcat

SEQ ID NO: 58823 - RNA, 19 nt, synthetic construct
  misc_feature 1..19: note = siRNA antisense sequence
  source 1..19: mol_type = other RNA
atgaaaatcactgaggaag

SEQ ID NO: 58824 - RNA, 19 nt, synthetic construct
  misc_feature 1..19: note = siRNA sense sequence
  source 1..19: mol_type = other RNA
tcctcagtgattttcatgt

SEQ ID NO: 58825 - RNA, 19 nt, synthetic construct
  misc_feature 1..19: note = siRNA antisense sequence
  source 1..19: mol_type = other RNA
acatgaaaatcactgagga

SEQ ID NO: 58826 - RNA, 19 nt, synthetic construct
  misc_feature 1..19: note = siRNA sense sequence
  source 1..19: mol_type = other RNA
ctcagtgattttcatgttg

SEQ ID NO: 58827 - RNA, 19 nt, synthetic construct
  misc_feature 1..19: note = siRNA antisense sequence
  source 1..19: mol_type = other RNA
caacatgaaaatcactgag

SEQ ID NO: 58828 - RNA, 19 nt, synthetic construct
  misc_feature 1..19: note = siRNA sense sequence
  source 1..19: mol_type = other RNA
tttcatgttgatatgcttc

SEQ ID NO: 58829 - RNA, 19 nt, synthetic construct
  misc_feature 1..19: note = siRNA antisense sequence
  source 1..19: mol_type = other RNA
gaagcatatcaacatgaaa

SEQ ID NO: 58830 - RNA, 19 nt, synthetic construct
  misc_feature 1..19: note = siRNA sense sequence
  source 1..19: mol_type = other RNA
ttgatatgcttcatgatac

SEQ ID NO: 58831 - RNA, 19 nt, synthetic construct
  misc_feature 1..19: note = siRNA antisense sequence
  source 1..19: mol_type = other RNA
gtatcatgaagcatatcaa

SEQ ID NO: 58832 - RNA, 19 nt, synthetic construct
  misc_feature 1..19: note = siRNA sense sequence
  source 1..19: mol_type = other RNA
gatatgcttcatgatactt

SEQ ID NO: 58833 - RNA, 19 nt, synthetic construct
  misc_feature 1..19: note = siRNA antisense sequence
  source 1..19: mol_type = other RNA
aagtatcatgaagcatatc

SEQ ID NO: 58834 - RNA, 19 nt, synthetic construct
  misc_feature 1..19: note = siRNA sense sequence
  source 1..19: mol_type = other RNA
atgcttcatgatacttatc

SEQ ID NO: 58835 - RNA, 19 nt, synthetic construct
  misc_feature 1..19: note = siRNA antisense sequence
  source 1..19: mol_type = other RNA
gataagtatcatgaagcat

SEQ ID NO: 58836 - RNA, 19 nt, synthetic construct
  misc_feature 1..19: note = siRNA sense sequence
  source 1..19: mol_type = other RNA
gatacttatcatgaagctt

SEQ ID NO: 58837 - RNA, 19 nt, synthetic construct
  misc_feature 1..19: note = siRNA antisense sequence
  source 1..19: mol_type = other RNA
aagcttcatgataagtatc

SEQ ID NO: 58838 - RNA, 19 nt, synthetic construct
  misc_feature 1..19: note = siRNA sense sequence
  source 1..19: mol_type = other RNA
cttatcatgaagcttattc

SEQ ID NO: 58839 - RNA, 19 nt, synthetic construct
  misc_feature 1..19: note = siRNA antisense sequence
  source 1..19: mol_type = other RNA
gaataagcttcatgataag

SEQ ID NO: 58840 - RNA, 19 nt, synthetic construct
  misc_feature 1..19: note = siRNA sense sequence
  source 1..19: mol_type = other RNA
tatcatgaagcttattctg

SEQ ID NO: 58841 - RNA, 19 nt, synthetic construct
  misc_feature 1..19: note = siRNA antisense sequence
  source 1..19: mol_type = other RNA
cagaataagcttcatgata

SEQ ID NO: 58842 - RNA, 19 nt, synthetic construct
  misc_feature 1..19: note = siRNA sense sequence
  source 1..19: mol_type = other RNA
catgaagcttattctgtca

SEQ ID NO: 58843 - RNA, 19 nt, synthetic construct
  misc_feature 1..19: note = siRNA antisense sequence
  source 1..19: mol_type = other RNA
tgacagaataagcttcatg

SEQ ID NO: 58844 - RNA, 19 nt, synthetic construct
  misc_feature 1..19: note = siRNA sense sequence
  source 1..19: mol_type = other RNA
tgaagcttattctgtcagg

SEQ ID NO: 58845 - RNA, 19 nt, synthetic construct
  misc_feature 1..19: note = siRNA antisense sequence
  source 1..19: mol_type = other RNA
cctgacagaataagcttca

SEQ ID NO: 58846 - RNA, 19 nt, synthetic construct
  misc_feature 1..19: note = siRNA sense sequence
  source 1..19: mol_type = other RNA
gcttattctgtcaggacca

SEQ ID NO: 58847 - RNA, 19 nt, synthetic construct
  misc_feature 1..19: note = siRNA antisense sequence
  source 1..19: mol_type = other RNA
tggtcctgacagaataagc

SEQ ID NO: 58848 - RNA, 19 nt, synthetic construct
  misc_feature 1..19: note = siRNA sense sequence
  source 1..19: mol_type = other RNA
attctgtcaggaccaagat

SEQ ID NO: 58849 - RNA, 19 nt, synthetic construct
  misc_feature 1..19: note = siRNA antisense sequence
  source 1..19: mol_type = other RNA
atcttggtcctgacagaat

SEQ ID NO: 58850 - RNA, 19 nt, synthetic construct
  misc_feature 1..19: note = siRNA sense sequence
  source 1..19: mol_type = other RNA
tctgtcaggaccaagatca

SEQ ID NO: 58851 - RNA, 19 nt, synthetic construct
  misc_feature 1..19: note = siRNA antisense sequence
  source 1..19: mol_type = other RNA
tgatcttggtcctgacaga

SEQ ID NO: 58852 - RNA, 19 nt, synthetic construct
  misc_feature 1..19: note = siRNA sense sequence
  source 1..19: mol_type = other RNA
ctgtcaggaccaagatcaa

SEQ ID NO: 58853 - RNA, 19 nt, synthetic construct
  misc_feature 1..19: note = siRNA antisense sequence
  source 1..19: mol_type = other RNA
ttgatcttggtcctgacag

SEQ ID NO: 58854 - RNA, 19 nt, synthetic construct
  misc_feature 1..19: note = siRNA sense sequence
  source 1..19: mol_type = other RNA
tgtcaggaccaagatcaat

SEQ ID NO: 58855 - RNA, 19 nt, synthetic construct
  misc_feature 1..19: note = siRNA antisense sequence
  source 1..19: mol_type = other RNA
attgatcttggtcctgaca

SEQ ID NO: 58856 - RNA, 19 nt, synthetic construct
  misc_feature 1..19: note = siRNA sense sequence
  source 1..19: mol_type = other RNA
gtcaggaccaagatcaatc

SEQ ID NO: 58857 - RNA, 19 nt, synthetic construct
  misc_feature 1..19: note = siRNA antisense sequence
  source 1..19: mol_type = other RNA
gattgatcttggtcctgac

SEQ ID NO: 58858 - RNA, 19 nt, synthetic construct
  misc_feature 1..19: note = siRNA sense sequence
  source 1..19: mol_type = other RNA
tcaggaccaagatcaatct

SEQ ID NO: 58859 - RNA, 19 nt, synthetic construct
  misc_feature 1..19: note = siRNA antisense sequence
  source 1..19: mol_type = other RNA
agattgatcttggtcctga

SEQ ID NO: 58860 - RNA, 19 nt, synthetic construct
  misc_feature 1..19: note = siRNA sense sequence
  source 1..19: mol_type = other RNA
caggaccaagatcaatcta

SEQ ID NO: 58861 - RNA, 19 nt, synthetic construct
  misc_feature 1..19: note = siRNA antisense sequence
  source 1..19: mol_type = other RNA
tagattgatcttggtcctg

SEQ ID NO: 58862 - RNA, 19 nt, synthetic construct
  misc_feature 1..19: note = siRNA sense sequence
  source 1..19: mol_type = other RNA
aggaccaagatcaatctat

SEQ ID NO: 58863 - RNA, 19 nt, synthetic construct
  misc_feature 1..19: note = siRNA antisense sequence
  source 1..19: mol_type = other RNA
atagattgatcttggtcct

SEQ ID NO: 58864 - RNA, 19 nt, synthetic construct
  misc_feature 1..19: note = siRNA sense sequence
  source 1..19: mol_type = other RNA
ggaccaagatcaatctatt

SEQ ID NO: 58865 - RNA, 19 nt, synthetic construct
  misc_feature 1..19: note = siRNA antisense sequence
  source 1..19: mol_type = other RNA
aatagattgatcttggtcc

SEQ ID NO: 58866 - RNA, 19 nt, synthetic construct
  misc_feature 1..19: note = siRNA sense sequence
  source 1..19: mol_type = other RNA
gaccaagatcaatctatta

SEQ ID NO: 58867 - RNA, 19 nt, synthetic construct
  misc_feature 1..19: note = siRNA antisense sequence
  source 1..19: mol_type = other RNA
taatagattgatcttggtc

SEQ ID NO: 58868 - RNA, 19 nt, synthetic construct
  misc_feature 1..19: note = siRNA sense sequence
  source 1..19: mol_type = other RNA
ccctcctatttagttaatc

SEQ ID NO: 58869 - RNA, 19 nt, synthetic construct
  misc_feature 1..19: note = siRNA antisense sequence
  source 1..19: mol_type = other RNA
gattaactaaataggaggg

SEQ ID NO: 58870 - RNA, 19 nt, synthetic construct
  misc_feature 1..19: note = siRNA sense sequence
  source 1..19: mol_type = other RNA
cctcctatttagttaatca

SEQ ID NO: 58871 - RNA, 19 nt, synthetic construct
  misc_feature 1..19: note = siRNA antisense sequence
  source 1..19: mol_type = other RNA
tgattaactaaataggagg

SEQ ID NO: 58872 - RNA, 19 nt, synthetic construct
  misc_feature 1..19: note = siRNA sense sequence
  source 1..19: mol_type = other RNA
ggaattagaatgtggataa

SEQ ID NO: 58873 - RNA, 19 nt, synthetic construct
  misc_feature 1..19: note = siRNA antisense sequence
  source 1..19: mol_type = other RNA
ttatccacattctaattcc

SEQ ID NO: 58874 - RNA, 19 nt, synthetic construct
  misc_feature 1..19: note = siRNA sense sequence
  source 1..19: mol_type = other RNA
gtggataaaatttgaatgg

SEQ ID NO: 58875 - RNA, 19 nt, synthetic construct
  misc_feature 1..19: note = siRNA antisense sequence
  source 1..19: mol_type = other RNA
ccattcaaattttatccac

SEQ ID NO: 58876 - RNA, 19 nt, synthetic construct
  misc_feature 1..19: note = siRNA sense sequence
  source 1..19: mol_type = other RNA
tggataaaatttgaatggg

SEQ ID NO: 58877 - RNA, 19 nt, synthetic construct
  misc_feature 1..19: note = siRNA antisense sequence
  source 1..19: mol_type = other RNA
cccattcaaattttatcca

SEQ ID NO: 58878 - RNA, 19 nt, synthetic construct
  misc_feature 1..19: note = siRNA sense sequence
  source 1..19: mol_type = other RNA
aaccagatatggcattgtc

SEQ ID NO: 58879 - RNA, 19 nt, synthetic construct
  misc_feature 1..19: note = siRNA antisense sequence
  source 1..19: mol_type = other RNA
gacaatgccatatctggtt

SEQ ID NO: 58880 - RNA, 19 nt, synthetic construct
  misc_feature 1..19: note = siRNA sense sequence
  source 1..19: mol_type = other RNA
accagatatggcattgtct

SEQ ID NO: 58881 - RNA, 19 nt, synthetic construct
  misc_feature 1..19: note = siRNA antisense sequence
  source 1..19: mol_type = other RNA
agacaatgccatatctggt

SEQ ID NO: 58882 - RNA, 19 nt, synthetic construct
  misc_feature 1..19: note = siRNA sense sequence
  source 1..19: mol_type = other RNA
ccagatatggcattgtctc

SEQ ID NO: 58883 - RNA, 19 nt, synthetic construct
  misc_feature 1..19: note = siRNA antisense sequence
  source 1..19: mol_type = other RNA
gagacaatgccatatctgg

SEQ ID NO: 58884 - RNA, 19 nt, synthetic construct
  misc_feature 1..19: note = siRNA sense sequence
  source 1..19: mol_type = other RNA
ggcattgtctccaacctgc

SEQ ID NO: 58885 - RNA, 19 nt, synthetic construct
  misc_feature 1..19: note = siRNA antisense sequence
  source 1..19: mol_type = other RNA
gcaggttggagacaatgcc

SEQ ID NO: 58886 - RNA, 19 nt, synthetic construct
  misc_feature 1..19: note = siRNA sense sequence
  source 1..19: mol_type = other RNA
gcattgtctccaacctgct

SEQ ID NO: 58887 - RNA, 19 nt, synthetic construct
  misc_feature 1..19: note = siRNA antisense sequence
  source 1..19: mol_type = other RNA
agcaggttggagacaatgc

SEQ ID NO: 58888 - RNA, 19 nt, synthetic construct
  misc_feature 1..19: note = siRNA sense sequence
  source 1..19: mol_type = other RNA
cattgtctccaacctgcta

SEQ ID NO: 58889 - RNA, 19 nt, synthetic construct
  misc_feature 1..19: note = siRNA antisense sequence
  source 1..19: mol_type = other RNA
tagcaggttggagacaatg

SEQ ID NO: 58890 - RNA, 19 nt, synthetic construct
  misc_feature 1..19: note = siRNA sense sequence
  source 1..19: mol_type = other RNA
attgtctccaacctgctaa

SEQ ID NO: 58891 - RNA, 19 nt, synthetic construct
  misc_feature 1..19: note = siRNA antisense sequence
  source 1..19: mol_type = other RNA
ttagcaggttggagacaat

SEQ ID NO: 58892 - RNA, 19 nt, synthetic construct
  misc_feature 1..19: note = siRNA sense sequence
  source 1..19: mol_type = other RNA
tcatctcagtctatgtttg

SEQ ID NO: 58893 - RNA, 19 nt, synthetic construct
  misc_feature 1..19: note = siRNA antisense sequence
  source 1..19: mol_type = other RNA
caaacatagactgagatga

SEQ ID NO: 58894 - RNA, 19 nt, synthetic construct
  misc_feature 1..19: note = siRNA sense sequence
  source 1..19: mol_type = other RNA
catctcagtctatgtttgt

SEQ ID NO: 58895 - RNA, 19 nt, synthetic construct
  misc_feature 1..19: note = siRNA antisense sequence
  source 1..19: mol_type = other RNA
acaaacatagactgagatg

SEQ ID NO: 58896 - RNA, 19 nt, synthetic construct
  misc_feature 1..19: note = siRNA sense sequence
  source 1..19: mol_type = other RNA
atctcagtctatgtttgtc

SEQ ID NO: 58897 - RNA, 19 nt, synthetic construct
  misc_feature 1..19: note = siRNA antisense sequence
  source 1..19: mol_type = other RNA
gacaaacatagactgagat

SEQ ID NO: 58898 - RNA, 19 nt, synthetic construct
  misc_feature 1..19: note = siRNA sense sequence
  source 1..19: mol_type = other RNA
tctcagtctatgtttgtcc

SEQ ID NO: 58899 - RNA, 19 nt, synthetic construct
  misc_feature 1..19: note = siRNA antisense sequence
  source 1..19: mol_type = other RNA
ggacaaacatagactgaga

SEQ ID NO: 58900 - RNA, 19 nt, synthetic construct
  misc_feature 1..19: note = siRNA sense sequence
  source 1..19: mol_type = other RNA
ctcagtctatgtttgtcca

SEQ ID NO: 58901 - RNA, 19 nt, synthetic construct
  misc_feature 1..19: note = siRNA antisense sequence
  source 1..19: mol_type = other RNA
tggacaaacatagactgag

SEQ ID NO: 58902 - RNA, 19 nt, synthetic construct
  misc_feature 1..19: note = siRNA sense sequence
  source 1..19: mol_type = other RNA
caaattcagtgtctaagtt

SEQ ID NO: 58903 - RNA, 19 nt, synthetic construct
  misc_feature 1..19: note = siRNA antisense sequence
  source 1..19: mol_type = other RNA
aacttagacactgaatttg

SEQ ID NO: 58904 - RNA, 19 nt, synthetic construct
  misc_feature 1..19: note = siRNA sense sequence
  source 1..19: mol_type = other RNA
attcagtgtctaagttatg

SEQ ID NO: 58905 - RNA, 19 nt, synthetic construct
  misc_feature 1..19: note = siRNA antisense sequence
  source 1..19: mol_type = other RNA
cataacttagacactgaat

SEQ ID NO: 58906 - RNA, 19 nt, synthetic construct
  misc_feature 1..19: note = siRNA sense sequence
  source 1..19: mol_type = other RNA
tcagtgtctaagttatgtc

SEQ ID NO: 58907 - RNA, 19 nt, synthetic construct
  misc_feature 1..19: note = siRNA antisense sequence
  source 1..19: mol_type = other RNA
gacataacttagacactga

SEQ ID NO: 58908 - RNA, 19 nt, synthetic construct
  misc_feature 1..19: note = siRNA sense sequence
  source 1..19: mol_type = other RNA
cagtgtctaagttatgtcc

SEQ ID NO: 58909 - RNA, 19 nt, synthetic construct
  misc_feature 1..19: note = siRNA antisense sequence
  source 1..19: mol_type = other RNA
ggacataacttagacactg

SEQ ID NO: 58910 - RNA, 19 nt, synthetic construct
  misc_feature 1..19: note = siRNA sense sequence
  source 1..19: mol_type = other RNA
tctaagttatgtccaggta

SEQ ID NO: 58911 - RNA, 19 nt, synthetic construct
  misc_feature 1..19: note = siRNA antisense sequence
  source 1..19: mol_type = other RNA
tacctggacataacttaga

SEQ ID NO: 58912 - RNA, 19 nt, synthetic construct
  misc_feature 1..19: note = siRNA sense sequence
  source 1..19: mol_type = other RNA
ctaagttatgtccaggtac

SEQ ID NO: 58913 - RNA, 19 nt, synthetic construct
  misc_feature 1..19: note = siRNA antisense sequence
  source 1..19: mol_type = other RNA
gtacctggacataacttag

SEQ ID NO: 58914 - RNA, 19 nt, synthetic construct
  misc_feature 1..19: note = siRNA sense sequence
  source 1..19: mol_type = other RNA
taagttatgtccaggtact

SEQ ID NO: 58915 - RNA, 19 nt, synthetic construct
  misc_feature 1..19: note = siRNA antisense sequence
  source 1..19: mol_type = other RNA
agtacctggacataactta

SEQ ID NO: 58916 - RNA, 19 nt, synthetic construct
  misc_feature 1..19: note = siRNA sense sequence
  source 1..19: mol_type = other RNA
caggtactggtgtttaaag

SEQ ID NO: 58917 - RNA, 19 nt, synthetic construct
  misc_feature 1..19: note = siRNA antisense sequence
  source 1..19: mol_type = other RNA
ctttaaacaccagtacctg

SEQ ID NO: 58918 - RNA, 19 nt, synthetic construct
  misc_feature 1..19: note = siRNA sense sequence
  source 1..19: mol_type = other RNA
aggtactggtgtttaaagg

SEQ ID NO: 58919 - RNA, 19 nt, synthetic construct
  misc_feature 1..19: note = siRNA antisense sequence
  source 1..19: mol_type = other RNA
cctttaaacaccagtacct

SEQ ID NO: 58920 - RNA, 19 nt, synthetic construct
  misc_feature 1..19: note = siRNA sense sequence
  source 1..19: mol_type = other RNA
ggtactggtgtttaaagga

SEQ ID NO: 58921 - RNA, 19 nt, synthetic construct
  misc_feature 1..19: note = siRNA antisense sequence
  source 1..19: mol_type = other RNA
tcctttaaacaccagtacc

SEQ ID NO: 58922 - RNA, 19 nt, synthetic construct
  misc_feature 1..19: note = siRNA sense sequence
  source 1..19: mol_type = other RNA
tactggtgtttaaaggact

SEQ ID NO: 58923 - RNA, 19 nt, synthetic construct
  misc_feature 1..19: note = siRNA antisense sequence
  source 1..19: mol_type = other RNA
agtcctttaaacaccagta

SEQ ID NO: 58924 - RNA, 19 nt, synthetic construct
  misc_feature 1..19: note = siRNA sense sequence
  source 1..19: mol_type = other RNA
tggagtcagccagtgtaga

SEQ ID NO: 58925 - RNA, 19 nt, synthetic construct
  misc_feature 1..19: note = siRNA antisense sequence
  source 1..19: mol_type = other RNA
tctacactggctgactcca

SEQ ID NO: 58926 - RNA, 19 nt, synthetic construct
  misc_feature 1..19: note = siRNA sense sequence
  source 1..19: mol_type = other RNA
gagtcagccagtgtagaat

SEQ ID NO: 58927 - RNA, 19 nt, synthetic construct
  misc_feature 1..19: note = siRNA antisense sequence
  source 1..19: mol_type = other RNA
attctacactggctgactc

SEQ ID NO: 58928 - RNA, 19 nt, synthetic construct
  misc_feature 1..19: note = siRNA sense sequence
  source 1..19: mol_type = other RNA
agtcagccagtgtagaatt

SEQ ID NO: 58929 - RNA, 19 nt, synthetic construct
  misc_feature 1..19: note = siRNA antisense sequence
  source 1..19: mol_type = other RNA
aattctacactggctgact

SEQ ID NO: 58930 - RNA, 19 nt, synthetic construct
  misc_feature 1..19: note = siRNA sense sequence
  source 1..19: mol_type = other RNA
agccagtgtagaatttgta

SEQ ID NO: 58931 - RNA, 19 nt, synthetic construct
  misc_feature 1..19: note = siRNA antisense sequence
  source 1..19: mol_type = other RNA
tacaaattctacactggct

SEQ ID NO: 58932 - RNA, 19 nt, synthetic construct
  misc_feature 1..19: note = siRNA sense sequence
  source 1..19: mol_type = other RNA
ttgtatcccaaatattcca

SEQ ID NO: 58933 - RNA, 19 nt, synthetic construct
  misc_feature 1..19: note = siRNA antisense sequence
  source 1..19: mol_type = other RNA
tggaatatttgggatacaa

SEQ ID NO: 58934 - RNA, 19 nt, synthetic construct
  misc_feature 1..19: note = siRNA sense sequence
  source 1..19: mol_type = other RNA
tgtatcccaaatattccac

SEQ ID NO: 58935 - RNA, 19 nt, synthetic construct
  misc_feature 1..19: note = siRNA antisense sequence
  source 1..19: mol_type = other RNA
gtggaatatttgggataca

SEQ ID NO: 58936 - RNA, 19 nt, synthetic construct
  misc_feature 1..19: note = siRNA sense sequence
  source 1..19: mol_type = other RNA
gtatcccaaatattccaca

SEQ ID NO: 58937 - RNA, 19 nt, synthetic construct
  misc_feature 1..19: note = siRNA antisense sequence
  source 1..19: mol_type = other RNA
tgtggaatatttgggatac

SEQ ID NO: 58938 - RNA, 19 nt, synthetic construct
  misc_feature 1..19: note = siRNA sense sequence
  source 1..19: mol_type = other RNA
ccaaatattccacattctg

SEQ ID NO: 58939 - RNA, 19 nt, synthetic construct
  misc_feature 1..19: note = siRNA antisense sequence
  source 1..19: mol_type = other RNA
cagaatgtggaatatttgg

SEQ ID NO: 58940 - RNA, 19 nt, synthetic construct
  misc_feature 1..19: note = siRNA sense sequence
  source 1..19: mol_type = other RNA
caaatattccacattctga

SEQ ID NO: 58941 - RNA, 19 nt, synthetic construct
  misc_feature 1..19: note = siRNA antisense sequence
  source 1..19: mol_type = other RNA
tcagaatgtggaatatttg

SEQ ID NO: 58942 - RNA, 19 nt, synthetic construct
  misc_feature 1..19: note = siRNA sense sequence
  source 1..19: mol_type = other RNA
aaatattccacattctgag

SEQ ID NO: 58943 - RNA, 19 nt, synthetic construct
  misc_feature 1..19: note = siRNA antisense sequence
  source 1..19: mol_type = other RNA
ctcagaatgtggaatattt

SEQ ID NO: 58944 - RNA, 19 nt, synthetic construct
  misc_feature 1..19: note = siRNA sense sequence
  source 1..19: mol_type = other RNA
agactttggcaacgtcgtt

SEQ ID NO: 58945 - RNA, 19 nt, synthetic construct
  misc_feature 1..19: note = siRNA antisense sequence
  source 1..19: mol_type = other RNA
aacgacgttgccaaagtct

SEQ ID NO: 58946 - RNA, 19 nt, synthetic construct
  misc_feature 1..19: note = siRNA sense sequence
  source 1..19: mol_type = other RNA
gactttggcaacgtcgttt

SEQ ID NO: 58947 - RNA, 19 nt, synthetic construct
  misc_feature 1..19: note = siRNA antisense sequence
  source 1..19: mol_type = other RNA
aaacgacgttgccaaagtc

SEQ ID NO: 58948 - RNA, 19 nt, synthetic construct
  misc_feature 1..19: note = siRNA sense sequence
  source 1..19: mol_type = other RNA
actttggcaacgtcgtttg

SEQ ID NO: 58949 - RNA, 19 nt, synthetic construct
  misc_feature 1..19: note = siRNA antisense sequence
  source 1..19: mol_type = other RNA
caaacgacgttgccaaagt

SEQ ID NO: 58950 - RNA, 19 nt, synthetic construct
  misc_feature 1..19: note = siRNA sense sequence
  source 1..19: mol_type = other RNA
ctttggcaacgtcgtttgg

SEQ ID NO: 58951 - RNA, 19 nt, synthetic construct
  misc_feature 1..19: note = siRNA antisense sequence
  source 1..19: mol_type = other RNA
ccaaacgacgttgccaaag

SEQ ID NO: 58952 - RNA, 19 nt, synthetic construct
  misc_feature 1..19: note = siRNA sense sequence
  source 1..19: mol_type = other RNA
tttggcaacgtcgtttggt

SEQ ID NO: 58953 - RNA, 19 nt, synthetic construct
  misc_feature 1..19: note = siRNA antisense sequence
  source 1..19: mol_type = other RNA
accaaacgacgttgccaaa

SEQ ID NO: 58954 - RNA, 19 nt, synthetic construct
  misc_feature 1..19: note = siRNA sense sequence
  source 1..19: mol_type = other RNA
ttggcaacgtcgtttggtc

SEQ ID NO: 58955 - RNA, 19 nt, synthetic construct
  misc_feature 1..19: note = siRNA antisense sequence
  source 1..19: mol_type = other RNA
gaccaaacgacgttgccaa

SEQ ID NO: 58956 - RNA, 19 nt, synthetic construct
  misc_feature 1..19: note = siRNA sense sequence
  source 1..19: mol_type = other RNA
tggcaacgtcgtttggtct

SEQ ID NO: 58957 - RNA, 19 nt, synthetic construct
  misc_feature 1..19: note = siRNA antisense sequence
  source 1..19: mol_type = other RNA
agaccaaacgacgttgcca

SEQ ID NO: 58958 - RNA, 19 nt, synthetic construct
  misc_feature 1..19: note = siRNA sense sequence
  source 1..19: mol_type = other RNA
ggcaacgtcgtttggtctc

SEQ ID NO: 58959 - RNA, 19 nt, synthetic construct
  misc_feature 1..19: note = siRNA antisense sequence
  source 1..19: mol_type = other RNA
gagaccaaacgacgttgcc

SEQ ID NO: 58960 - RNA, 19 nt, synthetic construct
  misc_feature 1..19: note = siRNA sense sequence
  source 1..19: mol_type = other RNA
gcaacgtcgtttggtctct

SEQ ID NO: 58961 - RNA, 19 nt, synthetic construct
  misc_feature 1..19: note = siRNA antisense sequence
  source 1..19: mol_type = other RNA
agagaccaaacgacgttgc

SEQ ID NO: 58962 - RNA, 19 nt, synthetic construct
  misc_feature 1..19: note = siRNA sense sequence
  source 1..19: mol_type = other RNA
caacgtcgtttggtctctt

SEQ ID NO: 58963 - RNA, 19 nt, synthetic construct
  misc_feature 1..19: note = siRNA antisense sequence
  source 1..19: mol_type = other RNA
aagagaccaaacgacgttg

SEQ ID NO: 58964 - RNA, 19 nt, synthetic construct
  misc_feature 1..19: note = siRNA sense sequence
  source 1..19: mol_type = other RNA
aacgtcgtttggtctctta

SEQ ID NO: 58965 - RNA, 19 nt, synthetic construct
  misc_feature 1..19: note = siRNA antisense sequence
  source 1..19: mol_type = other RNA
taagagaccaaacgacgtt

SEQ ID NO: 58966 - RNA, 19 nt, synthetic construct
  misc_feature 1..19: note = siRNA sense sequence
  source 1..19: mol_type = other RNA
acgtcgtttggtctcttag

SEQ ID NO: 58967 - RNA, 19 nt, synthetic construct
  misc_feature 1..19: note = siRNA antisense sequence
  source 1..19: mol_type = other RNA
ctaagagaccaaacgacgt

SEQ ID NO: 58968 - RNA, 19 nt, synthetic construct
  misc_feature 1..19: note = siRNA sense sequence
  source 1..19: mol_type = other RNA
cgtcgtttggtctcttaga

SEQ ID NO: 58969 - RNA, 19 nt, synthetic construct
  misc_feature 1..19: note = siRNA antisense sequence
  source 1..19: mol_type = other RNA
tctaagagaccaaacgacg

SEQ ID NO: 58970 - RNA, 19 nt, synthetic construct
  misc_feature 1..19: note = siRNA sense sequence
  source 1..19: mol_type = other RNA
gtcgtttggtctcttagag

SEQ ID NO: 58971 - RNA, 19 nt, synthetic construct
  misc_feature 1..19: note = siRNA antisense sequence
  source 1..19: mol_type = other RNA
ctctaagagaccaaacgac

SEQ ID NO: 58972 - RNA, 19 nt, synthetic construct
  misc_feature 1..19: note = siRNA sense sequence
  source 1..19: mol_type = other RNA
tcgtttggtctcttagagg

SEQ ID NO: 58973 - RNA, 19 nt, synthetic construct
  misc_feature 1..19: note = siRNA antisense sequence
  source 1..19: mol_type = other RNA
cctctaagagaccaaacga

SEQ ID NO: 58974 - RNA, 19 nt, synthetic construct
  misc_feature 1..19: note = siRNA sense sequence
  source 1..19: mol_type = other RNA
cgtttggtctcttagaggg

SEQ ID NO: 58975 - RNA, 19 nt, synthetic construct
  misc_feature 1..19: note = siRNA antisense sequence
  source 1..19: mol_type = other RNA
ccctctaagagaccaaacg

SEQ ID NO: 58976 - RNA, 19 nt, synthetic construct
  misc_feature 1..19: note = siRNA sense sequence
  source 1..19: mol_type = other RNA
gtttggtctcttagagggt

SEQ ID NO: 58977 - RNA, 19 nt, synthetic construct
  misc_feature 1..19: note = siRNA antisense sequence
  source 1..19: mol_type = other RNA
accctctaagagaccaaac

SEQ ID NO: 58978 - RNA, 19 nt, synthetic construct
  misc_feature 1..19: note = siRNA sense sequence
  source 1..19: mol_type = other RNA
ggtctcttagagggtcaat

SEQ ID NO: 58979 - RNA, 19 nt, synthetic construct
  misc_feature 1..19: note = siRNA antisense sequence
  source 1..19: mol_type = other RNA
attgaccctctaagagacc

SEQ ID NO: 58980 - RNA, 19 nt, synthetic construct
  misc_feature 1..19: note = siRNA sense sequence
  source 1..19: mol_type = other RNA
gtctcttagagggtcaatc

SEQ ID NO: 58981 - RNA, 19 nt, synthetic construct
  misc_feature 1..19: note = siRNA antisense sequence
  source 1..19: mol_type = other RNA
gattgaccctctaagagac

SEQ ID NO: 58982 - RNA, 19 nt, synthetic construct
  misc_feature 1..19: note = siRNA sense sequence
  source 1..19: mol_type = other RNA
tctcttagagggtcaatct

SEQ ID NO: 58983 - RNA, 19 nt, synthetic construct
  misc_feature 1..19: note = siRNA antisense sequence
  source 1..19: mol_type = other RNA
agattgaccctctaagaga

SEQ ID NO: 58984 - RNA, 19 nt, synthetic construct
  misc_feature 1..19: note = siRNA sense sequence
  source 1..19: mol_type = other RNA
ctcttagagggtcaatctt

SEQ ID NO: 58985 - RNA, 19 nt, synthetic construct
  misc_feature 1..19: note = siRNA antisense sequence
  source 1..19: mol_type = other RNA
aagattgaccctctaagag

SEQ ID NO: 58986 - RNA, 19 nt, synthetic construct
  misc_feature 1..19: note = siRNA sense sequence
  source 1..19: mol_type = other RNA
tcttagagggtcaatcttt

SEQ ID NO: 58987 - RNA, 19 nt, synthetic construct
  misc_feature 1..19: note = siRNA antisense sequence
  source 1..19: mol_type = other RNA
aaagattgaccctctaaga

SEQ ID NO: 58988 - RNA, 19 nt, synthetic construct
  misc_feature 1..19: note = siRNA sense sequence
  source 1..19: mol_type = other RNA
cttagagggtcaatctttc

SEQ ID NO: 58989 - RNA, 19 nt, synthetic construct
  misc_feature 1..19: note = siRNA antisense sequence
  source 1..19: mol_type = other RNA
gaaagattgaccctctaag

SEQ ID NO: 58990 - RNA, 19 nt, synthetic construct
  misc_feature 1..19: note = siRNA sense sequence
  source 1..19: mol_type = other RNA
gagggtcaatctttcatct

SEQ ID NO: 58991 - RNA, 19 nt, synthetic construct
  misc_feature 1..19: note = siRNA antisense sequence
  source 1..19: mol_type = other RNA
agatgaaagattgaccctc

SEQ ID NO: 58992 - RNA, 19 nt, synthetic construct
  misc_feature 1..19: note = siRNA sense sequence
  source 1..19: mol_type = other RNA
agggtcaatctttcatctg

SEQ ID NO: 58993 - RNA, 19 nt, synthetic construct
  misc_feature 1..19: note = siRNA antisense sequence
  source 1..19: mol_type = other RNA
cagatgaaagattgaccct

SEQ ID NO: 58994 - RNA, 19 nt, synthetic construct
  misc_feature 1..19: note = siRNA sense sequence
  source 1..19: mol_type = other RNA
gggtcaatctttcatctgt

SEQ ID NO: 58995 - RNA, 19 nt, synthetic construct
  misc_feature 1..19: note = siRNA antisense sequence
  source 1..19: mol_type = other RNA
acagatgaaagattgaccc

SEQ ID NO: 58996 - RNA, 19 nt, synthetic construct
  misc_feature 1..19: note = siRNA sense sequence
  source 1..19: mol_type = other RNA
gtcaatctttcatctgtaa

SEQ ID NO: 58997 - RNA, 19 nt, synthetic construct
  misc_feature 1..19: note = siRNA antisense sequence
  source 1..19: mol_type = other RNA
ttacagatgaaagattgac

SEQ ID NO: 58998 - RNA, 19 nt, synthetic construct
  misc_feature 1..19: note = siRNA sense sequence
  source 1..19: mol_type = other RNA
atagttactcatcttagag

SEQ ID NO: 58999 - RNA, 19 nt, synthetic construct
  misc_feature 1..19: note = siRNA antisense sequence
  source 1..19: mol_type = other RNA
ctctaagatgagtaactat

SEQ ID NO: 59000 - RNA, 19 nt, synthetic construct
  misc_feature 1..19: note = siRNA sense sequence
  source 1..19: mol_type = other RNA
tagttactcatcttagagg

SEQ ID NO: 59001 - RNA, 19 nt, synthetic construct
  misc_feature 1..19: note = siRNA antisense sequence
  source 1..19: mol_type = other RNA
cctctaagatgagtaacta

SEQ ID NO: 59002 - RNA, 19 nt, synthetic construct
  misc_feature 1..19: note = siRNA sense sequence
  source 1..19: mol_type = other RNA
agttactcatcttagagga

SEQ ID NO: 59003 - RNA, 19 nt, synthetic construct
  misc_feature 1..19: note = siRNA antisense sequence
  source 1..19: mol_type = other RNA
tcctctaagatgagtaact

SEQ ID NO: 59004 - RNA, 19 nt, synthetic construct
  misc_feature 1..19: note = siRNA sense sequence
  source 1..19: mol_type = other RNA
gttactcatcttagaggac

SEQ ID NO: 59005 - RNA, 19 nt, synthetic construct
  misc_feature 1..19: note = siRNA antisense sequence
  source 1..19: mol_type = other RNA
gtcctctaagatgagtaac

SEQ ID NO: 59006 - RNA, 19 nt, synthetic construct
  misc_feature 1..19: note = siRNA sense sequence
  source 1..19: mol_type = other RNA
ttactcatcttagaggact

SEQ ID NO: 59007 - RNA, 19 nt, synthetic construct
  misc_feature 1..19: note = siRNA antisense sequence
  source 1..19: mol_type = other RNA
agtcctctaagatgagtaa

SEQ ID NO: 59008 - RNA, 19 nt, synthetic construct
  misc_feature 1..19: note = siRNA sense sequence
  source 1..19: mol_type = other RNA
tattcacatcctttccaaa

SEQ ID NO: 59009 - RNA, 19 nt, synthetic construct
  misc_feature 1..19: note = siRNA antisense sequence
  source 1..19: mol_type = other RNA
tttggaaaggatgtgaata

SEQ ID NO: 59010 - RNA, 19 nt, synthetic construct
  misc_feature 1..19: note = siRNA sense sequence
  source 1..19: mol_type = other RNA
attcacatcctttccaaat

SEQ ID NO: 59011 - RNA, 19 nt, synthetic construct
  misc_feature 1..19: note = siRNA antisense sequence
  source 1..19: mol_type = other RNA
atttggaaaggatgtgaat

SEQ ID NO: 59012 - RNA, 19 nt, synthetic construct
  misc_feature 1..19: note = siRNA sense sequence
  source 1..19: mol_type = other RNA
ttcacatcctttccaaata

SEQ ID NO: 59013 - RNA, 19 nt, synthetic construct
  misc_feature 1..19: note = siRNA antisense sequence
  source 1..19: mol_type = other RNA
tatttggaaaggatgtgaa

SEQ ID NO: 59014 - RNA, 19 nt, synthetic construct
  misc_feature 1..19: note = siRNA sense sequence
  source 1..19: mol_type = other RNA
tcacatcctttccaaataa

SEQ ID NO: 59015 - RNA, 19 nt, synthetic construct
  misc_feature 1..19: note = siRNA antisense sequence
  source 1..19: mol_type = other RNA
ttatttggaaaggatgtga

SEQ ID NO: 59016 - RNA, 19 nt, synthetic construct
  misc_feature 1..19: note = siRNA sense sequence
  source 1..19: mol_type = other RNA
cattataaaattcttggcc

SEQ ID NO: 59017 - RNA, 19 nt, synthetic construct
  misc_feature 1..19: note = siRNA antisense sequence
  source 1..19: mol_type = other RNA
ggccaagaattttataatg

SEQ ID NO: 59018 - RNA, 19 nt, synthetic construct
  misc_feature 1..19: note = siRNA sense sequence
  source 1..19: mol_type = other RNA
ttataaaattcttggccag

SEQ ID NO: 59019 - RNA, 19 nt, synthetic construct
  misc_feature 1..19: note = siRNA antisense sequence
  source 1..19: mol_type = other RNA
ctggccaagaattttataa

SEQ ID NO: 59020 - RNA, 19 nt, synthetic construct
  misc_feature 1..19: note = siRNA sense sequence
  source 1..19: mol_type = other RNA
ttcttggccaggcatggtg

SEQ ID NO: 59021 - RNA, 19 nt, synthetic construct
  misc_feature 1..19: note = siRNA antisense sequence
  source 1..19: mol_type = other RNA
caccatgcctggccaagaa

SEQ ID NO: 59022 - RNA, 19 nt, synthetic construct
  misc_feature 1..19: note = siRNA sense sequence
  source 1..19: mol_type = other RNA
tcttggccaggcatggtgg

SEQ ID NO: 59023 - RNA, 19 nt, synthetic construct
  misc_feature 1..19: note = siRNA antisense sequence
  source 1..19: mol_type = other RNA
ccaccatgcctggccaaga

SEQ ID NO: 59024 - RNA, 19 nt, synthetic construct
  misc_feature 1..19: note = siRNA sense sequence
  source 1..19: mol_type = other RNA
catggtggctcacgcctgt

SEQ ID NO: 59025 - RNA, 19 nt, synthetic construct
  misc_feature 1..19: note = siRNA antisense sequence
  source 1..19: mol_type = other RNA
acaggcgtgagccaccatg

SEQ ID NO: 59026 - RNA, 19 nt, synthetic construct
  misc_feature 1..19: note = siRNA sense sequence
  source 1..19: mol_type = other RNA
atggtggctcacgcctgta

SEQ ID NO: 59027 - RNA, 19 nt, synthetic construct
  misc_feature 1..19: note = siRNA antisense sequence
  source 1..19: mol_type = other RNA
tacaggcgtgagccaccat

SEQ ID NO: 59028 - RNA, 19 nt, synthetic construct
  misc_feature 1..19: note = siRNA sense sequence
  source 1..19: mol_type = other RNA
tggtggctcacgcctgtaa

SEQ ID NO: 59029 - RNA, 19 nt, synthetic construct
  misc_feature 1..19: note = siRNA antisense sequence
  source 1..19: mol_type = other RNA
ttacaggcgtgagccacca

SEQ ID NO: 59030 - RNA, 19 nt, synthetic construct
  misc_feature 1..19: note = siRNA sense sequence
  source 1..19: mol_type = other RNA
ggtggctcacgcctgtaat

SEQ ID NO: 59031 - RNA, 19 nt, synthetic construct
  misc_feature 1..19: note = siRNA antisense sequence
  source 1..19: mol_type = other RNA
attacaggcgtgagccacc

SEQ ID NO: 59032 - RNA, 19 nt, synthetic construct
  misc_feature 1..19: note = siRNA sense sequence
  source 1..19: mol_type = other RNA
gtggctcacgcctgtaatc

SEQ ID NO: 59033 - RNA, 19 nt, synthetic construct
  misc_feature 1..19: note = siRNA antisense sequence
  source 1..19: mol_type = other RNA
gattacaggcgtgagccac

SEQ ID NO: 59034 - RNA, 19 nt, synthetic construct
  misc_feature 1..19: note = siRNA sense sequence
  source 1..19: mol_type = other RNA
tggctcacgcctgtaatcc

SEQ ID NO: 59035 - RNA, 19 nt, synthetic construct
  misc_feature 1..19: note = siRNA antisense sequence
  source 1..19: mol_type = other RNA
ggattacaggcgtgagcca

SEQ ID NO: 59036 - RNA, 19 nt, synthetic construct
  misc_feature 1..19: note = siRNA sense sequence
  source 1..19: mol_type = other RNA
ggctcacgcctgtaatccc

SEQ ID NO: 59037 - RNA, 19 nt, synthetic construct
  misc_feature 1..19: note = siRNA antisense sequence
  source 1..19: mol_type = other RNA
gggattacaggcgtgagcc

SEQ ID NO: 59038 - RNA, 19 nt, synthetic construct
  misc_feature 1..19: note = siRNA sense sequence
  source 1..19: mol_type = other RNA
acgcctgtaatcccagcac

SEQ ID NO: 59039 - RNA, 19 nt, synthetic construct
  misc_feature 1..19: note = siRNA antisense sequence
  source 1..19: mol_type = other RNA
gtgctgggattacaggcgt

SEQ ID NO: 59040 - RNA, 19 nt, synthetic construct
  misc_feature 1..19: note = siRNA sense sequence
  source 1..19: mol_type = other RNA
agcactttgggaggctgag

SEQ ID NO: 59041 - RNA, 19 nt, synthetic construct
  misc_feature 1..19: note = siRNA antisense sequence
  source 1..19: mol_type = other RNA
ctcagcctcccaaagtgct

SEQ ID NO: 59042 - RNA, 19 nt, synthetic construct
  misc_feature 1..19: note = siRNA sense sequence
  source 1..19: mol_type = other RNA
gcactttgggaggctgagg

SEQ ID NO: 59043 - RNA, 19 nt, synthetic construct
  misc_feature 1..19: note = siRNA antisense sequence
  source 1..19: mol_type = other RNA
cctcagcctcccaaagtgc

SEQ ID NO: 59044 - RNA, 19 nt, synthetic construct
  misc_feature 1..19: note = siRNA sense sequence
  source 1..19: mol_type = other RNA
cactttgggaggctgaggt

SEQ ID NO: 59045 - RNA, 19 nt, synthetic construct
  misc_feature 1..19: note = siRNA antisense sequence
  source 1..19: mol_type = other RNA
acctcagcctcccaaagtg

SEQ ID NO: 59046 - RNA, 19 nt, synthetic construct
  misc_feature 1..19: note = siRNA sense sequence
  source 1..19: mol_type = other RNA
actttgggaggctgaggtg

SEQ ID NO: 59047 - RNA, 19 nt, synthetic construct
  misc_feature 1..19: note = siRNA antisense sequence
  source 1..19: mol_type = other RNA
cacctcagcctcccaaagt

SEQ ID NO: 59048 - RNA, 19 nt, synthetic construct
  misc_feature 1..19: note = siRNA sense sequence
  source 1..19: mol_type = other RNA
ctttgggaggctgaggtga

SEQ ID NO: 59049 - RNA, 19 nt, synthetic construct
  misc_feature 1..19: note = siRNA antisense sequence
  source 1..19: mol_type = other RNA
tcacctcagcctcccaaag

SEQ ID NO: 59050 - RNA, 19 nt, synthetic construct
  misc_feature 1..19: note = siRNA sense sequence
  source 1..19: mol_type = other RNA
tttgggaggctgaggtgag

SEQ ID NO: 59051 - RNA, 19 nt, synthetic construct
  misc_feature 1..19: note = siRNA antisense sequence
  source 1..19: mol_type = other RNA
ctcacctcagcctcccaaa

SEQ ID NO: 59052 - RNA, 19 nt, synthetic construct
  misc_feature 1..19: note = siRNA sense sequence
  source 1..19: mol_type = other RNA
tgagtggatcacctgaggt

SEQ ID NO: 59053 - RNA, 19 nt, synthetic construct
  misc_feature 1..19: note = siRNA antisense sequence
  source 1..19: mol_type = other RNA
acctcaggtgatccactca

SEQ ID NO: 59054 - RNA, 19 nt, synthetic construct
  misc_feature 1..19: note = siRNA sense sequence
  source 1..19: mol_type = other RNA
gagtggatcacctgaggtc

SEQ ID NO: 59055 - RNA, 19 nt, synthetic construct
  misc_feature 1..19: note = siRNA antisense sequence
  source 1..19: mol_type = other RNA
gacctcaggtgatccactc

SEQ ID NO: 59056 - RNA, 19 nt, synthetic construct
  misc_feature 1..19: note = siRNA sense sequence
  source 1..19: mol_type = other RNA
ctgaggtcaggagttcgag

SEQ ID NO: 59057 - RNA, 19 nt, synthetic construct
  misc_feature 1..19: note = siRNA antisense sequence
  source 1..19: mol_type = other RNA
ctcgaactcctgacctcag

SEQ ID NO: 59058 - RNA, 19 nt, synthetic construct
  misc_feature 1..19: note = siRNA sense sequence
  source 1..19: mol_type = other RNA
agaccagcctggccaacgt

SEQ ID NO: 59059 - RNA, 19 nt, synthetic construct
  misc_feature 1..19: note = siRNA antisense sequence
  source 1..19: mol_type = other RNA
acgttggccaggctggtct

SEQ ID NO: 59060 - RNA, 19 nt, synthetic construct
  misc_feature 1..19: note = siRNA sense sequence
  source 1..19: mol_type = other RNA
attagctgggtgtggtggc

SEQ ID NO: 59061 - RNA, 19 nt, synthetic construct
  misc_feature 1..19: note = siRNA antisense sequence
  source 1..19: mol_type = other RNA
gccaccacacccagctaat

SEQ ID NO: 59062 - RNA, 19 nt, synthetic construct
  misc_feature 1..19: note = siRNA sense sequence
  source 1..19: mol_type = other RNA
ttagctgggtgtggtggca

SEQ ID NO: 59063 - RNA, 19 nt, synthetic construct
  misc_feature 1..19: note = siRNA antisense sequence
  source 1..19: mol_type = other RNA
tgccaccacacccagctaa

SEQ ID NO: 59064 - RNA, 19 nt, synthetic construct
  misc_feature 1..19: note = siRNA sense sequence
  source 1..19: mol_type = other RNA
tagctgggtgtggtggcac

SEQ ID NO: 59065 - RNA, 19 nt, synthetic construct
  misc_feature 1..19: note = siRNA antisense sequence
  source 1..19: mol_type = other RNA
gtgccaccacacccagcta

SEQ ID NO: 59066 - RNA, 19 nt, synthetic construct
  misc_feature 1..19: note = siRNA sense sequence
  source 1..19: mol_type = other RNA
gtggtggcacatgcctgta

SEQ ID NO: 59067 - RNA, 19 nt, synthetic construct
  misc_feature 1..19: note = siRNA antisense sequence
  source 1..19: mol_type = other RNA
tacaggcatgtgccaccac

SEQ ID NO: 59068 - RNA, 19 nt, synthetic construct
  misc_feature 1..19: note = siRNA sense sequence
  source 1..19: mol_type = other RNA
tggtggcacatgcctgtaa

SEQ ID NO: 59069 - RNA, 19 nt, synthetic construct
  misc_feature 1..19: note = siRNA antisense sequence
  source 1..19: mol_type = other RNA
ttacaggcatgtgccacca

SEQ ID NO: 59070 - RNA, 19 nt, synthetic construct
  misc_feature 1..19: note = siRNA sense sequence
  source 1..19: mol_type = other RNA
ggtggcacatgcctgtaat

SEQ ID NO: 59071 - RNA, 19 nt, synthetic construct
  misc_feature 1..19: note = siRNA antisense sequence
  source 1..19: mol_type = other RNA
attacaggcatgtgccacc

SEQ ID NO: 59072 - RNA, 19 nt, synthetic construct
  misc_feature 1..19: note = siRNA sense sequence
  source 1..19: mol_type = other RNA
gtggcacatgcctgtaatc

SEQ ID NO: 59073 - RNA, 19 nt, synthetic construct
  misc_feature 1..19: note = siRNA antisense sequence
  source 1..19: mol_type = other RNA
gattacaggcatgtgccac

SEQ ID NO: 59074 - RNA, 19 nt, synthetic construct
  misc_feature 1..19: note = siRNA sense sequence
  source 1..19: mol_type = other RNA
tggcacatgcctgtaatcc

SEQ ID NO: 59075 - RNA, 19 nt, synthetic construct
  misc_feature 1..19: note = siRNA antisense sequence
  source 1..19: mol_type = other RNA
ggattacaggcatgtgcca

SEQ ID NO: 59076 - RNA, 19 nt, synthetic construct
  misc_feature 1..19: note = siRNA sense sequence
  source 1..19: mol_type = other RNA
ggcacatgcctgtaatccc

SEQ ID NO: 59077 - RNA, 19 nt, synthetic construct
  misc_feature 1..19: note = siRNA antisense sequence
  source 1..19: mol_type = other RNA
gggattacaggcatgtgcc

SEQ ID NO: 59078 - RNA, 19 nt, synthetic construct
  misc_feature 1..19: note = siRNA sense sequence
  source 1..19: mol_type = other RNA
atgcctgtaatcccagcta

SEQ ID NO: 59079 - RNA, 19 nt, synthetic construct
  misc_feature 1..19: note = siRNA antisense sequence
  source 1..19: mol_type = other RNA
tagctgggattacaggcat

SEQ ID NO: 59080 - RNA, 19 nt, synthetic construct
  misc_feature 1..19: note = siRNA sense sequence
  source 1..19: mol_type = other RNA
tgcctgtaatcccagctag

SEQ ID NO: 59081 - RNA, 19 nt, synthetic construct
  misc_feature 1..19: note = siRNA antisense sequence
  source 1..19: mol_type = other RNA
ctagctgggattacaggca

SEQ ID NO: 59082 - RNA, 19 nt, synthetic construct
  misc_feature 1..19: note = siRNA sense sequence
  source 1..19: mol_type = other RNA
gcctgtaatcccagctagt

SEQ ID NO: 59083 - RNA, 19 nt, synthetic construct
  misc_feature 1..19: note = siRNA antisense sequence
  source 1..19: mol_type = other RNA
actagctgggattacaggc

SEQ ID NO: 59084 - RNA, 19 nt, synthetic construct
  misc_feature 1..19: note = siRNA sense sequence
  source 1..19: mol_type = other RNA
cctgtaatcccagctagtc

SEQ ID NO: 59085 - RNA, 19 nt, synthetic construct
  misc_feature 1..19: note = siRNA antisense sequence
  source 1..19: mol_type = other RNA
gactagctgggattacagg

SEQ ID NO: 59086 - RNA, 19 nt, synthetic construct
  misc_feature 1..19: note = siRNA sense sequence
  source 1..19: mol_type = other RNA
ctgtaatcccagctagtcg

SEQ ID NO: 59087 - RNA, 19 nt, synthetic construct
  misc_feature 1..19: note = siRNA antisense sequence
  source 1..19: mol_type = other RNA
cgactagctgggattacag

SEQ ID NO: 59088 - RNA, 19 nt, synthetic construct
  misc_feature 1..19: note = siRNA sense sequence
  source 1..19: mol_type = other RNA
tgtaatcccagctagtcgg

SEQ ID NO: 59089 - RNA, 19 nt, synthetic construct
  misc_feature 1..19: note = siRNA antisense sequence
  source 1..19: mol_type = other RNA
ccgactagctgggattaca

SEQ ID NO: 59090 - RNA, 19 nt, synthetic construct
  misc_feature 1..19: note = siRNA sense sequence
  source 1..19: mol_type = other RNA
tagtcgggaggctgaggca

SEQ ID NO: 59091 - RNA, 19 nt, synthetic construct
  misc_feature 1..19: note = siRNA antisense sequence
  source 1..19: mol_type = other RNA
tgcctcagcctcccgacta

SEQ ID NO: 59092 - RNA, 19 nt, synthetic construct
  misc_feature 1..19: note = siRNA sense sequence
  source 1..19: mol_type = other RNA
gaggttgcagtgagccgag

SEQ ID NO: 59093 - RNA, 19 nt, synthetic construct
  misc_feature 1..19: note = siRNA antisense sequence
  source 1..19: mol_type = other RNA
ctcggctcactgcaacctc

SEQ ID NO: 59094 - RNA, 19 nt, synthetic construct
  misc_feature 1..19: note = siRNA sense sequence
  source 1..19: mol_type = other RNA
aaagtttgcccttctgaag

SEQ ID NO: 59095 - RNA, 19 nt, synthetic construct
  misc_feature 1..19: note = siRNA antisense sequence
  source 1..19: mol_type = other RNA
cttcagaagggcaaacttt

SEQ ID NO: 59096 - RNA, 19 nt, synthetic construct
  misc_feature 1..19: note = siRNA sense sequence
  source 1..19: mol_type = other RNA
aagtttgcccttctgaagt

SEQ ID NO: 59097 - RNA, 19 nt, synthetic construct
  misc_feature 1..19: note = siRNA antisense sequence
  source 1..19: mol_type = other RNA
acttcagaagggcaaactt

SEQ ID NO: 59098 - RNA, 19 nt, synthetic construct
  misc_feature 1..19: note = siRNA sense sequence
  source 1..19: mol_type = other RNA
agtttgcccttctgaagtt

SEQ ID NO: 59099 - RNA, 19 nt, synthetic construct
  misc_feature 1..19: note = siRNA antisense sequence
  source 1..19: mol_type = other RNA
aacttcagaagggcaaact

SEQ ID NO: 59100 - RNA, 19 nt, synthetic construct
  misc_feature 1..19: note = siRNA sense sequence
  source 1..19: mol_type = other RNA
tgcccttctgaagttggga

SEQ ID NO: 59101 - RNA, 19 nt, synthetic construct
  misc_feature 1..19: note = siRNA antisense sequence
  source 1..19: mol_type = other RNA
tcccaacttcagaagggca

SEQ ID NO: 59102 - RNA, 19 nt, synthetic construct
  misc_feature 1..19: note = siRNA sense sequence
  source 1..19: mol_type = other RNA
gcccttctgaagttgggaa

SEQ ID NO: 59103 - RNA, 19 nt, synthetic construct
  misc_feature 1..19: note = siRNA antisense sequence
  source 1..19: mol_type = other RNA
ttcccaacttcagaagggc

SEQ ID NO: 59104 - RNA, 19 nt, synthetic construct
  misc_feature 1..19: note = siRNA sense sequence
  source 1..19: mol_type = other RNA
cccggaagtgttacataat

SEQ ID NO: 59105 - RNA, 19 nt, synthetic construct
  misc_feature 1..19: note = siRNA antisense sequence
  source 1..19: mol_type = other RNA
attatgtaacacttccggg

SEQ ID NO: 59106 - RNA, 19 nt, synthetic construct
  misc_feature 1..19: note = siRNA sense sequence
  source 1..19: mol_type = other RNA
ccggaagtgttacataatg

SEQ ID NO: 59107 - RNA, 19 nt, synthetic construct
  misc_feature 1..19: note = siRNA antisense sequence
  source 1..19: mol_type = other RNA
cattatgtaacacttccgg

SEQ ID NO: 59108 - RNA, 19 nt, synthetic construct
  misc_feature 1..19: note = siRNA sense sequence
  source 1..19: mol_type = other RNA
cggaagtgttacataatga

SEQ ID NO: 59109 - RNA, 19 nt, synthetic construct
  misc_feature 1..19: note = siRNA antisense sequence
  source 1..19: mol_type = other RNA
tcattatgtaacacttccg

SEQ ID NO: 59110 - RNA, 19 nt, synthetic construct
  misc_feature 1..19: note = siRNA sense sequence
  source 1..19: mol_type = other RNA
ggaagtgttacataatgat

SEQ ID NO: 59111 - RNA, 19 nt, synthetic construct
  misc_feature 1..19: note = siRNA antisense sequence
  source 1..19: mol_type = other RNA
atcattatgtaacacttcc

SEQ ID NO: 59112 - RNA, 19 nt, synthetic construct
  misc_feature 1..19: note = siRNA sense sequence
  source 1..19: mol_type = other RNA
gaagtgttacataatgatc

SEQ ID NO: 59113 - RNA, 19 nt, synthetic construct
  misc_feature 1..19: note = siRNA antisense sequence
  source 1..19: mol_type = other RNA
gatcattatgtaacacttc

SEQ ID NO: 59114 - RNA, 19 nt, synthetic construct
  misc_feature 1..19: note = siRNA sense sequence
  source 1..19: mol_type = other RNA
tacataatgatctttggct

SEQ ID NO: 59115 - RNA, 19 nt, synthetic construct
  misc_feature 1..19: note = siRNA antisense sequence
  source 1..19: mol_type = other RNA
agccaaagatcattatgta

SEQ ID NO: 59116 - RNA, 19 nt, synthetic construct
  misc_feature 1..19: note = siRNA sense sequence
  source 1..19: mol_type = other RNA
cataatgatctttggcttg

SEQ ID NO: 59117 - RNA, 19 nt, synthetic construct
  misc_feature 1..19: note = siRNA antisense sequence
  source 1..19: mol_type = other RNA
caagccaaagatcattatg

SEQ ID NO: 59118 - RNA, 19 nt, synthetic construct
  misc_feature 1..19: note = siRNA sense sequence
  source 1..19: mol_type = other RNA
ataatgatctttggcttga

SEQ ID NO: 59119 - RNA, 19 nt, synthetic construct
  misc_feature 1..19: note = siRNA antisense sequence
  source 1..19: mol_type = other RNA
tcaagccaaagatcattat

SEQ ID NO: 59120 - RNA, 19 nt, synthetic construct
  misc_feature 1..19: note = siRNA sense sequence
  source 1..19: mol_type = other RNA
taatgatctttggcttgag

SEQ ID NO: 59121 - RNA, 19 nt, synthetic construct
  misc_feature 1..19: note = siRNA antisense sequence
  source 1..19: mol_type = other RNA
ctcaagccaaagatcatta

SEQ ID NO: 59122 - RNA, 19 nt, synthetic construct
  misc_feature 1..19: note = siRNA sense sequence
  source 1..19: mol_type = other RNA
aatgatctttggcttgagg

SEQ ID NO: 59123 - RNA, 19 nt, synthetic construct
  misc_feature 1..19: note = siRNA antisense sequence
  source 1..19: mol_type = other RNA
cctcaagccaaagatcatt

SEQ ID NO: 59124 - RNA, 19 nt, synthetic construct
  misc_feature 1..19: note = siRNA sense sequence
  source 1..19: mol_type = other RNA
tgatctttggcttgaggtc

SEQ ID NO: 59125 - RNA, 19 nt, synthetic construct
  misc_feature 1..19: note = siRNA antisense sequence
  source 1..19: mol_type = other RNA
gacctcaagccaaagatca

SEQ ID NO: 59126 - RNA, 19 nt, synthetic construct
  misc_feature 1..19: note = siRNA sense sequence
  source 1..19: mol_type = other RNA
gatctttggcttgaggtct

SEQ ID NO: 59127 - RNA, 19 nt, synthetic construct
  misc_feature 1..19: note = siRNA antisense sequence
  source 1..19: mol_type = other RNA
agacctcaagccaaagatc

SEQ ID NO: 59128 - RNA, 19 nt, synthetic construct
  misc_feature 1..19: note = siRNA sense sequence
  source 1..19: mol_type = other RNA
tctttggcttgaggtctca

SEQ ID NO: 59129 - RNA, 19 nt, synthetic construct
  misc_feature 1..19: note = siRNA antisense sequence
  source 1..19: mol_type = other RNA
tgagacctcaagccaaaga

SEQ ID NO: 59130 - RNA, 19 nt, synthetic construct
  misc_feature 1..19: note = siRNA sense sequence
  source 1..19: mol_type = other RNA
ctatattgtgatgcaggta

SEQ ID NO: 59131 - RNA, 19 nt, synthetic construct
  misc_feature 1..19: note = siRNA antisense sequence
  source 1..19: mol_type = other RNA
tacctgcatcacaatatag

SEQ ID NO: 59132 - RNA, 19 nt, synthetic construct
  misc_feature 1..19: note = siRNA sense sequence
  source 1..19: mol_type = other RNA
tatattgtgatgcaggtag

SEQ ID NO: 59133 - RNA, 19 nt, synthetic construct
  misc_feature 1..19: note = siRNA antisense sequence
  source 1..19: mol_type = other RNA
ctacctgcatcacaatata

SEQ ID NO: 59134 - RNA, 19 nt, synthetic construct
  misc_feature 1..19: note = siRNA sense sequence
  source 1..19: mol_type = other RNA
atattgtgatgcaggtagc

SEQ ID NO: 59135 - RNA, 19 nt, synthetic construct
  misc_feature 1..19: note = siRNA antisense sequence
  source 1..19: mol_type = other RNA
gctacctgcatcacaatat

SEQ ID NO: 59136 - RNA, 19 nt, synthetic construct
  misc_feature 1..19: note = siRNA sense sequence
  source 1..19: mol_type = other RNA
tattgtgatgcaggtagct

SEQ ID NO: 59137 - RNA, 19 nt, synthetic construct
  misc_feature 1..19: note = siRNA antisense sequence
  source 1..19: mol_type = other RNA
agctacctgcatcacaata

SEQ ID NO: 59138 - RNA, 19 nt, synthetic construct
  misc_feature 1..19: note = siRNA sense sequence
  source 1..19: mol_type = other RNA
attgtgatgcaggtagctc

SEQ ID NO: 59139 - RNA, 19 nt, synthetic construct
  misc_feature 1..19: note = siRNA antisense sequence
  source 1..19: mol_type = other RNA
gagctacctgcatcacaat

SEQ ID NO: 59140 - RNA, 19 nt, synthetic construct
  misc_feature 1..19: note = siRNA sense sequence
  source 1..19: mol_type = other RNA
gatgcaggtagctcctatg

SEQ ID NO: 59141 - RNA, 19 nt, synthetic construct
  misc_feature 1..19: note = siRNA antisense sequence
  source 1..19: mol_type = other RNA
cataggagctacctgcatc

SEQ ID NO: 59142 - RNA, 19 nt, synthetic construct
  misc_feature 1..19: note = siRNA sense sequence
  source 1..19: mol_type = other RNA
gtagctcctatgttgacac

SEQ ID NO: 59143 - RNA, 19 nt, synthetic construct
  misc_feature 1..19: note = siRNA antisense sequence
  source 1..19: mol_type = other RNA
gtgtcaacataggagctac

SEQ ID NO: 59144 - RNA, 19 nt, synthetic construct
  misc_feature 1..19: note = siRNA sense sequence
  source 1..19: mol_type = other RNA
tgttgccatcactccagca

SEQ ID NO: 59145 - RNA, 19 nt, synthetic construct
  misc_feature 1..19: note = siRNA antisense sequence
  source 1..19: mol_type = other RNA
tgctggagtgatggcaaca

SEQ ID NO: 59146 - RNA, 19 nt, synthetic construct
  misc_feature 1..19: note = siRNA sense sequence
  source 1..19: mol_type = other RNA
cttgtcagaatgccaatcc

SEQ ID NO: 59147 - RNA, 19 nt, synthetic construct
  misc_feature 1..19: note = siRNA antisense sequence
  source 1..19: mol_type = other RNA
ggattggcattctgacaag

SEQ ID NO: 59148 - RNA, 19 nt, synthetic construct
  misc_feature 1..19: note = siRNA sense sequence
  source 1..19: mol_type = other RNA
ttgtcagaatgccaatccc

SEQ ID NO: 59149 - RNA, 19 nt, synthetic construct
  misc_feature 1..19: note = siRNA antisense sequence
  source 1..19: mol_type = other RNA
gggattggcattctgacaa

SEQ ID NO: 59150 - RNA, 19 nt, synthetic construct
  misc_feature 1..19: note = siRNA sense sequence
  source 1..19: mol_type = other RNA
cagaatgccaatccctctc

SEQ ID NO: 59151 - RNA, 19 nt, synthetic construct
  misc_feature 1..19: note = siRNA antisense sequence
  source 1..19: mol_type = other RNA
gagagggattggcattctg

SEQ ID NO: 59152 - RNA, 19 nt, synthetic construct
  misc_feature 1..19: note = siRNA sense sequence
  source 1..19: mol_type = other RNA
atgccaatccctctccagg

SEQ ID NO: 59153 - RNA, 19 nt, synthetic construct
  misc_feature 1..19: note = siRNA antisense sequence
  source 1..19: mol_type = other RNA
cctggagagggattggcat

SEQ ID NO: 59154 - RNA, 19 nt, synthetic construct
  misc_feature 1..19: note = siRNA sense sequence
  source 1..19: mol_type = other RNA
tctccagggaagcaaaagc

SEQ ID NO: 59155 - RNA, 19 nt, synthetic construct
  misc_feature 1..19: note = siRNA antisense sequence
  source 1..19: mol_type = other RNA
gcttttgcttccctggaga

SEQ ID NO: 59156 - RNA, 19 nt, synthetic construct
  misc_feature 1..19: note = siRNA sense sequence
  source 1..19: mol_type = other RNA
ctccagggaagcaaaagcc

SEQ ID NO: 59157 - RNA, 19 nt, synthetic construct
  misc_feature 1..19: note = siRNA antisense sequence
  source 1..19: mol_type = other RNA
ggcttttgcttccctggag

SEQ ID NO: 59158 - RNA, 19 nt, synthetic construct
  misc_feature 1..19: note = siRNA sense sequence
  source 1..19: mol_type = other RNA
tccagggaagcaaaagcct

SEQ ID NO: 59159 - RNA, 19 nt, synthetic construct
  misc_feature 1..19: note = siRNA antisense sequence
  source 1..19: mol_type = other RNA
aggcttttgcttccctgga

SEQ ID NO: 59160 - RNA, 19 nt, synthetic construct
  misc_feature 1..19: note = siRNA sense sequence
  source 1..19: mol_type = other RNA
gaagcaaaagcctgatgag

SEQ ID NO: 59161 - RNA, 19 nt, synthetic construct
  misc_feature 1..19: note = siRNA antisense sequence
  source 1..19: mol_type = other RNA
ctcatcaggcttttgcttc

SEQ ID NO: 59162 - RNA, 19 nt, synthetic construct
  misc_feature 1..19: note = siRNA sense sequence
  source 1..19: mol_type = other RNA
agatcatatgtcagattag

SEQ ID NO: 59163 - RNA, 19 nt, synthetic construct
  misc_feature 1..19: note = siRNA antisense sequence
  source 1..19: mol_type = other RNA
ctaatctgacatatgatct

SEQ ID NO: 59164 - RNA, 19 nt, synthetic construct
  misc_feature 1..19: note = siRNA sense sequence
  source 1..19: mol_type = other RNA
gatcatatgtcagattaga

SEQ ID NO: 59165 - RNA, 19 nt, synthetic construct
  misc_feature 1..19: note = siRNA antisense sequence
  source 1..19: mol_type = other RNA
tctaatctgacatatgatc

SEQ ID NO: 59166 - RNA, 19 nt, synthetic construct
  misc_feature 1..19: note = siRNA sense sequence
  source 1..19: mol_type = other RNA
tcatatgtcagattagatg

SEQ ID NO: 59167 - RNA, 19 nt, synthetic construct
  misc_feature 1..19: note = siRNA antisense sequence
  source 1..19: mol_type = other RNA
catctaatctgacatatga

SEQ ID NO: 59168 - RNA, 19 nt, synthetic construct
  misc_feature 1..19: note = siRNA sense sequence
  source 1..19: mol_type = other RNA
catatgtcagattagatgc

SEQ ID NO: 59169 - RNA, 19 nt, synthetic construct
  misc_feature 1..19: note = siRNA antisense sequence
  source 1..19: mol_type = other RNA
gcatctaatctgacatatg

SEQ ID NO: 59170 - RNA, 19 nt, synthetic construct
  misc_feature 1..19: note = siRNA sense sequence
  source 1..19: mol_type = other RNA
atatgtcagattagatgca

SEQ ID NO: 59171 - RNA, 19 nt, synthetic construct
  misc_feature 1..19: note = siRNA antisense sequence
  source 1..19: mol_type = other RNA
tgcatctaatctgacatat

SEQ ID NO: 59172 - RNA, 19 nt, synthetic construct
  misc_feature 1..19: note = siRNA sense sequence
  source 1..19: mol_type = other RNA
tatgtcagattagatgcac

SEQ ID NO: 59173 - RNA, 19 nt, synthetic construct
  misc_feature 1..19: note = siRNA antisense sequence
  source 1..19: mol_type = other RNA
gtgcatctaatctgacata

SEQ ID NO: 59174 - RNA, 19 nt, synthetic construct
  misc_feature 1..19: note = siRNA sense sequence
  source 1..19: mol_type = other RNA
atgtcagattagatgcaca

SEQ ID NO: 59175 - RNA, 19 nt, synthetic construct
  misc_feature 1..19: note = siRNA antisense sequence
  source 1..19: mol_type = other RNA
tgtgcatctaatctgacat

SEQ ID NO: 59176 - RNA, 19 nt, synthetic construct
  misc_feature 1..19: note = siRNA sense sequence
  source 1..19: mol_type = other RNA
aagaatgctgcagtaagcc

SEQ ID NO: 59177 - RNA, 19 nt, synthetic construct
  misc_feature 1..19: note = siRNA antisense sequence
  source 1..19: mol_type = other RNA
ggcttactgcagcattctt

SEQ ID NO: 59178 - RNA, 19 nt, synthetic construct
  misc_feature 1..19: note = siRNA sense sequence
  source 1..19: mol_type = other RNA
agaatgctgcagtaagcct

SEQ ID NO: 59179 - RNA, 19 nt, synthetic construct
  misc_feature 1..19: note = siRNA antisense sequence
  source 1..19: mol_type = other RNA
aggcttactgcagcattct

SEQ ID NO: 59180 - RNA, 19 nt, synthetic construct
  misc_feature 1..19: note = siRNA sense sequence
  source 1..19: mol_type = other RNA
tgcagtaagcctgaccctt

SEQ ID NO: 59181 - RNA, 19 nt, synthetic construct
  misc_feature 1..19: note = siRNA antisense sequence
  source 1..19: mol_type = other RNA
aagggtcaggcttactgca

SEQ ID NO: 59182 - RNA, 19 nt, synthetic construct
  misc_feature 1..19: note = siRNA sense sequence
  source 1..19: mol_type = other RNA
gcagtaagcctgacccttg

SEQ ID NO: 59183 - RNA, 19 nt, synthetic construct
  misc_feature 1..19: note = siRNA antisense sequence
  source 1..19: mol_type = other RNA
caagggtcaggcttactgc

SEQ ID NO: 59184 - RNA, 19 nt, synthetic construct
  misc_feature 1..19: note = siRNA sense sequence
  source 1..19: mol_type = other RNA
cagtaagcctgacccttgg

SEQ ID NO: 59185 - RNA, 19 nt, synthetic construct
  misc_feature 1..19: note = siRNA antisense sequence
  source 1..19: mol_type = other RNA
ccaagggtcaggcttactg

SEQ ID NO: 59186 - RNA, 19 nt, synthetic construct
  misc_feature 1..19: note = siRNA sense sequence
  source 1..19: mol_type = other RNA
agtaagcctgacccttggg

SEQ ID NO: 59187 - RNA, 19 nt, synthetic construct
  misc_feature 1..19: note = siRNA antisense sequence
  source 1..19: mol_type = other RNA
cccaagggtcaggcttact

SEQ ID NO: 59188 - RNA, 19 nt, synthetic construct
  misc_feature 1..19: note = siRNA sense sequence
  source 1..19: mol_type = other RNA
gtaagcctgacccttggga

SEQ ID NO: 59189 - RNA, 19 nt, synthetic construct
  misc_feature 1..19: note = siRNA antisense sequence
  source 1..19: mol_type = other RNA
tcccaagggtcaggcttac

SEQ ID NO: 59190 - RNA, 19 nt, synthetic construct
  misc_feature 1..19: note = siRNA sense sequence
  source 1..19: mol_type = other RNA
taagcctgacccttgggaa

SEQ ID NO: 59191 - RNA, 19 nt, synthetic construct
  misc_feature 1..19: note = siRNA antisense sequence
  source 1..19: mol_type = other RNA
ttcccaagggtcaggctta

SEQ ID NO: 59192 - RNA, 19 nt, synthetic construct
  misc_feature 1..19: note = siRNA sense sequence
  source 1..19: mol_type = other RNA
tattttatgtttcaccctc

SEQ ID NO: 59193 - RNA, 19 nt, synthetic construct
  misc_feature 1..19: note = siRNA antisense sequence
  source 1..19: mol_type = other RNA
gagggtgaaacataaaata

SEQ ID NO: 59194 - RNA, 19 nt, synthetic construct
  misc_feature 1..19: note = siRNA sense sequence
  source 1..19: mol_type = other RNA
attttatgtttcaccctct

SEQ ID NO: 59195 - RNA, 19 nt, synthetic construct
  misc_feature 1..19: note = siRNA antisense sequence
  source 1..19: mol_type = other RNA
agagggtgaaacataaaat

SEQ ID NO: 59196 - RNA, 19 nt, synthetic construct
  misc_feature 1..19: note = siRNA sense sequence
  source 1..19: mol_type = other RNA
tatgtttcaccctctagga

SEQ ID NO: 59197 - RNA, 19 nt, synthetic construct
  misc_feature 1..19: note = siRNA antisense sequence
  source 1..19: mol_type = other RNA
tcctagagggtgaaacata

SEQ ID NO: 59198 - RNA, 19 nt, synthetic construct
  misc_feature 1..19: note = siRNA sense sequence
  source 1..19: mol_type = other RNA
atgtttcaccctctaggac

SEQ ID NO: 59199 - RNA, 19 nt, synthetic construct
  misc_feature 1..19: note = siRNA antisense sequence
  source 1..19: mol_type = other RNA
gtcctagagggtgaaacat

SEQ ID NO: 59200 - RNA, 19 nt, synthetic construct
  misc_feature 1..19: note = siRNA sense sequence
  source 1..19: mol_type = other RNA
tgtttcaccctctaggaca

SEQ ID NO: 59201 - RNA, 19 nt, synthetic construct
  misc_feature 1..19: note = siRNA antisense sequence
  source 1..19: mol_type = other RNA
tgtcctagagggtgaaaca

SEQ ID NO: 59202 - RNA, 19 nt, synthetic construct
  misc_feature 1..19: note = siRNA sense sequence
  source 1..19: mol_type = other RNA
agcatgactttcaggactc

SEQ ID NO: 59203 - RNA, 19 nt, synthetic construct
  misc_feature 1..19: note = siRNA antisense sequence
  source 1..19: mol_type = other RNA
gagtcctgaaagtcatgct

SEQ ID NO: 59204 - RNA, 19 nt, synthetic construct
  misc_feature 1..19: note = siRNA sense sequence
  source 1..19: mol_type = other RNA
gcatgactttcaggactct

SEQ ID NO: 59205 - RNA, 19 nt, synthetic construct
  misc_feature 1..19: note = siRNA antisense sequence
  source 1..19: mol_type = other RNA
agagtcctgaaagtcatgc

SEQ ID NO: 59206 - RNA, 19 nt, synthetic construct
  misc_feature 1..19: note = siRNA sense sequence
  source 1..19: mol_type = other RNA
agaataacgttggacttta

SEQ ID NO: 59207 - RNA, 19 nt, synthetic construct
  misc_feature 1..19: note = siRNA antisense sequence
  source 1..19: mol_type = other RNA
taaagtccaacgttattct

SEQ ID NO: 59208 - RNA, 19 nt, synthetic construct
  misc_feature 1..19: note = siRNA sense sequence
  source 1..19: mol_type = other RNA
gaataacgttggactttaa

SEQ ID NO: 59209 - RNA, 19 nt, synthetic construct
  misc_feature 1..19: note = siRNA antisense sequence
  source 1..19: mol_type = other RNA
ttaaagtccaacgttattc

SEQ ID NO: 59210 - RNA, 19 nt, synthetic construct
  misc_feature 1..19: note = siRNA sense sequence
  source 1..19: mol_type = other RNA
ataacgttggactttaatc

SEQ ID NO: 59211 - RNA, 19 nt, synthetic construct
  misc_feature 1..19: note = siRNA antisense sequence
  source 1..19: mol_type = other RNA
gattaaagtccaacgttat

SEQ ID NO: 59212 - RNA, 19 nt, synthetic construct
  misc_feature 1..19: note = siRNA sense sequence
  source 1..19: mol_type = other RNA
taacgttggactttaatct

SEQ ID NO: 59213 - RNA, 19 nt, synthetic construct
  misc_feature 1..19: note = siRNA antisense sequence
  source 1..19: mol_type = other RNA
agattaaagtccaacgtta

SEQ ID NO: 59214 - RNA, 19 nt, synthetic construct
  misc_feature 1..19: note = siRNA sense sequence
  source 1..19: mol_type = other RNA
aacgttggactttaatctt

SEQ ID NO: 59215 - RNA, 19 nt, synthetic construct
  misc_feature 1..19: note = siRNA antisense sequence
  source 1..19: mol_type = other RNA
aagattaaagtccaacgtt

SEQ ID NO: 59216 - RNA, 19 nt, synthetic construct
  misc_feature 1..19: note = siRNA sense sequence
  source 1..19: mol_type = other RNA
acgttggactttaatctta

SEQ ID NO: 59217 - RNA, 19 nt, synthetic construct
  misc_feature 1..19: note = siRNA antisense sequence
  source 1..19: mol_type = other RNA
taagattaaagtccaacgt

SEQ ID NO: 59218 - RNA, 19 nt, synthetic construct
  misc_feature 1..19: note = siRNA sense sequence
  source 1..19: mol_type = other RNA
cgttggactttaatcttac

SEQ ID NO: 59219 - RNA, 19 nt, synthetic construct
  misc_feature 1..19: note = siRNA antisense sequence
  source 1..19: mol_type = other RNA
gtaagattaaagtccaacg

SEQ ID NO: 59220 - RNA, 19 nt, synthetic construct
  misc_feature 1..19: note = siRNA sense sequence
  source 1..19: mol_type = other RNA
gttggactttaatcttacc

SEQ ID NO: 59221 - RNA, 19 nt, synthetic construct
  misc_feature 1..19: note = siRNA antisense sequence
  source 1..19: mol_type = other RNA
ggtaagattaaagtccaac

SEQ ID NO: 59222 - RNA, 19 nt, synthetic construct
  misc_feature 1..19: note = siRNA sense sequence
  source 1..19: mol_type = other RNA
tggactttaatcttaccga

SEQ ID NO: 59223 - RNA, 19 nt, synthetic construct
  misc_feature 1..19: note = siRNA antisense sequence
  source 1..19: mol_type = other RNA
tcggtaagattaaagtcca

SEQ ID NO: 59224 - RNA, 19 nt, synthetic construct
  misc_feature 1..19: note = siRNA sense sequence
  source 1..19: mol_type = other RNA
ggactttaatcttaccgat

SEQ ID NO: 59225 - RNA, 19 nt, synthetic construct
  misc_feature 1..19: note = siRNA antisense sequence
  source 1..19: mol_type = other RNA
atcggtaagattaaagtcc

SEQ ID NO: 59226 - RNA, 19 nt, synthetic construct
  misc_feature 1..19: note = siRNA sense sequence
  source 1..19: mol_type = other RNA
gactttaatcttaccgatc

SEQ ID NO: 59227 - RNA, 19 nt, synthetic construct
  misc_feature 1..19: note = siRNA antisense sequence
  source 1..19: mol_type = other RNA
gatcggtaagattaaagtc

SEQ ID NO: 59228 - RNA, 19 nt, synthetic construct
  misc_feature 1..19: note = siRNA sense sequence
  source 1..19: mol_type = other RNA
actttaatcttaccgatcc

SEQ ID NO: 59229 - RNA, 19 nt, synthetic construct
  misc_feature 1..19: note = siRNA antisense sequence
  source 1..19: mol_type = other RNA
ggatcggtaagattaaagt

SEQ ID NO: 59230 - RNA, 19 nt, synthetic construct
  misc_feature 1..19: note = siRNA sense sequence
  source 1..19: mol_type = other RNA
ctttaatcttaccgatcca

SEQ ID NO: 59231 - RNA, 19 nt, synthetic construct
  misc_feature 1..19: note = siRNA antisense sequence
  source 1..19: mol_type = other RNA
tggatcggtaagattaaag

SEQ ID NO: 59232 - RNA, 19 nt, synthetic construct
  misc_feature 1..19: note = siRNA sense sequence
  source 1..19: mol_type = other RNA
tttaatcttaccgatccag

SEQ ID NO: 59233 - RNA, 19 nt, synthetic construct
  misc_feature 1..19: note = siRNA antisense sequence
  source 1..19: mol_type = other RNA
ctggatcggtaagattaaa

SEQ ID NO: 59234 - RNA, 19 nt, synthetic construct
  misc_feature 1..19: note = siRNA sense sequence
  source 1..19: mol_type = other RNA
ttaatcttaccgatccaga

SEQ ID NO: 59235 - RNA, 19 nt, synthetic construct
  misc_feature 1..19: note = siRNA antisense sequence
  source 1..19: mol_type = other RNA
tctggatcggtaagattaa

SEQ ID NO: 59236 - RNA, 19 nt, synthetic construct
  misc_feature 1..19: note = siRNA sense sequence
  source 1..19: mol_type = other RNA
taatcttaccgatccagaa

SEQ ID NO: 59237 - RNA, 19 nt, synthetic construct
  misc_feature 1..19: note = siRNA antisense sequence
  source 1..19: mol_type = other RNA
ttctggatcggtaagatta

SEQ ID NO: 59238 - RNA, 19 nt, synthetic construct
  misc_feature 1..19: note = siRNA sense sequence
  source 1..19: mol_type = other RNA
aaaatgggcctgttcttga

SEQ ID NO: 59239 - RNA, 19 nt, synthetic construct
  misc_feature 1..19: note = siRNA antisense sequence
  source 1..19: mol_type = other RNA
tcaagaacaggcccatttt

SEQ ID NO: 59240 - RNA, 19 nt, synthetic construct
  misc_feature 1..19: note = siRNA sense sequence
  source 1..19: mol_type = other RNA
aaatgggcctgttcttgat

SEQ ID NO: 59241 - RNA, 19 nt, synthetic construct
  misc_feature 1..19: note = siRNA antisense sequence
  source 1..19: mol_type = other RNA
atcaagaacaggcccattt

SEQ ID NO: 59242 - RNA, 19 nt, synthetic construct
  misc_feature 1..19: note = siRNA sense sequence
  source 1..19: mol_type = other RNA
aatgggcctgttcttgatg

SEQ ID NO: 59243 - RNA, 19 nt, synthetic construct
  misc_feature 1..19: note = siRNA antisense sequence
  source 1..19: mol_type = other RNA
catcaagaacaggcccatt

SEQ ID NO: 59244 - RNA, 19 nt, synthetic construct
  misc_feature 1..19: note = siRNA sense sequence
  source 1..19: mol_type = other RNA
atgggcctgttcttgatga

SEQ ID NO: 59245 - RNA, 19 nt, synthetic construct
  misc_feature 1..19: note = siRNA antisense sequence
  source 1..19: mol_type = other RNA
tcatcaagaacaggcccat

SEQ ID NO: 59246 - RNA, 19 nt, synthetic construct
  misc_feature 1..19: note = siRNA sense sequence
  source 1..19: mol_type = other RNA
tgggcctgttcttgatgat

SEQ ID NO: 59247 - RNA, 19 nt, synthetic construct
  misc_feature 1..19: note = siRNA antisense sequence
  source 1..19: mol_type = other RNA
atcatcaagaacaggccca

SEQ ID NO: 59248 - RNA, 19 nt, synthetic construct
  misc_feature 1..19: note = siRNA sense sequence
  source 1..19: mol_type = other RNA
gggcctgttcttgatgatt

SEQ ID NO: 59249 - RNA, 19 nt, synthetic construct
  misc_feature 1..19: note = siRNA antisense sequence
  source 1..19: mol_type = other RNA
aatcatcaagaacaggccc

SEQ ID NO: 59250 - RNA, 19 nt, synthetic construct
  misc_feature 1..19: note = siRNA sense sequence
  source 1..19: mol_type = other RNA
ttttcactactctgcattg

SEQ ID NO: 59251 - RNA, 19 nt, synthetic construct
  misc_feature 1..19: note = siRNA antisense sequence
  source 1..19: mol_type = other RNA
caatgcagagtagtgaaaa

SEQ ID NO: 59252 - RNA, 19 nt, synthetic construct
  misc_feature 1..19: note = siRNA sense sequence
  source 1..19: mol_type = other RNA
tttcactactctgcattga

SEQ ID NO: 59253 - RNA, 19 nt, synthetic construct
  misc_feature 1..19: note = siRNA antisense sequence
  source 1..19: mol_type = other RNA
tcaatgcagagtagtgaaa

SEQ ID NO: 59254 - RNA, 19 nt, synthetic construct
  misc_feature 1..19: note = siRNA sense sequence
  source 1..19: mol_type = other RNA
ttcactactctgcattgat

SEQ ID NO: 59255 - RNA, 19 nt, synthetic construct
  misc_feature 1..19: note = siRNA antisense sequence
  source 1..19: mol_type = other RNA
atcaatgcagagtagtgaa

SEQ ID NO: 59256 - RNA, 19 nt, synthetic construct
  misc_feature 1..19: note = siRNA sense sequence
  source 1..19: mol_type = other RNA
tcactactctgcattgatc

SEQ ID NO: 59257 - RNA, 19 nt, synthetic construct
  misc_feature 1..19: note = siRNA antisense sequence
  source 1..19: mol_type = other RNA
gatcaatgcagagtagtga

SEQ ID NO: 59258 - RNA, 19 nt, synthetic construct
  misc_feature 1..19: note = siRNA sense sequence
  source 1..19: mol_type = other RNA
cactactctgcattgatca

SEQ ID NO: 59259 - RNA, 19 nt, synthetic construct
  misc_feature 1..19: note = siRNA antisense sequence
  source 1..19: mol_type = other RNA
tgatcaatgcagagtagtg

SEQ ID NO: 59260 - RNA, 19 nt, synthetic construct
  misc_feature 1..19: note = siRNA sense sequence
  source 1..19: mol_type = other RNA
actactctgcattgatcac

SEQ ID NO: 59261 - RNA, 19 nt, synthetic construct
  misc_feature 1..19: note = siRNA antisense sequence
  source 1..19: mol_type = other RNA
gtgatcaatgcagagtagt

SEQ ID NO: 59262 - RNA, 19 nt, synthetic construct
  misc_feature 1..19: note = siRNA sense sequence
  source 1..19: mol_type = other RNA
ctactctgcattgatcaca

SEQ ID NO: 59263 - RNA, 19 nt, synthetic construct
  misc_feature 1..19: note = siRNA antisense sequence
  source 1..19: mol_type = other RNA
tgtgatcaatgcagagtag

SEQ ID NO: 59264 - RNA, 19 nt, synthetic construct
  misc_feature 1..19: note = siRNA sense sequence
  source 1..19: mol_type = other RNA
aggcaagcagattttattc

SEQ ID NO: 59265 - RNA, 19 nt, synthetic construct
  misc_feature 1..19: note = siRNA antisense sequence
  source 1..19: mol_type = other RNA
gaataaaatctgcttgcct

SEQ ID NO: 59266 - RNA, 19 nt, synthetic construct
  misc_feature 1..19: note = siRNA sense sequence
  source 1..19: mol_type = other RNA
ggcaagcagattttattcc

SEQ ID NO: 59267 - RNA, 19 nt, synthetic construct
  misc_feature 1..19: note = siRNA antisense sequence
  source 1..19: mol_type = other RNA
ggaataaaatctgcttgcc

SEQ ID NO: 59268 - RNA, 19 nt, synthetic construct
  misc_feature 1..19: note = siRNA sense sequence
  source 1..19: mol_type = other RNA
gcaagcagattttattcct

SEQ ID NO: 59269 - RNA, 19 nt, synthetic construct
  misc_feature 1..19: note = siRNA antisense sequence
  source 1..19: mol_type = other RNA
aggaataaaatctgcttgc

SEQ ID NO: 59270 - RNA, 19 nt, synthetic construct
  misc_feature 1..19: note = siRNA sense sequence
  source 1..19: mol_type = other RNA
gattttattcctggtcagg

SEQ ID NO: 59271 - RNA, 19 nt, synthetic construct
  misc_feature 1..19: note = siRNA antisense sequence
  source 1..19: mol_type = other RNA
cctgaccaggaataaaatc

SEQ ID NO: 59272 - RNA, 19 nt, synthetic construct
  misc_feature 1..19: note = siRNA sense sequence
  source 1..19: mol_type = other RNA
agaccttctcttcaagctg

SEQ ID NO: 59273 - RNA, 19 nt, synthetic construct
  misc_feature 1..19: note = siRNA antisense sequence
  source 1..19: mol_type = other RNA
cagcttgaagagaaggtct

SEQ ID NO: 59274 - RNA, 19 nt, synthetic construct
  misc_feature 1..19: note = siRNA sense sequence
  source 1..19: mol_type = other RNA
gaccttctcttcaagctgt

SEQ ID NO: 59275 - RNA, 19 nt, synthetic construct
  misc_feature 1..19: note = siRNA antisense sequence
  source 1..19: mol_type = other RNA
acagcttgaagagaaggtc

SEQ ID NO: 59276 - RNA, 19 nt, synthetic construct
  misc_feature 1..19: note = siRNA sense sequence
  source 1..19: mol_type = other RNA
tggtggccattttcttcta

SEQ ID NO: 59277 - RNA, 19 nt, synthetic construct
  misc_feature 1..19: note = siRNA antisense sequence
  source 1..19: mol_type = other RNA
tagaagaaaatggccacca

SEQ ID NO: 59278 - RNA, 19 nt, synthetic construct
  misc_feature 1..19: note = siRNA sense sequence
  source 1..19: mol_type = other RNA
gtggccattttcttctatg

SEQ ID NO: 59279 - RNA, 19 nt, synthetic construct
  misc_feature 1..19: note = siRNA antisense sequence
  source 1..19: mol_type = other RNA
catagaagaaaatggccac

SEQ ID NO: 59280 - RNA, 19 nt, synthetic construct
  misc_feature 1..19: note = siRNA sense sequence
  source 1..19: mol_type = other RNA
cattttcttctatggcagg

SEQ ID NO: 59281 - RNA, 19 nt, synthetic construct
  misc_feature 1..19: note = siRNA antisense sequence
  source 1..19: mol_type = other RNA
cctgccatagaagaaaatg

SEQ ID NO: 59282 - RNA, 19 nt, synthetic construct
  misc_feature 1..19: note = siRNA sense sequence
  source 1..19: mol_type = other RNA
attttcttctatggcaggg

SEQ ID NO: 59283 - RNA, 19 nt, synthetic construct
  misc_feature 1..19: note = siRNA antisense sequence
  source 1..19: mol_type = other RNA
ccctgccatagaagaaaat

SEQ ID NO: 59284 - RNA, 19 nt, synthetic construct
  misc_feature 1..19: note = siRNA sense sequence
  source 1..19: mol_type = other RNA
ttttcttctatggcaggga

SEQ ID NO: 59285 - RNA, 19 nt, synthetic construct
  misc_feature 1..19: note = siRNA antisense sequence
  source 1..19: mol_type = other RNA
tccctgccatagaagaaaa

SEQ ID NO: 59286 - RNA, 19 nt, synthetic construct
  misc_feature 1..19: note = siRNA sense sequence
  source 1..19: mol_type = other RNA
tttcttctatggcagggac

SEQ ID NO: 59287 - RNA, 19 nt, synthetic construct
  misc_feature 1..19: note = siRNA antisense sequence
  source 1..19: mol_type = other RNA
gtccctgccatagaagaaa

SEQ ID NO: 59288 - RNA, 19 nt, synthetic construct
  misc_feature 1..19: note = siRNA sense sequence
  source 1..19: mol_type = other RNA
ttcttctatggcagggact

SEQ ID NO: 59289 - RNA, 19 nt, synthetic construct
  misc_feature 1..19: note = siRNA antisense sequence
  source 1..19: mol_type = other RNA
agtccctgccatagaagaa

SEQ ID NO: 59290 - RNA, 19 nt, synthetic construct
  misc_feature 1..19: note = siRNA sense sequence
  source 1..19: mol_type = other RNA
tcttctatggcagggactt

SEQ ID NO: 59291 - RNA, 19 nt, synthetic construct
  misc_feature 1..19: note = siRNA antisense sequence
  source 1..19: mol_type = other RNA
aagtccctgccatagaaga

SEQ ID NO: 59292 - RNA, 19 nt, synthetic construct
  misc_feature 1..19: note = siRNA sense sequence
  source 1..19: mol_type = other RNA
cttctatggcagggacttt

SEQ ID NO: 59293 - RNA, 19 nt, synthetic construct
  misc_feature 1..19: note = siRNA antisense sequence
  source 1..19: mol_type = other RNA
aaagtccctgccatagaag

SEQ ID NO: 59294 - RNA, 19 nt, synthetic construct
  misc_feature 1..19: note = siRNA sense sequence
  source 1..19: mol_type = other RNA
ttctatggcagggacttta

SEQ ID NO: 59295 - RNA, 19 nt, synthetic construct
  misc_feature 1..19: note = siRNA antisense sequence
  source 1..19: mol_type = other RNA
taaagtccctgccatagaa

SEQ ID NO: 59296 - RNA, 19 nt, synthetic construct
  misc_feature 1..19: note = siRNA sense sequence
  source 1..19: mol_type = other RNA
tctatggcagggactttag

SEQ ID NO: 59297 - RNA, 19 nt, synthetic construct
  misc_feature 1..19: note = siRNA antisense sequence
  source 1..19: mol_type = other RNA
ctaaagtccctgccataga

SEQ ID NO: 59298 - RNA, 19 nt, synthetic construct
  misc_feature 1..19: note = siRNA sense sequence
  source 1..19: mol_type = other RNA
ctatggcagggactttagc

SEQ ID NO: 59299 - RNA, 19 nt, synthetic construct
  misc_feature 1..19: note = siRNA antisense sequence
  source 1..19: mol_type = other RNA
gctaaagtccctgccatag

SEQ ID NO: 59300 - RNA, 19 nt, synthetic construct
  misc_feature 1..19: note = siRNA sense sequence
  source 1..19: mol_type = other RNA
tatggcagggactttagca

SEQ ID NO: 59301 - RNA, 19 nt, synthetic construct
  misc_feature 1..19: note = siRNA antisense sequence
  source 1..19: mol_type = other RNA
tgctaaagtccctgccata

SEQ ID NO: 59302 - RNA, 19 nt, synthetic construct
  misc_feature 1..19: note = siRNA sense sequence
  source 1..19: mol_type = other RNA
atggcagggactttagcat

SEQ ID NO: 59303 - RNA, 19 nt, synthetic construct
  misc_feature 1..19: note = siRNA antisense sequence
  source 1..19: mol_type = other RNA
atgctaaagtccctgccat

SEQ ID NO: 59304 - RNA, 19 nt, synthetic construct
  misc_feature 1..19: note = siRNA sense sequence
  source 1..19: mol_type = other RNA
tggcagggactttagcatt

SEQ ID NO: 59305 - RNA, 19 nt, synthetic construct
  misc_feature 1..19: note = siRNA antisense sequence
  source 1..19: mol_type = other RNA
aatgctaaagtccctgcca

SEQ ID NO: 59306 - RNA, 19 nt, synthetic construct
  misc_feature 1..19: note = siRNA sense sequence
  source 1..19: mol_type = other RNA
gggttgctggttcttgttt

SEQ ID NO: 59307 - RNA, 19 nt, synthetic construct
  misc_feature 1..19: note = siRNA antisense sequence
  source 1..19: mol_type = other RNA
aaacaagaaccagcaaccc

SEQ ID NO: 59308 - RNA, 19 nt, synthetic construct
  misc_feature 1..19: note = siRNA sense sequence
  source 1..19: mol_type = other RNA
ggttgctggttcttgtttg

SEQ ID NO: 59309 - RNA, 19 nt, synthetic construct
  misc_feature 1..19: note = siRNA antisense sequence
  source 1..19: mol_type = other RNA
caaacaagaaccagcaacc

SEQ ID NO: 59310 - RNA, 19 nt, synthetic construct
  misc_feature 1..19: note = siRNA sense sequence
  source 1..19: mol_type = other RNA
gttgctggttcttgtttgc

SEQ ID NO: 59311 - RNA, 19 nt, synthetic construct
  misc_feature 1..19: note = siRNA antisense sequence
  source 1..19: mol_type = other RNA
gcaaacaagaaccagcaac

SEQ ID NO: 59312 - RNA, 19 nt, synthetic construct
  misc_feature 1..19: note = siRNA sense sequence
  source 1..19: mol_type = other RNA
ttgctggttcttgtttgct

SEQ ID NO: 59313 - RNA, 19 nt, synthetic construct
  misc_feature 1..19: note = siRNA antisense sequence
  source 1..19: mol_type = other RNA
agcaaacaagaaccagcaa

SEQ ID NO: 59314 - RNA, 19 nt, synthetic construct
  misc_feature 1..19: note = siRNA sense sequence
  source 1..19: mol_type = other RNA
tgctggttcttgtttgctc

SEQ ID NO: 59315 - RNA, 19 nt, synthetic construct
  misc_feature 1..19: note = siRNA antisense sequence
  source 1..19: mol_type = other RNA
gagcaaacaagaaccagca

SEQ ID NO: 59316 - RNA, 19 nt, synthetic construct
  misc_feature 1..19: note = siRNA sense sequence
  source 1..19: mol_type = other RNA
gctggttcttgtttgctcc

SEQ ID NO: 59317 - RNA, 19 nt, synthetic construct
  misc_feature 1..19: note = siRNA antisense sequence
  source 1..19: mol_type = other RNA
ggagcaaacaagaaccagc

SEQ ID NO: 59318 - RNA, 19 nt, synthetic construct
  misc_feature 1..19: note = siRNA sense sequence
  source 1..19: mol_type = other RNA
ctggttcttgtttgctccg

SEQ ID NO: 59319 - RNA, 19 nt, synthetic construct
  misc_feature 1..19: note = siRNA antisense sequence
  source 1..19: mol_type = other RNA
cggagcaaacaagaaccag

SEQ ID NO: 59320 - RNA, 19 nt, synthetic construct
  misc_feature 1..19: note = siRNA sense sequence
  source 1..19: mol_type = other RNA
tggttcttgtttgctccgt

SEQ ID NO: 59321 - RNA, 19 nt, synthetic construct
  misc_feature 1..19: note = siRNA antisense sequence
  source 1..19: mol_type = other RNA
acggagcaaacaagaacca

SEQ ID NO: 59322 - RNA, 19 nt, synthetic construct
  misc_feature 1..19: note = siRNA sense sequence
  source 1..19: mol_type = other RNA
tcttgtttgctccgttttc

SEQ ID NO: 59323 - RNA, 19 nt, synthetic construct
  misc_feature 1..19: note = siRNA antisense sequence
  source 1..19: mol_type = other RNA
gaaaacggagcaaacaaga

SEQ ID NO: 59324 - RNA, 19 nt, synthetic construct
  misc_feature 1..19: note = siRNA sense sequence
  source 1..19: mol_type = other RNA
cttgtttgctccgttttct

SEQ ID NO: 59325 - RNA, 19 nt, synthetic construct
  misc_feature 1..19: note = siRNA antisense sequence
  source 1..19: mol_type = other RNA
agaaaacggagcaaacaag

SEQ ID NO: 59326 - RNA, 19 nt, synthetic construct
  misc_feature 1..19: note = siRNA sense sequence
  source 1..19: mol_type = other RNA
tttgctccgttttctcaat

SEQ ID NO: 59327 - RNA, 19 nt, synthetic construct
  misc_feature 1..19: note = siRNA antisense sequence
  source 1..19: mol_type = other RNA
attgagaaaacggagcaaa

SEQ ID NO: 59328 - RNA, 19 nt, synthetic construct
  misc_feature 1..19: note = siRNA sense sequence
  source 1..19: mol_type = other RNA
ttgctccgttttctcaatg

SEQ ID NO: 59329 - RNA, 19 nt, synthetic construct
  misc_feature 1..19: note = siRNA antisense sequence
  source 1..19: mol_type = other RNA
cattgagaaaacggagcaa

SEQ ID NO: 59330 - RNA, 19 nt, synthetic construct
  misc_feature 1..19: note = siRNA sense sequence
  source 1..19: mol_type = other RNA
tgctccgttttctcaatgg

SEQ ID NO: 59331 - RNA, 19 nt, synthetic construct
  misc_feature 1..19: note = siRNA antisense sequence
  source 1..19: mol_type = other RNA
ccattgagaaaacggagca

SEQ ID NO: 59332 - RNA, 19 nt, synthetic construct
  misc_feature 1..19: note = siRNA sense sequence
  source 1..19: mol_type = other RNA
gctccgttttctcaatggc

SEQ ID NO: 59333 - RNA, 19 nt, synthetic construct
  misc_feature 1..19: note = siRNA antisense sequence
  source 1..19: mol_type = other RNA
gccattgagaaaacggagc

SEQ ID NO: 59334 - RNA, 19 nt, synthetic construct
  misc_feature 1..19: note = siRNA sense sequence
  source 1..19: mol_type = other RNA
ctccgttttctcaatggct

SEQ ID NO: 59335 - RNA, 19 nt, synthetic construct
  misc_feature 1..19: note = siRNA antisense sequence
  source 1..19: mol_type = other RNA
agccattgagaaaacggag

SEQ ID NO: 59336 - RNA, 19 nt, synthetic construct
  misc_feature 1..19: note = siRNA sense sequence
  source 1..19: mol_type = other RNA
tccgttttctcaatggctt

SEQ ID NO: 59337 - RNA, 19 nt, synthetic construct
  misc_feature 1..19: note = siRNA antisense sequence
  source 1..19: mol_type = other RNA
aagccattgagaaaacgga

SEQ ID NO: 59338 - RNA, 19 nt, synthetic construct
  misc_feature 1..19: note = siRNA sense sequence
  source 1..19: mol_type = other RNA
ccgttttctcaatggcttt

SEQ ID NO: 59339 - RNA, 19 nt, synthetic construct
  misc_feature 1..19: note = siRNA antisense sequence
  source 1..19: mol_type = other RNA
aaagccattgagaaaacgg

SEQ ID NO: 59340 - RNA, 19 nt, synthetic construct
  misc_feature 1..19: note = siRNA sense sequence
  source 1..19: mol_type = other RNA
ttctcaatggctttatctt

SEQ ID NO: 59341 - RNA, 19 nt, synthetic construct
  misc_feature 1..19: note = siRNA antisense sequence
  source 1..19: mol_type = other RNA
aagataaagccattgagaa

SEQ ID NO: 59342 - RNA, 19 nt, synthetic construct
  misc_feature 1..19: note = siRNA sense sequence
  source 1..19: mol_type = other RNA
tctcaatggctttatcttc

SEQ ID NO: 59343 - RNA, 19 nt, synthetic construct
  misc_feature 1..19: note = siRNA antisense sequence
  source 1..19: mol_type = other RNA
gaagataaagccattgaga

SEQ ID NO: 59344 - RNA, 19 nt, synthetic construct
  misc_feature 1..19: note = siRNA sense sequence
  source 1..19: mol_type = other RNA
aatggctttatcttcctct

SEQ ID NO: 59345 - RNA, 19 nt, synthetic construct
  misc_feature 1..19: note = siRNA antisense sequence
  source 1..19: mol_type = other RNA
agaggaagataaagccatt

SEQ ID NO: 59346 - RNA, 19 nt, synthetic construct
  misc_feature 1..19: note = siRNA sense sequence
  source 1..19: mol_type = other RNA
atggctttatcttcctctg

SEQ ID NO: 59347 - RNA, 19 nt, synthetic construct
  misc_feature 1..19: note = siRNA antisense sequence
  source 1..19: mol_type = other RNA
cagaggaagataaagccat

SEQ ID NO: 59348 - RNA, 19 nt, synthetic construct
  misc_feature 1..19: note = siRNA sense sequence
  source 1..19: mol_type = other RNA
ggctttatcttcctctggt

SEQ ID NO: 59349 - RNA, 19 nt, synthetic construct
  misc_feature 1..19: note = siRNA antisense sequence
  source 1..19: mol_type = other RNA
accagaggaagataaagcc

SEQ ID NO: 59350 - RNA, 19 nt, synthetic construct
  misc_feature 1..19: note = siRNA sense sequence
  source 1..19: mol_type = other RNA
tcttcctctggtaattggc

SEQ ID NO: 59351 - RNA, 19 nt, synthetic construct
  misc_feature 1..19: note = siRNA antisense sequence
  source 1..19: mol_type = other RNA
gccaattaccagaggaaga

SEQ ID NO: 59352 - RNA, 19 nt, synthetic construct
  misc_feature 1..19: note = siRNA sense sequence
  source 1..19: mol_type = other RNA
cttcctctggtaattggca

SEQ ID NO: 59353 - RNA, 19 nt, synthetic construct
  misc_feature 1..19: note = siRNA antisense sequence
  source 1..19: mol_type = other RNA
tgccaattaccagaggaag

SEQ ID NO: 59354 - RNA, 19 nt, synthetic construct
  misc_feature 1..19: note = siRNA sense sequence
  source 1..19: mol_type = other RNA
ttcctctggtaattggcaa

SEQ ID NO: 59355 - RNA, 19 nt, synthetic construct
  misc_feature 1..19: note = siRNA antisense sequence
  source 1..19: mol_type = other RNA
ttgccaattaccagaggaa

SEQ ID NO: 59356 - RNA, 19 nt, synthetic construct
  misc_feature 1..19: note = siRNA sense sequence
  source 1..19: mol_type = other RNA
tcctctggtaattggcaaa

SEQ ID NO: 59357 - RNA, 19 nt, synthetic construct
  misc_feature 1..19: note = siRNA antisense sequence
  source 1..19: mol_type = other RNA
tttgccaattaccagagga

SEQ ID NO: 59358 - RNA, 19 nt, synthetic construct
  misc_feature 1..19: note = siRNA sense sequence
  source 1..19: mol_type = other RNA
cctctggtaattggcaaag

SEQ ID NO: 59359 - RNA, 19 nt, synthetic construct
  misc_feature 1..19: note = siRNA antisense sequence
  source 1..19: mol_type = other RNA
ctttgccaattaccagagg

SEQ ID NO: 59360 - RNA, 19 nt, synthetic construct
  misc_feature 1..19: note = siRNA sense sequence
  source 1..19: mol_type = other RNA
ctctggtaattggcaaagg

SEQ ID NO: 59361 - RNA, 19 nt, synthetic construct
  misc_feature 1..19: note = siRNA antisense sequence
  source 1..19: mol_type = other RNA
cctttgccaattaccagag

SEQ ID NO: 59362 - RNA, 19 nt, synthetic construct
  misc_feature 1..19: note = siRNA sense sequence
  source 1..19: mol_type = other RNA
tctggtaattggcaaaggg

SEQ ID NO: 59363 - RNA, 19 nt, synthetic construct
  misc_feature 1..19: note = siRNA antisense sequence
  source 1..19: mol_type = other RNA
ccctttgccaattaccaga

SEQ ID NO: 59364 - RNA, 19 nt, synthetic construct
  misc_feature 1..19: note = siRNA sense sequence
  source 1..19: mol_type = other RNA
ctggtaattggcaaagggt

SEQ ID NO: 59365 - RNA, 19 nt, synthetic construct
  misc_feature 1..19: note = siRNA antisense sequence
  source 1..19: mol_type = other RNA
accctttgccaattaccag

SEQ ID NO: 59366 - RNA, 19 nt, synthetic construct
  misc_feature 1..19: note = siRNA sense sequence
  source 1..19: mol_type = other RNA
attggcaaagggtcctgaa

SEQ ID NO: 59367 - RNA, 19 nt, synthetic construct
  misc_feature 1..19: note = siRNA antisense sequence
  source 1..19: mol_type = other RNA
ttcaggaccctttgccaat

SEQ ID NO: 59368 - RNA, 19 nt, synthetic construct
  misc_feature 1..19: note = siRNA sense sequence
  source 1..19: mol_type = other RNA
ttttcagcaagcttaccta

SEQ ID NO: 59369 - RNA, 19 nt, synthetic construct
  misc_feature 1..19: note = siRNA antisense sequence
  source 1..19: mol_type = other RNA
taggtaagcttgctgaaaa

SEQ ID NO: 59370 - RNA, 19 nt, synthetic construct
  misc_feature 1..19: note = siRNA sense sequence
  source 1..19: mol_type = other RNA
tttcagcaagcttacctac

SEQ ID NO: 59371 - RNA, 19 nt, synthetic construct
  misc_feature 1..19: note = siRNA antisense sequence
  source 1..19: mol_type = other RNA
gtaggtaagcttgctgaaa

SEQ ID NO: 59372 - RNA, 19 nt, synthetic construct
  misc_feature 1..19: note = siRNA sense sequence
  source 1..19: mol_type = other RNA
agcaagcttacctacagat

SEQ ID NO: 59373 - RNA, 19 nt, synthetic construct
  misc_feature 1..19: note = siRNA antisense sequence
  source 1..19: mol_type = other RNA
atctgtaggtaagcttgct

SEQ ID NO: 59374 - RNA, 19 nt, synthetic construct
  misc_feature 1..19: note = siRNA sense sequence
  source 1..19: mol_type = other RNA
gcaagcttacctacagata

SEQ ID NO: 59375 - RNA, 19 nt, synthetic construct
  misc_feature 1..19: note = siRNA antisense sequence
  source 1..19: mol_type = other RNA
tatctgtaggtaagcttgc

SEQ ID NO: 59376 - RNA, 19 nt, synthetic construct
  misc_feature 1..19: note = siRNA sense sequence
  source 1..19: mol_type = other RNA
caagcttacctacagataa

SEQ ID NO: 59377 - RNA, 19 nt, synthetic construct
  misc_feature 1..19: note = siRNA antisense sequence
  source 1..19: mol_type = other RNA
ttatctgtaggtaagcttg

SEQ ID NO: 59378 - RNA, 19 nt, synthetic construct
  misc_feature 1..19: note = siRNA sense sequence
  source 1..19: mol_type = other RNA
gcttacctacagataaata

SEQ ID NO: 59379 - RNA, 19 nt, synthetic construct
  misc_feature 1..19: note = siRNA antisense sequence
  source 1..19: mol_type = other RNA
tatttatctgtaggtaagc

SEQ ID NO: 59380 - RNA, 19 nt, synthetic construct
  misc_feature 1..19: note = siRNA sense sequence
  source 1..19: mol_type = other RNA
acctacagataaatagact

SEQ ID NO: 59381 - RNA, 19 nt, synthetic construct
  misc_feature 1..19: note = siRNA antisense sequence
  source 1..19: mol_type = other RNA
agtctatttatctgtaggt

SEQ ID NO: 59382 - RNA, 19 nt, synthetic construct
  misc_feature 1..19: note = siRNA sense sequence
  source 1..19: mol_type = other RNA
cctacagataaatagacta

SEQ ID NO: 59383 - RNA, 19 nt, synthetic construct
  misc_feature 1..19: note = siRNA antisense sequence
  source 1..19: mol_type = other RNA
tagtctatttatctgtagg

SEQ ID NO: 59384 - RNA, 19 nt, synthetic construct
  misc_feature 1..19: note = siRNA sense sequence
  source 1..19: mol_type = other RNA
ctacagataaatagactag

SEQ ID NO: 59385 - RNA, 19 nt, synthetic construct
  misc_feature 1..19: note = siRNA antisense sequence
  source 1..19: mol_type = other RNA
ctagtctatttatctgtag

SEQ ID NO: 59386 - RNA, 19 nt, synthetic construct
  misc_feature 1..19: note = siRNA sense sequence
  source 1..19: mol_type = other RNA
aatgcactttctcagctat

SEQ ID NO: 59387 - RNA, 19 nt, synthetic construct
  misc_feature 1..19: note = siRNA antisense sequence
  source 1..19: mol_type = other RNA
atagctgagaaagtgcatt

SEQ ID NO: 59388 - RNA, 19 nt, synthetic construct
  misc_feature 1..19: note = siRNA sense sequence
  source 1..19: mol_type = other RNA
atgcactttctcagctatc

SEQ ID NO: 59389 - RNA, 19 nt, synthetic construct
  misc_feature 1..19: note = siRNA antisense sequence
  source 1..19: mol_type = other RNA
gatagctgagaaagtgcat

SEQ ID NO: 59390 - RNA, 19 nt, synthetic construct
  misc_feature 1..19: note = siRNA sense sequence
  source 1..19: mol_type = other RNA
gcactttctcagctatcta

SEQ ID NO: 59391 - RNA, 19 nt, synthetic construct
  misc_feature 1..19: note = siRNA antisense sequence
  source 1..19: mol_type = other RNA
tagatagctgagaaagtgc

SEQ ID NO: 59392 - RNA, 19 nt, synthetic construct
  misc_feature 1..19: note = siRNA sense sequence
  source 1..19: mol_type = other RNA
tcagctatctactgtttaa

SEQ ID NO: 59393 - RNA, 19 nt, synthetic construct
  misc_feature 1..19: note = siRNA antisense sequence
  source 1..19: mol_type = other RNA
ttaaacagtagatagctga

SEQ ID NO: 59394 - RNA, 19 nt, synthetic construct
  misc_feature 1..19: note = siRNA sense sequence
  source 1..19: mol_type = other RNA
cagctatctactgtttaac

SEQ ID NO: 59395 - RNA, 19 nt, synthetic construct
  misc_feature 1..19: note = siRNA antisense sequence
  source 1..19: mol_type = other RNA
gttaaacagtagatagctg

SEQ ID NO: 59396 - RNA, 19 nt, synthetic construct
  misc_feature 1..19: note = siRNA sense sequence
  source 1..19: mol_type = other RNA
ttctcagttatctactctt

SEQ ID NO: 59397 - RNA, 19 nt, synthetic construct
  misc_feature 1..19: note = siRNA antisense sequence
  source 1..19: mol_type = other RNA
aagagtagataactgagaa

SEQ ID NO: 59398 - RNA, 19 nt, synthetic construct
  misc_feature 1..19: note = siRNA sense sequence
  source 1..19: mol_type = other RNA
tctcagttatctactcttc

SEQ ID NO: 59399 - RNA, 19 nt, synthetic construct
  misc_feature 1..19: note = siRNA antisense sequence
  source 1..19: mol_type = other RNA
gaagagtagataactgaga

SEQ ID NO: 59400 - RNA, 19 nt, synthetic construct
  misc_feature 1..19: note = siRNA sense sequence
  source 1..19: mol_type = other RNA
agttatctactcttcaaga

SEQ ID NO: 59401 - RNA, 19 nt, synthetic construct
  misc_feature 1..19: note = siRNA antisense sequence
  source 1..19: mol_type = other RNA
tcttgaagagtagataact

SEQ ID NO: 59402 - RNA, 19 nt, synthetic construct
  misc_feature 1..19: note = siRNA sense sequence
  source 1..19: mol_type = other RNA
gttatctactcttcaagaa

SEQ ID NO: 59403 - RNA, 19 nt, synthetic construct
  misc_feature 1..19: note = siRNA antisense sequence
  source 1..19: mol_type = other RNA
ttcttgaagagtagataac

SEQ ID NO: 59404 - RNA, 19 nt, synthetic construct
  misc_feature 1..19: note = siRNA sense sequence
  source 1..19: mol_type = other RNA
ctttctcagccatatctcc

SEQ ID NO: 59405 - RNA, 19 nt, synthetic construct
  misc_feature 1..19: note = siRNA antisense sequence
  source 1..19: mol_type = other RNA
ggagatatggctgagaaag

SEQ ID NO: 59406 - RNA, 19 nt, synthetic construct
  misc_feature 1..19: note = siRNA sense sequence
  source 1..19: mol_type = other RNA
tttctcagccatatctcca

SEQ ID NO: 59407 - RNA, 19 nt, synthetic construct
  misc_feature 1..19: note = siRNA antisense sequence
  source 1..19: mol_type = other RNA
tggagatatggctgagaaa

SEQ ID NO: 59408 - RNA, 19 nt, synthetic construct
  misc_feature 1..19: note = siRNA sense sequence
  source 1..19: mol_type = other RNA
ttctcagccatatctccag

SEQ ID NO: 59409 - RNA, 19 nt, synthetic construct
  misc_feature 1..19: note = siRNA antisense sequence
  source 1..19: mol_type = other RNA
ctggagatatggctgagaa

SEQ ID NO: 59410 - RNA, 19 nt, synthetic construct
  misc_feature 1..19: note = siRNA sense sequence
  source 1..19: mol_type = other RNA
tctcagccatatctccagg

SEQ ID NO: 59411 - RNA, 19 nt, synthetic construct
  misc_feature 1..19: note = siRNA antisense sequence
  source 1..19: mol_type = other RNA
cctggagatatggctgaga

SEQ ID NO: 59412 - RNA, 19 nt, synthetic construct
  misc_feature 1..19: note = siRNA sense sequence
  source 1..19: mol_type = other RNA
ctcagccatatctccaggt

SEQ ID NO: 59413 - RNA, 19 nt, synthetic construct
  misc_feature 1..19: note = siRNA antisense sequence
  source 1..19: mol_type = other RNA
acctggagatatggctgag

SEQ ID NO: 59414 - RNA, 19 nt, synthetic construct
  misc_feature 1..19: note = siRNA sense sequence
  source 1..19: mol_type = other RNA
catatctccaggtttgccc

SEQ ID NO: 59415 - RNA, 19 nt, synthetic construct
  misc_feature 1..19: note = siRNA antisense sequence
  source 1..19: mol_type = other RNA
gggcaaacctggagatatg

SEQ ID NO: 59416 - RNA, 19 nt, synthetic construct
  misc_feature 1..19: note = siRNA sense sequence
  source 1..19: mol_type = other RNA
atatctccaggtttgccct

SEQ ID NO: 59417 - RNA, 19 nt, synthetic construct
  misc_feature 1..19: note = siRNA antisense sequence
  source 1..19: mol_type = other RNA
agggcaaacctggagatat

SEQ ID NO: 59418 - RNA, 19 nt, synthetic construct
  misc_feature 1..19: note = siRNA sense sequence
  source 1..19: mol_type = other RNA
cacataaccctaaatcaat

SEQ ID NO: 59419 - RNA, 19 nt, synthetic construct
  misc_feature 1..19: note = siRNA antisense sequence
  source 1..19: mol_type = other RNA
attgatttagggttatgtg

SEQ ID NO: 59420 - RNA, 19 nt, synthetic construct
  misc_feature 1..19: note = siRNA sense sequence
  source 1..19: mol_type = other RNA
gaattaggctcttctagac

SEQ ID NO: 59421 - RNA, 19 nt, synthetic construct
  misc_feature 1..19: note = siRNA antisense sequence
  source 1..19: mol_type = other RNA
gtctagaagagcctaattc

SEQ ID NO: 59422 - RNA, 19 nt, synthetic construct
  misc_feature 1..19: note = siRNA sense sequence
  source 1..19: mol_type = other RNA
aattaggctcttctagact

SEQ ID NO: 59423 - RNA, 19 nt, synthetic construct
  misc_feature 1..19: note = siRNA antisense sequence
  source 1..19: mol_type = other RNA
agtctagaagagcctaatt

SEQ ID NO: 59424 - RNA, 19 nt, synthetic construct
  misc_feature 1..19: note = siRNA sense sequence
  source 1..19: mol_type = other RNA
taggctcttctagactttt

SEQ ID NO: 59425 - RNA, 19 nt, synthetic construct
  misc_feature 1..19: note = siRNA antisense sequence
  source 1..19: mol_type = other RNA
aaaagtctagaagagccta

SEQ ID NO: 59426 - RNA, 19 nt, synthetic construct
  misc_feature 1..19: note = siRNA sense sequence
  source 1..19: mol_type = other RNA
taatttcctattgttggag

SEQ ID NO: 59427 - RNA, 19 nt, synthetic construct
  misc_feature 1..19: note = siRNA antisense sequence
  source 1..19: mol_type = other RNA
ctccaacaataggaaatta

SEQ ID NO: 59428 - RNA, 19 nt, synthetic construct
  misc_feature 1..19: note = siRNA sense sequence
  source 1..19: mol_type = other RNA
ttcctattgttggagttta

SEQ ID NO: 59429 - RNA, 19 nt, synthetic construct
  misc_feature 1..19: note = siRNA antisense sequence
  source 1..19: mol_type = other RNA
taaactccaacaataggaa

SEQ ID NO: 59430 - RNA, 19 nt, synthetic construct
  misc_feature 1..19: note = siRNA sense sequence
  source 1..19: mol_type = other RNA
tcctattgttggagtttaa

SEQ ID NO: 59431 - RNA, 19 nt, synthetic construct
  misc_feature 1..19: note = siRNA antisense sequence
  source 1..19: mol_type = other RNA
ttaaactccaacaatagga

SEQ ID NO: 59432 - RNA, 19 nt, synthetic construct
  misc_feature 1..19: note = siRNA sense sequence
  source 1..19: mol_type = other RNA
cctattgttggagtttaag

SEQ ID NO: 59433 - RNA, 19 nt, synthetic construct
  misc_feature 1..19: note = siRNA antisense sequence
  source 1..19: mol_type = other RNA
cttaaactccaacaatagg

SEQ ID NO: 59434 - RNA, 19 nt, synthetic construct
  misc_feature 1..19: note = siRNA sense sequence
  source 1..19: mol_type = other RNA
ctattgttggagtttaaga

SEQ ID NO: 59435 - RNA, 19 nt, synthetic construct
  misc_feature 1..19: note = siRNA antisense sequence
  source 1..19: mol_type = other RNA
tcttaaactccaacaatag

SEQ ID NO: 59436 - RNA, 19 nt, synthetic construct
  misc_feature 1..19: note = siRNA sense sequence
  source 1..19: mol_type = other RNA
tacctcatttgaatttagg

SEQ ID NO: 59437 - RNA, 19 nt, synthetic construct
  misc_feature 1..19: note = siRNA antisense sequence
  source 1..19: mol_type = other RNA
cctaaattcaaatgaggta

SEQ ID NO: 59438 - RNA, 19 nt, synthetic construct
  misc_feature 1..19: note = siRNA sense sequence
  source 1..19: mol_type = other RNA
acctcatttgaatttagga

SEQ ID NO: 59439 - RNA, 19 nt, synthetic construct
  misc_feature 1..19: note = siRNA antisense sequence
  source 1..19: mol_type = other RNA
tcctaaattcaaatgaggt

SEQ ID NO: 59440 - RNA, 19 nt, synthetic construct
  misc_feature 1..19: note = siRNA sense sequence
  source 1..19: mol_type = other RNA
ctaataagcactggattgc

SEQ ID NO: 59441 - RNA, 19 nt, synthetic construct
  misc_feature 1..19: note = siRNA antisense sequence
  source 1..19: mol_type = other RNA
gcaatccagtgcttattag

SEQ ID NO: 59442 - RNA, 19 nt, synthetic construct
  misc_feature 1..19: note = siRNA sense sequence
  source 1..19: mol_type = other RNA
taataagcactggattgca

SEQ ID NO: 59443 - RNA, 19 nt, synthetic construct
  misc_feature 1..19: note = siRNA antisense sequence
  source 1..19: mol_type = other RNA
tgcaatccagtgcttatta

SEQ ID NO: 59444 - RNA, 19 nt, synthetic construct
  misc_feature 1..19: note = siRNA sense sequence
  source 1..19: mol_type = other RNA
aataagcactggattgcag

SEQ ID NO: 59445 - RNA, 19 nt, synthetic construct
  misc_feature 1..19: note = siRNA antisense sequence
  source 1..19: mol_type = other RNA
ctgcaatccagtgcttatt

SEQ ID NO: 59446 - RNA, 19 nt, synthetic construct
  misc_feature 1..19: note = siRNA sense sequence
  source 1..19: mol_type = other RNA
ctggattgcagtgtatggt

SEQ ID NO: 59447 - RNA, 19 nt, synthetic construct
  misc_feature 1..19: note = siRNA antisense sequence
  source 1..19: mol_type = other RNA
accatacactgcaatccag

SEQ ID NO: 59448 - RNA, 19 nt, synthetic construct
  misc_feature 1..19: note = siRNA sense sequence
  source 1..19: mol_type = other RNA
tggattgcagtgtatggtt

SEQ ID NO: 59449 - RNA, 19 nt, synthetic construct
  misc_feature 1..19: note = siRNA antisense sequence
  source 1..19: mol_type = other RNA
aaccatacactgcaatcca

SEQ ID NO: 59450 - RNA, 19 nt, synthetic construct
  misc_feature 1..19: note = siRNA sense sequence
  source 1..19: mol_type = other RNA
ggattgcagtgtatggttt

SEQ ID NO: 59451 - RNA, 19 nt, synthetic construct
  misc_feature 1..19: note = siRNA antisense sequence
  source 1..19: mol_type = other RNA
aaaccatacactgcaatcc

SEQ ID NO: 59452 - RNA, 19 nt, synthetic construct
  misc_feature 1..19: note = siRNA sense sequence
  source 1..19: mol_type = other RNA
gattgcagtgtatggttta

SEQ ID NO: 59453 - RNA, 19 nt, synthetic construct
  misc_feature 1..19: note = siRNA antisense sequence
  source 1..19: mol_type = other RNA
taaaccatacactgcaatc

SEQ ID NO: 59454 - RNA, 19 nt, synthetic construct
  misc_feature 1..19: note = siRNA sense sequence
  source 1..19: mol_type = other RNA
attgcagtgtatggtttag

SEQ ID NO: 59455 - RNA, 19 nt, synthetic construct
  misc_feature 1..19: note = siRNA antisense sequence
  source 1..19: mol_type = other RNA
ctaaaccatacactgcaat

SEQ ID NO: 59456 - RNA, 19 nt, synthetic construct
  misc_feature 1..19: note = siRNA sense sequence
  source 1..19: mol_type = other RNA
ttgcagtgtatggtttagg

SEQ ID NO: 59457 - RNA, 19 nt, synthetic construct
  misc_feature 1..19: note = siRNA antisense sequence
  source 1..19: mol_type = other RNA
cctaaaccatacactgcaa

SEQ ID NO: 59458 - RNA, 19 nt, synthetic construct
  misc_feature 1..19: note = siRNA sense sequence
  source 1..19: mol_type = other RNA
tgcagtgtatggtttaggt

SEQ ID NO: 59459 - RNA, 19 nt, synthetic construct
  misc_feature 1..19: note = siRNA antisense sequence
  source 1..19: mol_type = other RNA
acctaaaccatacactgca

SEQ ID NO: 59460 - RNA, 19 nt, synthetic construct
  misc_feature 1..19: note = siRNA sense sequence
  source 1..19: mol_type = other RNA
gcagtgtatggtttaggta

SEQ ID NO: 59461 - RNA, 19 nt, synthetic construct
  misc_feature 1..19: note = siRNA antisense sequence
  source 1..19: mol_type = other RNA
tacctaaaccatacactgc

SEQ ID NO: 59462 - RNA, 19 nt, synthetic construct
  misc_feature 1..19: note = siRNA sense sequence
  source 1..19: mol_type = other RNA
taggtataaagggtgtcct

SEQ ID NO: 59463 - RNA, 19 nt, synthetic construct
  misc_feature 1..19: note = siRNA antisense sequence
  source 1..19: mol_type = other RNA
aggacaccctttataccta

SEQ ID NO: 59464 - RNA, 19 nt, synthetic construct
  misc_feature 1..19: note = siRNA sense sequence
  source 1..19: mol_type = other RNA
aggtataaagggtgtcctc

SEQ ID NO: 59465 - RNA, 19 nt, synthetic construct
  misc_feature 1..19: note = siRNA antisense sequence
  source 1..19: mol_type = other RNA
gaggacaccctttatacct

SEQ ID NO: 59466 - RNA, 19 nt, synthetic construct
  misc_feature 1..19: note = siRNA sense sequence
  source 1..19: mol_type = other RNA
ctgaagcatggacttagac

SEQ ID NO: 59467 - RNA, 19 nt, synthetic construct
  misc_feature 1..19: note = siRNA antisense sequence
  source 1..19: mol_type = other RNA
gtctaagtccatgcttcag

SEQ ID NO: 59468 - RNA, 19 nt, synthetic construct
  misc_feature 1..19: note = siRNA sense sequence
  source 1..19: mol_type = other RNA
tgaagcatggacttagacc

SEQ ID NO: 59469 - RNA, 19 nt, synthetic construct
  misc_feature 1..19: note = siRNA antisense sequence
  source 1..19: mol_type = other RNA
ggtctaagtccatgcttca

SEQ ID NO: 59470 - RNA, 19 nt, synthetic construct
  misc_feature 1..19: note = siRNA sense sequence
  source 1..19: mol_type = other RNA
gaagcatggacttagacca

SEQ ID NO: 59471 - RNA, 19 nt, synthetic construct
  misc_feature 1..19: note = siRNA antisense sequence
  source 1..19: mol_type = other RNA
tggtctaagtccatgcttc

SEQ ID NO: 59472 - RNA, 19 nt, synthetic construct
  misc_feature 1..19: note = siRNA sense sequence
  source 1..19: mol_type = other RNA
aagcatggacttagaccac

SEQ ID NO: 59473 - RNA, 19 nt, synthetic construct
  misc_feature 1..19: note = siRNA antisense sequence
  source 1..19: mol_type = other RNA
gtggtctaagtccatgctt

SEQ ID NO: 59474 - RNA, 19 nt, synthetic construct
  misc_feature 1..19: note = siRNA sense sequence
  source 1..19: mol_type = other RNA
atggacttagaccaccagt

SEQ ID NO: 59475 - RNA, 19 nt, synthetic construct
  misc_feature 1..19: note = siRNA antisense sequence
  source 1..19: mol_type = other RNA
actggtggtctaagtccat

SEQ ID NO: 59476 - RNA, 19 nt, synthetic construct
  misc_feature 1..19: note = siRNA sense sequence
  source 1..19: mol_type = other RNA
tggacttagaccaccagta

SEQ ID NO: 59477 - RNA, 19 nt, synthetic construct
  misc_feature 1..19: note = siRNA antisense sequence
  source 1..19: mol_type = other RNA
tactggtggtctaagtcca

SEQ ID NO: 59478 - RNA, 19 nt, synthetic construct
  misc_feature 1..19: note = siRNA sense sequence
  source 1..19: mol_type = other RNA
ggacttagaccaccagtaa

SEQ ID NO: 59479 - RNA, 19 nt, synthetic construct
  misc_feature 1..19: note = siRNA antisense sequence
  source 1..19: mol_type = other RNA
ttactggtggtctaagtcc

SEQ ID NO: 59480 - RNA, 19 nt, synthetic construct
  misc_feature 1..19: note = siRNA sense sequence
  source 1..19: mol_type = other RNA
gacttagaccaccagtaac

SEQ ID NO: 59481 - RNA, 19 nt, synthetic construct
  misc_feature 1..19: note = siRNA antisense sequence
  source 1..19: mol_type = other RNA
gttactggtggtctaagtc

SEQ ID NO: 59482 - RNA, 19 nt, synthetic construct
  misc_feature 1..19: note = siRNA sense sequence
  source 1..19: mol_type = other RNA
accaccagtaaccacctag

SEQ ID NO: 59483 - RNA, 19 nt, synthetic construct
  misc_feature 1..19: note = siRNA antisense sequence
  source 1..19: mol_type = other RNA
ctaggtggttactggtggt

SEQ ID NO: 59484 - RNA, 19 nt, synthetic construct
  misc_feature 1..19: note = siRNA sense sequence
  source 1..19: mol_type = other RNA
ccaccagtaaccacctagg

SEQ ID NO: 59485 - RNA, 19 nt, synthetic construct
  misc_feature 1..19: note = siRNA antisense sequence
  source 1..19: mol_type = other RNA
cctaggtggttactggtgg

SEQ ID NO: 59486 - RNA, 19 nt, synthetic construct
  misc_feature 1..19: note = siRNA sense sequence
  source 1..19: mol_type = other RNA
caccagtaaccacctaggt

SEQ ID NO: 59487 - RNA, 19 nt, synthetic construct
  misc_feature 1..19: note = siRNA antisense sequence
  source 1..19: mol_type = other RNA
acctaggtggttactggtg

SEQ ID NO: 59488 - RNA, 19 nt, synthetic construct
  misc_feature 1..19: note = siRNA sense sequence
  source 1..19: mol_type = other RNA
accagtaaccacctaggtc

SEQ ID NO: 59489 - RNA, 19 nt, synthetic construct
  misc_feature 1..19: note = siRNA antisense sequence
  source 1..19: mol_type = other RNA
gacctaggtggttactggt

SEQ ID NO: 59490 - RNA, 19 nt, synthetic construct
  misc_feature 1..19: note = siRNA sense sequence
  source 1..19: mol_type = other RNA
gtaaccacctaggtcatca

SEQ ID NO: 59491 - RNA, 19 nt, synthetic construct
  misc_feature 1..19: note = siRNA antisense sequence
  source 1..19: mol_type = other RNA
tgatgacctaggtggttac

SEQ ID NO: 59492 - RNA, 19 nt, synthetic construct
  misc_feature 1..19: note = siRNA sense sequence
  source 1..19: mol_type = other RNA
agtgctgatccatctctgt

SEQ ID NO: 59493 - RNA, 19 nt, synthetic construct
  misc_feature 1..19: note = siRNA antisense sequence
  source 1..19: mol_type = other RNA
acagagatggatcagcact

SEQ ID NO: 59494 - RNA, 19 nt, synthetic construct
  misc_feature 1..19: note = siRNA sense sequence
  source 1..19: mol_type = other RNA
gtgctgatccatctctgtc

SEQ ID NO: 59495 - RNA, 19 nt, synthetic construct
  misc_feature 1..19: note = siRNA antisense sequence
  source 1..19: mol_type = other RNA
gacagagatggatcagcac

SEQ ID NO: 59496 - RNA, 19 nt, synthetic construct
  misc_feature 1..19: note = siRNA sense sequence
  source 1..19: mol_type = other RNA
tgctgatccatctctgtcc

SEQ ID NO: 59497 - RNA, 19 nt, synthetic construct
  misc_feature 1..19: note = siRNA antisense sequence
  source 1..19: mol_type = other RNA
ggacagagatggatcagca

SEQ ID NO: 59498 - RNA, 19 nt, synthetic construct
  misc_feature 1..19: note = siRNA sense sequence
  source 1..19: mol_type = other RNA
gctgatccatctctgtcct

SEQ ID NO: 59499 - RNA, 19 nt, synthetic construct
  misc_feature 1..19: note = siRNA antisense sequence
  source 1..19: mol_type = other RNA
aggacagagatggatcagc

SEQ ID NO: 59500 - RNA, 19 nt, synthetic construct
  misc_feature 1..19: note = siRNA sense sequence
  source 1..19: mol_type = other RNA
ctgatccatctctgtcctt

SEQ ID NO: 59501 - RNA, 19 nt, synthetic construct
  misc_feature 1..19: note = siRNA antisense sequence
  source 1..19: mol_type = other RNA
aaggacagagatggatcag

SEQ ID NO: 59502 - RNA, 19 nt, synthetic construct
  misc_feature 1..19: note = siRNA sense sequence
  source 1..19: mol_type = other RNA
tgatccatctctgtccttc

SEQ ID NO: 59503 - RNA, 19 nt, synthetic construct
  misc_feature 1..19: note = siRNA antisense sequence
  source 1..19: mol_type = other RNA
gaaggacagagatggatca

SEQ ID NO: 59504 - RNA, 19 nt, synthetic construct
  misc_feature 1..19: note = siRNA sense sequence
  source 1..19: mol_type = other RNA
gatccatctctgtccttct

SEQ ID NO: 59505 - RNA, 19 nt, synthetic construct
  misc_feature 1..19: note = siRNA antisense sequence
  source 1..19: mol_type = other RNA
agaaggacagagatggatc

SEQ ID NO: 59506 - RNA, 19 nt, synthetic construct
  misc_feature 1..19: note = siRNA sense sequence
  source 1..19: mol_type = other RNA
tctctgtccttcttcatgg

SEQ ID NO: 59507 - RNA, 19 nt, synthetic construct
  misc_feature 1..19: note = siRNA antisense sequence
  source 1..19: mol_type = other RNA
ccatgaagaaggacagaga

SEQ ID NO: 59508 - RNA, 19 nt, synthetic construct
  misc_feature 1..19: note = siRNA sense sequence
  source 1..19: mol_type = other RNA
tcatggagcccaccttgta

SEQ ID NO: 59509 - RNA, 19 nt, synthetic construct
  misc_feature 1..19: note = siRNA antisense sequence
  source 1..19: mol_type = other RNA
tacaaggtgggctccatga

SEQ ID NO: 59510 - RNA, 19 nt, synthetic construct
  misc_feature 1..19: note = siRNA sense sequence
  source 1..19: mol_type = other RNA
catggagcccaccttgtaa

SEQ ID NO: 59511 - RNA, 19 nt, synthetic construct
  misc_feature 1..19: note = siRNA antisense sequence
  source 1..19: mol_type = other RNA
ttacaaggtgggctccatg

SEQ ID NO: 59512 - RNA, 19 nt, synthetic construct
  misc_feature 1..19: note = siRNA sense sequence
  source 1..19: mol_type = other RNA
atggagcccaccttgtaaa

SEQ ID NO: 59513 - RNA, 19 nt, synthetic construct
  misc_feature 1..19: note = siRNA antisense sequence
  source 1..19: mol_type = other RNA
tttacaaggtgggctccat

SEQ ID NO: 59514 - RNA, 19 nt, synthetic construct
  misc_feature 1..19: note = siRNA sense sequence
  source 1..19: mol_type = other RNA
tggagcccaccttgtaaaa

SEQ ID NO: 59515 - RNA, 19 nt, synthetic construct
  misc_feature 1..19: note = siRNA antisense sequence
  source 1..19: mol_type = other RNA
ttttacaaggtgggctcca

SEQ ID NO: 59516 - RNA, 19 nt, synthetic construct
  misc_feature 1..19: note = siRNA sense sequence
  source 1..19: mol_type = other RNA
acttgtcaaatggagtaga

SEQ ID NO: 59517 - RNA, 19 nt, synthetic construct
  misc_feature 1..19: note = siRNA antisense sequence
  source 1..19: mol_type = other RNA
tctactccatttgacaagt

SEQ ID NO: 59518 - RNA, 19 nt, synthetic construct
  misc_feature 1..19: note = siRNA sense sequence
  source 1..19: mol_type = other RNA
cttgtcaaatggagtagag

SEQ ID NO: 59519 - RNA, 19 nt, synthetic construct
  misc_feature 1..19: note = siRNA antisense sequence
  source 1..19: mol_type = other RNA
ctctactccatttgacaag

SEQ ID NO: 59520 - RNA, 19 nt, synthetic construct
  misc_feature 1..19: note = siRNA sense sequence
  source 1..19: mol_type = other RNA
caaatggagtagagccaaa

SEQ ID NO: 59521 - RNA, 19 nt, synthetic construct
  misc_feature 1..19: note = siRNA antisense sequence
  source 1..19: mol_type = other RNA
tttggctctactccatttg

SEQ ID NO: 59522 - RNA, 19 nt, synthetic construct
  misc_feature 1..19: note = siRNA sense sequence
  source 1..19: mol_type = other RNA
aaatggagtagagccaaat

SEQ ID NO: 59523 - RNA, 19 nt, synthetic construct
  misc_feature 1..19: note = siRNA antisense sequence
  source 1..19: mol_type = other RNA
atttggctctactccattt

SEQ ID NO: 59524 - RNA, 19 nt, synthetic construct
  misc_feature 1..19: note = siRNA sense sequence
  source 1..19: mol_type = other RNA
aatggagtagagccaaatg

SEQ ID NO: 59525 - RNA, 19 nt, synthetic construct
  misc_feature 1..19: note = siRNA antisense sequence
  source 1..19: mol_type = other RNA
catttggctctactccatt

SEQ ID NO: 59526 - RNA, 19 nt, synthetic construct
  misc_feature 1..19: note = siRNA sense sequence
  source 1..19: mol_type = other RNA
atggagtagagccaaatgt

SEQ ID NO: 59527 - RNA, 19 nt, synthetic construct
  misc_feature 1..19: note = siRNA antisense sequence
  source 1..19: mol_type = other RNA
acatttggctctactccat

SEQ ID NO: 59528 - RNA, 19 nt, synthetic construct
  misc_feature 1..19: note = siRNA sense sequence
  source 1..19: mol_type = other RNA
tggagtagagccaaatgtg

SEQ ID NO: 59529 - RNA, 19 nt, synthetic construct
  misc_feature 1..19: note = siRNA antisense sequence
  source 1..19: mol_type = other RNA
cacatttggctctactcca

SEQ ID NO: 59530 - RNA, 19 nt, synthetic construct
  misc_feature 1..19: note = siRNA sense sequence
  source 1..19: mol_type = other RNA
ggagtagagccaaatgtgt

SEQ ID NO: 59531 - RNA, 19 nt, synthetic construct
  misc_feature 1..19: note = siRNA antisense sequence
  source 1..19: mol_type = other RNA
acacatttggctctactcc

SEQ ID NO: 59532 - RNA, 19 nt, synthetic construct
  misc_feature 1..19: note = siRNA sense sequence
  source 1..19: mol_type = other RNA
gagtagagccaaatgtgtg

SEQ ID NO: 59533 - RNA, 19 nt, synthetic construct
  misc_feature 1..19: note = siRNA antisense sequence
  source 1..19: mol_type = other RNA
cacacatttggctctactc

SEQ ID NO: 59534 - RNA, 19 nt, synthetic construct
  misc_feature 1..19: note = siRNA sense sequence
  source 1..19: mol_type = other RNA
agtagagccaaatgtgtgc

SEQ ID NO: 59535 - RNA, 19 nt, synthetic construct
  misc_feature 1..19: note = siRNA antisense sequence
  source 1..19: mol_type = other RNA
gcacacatttggctctact

SEQ ID NO: 59536 - RNA, 19 nt, synthetic construct
  misc_feature 1..19: note = siRNA sense sequence
  source 1..19: mol_type = other RNA
gtagagccaaatgtgtgct

SEQ ID NO: 59537 - RNA, 19 nt, synthetic construct
  misc_feature 1..19: note = siRNA antisense sequence
  source 1..19: mol_type = other RNA
agcacacatttggctctac

SEQ ID NO: 59538 - RNA, 19 nt, synthetic construct
  misc_feature 1..19: note = siRNA sense sequence
  source 1..19: mol_type = other RNA
tagagccaaatgtgtgctt

SEQ ID NO: 59539 - RNA, 19 nt, synthetic construct
  misc_feature 1..19: note = siRNA antisense sequence
  source 1..19: mol_type = other RNA
aagcacacatttggctcta

SEQ ID NO: 59540 - RNA, 19 nt, synthetic construct
  misc_feature 1..19: note = siRNA sense sequence
  source 1..19: mol_type = other RNA
agagccaaatgtgtgcttc

SEQ ID NO: 59541 - RNA, 19 nt, synthetic construct
  misc_feature 1..19: note = siRNA antisense sequence
  source 1..19: mol_type = other RNA
gaagcacacatttggctct

SEQ ID NO: 59542 - RNA, 19 nt, synthetic construct
  misc_feature 1..19: note = siRNA sense sequence
  source 1..19: mol_type = other RNA
gagccaaatgtgtgcttcc

SEQ ID NO: 59543 - RNA, 19 nt, synthetic construct
  misc_feature 1..19: note = siRNA antisense sequence
  source 1..19: mol_type = other RNA
ggaagcacacatttggctc

SEQ ID NO: 59544 - RNA, 19 nt, synthetic construct
  misc_feature 1..19: note = siRNA sense sequence
  source 1..19: mol_type = other RNA
agccaaatgtgtgcttcct

SEQ ID NO: 59545 - RNA, 19 nt, synthetic construct
  misc_feature 1..19: note = siRNA antisense sequence
  source 1..19: mol_type = other RNA
aggaagcacacatttggct

SEQ ID NO: 59546 - RNA, 19 nt, synthetic construct
  misc_feature 1..19: note = siRNA sense sequence
  source 1..19: mol_type = other RNA
aaatgtgtgcttcctgtgg

SEQ ID NO: 59547 - RNA, 19 nt, synthetic construct
  misc_feature 1..19: note = siRNA antisense sequence
  source 1..19: mol_type = other RNA
ccacaggaagcacacattt

SEQ ID NO: 59548 - RNA, 19 nt, synthetic construct
  misc_feature 1..19: note = siRNA sense sequence
  source 1..19: mol_type = other RNA
atgtgtgcttcctgtgggt

SEQ ID NO: 59549 - RNA, 19 nt, synthetic construct
  misc_feature 1..19: note = siRNA antisense sequence
  source 1..19: mol_type = other RNA
acccacaggaagcacacat

SEQ ID NO: 59550 - RNA, 19 nt, synthetic construct
  misc_feature 1..19: note = siRNA sense sequence
  source 1..19: mol_type = other RNA
tgtgtgcttcctgtgggta

SEQ ID NO: 59551 - RNA, 19 nt, synthetic construct
  misc_feature 1..19: note = siRNA antisense sequence
  source 1..19: mol_type = other RNA
tacccacaggaagcacaca

SEQ ID NO: 59552 - RNA, 19 nt, synthetic construct
  misc_feature 1..19: note = siRNA sense sequence
  source 1..19: mol_type = other RNA
gtgtgcttcctgtgggtac

SEQ ID NO: 59553 - RNA, 19 nt, synthetic construct
  misc_feature 1..19: note = siRNA antisense sequence
  source 1..19: mol_type = other RNA
gtacccacaggaagcacac

SEQ ID NO: 59554 - RNA, 19 nt, synthetic construct
  misc_feature 1..19: note = siRNA sense sequence
  source 1..19: mol_type = other RNA
tgtgcttcctgtgggtaca

SEQ ID NO: 59555 - RNA, 19 nt, synthetic construct
  misc_feature 1..19: note = siRNA antisense sequence
  source 1..19: mol_type = other RNA
tgtacccacaggaagcaca

SEQ ID NO: 59556 - RNA, 19 nt, synthetic construct
  misc_feature 1..19: note = siRNA sense sequence
  source 1..19: mol_type = other RNA
tgtgggtacagctgctctg

SEQ ID NO: 59557 - RNA, 19 nt, synthetic construct
  misc_feature 1..19: note = siRNA antisense sequence
  source 1..19: mol_type = other RNA
cagagcagctgtacccaca

SEQ ID NO: 59558 - RNA, 19 nt, synthetic construct
  misc_feature 1..19: note = siRNA sense sequence
  source 1..19: mol_type = other RNA
gtgggtacagctgctctga

SEQ ID NO: 59559 - RNA, 19 nt, synthetic construct
  misc_feature 1..19: note = siRNA antisense sequence
  source 1..19: mol_type = other RNA
tcagagcagctgtacccac

SEQ ID NO: 59560 - RNA, 19 nt, synthetic construct
  misc_feature 1..19: note = siRNA sense sequence
  source 1..19: mol_type = other RNA
tgggtacagctgctctgag

SEQ ID NO: 59561 - RNA, 19 nt, synthetic construct
  misc_feature 1..19: note = siRNA antisense sequence
  source 1..19: mol_type = other RNA
ctcagagcagctgtaccca

SEQ ID NO: 59562 - RNA, 19 nt, synthetic construct
  misc_feature 1..19: note = siRNA sense sequence
  source 1..19: mol_type = other RNA
aaagggactgagttgtgtt

SEQ ID NO: 59563 - RNA, 19 nt, synthetic construct
  misc_feature 1..19: note = siRNA antisense sequence
  source 1..19: mol_type = other RNA
aacacaactcagtcccttt

SEQ ID NO: 59564 - RNA, 19 nt, synthetic construct
  misc_feature 1..19: note = siRNA sense sequence
  source 1..19: mol_type = other RNA
agggactgagttgtgttca

SEQ ID NO: 59565 - RNA, 19 nt, synthetic construct
  misc_feature 1..19: note = siRNA antisense sequence
  source 1..19: mol_type = other RNA
tgaacacaactcagtccct

SEQ ID NO: 59566 - RNA, 19 nt, synthetic construct
  misc_feature 1..19: note = siRNA sense sequence
  source 1..19: mol_type = other RNA
gggactgagttgtgttcac

SEQ ID NO: 59567 - RNA, 19 nt, synthetic construct
  misc_feature 1..19: note = siRNA antisense sequence
  source 1..19: mol_type = other RNA
gtgaacacaactcagtccc

SEQ ID NO: 59568 - RNA, 19 nt, synthetic construct
  misc_feature 1..19: note = siRNA sense sequence
  source 1..19: mol_type = other RNA
ggactgagttgtgttcact

SEQ ID NO: 59569 - RNA, 19 nt, synthetic construct
  misc_feature 1..19: note = siRNA antisense sequence
  source 1..19: mol_type = other RNA
agtgaacacaactcagtcc

SEQ ID NO: 59570 - RNA, 19 nt, synthetic construct
  misc_feature 1..19: note = siRNA sense sequence
  source 1..19: mol_type = other RNA
gactgagttgtgttcactt

SEQ ID NO: 59571 - RNA, 19 nt, synthetic construct
  misc_feature 1..19: note = siRNA antisense sequence
  source 1..19: mol_type = other RNA
aagtgaacacaactcagtc

SEQ ID NO: 59572 - RNA, 19 nt, synthetic construct
  misc_feature 1..19: note = siRNA sense sequence
  source 1..19: mol_type = other RNA
actgagttgtgttcactta

SEQ ID NO: 59573 - RNA, 19 nt, synthetic construct
  misc_feature 1..19: note = siRNA antisense sequence
  source 1..19: mol_type = other RNA
taagtgaacacaactcagt

SEQ ID NO: 59574 - RNA, 19 nt, synthetic construct
  misc_feature 1..19: note = siRNA sense sequence
  source 1..19: mol_type = other RNA
ctgagttgtgttcacttag

SEQ ID NO: 59575 - RNA, 19 nt, synthetic construct
  misc_feature 1..19: note = siRNA antisense sequence
  source 1..19: mol_type = other RNA
ctaagtgaacacaactcag

SEQ ID NO: 59576 - RNA, 19 nt, synthetic construct
  misc_feature 1..19: note = siRNA sense sequence
  source 1..19: mol_type = other RNA
tgagttgtgttcacttagt

SEQ ID NO: 59577 - RNA, 19 nt, synthetic construct
  misc_feature 1..19: note = siRNA antisense sequence
  source 1..19: mol_type = other RNA
actaagtgaacacaactca

SEQ ID NO: 59578 - RNA, 19 nt, synthetic construct
  misc_feature 1..19: note = siRNA sense sequence
  source 1..19: mol_type = other RNA
gagttgtgttcacttagtt

SEQ ID NO: 59579 - RNA, 19 nt, synthetic construct
  misc_feature 1..19: note = siRNA antisense sequence
  source 1..19: mol_type = other RNA
aactaagtgaacacaactc

SEQ ID NO: 59580 - RNA, 19 nt, synthetic construct
  misc_feature 1..19: note = siRNA sense sequence
  source 1..19: mol_type = other RNA
agttgtgttcacttagttc

SEQ ID NO: 59581 - RNA, 19 nt, synthetic construct
  misc_feature 1..19: note = siRNA antisense sequence
  source 1..19: mol_type = other RNA
gaactaagtgaacacaact

SEQ ID NO: 59582 - RNA, 19 nt, synthetic construct
  misc_feature 1..19: note = siRNA sense sequence
  source 1..19: mol_type = other RNA
gttgtgttcacttagttcc

SEQ ID NO: 59583 - RNA, 19 nt, synthetic construct
  misc_feature 1..19: note = siRNA antisense sequence
  source 1..19: mol_type = other RNA
ggaactaagtgaacacaac

SEQ ID NO: 59584 - RNA, 19 nt, synthetic construct
  misc_feature 1..19: note = siRNA sense sequence
  source 1..19: mol_type = other RNA
gttcacttagttcctgttc

SEQ ID NO: 59585 - RNA, 19 nt, synthetic construct
  misc_feature 1..19: note = siRNA antisense sequence
  source 1..19: mol_type = other RNA
gaacaggaactaagtgaac

SEQ ID NO: 59586 - RNA, 19 nt, synthetic construct
  misc_feature 1..19: note = siRNA sense sequence
  source 1..19: mol_type = other RNA
ttcacttagttcctgttcc

SEQ ID NO: 59587 - RNA, 19 nt, synthetic construct
  misc_feature 1..19: note = siRNA antisense sequence
  source 1..19: mol_type = other RNA
ggaacaggaactaagtgaa

SEQ ID NO: 59588 - RNA, 19 nt, synthetic construct
  misc_feature 1..19: note = siRNA sense sequence
  source 1..19: mol_type = other RNA
cttagttcctgttcccaaa

SEQ ID NO: 59589 - RNA, 19 nt, synthetic construct
  misc_feature 1..19: note = siRNA antisense sequence
  source 1..19: mol_type = other RNA
tttgggaacaggaactaag

SEQ ID NO: 59590 - RNA, 19 nt, synthetic construct
  misc_feature 1..19: note = siRNA sense sequence
  source 1..19: mol_type = other RNA
gttcctgttcccaaagtta

SEQ ID NO: 59591 - RNA, 19 nt, synthetic construct
  misc_feature 1..19: note = siRNA antisense sequence
  source 1..19: mol_type = other RNA
taactttgggaacaggaac

SEQ ID NO: 59592 - RNA, 19 nt, synthetic construct
  misc_feature 1..19: note = siRNA sense sequence
  source 1..19: mol_type = other RNA
ttcctgttcccaaagttag

SEQ ID NO: 59593 - RNA, 19 nt, synthetic construct
  misc_feature 1..19: note = siRNA antisense sequence
  source 1..19: mol_type = other RNA
ctaactttgggaacaggaa

SEQ ID NO: 59594 - RNA, 19 nt, synthetic construct
  misc_feature 1..19: note = siRNA sense sequence
  source 1..19: mol_type = other RNA
tcctgttcccaaagttaga

SEQ ID NO: 59595 - RNA, 19 nt, synthetic construct
  misc_feature 1..19: note = siRNA antisense sequence
  source 1..19: mol_type = other RNA
tctaactttgggaacagga

SEQ ID NO: 59596 - RNA, 19 nt, synthetic construct
  misc_feature 1..19: note = siRNA sense sequence
  source 1..19: mol_type = other RNA
cctgttcccaaagttagag

SEQ ID NO: 59597 - RNA, 19 nt, synthetic construct
  misc_feature 1..19: note = siRNA antisense sequence
  source 1..19: mol_type = other RNA
ctctaactttgggaacagg

SEQ ID NO: 59598 - RNA, 19 nt, synthetic construct
  misc_feature 1..19: note = siRNA sense sequence
  source 1..19: mol_type = other RNA
tgttcccaaagttagagtc

SEQ ID NO: 59599 - RNA, 19 nt, synthetic construct
  misc_feature 1..19: note = siRNA antisense sequence
  source 1..19: mol_type = other RNA
gactctaactttgggaaca

SEQ ID NO: 59600 - RNA, 19 nt, synthetic construct
  misc_feature 1..19: note = siRNA sense sequence
  source 1..19: mol_type = other RNA
gttcccaaagttagagtcc

SEQ ID NO: 59601 - RNA, 19 nt, synthetic construct
  misc_feature 1..19: note = siRNA antisense sequence
  source 1..19: mol_type = other RNA
ggactctaactttgggaac

SEQ ID NO: 59602 - RNA, 19 nt, synthetic construct
  misc_feature 1..19: note = siRNA sense sequence
  source 1..19: mol_type = other RNA
ttcccaaagttagagtcca

SEQ ID NO: 59603 - RNA, 19 nt, synthetic construct
  misc_feature 1..19: note = siRNA antisense sequence
  source 1..19: mol_type = other RNA
tggactctaactttgggaa

SEQ ID NO: 59604 - RNA, 19 nt, synthetic construct
  misc_feature 1..19: note = siRNA sense sequence
  source 1..19: mol_type = other RNA
tcccaaagttagagtccat

SEQ ID NO: 59605 - RNA, 19 nt, synthetic construct
  misc_feature 1..19: note = siRNA antisense sequence
  source 1..19: mol_type = other RNA
atggactctaactttggga

SEQ ID NO: 59606 - RNA, 19 nt, synthetic construct
  misc_feature 1..19: note = siRNA sense sequence
  source 1..19: mol_type = other RNA
aaagttagagtccatgtgc

SEQ ID NO: 59607 - RNA, 19 nt, synthetic construct
  misc_feature 1..19: note = siRNA antisense sequence
  source 1..19: mol_type = other RNA
gcacatggactctaacttt

SEQ ID NO: 59608 - RNA, 19 nt, synthetic construct
  misc_feature 1..19: note = siRNA sense sequence
  source 1..19: mol_type = other RNA
aagttagagtccatgtgcc

SEQ ID NO: 59609 - RNA, 19 nt, synthetic construct
  misc_feature 1..19: note = siRNA antisense sequence
  source 1..19: mol_type = other RNA
ggcacatggactctaactt

SEQ ID NO: 59610 - RNA, 19 nt, synthetic construct
  misc_feature 1..19: note = siRNA sense sequence
  source 1..19: mol_type = other RNA
agttagagtccatgtgcca

SEQ ID NO: 59611 - RNA, 19 nt, synthetic construct
  misc_feature 1..19: note = siRNA antisense sequence
  source 1..19: mol_type = other RNA
tggcacatggactctaact

SEQ ID NO: 59612 - RNA, 19 nt, synthetic construct
  misc_feature 1..19: note = siRNA sense sequence
  source 1..19: mol_type = other RNA
gttagagtccatgtgccac

SEQ ID NO: 59613 - RNA, 19 nt, synthetic construct
  misc_feature 1..19: note = siRNA antisense sequence
  source 1..19: mol_type = other RNA
gtggcacatggactctaac

SEQ ID NO: 59614 - RNA, 19 nt, synthetic construct
  misc_feature 1..19: note = siRNA sense sequence
  source 1..19: mol_type = other RNA
ttagagtccatgtgccacc

SEQ ID NO: 59615 - RNA, 19 nt, synthetic construct
  misc_feature 1..19: note = siRNA antisense sequence
  source 1..19: mol_type = other RNA
ggtggcacatggactctaa

SEQ ID NO: 59616 - RNA, 19 nt, synthetic construct
  misc_feature 1..19: note = siRNA sense sequence
  source 1..19: mol_type = other RNA
agagggagggtgtcactag

SEQ ID NO: 59617 - RNA, 19 nt, synthetic construct
  misc_feature 1..19: note = siRNA antisense sequence
  source 1..19: mol_type = other RNA
ctagtgacaccctccctct

SEQ ID NO: 59618 - RNA, 19 nt, synthetic construct
  misc_feature 1..19: note = siRNA sense sequence
  source 1..19: mol_type = other RNA
gagggagggtgtcactagc

SEQ ID NO: 59619 - RNA, 19 nt, synthetic construct
  misc_feature 1..19: note = siRNA antisense sequence
  source 1..19: mol_type = other RNA
gctagtgacaccctccctc

SEQ ID NO: 59620 - RNA, 19 nt, synthetic construct
  misc_feature 1..19: note = siRNA sense sequence
  source 1..19: mol_type = other RNA
agggagggtgtcactagcg

SEQ ID NO: 59621 - RNA, 19 nt, synthetic construct
  misc_feature 1..19: note = siRNA antisense sequence
  source 1..19: mol_type = other RNA
cgctagtgacaccctccct

SEQ ID NO: 59622 - RNA, 19 nt, synthetic construct
  misc_feature 1..19: note = siRNA sense sequence
  source 1..19: mol_type = other RNA
gggagggtgtcactagcgt

SEQ ID NO: 59623 - RNA, 19 nt, synthetic construct
  misc_feature 1..19: note = siRNA antisense sequence
  source 1..19: mol_type = other RNA
acgctagtgacaccctccc

SEQ ID NO: 59624 - RNA, 19 nt, synthetic construct
  misc_feature 1..19: note = siRNA sense sequence
  source 1..19: mol_type = other RNA
ggagggtgtcactagcgtg

SEQ ID NO: 59625 - RNA, 19 nt, synthetic construct
  misc_feature 1..19: note = siRNA antisense sequence
  source 1..19: mol_type = other RNA
cacgctagtgacaccctcc

SEQ ID NO: 59626 - RNA, 19 nt, synthetic construct
  misc_feature 1..19: note = siRNA sense sequence
  source 1..19: mol_type = other RNA
gagggtgtcactagcgtgg

SEQ ID NO: 59627 - RNA, 19 nt, synthetic construct
  misc_feature 1..19: note = siRNA antisense sequence
  source 1..19: mol_type = other RNA
ccacgctagtgacaccctc

SEQ ID NO: 59628 - RNA, 19 nt, synthetic construct
  misc_feature 1..19: note = siRNA sense sequence
  source 1..19: mol_type = other RNA
agggtgtcactagcgtggc

SEQ ID NO: 59629 - RNA, 19 nt, synthetic construct
  misc_feature 1..19: note = siRNA antisense sequence
  source 1..19: mol_type = other RNA
gccacgctagtgacaccct

SEQ ID NO: 59630 - RNA, 19 nt, synthetic construct
  misc_feature 1..19: note = siRNA sense sequence
  source 1..19: mol_type = other RNA
gggtgtcactagcgtggct

SEQ ID NO: 59631 - RNA, 19 nt, synthetic construct
  misc_feature 1..19: note = siRNA antisense sequence
  source 1..19: mol_type = other RNA
agccacgctagtgacaccc

SEQ ID NO: 59632 - RNA, 19 nt, synthetic construct
  misc_feature 1..19: note = siRNA sense sequence
  source 1..19: mol_type = other RNA
ggtgtcactagcgtggctc

SEQ ID NO: 59633 - RNA, 19 nt, synthetic construct
  misc_feature 1..19: note = siRNA antisense sequence
  source 1..19: mol_type = other RNA
gagccacgctagtgacacc

SEQ ID NO: 59634 - RNA, 19 nt, synthetic construct
  misc_feature 1..19: note = siRNA sense sequence
  source 1..19: mol_type = other RNA
tcactagcgtggctccaat

SEQ ID NO: 59635 - RNA, 19 nt, synthetic construct
  misc_feature 1..19: note = siRNA antisense sequence
  source 1..19: mol_type = other RNA
attggagccacgctagtga

SEQ ID NO: 59636 - RNA, 19 nt, synthetic construct
  misc_feature 1..19: note = siRNA sense sequence
  source 1..19: mol_type = other RNA
cactagcgtggctccaatg

SEQ ID NO: 59637 - RNA, 19 nt, synthetic construct
  misc_feature 1..19: note = siRNA antisense sequence
  source 1..19: mol_type = other RNA
cattggagccacgctagtg

SEQ ID NO: 59638 - RNA, 19 nt, synthetic construct
  misc_feature 1..19: note = siRNA sense sequence
  source 1..19: mol_type = other RNA
actagcgtggctccaatgg

SEQ ID NO: 59639 - RNA, 19 nt, synthetic construct
  misc_feature 1..19: note = siRNA antisense sequence
  source 1..19: mol_type = other RNA
ccattggagccacgctagt

SEQ ID NO: 59640 - RNA, 19 nt, synthetic construct
  misc_feature 1..19: note = siRNA sense sequence
  source 1..19: mol_type = other RNA
ctagcgtggctccaatgga

SEQ ID NO: 59641 - RNA, 19 nt, synthetic construct
  misc_feature 1..19: note = siRNA antisense sequence
  source 1..19: mol_type = other RNA
tccattggagccacgctag

SEQ ID NO: 59642 - RNA, 19 nt, synthetic construct
  misc_feature 1..19: note = siRNA sense sequence
  source 1..19: mol_type = other RNA
tagcgtggctccaatggaa

SEQ ID NO: 59643 - RNA, 19 nt, synthetic construct
  misc_feature 1..19: note = siRNA antisense sequence
  source 1..19: mol_type = other RNA
ttccattggagccacgcta

SEQ ID NO: 59644 - RNA, 19 nt, synthetic construct
  misc_feature 1..19: note = siRNA sense sequence
  source 1..19: mol_type = other RNA
agcgtggctccaatggaag

SEQ ID NO: 59645 - RNA, 19 nt, synthetic construct
  misc_feature 1..19: note = siRNA antisense sequence
  source 1..19: mol_type = other RNA
cttccattggagccacgct

SEQ ID NO: 59646 - RNA, 19 nt, synthetic construct
  misc_feature 1..19: note = siRNA sense sequence
  source 1..19: mol_type = other RNA
gcgtggctccaatggaaga

SEQ ID NO: 59647 - RNA, 19 nt, synthetic construct
  misc_feature 1..19: note = siRNA antisense sequence
  source 1..19: mol_type = other RNA
tcttccattggagccacgc

SEQ ID NO: 59648 - RNA, 19 nt, synthetic construct
  misc_feature 1..19: note = siRNA sense sequence
  source 1..19: mol_type = other RNA
cgtggctccaatggaagag

SEQ ID NO: 59649 - RNA, 19 nt, synthetic construct
  misc_feature 1..19: note = siRNA antisense sequence
  source 1..19: mol_type = other RNA
ctcttccattggagccacg

SEQ ID NO: 59650 - RNA, 19 nt, synthetic construct
  misc_feature 1..19: note = siRNA sense sequence
  source 1..19: mol_type = other RNA
catacacctatcttccatt

SEQ ID NO: 59651 - RNA, 19 nt, synthetic construct
  misc_feature 1..19: note = siRNA antisense sequence
  source 1..19: mol_type = other RNA
aatggaagataggtgtatg

SEQ ID NO: 59652 - RNA, 19 nt, synthetic construct
  misc_feature 1..19: note = siRNA sense sequence
  source 1..19: mol_type = other RNA
atacacctatcttccattc

SEQ ID NO: 59653 - RNA, 19 nt, synthetic construct
  misc_feature 1..19: note = siRNA antisense sequence
  source 1..19: mol_type = other RNA
gaatggaagataggtgtat

SEQ ID NO: 59654 - RNA, 19 nt, synthetic construct
  misc_feature 1..19: note = siRNA sense sequence
  source 1..19: mol_type = other RNA
tacacctatcttccattct

SEQ ID NO: 59655 - RNA, 19 nt, synthetic construct
  misc_feature 1..19: note = siRNA antisense sequence
  source 1..19: mol_type = other RNA
agaatggaagataggtgta

SEQ ID NO: 59656 - RNA, 19 nt, synthetic construct
  misc_feature 1..19: note = siRNA sense sequence
  source 1..19: mol_type = other RNA
cacctatcttccattctcc

SEQ ID NO: 59657 - RNA, 19 nt, synthetic construct
  misc_feature 1..19: note = siRNA antisense sequence
  source 1..19: mol_type = other RNA
ggagaatggaagataggtg

SEQ ID NO: 59658 - RNA, 19 nt, synthetic construct
  misc_feature 1..19: note = siRNA sense sequence
  source 1..19: mol_type = other RNA
acctatcttccattctccc

SEQ ID NO: 59659 - RNA, 19 nt, synthetic construct
  misc_feature 1..19: note = siRNA antisense sequence
  source 1..19: mol_type = other RNA
gggagaatggaagataggt

SEQ ID NO: 59660 - RNA, 19 nt, synthetic construct
  misc_feature 1..19: note = siRNA sense sequence
  source 1..19: mol_type = other RNA
ctatcttccattctccctt

SEQ ID NO: 59661 - RNA, 19 nt, synthetic construct
  misc_feature 1..19: note = siRNA antisense sequence
  source 1..19: mol_type = other RNA
aagggagaatggaagatag

SEQ ID NO: 59662 - RNA, 19 nt, synthetic construct
  misc_feature 1..19: note = siRNA sense sequence
  source 1..19: mol_type = other RNA
ctcccttccttcctaccag

SEQ ID NO: 59663 - RNA, 19 nt, synthetic construct
  misc_feature 1..19: note = siRNA antisense sequence
  source 1..19: mol_type = other RNA
ctggtaggaaggaagggag

SEQ ID NO: 59664 - RNA, 19 nt, synthetic construct
  misc_feature 1..19: note = siRNA sense sequence
  source 1..19: mol_type = other RNA
tcccttccttcctaccaga

SEQ ID NO: 59665 - RNA, 19 nt, synthetic construct
  misc_feature 1..19: note = siRNA antisense sequence
  source 1..19: mol_type = other RNA
tctggtaggaaggaaggga

SEQ ID NO: 59666 - RNA, 19 nt, synthetic construct
  misc_feature 1..19: note = siRNA sense sequence
  source 1..19: mol_type = other RNA
cccttccttcctaccagat

SEQ ID NO: 59667 - RNA, 19 nt, synthetic construct
  misc_feature 1..19: note = siRNA antisense sequence
  source 1..19: mol_type = other RNA
atctggtaggaaggaaggg

SEQ ID NO: 59668 - RNA, 19 nt, synthetic construct
  misc_feature 1..19: note = siRNA sense sequence
  source 1..19: mol_type = other RNA
ccttccttcctaccagata

SEQ ID NO: 59669 - RNA, 19 nt, synthetic construct
  misc_feature 1..19: note = siRNA antisense sequence
  source 1..19: mol_type = other RNA
tatctggtaggaaggaagg

SEQ ID NO: 59670 - RNA, 19 nt, synthetic construct
  misc_feature 1..19: note = siRNA sense sequence
  source 1..19: mol_type = other RNA
cttccttcctaccagatat

SEQ ID NO: 59671 - RNA, 19 nt, synthetic construct
  misc_feature 1..19: note = siRNA antisense sequence
  source 1..19: mol_type = other RNA
atatctggtaggaaggaag

SEQ ID NO: 59672 - RNA, 19 nt, synthetic construct
  misc_feature 1..19: note = siRNA sense sequence
  source 1..19: mol_type = other RNA
ttccttcctaccagatata

SEQ ID NO: 59673 - RNA, 19 nt, synthetic construct
  misc_feature 1..19: note = siRNA antisense sequence
  source 1..19: mol_type = other RNA
tatatctggtaggaaggaa

SEQ ID NO: 59674 - RNA, 19 nt, synthetic construct
  misc_feature 1..19: note = siRNA sense sequence
  source 1..19: mol_type = other RNA
tccttcctaccagatatat

SEQ ID NO: 59675 - RNA, 19 nt, synthetic construct
  misc_feature 1..19: note = siRNA antisense sequence
  source 1..19: mol_type = other RNA
atatatctggtaggaagga

SEQ ID NO: 59676 - RNA, 19 nt, synthetic construct
  misc_feature 1..19: note = siRNA sense sequence
  source 1..19: mol_type = other RNA
ccttcctaccagatatatt

SEQ ID NO: 59677 - RNA, 19 nt, synthetic construct
  misc_feature 1..19: note = siRNA antisense sequence
  source 1..19: mol_type = other RNA
aatatatctggtaggaagg

SEQ ID NO: 59678 - RNA, 19 nt, synthetic construct
  misc_feature 1..19: note = siRNA sense sequence
  source 1..19: mol_type = other RNA
cctaccagatatattgatt

SEQ ID NO: 59679 - RNA, 19 nt, synthetic construct
  misc_feature 1..19: note = siRNA antisense sequence
  source 1..19: mol_type = other RNA
aatcaatatatctggtagg

SEQ ID NO: 59680 - RNA, 19 nt, synthetic construct
  misc_feature 1..19: note = siRNA sense sequence
  source 1..19: mol_type = other RNA
ctaccagatatattgattg

SEQ ID NO: 59681 - RNA, 19 nt, synthetic construct
  misc_feature 1..19: note = siRNA antisense sequence
  source 1..19: mol_type = other RNA
caatcaatatatctggtag

SEQ ID NO: 59682 - RNA, 19 nt, synthetic construct
  misc_feature 1..19: note = siRNA sense sequence
  source 1..19: mol_type = other RNA
accagatatattgattgtc

SEQ ID NO: 59683 - RNA, 19 nt, synthetic construct
  misc_feature 1..19: note = siRNA antisense sequence
  source 1..19: mol_type = other RNA
gacaatcaatatatctggt

SEQ ID NO: 59684 - RNA, 19 nt, synthetic construct
  misc_feature 1..19: note = siRNA sense sequence
  source 1..19: mol_type = other RNA
ccagatatattgattgtct

SEQ ID NO: 59685 - RNA, 19 nt, synthetic construct
  misc_feature 1..19: note = siRNA antisense sequence
  source 1..19: mol_type = other RNA
agacaatcaatatatctgg

SEQ ID NO: 59686 - RNA, 19 nt, synthetic construct
  misc_feature 1..19: note = siRNA sense sequence
  source 1..19: mol_type = other RNA
tgattgtcttatacatacc

SEQ ID NO: 59687 - RNA, 19 nt, synthetic construct
  misc_feature 1..19: note = siRNA antisense sequence
  source 1..19: mol_type = other RNA
ggtatgtataagacaatca

SEQ ID NO: 59688 - RNA, 19 nt, synthetic construct
  misc_feature 1..19: note = siRNA sense sequence
  source 1..19: mol_type = other RNA
gattgtcttatacatacca

SEQ ID NO: 59689 - RNA, 19 nt, synthetic construct
  misc_feature 1..19: note = siRNA antisense sequence
  source 1..19: mol_type = other RNA
tggtatgtataagacaatc

SEQ ID NO: 59690 - RNA, 19 nt, synthetic construct
  misc_feature 1..19: note = siRNA sense sequence
  source 1..19: mol_type = other RNA
attgtcttatacataccag

SEQ ID NO: 59691 - RNA, 19 nt, synthetic construct
  misc_feature 1..19: note = siRNA antisense sequence
  source 1..19: mol_type = other RNA
ctggtatgtataagacaat

SEQ ID NO: 59692 - RNA, 19 nt, synthetic construct
  misc_feature 1..19: note = siRNA sense sequence
  source 1..19: mol_type = other RNA
ttgtcttatacataccagg

SEQ ID NO: 59693 - RNA, 19 nt, synthetic construct
  misc_feature 1..19: note = siRNA antisense sequence
  source 1..19: mol_type = other RNA
cctggtatgtataagacaa

SEQ ID NO: 59694 - RNA, 19 nt, synthetic construct
  misc_feature 1..19: note = siRNA sense sequence
  source 1..19: mol_type = other RNA
tgtcttatacataccaggc

SEQ ID NO: 59695 - RNA, 19 nt, synthetic construct
  misc_feature 1..19: note = siRNA antisense sequence
  source 1..19: mol_type = other RNA
gcctggtatgtataagaca

SEQ ID NO: 59696 - RNA, 19 nt, synthetic construct
  misc_feature 1..19: note = siRNA sense sequence
  source 1..19: mol_type = other RNA
atacataccaggcattgga

SEQ ID NO: 59697 - RNA, 19 nt, synthetic construct
  misc_feature 1..19: note = siRNA antisense sequence
  source 1..19: mol_type = other RNA
tccaatgcctggtatgtat

SEQ ID NO: 59698 - RNA, 19 nt, synthetic construct
  misc_feature 1..19: note = siRNA sense sequence
  source 1..19: mol_type = other RNA
tacataccaggcattggag

SEQ ID NO: 59699 - RNA, 19 nt, synthetic construct
  misc_feature 1..19: note = siRNA antisense sequence
  source 1..19: mol_type = other RNA
ctccaatgcctggtatgta

SEQ ID NO: 59700 - RNA, 19 nt, synthetic construct
  misc_feature 1..19: note = siRNA sense sequence
  source 1..19: mol_type = other RNA
acataccaggcattggagc

SEQ ID NO: 59701 - RNA, 19 nt, synthetic construct
  misc_feature 1..19: note = siRNA antisense sequence
  source 1..19: mol_type = other RNA
gctccaatgcctggtatgt

SEQ ID NO: 59702 - RNA, 19 nt, synthetic construct
  misc_feature 1..19: note = siRNA sense sequence
  source 1..19: mol_type = other RNA
cataccaggcattggagct

SEQ ID NO: 59703 - RNA, 19 nt, synthetic construct
  misc_feature 1..19: note = siRNA antisense sequence
  source 1..19: mol_type = other RNA
agctccaatgcctggtatg

SEQ ID NO: 59704 - RNA, 19 nt, synthetic construct
  misc_feature 1..19: note = siRNA sense sequence
  source 1..19: mol_type = other RNA
ccaggcattggagcttaca

SEQ ID NO: 59705 - RNA, 19 nt, synthetic construct
  misc_feature 1..19: note = siRNA antisense sequence
  source 1..19: mol_type = other RNA
tgtaagctccaatgcctgg

SEQ ID NO: 59706 - RNA, 19 nt, synthetic construct
  misc_feature 1..19: note = siRNA sense sequence
  source 1..19: mol_type = other RNA
caggcattggagcttacag

SEQ ID NO: 59707 - RNA, 19 nt, synthetic construct
  misc_feature 1..19: note = siRNA antisense sequence
  source 1..19: mol_type = other RNA
ctgtaagctccaatgcctg

SEQ ID NO: 59708 - RNA, 19 nt, synthetic construct
  misc_feature 1..19: note = siRNA sense sequence
  source 1..19: mol_type = other RNA
aggcattggagcttacagt

SEQ ID NO: 59709 - RNA, 19 nt, synthetic construct
  misc_feature 1..19: note = siRNA antisense sequence
  source 1..19: mol_type = other RNA
actgtaagctccaatgcct

SEQ ID NO: 59710 - RNA, 19 nt, synthetic construct
  misc_feature 1..19: note = siRNA sense sequence
  source 1..19: mol_type = other RNA
ggcattggagcttacagtc

SEQ ID NO: 59711 - RNA, 19 nt, synthetic construct
  misc_feature 1..19: note = siRNA antisense sequence
  source 1..19: mol_type = other RNA
gactgtaagctccaatgcc

SEQ ID NO: 59712 - RNA, 19 nt, synthetic construct
  misc_feature 1..19: note = siRNA sense sequence
  source 1..19: mol_type = other RNA
atgctatggaggaggattt

SEQ ID NO: 59713 - RNA, 19 nt, synthetic construct
  misc_feature 1..19: note = siRNA antisense sequence
  source 1..19: mol_type = other RNA
aaatcctcctccatagcat

SEQ ID NO: 59714 - RNA, 19 nt, synthetic construct
  misc_feature 1..19: note = siRNA sense sequence
  source 1..19: mol_type = other RNA
tgctatggaggaggatttc

SEQ ID NO: 59715 - RNA, 19 nt, synthetic construct
  misc_feature 1..19: note = siRNA antisense sequence
  source 1..19: mol_type = other RNA
gaaatcctcctccatagca

SEQ ID NO: 59716 - RNA, 19 nt, synthetic construct
  misc_feature 1..19: note = siRNA sense sequence
  source 1..19: mol_type = other RNA
aggaggatttcagagctct

SEQ ID NO: 59717 - RNA, 19 nt, synthetic construct
  misc_feature 1..19: note = siRNA antisense sequence
  source 1..19: mol_type = other RNA
agagctctgaaatcctcct

SEQ ID NO: 59718 - RNA, 19 nt, synthetic construct
  misc_feature 1..19: note = siRNA sense sequence
  source 1..19: mol_type = other RNA
ggaggatttcagagctctc

SEQ ID NO: 59719 - RNA, 19 nt, synthetic construct
  misc_feature 1..19: note = siRNA antisense sequence
  source 1..19: mol_type = other RNA
gagagctctgaaatcctcc

SEQ ID NO: 59720 - RNA, 19 nt, synthetic construct
  misc_feature 1..19: note = siRNA sense sequence
  source 1..19: mol_type = other RNA
aggatttcagagctctcta

SEQ ID NO: 59721 - RNA, 19 nt, synthetic construct
  misc_feature 1..19: note = siRNA antisense sequence
  source 1..19: mol_type = other RNA
tagagagctctgaaatcct

SEQ ID NO: 59722 - RNA, 19 nt, synthetic construct
  misc_feature 1..19: note = siRNA sense sequence
  source 1..19: mol_type = other RNA
ggatttcagagctctctag

SEQ ID NO: 59723 - RNA, 19 nt, synthetic construct
  misc_feature 1..19: note = siRNA antisense sequence
  source 1..19: mol_type = other RNA
ctagagagctctgaaatcc

SEQ ID NO: 59724 - RNA, 19 nt, synthetic construct
  misc_feature 1..19: note = siRNA sense sequence
  source 1..19: mol_type = other RNA
gatttcagagctctctagg

SEQ ID NO: 59725 - RNA, 19 nt, synthetic construct
  misc_feature 1..19: note = siRNA antisense sequence
  source 1..19: mol_type = other RNA
cctagagagctctgaaatc

SEQ ID NO: 59726 - RNA, 19 nt, synthetic construct
  misc_feature 1..19: note = siRNA sense sequence
  source 1..19: mol_type = other RNA
atttcagagctctctagga

SEQ ID NO: 59727 - RNA, 19 nt, synthetic construct
  misc_feature 1..19: note = siRNA antisense sequence
  source 1..19: mol_type = other RNA
tcctagagagctctgaaat

SEQ ID NO: 59728 - RNA, 19 nt, synthetic construct
  misc_feature 1..19: note = siRNA sense sequence
  source 1..19: mol_type = other RNA
gaagtcaggacagccctcc

SEQ ID NO: 59729 - RNA, 19 nt, synthetic construct
  misc_feature 1..19: note = siRNA antisense sequence
  source 1..19: mol_type = other RNA
ggagggctgtcctgacttc

SEQ ID NO: 59730 - RNA, 19 nt, synthetic construct
  misc_feature 1..19: note = siRNA sense sequence
  source 1..19: mol_type = other RNA
ggacagccctcctgaagtt

SEQ ID NO: 59731 - RNA, 19 nt, synthetic construct
  misc_feature 1..19: note = siRNA antisense sequence
  source 1..19: mol_type = other RNA
aacttcaggagggctgtcc

SEQ ID NO: 59732 - RNA, 19 nt, synthetic construct
  misc_feature 1..19: note = siRNA sense sequence
  source 1..19: mol_type = other RNA
gacagccctcctgaagttg

SEQ ID NO: 59733 - RNA, 19 nt, synthetic construct
  misc_feature 1..19: note = siRNA antisense sequence
  source 1..19: mol_type = other RNA
caacttcaggagggctgtc

SEQ ID NO: 59734 - RNA, 19 nt, synthetic construct
  misc_feature 1..19: note = siRNA sense sequence
  source 1..19: mol_type = other RNA
acagccctcctgaagttgt

SEQ ID NO: 59735 - RNA, 19 nt, synthetic construct
  misc_feature 1..19: note = siRNA antisense sequence
  source 1..19: mol_type = other RNA
acaacttcaggagggctgt

SEQ ID NO: 59736 - RNA, 19 nt, synthetic construct
  misc_feature 1..19: note = siRNA sense sequence
  source 1..19: mol_type = other RNA
cagccctcctgaagttgtg

SEQ ID NO: 59737 - RNA, 19 nt, synthetic construct
  misc_feature 1..19: note = siRNA antisense sequence
  source 1..19: mol_type = other RNA
cacaacttcaggagggctg

SEQ ID NO: 59738 - RNA, 19 nt, synthetic construct
  misc_feature 1..19: note = siRNA sense sequence
  source 1..19: mol_type = other RNA
agccctcctgaagttgtgc

SEQ ID NO: 59739 - RNA, 19 nt, synthetic construct
  misc_feature 1..19: note = siRNA antisense sequence
  source 1..19: mol_type = other RNA
gcacaacttcaggagggct

SEQ ID NO: 59740 - RNA, 19 nt, synthetic construct
  misc_feature 1..19: note = siRNA sense sequence
  source 1..19: mol_type = other RNA
cctgaagttgtgccatttc

SEQ ID NO: 59741 - RNA, 19 nt, synthetic construct
  misc_feature 1..19: note = siRNA antisense sequence
  source 1..19: mol_type = other RNA
gaaatggcacaacttcagg

SEQ ID NO: 59742 - RNA, 19 nt, synthetic construct
  misc_feature 1..19: note = siRNA sense sequence
  source 1..19: mol_type = other RNA
aagttgtgccatttcagtg

SEQ ID NO: 59743 - RNA, 19 nt, synthetic construct
  misc_feature 1..19: note = siRNA antisense sequence
  source 1..19: mol_type = other RNA
cactgaaatggcacaactt

SEQ ID NO: 59744 - RNA, 19 nt, synthetic construct
  misc_feature 1..19: note = siRNA sense sequence
  source 1..19: mol_type = other RNA
tgtgccatttcagtggagc

SEQ ID NO: 59745 - RNA, 19 nt, synthetic construct
  misc_feature 1..19: note = siRNA antisense sequence
  source 1..19: mol_type = other RNA
gctccactgaaatggcaca

SEQ ID NO: 59746 - RNA, 19 nt, synthetic construct
  misc_feature 1..19: note = siRNA sense sequence
  source 1..19: mol_type = other RNA
gtgccatttcagtggagcc

SEQ ID NO: 59747 - RNA, 19 nt, synthetic construct
  misc_feature 1..19: note = siRNA antisense sequence
  source 1..19: mol_type = other RNA
ggctccactgaaatggcac

SEQ ID NO: 59748 - RNA, 19 nt, synthetic construct
  misc_feature 1..19: note = siRNA sense sequence
  source 1..19: mol_type = other RNA
tgccatttcagtggagccc

SEQ ID NO: 59749 - RNA, 19 nt, synthetic construct
  misc_feature 1..19: note = siRNA antisense sequence
  source 1..19: mol_type = other RNA
gggctccactgaaatggca

SEQ ID NO: 59750 - RNA, 19 nt, synthetic construct
  misc_feature 1..19: note = siRNA sense sequence
  source 1..19: mol_type = other RNA
gccatttcagtggagccct

SEQ ID NO: 59751 - RNA, 19 nt, synthetic construct
  misc_feature 1..19: note = siRNA antisense sequence
  source 1..19: mol_type = other RNA
agggctccactgaaatggc

SEQ ID NO: 59752 - RNA, 19 nt, synthetic construct
  misc_feature 1..19: note = siRNA sense sequence
  source 1..19: mol_type = other RNA
ccatttcagtggagccctg

SEQ ID NO: 59753 - RNA, 19 nt, synthetic construct
  misc_feature 1..19: note = siRNA antisense sequence
  source 1..19: mol_type = other RNA
cagggctccactgaaatgg

SEQ ID NO: 59754 - RNA, 19 nt, synthetic construct
  misc_feature 1..19: note = siRNA sense sequence
  source 1..19: mol_type = other RNA
tggagccctgaaggatagg

SEQ ID NO: 59755 - RNA, 19 nt, synthetic construct
  misc_feature 1..19: note = siRNA antisense sequence
  source 1..19: mol_type = other RNA
cctatccttcagggctcca

SEQ ID NO: 59756 - RNA, 19 nt, synthetic construct
  misc_feature 1..19: note = siRNA sense sequence
  source 1..19: mol_type = other RNA
cctgaaggatagggtgatt

SEQ ID NO: 59757 - RNA, 19 nt, synthetic construct
  misc_feature 1..19: note = siRNA antisense sequence
  source 1..19: mol_type = other RNA
aatcaccctatccttcagg

SEQ ID NO: 59758 - RNA, 19 nt, synthetic construct
  misc_feature 1..19: note = siRNA sense sequence
  source 1..19: mol_type = other RNA
aaggatagggtgatttcca

SEQ ID NO: 59759 - RNA, 19 nt, synthetic construct
  misc_feature 1..19: note = siRNA antisense sequence
  source 1..19: mol_type = other RNA
tggaaatcaccctatcctt

SEQ ID NO: 59760 - RNA, 19 nt, synthetic construct
  misc_feature 1..19: note = siRNA sense sequence
  source 1..19: mol_type = other RNA
aggatagggtgatttccac

SEQ ID NO: 59761 - RNA, 19 nt, synthetic construct
  misc_feature 1..19: note = siRNA antisense sequence
  source 1..19: mol_type = other RNA
gtggaaatcaccctatcct

SEQ ID NO: 59762 - RNA, 19 nt, synthetic construct
  misc_feature 1..19: note = siRNA sense sequence
  source 1..19: mol_type = other RNA
gtgatttccaccctattta

SEQ ID NO: 59763 - RNA, 19 nt, synthetic construct
  misc_feature 1..19: note = siRNA antisense sequence
  source 1..19: mol_type = other RNA
taaatagggtggaaatcac

SEQ ID NO: 59764 - RNA, 19 nt, synthetic construct
  misc_feature 1..19: note = siRNA sense sequence
  source 1..19: mol_type = other RNA
tgatttccaccctatttag

SEQ ID NO: 59765 - RNA, 19 nt, synthetic construct
  misc_feature 1..19: note = siRNA antisense sequence
  source 1..19: mol_type = other RNA
ctaaatagggtggaaatca

SEQ ID NO: 59766 - RNA, 19 nt, synthetic construct
  misc_feature 1..19: note = siRNA sense sequence
  source 1..19: mol_type = other RNA
gatttccaccctatttagg

SEQ ID NO: 59767 - RNA, 19 nt, synthetic construct
  misc_feature 1..19: note = siRNA antisense sequence
  source 1..19: mol_type = other RNA
cctaaatagggtggaaatc

SEQ ID NO: 59768 - RNA, 19 nt, synthetic construct
  misc_feature 1..19: note = siRNA sense sequence
  source 1..19: mol_type = other RNA
caacgacattcgctagtgt

SEQ ID NO: 59769 - RNA, 19 nt, synthetic construct
  misc_feature 1..19: note = siRNA antisense sequence
  source 1..19: mol_type = other RNA
acactagcgaatgtcgttg

SEQ ID NO: 59770 - RNA, 19 nt, synthetic construct
  misc_feature 1..19: note = siRNA sense sequence
  source 1..19: mol_type = other RNA
aacgacattcgctagtgtg

SEQ ID NO: 59771 - RNA, 19 nt, synthetic construct
  misc_feature 1..19: note = siRNA antisense sequence
  source 1..19: mol_type = other RNA
cacactagcgaatgtcgtt

SEQ ID NO: 59772 - RNA, 19 nt, synthetic construct
  misc_feature 1..19: note = siRNA sense sequence
  source 1..19: mol_type = other RNA
acgacattcgctagtgtgg

SEQ ID NO: 59773 - RNA, 19 nt, synthetic construct
  misc_feature 1..19: note = siRNA antisense sequence
  source 1..19: mol_type = other RNA
ccacactagcgaatgtcgt

SEQ ID NO: 59774 - RNA, 19 nt, synthetic construct
  misc_feature 1..19: note = siRNA sense sequence
  source 1..19: mol_type = other RNA
cgacattcgctagtgtggc

SEQ ID NO: 59775 - RNA, 19 nt, synthetic construct
  misc_feature 1..19: note = siRNA antisense sequence
  source 1..19: mol_type = other RNA
gccacactagcgaatgtcg

SEQ ID NO: 59776 - RNA, 19 nt, synthetic construct
  misc_feature 1..19: note = siRNA sense sequence
  source 1..19: mol_type = other RNA
gacattcgctagtgtggct

SEQ ID NO: 59777 - RNA, 19 nt, synthetic construct
  misc_feature 1..19: note = siRNA antisense sequence
  source 1..19: mol_type = other RNA
agccacactagcgaatgtc

SEQ ID NO: 59778 - RNA, 19 nt, synthetic construct
  misc_feature 1..19: note = siRNA sense sequence
  source 1..19: mol_type = other RNA
acattcgctagtgtggctg

SEQ ID NO: 59779 - RNA, 19 nt, synthetic construct
  misc_feature 1..19: note = siRNA antisense sequence
  source 1..19: mol_type = other RNA
cagccacactagcgaatgt

SEQ ID NO: 59780 - RNA, 19 nt, synthetic construct
  misc_feature 1..19: note = siRNA sense sequence
  source 1..19: mol_type = other RNA
cattcgctagtgtggctga

SEQ ID NO: 59781 - RNA, 19 nt, synthetic construct
  misc_feature 1..19: note = siRNA antisense sequence
  source 1..19: mol_type = other RNA
tcagccacactagcgaatg

SEQ ID NO: 59782 - RNA, 19 nt, synthetic construct
  misc_feature 1..19: note = siRNA sense sequence
  source 1..19: mol_type = other RNA
aaaggaggtgacgtgaggt

SEQ ID NO: 59783 - RNA, 19 nt, synthetic construct
  misc_feature 1..19: note = siRNA antisense sequence
  source 1..19: mol_type = other RNA
acctcacgtcacctccttt

SEQ ID NO: 59784 - RNA, 19 nt, synthetic construct
  misc_feature 1..19: note = siRNA sense sequence
  source 1..19: mol_type = other RNA
aaggaggtgacgtgaggtg

SEQ ID NO: 59785 - RNA, 19 nt, synthetic construct
  misc_feature 1..19: note = siRNA antisense sequence
  source 1..19: mol_type = other RNA
cacctcacgtcacctcctt

SEQ ID NO: 59786 - RNA, 19 nt, synthetic construct
  misc_feature 1..19: note = siRNA sense sequence
  source 1..19: mol_type = other RNA
aggaggtgacgtgaggtga

SEQ ID NO: 59787 - RNA, 19 nt, synthetic construct
  misc_feature 1..19: note = siRNA antisense sequence
  source 1..19: mol_type = other RNA
tcacctcacgtcacctcct

SEQ ID NO: 59788 - RNA, 19 nt, synthetic construct
  misc_feature 1..19: note = siRNA sense sequence
  source 1..19: mol_type = other RNA
ggaggtgacgtgaggtgag

SEQ ID NO: 59789 - RNA, 19 nt, synthetic construct
  misc_feature 1..19: note = siRNA antisense sequence
  source 1..19: mol_type = other RNA
ctcacctcacgtcacctcc

SEQ ID NO: 59790 - RNA, 19 nt, synthetic construct
  misc_feature 1..19: note = siRNA sense sequence
  source 1..19: mol_type = other RNA
gaggtgacgtgaggtgagg

SEQ ID NO: 59791 - RNA, 19 nt, synthetic construct
  misc_feature 1..19: note = siRNA antisense sequence
  source 1..19: mol_type = other RNA
cctcacctcacgtcacctc

SEQ ID NO: 59792 - RNA, 19 nt, synthetic construct
  misc_feature 1..19: note = siRNA sense sequence
  source 1..19: mol_type = other RNA
aggtgacgtgaggtgaggc

SEQ ID NO: 59793 - RNA, 19 nt, synthetic construct
  misc_feature 1..19: note = siRNA antisense sequence
  source 1..19: mol_type = other RNA
gcctcacctcacgtcacct

SEQ ID NO: 59794 - RNA, 19 nt, synthetic construct
  misc_feature 1..19: note = siRNA sense sequence
  source 1..19: mol_type = other RNA
ggtcattcgggacttggtg

SEQ ID NO: 59795 - RNA, 19 nt, synthetic construct
  misc_feature 1..19: note = siRNA antisense sequence
  source 1..19: mol_type = other RNA
caccaagtcccgaatgacc

SEQ ID NO: 59796 - RNA, 19 nt, synthetic construct
  misc_feature 1..19: note = siRNA sense sequence
  source 1..19: mol_type = other RNA
attcgggacttggtgccac

SEQ ID NO: 59797 - RNA, 19 nt, synthetic construct
  misc_feature 1..19: note = siRNA antisense sequence
  source 1..19: mol_type = other RNA
gtggcaccaagtcccgaat

SEQ ID NO: 59798 - RNA, 19 nt, synthetic construct
  misc_feature 1..19: note = siRNA sense sequence
  source 1..19: mol_type = other RNA
ttcgggacttggtgccact

SEQ ID NO: 59799 - RNA, 19 nt, synthetic construct
  misc_feature 1..19: note = siRNA antisense sequence
  source 1..19: mol_type = other RNA
agtggcaccaagtcccgaa

SEQ ID NO: 59800 - RNA, 19 nt, synthetic construct
  misc_feature 1..19: note = siRNA sense sequence
  source 1..19: mol_type = other RNA
cagtgcagtgcttttgaag

SEQ ID NO: 59801 - RNA, 19 nt, synthetic construct
  misc_feature 1..19: note = siRNA antisense sequence
  source 1..19: mol_type = other RNA
cttcaaaagcactgcactg

SEQ ID NO: 59802 - RNA, 19 nt, synthetic construct
  misc_feature 1..19: note = siRNA sense sequence
  source 1..19: mol_type = other RNA
gcagtgcttttgaaggttt

SEQ ID NO: 59803 - RNA, 19 nt, synthetic construct
  misc_feature 1..19: note = siRNA antisense sequence
  source 1..19: mol_type = other RNA
aaaccttcaaaagcactgc

SEQ ID NO: 59804 - RNA, 19 nt, synthetic construct
  misc_feature 1..19: note = siRNA sense sequence
  source 1..19: mol_type = other RNA
cagtgcttttgaaggtttt

SEQ ID NO: 59805 - RNA, 19 nt, synthetic construct
  misc_feature 1..19: note = siRNA antisense sequence
  source 1..19: mol_type = other RNA
aaaaccttcaaaagcactg

SEQ ID NO: 59806 - RNA, 19 nt, synthetic construct
  misc_feature 1..19: note = siRNA sense sequence
  source 1..19: mol_type = other RNA
ttatttggttcagccacac

SEQ ID NO: 59807 - RNA, 19 nt, synthetic construct
  misc_feature 1..19: note = siRNA antisense sequence
  source 1..19: mol_type = other RNA
gtgtggctgaaccaaataa

SEQ ID NO: 59808 - RNA, 19 nt, synthetic construct
  misc_feature 1..19: note = siRNA sense sequence
  source 1..19: mol_type = other RNA
tatttggttcagccacacg

SEQ ID NO: 59809 - RNA, 19 nt, synthetic construct
  misc_feature 1..19: note = siRNA antisense sequence
  source 1..19: mol_type = other RNA
cgtgtggctgaaccaaata

SEQ ID NO: 59810 - RNA, 19 nt, synthetic construct
  misc_feature 1..19: note = siRNA sense sequence
  source 1..19: mol_type = other RNA
atttggttcagccacacga

SEQ ID NO: 59811 - RNA, 19 nt, synthetic construct
  misc_feature 1..19: note = siRNA antisense sequence
  source 1..19: mol_type = other RNA
tcgtgtggctgaaccaaat

SEQ ID NO: 59812 - RNA, 19 nt, synthetic construct
  misc_feature 1..19: note = siRNA sense sequence
  source 1..19: mol_type = other RNA
tttggttcagccacacgac

SEQ ID NO: 59813 - RNA, 19 nt, synthetic construct
  misc_feature 1..19: note = siRNA antisense sequence
  source 1..19: mol_type = other RNA
gtcgtgtggctgaaccaaa

SEQ ID NO: 59814 - RNA, 19 nt, synthetic construct
  misc_feature 1..19: note = siRNA sense sequence
  source 1..19: mol_type = other RNA
ttggttcagccacacgaca

SEQ ID NO: 59815 - RNA, 19 nt, synthetic construct
  misc_feature 1..19: note = siRNA antisense sequence
  source 1..19: mol_type = other RNA
tgtcgtgtggctgaaccaa

SEQ ID NO: 59816 - RNA, 19 nt, synthetic construct
  misc_feature 1..19: note = siRNA sense sequence
  source 1..19: mol_type = other RNA
tggttcagccacacgacag

SEQ ID NO: 59817 - RNA, 19 nt, synthetic construct
  misc_feature 1..19: note = siRNA antisense sequence
  source 1..19: mol_type = other RNA
ctgtcgtgtggctgaacca

SEQ ID NO: 59818 - RNA, 19 nt, synthetic construct
  misc_feature 1..19: note = siRNA sense sequence
  source 1..19: mol_type = other RNA
ggttcagccacacgacagg

SEQ ID NO: 59819 - RNA, 19 nt, synthetic construct
  misc_feature 1..19: note = siRNA antisense sequence
  source 1..19: mol_type = other RNA
cctgtcgtgtggctgaacc

SEQ ID NO: 59820 - RNA, 19 nt, synthetic construct
  misc_feature 1..19: note = siRNA sense sequence
  source 1..19: mol_type = other RNA
gttcagccacacgacagga

SEQ ID NO: 59821 - RNA, 19 nt, synthetic construct
  misc_feature 1..19: note = siRNA antisense sequence
  source 1..19: mol_type = other RNA
tcctgtcgtgtggctgaac

SEQ ID NO: 59822 - RNA, 19 nt, synthetic construct
  misc_feature 1..19: note = siRNA sense sequence
  source 1..19: mol_type = other RNA
ttcagccacacgacaggat

SEQ ID NO: 59823 - RNA, 19 nt, synthetic construct
  misc_feature 1..19: note = siRNA antisense sequence
  source 1..19: mol_type = other RNA
atcctgtcgtgtggctgaa

SEQ ID NO: 59824 - RNA, 19 nt, synthetic construct
  misc_feature 1..19: note = siRNA sense sequence
  source 1..19: mol_type = other RNA
tcagccacacgacaggatg

SEQ ID NO: 59825 - RNA, 19 nt, synthetic construct
  misc_feature 1..19: note = siRNA antisense sequence
  source 1..19: mol_type = other RNA
catcctgtcgtgtggctga

SEQ ID NO: 59826 - RNA, 19 nt, synthetic construct
  misc_feature 1..19: note = siRNA sense sequence
  source 1..19: mol_type = other RNA
cgacaggatgcagcagagt

SEQ ID NO: 59827 - RNA, 19 nt, synthetic construct
  misc_feature 1..19: note = siRNA antisense sequence
  source 1..19: mol_type = other RNA
actctgctgcatcctgtcg

SEQ ID NO: 59828 - RNA, 19 nt, synthetic construct
  misc_feature 1..19: note = siRNA sense sequence
  source 1..19: mol_type = other RNA
acaggatgcagcagagtga

SEQ ID NO: 59829 - RNA, 19 nt, synthetic construct
  misc_feature 1..19: note = siRNA antisense sequence
  source 1..19: mol_type = other RNA
tcactctgctgcatcctgt

SEQ ID NO: 59830 - RNA, 19 nt, synthetic construct
  misc_feature 1..19: note = siRNA sense sequence
  source 1..19: mol_type = other RNA
caggatgcagcagagtgaa

SEQ ID NO: 59831 - RNA, 19 nt, synthetic construct
  misc_feature 1..19: note = siRNA antisense sequence
  source 1..19: mol_type = other RNA
ttcactctgctgcatcctg

SEQ ID NO: 59832 - RNA, 19 nt, synthetic construct
  misc_feature 1..19: note = siRNA sense sequence
  source 1..19: mol_type = other RNA
aggatgcagcagagtgaag

SEQ ID NO: 59833 - RNA, 19 nt, synthetic construct
  misc_feature 1..19: note = siRNA antisense sequence
  source 1..19: mol_type = other RNA
cttcactctgctgcatcct

SEQ ID NO: 59834 - RNA, 19 nt, synthetic construct
  misc_feature 1..19: note = siRNA sense sequence
  source 1..19: mol_type = other RNA
ggatgcagcagagtgaaga

SEQ ID NO: 59835 - RNA, 19 nt, synthetic construct
  misc_feature 1..19: note = siRNA antisense sequence
  source 1..19: mol_type = other RNA
tcttcactctgctgcatcc

SEQ ID NO: 59836 - RNA, 19 nt, synthetic construct
  misc_feature 1..19: note = siRNA sense sequence
  source 1..19: mol_type = other RNA
gatgcagcagagtgaagag

SEQ ID NO: 59837 - RNA, 19 nt, synthetic construct
  misc_feature 1..19: note = siRNA antisense sequence
  source 1..19: mol_type = other RNA
ctcttcactctgctgcatc

SEQ ID NO: 59838 - RNA, 19 nt, synthetic construct
  misc_feature 1..19: note = siRNA sense sequence
  source 1..19: mol_type = other RNA
atgcagcagagtgaagagt

SEQ ID NO: 59839 - RNA, 19 nt, synthetic construct
  misc_feature 1..19: note = siRNA antisense sequence
  source 1..19: mol_type = other RNA
actcttcactctgctgcat

SEQ ID NO: 59840 - RNA, 19 nt, synthetic construct
  misc_feature 1..19: note = siRNA sense sequence
  source 1..19: mol_type = other RNA
cagcagagtgaagagtggt

SEQ ID NO: 59841 - RNA, 19 nt, synthetic construct
  misc_feature 1..19: note = siRNA antisense sequence
  source 1..19: mol_type = other RNA
accactcttcactctgctg

SEQ ID NO: 59842 - RNA, 19 nt, synthetic construct
  misc_feature 1..19: note = siRNA sense sequence
  source 1..19: mol_type = other RNA
agcagagtgaagagtggtt

SEQ ID NO: 59843 - RNA, 19 nt, synthetic construct
  misc_feature 1..19: note = siRNA antisense sequence
  source 1..19: mol_type = other RNA
aaccactcttcactctgct

SEQ ID NO: 59844 - RNA, 19 nt, synthetic construct
  misc_feature 1..19: note = siRNA sense sequence
  source 1..19: mol_type = other RNA
gcagagtgaagagtggttg

SEQ ID NO: 59845 - RNA, 19 nt, synthetic construct
  misc_feature 1..19: note = siRNA antisense sequence
  source 1..19: mol_type = other RNA
caaccactcttcactctgc

SEQ ID NO: 59846 - RNA, 19 nt, synthetic construct
  misc_feature 1..19: note = siRNA sense sequence
  source 1..19: mol_type = other RNA
gagtgaagagtggttggag

SEQ ID NO: 59847 - RNA, 19 nt, synthetic construct
  misc_feature 1..19: note = siRNA antisense sequence
  source 1..19: mol_type = other RNA
ctccaaccactcttcactc

SEQ ID NO: 59848 - RNA, 19 nt, synthetic construct
  misc_feature 1..19: note = siRNA sense sequence
  source 1..19: mol_type = other RNA
agtgaagagtggttggagg

SEQ ID NO: 59849 - RNA, 19 nt, synthetic construct
  misc_feature 1..19: note = siRNA antisense sequence
  source 1..19: mol_type = other RNA
cctccaaccactcttcact

SEQ ID NO: 59850 - RNA, 19 nt, synthetic construct
  misc_feature 1..19: note = siRNA sense sequence
  source 1..19: mol_type = other RNA
gtgaagagtggttggaggg

SEQ ID NO: 59851 - RNA, 19 nt, synthetic construct
  misc_feature 1..19: note = siRNA antisense sequence
  source 1..19: mol_type = other RNA
ccctccaaccactcttcac

SEQ ID NO: 59852 - RNA, 19 nt, synthetic construct
  misc_feature 1..19: note = siRNA sense sequence
  source 1..19: mol_type = other RNA
tgaagagtggttggaggga

SEQ ID NO: 59853 - RNA, 19 nt, synthetic construct
  misc_feature 1..19: note = siRNA antisense sequence
  source 1..19: mol_type = other RNA
tccctccaaccactcttca

SEQ ID NO: 59854 - RNA, 19 nt, synthetic construct
  misc_feature 1..19: note = siRNA sense sequence
  source 1..19: mol_type = other RNA
gaagagtggttggagggaa

SEQ ID NO: 59855 - RNA, 19 nt, synthetic construct
  misc_feature 1..19: note = siRNA antisense sequence
  source 1..19: mol_type = other RNA
ttccctccaaccactcttc

SEQ ID NO: 59856 - RNA, 19 nt, synthetic construct
  misc_feature 1..19: note = siRNA sense sequence
  source 1..19: mol_type = other RNA
cccgtgggaagctattact

SEQ ID NO: 59857 - RNA, 19 nt, synthetic construct
  misc_feature 1..19: note = siRNA antisense sequence
  source 1..19: mol_type = other RNA
agtaatagcttcccacggg

SEQ ID NO: 59858 - RNA, 19 nt, synthetic construct
  misc_feature 1..19: note = siRNA sense sequence
  source 1..19: mol_type = other RNA
ccgtgggaagctattactt

SEQ ID NO: 59859 - RNA, 19 nt, synthetic construct
  misc_feature 1..19: note = siRNA antisense sequence
  source 1..19: mol_type = other RNA
aagtaatagcttcccacgg

SEQ ID NO: 59860 - RNA, 19 nt, synthetic construct
  misc_feature 1..19: note = siRNA sense sequence
  source 1..19: mol_type = other RNA
cgtgggaagctattacttt

SEQ ID NO: 59861 - RNA, 19 nt, synthetic construct
  misc_feature 1..19: note = siRNA antisense sequence
  source 1..19: mol_type = other RNA
aaagtaatagcttcccacg

SEQ ID NO: 59862 - RNA, 19 nt, synthetic construct
  misc_feature 1..19: note = siRNA sense sequence
  source 1..19: mol_type = other RNA
gtgggaagctattacttta

SEQ ID NO: 59863 - RNA, 19 nt, synthetic construct
  misc_feature 1..19: note = siRNA antisense sequence
  source 1..19: mol_type = other RNA
taaagtaatagcttcccac

SEQ ID NO: 59864 - RNA, 19 nt, synthetic construct
  misc_feature 1..19: note = siRNA sense sequence
  source 1..19: mol_type = other RNA
tgggaagctattactttag

SEQ ID NO: 59865 - RNA, 19 nt, synthetic construct
  misc_feature 1..19: note = siRNA antisense sequence
  source 1..19: mol_type = other RNA
ctaaagtaatagcttccca

SEQ ID NO: 59866 - RNA, 19 nt, synthetic construct
  misc_feature 1..19: note = siRNA sense sequence
  source 1..19: mol_type = other RNA
gggaagctattactttagt

SEQ ID NO: 59867 - RNA, 19 nt, synthetic construct
  misc_feature 1..19: note = siRNA antisense sequence
  source 1..19: mol_type = other RNA
actaaagtaatagcttccc

SEQ ID NO: 59868 - RNA, 19 nt, synthetic construct
  misc_feature 1..19: note = siRNA sense sequence
  source 1..19: mol_type = other RNA
ggaagctattactttagtt

SEQ ID NO: 59869 - RNA, 19 nt, synthetic construct
  misc_feature 1..19: note = siRNA antisense sequence
  source 1..19: mol_type = other RNA
aactaaagtaatagcttcc

SEQ ID NO: 59870 - RNA, 19 nt, synthetic construct
  misc_feature 1..19: note = siRNA sense sequence
  source 1..19: mol_type = other RNA
gaagctattactttagttc

SEQ ID NO: 59871 - RNA, 19 nt, synthetic construct
  misc_feature 1..19: note = siRNA antisense sequence
  source 1..19: mol_type = other RNA
gaactaaagtaatagcttc

SEQ ID NO: 59872 - RNA, 19 nt, synthetic construct
  misc_feature 1..19: note = siRNA sense sequence
  source 1..19: mol_type = other RNA
aatgcttgggtgtgaggtg

SEQ ID NO: 59873 - RNA, 19 nt, synthetic construct
  misc_feature 1..19: note = siRNA antisense sequence
  source 1..19: mol_type = other RNA
cacctcacacccaagcatt

SEQ ID NO: 59874 - RNA, 19 nt, synthetic construct
  misc_feature 1..19: note = siRNA sense sequence
  source 1..19: mol_type = other RNA
atgcttgggtgtgaggtgg

SEQ ID NO: 59875 - RNA, 19 nt, synthetic construct
  misc_feature 1..19: note = siRNA antisense sequence
  source 1..19: mol_type = other RNA
ccacctcacacccaagcat

SEQ ID NO: 59876 - RNA, 19 nt, synthetic construct
  misc_feature 1..19: note = siRNA sense sequence
  source 1..19: mol_type = other RNA
tgcttgggtgtgaggtggt

SEQ ID NO: 59877 - RNA, 19 nt, synthetic construct
  misc_feature 1..19: note = siRNA antisense sequence
  source 1..19: mol_type = other RNA
accacctcacacccaagca

SEQ ID NO: 59878 - RNA, 19 nt, synthetic construct
  misc_feature 1..19: note = siRNA sense sequence
  source 1..19: mol_type = other RNA
gcttgggtgtgaggtggtg

SEQ ID NO: 59879 - RNA, 19 nt, synthetic construct
  misc_feature 1..19: note = siRNA antisense sequence
  source 1..19: mol_type = other RNA
caccacctcacacccaagc

SEQ ID NO: 59880 - RNA, 19 nt, synthetic construct
  misc_feature 1..19: note = siRNA sense sequence
  source 1..19: mol_type = other RNA
cttgggtgtgaggtggtgg

SEQ ID NO: 59881 - RNA, 19 nt, synthetic construct
  misc_feature 1..19: note = siRNA antisense sequence
  source 1..19: mol_type = other RNA
ccaccacctcacacccaag

SEQ ID NO: 59882 - RNA, 19 nt, synthetic construct
  misc_feature 1..19: note = siRNA sense sequence
  source 1..19: mol_type = other RNA
tgggtgtgaggtggtggtg

SEQ ID NO: 59883 - RNA, 19 nt, synthetic construct
  misc_feature 1..19: note = siRNA antisense sequence
  source 1..19: mol_type = other RNA
caccaccacctcacaccca

SEQ ID NO: 59884 - RNA, 19 nt, synthetic construct
  misc_feature 1..19: note = siRNA sense sequence
  source 1..19: mol_type = other RNA
gtgggactgcagaagcaag

SEQ ID NO: 59885 - RNA, 19 nt, synthetic construct
  misc_feature 1..19: note = siRNA antisense sequence
  source 1..19: mol_type = other RNA
cttgcttctgcagtcccac

SEQ ID NO: 59886 - RNA, 19 nt, synthetic construct
  misc_feature 1..19: note = siRNA sense sequence
  source 1..19: mol_type = other RNA
tgggactgcagaagcaaga

SEQ ID NO: 59887 - RNA, 19 nt, synthetic construct
  misc_feature 1..19: note = siRNA antisense sequence
  source 1..19: mol_type = other RNA
tcttgcttctgcagtccca

SEQ ID NO: 59888 - RNA, 19 nt, synthetic construct
  misc_feature 1..19: note = siRNA sense sequence
  source 1..19: mol_type = other RNA
gggactgcagaagcaagaa

SEQ ID NO: 59889 - RNA, 19 nt, synthetic construct
  misc_feature 1..19: note = siRNA antisense sequence
  source 1..19: mol_type = other RNA
ttcttgcttctgcagtccc

SEQ ID NO: 59890 - RNA, 19 nt, synthetic construct
  misc_feature 1..19: note = siRNA sense sequence
  source 1..19: mol_type = other RNA
agatatttagaagaggagt

SEQ ID NO: 59891 - RNA, 19 nt, synthetic construct
  misc_feature 1..19: note = siRNA antisense sequence
  source 1..19: mol_type = other RNA
actcctcttctaaatatct

SEQ ID NO: 59892 - RNA, 19 nt, synthetic construct
  misc_feature 1..19: note = siRNA sense sequence
  source 1..19: mol_type = other RNA
gcttggtgagttacatatg

SEQ ID NO: 59893 - RNA, 19 nt, synthetic construct
  misc_feature 1..19: note = siRNA antisense sequence
  source 1..19: mol_type = other RNA
catatgtaactcaccaagc

SEQ ID NO: 59894 - RNA, 19 nt, synthetic construct
  misc_feature 1..19: note = siRNA sense sequence
  source 1..19: mol_type = other RNA
cttggtgagttacatatgg

SEQ ID NO: 59895 - RNA, 19 nt, synthetic construct
  misc_feature 1..19: note = siRNA antisense sequence
  source 1..19: mol_type = other RNA
ccatatgtaactcaccaag

SEQ ID NO: 59896 - RNA, 19 nt, synthetic construct
  misc_feature 1..19: note = siRNA sense sequence
  source 1..19: mol_type = other RNA
ttggtgagttacatatggt

SEQ ID NO: 59897 - RNA, 19 nt, synthetic construct
  misc_feature 1..19: note = siRNA antisense sequence
  source 1..19: mol_type = other RNA
accatatgtaactcaccaa

SEQ ID NO: 59898 - RNA, 19 nt, synthetic construct
  misc_feature 1..19: note = siRNA sense sequence
  source 1..19: mol_type = other RNA
tggtgagttacatatggtg

SEQ ID NO: 59899 - RNA, 19 nt, synthetic construct
  misc_feature 1..19: note = siRNA antisense sequence
  source 1..19: mol_type = other RNA
caccatatgtaactcacca

SEQ ID NO: 59900 - RNA, 19 nt, synthetic construct
  misc_feature 1..19: note = siRNA sense sequence
  source 1..19: mol_type = other RNA
ggtgagttacatatggtgg

SEQ ID NO: 59901 - RNA, 19 nt, synthetic construct
  misc_feature 1..19: note = siRNA antisense sequence
  source 1..19: mol_type = other RNA
ccaccatatgtaactcacc

SEQ ID NO: 59902 - RNA, 19 nt, synthetic construct
  misc_feature 1..19: note = siRNA sense sequence
  source 1..19: mol_type = other RNA
gtgagttacatatggtggt

SEQ ID NO: 59903 - RNA, 19 nt, synthetic construct
  misc_feature 1..19: note = siRNA antisense sequence
  source 1..19: mol_type = other RNA
accaccatatgtaactcac

SEQ ID NO: 59904 - RNA, 19 nt, synthetic construct
  misc_feature 1..19: note = siRNA sense sequence
  source 1..19: mol_type = other RNA
tgagttacatatggtggtg

SEQ ID NO: 59905 - RNA, 19 nt, synthetic construct
  misc_feature 1..19: note = siRNA antisense sequence
  source 1..19: mol_type = other RNA
caccaccatatgtaactca

SEQ ID NO: 59906 - RNA, 19 nt, synthetic construct
  misc_feature 1..19: note = siRNA sense sequence
  source 1..19: mol_type = other RNA
gagttacatatggtggtgg

SEQ ID NO: 59907 - RNA, 19 nt, synthetic construct
  misc_feature 1..19: note = siRNA antisense sequence
  source 1..19: mol_type = other RNA
ccaccaccatatgtaactc

SEQ ID NO: 59908 - RNA, 19 nt, synthetic construct
  misc_feature 1..19: note = siRNA sense sequence
  source 1..19: mol_type = other RNA
agttacatatggtggtggt

SEQ ID NO: 59909 - RNA, 19 nt, synthetic construct
  misc_feature 1..19: note = siRNA antisense sequence
  source 1..19: mol_type = other RNA
accaccaccatatgtaact

SEQ ID NO: 59910 - RNA, 19 nt, synthetic construct
  misc_feature 1..19: note = siRNA sense sequence
  source 1..19: mol_type = other RNA
gttacatatggtggtggtg

SEQ ID NO: 59911 - RNA, 19 nt, synthetic construct
  misc_feature 1..19: note = siRNA antisense sequence
  source 1..19: mol_type = other RNA
caccaccaccatatgtaac

SEQ ID NO: 59912 - RNA, 19 nt, synthetic construct
  misc_feature 1..19: note = siRNA sense sequence
  source 1..19: mol_type = other RNA
ttacatatggtggtggtgg

SEQ ID NO: 59913 - RNA, 19 nt, synthetic construct
  misc_feature 1..19: note = siRNA antisense sequence
  source 1..19: mol_type = other RNA
ccaccaccaccatatgtaa

SEQ ID NO: 59914 - RNA, 19 nt, synthetic construct
  misc_feature 1..19: note = siRNA sense sequence
  source 1..19: mol_type = other RNA
tacatatggtggtggtgga

SEQ ID NO: 59915 - RNA, 19 nt, synthetic construct
  misc_feature 1..19: note = siRNA antisense sequence
  source 1..19: mol_type = other RNA
tccaccaccaccatatgta

SEQ ID NO: 59916 - RNA, 19 nt, synthetic construct
  misc_feature 1..19: note = siRNA sense sequence
  source 1..19: mol_type = other RNA
acatatggtggtggtggag

SEQ ID NO: 59917 - RNA, 19 nt, synthetic construct
  misc_feature 1..19: note = siRNA antisense sequence
  source 1..19: mol_type = other RNA
ctccaccaccaccatatgt

SEQ ID NO: 59918 - RNA, 19 nt, synthetic construct
  misc_feature 1..19: note = siRNA sense sequence
  source 1..19: mol_type = other RNA
agaggcggtcaatgaagaa

SEQ ID NO: 59919 - RNA, 19 nt, synthetic construct
  misc_feature 1..19: note = siRNA antisense sequence
  source 1..19: mol_type = other RNA
ttcttcattgaccgcctct

SEQ ID NO: 59920 - RNA, 19 nt, synthetic construct
  misc_feature 1..19: note = siRNA sense sequence
  source 1..19: mol_type = other RNA
gaggcggtcaatgaagaag

SEQ ID NO: 59921 - RNA, 19 nt, synthetic construct
  misc_feature 1..19: note = siRNA antisense sequence
  source 1..19: mol_type = other RNA
cttcttcattgaccgcctc

SEQ ID NO: 59922 - RNA, 19 nt, synthetic construct
  misc_feature 1..19: note = siRNA sense sequence
  source 1..19: mol_type = other RNA
aggcggtcaatgaagaaga

SEQ ID NO: 59923 - RNA, 19 nt, synthetic construct
  misc_feature 1..19: note = siRNA antisense sequence
  source 1..19: mol_type = other RNA
tcttcttcattgaccgcct

SEQ ID NO: 59924 - RNA, 19 nt, synthetic construct
  misc_feature 1..19: note = siRNA sense sequence
  source 1..19: mol_type = other RNA
ggcggtcaatgaagaagaa

SEQ ID NO: 59925 - RNA, 19 nt, synthetic construct
  misc_feature 1..19: note = siRNA antisense sequence
  source 1..19: mol_type = other RNA
ttcttcttcattgaccgcc

SEQ ID NO: 59926 - RNA, 19 nt, synthetic construct
  misc_feature 1..19: note = siRNA sense sequence
  source 1..19: mol_type = other RNA
gcggtcaatgaagaagaat

SEQ ID NO: 59927 - RNA, 19 nt, synthetic construct
  misc_feature 1..19: note = siRNA antisense sequence
  source 1..19: mol_type = other RNA
attcttcttcattgaccgc

SEQ ID NO: 59928 - RNA, 19 nt, synthetic construct
  misc_feature 1..19: note = siRNA sense sequence
  source 1..19: mol_type = other RNA
cggtcaatgaagaagaatc

SEQ ID NO: 59929 - RNA, 19 nt, synthetic construct
  misc_feature 1..19: note = siRNA antisense sequence
  source 1..19: mol_type = other RNA
gattcttcttcattgaccg

SEQ ID NO: 59930 - RNA, 19 nt, synthetic construct
  misc_feature 1..19: note = siRNA sense sequence
  source 1..19: mol_type = other RNA
ggtcaatgaagaagaatca

SEQ ID NO: 59931 - RNA, 19 nt, synthetic construct
  misc_feature 1..19: note = siRNA antisense sequence
  source 1..19: mol_type = other RNA
tgattcttcttcattgacc

SEQ ID NO: 59932 - RNA, 19 nt, synthetic construct
  misc_feature 1..19: note = siRNA sense sequence
  source 1..19: mol_type = other RNA
gtcaatgaagaagaatcaa

SEQ ID NO: 59933 - RNA, 19 nt, synthetic construct
  misc_feature 1..19: note = siRNA antisense sequence
  source 1..19: mol_type = other RNA
ttgattcttcttcattgac

SEQ ID NO: 59934 - RNA, 19 nt, synthetic construct
  misc_feature 1..19: note = siRNA sense sequence
  source 1..19: mol_type = other RNA
tcaatgaagaagaatcaag

SEQ ID NO: 59935 - RNA, 19 nt, synthetic construct
  misc_feature 1..19: note = siRNA antisense sequence
  source 1..19: mol_type = other RNA
cttgattcttcttcattga

SEQ ID NO: 59936 - RNA, 19 nt, synthetic construct
  misc_feature 1..19: note = siRNA sense sequence
  source 1..19: mol_type = other RNA
caatgaagaagaatcaagc

SEQ ID NO: 59937 - RNA, 19 nt, synthetic construct
  misc_feature 1..19: note = siRNA antisense sequence
  source 1..19: mol_type = other RNA
gcttgattcttcttcattg

SEQ ID NO: 59938 - RNA, 19 nt, synthetic construct
  misc_feature 1..19: note = siRNA sense sequence
  source 1..19: mol_type = other RNA
aactcctagatttgtggct

SEQ ID NO: 59939 - RNA, 19 nt, synthetic construct
  misc_feature 1..19: note = siRNA antisense sequence
  source 1..19: mol_type = other RNA
agccacaaatctaggagtt

SEQ ID NO: 59940 - RNA, 19 nt, synthetic construct
  misc_feature 1..19: note = siRNA sense sequence
  source 1..19: mol_type = other RNA
actcctagatttgtggctt

SEQ ID NO: 59941 - RNA, 19 nt, synthetic construct
  misc_feature 1..19: note = siRNA antisense sequence
  source 1..19: mol_type = other RNA
aagccacaaatctaggagt

SEQ ID NO: 59942 - RNA, 19 nt, synthetic construct
  misc_feature 1..19: note = siRNA sense sequence
  source 1..19: mol_type = other RNA
ctcctagatttgtggcttg

SEQ ID NO: 59943 - RNA, 19 nt, synthetic construct
  misc_feature 1..19: note = siRNA antisense sequence
  source 1..19: mol_type = other RNA
caagccacaaatctaggag

SEQ ID NO: 59944 - RNA, 19 nt, synthetic construct
  misc_feature 1..19: note = siRNA sense sequence
  source 1..19: mol_type = other RNA
tcctagatttgtggcttga

SEQ ID NO: 59945 - RNA, 19 nt, synthetic construct
  misc_feature 1..19: note = siRNA antisense sequence
  source 1..19: mol_type = other RNA
tcaagccacaaatctagga

SEQ ID NO: 59946 - RNA, 19 nt, synthetic construct
  misc_feature 1..19: note = siRNA sense sequence
  source 1..19: mol_type = other RNA
cctagatttgtggcttgac

SEQ ID NO: 59947 - RNA, 19 nt, synthetic construct
  misc_feature 1..19: note = siRNA antisense sequence
  source 1..19: mol_type = other RNA
gtcaagccacaaatctagg

SEQ ID NO: 59948 - RNA, 19 nt, synthetic construct
  misc_feature 1..19: note = siRNA sense sequence
  source 1..19: mol_type = other RNA
tagatttgtggcttgaccg

SEQ ID NO: 59949 - RNA, 19 nt, synthetic construct
  misc_feature 1..19: note = siRNA antisense sequence
  source 1..19: mol_type = other RNA
cggtcaagccacaaatcta

SEQ ID NO: 59950 - RNA, 19 nt, synthetic construct
  misc_feature 1..19: note = siRNA sense sequence
  source 1..19: mol_type = other RNA
agatttgtggcttgaccgt

SEQ ID NO: 59951 - RNA, 19 nt, synthetic construct
  misc_feature 1..19: note = siRNA antisense sequence
  source 1..19: mol_type = other RNA
acggtcaagccacaaatct

SEQ ID NO: 59952 - RNA, 19 nt, synthetic construct
  misc_feature 1..19: note = siRNA sense sequence
  source 1..19: mol_type = other RNA
gatttgtggcttgaccgtt

SEQ ID NO: 59953 - RNA, 19 nt, synthetic construct
  misc_feature 1..19: note = siRNA antisense sequence
  source 1..19: mol_type = other RNA
aacggtcaagccacaaatc

SEQ ID NO: 59954 - RNA, 19 nt, synthetic construct
  misc_feature 1..19: note = siRNA sense sequence
  source 1..19: mol_type = other RNA
atttgtggcttgaccgttt

SEQ ID NO: 59955 - RNA, 19 nt, synthetic construct
  misc_feature 1..19: note = siRNA antisense sequence
  source 1..19: mol_type = other RNA
aaacggtcaagccacaaat

SEQ ID NO: 59956 - RNA, 19 nt, synthetic construct
  misc_feature 1..19: note = siRNA sense sequence
  source 1..19: mol_type = other RNA
tttgtggcttgaccgtttt

SEQ ID NO: 59957 - RNA, 19 nt, synthetic construct
  misc_feature 1..19: note = siRNA antisense sequence
  source 1..19: mol_type = other RNA
aaaacggtcaagccacaaa

SEQ ID NO: 59958 - RNA, 19 nt, synthetic construct
  misc_feature 1..19: note = siRNA sense sequence
  source 1..19: mol_type = other RNA
ttgtggcttgaccgttttc

SEQ ID NO: 59959 - RNA, 19 nt, synthetic construct
  misc_feature 1..19: note = siRNA antisense sequence
  source 1..19: mol_type = other RNA
gaaaacggtcaagccacaa

SEQ ID NO: 59960 - RNA, 19 nt, synthetic construct
  misc_feature 1..19: note = siRNA sense sequence
  source 1..19: mol_type = other RNA
tgtggcttgaccgttttcc

SEQ ID NO: 59961 - RNA, 19 nt, synthetic construct
  misc_feature 1..19: note = siRNA antisense sequence
  source 1..19: mol_type = other RNA
ggaaaacggtcaagccaca

SEQ ID NO: 59962 - RNA, 19 nt, synthetic construct
  misc_feature 1..19: note = siRNA sense sequence
  source 1..19: mol_type = other RNA
gtggcttgaccgttttcca

SEQ ID NO: 59963 - RNA, 19 nt, synthetic construct
  misc_feature 1..19: note = siRNA antisense sequence
  source 1..19: mol_type = other RNA
tggaaaacggtcaagccac

SEQ ID NO: 59964 - RNA, 19 nt, synthetic construct
  misc_feature 1..19: note = siRNA sense sequence
  source 1..19: mol_type = other RNA
tggcttgaccgttttccac

SEQ ID NO: 59965 - RNA, 19 nt, synthetic construct
  misc_feature 1..19: note = siRNA antisense sequence
  source 1..19: mol_type = other RNA
gtggaaaacggtcaagcca

SEQ ID NO: 59966 - RNA, 19 nt, synthetic construct
  misc_feature 1..19: note = siRNA sense sequence
  source 1..19: mol_type = other RNA
ggcttgaccgttttccacc

SEQ ID NO: 59967 - RNA, 19 nt, synthetic construct
  misc_feature 1..19: note = siRNA antisense sequence
  source 1..19: mol_type = other RNA
ggtggaaaacggtcaagcc

SEQ ID NO: 59968 - RNA, 19 nt, synthetic construct
  misc_feature 1..19: note = siRNA sense sequence
  source 1..19: mol_type = other RNA
tgaccgttttccaccctct

SEQ ID NO: 59969 - RNA, 19 nt, synthetic construct
  misc_feature 1..19: note = siRNA antisense sequence
  source 1..19: mol_type = other RNA
agagggtggaaaacggtca

SEQ ID NO: 59970 - RNA, 19 nt, synthetic construct
  misc_feature 1..19: note = siRNA sense sequence
  source 1..19: mol_type = other RNA
gaccgttttccaccctctc

SEQ ID NO: 59971 - RNA, 19 nt, synthetic construct
  misc_feature 1..19: note = siRNA antisense sequence
  source 1..19: mol_type = other RNA
gagagggtggaaaacggtc

SEQ ID NO: 59972 - RNA, 19 nt, synthetic construct
  misc_feature 1..19: note = siRNA sense sequence
  source 1..19: mol_type = other RNA
accgttttccaccctctca

SEQ ID NO: 59973 - RNA, 19 nt, synthetic construct
  misc_feature 1..19: note = siRNA antisense sequence
  source 1..19: mol_type = other RNA
tgagagggtggaaaacggt

SEQ ID NO: 59974 - RNA, 19 nt, synthetic construct
  misc_feature 1..19: note = siRNA sense sequence
  source 1..19: mol_type = other RNA
ccgttttccaccctctcaa

SEQ ID NO: 59975 - RNA, 19 nt, synthetic construct
  misc_feature 1..19: note = siRNA antisense sequence
  source 1..19: mol_type = other RNA
ttgagagggtggaaaacgg

SEQ ID NO: 59976 - RNA, 19 nt, synthetic construct
  misc_feature 1..19: note = siRNA sense sequence
  source 1..19: mol_type = other RNA
cgttttccaccctctcaac

SEQ ID NO: 59977 - RNA, 19 nt, synthetic construct
  misc_feature 1..19: note = siRNA antisense sequence
  source 1..19: mol_type = other RNA
gttgagagggtggaaaacg

SEQ ID NO: 59978 - RNA, 19 nt, synthetic construct
  misc_feature 1..19: note = siRNA sense sequence
  source 1..19: mol_type = other RNA
gttttccaccctctcaact

SEQ ID NO: 59979 - RNA, 19 nt, synthetic construct
  misc_feature 1..19: note = siRNA antisense sequence
  source 1..19: mol_type = other RNA
agttgagagggtggaaaac

SEQ ID NO: 59980 - RNA, 19 nt, synthetic construct
  misc_feature 1..19: note = siRNA sense sequence
  source 1..19: mol_type = other RNA
ttttccaccctctcaactg

SEQ ID NO: 59981 - RNA, 19 nt, synthetic construct
  misc_feature 1..19: note = siRNA antisense sequence
  source 1..19: mol_type = other RNA
cagttgagagggtggaaaa

SEQ ID NO: 59982 - RNA, 19 nt, synthetic construct
  misc_feature 1..19: note = siRNA sense sequence
  source 1..19: mol_type = other RNA
tttccaccctctcaactga

SEQ ID NO: 59983 - RNA, 19 nt, synthetic construct
  misc_feature 1..19: note = siRNA antisense sequence
  source 1..19: mol_type = other RNA
tcagttgagagggtggaaa

SEQ ID NO: 59984 - RNA, 19 nt, synthetic construct
  misc_feature 1..19: note = siRNA sense sequence
  source 1..19: mol_type = other RNA
ttccaccctctcaactgag

SEQ ID NO: 59985 - RNA, 19 nt, synthetic construct
  misc_feature 1..19: note = siRNA antisense sequence
  source 1..19: mol_type = other RNA
ctcagttgagagggtggaa

SEQ ID NO: 59986 - RNA, 19 nt, synthetic construct
  misc_feature 1..19: note = siRNA sense sequence
  source 1..19: mol_type = other RNA
tccaccctctcaactgagc

SEQ ID NO: 59987 - RNA, 19 nt, synthetic construct
  misc_feature 1..19: note = siRNA antisense sequence
  source 1..19: mol_type = other RNA
gctcagttgagagggtgga

SEQ ID NO: 59988 - RNA, 19 nt, synthetic construct
  misc_feature 1..19: note = siRNA sense sequence
  source 1..19: mol_type = other RNA
ccaccctctcaactgagct

SEQ ID NO: 59989 - RNA, 19 nt, synthetic construct
  misc_feature 1..19: note = siRNA antisense sequence
  source 1..19: mol_type = other RNA
agctcagttgagagggtgg

SEQ ID NO: 59990 - RNA, 19 nt, synthetic construct
  misc_feature 1..19: note = siRNA sense sequence
  source 1..19: mol_type = other RNA
ctgagctttatgatattcc

SEQ ID NO: 59991 - RNA, 19 nt, synthetic construct
  misc_feature 1..19: note = siRNA antisense sequence
  source 1..19: mol_type = other RNA
ggaatatcataaagctcag

SEQ ID NO: 59992 - RNA, 19 nt, synthetic construct
  misc_feature 1..19: note = siRNA sense sequence
  source 1..19: mol_type = other RNA
tgagctttatgatattcct

SEQ ID NO: 59993 - RNA, 19 nt, synthetic construct
  misc_feature 1..19: note = siRNA antisense sequence
  source 1..19: mol_type = other RNA
aggaatatcataaagctca

SEQ ID NO: 59994 - RNA, 19 nt, synthetic construct
  misc_feature 1..19: note = siRNA sense sequence
  source 1..19: mol_type = other RNA
gagctttatgatattccta

SEQ ID NO: 59995 - RNA, 19 nt, synthetic construct
  misc_feature 1..19: note = siRNA antisense sequence
  source 1..19: mol_type = other RNA
taggaatatcataaagctc

SEQ ID NO: 59996 - RNA, 19 nt, synthetic construct
  misc_feature 1..19: note = siRNA sense sequence
  source 1..19: mol_type = other RNA
gctttatgatattcctaag

SEQ ID NO: 59997 - RNA, 19 nt, synthetic construct
  misc_feature 1..19: note = siRNA antisense sequence
  source 1..19: mol_type = other RNA
cttaggaatatcataaagc

SEQ ID NO: 59998 - RNA, 19 nt, synthetic construct
  misc_feature 1..19: note = siRNA sense sequence
  source 1..19: mol_type = other RNA
atctcatgattagagttga

SEQ ID NO: 59999 - RNA, 19 nt, synthetic construct
  misc_feature 1..19: note = siRNA antisense sequence
  source 1..19: mol_type = other RNA
tcaactctaatcatgagat

SEQ ID NO: 60000 - RNA, 19 nt, synthetic construct
  misc_feature 1..19: note = siRNA sense sequence
  source 1..19: mol_type = other RNA
catgattagagttgagtag

SEQ ID NO: 60001 - RNA, 19 nt, synthetic construct
  misc_feature 1..19: note = siRNA antisense sequence
  source 1..19: mol_type = other RNA
ctactcaactctaatcatg

SEQ ID NO: 60002 - RNA, 19 nt, synthetic construct
  misc_feature 1..19: note = siRNA sense sequence
  source 1..19: mol_type = other RNA
atgattagagttgagtaga

SEQ ID NO: 60003 - RNA, 19 nt, synthetic construct
  misc_feature 1..19: note = siRNA antisense sequence
  source 1..19: mol_type = other RNA
tctactcaactctaatcat

SEQ ID NO: 60004 - RNA, 19 nt, synthetic construct
  misc_feature 1..19: note = siRNA sense sequence
  source 1..19: mol_type = other RNA
gattagagttgagtagatt

SEQ ID NO: 60005 - RNA, 19 nt, synthetic construct
  misc_feature 1..19: note = siRNA antisense sequence
  source 1..19: mol_type = other RNA
aatctactcaactctaatc

SEQ ID NO: 60006 - RNA, 19 nt, synthetic construct
  misc_feature 1..19: note = siRNA sense sequence
  source 1..19: mol_type = other RNA
tagagttgagtagatttag

SEQ ID NO: 60007 - RNA, 19 nt, synthetic construct
  misc_feature 1..19: note = siRNA antisense sequence
  source 1..19: mol_type = other RNA
ctaaatctactcaactcta

SEQ ID NO: 60008 - RNA, 19 nt, synthetic construct
  misc_feature 1..19: note = siRNA sense sequence
  source 1..19: mol_type = other RNA
agagttgagtagatttaga

SEQ ID NO: 60009 - RNA, 19 nt, synthetic construct
  misc_feature 1..19: note = siRNA antisense sequence
  source 1..19: mol_type = other RNA
tctaaatctactcaactct

SEQ ID NO: 60010 - RNA, 19 nt, synthetic construct
  misc_feature 1..19: note = siRNA sense sequence
  source 1..19: mol_type = other RNA
gagttgagtagatttagat

SEQ ID NO: 60011 - RNA, 19 nt, synthetic construct
  misc_feature 1..19: note = siRNA antisense sequence
  source 1..19: mol_type = other RNA
atctaaatctactcaactc

SEQ ID NO: 60012 - RNA, 19 nt, synthetic construct
  misc_feature 1..19: note = siRNA sense sequence
  source 1..19: mol_type = other RNA
agttgagtagatttagatc

SEQ ID NO: 60013 - RNA, 19 nt, synthetic construct
  misc_feature 1..19: note = siRNA antisense sequence
  source 1..19: mol_type = other RNA
gatctaaatctactcaact

SEQ ID NO: 60014 - RNA, 19 nt, synthetic construct
  misc_feature 1..19: note = siRNA sense sequence
  source 1..19: mol_type = other RNA
atttagatcttgcagtact

SEQ ID NO: 60015 - RNA, 19 nt, synthetic construct
  misc_feature 1..19: note = siRNA antisense sequence
  source 1..19: mol_type = other RNA
agtactgcaagatctaaat

SEQ ID NO: 60016 - RNA, 19 nt, synthetic construct
  misc_feature 1..19: note = siRNA sense sequence
  source 1..19: mol_type = other RNA
tttagatcttgcagtactt

SEQ ID NO: 60017 - RNA, 19 nt, synthetic construct
  misc_feature 1..19: note = siRNA antisense sequence
  source 1..19: mol_type = other RNA
aagtactgcaagatctaaa

SEQ ID NO: 60018 - RNA, 19 nt, synthetic construct
  misc_feature 1..19: note = siRNA sense sequence
  source 1..19: mol_type = other RNA
ttagatcttgcagtacttg

SEQ ID NO: 60019 - RNA, 19 nt, synthetic construct
  misc_feature 1..19: note = siRNA antisense sequence
  source 1..19: mol_type = other RNA
caagtactgcaagatctaa

SEQ ID NO: 60020 - RNA, 19 nt, synthetic construct
  misc_feature 1..19: note = siRNA sense sequence
  source 1..19: mol_type = other RNA
atcttgcagtacttgactt

SEQ ID NO: 60021 - RNA, 19 nt, synthetic construct
  misc_feature 1..19: note = siRNA antisense sequence
  source 1..19: mol_type = other RNA
aagtcaagtactgcaagat

SEQ ID NO: 60022 - RNA, 19 nt, synthetic construct
  misc_feature 1..19: note = siRNA sense sequence
  source 1..19: mol_type = other RNA
tcttgcagtacttgacttt

SEQ ID NO: 60023 - RNA, 19 nt, synthetic construct
  misc_feature 1..19: note = siRNA antisense sequence
  source 1..19: mol_type = other RNA
aaagtcaagtactgcaaga

SEQ ID NO: 60024 - RNA, 19 nt, synthetic construct
  misc_feature 1..19: note = siRNA sense sequence
  source 1..19: mol_type = other RNA
cttgcagtacttgactttg

SEQ ID NO: 60025 - RNA, 19 nt, synthetic construct
  misc_feature 1..19: note = siRNA antisense sequence
  source 1..19: mol_type = other RNA
caaagtcaagtactgcaag

SEQ ID NO: 60026 - RNA, 19 nt, synthetic construct
  misc_feature 1..19: note = siRNA sense sequence
  source 1..19: mol_type = other RNA
ttgcagtacttgactttgt

SEQ ID NO: 60027 - RNA, 19 nt, synthetic construct
  misc_feature 1..19: note = siRNA antisense sequence
  source 1..19: mol_type = other RNA
acaaagtcaagtactgcaa

SEQ ID NO: 60028 - RNA, 19 nt, synthetic construct
  misc_feature 1..19: note = siRNA sense sequence
  source 1..19: mol_type = other RNA
tgcagtacttgactttgta

SEQ ID NO: 60029 - RNA, 19 nt, synthetic construct
  misc_feature 1..19: note = siRNA antisense sequence
  source 1..19: mol_type = other RNA
tacaaagtcaagtactgca

SEQ ID NO: 60030 - RNA, 19 nt, synthetic construct
  misc_feature 1..19: note = siRNA sense sequence
  source 1..19: mol_type = other RNA
gtacttgactttgtatttc

SEQ ID NO: 60031 - RNA, 19 nt, synthetic construct
  misc_feature 1..19: note = siRNA antisense sequence
  source 1..19: mol_type = other RNA
gaaatacaaagtcaagtac

SEQ ID NO: 60032 - RNA, 19 nt, synthetic construct
  misc_feature 1..19: note = siRNA sense sequence
  source 1..19: mol_type = other RNA
caaaagccagtgcaaagca

SEQ ID NO: 60033 - RNA, 19 nt, synthetic construct
  misc_feature 1..19: note = siRNA antisense sequence
  source 1..19: mol_type = other RNA
tgctttgcactggcttttg

SEQ ID NO: 60034 - RNA, 19 nt, synthetic construct
  misc_feature 1..19: note = siRNA sense sequence
  source 1..19: mol_type = other RNA
aattgtgcgttcttaaaag

SEQ ID NO: 60035 - RNA, 19 nt, synthetic construct
  misc_feature 1..19: note = siRNA antisense sequence
  source 1..19: mol_type = other RNA
cttttaagaacgcacaatt

SEQ ID NO: 60036 - RNA, 19 nt, synthetic construct
  misc_feature 1..19: note = siRNA sense sequence
  source 1..19: mol_type = other RNA
attgtgcgttcttaaaagg

SEQ ID NO: 60037 - RNA, 19 nt, synthetic construct
  misc_feature 1..19: note = siRNA antisense sequence
  source 1..19: mol_type = other RNA
ccttttaagaacgcacaat

SEQ ID NO: 60038 - RNA, 19 nt, synthetic construct
  misc_feature 1..19: note = siRNA sense sequence
  source 1..19: mol_type = other RNA
ttgtgcgttcttaaaagga

SEQ ID NO: 60039 - RNA, 19 nt, synthetic construct
  misc_feature 1..19: note = siRNA antisense sequence
  source 1..19: mol_type = other RNA
tccttttaagaacgcacaa

SEQ ID NO: 60040 - RNA, 19 nt, synthetic construct
  misc_feature 1..19: note = siRNA sense sequence
  source 1..19: mol_type = other RNA
tgtgcgttcttaaaaggac

SEQ ID NO: 60041 - RNA, 19 nt, synthetic construct
  misc_feature 1..19: note = siRNA antisense sequence
  source 1..19: mol_type = other RNA
gtccttttaagaacgcaca

SEQ ID NO: 60042 - RNA, 19 nt, synthetic construct
  misc_feature 1..19: note = siRNA sense sequence
  source 1..19: mol_type = other RNA
gtgcgttcttaaaaggaca

SEQ ID NO: 60043 - RNA, 19 nt, synthetic construct
  misc_feature 1..19: note = siRNA antisense sequence
  source 1..19: mol_type = other RNA
tgtccttttaagaacgcac

SEQ ID NO: 60044 - RNA, 19 nt, synthetic construct
  misc_feature 1..19: note = siRNA sense sequence
  source 1..19: mol_type = other RNA
taaatgtttactcttctcc

SEQ ID NO: 60045 - RNA, 19 nt, synthetic construct
  misc_feature 1..19: note = siRNA antisense sequence
  source 1..19: mol_type = other RNA
ggagaagagtaaacattta

SEQ ID NO: 60046 - RNA, 19 nt, synthetic construct
  misc_feature 1..19: note = siRNA sense sequence
  source 1..19: mol_type = other RNA
aaatgtttactcttctccc

SEQ ID NO: 60047 - RNA, 19 nt, synthetic construct
  misc_feature 1..19: note = siRNA antisense sequence
  source 1..19: mol_type = other RNA
gggagaagagtaaacattt

SEQ ID NO: 60048 - RNA, 19 nt, synthetic construct
  misc_feature 1..19: note = siRNA sense sequence
  source 1..19: mol_type = other RNA
aaattctccttatgagttg

SEQ ID NO: 60049 - RNA, 19 nt, synthetic construct
  misc_feature 1..19: note = siRNA antisense sequence
  source 1..19: mol_type = other RNA
caactcataaggagaattt

SEQ ID NO: 60050 - RNA, 19 nt, synthetic construct
  misc_feature 1..19: note = siRNA sense sequence
  source 1..19: mol_type = other RNA
aattctccttatgagttgc

SEQ ID NO: 60051 - RNA, 19 nt, synthetic construct
  misc_feature 1..19: note = siRNA antisense sequence
  source 1..19: mol_type = other RNA
gcaactcataaggagaatt

SEQ ID NO: 60052 - RNA, 19 nt, synthetic construct
  misc_feature 1..19: note = siRNA sense sequence
  source 1..19: mol_type = other RNA
tccttatgagttgcttaac

SEQ ID NO: 60053 - RNA, 19 nt, synthetic construct
  misc_feature 1..19: note = siRNA antisense sequence
  source 1..19: mol_type = other RNA
gttaagcaactcataagga

SEQ ID NO: 60054 - RNA, 19 nt, synthetic construct
  misc_feature 1..19: note = siRNA sense sequence
  source 1..19: mol_type = other RNA
aattctttcctgtcatcat

SEQ ID NO: 60055 - RNA, 19 nt, synthetic construct
  misc_feature 1..19: note = siRNA antisense sequence
  source 1..19: mol_type = other RNA
atgatgacaggaaagaatt

SEQ ID NO: 60056 - RNA, 19 nt, synthetic construct
  misc_feature 1..19: note = siRNA sense sequence
  source 1..19: mol_type = other RNA
tctttcctgtcatcatttc

SEQ ID NO: 60057 - RNA, 19 nt, synthetic construct
  misc_feature 1..19: note = siRNA antisense sequence
  source 1..19: mol_type = other RNA
gaaatgatgacaggaaaga

SEQ ID NO: 60058 - RNA, 19 nt, synthetic construct
  misc_feature 1..19: note = siRNA sense sequence
  source 1..19: mol_type = other RNA
cctgtcatcatttcagatt

SEQ ID NO: 60059 - RNA, 19 nt, synthetic construct
  misc_feature 1..19: note = siRNA antisense sequence
  source 1..19: mol_type = other RNA
aatctgaaatgatgacagg

SEQ ID NO: 60060 - RNA, 19 nt, synthetic construct
  misc_feature 1..19: note = siRNA sense sequence
  source 1..19: mol_type = other RNA
ctgtcatcatttcagattc

SEQ ID NO: 60061 - RNA, 19 nt, synthetic construct
  misc_feature 1..19: note = siRNA antisense sequence
  source 1..19: mol_type = other RNA
gaatctgaaatgatgacag

SEQ ID NO: 60062 - RNA, 19 nt, synthetic construct
  misc_feature 1..19: note = siRNA sense sequence
  source 1..19: mol_type = other RNA
tgtcatcatttcagattcc

SEQ ID NO: 60063 - RNA, 19 nt, synthetic construct
  misc_feature 1..19: note = siRNA antisense sequence
  source 1..19: mol_type = other RNA
ggaatctgaaatgatgaca

SEQ ID NO: 60064 - RNA, 19 nt, synthetic construct
  misc_feature 1..19: note = siRNA sense sequence
  source 1..19: mol_type = other RNA
gtcatcatttcagattccc

SEQ ID NO: 60065 - RNA, 19 nt, synthetic construct
  misc_feature 1..19: note = siRNA antisense sequence
  source 1..19: mol_type = other RNA
gggaatctgaaatgatgac

SEQ ID NO: 60066 - RNA, 19 nt, synthetic construct
  misc_feature 1..19: note = siRNA sense sequence
  source 1..19: mol_type = other RNA
catcatttcagattccctt

SEQ ID NO: 60067 - RNA, 19 nt, synthetic construct
  misc_feature 1..19: note = siRNA antisense sequence
  source 1..19: mol_type = other RNA
aagggaatctgaaatgatg

SEQ ID NO: 60068 - RNA, 19 nt, synthetic construct
  misc_feature 1..19: note = siRNA sense sequence
  source 1..19: mol_type = other RNA
atttcagattccctttgcc

SEQ ID NO: 60069 - RNA, 19 nt, synthetic construct
  misc_feature 1..19: note = siRNA antisense sequence
  source 1..19: mol_type = other RNA
ggcaaagggaatctgaaat

SEQ ID NO: 60070 - RNA, 19 nt, synthetic construct
  misc_feature 1..19: note = siRNA sense sequence
  source 1..19: mol_type = other RNA
tttcagattccctttgcca

SEQ ID NO: 60071 - RNA, 19 nt, synthetic construct
  misc_feature 1..19: note = siRNA antisense sequence
  source 1..19: mol_type = other RNA
tggcaaagggaatctgaaa

SEQ ID NO: 60072 - RNA, 19 nt, synthetic construct
  misc_feature 1..19: note = siRNA sense sequence
  source 1..19: mol_type = other RNA
tttgccaaagattgtggaa

SEQ ID NO: 60073 - RNA, 19 nt, synthetic construct
  misc_feature 1..19: note = siRNA antisense sequence
  source 1..19: mol_type = other RNA
ttccacaatctttggcaaa

SEQ ID NO: 60074 - RNA, 19 nt, synthetic construct
  misc_feature 1..19: note = siRNA sense sequence
  source 1..19: mol_type = other RNA
aaaatgtatctcagacctc

SEQ ID NO: 60075 - RNA, 19 nt, synthetic construct
  misc_feature 1..19: note = siRNA antisense sequence
  source 1..19: mol_type = other RNA
gaggtctgagatacatttt

SEQ ID NO: 60076 - RNA, 19 nt, synthetic construct
  misc_feature 1..19: note = siRNA sense sequence
  source 1..19: mol_type = other RNA
aaatgtatctcagacctca

SEQ ID NO: 60077 - RNA, 19 nt, synthetic construct
  misc_feature 1..19: note = siRNA antisense sequence
  source 1..19: mol_type = other RNA
tgaggtctgagatacattt

SEQ ID NO: 60078 - RNA, 19 nt, synthetic construct
  misc_feature 1..19: note = siRNA sense sequence
  source 1..19: mol_type = other RNA
aatgtatctcagacctcag

SEQ ID NO: 60079 - RNA, 19 nt, synthetic construct
  misc_feature 1..19: note = siRNA antisense sequence
  source 1..19: mol_type = other RNA
ctgaggtctgagatacatt

SEQ ID NO: 60080 - RNA, 19 nt, synthetic construct
  misc_feature 1..19: note = siRNA sense sequence
  source 1..19: mol_type = other RNA
cagacctcagcctgcatgt

SEQ ID NO: 60081 - RNA, 19 nt, synthetic construct
  misc_feature 1..19: note = siRNA antisense sequence
  source 1..19: mol_type = other RNA
acatgcaggctgaggtctg

SEQ ID NO: 60082 - RNA, 19 nt, synthetic construct
  misc_feature 1..19: note = siRNA sense sequence
  source 1..19: mol_type = other RNA
agacctcagcctgcatgtc

SEQ ID NO: 60083 - RNA, 19 nt, synthetic construct
  misc_feature 1..19: note = siRNA antisense sequence
  source 1..19: mol_type = other RNA
gacatgcaggctgaggtct

SEQ ID NO: 60084 - RNA, 19 nt, synthetic construct
  misc_feature 1..19: note = siRNA sense sequence
  source 1..19: mol_type = other RNA
gacctcagcctgcatgtcg

SEQ ID NO: 60085 - RNA, 19 nt, synthetic construct
  misc_feature 1..19: note = siRNA antisense sequence
  source 1..19: mol_type = other RNA
cgacatgcaggctgaggtc

SEQ ID NO: 60086 - RNA, 19 nt, synthetic construct
  misc_feature 1..19: note = siRNA sense sequence
  source 1..19: mol_type = other RNA
acctcagcctgcatgtcgc

SEQ ID NO: 60087 - RNA, 19 nt, synthetic construct
  misc_feature 1..19: note = siRNA antisense sequence
  source 1..19: mol_type = other RNA
gcgacatgcaggctgaggt

SEQ ID NO: 60088 - RNA, 19 nt, synthetic construct
  misc_feature 1..19: note = siRNA sense sequence
  source 1..19: mol_type = other RNA
ctcagcctgcatgtcgcca

SEQ ID NO: 60089 - RNA, 19 nt, synthetic construct
  misc_feature 1..19: note = siRNA antisense sequence
  source 1..19: mol_type = other RNA
tggcgacatgcaggctgag

SEQ ID NO: 60090 - RNA, 19 nt, synthetic construct
  misc_feature 1..19: note = siRNA sense sequence
  source 1..19: mol_type = other RNA
tcagcctgcatgtcgccac

SEQ ID NO: 60091 - RNA, 19 nt, synthetic construct
  misc_feature 1..19: note = siRNA antisense sequence
  source 1..19: mol_type = other RNA
gtggcgacatgcaggctga

SEQ ID NO: 60092 - RNA, 19 nt, synthetic construct
  misc_feature 1..19: note = siRNA sense sequence
  source 1..19: mol_type = other RNA
agcctgcatgtcgccacca

SEQ ID NO: 60093 - RNA, 19 nt, synthetic construct
  misc_feature 1..19: note = siRNA antisense sequence
  source 1..19: mol_type = other RNA
tggtggcgacatgcaggct

SEQ ID NO: 60094 - RNA, 19 nt, synthetic construct
  misc_feature 1..19: note = siRNA sense sequence
  source 1..19: mol_type = other RNA
aaaaggacctgctgattgt

SEQ ID NO: 60095 - RNA, 19 nt, synthetic construct
  misc_feature 1..19: note = siRNA antisense sequence
  source 1..19: mol_type = other RNA
acaatcagcaggtcctttt

SEQ ID NO: 60096 - RNA, 19 nt, synthetic construct
  misc_feature 1..19: note = siRNA sense sequence
  source 1..19: mol_type = other RNA
aaaggacctgctgattgtc

SEQ ID NO: 60097 - RNA, 19 nt, synthetic construct
  misc_feature 1..19: note = siRNA antisense sequence
  source 1..19: mol_type = other RNA
gacaatcagcaggtccttt

SEQ ID NO: 60098 - RNA, 19 nt, synthetic construct
  misc_feature 1..19: note = siRNA sense sequence
  source 1..19: mol_type = other RNA
gacctgctgattgtccgat

SEQ ID NO: 60099 - RNA, 19 nt, synthetic construct
  misc_feature 1..19: note = siRNA antisense sequence
  source 1..19: mol_type = other RNA
atcggacaatcagcaggtc

SEQ ID NO: 60100 - RNA, 19 nt, synthetic construct
  misc_feature 1..19: note = siRNA sense sequence
  source 1..19: mol_type = other RNA
acctgctgattgtccgatc

SEQ ID NO: 60101 - RNA, 19 nt, synthetic construct
  misc_feature 1..19: note = siRNA antisense sequence
  source 1..19: mol_type = other RNA
gatcggacaatcagcaggt

SEQ ID NO: 60102 - RNA, 19 nt, synthetic construct
  misc_feature 1..19: note = siRNA sense sequence
  source 1..19: mol_type = other RNA
cctgctgattgtccgatcc

SEQ ID NO: 60103 - RNA, 19 nt, synthetic construct
  misc_feature 1..19: note = siRNA antisense sequence
  source 1..19: mol_type = other RNA
ggatcggacaatcagcagg

SEQ ID NO: 60104 - RNA, 19 nt, synthetic construct
  misc_feature 1..19: note = siRNA sense sequence
  source 1..19: mol_type = other RNA
ctgctgattgtccgatccc

SEQ ID NO: 60105 - RNA, 19 nt, synthetic construct
  misc_feature 1..19: note = siRNA antisense sequence
  source 1..19: mol_type = other RNA
gggatcggacaatcagcag

SEQ ID NO: 60106 - RNA, 19 nt, synthetic construct
  misc_feature 1..19: note = siRNA sense sequence
  source 1..19: mol_type = other RNA
gattgtccgatcccagaat

SEQ ID NO: 60107 - RNA, 19 nt, synthetic construct
  misc_feature 1..19: note = siRNA antisense sequence
  source 1..19: mol_type = other RNA
attctgggatcggacaatc

SEQ ID NO: 60108 - RNA, 19 nt, synthetic construct
  misc_feature 1..19: note = siRNA sense sequence
  source 1..19: mol_type = other RNA
attgtccgatcccagaatg

SEQ ID NO: 60109 - RNA, 19 nt, synthetic construct
  misc_feature 1..19: note = siRNA antisense sequence
  source 1..19: mol_type = other RNA
cattctgggatcggacaat

SEQ ID NO: 60110 - RNA, 19 nt, synthetic construct
  misc_feature 1..19: note = siRNA sense sequence
  source 1..19: mol_type = other RNA
tccgatcccagaatgataa

SEQ ID NO: 60111 - RNA, 19 nt, synthetic construct
  misc_feature 1..19: note = siRNA antisense sequence
  source 1..19: mol_type = other RNA
ttatcattctgggatcgga

SEQ ID NO: 60112 - RNA, 19 nt, synthetic construct
  misc_feature 1..19: note = siRNA sense sequence
  source 1..19: mol_type = other RNA
ccgatcccagaatgataag

SEQ ID NO: 60113 - RNA, 19 nt, synthetic construct
  misc_feature 1..19: note = siRNA antisense sequence
  source 1..19: mol_type = other RNA
cttatcattctgggatcgg

SEQ ID NO: 60114 - RNA, 19 nt, synthetic construct
  misc_feature 1..19: note = siRNA sense sequence
  source 1..19: mol_type = other RNA
cgatcccagaatgataagt

SEQ ID NO: 60115 - RNA, 19 nt, synthetic construct
  misc_feature 1..19: note = siRNA antisense sequence
  source 1..19: mol_type = other RNA
acttatcattctgggatcg

SEQ ID NO: 60116 - RNA, 19 nt, synthetic construct
  misc_feature 1..19: note = siRNA sense sequence
  source 1..19: mol_type = other RNA
gatcccagaatgataagtt

SEQ ID NO: 60117 - RNA, 19 nt, synthetic construct
  misc_feature 1..19: note = siRNA antisense sequence
  source 1..19: mol_type = other RNA
aacttatcattctgggatc

SEQ ID NO: 60118 - RNA, 19 nt, synthetic construct
  misc_feature 1..19: note = siRNA sense sequence
  source 1..19: mol_type = other RNA
cagaatgataagttcaacg

SEQ ID NO: 60119 - RNA, 19 nt, synthetic construct
  misc_feature 1..19: note = siRNA antisense sequence
  source 1..19: mol_type = other RNA
cgttgaacttatcattctg

SEQ ID NO: 60120 - RNA, 19 nt, synthetic construct
  misc_feature 1..19: note = siRNA sense sequence
  source 1..19: mol_type = other RNA
agaatgataagttcaacgt

SEQ ID NO: 60121 - RNA, 19 nt, synthetic construct
  misc_feature 1..19: note = siRNA antisense sequence
  source 1..19: mol_type = other RNA
acgttgaacttatcattct

SEQ ID NO: 60122 - RNA, 19 nt, synthetic construct
  misc_feature 1..19: note = siRNA sense sequence
  source 1..19: mol_type = other RNA
gaatgataagttcaacgtt

SEQ ID NO: 60123 - RNA, 19 nt, synthetic construct
  misc_feature 1..19: note = siRNA antisense sequence
  source 1..19: mol_type = other RNA
aacgttgaacttatcattc

SEQ ID NO: 60124 - RNA, 19 nt, synthetic construct
  misc_feature 1..19: note = siRNA sense sequence
  source 1..19: mol_type = other RNA
atgataagttcaacgttag

SEQ ID NO: 60125 - RNA, 19 nt, synthetic construct
  misc_feature 1..19: note = siRNA antisense sequence
  source 1..19: mol_type = other RNA
ctaacgttgaacttatcat

SEQ ID NO: 60126 - RNA, 19 nt, synthetic construct
  misc_feature 1..19: note = siRNA sense sequence
  source 1..19: mol_type = other RNA
tgataagttcaacgttagc

SEQ ID NO: 60127 - RNA, 19 nt, synthetic construct
  misc_feature 1..19: note = siRNA antisense sequence
  source 1..19: mol_type = other RNA
gctaacgttgaacttatca

SEQ ID NO: 60128 - RNA, 19 nt, synthetic construct
  misc_feature 1..19: note = siRNA sense sequence
  source 1..19: mol_type = other RNA
gataagttcaacgttagcc

SEQ ID NO: 60129 - RNA, 19 nt, synthetic construct
  misc_feature 1..19: note = siRNA antisense sequence
  source 1..19: mol_type = other RNA
ggctaacgttgaacttatc

SEQ ID NO: 60130 - RNA, 19 nt, synthetic construct
  misc_feature 1..19: note = siRNA sense sequence
  source 1..19: mol_type = other RNA
ataagttcaacgttagcct

SEQ ID NO: 60131 - RNA, 19 nt, synthetic construct
  misc_feature 1..19: note = siRNA antisense sequence
  source 1..19: mol_type = other RNA
aggctaacgttgaacttat

SEQ ID NO: 60132 - RNA, 19 nt, synthetic construct
  misc_feature 1..19: note = siRNA sense sequence
  source 1..19: mol_type = other RNA
gttcaacgttagcctcaca

SEQ ID NO: 60133 - RNA, 19 nt, synthetic construct
  misc_feature 1..19: note = siRNA antisense sequence
  source 1..19: mol_type = other RNA
tgtgaggctaacgttgaac

SEQ ID NO: 60134 - RNA, 19 nt, synthetic construct
  misc_feature 1..19: note = siRNA sense sequence
  source 1..19: mol_type = other RNA
ttcaacgttagcctcacag

SEQ ID NO: 60135 - RNA, 19 nt, synthetic construct
  misc_feature 1..19: note = siRNA antisense sequence
  source 1..19: mol_type = other RNA
ctgtgaggctaacgttgaa

SEQ ID NO: 60136 - RNA, 19 nt, synthetic construct
  misc_feature 1..19: note = siRNA sense sequence
  source 1..19: mol_type = other RNA
tcaacgttagcctcacagt

SEQ ID NO: 60137 - RNA, 19 nt, synthetic construct
  misc_feature 1..19: note = siRNA antisense sequence
  source 1..19: mol_type = other RNA
actgtgaggctaacgttga

SEQ ID NO: 60138 - RNA, 19 nt, synthetic construct
  misc_feature 1..19: note = siRNA sense sequence
  source 1..19: mol_type = other RNA
caacgttagcctcacagtc

SEQ ID NO: 60139 - RNA, 19 nt, synthetic construct
  misc_feature 1..19: note = siRNA antisense sequence
  source 1..19: mol_type = other RNA
gactgtgaggctaacgttg

SEQ ID NO: 60140 - RNA, 19 nt, synthetic construct
  misc_feature 1..19: note = siRNA sense sequence
  source 1..19: mol_type = other RNA
aacgttagcctcacagtca

SEQ ID NO: 60141 - RNA, 19 nt, synthetic construct
  misc_feature 1..19: note = siRNA antisense sequence
  source 1..19: mol_type = other RNA
tgactgtgaggctaacgtt

SEQ ID NO: 60142 - RNA, 19 nt, synthetic construct
  misc_feature 1..19: note = siRNA sense sequence
  source 1..19: mol_type = other RNA
acgttagcctcacagtcaa

SEQ ID NO: 60143 - RNA, 19 nt, synthetic construct
  misc_feature 1..19: note = siRNA antisense sequence
  source 1..19: mol_type = other RNA
ttgactgtgaggctaacgt

SEQ ID NO: 60144 - RNA, 19 nt, synthetic construct
  misc_feature 1..19: note = siRNA sense sequence
  source 1..19: mol_type = other RNA
cgttagcctcacagtcaaa

SEQ ID NO: 60145 - RNA, 19 nt, synthetic construct
  misc_feature 1..19: note = siRNA antisense sequence
  source 1..19: mol_type = other RNA
tttgactgtgaggctaacg

SEQ ID NO: 60146 - RNA, 19 nt, synthetic construct
  misc_feature 1..19: note = siRNA sense sequence
  source 1..19: mol_type = other RNA
gttagcctcacagtcaaaa

SEQ ID NO: 60147 - RNA, 19 nt, synthetic construct
  misc_feature 1..19: note = siRNA antisense sequence
  source 1..19: mol_type = other RNA
ttttgactgtgaggctaac

SEQ ID NO: 60148 - RNA, 19 nt, synthetic construct
  misc_feature 1..19: note = siRNA sense sequence
  source 1..19: mol_type = other RNA
aaaggacagtgcctataac

SEQ ID NO: 60149 - RNA, 19 nt, synthetic construct
  misc_feature 1..19: note = siRNA antisense sequence
  source 1..19: mol_type = other RNA
gttataggcactgtccttt

SEQ ID NO: 60150 - RNA, 19 nt, synthetic construct
  misc_feature 1..19: note = siRNA sense sequence
  source 1..19: mol_type = other RNA
atagtgcattattctccaa

SEQ ID NO: 60151 - RNA, 19 nt, synthetic construct
  misc_feature 1..19: note = siRNA antisense sequence
  source 1..19: mol_type = other RNA
ttggagaataatgcactat

SEQ ID NO: 60152 - RNA, 19 nt, synthetic construct
  misc_feature 1..19: note = siRNA sense sequence
  source 1..19: mol_type = other RNA
tagtgcattattctccaaa

SEQ ID NO: 60153 - RNA, 19 nt, synthetic construct
  misc_feature 1..19: note = siRNA antisense sequence
  source 1..19: mol_type = other RNA
tttggagaataatgcacta

SEQ ID NO: 60154 - RNA, 19 nt, synthetic construct
  misc_feature 1..19: note = siRNA sense sequence
  source 1..19: mol_type = other RNA
agtgcattattctccaaat

SEQ ID NO: 60155 - RNA, 19 nt, synthetic construct
  misc_feature 1..19: note = siRNA antisense sequence
  source 1..19: mol_type = other RNA
atttggagaataatgcact

SEQ ID NO: 60156 - RNA, 19 nt, synthetic construct
  misc_feature 1..19: note = siRNA sense sequence
  source 1..19: mol_type = other RNA
gtgcattattctccaaatc

SEQ ID NO: 60157 - RNA, 19 nt, synthetic construct
  misc_feature 1..19: note = siRNA antisense sequence
  source 1..19: mol_type = other RNA
gatttggagaataatgcac

SEQ ID NO: 60158 - RNA, 19 nt, synthetic construct
  misc_feature 1..19: note = siRNA sense sequence
  source 1..19: mol_type = other RNA
cattattctccaaatctag

SEQ ID NO: 60159 - RNA, 19 nt, synthetic construct
  misc_feature 1..19: note = siRNA antisense sequence
  source 1..19: mol_type = other RNA
ctagatttggagaataatg

SEQ ID NO: 60160 - RNA, 19 nt, synthetic construct
  misc_feature 1..19: note = siRNA sense sequence
  source 1..19: mol_type = other RNA
ttttcaggaattgaggtaa

SEQ ID NO: 60161 - RNA, 19 nt, synthetic construct
  misc_feature 1..19: note = siRNA antisense sequence
  source 1..19: mol_type = other RNA
ttacctcaattcctgaaaa

SEQ ID NO: 60162 - RNA, 19 nt, synthetic construct
  misc_feature 1..19: note = siRNA sense sequence
  source 1..19: mol_type = other RNA
tttcaggaattgaggtaaa

SEQ ID NO: 60163 - RNA, 19 nt, synthetic construct
  misc_feature 1..19: note = siRNA antisense sequence
  source 1..19: mol_type = other RNA
tttacctcaattcctgaaa

SEQ ID NO: 60164 - RNA, 19 nt, synthetic construct
  misc_feature 1..19: note = siRNA sense sequence
  source 1..19: mol_type = other RNA
acatcatttacctggccta

SEQ ID NO: 60165 - RNA, 19 nt, synthetic construct
  misc_feature 1..19: note = siRNA antisense sequence
  source 1..19: mol_type = other RNA
taggccaggtaaatgatgt

SEQ ID NO: 60166 - RNA, 19 nt, synthetic construct
  misc_feature 1..19: note = siRNA sense sequence
  source 1..19: mol_type = other RNA
catcatttacctggcctac

SEQ ID NO: 60167 - RNA, 19 nt, synthetic construct
  misc_feature 1..19: note = siRNA antisense sequence
  source 1..19: mol_type = other RNA
gtaggccaggtaaatgatg

SEQ ID NO: 60168 - RNA, 19 nt, synthetic construct
  misc_feature 1..19: note = siRNA sense sequence
  source 1..19: mol_type = other RNA
atcatttacctggcctact

SEQ ID NO: 60169 - RNA, 19 nt, synthetic construct
  misc_feature 1..19: note = siRNA antisense sequence
  source 1..19: mol_type = other RNA
agtaggccaggtaaatgat

SEQ ID NO: 60170 - RNA, 19 nt, synthetic construct
  misc_feature 1..19: note = siRNA sense sequence
  source 1..19: mol_type = other RNA
tcatttacctggcctactt

SEQ ID NO: 60171 - RNA, 19 nt, synthetic construct
  misc_feature 1..19: note = siRNA antisense sequence
  source 1..19: mol_type = other RNA
aagtaggccaggtaaatga

SEQ ID NO: 60172 - RNA, 19 nt, synthetic construct
  misc_feature 1..19: note = siRNA sense sequence
  source 1..19: mol_type = other RNA
catttacctggcctacttt

SEQ ID NO: 60173 - RNA, 19 nt, synthetic construct
  misc_feature 1..19: note = siRNA antisense sequence
  source 1..19: mol_type = other RNA
aaagtaggccaggtaaatg

SEQ ID NO: 60174 - RNA, 19 nt, synthetic construct
  misc_feature 1..19: note = siRNA sense sequence
  source 1..19: mol_type = other RNA
atttacctggcctactttt

SEQ ID NO: 60175 - RNA, 19 nt, synthetic construct
  misc_feature 1..19: note = siRNA antisense sequence
  source 1..19: mol_type = other RNA
aaaagtaggccaggtaaat

SEQ ID NO: 60176 - RNA, 19 nt, synthetic construct
  misc_feature 1..19: note = siRNA sense sequence
  source 1..19: mol_type = other RNA
tttacctggcctacttttc

SEQ ID NO: 60177 - RNA, 19 nt, synthetic construct
  misc_feature 1..19: note = siRNA antisense sequence
  source 1..19: mol_type = other RNA
gaaaagtaggccaggtaaa

SEQ ID NO: 60178 - RNA, 19 nt, synthetic construct
  misc_feature 1..19: note = siRNA sense sequence
  source 1..19: mol_type = other RNA
ttacctggcctacttttca

SEQ ID NO: 60179 - RNA, 19 nt, synthetic construct
  misc_feature 1..19: note = siRNA antisense sequence
  source 1..19: mol_type = other RNA
tgaaaagtaggccaggtaa

SEQ ID NO: 60180 - RNA, 19 nt, synthetic construct
  misc_feature 1..19: note = siRNA sense sequence
  source 1..19: mol_type = other RNA
acctggcctacttttcatg

SEQ ID NO: 60181 - RNA, 19 nt, synthetic construct
  misc_feature 1..19: note = siRNA antisense sequence
  source 1..19: mol_type = other RNA
catgaaaagtaggccaggt

SEQ ID NO: 60182 - RNA, 19 nt, synthetic construct
  misc_feature 1..19: note = siRNA sense sequence
  source 1..19: mol_type = other RNA
cctggcctacttttcatgc

SEQ ID NO: 60183 - RNA, 19 nt, synthetic construct
  misc_feature 1..19: note = siRNA antisense sequence
  source 1..19: mol_type = other RNA
gcatgaaaagtaggccagg

SEQ ID NO: 60184 - RNA, 19 nt, synthetic construct
  misc_feature 1..19: note = siRNA sense sequence
  source 1..19: mol_type = other RNA
ctggcctacttttcatgct

SEQ ID NO: 60185 - RNA, 19 nt, synthetic construct
  misc_feature 1..19: note = siRNA antisense sequence
  source 1..19: mol_type = other RNA
agcatgaaaagtaggccag

SEQ ID NO: 60186 - RNA, 19 nt, synthetic construct
  misc_feature 1..19: note = siRNA sense sequence
  source 1..19: mol_type = other RNA
tggcctacttttcatgcta

SEQ ID NO: 60187 - RNA, 19 nt, synthetic construct
  misc_feature 1..19: note = siRNA antisense sequence
  source 1..19: mol_type = other RNA
tagcatgaaaagtaggcca

SEQ ID NO: 60188 - RNA, 19 nt, synthetic construct
  misc_feature 1..19: note = siRNA sense sequence
  source 1..19: mol_type = other RNA
ggcctacttttcatgctac

SEQ ID NO: 60189 - RNA, 19 nt, synthetic construct
  misc_feature 1..19: note = siRNA antisense sequence
  source 1..19: mol_type = other RNA
gtagcatgaaaagtaggcc

SEQ ID NO: 60190 - RNA, 19 nt, synthetic construct
  misc_feature 1..19: note = siRNA sense sequence
  source 1..19: mol_type = other RNA
gcctacttttcatgctact

SEQ ID NO: 60191 - RNA, 19 nt, synthetic construct
  misc_feature 1..19: note = siRNA antisense sequence
  source 1..19: mol_type = other RNA
agtagcatgaaaagtaggc

SEQ ID NO: 60192 - RNA, 19 nt, synthetic construct
  misc_feature 1..19: note = siRNA sense sequence
  source 1..19: mol_type = other RNA
tttacattagtcctcacca

SEQ ID NO: 60193 - RNA, 19 nt, synthetic construct
  misc_feature 1..19: note = siRNA antisense sequence
  source 1..19: mol_type = other RNA
tggtgaggactaatgtaaa

SEQ ID NO: 60194 - RNA, 19 nt, synthetic construct
  misc_feature 1..19: note = siRNA sense sequence
  source 1..19: mol_type = other RNA
ttacattagtcctcaccaa

SEQ ID NO: 60195 - RNA, 19 nt, synthetic construct
  misc_feature 1..19: note = siRNA antisense sequence
  source 1..19: mol_type = other RNA
ttggtgaggactaatgtaa

SEQ ID NO: 60196 - RNA, 19 nt, synthetic construct
  misc_feature 1..19: note = siRNA sense sequence
  source 1..19: mol_type = other RNA
tacattagtcctcaccaat

SEQ ID NO: 60197 - RNA, 19 nt, synthetic construct
  misc_feature 1..19: note = siRNA antisense sequence
  source 1..19: mol_type = other RNA
attggtgaggactaatgta

SEQ ID NO: 60198 - RNA, 19 nt, synthetic construct
  misc_feature 1..19: note = siRNA sense sequence
  source 1..19: mol_type = other RNA
attagtcctcaccaatggt

SEQ ID NO: 60199 - RNA, 19 nt, synthetic construct
  misc_feature 1..19: note = siRNA antisense sequence
  source 1..19: mol_type = other RNA
accattggtgaggactaat

SEQ ID NO: 60200 - RNA, 19 nt, synthetic construct
  misc_feature 1..19: note = siRNA sense sequence
  source 1..19: mol_type = other RNA
ggatagctcatgtataaaa

SEQ ID NO: 60201 - RNA, 19 nt, synthetic construct
  misc_feature 1..19: note = siRNA antisense sequence
  source 1..19: mol_type = other RNA
ttttatacatgagctatcc

SEQ ID NO: 60202 - RNA, 19 nt, synthetic construct
  misc_feature 1..19: note = siRNA sense sequence
  source 1..19: mol_type = other RNA
gaggtacctctgtgttaag

SEQ ID NO: 60203 - RNA, 19 nt, synthetic construct
  misc_feature 1..19: note = siRNA antisense sequence
  source 1..19: mol_type = other RNA
cttaacacagaggtacctc

SEQ ID NO: 60204 - RNA, 19 nt, synthetic construct
  misc_feature 1..19: note = siRNA sense sequence
  source 1..19: mol_type = other RNA
aggtacctctgtgttaagc

SEQ ID NO: 60205 - RNA, 19 nt, synthetic construct
  misc_feature 1..19: note = siRNA antisense sequence
  source 1..19: mol_type = other RNA
gcttaacacagaggtacct

SEQ ID NO: 60206 - RNA, 19 nt, synthetic construct
  misc_feature 1..19: note = siRNA sense sequence
  source 1..19: mol_type = other RNA
ggtacctctgtgttaagca

SEQ ID NO: 60207 - RNA, 19 nt, synthetic construct
  misc_feature 1..19: note = siRNA antisense sequence
  source 1..19: mol_type = other RNA
tgcttaacacagaggtacc

SEQ ID NO: 60208 - RNA, 19 nt, synthetic construct
  misc_feature 1..19: note = siRNA sense sequence
  source 1..19: mol_type = other RNA
gtacctctgtgttaagcaa

SEQ ID NO: 60209 - RNA, 19 nt, synthetic construct
  misc_feature 1..19: note = siRNA antisense sequence
  source 1..19: mol_type = other RNA
ttgcttaacacagaggtac

SEQ ID NO: 60210 - RNA, 19 nt, synthetic construct
  misc_feature 1..19: note = siRNA sense sequence
  source 1..19: mol_type = other RNA
tacctctgtgttaagcaaa

SEQ ID NO: 60211 - RNA, 19 nt, synthetic construct
  misc_feature 1..19: note = siRNA antisense sequence
  source 1..19: mol_type = other RNA
tttgcttaacacagaggta

SEQ ID NO: 60212 - RNA, 19 nt, synthetic construct
  misc_feature 1..19: note = siRNA sense sequence
  source 1..19: mol_type = other RNA
acctctgtgttaagcaaaa

SEQ ID NO: 60213 - RNA, 19 nt, synthetic construct
  misc_feature 1..19: note = siRNA antisense sequence
  source 1..19: mol_type = other RNA
ttttgcttaacacagaggt

SEQ ID NO: 60214 - RNA, 19 nt, synthetic construct
  misc_feature 1..19: note = siRNA sense sequence
  source 1..19: mol_type = other RNA
accatatctccctttctat

SEQ ID NO: 60215 - RNA, 19 nt, synthetic construct
  misc_feature 1..19: note = siRNA antisense sequence
  source 1..19: mol_type = other RNA
atagaaagggagatatggt

SEQ ID NO: 60216 - RNA, 19 nt, synthetic construct
  misc_feature 1..19: note = siRNA sense sequence
  source 1..19: mol_type = other RNA
tctccctttctatgcaaaa

SEQ ID NO: 60217 - RNA, 19 nt, synthetic construct
  misc_feature 1..19: note = siRNA antisense sequence
  source 1..19: mol_type = other RNA
ttttgcatagaaagggaga

SEQ ID NO: 60218 - RNA, 19 nt, synthetic construct
  misc_feature 1..19: note = siRNA sense sequence
  source 1..19: mol_type = other RNA
ctccctttctatgcaaaat

SEQ ID NO: 60219 - RNA, 19 nt, synthetic construct
  misc_feature 1..19: note = siRNA antisense sequence
  source 1..19: mol_type = other RNA
attttgcatagaaagggag

SEQ ID NO: 60220 - RNA, 19 nt, synthetic construct
  misc_feature 1..19: note = siRNA sense sequence
  source 1..19: mol_type = other RNA
tccctttctatgcaaaatc

SEQ ID NO: 60221 - RNA, 19 nt, synthetic construct
  misc_feature 1..19: note = siRNA antisense sequence
  source 1..19: mol_type = other RNA
gattttgcatagaaaggga

SEQ ID NO: 60222 - RNA, 19 nt, synthetic construct
  misc_feature 1..19: note = siRNA sense sequence
  source 1..19: mol_type = other RNA
ttctatgcaaaatccttac

SEQ ID NO: 60223 - RNA, 19 nt, synthetic construct
  misc_feature 1..19: note = siRNA antisense sequence
  source 1..19: mol_type = other RNA
gtaaggattttgcatagaa

SEQ ID NO: 60224 - RNA, 19 nt, synthetic construct
  misc_feature 1..19: note = siRNA sense sequence
  source 1..19: mol_type = other RNA
tctatgcaaaatccttact

SEQ ID NO: 60225 - RNA, 19 nt, synthetic construct
  misc_feature 1..19: note = siRNA antisense sequence
  source 1..19: mol_type = other RNA
agtaaggattttgcataga

SEQ ID NO: 60226 - RNA, 19 nt, synthetic construct
  misc_feature 1..19: note = siRNA sense sequence
  source 1..19: mol_type = other RNA
ctatgcaaaatccttactt

SEQ ID NO: 60227 - RNA, 19 nt, synthetic construct
  misc_feature 1..19: note = siRNA antisense sequence
  source 1..19: mol_type = other RNA
aagtaaggattttgcatag

SEQ ID NO: 60228 - RNA, 19 nt, synthetic construct
  misc_feature 1..19: note = siRNA sense sequence
  source 1..19: mol_type = other RNA
aaaatccttactttggcaa

SEQ ID NO: 60229 - RNA, 19 nt, synthetic construct
  misc_feature 1..19: note = siRNA antisense sequence
  source 1..19: mol_type = other RNA
ttgccaaagtaaggatttt

SEQ ID NO: 60230 - RNA, 19 nt, synthetic construct
  misc_feature 1..19: note = siRNA sense sequence
  source 1..19: mol_type = other RNA
aaatccttactttggcaag

SEQ ID NO: 60231 - RNA, 19 nt, synthetic construct
  misc_feature 1..19: note = siRNA antisense sequence
  source 1..19: mol_type = other RNA
cttgccaaagtaaggattt

SEQ ID NO: 60232 - RNA, 19 nt, synthetic construct
  misc_feature 1..19: note = siRNA sense sequence
  source 1..19: mol_type = other RNA
aatccttactttggcaaga

SEQ ID NO: 60233 - RNA, 19 nt, synthetic construct
  misc_feature 1..19: note = siRNA antisense sequence
  source 1..19: mol_type = other RNA
tcttgccaaagtaaggatt

SEQ ID NO: 60234 - RNA, 19 nt, synthetic construct
  misc_feature 1..19: note = siRNA sense sequence
  source 1..19: mol_type = other RNA
atccttactttggcaagat

SEQ ID NO: 60235 - RNA, 19 nt, synthetic construct
  misc_feature 1..19: note = siRNA antisense sequence
  source 1..19: mol_type = other RNA
atcttgccaaagtaaggat

SEQ ID NO: 60236 - RNA, 19 nt, synthetic construct
  misc_feature 1..19: note = siRNA sense sequence
  source 1..19: mol_type = other RNA
cagaggtttcttttattac

SEQ ID NO: 60237 - RNA, 19 nt, synthetic construct
  misc_feature 1..19: note = siRNA antisense sequence
  source 1..19: mol_type = other RNA
gtaataaaagaaacctctg

SEQ ID NO: 60238 - RNA, 19 nt, synthetic construct
  misc_feature 1..19: note = siRNA sense sequence
  source 1..19: mol_type = other RNA
tgtgtaagatgctatatca

SEQ ID NO: 60239 - RNA, 19 nt, synthetic construct
  misc_feature 1..19: note = siRNA antisense sequence
  source 1..19: mol_type = other RNA
tgatatagcatcttacaca

SEQ ID NO: 60240 - RNA, 19 nt, synthetic construct
  misc_feature 1..19: note = siRNA sense sequence
  source 1..19: mol_type = other RNA
gtgtaagatgctatatcag

SEQ ID NO: 60241 - RNA, 19 nt, synthetic construct
  misc_feature 1..19: note = siRNA antisense sequence
  source 1..19: mol_type = other RNA
ctgatatagcatcttacac

SEQ ID NO: 60242 - RNA, 19 nt, synthetic construct
  misc_feature 1..19: note = siRNA sense sequence
  source 1..19: mol_type = other RNA
tgtaagatgctatatcaga

SEQ ID NO: 60243 - RNA, 19 nt, synthetic construct
  misc_feature 1..19: note = siRNA antisense sequence
  source 1..19: mol_type = other RNA
tctgatatagcatcttaca

SEQ ID NO: 60244 - RNA, 19 nt, synthetic construct
  misc_feature 1..19: note = siRNA sense sequence
  source 1..19: mol_type = other RNA
agatgctatatcagaggta

SEQ ID NO: 60245 - RNA, 19 nt, synthetic construct
  misc_feature 1..19: note = siRNA antisense sequence
  source 1..19: mol_type = other RNA
tacctctgatatagcatct

SEQ ID NO: 60246 - RNA, 19 nt, synthetic construct
  misc_feature 1..19: note = siRNA sense sequence
  source 1..19: mol_type = other RNA
gatgctatatcagaggtaa

SEQ ID NO: 60247 - RNA, 19 nt, synthetic construct
  misc_feature 1..19: note = siRNA antisense sequence
  source 1..19: mol_type = other RNA
ttacctctgatatagcatc

SEQ ID NO: 60248 - RNA, 19 nt, synthetic construct
  misc_feature 1..19: note = siRNA sense sequence
  source 1..19: mol_type = other RNA
atgctatatcagaggtaat

SEQ ID NO: 60249 - RNA, 19 nt, synthetic construct
  misc_feature 1..19: note = siRNA antisense sequence
  source 1..19: mol_type = other RNA
attacctctgatatagcat

SEQ ID NO: 60250 - RNA, 19 nt, synthetic construct
  misc_feature 1..19: note = siRNA sense sequence
  source 1..19: mol_type = other RNA
tgctatatcagaggtaatc

SEQ ID NO: 60251 - RNA, 19 nt, synthetic construct
  misc_feature 1..19: note = siRNA antisense sequence
  source 1..19: mol_type = other RNA
gattacctctgatatagca

SEQ ID NO: 60252 - RNA, 19 nt, synthetic construct
  misc_feature 1..19: note = siRNA sense sequence
  source 1..19: mol_type = other RNA
gctatatcagaggtaatca

SEQ ID NO: 60253 - RNA, 19 nt, synthetic construct
  misc_feature 1..19: note = siRNA antisense sequence
  source 1..19: mol_type = other RNA
tgattacctctgatatagc

SEQ ID NO: 60254 - RNA, 19 nt, synthetic construct
  misc_feature 1..19: note = siRNA sense sequence
  source 1..19: mol_type = other RNA
tatcagaggtaatcagtgt

SEQ ID NO: 60255 - RNA, 19 nt, synthetic construct
  misc_feature 1..19: note = siRNA antisense sequence
  source 1..19: mol_type = other RNA
acactgattacctctgata

SEQ ID NO: 60256 - RNA, 19 nt, synthetic construct
  misc_feature 1..19: note = siRNA sense sequence
  source 1..19: mol_type = other RNA
aggtaatcagtgtttccaa

SEQ ID NO: 60257 - RNA, 19 nt, synthetic construct
  misc_feature 1..19: note = siRNA antisense sequence
  source 1..19: mol_type = other RNA
ttggaaacactgattacct

SEQ ID NO: 60258 - RNA, 19 nt, synthetic construct
  misc_feature 1..19: note = siRNA sense sequence
  source 1..19: mol_type = other RNA
ggtaatcagtgtttccaaa

SEQ ID NO: 60259 - RNA, 19 nt, synthetic construct
  misc_feature 1..19: note = siRNA antisense sequence
  source 1..19: mol_type = other RNA
tttggaaacactgattacc

SEQ ID NO: 60260 - RNA, 19 nt, synthetic construct
  misc_feature 1..19: note = siRNA sense sequence
  source 1..19: mol_type = other RNA
gtaatcagtgtttccaaat

SEQ ID NO: 60261 - RNA, 19 nt, synthetic construct
  misc_feature 1..19: note = siRNA antisense sequence
  source 1..19: mol_type = other RNA
atttggaaacactgattac

SEQ ID NO: 60262 - RNA, 19 nt, synthetic construct
  misc_feature 1..19: note = siRNA sense sequence
  source 1..19: mol_type = other RNA
taatcagtgtttccaaatg

SEQ ID NO: 60263 - RNA, 19 nt, synthetic construct
  misc_feature 1..19: note = siRNA antisense sequence
  source 1..19: mol_type = other RNA
catttggaaacactgatta

SEQ ID NO: 60264 - RNA, 19 nt, synthetic construct
  misc_feature 1..19: note = siRNA sense sequence
  source 1..19: mol_type = other RNA
aatcagtgtttccaaatgt

SEQ ID NO: 60265 - RNA, 19 nt, synthetic construct
  misc_feature 1..19: note = siRNA antisense sequence
  source 1..19: mol_type = other RNA
acatttggaaacactgatt

SEQ ID NO: 60266 - RNA, 19 nt, synthetic construct
  misc_feature 1..19: note = siRNA sense sequence
  source 1..19: mol_type = other RNA
atcagtgtttccaaatgtg

SEQ ID NO: 60267 - RNA, 19 nt, synthetic construct
  misc_feature 1..19: note = siRNA antisense sequence
  source 1..19: mol_type = other RNA
cacatttggaaacactgat

SEQ ID NO: 60268 - RNA, 19 nt, synthetic construct
  misc_feature 1..19: note = siRNA sense sequence
  source 1..19: mol_type = other RNA
aactttgctcttaattctg

SEQ ID NO: 60269 - RNA, 19 nt, synthetic construct
  misc_feature 1..19: note = siRNA antisense sequence
  source 1..19: mol_type = other RNA
cagaattaagagcaaagtt

SEQ ID NO: 60270 - RNA, 19 nt, synthetic construct
  misc_feature 1..19: note = siRNA sense sequence
  source 1..19: mol_type = other RNA
actttgctcttaattctga

SEQ ID NO: 60271 - RNA, 19 nt, synthetic construct
  misc_feature 1..19: note = siRNA antisense sequence
  source 1..19: mol_type = other RNA
tcagaattaagagcaaagt

SEQ ID NO: 60272 - RNA, 19 nt, synthetic construct
  misc_feature 1..19: note = siRNA sense sequence
  source 1..19: mol_type = other RNA
ctttgctcttaattctgat

SEQ ID NO: 60273 - RNA, 19 nt, synthetic construct
  misc_feature 1..19: note = siRNA antisense sequence
  source 1..19: mol_type = other RNA
atcagaattaagagcaaag

SEQ ID NO: 60274 - RNA, 19 nt, synthetic construct
  misc_feature 1..19: note = siRNA sense sequence
  source 1..19: mol_type = other RNA
gctcttaattctgatctcc

SEQ ID NO: 60275 - RNA, 19 nt, synthetic construct
  misc_feature 1..19: note = siRNA antisense sequence
  source 1..19: mol_type = other RNA
ggagatcagaattaagagc

SEQ ID NO: 60276 - RNA, 19 nt, synthetic construct
  misc_feature 1..19: note = siRNA sense sequence
  source 1..19: mol_type = other RNA
ctcttaattctgatctcca

SEQ ID NO: 60277 - RNA, 19 nt, synthetic construct
  misc_feature 1..19: note = siRNA antisense sequence
  source 1..19: mol_type = other RNA
tggagatcagaattaagag

SEQ ID NO: 60278 - RNA, 19 nt, synthetic construct
  misc_feature 1..19: note = siRNA sense sequence
  source 1..19: mol_type = other RNA
tcttaattctgatctccaa

SEQ ID NO: 60279 - RNA, 19 nt, synthetic construct
  misc_feature 1..19: note = siRNA antisense sequence
  source 1..19: mol_type = other RNA
ttggagatcagaattaaga

SEQ ID NO: 60280 - RNA, 19 nt, synthetic construct
  misc_feature 1..19: note = siRNA sense sequence
  source 1..19: mol_type = other RNA
cttaattctgatctccaaa

SEQ ID NO: 60281 - RNA, 19 nt, synthetic construct
  misc_feature 1..19: note = siRNA antisense sequence
  source 1..19: mol_type = other RNA
tttggagatcagaattaag

SEQ ID NO: 60282 - RNA, 19 nt, synthetic construct
  misc_feature 1..19: note = siRNA sense sequence
  source 1..19: mol_type = other RNA
aactcagatttcatggacg

SEQ ID NO: 60283 - RNA, 19 nt, synthetic construct
  misc_feature 1..19: note = siRNA antisense sequence
  source 1..19: mol_type = other RNA
cgtccatgaaatctgagtt

SEQ ID NO: 60284 - RNA, 19 nt, synthetic construct
  misc_feature 1..19: note = siRNA sense sequence
  source 1..19: mol_type = other RNA
actcagatttcatggacgt

SEQ ID NO: 60285 - RNA, 19 nt, synthetic construct
  misc_feature 1..19: note = siRNA antisense sequence
  source 1..19: mol_type = other RNA
acgtccatgaaatctgagt

SEQ ID NO: 60286 - RNA, 19 nt, synthetic construct
  misc_feature 1..19: note = siRNA sense sequence
  source 1..19: mol_type = other RNA
cagatttcatggacgtttc

SEQ ID NO: 60287 - RNA, 19 nt, synthetic construct
  misc_feature 1..19: note = siRNA antisense sequence
  source 1..19: mol_type = other RNA
gaaacgtccatgaaatctg

SEQ ID NO: 60288 - RNA, 19 nt, synthetic construct
  misc_feature 1..19: note = siRNA sense sequence
  source 1..19: mol_type = other RNA
ttcatggacgtttctctct

SEQ ID NO: 60289 - RNA, 19 nt, synthetic construct
  misc_feature 1..19: note = siRNA antisense sequence
  source 1..19: mol_type = other RNA
agagagaaacgtccatgaa

SEQ ID NO: 60290 - RNA, 19 nt, synthetic construct
  misc_feature 1..19: note = siRNA sense sequence
  source 1..19: mol_type = other RNA
tcatggacgtttctctcta

SEQ ID NO: 60291 - RNA, 19 nt, synthetic construct
  misc_feature 1..19: note = siRNA antisense sequence
  source 1..19: mol_type = other RNA
tagagagaaacgtccatga

SEQ ID NO: 60292 - RNA, 19 nt, synthetic construct
  misc_feature 1..19: note = siRNA sense sequence
  source 1..19: mol_type = other RNA
catggacgtttctctctat

SEQ ID NO: 60293 - RNA, 19 nt, synthetic construct
  misc_feature 1..19: note = siRNA antisense sequence
  source 1..19: mol_type = other RNA
atagagagaaacgtccatg

SEQ ID NO: 60294 - RNA, 19 nt, synthetic construct
  misc_feature 1..19: note = siRNA sense sequence
  source 1..19: mol_type = other RNA
atggacgtttctctctatc

SEQ ID NO: 60295 - RNA, 19 nt, synthetic construct
  misc_feature 1..19: note = siRNA antisense sequence
  source 1..19: mol_type = other RNA
gatagagagaaacgtccat

SEQ ID NO: 60296 - RNA, 19 nt, synthetic construct
  misc_feature 1..19: note = siRNA sense sequence
  source 1..19: mol_type = other RNA
tggacgtttctctctatct

SEQ ID NO: 60297 - RNA, 19 nt, synthetic construct
  misc_feature 1..19: note = siRNA antisense sequence
  source 1..19: mol_type = other RNA
agatagagagaaacgtcca

SEQ ID NO: 60298 - RNA, 19 nt, synthetic construct
  misc_feature 1..19: note = siRNA sense sequence
  source 1..19: mol_type = other RNA
gaatattaattacaggctg

SEQ ID NO: 60299 - RNA, 19 nt, synthetic construct
  misc_feature 1..19: note = siRNA antisense sequence
  source 1..19: mol_type = other RNA
cagcctgtaattaatattc

SEQ ID NO: 60300 - RNA, 19 nt, synthetic construct
  misc_feature 1..19: note = siRNA sense sequence
  source 1..19: mol_type = other RNA
atattaattacaggctggg

SEQ ID NO: 60301 - RNA, 19 nt, synthetic construct
  misc_feature 1..19: note = siRNA antisense sequence
  source 1..19: mol_type = other RNA
cccagcctgtaattaatat

SEQ ID NO: 60302 - RNA, 19 nt, synthetic construct
  misc_feature 1..19: note = siRNA sense sequence
  source 1..19: mol_type = other RNA
ttacaggctgggcatggtg

SEQ ID NO: 60303 - RNA, 19 nt, synthetic construct
  misc_feature 1..19: note = siRNA antisense sequence
  source 1..19: mol_type = other RNA
caccatgcccagcctgtaa

SEQ ID NO: 60304 - RNA, 19 nt, synthetic construct
  misc_feature 1..19: note = siRNA sense sequence
  source 1..19: mol_type = other RNA
tacaggctgggcatggtgg

SEQ ID NO: 60305 - RNA, 19 nt, synthetic construct
  misc_feature 1..19: note = siRNA antisense sequence
  source 1..19: mol_type = other RNA
ccaccatgcccagcctgta

SEQ ID NO: 60306 - RNA, 19 nt, synthetic construct
  misc_feature 1..19: note = siRNA sense sequence
  source 1..19: mol_type = other RNA
gctgggcatggtggctcat

SEQ ID NO: 60307 - RNA, 19 nt, synthetic construct
  misc_feature 1..19: note = siRNA antisense sequence
  source 1..19: mol_type = other RNA
atgagccaccatgcccagc

SEQ ID NO: 60308 - RNA, 19 nt, synthetic construct
  misc_feature 1..19: note = siRNA sense sequence
  source 1..19: mol_type = other RNA
atggtggctcatgcctgta

SEQ ID NO: 60309 - RNA, 19 nt, synthetic construct
  misc_feature 1..19: note = siRNA antisense sequence
  source 1..19: mol_type = other RNA
tacaggcatgagccaccat

SEQ ID NO: 60310 - RNA, 19 nt, synthetic construct
  misc_feature 1..19: note = siRNA sense sequence
  source 1..19: mol_type = other RNA
tggtggctcatgcctgtaa

SEQ ID NO: 60311 - RNA, 19 nt, synthetic construct
  misc_feature 1..19: note = siRNA antisense sequence
  source 1..19: mol_type = other RNA
ttacaggcatgagccacca

SEQ ID NO: 60312 - RNA, 19 nt, synthetic construct
  misc_feature 1..19: note = siRNA sense sequence
  source 1..19: mol_type = other RNA
ggtggctcatgcctgtaat

SEQ ID NO: 60313 - RNA, 19 nt, synthetic construct
  misc_feature 1..19: note = siRNA antisense sequence
  source 1..19: mol_type = other RNA
attacaggcatgagccacc

SEQ ID NO: 60314 - RNA, 19 nt, synthetic construct
  misc_feature 1..19: note = siRNA sense sequence
  source 1..19: mol_type = other RNA
gtggctcatgcctgtaatc

SEQ ID NO: 60315 - RNA, 19 nt, synthetic construct
  misc_feature 1..19: note = siRNA antisense sequence
  source 1..19: mol_type = other RNA
gattacaggcatgagccac

SEQ ID NO: 60316 - RNA, 19 nt, synthetic construct
  misc_feature 1..19: note = siRNA sense sequence
  source 1..19: mol_type = other RNA
tggctcatgcctgtaatcc

SEQ ID NO: 60317 - RNA, 19 nt, synthetic construct
  misc_feature 1..19: note = siRNA antisense sequence
  source 1..19: mol_type = other RNA
ggattacaggcatgagcca

SEQ ID NO: 60318 - RNA, 19 nt, synthetic construct
  misc_feature 1..19: note = siRNA sense sequence
  source 1..19: mol_type = other RNA
ggctcatgcctgtaatccc

SEQ ID NO: 60319 - RNA, 19 nt, synthetic construct
  misc_feature 1..19: note = siRNA antisense sequence
  source 1..19: mol_type = other RNA
gggattacaggcatgagcc

SEQ ID NO: 60320 - RNA, 19 nt, synthetic construct
  misc_feature 1..19: note = siRNA sense sequence
  source 1..19: mol_type = other RNA
atgcctgtaatcccagcac

SEQ ID NO: 60321 - RNA, 19 nt, synthetic construct
  misc_feature 1..19: note = siRNA antisense sequence
  source 1..19: mol_type = other RNA
gtgctgggattacaggcat

SEQ ID NO: 60322 - RNA, 19 nt, synthetic construct
  misc_feature 1..19: note = siRNA sense sequence
  source 1..19: mol_type = other RNA
tagcaaggcatggtggcac

SEQ ID NO: 60323 - RNA, 19 nt, synthetic construct
  misc_feature 1..19: note = siRNA antisense sequence
  source 1..19: mol_type = other RNA
gtgccaccatgccttgcta

SEQ ID NO: 60324 - RNA, 19 nt, synthetic construct
  misc_feature 1..19: note = siRNA sense sequence
  source 1..19: mol_type = other RNA
tcccagctactcaggaggc

SEQ ID NO: 60325 - RNA, 19 nt, synthetic construct
  misc_feature 1..19: note = siRNA antisense sequence
  source 1..19: mol_type = other RNA
gcctcctgagtagctggga

SEQ ID NO: 60326 - RNA, 19 nt, synthetic construct
  misc_feature 1..19: note = siRNA sense sequence
  source 1..19: mol_type = other RNA
cccagctactcaggaggct

SEQ ID NO: 60327 - RNA, 19 nt, synthetic construct
  misc_feature 1..19: note = siRNA antisense sequence
  source 1..19: mol_type = other RNA
agcctcctgagtagctggg

SEQ ID NO: 60328 - RNA, 19 nt, synthetic construct
  misc_feature 1..19: note = siRNA sense sequence
  source 1..19: mol_type = other RNA
gaggttgcagtgagccgag

SEQ ID NO: 60329 - RNA, 19 nt, synthetic construct
  misc_feature 1..19: note = siRNA antisense sequence
  source 1..19: mol_type = other RNA
ctcggctcactgcaacctc

SEQ ID NO: 60330 - RNA, 19 nt, synthetic construct
  misc_feature 1..19: note = siRNA sense sequence
  source 1..19: mol_type = other RNA
aaaattattgcctgtatcc

SEQ ID NO: 60331 - RNA, 19 nt, synthetic construct
  misc_feature 1..19: note = siRNA antisense sequence
  source 1..19: mol_type = other RNA
ggatacaggcaataatttt

SEQ ID NO: 60332 - RNA, 19 nt, synthetic construct
  misc_feature 1..19: note = siRNA sense sequence
  source 1..19: mol_type = other RNA
aaattattgcctgtatcct

SEQ ID NO: 60333 - RNA, 19 nt, synthetic construct
  misc_feature 1..19: note = siRNA antisense sequence
  source 1..19: mol_type = other RNA
aggatacaggcaataattt

SEQ ID NO: 60334 - RNA, 19 nt, synthetic construct
  misc_feature 1..19: note = siRNA sense sequence
  source 1..19: mol_type = other RNA
aattattgcctgtatcctc

SEQ ID NO: 60335 - RNA, 19 nt, synthetic construct
  misc_feature 1..19: note = siRNA antisense sequence
  source 1..19: mol_type = other RNA
gaggatacaggcaataatt

SEQ ID NO: 60336 - RNA, 19 nt, synthetic construct
  misc_feature 1..19: note = siRNA sense sequence
  source 1..19: mol_type = other RNA
ttgcctgtatcctcctatg

SEQ ID NO: 60337 - RNA, 19 nt, synthetic construct
  misc_feature 1..19: note = siRNA antisense sequence
  source 1..19: mol_type = other RNA
cataggaggatacaggcaa

SEQ ID NO: 60338 - RNA, 19 nt, synthetic construct
  misc_feature 1..19: note = siRNA sense sequence
  source 1..19: mol_type = other RNA
tgcctgtatcctcctatgc

SEQ ID NO: 60339 - RNA, 19 nt, synthetic construct
  misc_feature 1..19: note = siRNA antisense sequence
  source 1..19: mol_type = other RNA
gcataggaggatacaggca

SEQ ID NO: 60340 - RNA, 19 nt, synthetic construct
  misc_feature 1..19: note = siRNA sense sequence
  source 1..19: mol_type = other RNA
gcctgtatcctcctatgct

SEQ ID NO: 60341 - RNA, 19 nt, synthetic construct
  misc_feature 1..19: note = siRNA antisense sequence
  source 1..19: mol_type = other RNA
agcataggaggatacaggc

SEQ ID NO: 60342 - RNA, 19 nt, synthetic construct
  misc_feature 1..19: note = siRNA sense sequence
  source 1..19: mol_type = other RNA
tctgacagtgcatctcttc

SEQ ID NO: 60343 - RNA, 19 nt, synthetic construct
  misc_feature 1..19: note = siRNA antisense sequence
  source 1..19: mol_type = other RNA
gaagagatgcactgtcaga

SEQ ID NO: 60344 - RNA, 19 nt, synthetic construct
  misc_feature 1..19: note = siRNA sense sequence
  source 1..19: mol_type = other RNA
ctgacagtgcatctcttct

SEQ ID NO: 60345 - RNA, 19 nt, synthetic construct
  misc_feature 1..19: note = siRNA antisense sequence
  source 1..19: mol_type = other RNA
agaagagatgcactgtcag

SEQ ID NO: 60346 - RNA, 19 nt, synthetic construct
  misc_feature 1..19: note = siRNA sense sequence
  source 1..19: mol_type = other RNA
tgacagtgcatctcttctg

SEQ ID NO: 60347 - RNA, 19 nt, synthetic construct
  misc_feature 1..19: note = siRNA antisense sequence
  source 1..19: mol_type = other RNA
cagaagagatgcactgtca

SEQ ID NO: 60348 - RNA, 19 nt, synthetic construct
  misc_feature 1..19: note = siRNA sense sequence
  source 1..19: mol_type = other RNA
agtgcatctcttctgtgta

SEQ ID NO: 60349 - RNA, 19 nt, synthetic construct
  misc_feature 1..19: note = siRNA antisense sequence
  source 1..19: mol_type = other RNA
tacacagaagagatgcact

SEQ ID NO: 60350 - RNA, 19 nt, synthetic construct
  misc_feature 1..19: note = siRNA sense sequence
  source 1..19: mol_type = other RNA
gtgcatctcttctgtgtat

SEQ ID NO: 60351 - RNA, 19 nt, synthetic construct
  misc_feature 1..19: note = siRNA antisense sequence
  source 1..19: mol_type = other RNA
atacacagaagagatgcac

SEQ ID NO: 60352 - RNA, 19 nt, synthetic construct
  misc_feature 1..19: note = siRNA sense sequence
  source 1..19: mol_type = other RNA
ctcttctgtgtatattaac

SEQ ID NO: 60353 - RNA, 19 nt, synthetic construct
  misc_feature 1..19: note = siRNA antisense sequence
  source 1..19: mol_type = other RNA
gttaatatacacagaagag

SEQ ID NO: 60354 - RNA, 19 nt, synthetic construct
  misc_feature 1..19: note = siRNA sense sequence
  source 1..19: mol_type = other RNA
acagtaataatgatggcaa

SEQ ID NO: 60355 - RNA, 19 nt, synthetic construct
  misc_feature 1..19: note = siRNA antisense sequence
  source 1..19: mol_type = other RNA
ttgccatcattattactgt

SEQ ID NO: 60356 - RNA, 19 nt, synthetic construct
  misc_feature 1..19: note = siRNA sense sequence
  source 1..19: mol_type = other RNA
cagtaataatgatggcaac

SEQ ID NO: 60357 - RNA, 19 nt, synthetic construct
  misc_feature 1..19: note = siRNA antisense sequence
  source 1..19: mol_type = other RNA
gttgccatcattattactg

SEQ ID NO: 60358 - RNA, 19 nt, synthetic construct
  misc_feature 1..19: note = siRNA sense sequence
  source 1..19: mol_type = other RNA
agtaataatgatggcaacc

SEQ ID NO: 60359 - RNA, 19 nt, synthetic construct
  misc_feature 1..19: note = siRNA antisense sequence
  source 1..19: mol_type = other RNA
ggttgccatcattattact

SEQ ID NO: 60360 - RNA, 19 nt, synthetic construct
  misc_feature 1..19: note = siRNA sense sequence
  source 1..19: mol_type = other RNA
gtaataatgatggcaacca

SEQ ID NO: 60361 - RNA, 19 nt, synthetic construct
  misc_feature 1..19: note = siRNA antisense sequence
  source 1..19: mol_type = other RNA
tggttgccatcattattac

SEQ ID NO: 60362 - RNA, 19 nt, synthetic construct
  misc_feature 1..19: note = siRNA sense sequence
  source 1..19: mol_type = other RNA
tggcaaccatttcttgagt

SEQ ID NO: 60363 - RNA, 19 nt, synthetic construct
  misc_feature 1..19: note = siRNA antisense sequence
  source 1..19: mol_type = other RNA
actcaagaaatggttgcca

SEQ ID NO: 60364 - RNA, 19 nt, synthetic construct
  misc_feature 1..19: note = siRNA sense sequence
  source 1..19: mol_type = other RNA
ggcaaccatttcttgagtc

SEQ ID NO: 60365 - RNA, 19 nt, synthetic construct
  misc_feature 1..19: note = siRNA antisense sequence
  source 1..19: mol_type = other RNA
gactcaagaaatggttgcc

SEQ ID NO: 60366 - RNA, 19 nt, synthetic construct
  misc_feature 1..19: note = siRNA sense sequence
  source 1..19: mol_type = other RNA
gcaaccatttcttgagtca

SEQ ID NO: 60367 - RNA, 19 nt, synthetic construct
  misc_feature 1..19: note = siRNA antisense sequence
  source 1..19: mol_type = other RNA
tgactcaagaaatggttgc

SEQ ID NO: 60368 - RNA, 19 nt, synthetic construct
  misc_feature 1..19: note = siRNA sense sequence
  source 1..19: mol_type = other RNA
ccatttcttgagtcacatc

SEQ ID NO: 60369 - RNA, 19 nt, synthetic construct
  misc_feature 1..19: note = siRNA antisense sequence
  source 1..19: mol_type = other RNA
gatgtgactcaagaaatgg

SEQ ID NO: 60370 - RNA, 19 nt, synthetic construct
  misc_feature 1..19: note = siRNA sense sequence
  source 1..19: mol_type = other RNA
catttcttgagtcacatca

SEQ ID NO: 60371 - RNA, 19 nt, synthetic construct
  misc_feature 1..19: note = siRNA antisense sequence
  source 1..19: mol_type = other RNA
tgatgtgactcaagaaatg

SEQ ID NO: 60372 - RNA, 19 nt, synthetic construct
  misc_feature 1..19: note = siRNA sense sequence
  source 1..19: mol_type = other RNA
atttcttgagtcacatcat

SEQ ID NO: 60373 - RNA, 19 nt, synthetic construct
  misc_feature 1..19: note = siRNA antisense sequence
  source 1..19: mol_type = other RNA
atgatgtgactcaagaaat

SEQ ID NO: 60374 - RNA, 19 nt, synthetic construct
  misc_feature 1..19: note = siRNA sense sequence
  source 1..19: mol_type = other RNA
tttcttgagtcacatcatg

SEQ ID NO: 60375 - RNA, 19 nt, synthetic construct
  misc_feature 1..19: note = siRNA antisense sequence
  source 1..19: mol_type = other RNA
catgatgtgactcaagaaa

SEQ ID NO: 60376 - RNA, 19 nt, synthetic construct
  misc_feature 1..19: note = siRNA sense sequence
  source 1..19: mol_type = other RNA
ttcttgagtcacatcatgg

SEQ ID NO: 60377 - RNA, 19 nt, synthetic construct
  misc_feature 1..19: note = siRNA antisense sequence
  source 1..19: mol_type = other RNA
ccatgatgtgactcaagaa

SEQ ID NO: 60378 - RNA, 19 nt, synthetic construct
  misc_feature 1..19: note = siRNA sense sequence
  source 1..19: mol_type = other RNA
tcttgagtcacatcatggt

SEQ ID NO: 60379 - RNA, 19 nt, synthetic construct
  misc_feature 1..19: note = siRNA antisense sequence
  source 1..19: mol_type = other RNA
accatgatgtgactcaaga

SEQ ID NO: 60380 - RNA, 19 nt, synthetic construct
  misc_feature 1..19: note = siRNA sense sequence
  source 1..19: mol_type = other RNA
cttgagtcacatcatggtt

SEQ ID NO: 60381 - RNA, 19 nt, synthetic construct
  misc_feature 1..19: note = siRNA antisense sequence
  source 1..19: mol_type = other RNA
aaccatgatgtgactcaag

SEQ ID NO: 60382 - RNA, 19 nt, synthetic construct
  misc_feature 1..19: note = siRNA sense sequence
  source 1..19: mol_type = other RNA
ttgagtcacatcatggttt

SEQ ID NO: 60383 - RNA, 19 nt, synthetic construct
  misc_feature 1..19: note = siRNA antisense sequence
  source 1..19: mol_type = other RNA
aaaccatgatgtgactcaa

SEQ ID NO: 60384 - RNA, 19 nt, synthetic construct
  misc_feature 1..19: note = siRNA sense sequence
  source 1..19: mol_type = other RNA
tgagtcacatcatggttta

SEQ ID NO: 60385 - RNA, 19 nt, synthetic construct
  misc_feature 1..19: note = siRNA antisense sequence
  source 1..19: mol_type = other RNA
taaaccatgatgtgactca

SEQ ID NO: 60386 - RNA, 19 nt, synthetic construct
  misc_feature 1..19: note = siRNA sense sequence
  source 1..19: mol_type = other RNA
gagtcacatcatggtttag

SEQ ID NO: 60387 - RNA, 19 nt, synthetic construct
  misc_feature 1..19: note = siRNA antisense sequence
  source 1..19: mol_type = other RNA
ctaaaccatgatgtgactc

SEQ ID NO: 60388 - RNA, 19 nt, synthetic construct
  misc_feature 1..19: note = siRNA sense sequence
  source 1..19: mol_type = other RNA
gtcacatcatggtttaggc

SEQ ID NO: 60389 - RNA, 19 nt, synthetic construct
  misc_feature 1..19: note = siRNA antisense sequence
  source 1..19: mol_type = other RNA
gcctaaaccatgatgtgac

SEQ ID NO: 60390 - RNA, 19 nt, synthetic construct
  misc_feature 1..19: note = siRNA sense sequence
  source 1..19: mol_type = other RNA
tcacatcatggtttaggcc

SEQ ID NO: 60391 - RNA, 19 nt, synthetic construct
  misc_feature 1..19: note = siRNA antisense sequence
  source 1..19: mol_type = other RNA
ggcctaaaccatgatgtga

SEQ ID NO: 60392 - RNA, 19 nt, synthetic construct
  misc_feature 1..19: note = siRNA sense sequence
  source 1..19: mol_type = other RNA
cacatcatggtttaggccc

SEQ ID NO: 60393 - RNA, 19 nt, synthetic construct
  misc_feature 1..19: note = siRNA antisense sequence
  source 1..19: mol_type = other RNA
gggcctaaaccatgatgtg

SEQ ID NO: 60394 - RNA, 19 nt, synthetic construct
  misc_feature 1..19: note = siRNA sense sequence
  source 1..19: mol_type = other RNA
acatcatggtttaggccct

SEQ ID NO: 60395 - RNA, 19 nt, synthetic construct
  misc_feature 1..19: note = siRNA antisense sequence
  source 1..19: mol_type = other RNA
agggcctaaaccatgatgt

SEQ ID NO: 60396 - RNA, 19 nt, synthetic construct
  misc_feature 1..19: note = siRNA sense sequence
  source 1..19: mol_type = other RNA
catcatggtttaggccctg

SEQ ID NO: 60397 - RNA, 19 nt, synthetic construct
  misc_feature 1..19: note = siRNA antisense sequence
  source 1..19: mol_type = other RNA
cagggcctaaaccatgatg

SEQ ID NO: 60398 - RNA, 19 nt, synthetic construct
  misc_feature 1..19: note = siRNA sense sequence
  source 1..19: mol_type = other RNA
atcatggtttaggccctgt

SEQ ID NO: 60399 - RNA, 19 nt, synthetic construct
  misc_feature 1..19: note = siRNA antisense sequence
  source 1..19: mol_type = other RNA
acagggcctaaaccatgat

SEQ ID NO: 60400 - RNA, 19 nt, synthetic construct
  misc_feature 1..19: note = siRNA sense sequence
  source 1..19: mol_type = other RNA
tcatggtttaggccctgta

SEQ ID NO: 60401 - RNA, 19 nt, synthetic construct
  misc_feature 1..19: note = siRNA antisense sequence
  source 1..19: mol_type = other RNA
tacagggcctaaaccatga

SEQ ID NO: 60402 - RNA, 19 nt, synthetic construct
  misc_feature 1..19: note = siRNA sense sequence
  source 1..19: mol_type = other RNA
catggtttaggccctgtac

SEQ ID NO: 60403 - RNA, 19 nt, synthetic construct
  misc_feature 1..19: note = siRNA antisense sequence
  source 1..19: mol_type = other RNA
gtacagggcctaaaccatg

SEQ ID NO: 60404 - RNA, 19 nt, synthetic construct
  misc_feature 1..19: note = siRNA sense sequence
  source 1..19: mol_type = other RNA
atggtttaggccctgtact

SEQ ID NO: 60405 - RNA, 19 nt, synthetic construct
  misc_feature 1..19: note = siRNA antisense sequence
  source 1..19: mol_type = other RNA
agtacagggcctaaaccat

SEQ ID NO: 60406 - RNA, 19 nt, synthetic construct
  misc_feature 1..19: note = siRNA sense sequence
  source 1..19: mol_type = other RNA
tggtttaggccctgtacta

SEQ ID NO: 60407 - RNA, 19 nt, synthetic construct
  misc_feature 1..19: note = siRNA antisense sequence
  source 1..19: mol_type = other RNA
tagtacagggcctaaacca

SEQ ID NO: 60408 - RNA, 19 nt, synthetic construct
  misc_feature 1..19: note = siRNA sense sequence
  source 1..19: mol_type = other RNA
tgtactaaggatttcactt

SEQ ID NO: 60409 - RNA, 19 nt, synthetic construct
  misc_feature 1..19: note = siRNA antisense sequence
  source 1..19: mol_type = other RNA
aagtgaaatccttagtaca

SEQ ID NO: 60410 - RNA, 19 nt, synthetic construct
  misc_feature 1..19: note = siRNA sense sequence
  source 1..19: mol_type = other RNA
ttttgtaagtaggtatgac

SEQ ID NO: 60411 - RNA, 19 nt, synthetic construct
  misc_feature 1..19: note = siRNA antisense sequence
  source 1..19: mol_type = other RNA
gtcatacctacttacaaaa

SEQ ID NO: 60412 - RNA, 19 nt, synthetic construct
  misc_feature 1..19: note = siRNA sense sequence
  source 1..19: mol_type = other RNA
tttgtaagtaggtatgact

SEQ ID NO: 60413 - RNA, 19 nt, synthetic construct
  misc_feature 1..19: note = siRNA antisense sequence
  source 1..19: mol_type = other RNA
agtcatacctacttacaaa

SEQ ID NO: 60414 - RNA, 19 nt, synthetic construct
  misc_feature 1..19: note = siRNA sense sequence
  source 1..19: mol_type = other RNA
ttgtaagtaggtatgactg

SEQ ID NO: 60415 - RNA, 19 nt, synthetic construct
  misc_feature 1..19: note = siRNA antisense sequence
  source 1..19: mol_type = other RNA
cagtcatacctacttacaa

SEQ ID NO: 60416 - RNA, 19 nt, synthetic construct
  misc_feature 1..19: note = siRNA sense sequence
  source 1..19: mol_type = other RNA
tgtaagtaggtatgactgt

SEQ ID NO: 60417 - RNA, 19 nt, synthetic construct
  misc_feature 1..19: note = siRNA antisense sequence
  source 1..19: mol_type = other RNA
acagtcatacctacttaca

SEQ ID NO: 60418 - RNA, 19 nt, synthetic construct
  misc_feature 1..19: note = siRNA sense sequence
  source 1..19: mol_type = other RNA
gtaagtaggtatgactgta

SEQ ID NO: 60419 - RNA, 19 nt, synthetic construct
  misc_feature 1..19: note = siRNA antisense sequence
  source 1..19: mol_type = other RNA
tacagtcatacctacttac

SEQ ID NO: 60420 - RNA, 19 nt, synthetic construct
  misc_feature 1..19: note = siRNA sense sequence
  source 1..19: mol_type = other RNA
taagtaggtatgactgtac

SEQ ID NO: 60421 - RNA, 19 nt, synthetic construct
  misc_feature 1..19: note = siRNA antisense sequence
  source 1..19: mol_type = other RNA
gtacagtcatacctactta

SEQ ID NO: 60422 - RNA, 19 nt, synthetic construct
  misc_feature 1..19: note = siRNA sense sequence
  source 1..19: mol_type = other RNA
gtaggtatgactgtactgc

SEQ ID NO: 60423 - RNA, 19 nt, synthetic construct
  misc_feature 1..19: note = siRNA antisense sequence
  source 1..19: mol_type = other RNA
gcagtacagtcatacctac

SEQ ID NO: 60424 - RNA, 19 nt, synthetic construct
  misc_feature 1..19: note = siRNA sense sequence
  source 1..19: mol_type = other RNA
taggtatgactgtactgca

SEQ ID NO: 60425 - RNA, 19 nt, synthetic construct
  misc_feature 1..19: note = siRNA antisense sequence
  source 1..19: mol_type = other RNA
tgcagtacagtcataccta

SEQ ID NO: 60426 - RNA, 19 nt, synthetic construct
  misc_feature 1..19: note = siRNA sense sequence
  source 1..19: mol_type = other RNA
acatgtttatttacgtggc

SEQ ID NO: 60427 - RNA, 19 nt, synthetic construct
  misc_feature 1..19: note = siRNA antisense sequence
  source 1..19: mol_type = other RNA
gccacgtaaataaacatgt

SEQ ID NO: 60428 - RNA, 19 nt, synthetic construct
  misc_feature 1..19: note = siRNA sense sequence
  source 1..19: mol_type = other RNA
catgtttatttacgtggca

SEQ ID NO: 60429 - RNA, 19 nt, synthetic construct
  misc_feature 1..19: note = siRNA antisense sequence
  source 1..19: mol_type = other RNA
tgccacgtaaataaacatg

SEQ ID NO: 60430 - RNA, 19 nt, synthetic construct
  misc_feature 1..19: note = siRNA sense sequence
  source 1..19: mol_type = other RNA
atgtttatttacgtggcag

SEQ ID NO: 60431 - RNA, 19 nt, synthetic construct
  misc_feature 1..19: note = siRNA antisense sequence
  source 1..19: mol_type = other RNA
ctgccacgtaaataaacat

SEQ ID NO: 60432 - RNA, 19 nt, synthetic construct
  misc_feature 1..19: note = siRNA sense sequence
  source 1..19: mol_type = other RNA
tgtttatttacgtggcagt

SEQ ID NO: 60433 - RNA, 19 nt, synthetic construct
  misc_feature 1..19: note = siRNA antisense sequence
  source 1..19: mol_type = other RNA
actgccacgtaaataaaca

SEQ ID NO: 60434 - RNA, 19 nt, synthetic construct
  misc_feature 1..19: note = siRNA sense sequence
  source 1..19: mol_type = other RNA
tttacgtggcagtgttatt

SEQ ID NO: 60435 - RNA, 19 nt, synthetic construct
  misc_feature 1..19: note = siRNA antisense sequence
  source 1..19: mol_type = other RNA
aataacactgccacgtaaa

SEQ ID NO: 60436 - RNA, 19 nt, synthetic construct
  misc_feature 1..19: note = siRNA sense sequence
  source 1..19: mol_type = other RNA
ttacgtggcagtgttattt

SEQ ID NO: 60437 - RNA, 19 nt, synthetic construct
  misc_feature 1..19: note = siRNA antisense sequence
  source 1..19: mol_type = other RNA
aaataacactgccacgtaa

SEQ ID NO: 60438 - RNA, 19 nt, synthetic construct
  misc_feature 1..19: note = siRNA sense sequence
  source 1..19: mol_type = other RNA
aataatggcatatctcatg

SEQ ID NO: 60439 - RNA, 19 nt, synthetic construct
  misc_feature 1..19: note = siRNA antisense sequence
  source 1..19: mol_type = other RNA
catgagatatgccattatt

SEQ ID NO: 60440 - RNA, 19 nt, synthetic construct
  misc_feature 1..19: note = siRNA sense sequence
  source 1..19: mol_type = other RNA
ataatggcatatctcatgt

SEQ ID NO: 60441 - RNA, 19 nt, synthetic construct
  misc_feature 1..19: note = siRNA antisense sequence
  source 1..19: mol_type = other RNA
acatgagatatgccattat

SEQ ID NO: 60442 - RNA, 19 nt, synthetic construct
  misc_feature 1..19: note = siRNA sense sequence
  source 1..19: mol_type = other RNA
taatggcatatctcatgtt

SEQ ID NO: 60443 - RNA, 19 nt, synthetic construct
  misc_feature 1..19: note = siRNA antisense sequence
  source 1..19: mol_type = other RNA
aacatgagatatgccatta

SEQ ID NO: 60444 - RNA, 19 nt, synthetic construct
  misc_feature 1..19: note = siRNA sense sequence
  source 1..19: mol_type = other RNA
aatggcatatctcatgttc

SEQ ID NO: 60445 - RNA, 19 nt, synthetic construct
  misc_feature 1..19: note = siRNA antisense sequence
  source 1..19: mol_type = other RNA
gaacatgagatatgccatt

SEQ ID NO: 60446 - RNA, 19 nt, synthetic construct
  misc_feature 1..19: note = siRNA sense sequence
  source 1..19: mol_type = other RNA
atggcatatctcatgttca

SEQ ID NO: 60447 - RNA, 19 nt, synthetic construct
  misc_feature 1..19: note = siRNA antisense sequence
  source 1..19: mol_type = other RNA
tgaacatgagatatgccat

SEQ ID NO: 60448 - RNA, 19 nt, synthetic construct
  misc_feature 1..19: note = siRNA sense sequence
  source 1..19: mol_type = other RNA
tggcatatctcatgttcaa

SEQ ID NO: 60449 - RNA, 19 nt, synthetic construct
  misc_feature 1..19: note = siRNA antisense sequence
  source 1..19: mol_type = other RNA
ttgaacatgagatatgcca

SEQ ID NO: 60450 - RNA, 19 nt, synthetic construct
  misc_feature 1..19: note = siRNA sense sequence
  source 1..19: mol_type = other RNA
ggcatatctcatgttcaat

SEQ ID NO: 60451 - RNA, 19 nt, synthetic construct
  misc_feature 1..19: note = siRNA antisense sequence
  source 1..19: mol_type = other RNA
attgaacatgagatatgcc

SEQ ID NO: 60452 - RNA, 19 nt, synthetic construct
  misc_feature 1..19: note = siRNA sense sequence
  source 1..19: mol_type = other RNA
gcatatctcatgttcaatg

SEQ ID NO: 60453 - RNA, 19 nt, synthetic construct
  misc_feature 1..19: note = siRNA antisense sequence
  source 1..19: mol_type = other RNA
cattgaacatgagatatgc

SEQ ID NO: 60454 - RNA, 19 nt, synthetic construct
  misc_feature 1..19: note = siRNA sense sequence
  source 1..19: mol_type = other RNA
atatctcatgttcaatggc

SEQ ID NO: 60455 - RNA, 19 nt, synthetic construct
  misc_feature 1..19: note = siRNA antisense sequence
  source 1..19: mol_type = other RNA
gccattgaacatgagatat

SEQ ID NO: 60456 - RNA, 19 nt, synthetic construct
  misc_feature 1..19: note = siRNA sense sequence
  source 1..19: mol_type = other RNA
tatctcatgttcaatggca

SEQ ID NO: 60457 - RNA, 19 nt, synthetic construct
  misc_feature 1..19: note = siRNA antisense sequence
  source 1..19: mol_type = other RNA
tgccattgaacatgagata

SEQ ID NO: 60458 - RNA, 19 nt, synthetic construct
  misc_feature 1..19: note = siRNA sense sequence
  source 1..19: mol_type = other RNA
atctcatgttcaatggcat

SEQ ID NO: 60459 - RNA, 19 nt, synthetic construct
  misc_feature 1..19: note = siRNA antisense sequence
  source 1..19: mol_type = other RNA
atgccattgaacatgagat

SEQ ID NO: 60460 - RNA, 19 nt, synthetic construct
  misc_feature 1..19: note = siRNA sense sequence
  source 1..19: mol_type = other RNA
catgttcaatggcatttta

SEQ ID NO: 60461 - RNA, 19 nt, synthetic construct
  misc_feature 1..19: note = siRNA antisense sequence
  source 1..19: mol_type = other RNA
taaaatgccattgaacatg

SEQ ID NO: 60462 - RNA, 19 nt, synthetic construct
  misc_feature 1..19: note = siRNA sense sequence
  source 1..19: mol_type = other RNA
agaggtgaggaatcttaac

SEQ ID NO: 60463 - RNA, 19 nt, synthetic construct
  misc_feature 1..19: note = siRNA antisense sequence
  source 1..19: mol_type = other RNA
gttaagattcctcacctct

SEQ ID NO: 60464 - RNA, 19 nt, synthetic construct
  misc_feature 1..19: note = siRNA sense sequence
  source 1..19: mol_type = other RNA
agggtttaaattctggtgg

SEQ ID NO: 60465 - RNA, 19 nt, synthetic construct
  misc_feature 1..19: note = siRNA antisense sequence
  source 1..19: mol_type = other RNA
ccaccagaatttaaaccct

SEQ ID NO: 60466 - RNA, 19 nt, synthetic construct
  misc_feature 1..19: note = siRNA sense sequence
  source 1..19: mol_type = other RNA
ggtttaaattctggtggtc

SEQ ID NO: 60467 - RNA, 19 nt, synthetic construct
  misc_feature 1..19: note = siRNA antisense sequence
  source 1..19: mol_type = other RNA
gaccaccagaatttaaacc

SEQ ID NO: 60468 - RNA, 19 nt, synthetic construct
  misc_feature 1..19: note = siRNA sense sequence
  source 1..19: mol_type = other RNA
gtttaaattctggtggtca

SEQ ID NO: 60469 - RNA, 19 nt, synthetic construct
  misc_feature 1..19: note = siRNA antisense sequence
  source 1..19: mol_type = other RNA
tgaccaccagaatttaaac

SEQ ID NO: 60470 - RNA, 19 nt, synthetic construct
  misc_feature 1..19: note = siRNA sense sequence
  source 1..19: mol_type = other RNA
tttaaattctggtggtcac

SEQ ID NO: 60471 - RNA, 19 nt, synthetic construct
  misc_feature 1..19: note = siRNA antisense sequence
  source 1..19: mol_type = other RNA
gtgaccaccagaatttaaa

SEQ ID NO: 60472 - RNA, 19 nt, synthetic construct
  misc_feature 1..19: note = siRNA sense sequence
  source 1..19: mol_type = other RNA
ttaaattctggtggtcacg

SEQ ID NO: 60473 - RNA, 19 nt, synthetic construct
  misc_feature 1..19: note = siRNA antisense sequence
  source 1..19: mol_type = other RNA
cgtgaccaccagaatttaa

SEQ ID NO: 60474 - RNA, 19 nt, synthetic construct
  misc_feature 1..19: note = siRNA sense sequence
  source 1..19: mol_type = other RNA
taaattctggtggtcacgg

SEQ ID NO: 60475 - RNA, 19 nt, synthetic construct
  misc_feature 1..19: note = siRNA antisense sequence
  source 1..19: mol_type = other RNA
ccgtgaccaccagaattta

SEQ ID NO: 60476 - RNA, 19 nt, synthetic construct
  misc_feature 1..19: note = siRNA sense sequence
  source 1..19: mol_type = other RNA
aaattctggtggtcacggg

SEQ ID NO: 60477 - RNA, 19 nt, synthetic construct
  misc_feature 1..19: note = siRNA antisense sequence
  source 1..19: mol_type = other RNA
cccgtgaccaccagaattt

SEQ ID NO: 60478 - RNA, 19 nt, synthetic construct
  misc_feature 1..19: note = siRNA sense sequence
  source 1..19: mol_type = other RNA
tctggtggtcacgggtcag

SEQ ID NO: 60479 - RNA, 19 nt, synthetic construct
  misc_feature 1..19: note = siRNA antisense sequence
  source 1..19: mol_type = other RNA
ctgacccgtgaccaccaga

SEQ ID NO: 60480 - RNA, 19 nt, synthetic construct
  misc_feature 1..19: note = siRNA sense sequence
  source 1..19: mol_type = other RNA
ctggtggtcacgggtcaga

SEQ ID NO: 60481 - RNA, 19 nt, synthetic construct
  misc_feature 1..19: note = siRNA antisense sequence
  source 1..19: mol_type = other RNA
tctgacccgtgaccaccag

SEQ ID NO: 60482 - RNA, 19 nt, synthetic construct
  misc_feature 1..19: note = siRNA sense sequence
  source 1..19: mol_type = other RNA
gtcacgggtcagagcctat

SEQ ID NO: 60483 - RNA, 19 nt, synthetic construct
  misc_feature 1..19: note = siRNA antisense sequence
  source 1..19: mol_type = other RNA
ataggctctgacccgtgac

SEQ ID NO: 60484 - RNA, 19 nt, synthetic construct
  misc_feature 1..19: note = siRNA sense sequence
  source 1..19: mol_type = other RNA
tcacgggtcagagcctatg

SEQ ID NO: 60485 - RNA, 19 nt, synthetic construct
  misc_feature 1..19: note = siRNA antisense sequence
  source 1..19: mol_type = other RNA
cataggctctgacccgtga

SEQ ID NO: 60486 - RNA, 19 nt, synthetic construct
  misc_feature 1..19: note = siRNA sense sequence
  source 1..19: mol_type = other RNA
cacgggtcagagcctatgc

SEQ ID NO: 60487 - RNA, 19 nt, synthetic construct
  misc_feature 1..19: note = siRNA antisense sequence
  source 1..19: mol_type = other RNA
gcataggctctgacccgtg

SEQ ID NO: 60488 - RNA, 19 nt, synthetic construct
  misc_feature 1..19: note = siRNA sense sequence
  source 1..19: mol_type = other RNA
acgggtcagagcctatgct

SEQ ID NO: 60489 - RNA, 19 nt, synthetic construct
  misc_feature 1..19: note = siRNA antisense sequence
  source 1..19: mol_type = other RNA
agcataggctctgacccgt

SEQ ID NO: 60490 - RNA, 19 nt, synthetic construct
  misc_feature 1..19: note = siRNA sense sequence
  source 1..19: mol_type = other RNA
tcttatccactgcactaaa

SEQ ID NO: 60491 - RNA, 19 nt, synthetic construct
  misc_feature 1..19: note = siRNA antisense sequence
  source 1..19: mol_type = other RNA
tttagtgcagtggataaga

SEQ ID NO: 60492 - RNA, 19 nt, synthetic construct
  misc_feature 1..19: note = siRNA sense sequence
  source 1..19: mol_type = other RNA
actcctccaatgactagca

SEQ ID NO: 60493 - RNA, 19 nt, synthetic construct
  misc_feature 1..19: note = siRNA antisense sequence
  source 1..19: mol_type = other RNA
tgctagtcattggaggagt

SEQ ID NO: 60494 - RNA, 19 nt, synthetic construct
  misc_feature 1..19: note = siRNA sense sequence
  source 1..19: mol_type = other RNA
atgactagcattcactgaa

SEQ ID NO: 60495 - RNA, 19 nt, synthetic construct
  misc_feature 1..19: note = siRNA antisense sequence
  source 1..19: mol_type = other RNA
ttcagtgaatgctagtcat

SEQ ID NO: 60496 - RNA, 19 nt, synthetic construct
  misc_feature 1..19: note = siRNA sense sequence
  source 1..19: mol_type = other RNA
tgactagcattcactgaag

SEQ ID NO: 60497 - RNA, 19 nt, synthetic construct
  misc_feature 1..19: note = siRNA antisense sequence
  source 1..19: mol_type = other RNA
cttcagtgaatgctagtca

SEQ ID NO: 60498 - RNA, 19 nt, synthetic construct
  misc_feature 1..19: note = siRNA sense sequence
  source 1..19: mol_type = other RNA
gactagcattcactgaaga

SEQ ID NO: 60499 - RNA, 19 nt, synthetic construct
  misc_feature 1..19: note = siRNA antisense sequence
  source 1..19: mol_type = other RNA
tcttcagtgaatgctagtc

SEQ ID NO: 60500 - RNA, 19 nt, synthetic construct
  misc_feature 1..19: note = siRNA sense sequence
  source 1..19: mol_type = other RNA
cattcactgaagactgctc

SEQ ID NO: 60501 - RNA, 19 nt, synthetic construct
  misc_feature 1..19: note = siRNA antisense sequence
  source 1..19: mol_type = other RNA
gagcagtcttcagtgaatg

SEQ ID NO: 60502 - RNA, 19 nt, synthetic construct
  misc_feature 1..19: note = siRNA sense sequence
  source 1..19: mol_type = other RNA
gaagactgctctgcaccag

SEQ ID NO: 60503 - RNA, 19 nt, synthetic construct
  misc_feature 1..19: note = siRNA antisense sequence
  source 1..19: mol_type = other RNA
ctggtgcagagcagtcttc

SEQ ID NO: 60504 - RNA, 19 nt, synthetic construct
  misc_feature 1..19: note = siRNA sense sequence
  source 1..19: mol_type = other RNA
tgctctgcaccagtcttgg

SEQ ID NO: 60505 - RNA, 19 nt, synthetic construct
  misc_feature 1..19: note = siRNA antisense sequence
  source 1..19: mol_type = other RNA
ccaagactggtgcagagca

SEQ ID NO: 60506 - RNA, 19 nt, synthetic construct
  misc_feature 1..19: note = siRNA sense sequence
  source 1..19: mol_type = other RNA
gctctgcaccagtcttggg

SEQ ID NO: 60507 - RNA, 19 nt, synthetic construct
  misc_feature 1..19: note = siRNA antisense sequence
  source 1..19: mol_type = other RNA
cccaagactggtgcagagc

SEQ ID NO: 60508 - RNA, 19 nt, synthetic construct
  misc_feature 1..19: note = siRNA sense sequence
  source 1..19: mol_type = other RNA
ctctgcaccagtcttgggt

SEQ ID NO: 60509 - RNA, 19 nt, synthetic construct
  misc_feature 1..19: note = siRNA antisense sequence
  source 1..19: mol_type = other RNA
acccaagactggtgcagag

SEQ ID NO: 60510 - RNA, 19 nt, synthetic construct
  misc_feature 1..19: note = siRNA sense sequence
  source 1..19: mol_type = other RNA
cttgggtgtctggattatt

SEQ ID NO: 60511 - RNA, 19 nt, synthetic construct
  misc_feature 1..19: note = siRNA antisense sequence
  source 1..19: mol_type = other RNA
aataatccagacacccaag

SEQ ID NO: 60512 - RNA, 19 nt, synthetic construct
  misc_feature 1..19: note = siRNA sense sequence
  source 1..19: mol_type = other RNA
gggtgtctggattatttta

SEQ ID NO: 60513 - RNA, 19 nt, synthetic construct
  misc_feature 1..19: note = siRNA antisense sequence
  source 1..19: mol_type = other RNA
taaaataatccagacaccc

SEQ ID NO: 60514 - RNA, 19 nt, synthetic construct
  misc_feature 1..19: note = siRNA sense sequence
  source 1..19: mol_type = other RNA
ttattttatccagccaccg

SEQ ID NO: 60515 - RNA, 19 nt, synthetic construct
  misc_feature 1..19: note = siRNA antisense sequence
  source 1..19: mol_type = other RNA
cggtggctggataaaataa

SEQ ID NO: 60516 - RNA, 19 nt, synthetic construct
  misc_feature 1..19: note = siRNA sense sequence
  source 1..19: mol_type = other RNA
tattttatccagccaccgc

SEQ ID NO: 60517 - RNA, 19 nt, synthetic construct
  misc_feature 1..19: note = siRNA antisense sequence
  source 1..19: mol_type = other RNA
gcggtggctggataaaata

SEQ ID NO: 60518 - RNA, 19 nt, synthetic construct
  misc_feature 1..19: note = siRNA sense sequence
  source 1..19: mol_type = other RNA
attttatccagccaccgca

SEQ ID NO: 60519 - RNA, 19 nt, synthetic construct
  misc_feature 1..19: note = siRNA antisense sequence
  source 1..19: mol_type = other RNA
tgcggtggctggataaaat

SEQ ID NO: 60520 - RNA, 19 nt, synthetic construct
  misc_feature 1..19: note = siRNA sense sequence
  source 1..19: mol_type = other RNA
ttttatccagccaccgcaa

SEQ ID NO: 60521 - RNA, 19 nt, synthetic construct
  misc_feature 1..19: note = siRNA antisense sequence
  source 1..19: mol_type = other RNA
ttgcggtggctggataaaa

SEQ ID NO: 60522 - RNA, 19 nt, synthetic construct
  misc_feature 1..19: note = siRNA sense sequence
  source 1..19: mol_type = other RNA
tttatccagccaccgcaat

SEQ ID NO: 60523 - RNA, 19 nt, synthetic construct
  misc_feature 1..19: note = siRNA antisense sequence
  source 1..19: mol_type = other RNA
attgcggtggctggataaa

SEQ ID NO: 60524 - RNA, 19 nt, synthetic construct
  misc_feature 1..19: note = siRNA sense sequence
  source 1..19: mol_type = other RNA
ttatccagccaccgcaatc

SEQ ID NO: 60525 - RNA, 19 nt, synthetic construct
  misc_feature 1..19: note = siRNA antisense sequence
  source 1..19: mol_type = other RNA
gattgcggtggctggataa

SEQ ID NO: 60526 - RNA, 19 nt, synthetic construct
  misc_feature 1..19: note = siRNA sense sequence
  source 1..19: mol_type = other RNA
tatccagccaccgcaatca

SEQ ID NO: 60527 - RNA, 19 nt, synthetic construct
  misc_feature 1..19: note = siRNA antisense sequence
  source 1..19: mol_type = other RNA
tgattgcggtggctggata

SEQ ID NO: 60528 - RNA, 19 nt, synthetic construct
  misc_feature 1..19: note = siRNA sense sequence
  source 1..19: mol_type = other RNA
atccagccaccgcaatcac

SEQ ID NO: 60529 - RNA, 19 nt, synthetic construct
  misc_feature 1..19: note = siRNA antisense sequence
  source 1..19: mol_type = other RNA
gtgattgcggtggctggat

SEQ ID NO: 60530 - RNA, 19 nt, synthetic construct
  misc_feature 1..19: note = siRNA sense sequence
  source 1..19: mol_type = other RNA
tccagccaccgcaatcact

SEQ ID NO: 60531 - RNA, 19 nt, synthetic construct
  misc_feature 1..19: note = siRNA antisense sequence
  source 1..19: mol_type = other RNA
agtgattgcggtggctgga

SEQ ID NO: 60532 - RNA, 19 nt, synthetic construct
  misc_feature 1..19: note = siRNA sense sequence
  source 1..19: mol_type = other RNA
ccagccaccgcaatcactc

SEQ ID NO: 60533 - RNA, 19 nt, synthetic construct
  misc_feature 1..19: note = siRNA antisense sequence
  source 1..19: mol_type = other RNA
gagtgattgcggtggctgg

SEQ ID NO: 60534 - RNA, 19 nt, synthetic construct
  misc_feature 1..19: note = siRNA sense sequence
  source 1..19: mol_type = other RNA
cagccaccgcaatcactct

SEQ ID NO: 60535 - RNA, 19 nt, synthetic construct
  misc_feature 1..19: note = siRNA antisense sequence
  source 1..19: mol_type = other RNA
agagtgattgcggtggctg

SEQ ID NO: 60536 - RNA, 19 nt, synthetic construct
  misc_feature 1..19: note = siRNA sense sequence
  source 1..19: mol_type = other RNA
gagggaggtgctattagta

SEQ ID NO: 60537 - RNA, 19 nt, synthetic construct
  misc_feature 1..19: note = siRNA antisense sequence
  source 1..19: mol_type = other RNA
tactaatagcacctccctc

SEQ ID NO: 60538 - RNA, 19 nt, synthetic construct
  misc_feature 1..19: note = siRNA sense sequence
  source 1..19: mol_type = other RNA
agggaggtgctattagtac

SEQ ID NO: 60539 - RNA, 19 nt, synthetic construct
  misc_feature 1..19: note = siRNA antisense sequence
  source 1..19: mol_type = other RNA
gtactaatagcacctccct

SEQ ID NO: 60540 - RNA, 19 nt, synthetic construct
  misc_feature 1..19: note = siRNA sense sequence
  source 1..19: mol_type = other RNA
gggaggtgctattagtact

SEQ ID NO: 60541 - RNA, 19 nt, synthetic construct
  misc_feature 1..19: note = siRNA antisense sequence
  source 1..19: mol_type = other RNA
agtactaatagcacctccc

SEQ ID NO: 60542 - RNA, 19 nt, synthetic construct
  misc_feature 1..19: note = siRNA sense sequence
  source 1..19: mol_type = other RNA
ggaggtgctattagtactt

SEQ ID NO: 60543 - RNA, 19 nt, synthetic construct
  misc_feature 1..19: note = siRNA antisense sequence
  source 1..19: mol_type = other RNA
aagtactaatagcacctcc

SEQ ID NO: 60544 - RNA, 19 nt, synthetic construct
  misc_feature 1..19: note = siRNA sense sequence
  source 1..19: mol_type = other RNA
aggtgctattagtacttcc

SEQ ID NO: 60545 - RNA, 19 nt, synthetic construct
  misc_feature 1..19: note = siRNA antisense sequence
  source 1..19: mol_type = other RNA
ggaagtactaatagcacct

SEQ ID NO: 60546 - RNA, 19 nt, synthetic construct
  misc_feature 1..19: note = siRNA sense sequence
  source 1..19: mol_type = other RNA
ggtgctattagtacttcca

SEQ ID NO: 60547 - RNA, 19 nt, synthetic construct
  misc_feature 1..19: note = siRNA antisense sequence
  source 1..19: mol_type = other RNA
tggaagtactaatagcacc

SEQ ID NO: 60548 - RNA, 19 nt, synthetic construct
  misc_feature 1..19: note = siRNA sense sequence
  source 1..19: mol_type = other RNA
gtgctattagtacttccat

SEQ ID NO: 60549 - RNA, 19 nt, synthetic construct
  misc_feature 1..19: note = siRNA antisense sequence
  source 1..19: mol_type = other RNA
atggaagtactaatagcac

SEQ ID NO: 60550 - RNA, 19 nt, synthetic construct
  misc_feature 1..19: note = siRNA sense sequence
  source 1..19: mol_type = other RNA
tgctattagtacttccatt

SEQ ID NO: 60551 - RNA, 19 nt, synthetic construct
  misc_feature 1..19: note = siRNA antisense sequence
  source 1..19: mol_type = other RNA
aatggaagtactaatagca

SEQ ID NO: 60552 - RNA, 19 nt, synthetic construct
  misc_feature 1..19: note = siRNA sense sequence
  source 1..19: mol_type = other RNA
ctttgtctttcaggcaccc

SEQ ID NO: 60553 - RNA, 19 nt, synthetic construct
  misc_feature 1..19: note = siRNA antisense sequence
  source 1..19: mol_type = other RNA
gggtgcctgaaagacaaag

SEQ ID NO: 60554 - RNA, 19 nt, synthetic construct
  misc_feature 1..19: note = siRNA sense sequence
  source 1..19: mol_type = other RNA
tttgtctttcaggcaccca

SEQ ID NO: 60555 - RNA, 19 nt, synthetic construct
  misc_feature 1..19: note = siRNA antisense sequence
  source 1..19: mol_type = other RNA
tgggtgcctgaaagacaaa

SEQ ID NO: 60556 - RNA, 19 nt, synthetic construct
  misc_feature 1..19: note = siRNA sense sequence
  source 1..19: mol_type = other RNA
ttgtctttcaggcacccac

SEQ ID NO: 60557 - RNA, 19 nt, synthetic construct
  misc_feature 1..19: note = siRNA antisense sequence
  source 1..19: mol_type = other RNA
gtgggtgcctgaaagacaa

SEQ ID NO: 60558 - RNA, 19 nt, synthetic construct
  misc_feature 1..19: note = siRNA sense sequence
  source 1..19: mol_type = other RNA
agtgatgttttaggatttc

SEQ ID NO: 60559 - RNA, 19 nt, synthetic construct
  misc_feature 1..19: note = siRNA antisense sequence
  source 1..19: mol_type = other RNA
gaaatcctaaaacatcact

SEQ ID NO: 60560 - RNA, 19 nt, synthetic construct
  misc_feature 1..19: note = siRNA sense sequence
  source 1..19: mol_type = other RNA
gtgatgttttaggatttcc

SEQ ID NO: 60561 - RNA, 19 nt, synthetic construct
  misc_feature 1..19: note = siRNA antisense sequence
  source 1..19: mol_type = other RNA
ggaaatcctaaaacatcac

SEQ ID NO: 60562 - RNA, 19 nt, synthetic construct
  misc_feature 1..19: note = siRNA sense sequence
  source 1..19: mol_type = other RNA
gatgttttaggatttccat

SEQ ID NO: 60563 - RNA, 19 nt, synthetic construct
  misc_feature 1..19: note = siRNA antisense sequence
  source 1..19: mol_type = other RNA
atggaaatcctaaaacatc

SEQ ID NO: 60564 - RNA, 19 nt, synthetic construct
  misc_feature 1..19: note = siRNA sense sequence
  source 1..19: mol_type = other RNA
ttttaggatttccatgagt

SEQ ID NO: 60565 - RNA, 19 nt, synthetic construct
  misc_feature 1..19: note = siRNA antisense sequence
  source 1..19: mol_type = other RNA
actcatggaaatcctaaaa

SEQ ID NO: 60566 - RNA, 19 nt, synthetic construct
  misc_feature 1..19: note = siRNA sense sequence
  source 1..19: mol_type = other RNA
tttaggatttccatgagtg

SEQ ID NO: 60567 - RNA, 19 nt, synthetic construct
  misc_feature 1..19: note = siRNA antisense sequence
  source 1..19: mol_type = other RNA
cactcatggaaatcctaaa

SEQ ID NO: 60568 - RNA, 19 nt, synthetic construct
  misc_feature 1..19: note = siRNA sense sequence
  source 1..19: mol_type = other RNA
taggatttccatgagtgta

SEQ ID NO: 60569 - RNA, 19 nt, synthetic construct
  misc_feature 1..19: note = siRNA antisense sequence
  source 1..19: mol_type = other RNA
tacactcatggaaatccta

SEQ ID NO: 60570 - RNA, 19 nt, synthetic construct
  misc_feature 1..19: note = siRNA sense sequence
  source 1..19: mol_type = other RNA
aggatttccatgagtgtag

SEQ ID NO: 60571 - RNA, 19 nt, synthetic construct
  misc_feature 1..19: note = siRNA antisense sequence
  source 1..19: mol_type = other RNA
ctacactcatggaaatcct

SEQ ID NO: 60572 - RNA, 19 nt, synthetic construct
  misc_feature 1..19: note = siRNA sense sequence
  source 1..19: mol_type = other RNA
acagctggtcccagaattc

SEQ ID NO: 60573 - RNA, 19 nt, synthetic construct
  misc_feature 1..19: note = siRNA antisense sequence
  source 1..19: mol_type = other RNA
gaattctgggaccagctgt

SEQ ID NO: 60574 - RNA, 19 nt, synthetic construct
  misc_feature 1..19: note = siRNA sense sequence
  source 1..19: mol_type = other RNA
cagctggtcccagaattct

SEQ ID NO: 60575 - RNA, 19 nt, synthetic construct
  misc_feature 1..19: note = siRNA antisense sequence
  source 1..19: mol_type = other RNA
agaattctgggaccagctg

SEQ ID NO: 60576 - RNA, 19 nt, synthetic construct
  misc_feature 1..19: note = siRNA sense sequence
  source 1..19: mol_type = other RNA
agctggtcccagaattctg

SEQ ID NO: 60577 - RNA, 19 nt, synthetic construct
  misc_feature 1..19: note = siRNA antisense sequence
  source 1..19: mol_type = other RNA
cagaattctgggaccagct

SEQ ID NO: 60578 - RNA, 19 nt, synthetic construct
  misc_feature 1..19: note = siRNA sense sequence
  source 1..19: mol_type = other RNA
gctggtcccagaattctgt

SEQ ID NO: 60579 - RNA, 19 nt, synthetic construct
  misc_feature 1..19: note = siRNA antisense sequence
  source 1..19: mol_type = other RNA
acagaattctgggaccagc

SEQ ID NO: 60580 - RNA, 19 nt, synthetic construct
  misc_feature 1..19: note = siRNA sense sequence
  source 1..19: mol_type = other RNA
ctggtcccagaattctgtg

SEQ ID NO: 60581 - RNA, 19 nt, synthetic construct
  misc_feature 1..19: note = siRNA antisense sequence
  source 1..19: mol_type = other RNA
cacagaattctgggaccag

SEQ ID NO: 60582 - RNA, 19 nt, synthetic construct
  misc_feature 1..19: note = siRNA sense sequence
  source 1..19: mol_type = other RNA
gtcccagaattctgtgcct

SEQ ID NO: 60583 - RNA, 19 nt, synthetic construct
  misc_feature 1..19: note = siRNA antisense sequence
  source 1..19: mol_type = other RNA
aggcacagaattctgggac

SEQ ID NO: 60584 - RNA, 19 nt, synthetic construct
  misc_feature 1..19: note = siRNA sense sequence
  source 1..19: mol_type = other RNA
tctgtgcctcttccagcta

SEQ ID NO: 60585 - RNA, 19 nt, synthetic construct
  misc_feature 1..19: note = siRNA antisense sequence
  source 1..19: mol_type = other RNA
tagctggaagaggcacaga

SEQ ID NO: 60586 - RNA, 19 nt, synthetic construct
  misc_feature 1..19: note = siRNA sense sequence
  source 1..19: mol_type = other RNA
tgtgcctcttccagctaaa

SEQ ID NO: 60587 - RNA, 19 nt, synthetic construct
  misc_feature 1..19: note = siRNA antisense sequence
  source 1..19: mol_type = other RNA
tttagctggaagaggcaca

SEQ ID NO: 60588 - RNA, 19 nt, synthetic construct
  misc_feature 1..19: note = siRNA sense sequence
  source 1..19: mol_type = other RNA
gtgcctcttccagctaaat

SEQ ID NO: 60589 - RNA, 19 nt, synthetic construct
  misc_feature 1..19: note = siRNA antisense sequence
  source 1..19: mol_type = other RNA
atttagctggaagaggcac

SEQ ID NO: 60590 - RNA, 19 nt, synthetic construct
  misc_feature 1..19: note = siRNA sense sequence
  source 1..19: mol_type = other RNA
tgcctcttccagctaaatc

SEQ ID NO: 60591 - RNA, 19 nt, synthetic construct
  misc_feature 1..19: note = siRNA antisense sequence
  source 1..19: mol_type = other RNA
gatttagctggaagaggca

SEQ ID NO: 60592 - RNA, 19 nt, synthetic construct
  misc_feature 1..19: note = siRNA sense sequence
  source 1..19: mol_type = other RNA
aaaatagtggcaaggcagt

SEQ ID NO: 60593 - RNA, 19 nt, synthetic construct
  misc_feature 1..19: note = siRNA antisense sequence
  source 1..19: mol_type = other RNA
actgccttgccactatttt

SEQ ID NO: 60594 - RNA, 19 nt, synthetic construct
  misc_feature 1..19: note = siRNA sense sequence
  source 1..19: mol_type = other RNA
aaatagtggcaaggcagtc

SEQ ID NO: 60595 - RNA, 19 nt, synthetic construct
  misc_feature 1..19: note = siRNA antisense sequence
  source 1..19: mol_type = other RNA
gactgccttgccactattt

SEQ ID NO: 60596 - RNA, 19 nt, synthetic construct
  misc_feature 1..19: note = siRNA sense sequence
  source 1..19: mol_type = other RNA
gtggcaaggcagtcaccaa

SEQ ID NO: 60597 - RNA, 19 nt, synthetic construct
  misc_feature 1..19: note = siRNA antisense sequence
  source 1..19: mol_type = other RNA
ttggtgactgccttgccac

SEQ ID NO: 60598 - RNA, 19 nt, synthetic construct
  misc_feature 1..19: note = siRNA sense sequence
  source 1..19: mol_type = other RNA
ggcaaggcagtcaccaaga

SEQ ID NO: 60599 - RNA, 19 nt, synthetic construct
  misc_feature 1..19: note = siRNA antisense sequence
  source 1..19: mol_type = other RNA
tcttggtgactgccttgcc

SEQ ID NO: 60600 - RNA, 19 nt, synthetic construct
  misc_feature 1..19: note = siRNA sense sequence
  source 1..19: mol_type = other RNA
acgtatcaatatttcacct

SEQ ID NO: 60601 - RNA, 19 nt, synthetic construct
  misc_feature 1..19: note = siRNA antisense sequence
  source 1..19: mol_type = other RNA
aggtgaaatattgatacgt

SEQ ID NO: 60602 - RNA, 19 nt, synthetic construct
  misc_feature 1..19: note = siRNA sense sequence
  source 1..19: mol_type = other RNA
atcaatatttcacctgctt

SEQ ID NO: 60603 - RNA, 19 nt, synthetic construct
  misc_feature 1..19: note = siRNA antisense sequence
  source 1..19: mol_type = other RNA
aagcaggtgaaatattgat

SEQ ID NO: 60604 - RNA, 19 nt, synthetic construct
  misc_feature 1..19: note = siRNA sense sequence
  source 1..19: mol_type = other RNA
tcaatatttcacctgcttg

SEQ ID NO: 60605 - RNA, 19 nt, synthetic construct
  misc_feature 1..19: note = siRNA antisense sequence
  source 1..19: mol_type = other RNA
caagcaggtgaaatattga

SEQ ID NO: 60606 - RNA, 19 nt, synthetic construct
  misc_feature 1..19: note = siRNA sense sequence
  source 1..19: mol_type = other RNA
caatatttcacctgcttgt

SEQ ID NO: 60607 - RNA, 19 nt, synthetic construct
  misc_feature 1..19: note = siRNA antisense sequence
  source 1..19: mol_type = other RNA
acaagcaggtgaaatattg

SEQ ID NO: 60608 - RNA, 19 nt, synthetic construct
  misc_feature 1..19: note = siRNA sense sequence
  source 1..19: mol_type = other RNA
aatatttcacctgcttgtc

SEQ ID NO: 60609 - RNA, 19 nt, synthetic construct
  misc_feature 1..19: note = siRNA antisense sequence
  source 1..19: mol_type = other RNA
gacaagcaggtgaaatatt

SEQ ID NO: 60610 - RNA, 19 nt, synthetic construct
  misc_feature 1..19: note = siRNA sense sequence
  source 1..19: mol_type = other RNA
tatttcacctgcttgtcca

SEQ ID NO: 60611 - RNA, 19 nt, synthetic construct
  misc_feature 1..19: note = siRNA antisense sequence
  source 1..19: mol_type = other RNA
tggacaagcaggtgaaata

SEQ ID NO: 60612 - RNA, 19 nt, synthetic construct
  misc_feature 1..19: note = siRNA sense sequence
  source 1..19: mol_type = other RNA
tcacctgcttgtccactct

SEQ ID NO: 60613 - RNA, 19 nt, synthetic construct
  misc_feature 1..19: note = siRNA antisense sequence
  source 1..19: mol_type = other RNA
agagtggacaagcaggtga

SEQ ID NO: 60614 - RNA, 19 nt, synthetic construct
  misc_feature 1..19: note = siRNA sense sequence
  source 1..19: mol_type = other RNA
ctgcttgtccactctgatt

SEQ ID NO: 60615 - RNA, 19 nt, synthetic construct
  misc_feature 1..19: note = siRNA antisense sequence
  source 1..19: mol_type = other RNA
aatcagagtggacaagcag

SEQ ID NO: 60616 - RNA, 19 nt, synthetic construct
  misc_feature 1..19: note = siRNA sense sequence
  source 1..19: mol_type = other RNA
ttgtccactctgattctgt

SEQ ID NO: 60617 - RNA, 19 nt, synthetic construct
  misc_feature 1..19: note = siRNA antisense sequence
  source 1..19: mol_type = other RNA
acagaatcagagtggacaa

SEQ ID NO: 60618 - RNA, 19 nt, synthetic construct
  misc_feature 1..19: note = siRNA sense sequence
  source 1..19: mol_type = other RNA
tgtccactctgattctgtt

SEQ ID NO: 60619 - RNA, 19 nt, synthetic construct
  misc_feature 1..19: note = siRNA antisense sequence
  source 1..19: mol_type = other RNA
aacagaatcagagtggaca

SEQ ID NO: 60620 - RNA, 19 nt, synthetic construct
  misc_feature 1..19: note = siRNA sense sequence
  source 1..19: mol_type = other RNA
gtccactctgattctgttt

SEQ ID NO: 60621 - RNA, 19 nt, synthetic construct
  misc_feature 1..19: note = siRNA antisense sequence
  source 1..19: mol_type = other RNA
aaacagaatcagagtggac

SEQ ID NO: 60622 - RNA, 19 nt, synthetic construct
  misc_feature 1..19: note = siRNA sense sequence
  source 1..19: mol_type = other RNA
ccactctgattctgtttgc

SEQ ID NO: 60623 - RNA, 19 nt, synthetic construct
  misc_feature 1..19: note = siRNA antisense sequence
  source 1..19: mol_type = other RNA
gcaaacagaatcagagtgg

SEQ ID NO: 60624 - RNA, 19 nt, synthetic construct
  misc_feature 1..19: note = siRNA sense sequence
  source 1..19: mol_type = other RNA
actctgattctgtttgctt

SEQ ID NO: 60625 - RNA, 19 nt, synthetic construct
  misc_feature 1..19: note = siRNA antisense sequence
  source 1..19: mol_type = other RNA
aagcaaacagaatcagagt

SEQ ID NO: 60626 - RNA, 19 nt, synthetic construct
  misc_feature 1..19: note = siRNA sense sequence
  source 1..19: mol_type = other RNA
ctctgattctgtttgcttt

SEQ ID NO: 60627 - RNA, 19 nt, synthetic construct
  misc_feature 1..19: note = siRNA antisense sequence
  source 1..19: mol_type = other RNA
aaagcaaacagaatcagag

SEQ ID NO: 60628 - RNA, 19 nt, synthetic construct
  misc_feature 1..19: note = siRNA sense sequence
  source 1..19: mol_type = other RNA
tctgattctgtttgctttc

SEQ ID NO: 60629 - RNA, 19 nt, synthetic construct
  misc_feature 1..19: note = siRNA antisense sequence
  source 1..19: mol_type = other RNA
gaaagcaaacagaatcaga

SEQ ID NO: 60630 - RNA, 19 nt, synthetic construct
  misc_feature 1..19: note = siRNA sense sequence
  source 1..19: mol_type = other RNA
ctgattctgtttgctttct

SEQ ID NO: 60631 - RNA, 19 nt, synthetic construct
  misc_feature 1..19: note = siRNA antisense sequence
  source 1..19: mol_type = other RNA
agaaagcaaacagaatcag

SEQ ID NO: 60632 - RNA, 19 nt, synthetic construct
  misc_feature 1..19: note = siRNA sense sequence
  source 1..19: mol_type = other RNA
ttgctttctcttcctaggc

SEQ ID NO: 60633 - RNA, 19 nt, synthetic construct
  misc_feature 1..19: note = siRNA antisense sequence
  source 1..19: mol_type = other RNA
gcctaggaagagaaagcaa

SEQ ID NO: 60634 - RNA, 19 nt, synthetic construct
  misc_feature 1..19: note = siRNA sense sequence
  source 1..19: mol_type = other RNA
tgctttctcttcctaggct

SEQ ID NO: 60635 - RNA, 19 nt, synthetic construct
  misc_feature 1..19: note = siRNA antisense sequence
  source 1..19: mol_type = other RNA
agcctaggaagagaaagca

SEQ ID NO: 60636 - RNA, 19 nt, synthetic construct
  misc_feature 1..19: note = siRNA sense sequence
  source 1..19: mol_type = other RNA
gctttctcttcctaggcta

SEQ ID NO: 60637 - RNA, 19 nt, synthetic construct
  misc_feature 1..19: note = siRNA antisense sequence
  source 1..19: mol_type = other RNA
tagcctaggaagagaaagc

SEQ ID NO: 60638 - RNA, 19 nt, synthetic construct
  misc_feature 1..19: note = siRNA sense sequence
  source 1..19: mol_type = other RNA
tttctcttcctaggctatc

SEQ ID NO: 60639 - RNA, 19 nt, synthetic construct
  misc_feature 1..19: note = siRNA antisense sequence
  source 1..19: mol_type = other RNA
gatagcctaggaagagaaa

SEQ ID NO: 60640 - RNA, 19 nt, synthetic construct
  misc_feature 1..19: note = siRNA sense sequence
  source 1..19: mol_type = other RNA
ttctcttcctaggctatcc

SEQ ID NO: 60641 - RNA, 19 nt, synthetic construct
  misc_feature 1..19: note = siRNA antisense sequence
  source 1..19: mol_type = other RNA
ggatagcctaggaagagaa

SEQ ID NO: 60642 - RNA, 19 nt, synthetic construct
  misc_feature 1..19: note = siRNA sense sequence
  source 1..19: mol_type = other RNA
aaaagacagttgtgaatct

SEQ ID NO: 60643 - RNA, 19 nt, synthetic construct
  misc_feature 1..19: note = siRNA antisense sequence
  source 1..19: mol_type = other RNA
agattcacaactgtctttt

SEQ ID NO: 60644 - RNA, 19 nt, synthetic construct
  misc_feature 1..19: note = siRNA sense sequence
  source 1..19: mol_type = other RNA
aaagacagttgtgaatcta

SEQ ID NO: 60645 - RNA, 19 nt, synthetic construct
  misc_feature 1..19: note = siRNA antisense sequence
  source 1..19: mol_type = other RNA
tagattcacaactgtcttt

SEQ ID NO: 60646 - RNA, 19 nt, synthetic construct
  misc_feature 1..19: note = siRNA sense sequence
  source 1..19: mol_type = other RNA
agacagttgtgaatctaat

SEQ ID NO: 60647 - RNA, 19 nt, synthetic construct
  misc_feature 1..19: note = siRNA antisense sequence
  source 1..19: mol_type = other RNA
attagattcacaactgtct

SEQ ID NO: 60648 - RNA, 19 nt, synthetic construct
  misc_feature 1..19: note = siRNA sense sequence
  source 1..19: mol_type = other RNA
gacagttgtgaatctaatc

SEQ ID NO: 60649 - RNA, 19 nt, synthetic construct
  misc_feature 1..19: note = siRNA antisense sequence
  source 1..19: mol_type = other RNA
gattagattcacaactgtc

SEQ ID NO: 60650 - RNA, 19 nt, synthetic construct
  misc_feature 1..19: note = siRNA sense sequence
  source 1..19: mol_type = other RNA
acagttgtgaatctaatca

SEQ ID NO: 60651 - RNA, 19 nt, synthetic construct
  misc_feature 1..19: note = siRNA antisense sequence
  source 1..19: mol_type = other RNA
tgattagattcacaactgt

SEQ ID NO: 60652 - RNA, 19 nt, synthetic construct
  misc_feature 1..19: note = siRNA sense sequence
  source 1..19: mol_type = other RNA
cagttgtgaatctaatcat

SEQ ID NO: 60653 - RNA, 19 nt, synthetic construct
  misc_feature 1..19: note = siRNA antisense sequence
  source 1..19: mol_type = other RNA
atgattagattcacaactg

SEQ ID NO: 60654 - RNA, 19 nt, synthetic construct
  misc_feature 1..19: note = siRNA sense sequence
  source 1..19: mol_type = other RNA
tatcacatgtaaagttgga

SEQ ID NO: 60655 - RNA, 19 nt, synthetic construct
  misc_feature 1..19: note = siRNA antisense sequence
  source 1..19: mol_type = other RNA
tccaactttacatgtgata

SEQ ID NO: 60656 - RNA, 19 nt, synthetic construct
  misc_feature 1..19: note = siRNA sense sequence
  source 1..19: mol_type = other RNA
atcacatgtaaagttggat

SEQ ID NO: 60657 - RNA, 19 nt, synthetic construct
  misc_feature 1..19: note = siRNA antisense sequence
  source 1..19: mol_type = other RNA
atccaactttacatgtgat

SEQ ID NO: 60658 - RNA, 19 nt, synthetic construct
  misc_feature 1..19: note = siRNA sense sequence
  source 1..19: mol_type = other RNA
cacatgtaaagttggatat

SEQ ID NO: 60659 - RNA, 19 nt, synthetic construct
  misc_feature 1..19: note = siRNA antisense sequence
  source 1..19: mol_type = other RNA
atatccaactttacatgtg

SEQ ID NO: 60660 - RNA, 19 nt, synthetic construct
  misc_feature 1..19: note = siRNA sense sequence
  source 1..19: mol_type = other RNA
aaagttggatatcccttcc

SEQ ID NO: 60661 - RNA, 19 nt, synthetic construct
  misc_feature 1..19: note = siRNA antisense sequence
  source 1..19: mol_type = other RNA
ggaagggatatccaacttt

SEQ ID NO: 60662 - RNA, 19 nt, synthetic construct
  misc_feature 1..19: note = siRNA sense sequence
  source 1..19: mol_type = other RNA
aagttggatatcccttcct

SEQ ID NO: 60663 - RNA, 19 nt, synthetic construct
  misc_feature 1..19: note = siRNA antisense sequence
  source 1..19: mol_type = other RNA
aggaagggatatccaactt

SEQ ID NO: 60664 - RNA, 19 nt, synthetic construct
  misc_feature 1..19: note = siRNA sense sequence
  source 1..19: mol_type = other RNA
agatggtgagcagatcata

SEQ ID NO: 60665 - RNA, 19 nt, synthetic construct
  misc_feature 1..19: note = siRNA antisense sequence
  source 1..19: mol_type = other RNA
tatgatctgctcaccatct

SEQ ID NO: 60666 - RNA, 19 nt, synthetic construct
  misc_feature 1..19: note = siRNA sense sequence
  source 1..19: mol_type = other RNA
gatggtgagcagatcatac

SEQ ID NO: 60667 - RNA, 19 nt, synthetic construct
  misc_feature 1..19: note = siRNA antisense sequence
  source 1..19: mol_type = other RNA
gtatgatctgctcaccatc

SEQ ID NO: 60668 - RNA, 19 nt, synthetic construct
  misc_feature 1..19: note = siRNA sense sequence
  source 1..19: mol_type = other RNA
aagtaatatgtgcaaagac

SEQ ID NO: 60669 - RNA, 19 nt, synthetic construct
  misc_feature 1..19: note = siRNA antisense sequence
  source 1..19: mol_type = other RNA
gtctttgcacatattactt

SEQ ID NO: 60670 - RNA, 19 nt, synthetic construct
  misc_feature 1..19: note = siRNA sense sequence
  source 1..19: mol_type = other RNA
atataaatccttccaatgg

SEQ ID NO: 60671 - RNA, 19 nt, synthetic construct
  misc_feature 1..19: note = siRNA antisense sequence
  source 1..19: mol_type = other RNA
ccattggaaggatttatat

SEQ ID NO: 60672 - RNA, 19 nt, synthetic construct
  misc_feature 1..19: note = siRNA sense sequence
  source 1..19: mol_type = other RNA
tataaatccttccaatggt

SEQ ID NO: 60673 - RNA, 19 nt, synthetic construct
  misc_feature 1..19: note = siRNA antisense sequence
  source 1..19: mol_type = other RNA
accattggaaggatttata

SEQ ID NO: 60674 - RNA, 19 nt, synthetic construct
  misc_feature 1..19: note = siRNA sense sequence
  source 1..19: mol_type = other RNA
ataaatccttccaatggta

SEQ ID NO: 60675 - RNA, 19 nt, synthetic construct
  misc_feature 1..19: note = siRNA antisense sequence
  source 1..19: mol_type = other RNA
taccattggaaggatttat

SEQ ID NO: 60676 - RNA, 19 nt, synthetic construct
  misc_feature 1..19: note = siRNA sense sequence
  source 1..19: mol_type = other RNA
taaatccttccaatggtag

SEQ ID NO: 60677 - RNA, 19 nt, synthetic construct
  misc_feature 1..19: note = siRNA antisense sequence
  source 1..19: mol_type = other RNA
ctaccattggaaggattta

SEQ ID NO: 60678 - RNA, 19 nt, synthetic construct
  misc_feature 1..19: note = siRNA sense sequence
  source 1..19: mol_type = other RNA
aaatccttccaatggtagt

SEQ ID NO: 60679 - RNA, 19 nt, synthetic construct
  misc_feature 1..19: note = siRNA antisense sequence
  source 1..19: mol_type = other RNA
actaccattggaaggattt

SEQ ID NO: 60680 - RNA, 19 nt, synthetic construct
  misc_feature 1..19: note = siRNA sense sequence
  source 1..19: mol_type = other RNA
aatccttccaatggtagtt

SEQ ID NO: 60681 - RNA, 19 nt, synthetic construct
  misc_feature 1..19: note = siRNA antisense sequence
  source 1..19: mol_type = other RNA
aactaccattggaaggatt

SEQ ID NO: 60682 - RNA, 19 nt, synthetic construct
  misc_feature 1..19: note = siRNA sense sequence
  source 1..19: mol_type = other RNA
atccttccaatggtagttt

SEQ ID NO: 60683 - RNA, 19 nt, synthetic construct
  misc_feature 1..19: note = siRNA antisense sequence
  source 1..19: mol_type = other RNA
aaactaccattggaaggat

SEQ ID NO: 60684 - RNA, 19 nt, synthetic construct
  misc_feature 1..19: note = siRNA sense sequence
  source 1..19: mol_type = other RNA
tccttccaatggtagttta

SEQ ID NO: 60685 - RNA, 19 nt, synthetic construct
  misc_feature 1..19: note = siRNA antisense sequence
  source 1..19: mol_type = other RNA
taaactaccattggaagga

SEQ ID NO: 60686 - RNA, 19 nt, synthetic construct
  misc_feature 1..19: note = siRNA sense sequence
  source 1..19: mol_type = other RNA
ccttccaatggtagtttag

SEQ ID NO: 60687 - RNA, 19 nt, synthetic construct
  misc_feature 1..19: note = siRNA antisense sequence
  source 1..19: mol_type = other RNA
ctaaactaccattggaagg

SEQ ID NO: 60688 - RNA, 19 nt, synthetic construct
  misc_feature 1..19: note = siRNA sense sequence
  source 1..19: mol_type = other RNA
cttccaatggtagtttagg

SEQ ID NO: 60689 - RNA, 19 nt, synthetic construct
  misc_feature 1..19: note = siRNA antisense sequence
  source 1..19: mol_type = other RNA
cctaaactaccattggaag

SEQ ID NO: 60690 - RNA, 19 nt, synthetic construct
  misc_feature 1..19: note = siRNA sense sequence
  source 1..19: mol_type = other RNA
ttccaatggtagtttagga

SEQ ID NO: 60691 - RNA, 19 nt, synthetic construct
  misc_feature 1..19: note = siRNA antisense sequence
  source 1..19: mol_type = other RNA
tcctaaactaccattggaa

SEQ ID NO: 60692 - RNA, 19 nt, synthetic construct
  misc_feature 1..19: note = siRNA sense sequence
  source 1..19: mol_type = other RNA
tccaatggtagtttaggat

SEQ ID NO: 60693 - RNA, 19 nt, synthetic construct
  misc_feature 1..19: note = siRNA antisense sequence
  source 1..19: mol_type = other RNA
atcctaaactaccattgga

SEQ ID NO: 60694 - RNA, 19 nt, synthetic construct
  misc_feature 1..19: note = siRNA sense sequence
  source 1..19: mol_type = other RNA
ccaatggtagtttaggata

SEQ ID NO: 60695 - RNA, 19 nt, synthetic construct
  misc_feature 1..19: note = siRNA antisense sequence
  source 1..19: mol_type = other RNA
tatcctaaactaccattgg

SEQ ID NO: 60696 - RNA, 19 nt, synthetic construct
  misc_feature 1..19: note = siRNA sense sequence
  source 1..19: mol_type = other RNA
caatggtagtttaggataa

SEQ ID NO: 60697 - RNA, 19 nt, synthetic construct
  misc_feature 1..19: note = siRNA antisense sequence
  source 1..19: mol_type = other RNA
ttatcctaaactaccattg

SEQ ID NO: 60698 - RNA, 19 nt, synthetic construct
  misc_feature 1..19: note = siRNA sense sequence
  source 1..19: mol_type = other RNA
tgttcagttcaaaattgtg

SEQ ID NO: 60699 - RNA, 19 nt, synthetic construct
  misc_feature 1..19: note = siRNA antisense sequence
  source 1..19: mol_type = other RNA
cacaattttgaactgaaca

SEQ ID NO: 60700 - RNA, 19 nt, synthetic construct
  misc_feature 1..19: note = siRNA sense sequence
  source 1..19: mol_type = other RNA
agttcaaaattgtgacaga

SEQ ID NO: 60701 - RNA, 19 nt, synthetic construct
  misc_feature 1..19: note = siRNA antisense sequence
  source 1..19: mol_type = other RNA
tctgtcacaattttgaact

SEQ ID NO: 60702 - RNA, 19 nt, synthetic construct
  misc_feature 1..19: note = siRNA sense sequence
  source 1..19: mol_type = other RNA
tcaaaattgtgacagattg

SEQ ID NO: 60703 - RNA, 19 nt, synthetic construct
  misc_feature 1..19: note = siRNA antisense sequence
  source 1..19: mol_type = other RNA
caatctgtcacaattttga

SEQ ID NO: 60704 - RNA, 19 nt, synthetic construct
  misc_feature 1..19: note = siRNA sense sequence
  source 1..19: mol_type = other RNA
aaattgtgacagattggaa

SEQ ID NO: 60705 - RNA, 19 nt, synthetic construct
  misc_feature 1..19: note = siRNA antisense sequence
  source 1..19: mol_type = other RNA
ttccaatctgtcacaattt

SEQ ID NO: 60706 - RNA, 19 nt, synthetic construct
  misc_feature 1..19: note = siRNA sense sequence
  source 1..19: mol_type = other RNA
aattgtgacagattggaat

SEQ ID NO: 60707 - RNA, 19 nt, synthetic construct
  misc_feature 1..19: note = siRNA antisense sequence
  source 1..19: mol_type = other RNA
attccaatctgtcacaatt

SEQ ID NO: 60708 - RNA, 19 nt, synthetic construct
  misc_feature 1..19: note = siRNA sense sequence
  source 1..19: mol_type = other RNA
attgtgacagattggaata

SEQ ID NO: 60709 - RNA, 19 nt, synthetic construct
  misc_feature 1..19: note = siRNA antisense sequence
  source 1..19: mol_type = other RNA
tattccaatctgtcacaat

SEQ ID NO: 60710 - RNA, 19 nt, synthetic construct
  misc_feature 1..19: note = siRNA sense sequence
  source 1..19: mol_type = other RNA
ttgtgacagattggaatat

SEQ ID NO: 60711 - RNA, 19 nt, synthetic construct
  misc_feature 1..19: note = siRNA antisense sequence
  source 1..19: mol_type = other RNA
atattccaatctgtcacaa

SEQ ID NO: 60712 - RNA, 19 nt, synthetic construct
  misc_feature 1..19: note = siRNA sense sequence
  source 1..19: mol_type = other RNA
tgtgacagattggaatatg

SEQ ID NO: 60713 - RNA, 19 nt, synthetic construct
  misc_feature 1..19: note = siRNA antisense sequence
  source 1..19: mol_type = other RNA
catattccaatctgtcaca

SEQ ID NO: 60714 - RNA, 19 nt, synthetic construct
  misc_feature 1..19: note = siRNA sense sequence
  source 1..19: mol_type = other RNA
gtgacagattggaatatgc

SEQ ID NO: 60715 - RNA, 19 nt, synthetic construct
  misc_feature 1..19: note = siRNA antisense sequence
  source 1..19: mol_type = other RNA
gcatattccaatctgtcac

SEQ ID NO: 60716 - RNA, 19 nt, synthetic construct
  misc_feature 1..19: note = siRNA sense sequence
  source 1..19: mol_type = other RNA
tgacagattggaatatgct

SEQ ID NO: 60717 - RNA, 19 nt, synthetic construct
  misc_feature 1..19: note = siRNA antisense sequence
  source 1..19: mol_type = other RNA
agcatattccaatctgtca

SEQ ID NO: 60718 - RNA, 19 nt, synthetic construct
  misc_feature 1..19: note = siRNA sense sequence
  source 1..19: mol_type = other RNA
gacagattggaatatgcta

SEQ ID NO: 60719 - RNA, 19 nt, synthetic construct
  misc_feature 1..19: note = siRNA antisense sequence
  source 1..19: mol_type = other RNA
tagcatattccaatctgtc

SEQ ID NO: 60720 - RNA, 19 nt, synthetic construct
  misc_feature 1..19: note = siRNA sense sequence
  source 1..19: mol_type = other RNA
acagattggaatatgctat

SEQ ID NO: 60721 - RNA, 19 nt, synthetic construct
  misc_feature 1..19: note = siRNA antisense sequence
  source 1..19: mol_type = other RNA
atagcatattccaatctgt

SEQ ID NO: 60722 - RNA, 19 nt, synthetic construct
  misc_feature 1..19: note = siRNA sense sequence
  source 1..19: mol_type = other RNA
tagtaaaagatgaggcctt

SEQ ID NO: 60723 - RNA, 19 nt, synthetic construct
  misc_feature 1..19: note = siRNA antisense sequence
  source 1..19: mol_type = other RNA
aaggcctcatcttttacta

SEQ ID NO: 60724 - RNA, 19 nt, synthetic construct
  misc_feature 1..19: note = siRNA sense sequence
  source 1..19: mol_type = other RNA
cccatgagggattagtgtc

SEQ ID NO: 60725 - RNA, 19 nt, synthetic construct
  misc_feature 1..19: note = siRNA antisense sequence
  source 1..19: mol_type = other RNA
gacactaatccctcatggg

SEQ ID NO: 60726 - RNA, 19 nt, synthetic construct
  misc_feature 1..19: note = siRNA sense sequence
  source 1..19: mol_type = other RNA
ggacttcccaaccctcaga

SEQ ID NO: 60727 - RNA, 19 nt, synthetic construct
  misc_feature 1..19: note = siRNA antisense sequence
  source 1..19: mol_type = other RNA
tctgagggttgggaagtcc

SEQ ID NO: 60728 - RNA, 19 nt, synthetic construct
  misc_feature 1..19: note = siRNA sense sequence
  source 1..19: mol_type = other RNA
aaaatgcttggtataaggt

SEQ ID NO: 60729 - RNA, 19 nt, synthetic construct
  misc_feature 1..19: note = siRNA antisense sequence
  source 1..19: mol_type = other RNA
accttataccaagcatttt

SEQ ID NO: 60730 - RNA, 19 nt, synthetic construct
  misc_feature 1..19: note = siRNA sense sequence
  source 1..19: mol_type = other RNA
aaatgcttggtataaggta

SEQ ID NO: 60731 - RNA, 19 nt, synthetic construct
  misc_feature 1..19: note = siRNA antisense sequence
  source 1..19: mol_type = other RNA
taccttataccaagcattt

SEQ ID NO: 60732 - RNA, 19 nt, synthetic construct
  misc_feature 1..19: note = siRNA sense sequence
  source 1..19: mol_type = other RNA
gcttggtataaggtatttt

SEQ ID NO: 60733 - RNA, 19 nt, synthetic construct
  misc_feature 1..19: note = siRNA antisense sequence
  source 1..19: mol_type = other RNA
aaaataccttataccaagc

SEQ ID NO: 60734 - RNA, 19 nt, synthetic construct
  misc_feature 1..19: note = siRNA sense sequence
  source 1..19: mol_type = other RNA
ggtataaggtattttgtac

SEQ ID NO: 60735 - RNA, 19 nt, synthetic construct
  misc_feature 1..19: note = siRNA antisense sequence
  source 1..19: mol_type = other RNA
gtacaaaataccttatacc

SEQ ID NO: 60736 - RNA, 19 nt, synthetic construct
  misc_feature 1..19: note = siRNA sense sequence
  source 1..19: mol_type = other RNA
atctgataaaatggagctg

SEQ ID NO: 60737 - RNA, 19 nt, synthetic construct
  misc_feature 1..19: note = siRNA antisense sequence
  source 1..19: mol_type = other RNA
cagctccattttatcagat

SEQ ID NO: 60738 - RNA, 19 nt, synthetic construct
  misc_feature 1..19: note = siRNA sense sequence
  source 1..19: mol_type = other RNA
tctgataaaatggagctgg

SEQ ID NO: 60739 - RNA, 19 nt, synthetic construct
  misc_feature 1..19: note = siRNA antisense sequence
  source 1..19: mol_type = other RNA
ccagctccattttatcaga

SEQ ID NO: 60740 - RNA, 19 nt, synthetic construct
  misc_feature 1..19: note = siRNA sense sequence
  source 1..19: mol_type = other RNA
ctgataaaatggagctggg

SEQ ID NO: 60741 - RNA, 19 nt, synthetic construct
  misc_feature 1..19: note = siRNA antisense sequence
  source 1..19: mol_type = other RNA
cccagctccattttatcag

SEQ ID NO: 60742 - RNA, 19 nt, synthetic construct
  misc_feature 1..19: note = siRNA sense sequence
  source 1..19: mol_type = other RNA
tgataaaatggagctggga

SEQ ID NO: 60743 - RNA, 19 nt, synthetic construct
  misc_feature 1..19: note = siRNA antisense sequence
  source 1..19: mol_type = other RNA
tcccagctccattttatca

SEQ ID NO: 60744 - RNA, 19 nt, synthetic construct
  misc_feature 1..19: note = siRNA sense sequence
  source 1..19: mol_type = other RNA
attctgttattggagtctc

SEQ ID NO: 60745 - RNA, 19 nt, synthetic construct
  misc_feature 1..19: note = siRNA antisense sequence
  source 1..19: mol_type = other RNA
gagactccaataacagaat

SEQ ID NO: 60746 - RNA, 19 nt, synthetic construct
  misc_feature 1..19: note = siRNA sense sequence
  source 1..19: mol_type = other RNA
tgttattggagtctcctag

SEQ ID NO: 60747 - RNA, 19 nt, synthetic construct
  misc_feature 1..19: note = siRNA antisense sequence
  source 1..19: mol_type = other RNA
ctaggagactccaataaca

SEQ ID NO: 60748 - RNA, 19 nt, synthetic construct
  misc_feature 1..19: note = siRNA sense sequence
  source 1..19: mol_type = other RNA
gttattggagtctcctagg

SEQ ID NO: 60749 - RNA, 19 nt, synthetic construct
  misc_feature 1..19: note = siRNA antisense sequence
  source 1..19: mol_type = other RNA
cctaggagactccaataac

SEQ ID NO: 60750 - RNA, 19 nt, synthetic construct
  misc_feature 1..19: note = siRNA sense sequence
  source 1..19: mol_type = other RNA
ttattggagtctcctaggt

SEQ ID NO: 60751 - RNA, 19 nt, synthetic construct
  misc_feature 1..19: note = siRNA antisense sequence
  source 1..19: mol_type = other RNA
acctaggagactccaataa

SEQ ID NO: 60752 - RNA, 19 nt, synthetic construct
  misc_feature 1..19: note = siRNA sense sequence
  source 1..19: mol_type = other RNA
tattggagtctcctaggta

SEQ ID NO: 60753 - RNA, 19 nt, synthetic construct
  misc_feature 1..19: note = siRNA antisense sequence
  source 1..19: mol_type = other RNA
tacctaggagactccaata

SEQ ID NO: 60754 - RNA, 19 nt, synthetic construct
  misc_feature 1..19: note = siRNA sense sequence
  source 1..19: mol_type = other RNA
attggagtctcctaggtag

SEQ ID NO: 60755 - RNA, 19 nt, synthetic construct
  misc_feature 1..19: note = siRNA antisense sequence
  source 1..19: mol_type = other RNA
ctacctaggagactccaat

SEQ ID NO: 60756 - RNA, 19 nt, synthetic construct
  misc_feature 1..19: note = siRNA sense sequence
  source 1..19: mol_type = other RNA
ttggagtctcctaggtagt

SEQ ID NO: 60757 - RNA, 19 nt, synthetic construct
  misc_feature 1..19: note = siRNA antisense sequence
  source 1..19: mol_type = other RNA
actacctaggagactccaa

SEQ ID NO: 60758 - RNA, 19 nt, synthetic construct
  misc_feature 1..19: note = siRNA sense sequence
  source 1..19: mol_type = other RNA
tggagtctcctaggtagta

SEQ ID NO: 60759 - RNA, 19 nt, synthetic construct
  misc_feature 1..19: note = siRNA antisense sequence
  source 1..19: mol_type = other RNA
tactacctaggagactcca

SEQ ID NO: 60760 - RNA, 19 nt, synthetic construct
  misc_feature 1..19: note = siRNA sense sequence
  source 1..19: mol_type = other RNA
ggagtctcctaggtagtag

SEQ ID NO: 60761 - RNA, 19 nt, synthetic construct
  misc_feature 1..19: note = siRNA antisense sequence
  source 1..19: mol_type = other RNA
ctactacctaggagactcc

SEQ ID NO: 60762 - RNA, 19 nt, synthetic construct
  misc_feature 1..19: note = siRNA sense sequence
  source 1..19: mol_type = other RNA
ctaggtagtaggtgtctct

SEQ ID NO: 60763 - RNA, 19 nt, synthetic construct
  misc_feature 1..19: note = siRNA antisense sequence
  source 1..19: mol_type = other RNA
agagacacctactacctag

SEQ ID NO: 60764 - RNA, 19 nt, synthetic construct
  misc_feature 1..19: note = siRNA sense sequence
  source 1..19: mol_type = other RNA
taggtagtaggtgtctctg

SEQ ID NO: 60765 - RNA, 19 nt, synthetic construct
  misc_feature 1..19: note = siRNA antisense sequence
  source 1..19: mol_type = other RNA
cagagacacctactaccta

SEQ ID NO: 60766 - RNA, 19 nt, synthetic construct
  misc_feature 1..19: note = siRNA sense sequence
  source 1..19: mol_type = other RNA
aggtagtaggtgtctctgg

SEQ ID NO: 60767 - RNA, 19 nt, synthetic construct
  misc_feature 1..19: note = siRNA antisense sequence
  source 1..19: mol_type = other RNA
ccagagacacctactacct

SEQ ID NO: 60768 - RNA, 19 nt, synthetic construct
  misc_feature 1..19: note = siRNA sense sequence
  source 1..19: mol_type = other RNA
ggtagtaggtgtctctggc

SEQ ID NO: 60769 - RNA, 19 nt, synthetic construct
  misc_feature 1..19: note = siRNA antisense sequence
  source 1..19: mol_type = other RNA
gccagagacacctactacc

SEQ ID NO: 60770 - RNA, 19 nt, synthetic construct
  misc_feature 1..19: note = siRNA sense sequence
  source 1..19: mol_type = other RNA
gtagtaggtgtctctggcc

SEQ ID NO: 60771 - RNA, 19 nt, synthetic construct
  misc_feature 1..19: note = siRNA antisense sequence
  source 1..19: mol_type = other RNA
ggccagagacacctactac

SEQ ID NO: 60772 - RNA, 19 nt, synthetic construct
  misc_feature 1..19: note = siRNA sense sequence
  source 1..19: mol_type = other RNA
tagtaggtgtctctggcct

SEQ ID NO: 60773 - RNA, 19 nt, synthetic construct
  misc_feature 1..19: note = siRNA antisense sequence
  source 1..19: mol_type = other RNA
aggccagagacacctacta

SEQ ID NO: 60774 - RNA, 19 nt, synthetic construct
  misc_feature 1..19: note = siRNA sense sequence
  source 1..19: mol_type = other RNA
agtaggtgtctctggcctt

SEQ ID NO: 60775 - RNA, 19 nt, synthetic construct
  misc_feature 1..19: note = siRNA antisense sequence
  source 1..19: mol_type = other RNA
aaggccagagacacctact

SEQ ID NO: 60776 - RNA, 19 nt, synthetic construct
  misc_feature 1..19: note = siRNA sense sequence
  source 1..19: mol_type = other RNA
gtaggtgtctctggccttc

SEQ ID NO: 60777 - RNA, 19 nt, synthetic construct
  misc_feature 1..19: note = siRNA antisense sequence
  source 1..19: mol_type = other RNA
gaaggccagagacacctac

SEQ ID NO: 60778 - RNA, 19 nt, synthetic construct
  misc_feature 1..19: note = siRNA sense sequence
  source 1..19: mol_type = other RNA
taggtgtctctggccttca

SEQ ID NO: 60779 - RNA, 19 nt, synthetic construct
  misc_feature 1..19: note = siRNA antisense sequence
  source 1..19: mol_type = other RNA
tgaaggccagagacaccta

SEQ ID NO: 60780 - RNA, 19 nt, synthetic construct
  misc_feature 1..19: note = siRNA sense sequence
  source 1..19: mol_type = other RNA
aggtgtctctggccttcaa

SEQ ID NO: 60781 - RNA, 19 nt, synthetic construct
  misc_feature 1..19: note = siRNA antisense sequence
  source 1..19: mol_type = other RNA
ttgaaggccagagacacct

SEQ ID NO: 60782 - RNA, 19 nt, synthetic construct
  misc_feature 1..19: note = siRNA sense sequence
  source 1..19: mol_type = other RNA
ggtgtctctggccttcaag

SEQ ID NO: 60783 - RNA, 19 nt, synthetic construct
  misc_feature 1..19: note = siRNA antisense sequence
  source 1..19: mol_type = other RNA
cttgaaggccagagacacc

SEQ ID NO: 60784 - RNA, 19 nt, synthetic construct
  misc_feature 1..19: note = siRNA sense sequence
  source 1..19: mol_type = other RNA
tgtctctggccttcaagaa

SEQ ID NO: 60785 - RNA, 19 nt, synthetic construct
  misc_feature 1..19: note = siRNA antisense sequence
  source 1..19: mol_type = other RNA
ttcttgaaggccagagaca

SEQ ID NO: 60786 - RNA, 19 nt, synthetic construct
  misc_feature 1..19: note = siRNA sense sequence
  source 1..19: mol_type = other RNA
gaatgcttcaaatagattg

SEQ ID NO: 60787 - RNA, 19 nt, synthetic construct
  misc_feature 1..19: note = siRNA antisense sequence
  source 1..19: mol_type = other RNA
caatctatttgaagcattc

SEQ ID NO: 60788 - RNA, 19 nt, synthetic construct
  misc_feature 1..19: note = siRNA sense sequence
  source 1..19: mol_type = other RNA
aatgcttcaaatagattgg

SEQ ID NO: 60789 - RNA, 19 nt, synthetic construct
  misc_feature 1..19: note = siRNA antisense sequence
  source 1..19: mol_type = other RNA
ccaatctatttgaagcatt

SEQ ID NO: 60790 - RNA, 19 nt, synthetic construct
  misc_feature 1..19: note = siRNA sense sequence
  source 1..19: mol_type = other RNA
atgcttcaaatagattggt

SEQ ID NO: 60791 - RNA, 19 nt, synthetic construct
  misc_feature 1..19: note = siRNA antisense sequence
  source 1..19: mol_type = other RNA
accaatctatttgaagcat

SEQ ID NO: 60792 - RNA, 19 nt, synthetic construct
  misc_feature 1..19: note = siRNA sense sequence
  source 1..19: mol_type = other RNA
tgcttcaaatagattggtt

SEQ ID NO: 60793 - RNA, 19 nt, synthetic construct
  misc_feature 1..19: note = siRNA antisense sequence
  source 1..19: mol_type = other RNA
aaccaatctatttgaagca

SEQ ID NO: 60794 - RNA, 19 nt, synthetic construct
  misc_feature 1..19: note = siRNA sense sequence
  source 1..19: mol_type = other RNA
gcttcaaatagattggttt

SEQ ID NO: 60795 - RNA, 19 nt, synthetic construct
  misc_feature 1..19: note = siRNA antisense sequence
  source 1..19: mol_type = other RNA
aaaccaatctatttgaagc

SEQ ID NO: 60796 - RNA, 19 nt, synthetic construct
  misc_feature 1..19: note = siRNA sense sequence
  source 1..19: mol_type = other RNA
tccatctctctctttctaa

SEQ ID NO: 60797 - RNA, 19 nt, synthetic construct
  misc_feature 1..19: note = siRNA antisense sequence
  source 1..19: mol_type = other RNA
ttagaaagagagagatgga

SEQ ID NO: 60798 - RNA, 19 nt, synthetic construct
  misc_feature 1..19: note = siRNA sense sequence
  source 1..19: mol_type = other RNA
ccatctctctctttctaaa

SEQ ID NO: 60799 - RNA, 19 nt, synthetic construct
  misc_feature 1..19: note = siRNA antisense sequence
  source 1..19: mol_type = other RNA
tttagaaagagagagatgg

SEQ ID NO: 60800 - RNA, 19 nt, synthetic construct
  misc_feature 1..19: note = siRNA sense sequence
  source 1..19: mol_type = other RNA
catctctctctttctaaaa

SEQ ID NO: 60801 - RNA, 19 nt, synthetic construct
  misc_feature 1..19: note = siRNA antisense sequence
  source 1..19: mol_type = other RNA
ttttagaaagagagagatg

SEQ ID NO: 60802 - RNA, 19 nt, synthetic construct
  misc_feature 1..19: note = siRNA sense sequence
  source 1..19: mol_type = other RNA
tataattcacgtagcatgg

SEQ ID NO: 60803 - RNA, 19 nt, synthetic construct
  misc_feature 1..19: note = siRNA antisense sequence
  source 1..19: mol_type = other RNA
ccatgctacgtgaattata

SEQ ID NO: 60804 - RNA, 19 nt, synthetic construct
  misc_feature 1..19: note = siRNA sense sequence
  source 1..19: mol_type = other RNA
ataattcacgtagcatgga

SEQ ID NO: 60805 - RNA, 19 nt, synthetic construct
  misc_feature 1..19: note = siRNA antisense sequence
  source 1..19: mol_type = other RNA
tccatgctacgtgaattat

SEQ ID NO: 60806 - RNA, 19 nt, synthetic construct
  misc_feature 1..19: note = siRNA sense sequence
  source 1..19: mol_type = other RNA
aaattgtacagtcattacg

SEQ ID NO: 60807 - RNA, 19 nt, synthetic construct
  misc_feature 1..19: note = siRNA antisense sequence
  source 1..19: mol_type = other RNA
cgtaatgactgtacaattt

SEQ ID NO: 60808 - RNA, 19 nt, synthetic construct
  misc_feature 1..19: note = siRNA sense sequence
  source 1..19: mol_type = other RNA
aattgtacagtcattacga

SEQ ID NO: 60809 - RNA, 19 nt, synthetic construct
  misc_feature 1..19: note = siRNA antisense sequence
  source 1..19: mol_type = other RNA
tcgtaatgactgtacaatt

SEQ ID NO: 60810 - RNA, 19 nt, synthetic construct
  misc_feature 1..19: note = siRNA sense sequence
  source 1..19: mol_type = other RNA
attgtacagtcattacgac

SEQ ID NO: 60811 - RNA, 19 nt, synthetic construct
  misc_feature 1..19: note = siRNA antisense sequence
  source 1..19: mol_type = other RNA
gtcgtaatgactgtacaat

SEQ ID NO: 60812 - RNA, 19 nt, synthetic construct
  misc_feature 1..19: note = siRNA sense sequence
  source 1..19: mol_type = other RNA
ttgtacagtcattacgaca

SEQ ID NO: 60813 - RNA, 19 nt, synthetic construct
  misc_feature 1..19: note = siRNA antisense sequence
  source 1..19: mol_type = other RNA
tgtcgtaatgactgtacaa

SEQ ID NO: 60814 - RNA, 19 nt, synthetic construct
  misc_feature 1..19: note = siRNA sense sequence
  source 1..19: mol_type = other RNA
atgcattggcagtcactct

SEQ ID NO: 60815 - RNA, 19 nt, synthetic construct
  misc_feature 1..19: note = siRNA antisense sequence
  source 1..19: mol_type = other RNA
agagtgactgccaatgcat

SEQ ID NO: 60816 - RNA, 19 nt, synthetic construct
  misc_feature 1..19: note = siRNA sense sequence
  source 1..19: mol_type = other RNA
attggcagtcactctgttt

SEQ ID NO: 60817 - RNA, 19 nt, synthetic construct
  misc_feature 1..19: note = siRNA antisense sequence
  source 1..19: mol_type = other RNA
aaacagagtgactgccaat

SEQ ID NO: 60818 - RNA, 19 nt, synthetic construct
  misc_feature 1..19: note = siRNA sense sequence
  source 1..19: mol_type = other RNA
ttggcagtcactctgtttt

SEQ ID NO: 60819 - RNA, 19 nt, synthetic construct
  misc_feature 1..19: note = siRNA antisense sequence
  source 1..19: mol_type = other RNA
aaaacagagtgactgccaa

SEQ ID NO: 60820 - RNA, 19 nt, synthetic construct
  misc_feature 1..19: note = siRNA sense sequence
  source 1..19: mol_type = other RNA
acagcctttctcccaagcc

SEQ ID NO: 60821 - RNA, 19 nt, synthetic construct
  misc_feature 1..19: note = siRNA antisense sequence
  source 1..19: mol_type = other RNA
ggcttgggagaaaggctgt

SEQ ID NO: 60822 - RNA, 19 nt, synthetic construct
  misc_feature 1..19: note = siRNA sense sequence
  source 1..19: mol_type = other RNA
ctttctcccaagcccaggc

SEQ ID NO: 60823 - RNA, 19 nt, synthetic construct
  misc_feature 1..19: note = siRNA antisense sequence
  source 1..19: mol_type = other RNA
gcctgggcttgggagaaag

SEQ ID NO: 60824 - RNA, 19 nt, synthetic construct
  misc_feature 1..19: note = siRNA sense sequence
  source 1..19: mol_type = other RNA
tcccaagcccaggcaacca

SEQ ID NO: 60825 - RNA, 19 nt, synthetic construct
  misc_feature 1..19: note = siRNA antisense sequence
  source 1..19: mol_type = other RNA
tggttgcctgggcttggga

SEQ ID NO: 60826 - RNA, 19 nt, synthetic construct
  misc_feature 1..19: note = siRNA sense sequence
  source 1..19: mol_type = other RNA
ataaaatgaatggtggatg

SEQ ID NO: 60827 - RNA, 19 nt, synthetic construct
  misc_feature 1..19: note = siRNA antisense sequence
  source 1..19: mol_type = other RNA
catccaccattcattttat

SEQ ID NO: 60828 - RNA, 19 nt, synthetic construct
  misc_feature 1..19: note = siRNA sense sequence
  source 1..19: mol_type = other RNA
taaaatgaatggtggatga

SEQ ID NO: 60829 - RNA, 19 nt, synthetic construct
  misc_feature 1..19: note = siRNA antisense sequence
  source 1..19: mol_type = other RNA
tcatccaccattcatttta

SEQ ID NO: 60830 - RNA, 19 nt, synthetic construct
  misc_feature 1..19: note = siRNA sense sequence
  source 1..19: mol_type = other RNA
tgaatggtggatgagctga

SEQ ID NO: 60831 - RNA, 19 nt, synthetic construct
  misc_feature 1..19: note = siRNA antisense sequence
  source 1..19: mol_type = other RNA
tcagctcatccaccattca

SEQ ID NO: 60832 - RNA, 19 nt, synthetic construct
  misc_feature 1..19: note = siRNA sense sequence
  source 1..19: mol_type = other RNA
gaatggtggatgagctgag

SEQ ID NO: 60833 - RNA, 19 nt, synthetic construct
  misc_feature 1..19: note = siRNA antisense sequence
  source 1..19: mol_type = other RNA
ctcagctcatccaccattc

SEQ ID NO: 60834 - RNA, 19 nt, synthetic construct
  misc_feature 1..19: note = siRNA sense sequence
  source 1..19: mol_type = other RNA
aatggtggatgagctgagg

SEQ ID NO: 60835 - RNA, 19 nt, synthetic construct
  misc_feature 1..19: note = siRNA antisense sequence
  source 1..19: mol_type = other RNA
cctcagctcatccaccatt

SEQ ID NO: 60836 - RNA, 19 nt, synthetic construct
  misc_feature 1..19: note = siRNA sense sequence
  source 1..19: mol_type = other RNA
atggtggatgagctgagga

SEQ ID NO: 60837 - RNA, 19 nt, synthetic construct
  misc_feature 1..19: note = siRNA antisense sequence
  source 1..19: mol_type = other RNA
tcctcagctcatccaccat

SEQ ID NO: 60838 - RNA, 19 nt, synthetic construct
  misc_feature 1..19: note = siRNA sense sequence
  source 1..19: mol_type = other RNA
tggtggatgagctgaggag

SEQ ID NO: 60839 - RNA, 19 nt, synthetic construct
  misc_feature 1..19: note = siRNA antisense sequence
  source 1..19: mol_type = other RNA
ctcctcagctcatccacca

SEQ ID NO: 60840 - RNA, 19 nt, synthetic construct
  misc_feature 1..19: note = siRNA sense sequence
  source 1..19: mol_type = other RNA
gggattttcttatcatgct

SEQ ID NO: 60841 - RNA, 19 nt, synthetic construct
  misc_feature 1..19: note = siRNA antisense sequence
  source 1..19: mol_type = other RNA
agcatgataagaaaatccc

SEQ ID NO: 60842 - RNA, 19 nt, synthetic construct
  misc_feature 1..19: note = siRNA sense sequence
  source 1..19: mol_type = other RNA
tttcttatcatgctgtttg

SEQ ID NO: 60843 - RNA, 19 nt, synthetic construct
  misc_feature 1..19: note = siRNA antisense sequence
  source 1..19: mol_type = other RNA
caaacagcatgataagaaa

SEQ ID NO: 60844 - RNA, 19 nt, synthetic construct
  misc_feature 1..19: note = siRNA sense sequence
  source 1..19: mol_type = other RNA
tcttatcatgctgtttgaa

SEQ ID NO: 60845 - RNA, 19 nt, synthetic construct
  misc_feature 1..19: note = siRNA antisense sequence
  source 1..19: mol_type = other RNA
ttcaaacagcatgataaga

SEQ ID NO: 60846 - RNA, 19 nt, synthetic construct
  misc_feature 1..19: note = siRNA sense sequence
  source 1..19: mol_type = other RNA
gattatctctcacttttct

SEQ ID NO: 60847 - RNA, 19 nt, synthetic construct
  misc_feature 1..19: note = siRNA antisense sequence
  source 1..19: mol_type = other RNA
agaaaagtgagagataatc

SEQ ID NO: 60848 - RNA, 19 nt, synthetic construct
  misc_feature 1..19: note = siRNA sense sequence
  source 1..19: mol_type = other RNA
ttagtctgttgggcctaga

SEQ ID NO: 60849 - RNA, 19 nt, synthetic construct
  misc_feature 1..19: note = siRNA antisense sequence
  source 1..19: mol_type = other RNA
tctaggcccaacagactaa

SEQ ID NO: 60850 - RNA, 19 nt, synthetic construct
  misc_feature 1..19: note = siRNA sense sequence
  source 1..19: mol_type = other RNA
tagtctgttgggcctagag

SEQ ID NO: 60851 - RNA, 19 nt, synthetic construct
  misc_feature 1..19: note = siRNA antisense sequence
  source 1..19: mol_type = other RNA
ctctaggcccaacagacta

SEQ ID NO: 60852 - RNA, 19 nt, synthetic construct
  misc_feature 1..19: note = siRNA sense sequence
  source 1..19: mol_type = other RNA
agtctgttgggcctagagc

SEQ ID NO: 60853 - RNA, 19 nt, synthetic construct
  misc_feature 1..19: note = siRNA antisense sequence
  source 1..19: mol_type = other RNA
gctctaggcccaacagact

SEQ ID NO: 60854 - RNA, 19 nt, synthetic construct
  misc_feature 1..19: note = siRNA sense sequence
  source 1..19: mol_type = other RNA
gtctgttgggcctagagca

SEQ ID NO: 60855 - RNA, 19 nt, synthetic construct
  misc_feature 1..19: note = siRNA antisense sequence
  source 1..19: mol_type = other RNA
tgctctaggcccaacagac

SEQ ID NO: 60856 - RNA, 19 nt, synthetic construct
  misc_feature 1..19: note = siRNA sense sequence
  source 1..19: mol_type = other RNA
tctgttgggcctagagcaa

SEQ ID NO: 60857 - RNA, 19 nt, synthetic construct
  misc_feature 1..19: note = siRNA antisense sequence
  source 1..19: mol_type = other RNA
ttgctctaggcccaacaga

SEQ ID NO: 60858 - RNA, 19 nt, synthetic construct
  misc_feature 1..19: note = siRNA sense sequence
  source 1..19: mol_type = other RNA
ctgttgggcctagagcaag

SEQ ID NO: 60859 - RNA, 19 nt, synthetic construct
  misc_feature 1..19: note = siRNA antisense sequence
  source 1..19: mol_type = other RNA
cttgctctaggcccaacag

SEQ ID NO: 60860 - RNA, 19 nt, synthetic construct
  misc_feature 1..19: note = siRNA sense sequence
  source 1..19: mol_type = other RNA
tgttgggcctagagcaaga

SEQ ID NO: 60861 - RNA, 19 nt, synthetic construct
  misc_feature 1..19: note = siRNA antisense sequence
  source 1..19: mol_type = other RNA
tcttgctctaggcccaaca

SEQ ID NO: 60862 - RNA, 19 nt, synthetic construct
  misc_feature 1..19: note = siRNA sense sequence
  source 1..19: mol_type = other RNA
gttgggcctagagcaagag

SEQ ID NO: 60863 - RNA, 19 nt, synthetic construct
  misc_feature 1..19: note = siRNA antisense sequence
  source 1..19: mol_type = other RNA
ctcttgctctaggcccaac

SEQ ID NO: 60864 - RNA, 19 nt, synthetic construct
  misc_feature 1..19: note = siRNA sense sequence
  source 1..19: mol_type = other RNA
ttgggcctagagcaagagc

SEQ ID NO: 60865 - RNA, 19 nt, synthetic construct
  misc_feature 1..19: note = siRNA antisense sequence
  source 1..19: mol_type = other RNA
gctcttgctctaggcccaa

SEQ ID NO: 60866 - RNA, 19 nt, synthetic construct
  misc_feature 1..19: note = siRNA sense sequence
  source 1..19: mol_type = other RNA
tgggcctagagcaagagct

SEQ ID NO: 60867 - RNA, 19 nt, synthetic construct
  misc_feature 1..19: note = siRNA antisense sequence
  source 1..19: mol_type = other RNA
agctcttgctctaggccca

SEQ ID NO: 60868 - RNA, 19 nt, synthetic construct
  misc_feature 1..19: note = siRNA sense sequence
  source 1..19: mol_type = other RNA
gggcctagagcaagagctg

SEQ ID NO: 60869 - RNA, 19 nt, synthetic construct
  misc_feature 1..19: note = siRNA antisense sequence
  source 1..19: mol_type = other RNA
cagctcttgctctaggccc

SEQ ID NO: 60870 - RNA, 19 nt, synthetic construct
  misc_feature 1..19: note = siRNA sense sequence
  source 1..19: mol_type = other RNA
ggcctagagcaagagctgt

SEQ ID NO: 60871 - RNA, 19 nt, synthetic construct
  misc_feature 1..19: note = siRNA antisense sequence
  source 1..19: mol_type = other RNA
acagctcttgctctaggcc

SEQ ID NO: 60872 - RNA, 19 nt, synthetic construct
  misc_feature 1..19: note = siRNA sense sequence
  source 1..19: mol_type = other RNA
gcctagagcaagagctgtc

SEQ ID NO: 60873 - RNA, 19 nt, synthetic construct
  misc_feature 1..19: note = siRNA antisense sequence
  source 1..19: mol_type = other RNA
gacagctcttgctctaggc

SEQ ID NO: 60874 - RNA, 19 nt, synthetic construct
  misc_feature 1..19: note = siRNA sense sequence
  source 1..19: mol_type = other RNA
cctagagcaagagctgtcc

SEQ ID NO: 60875 - RNA, 19 nt, synthetic construct
  misc_feature 1..19: note = siRNA antisense sequence
  source 1..19: mol_type = other RNA
ggacagctcttgctctagg

SEQ ID NO: 60876 - RNA, 19 nt, synthetic construct
  misc_feature 1..19: note = siRNA sense sequence
  source 1..19: mol_type = other RNA
ctagagcaagagctgtcca

SEQ ID NO: 60877 - RNA, 19 nt, synthetic construct
  misc_feature 1..19: note = siRNA antisense sequence
  source 1..19: mol_type = other RNA
tggacagctcttgctctag

SEQ ID NO: 60878 - RNA, 19 nt, synthetic construct
  misc_feature 1..19: note = siRNA sense sequence
  source 1..19: mol_type = other RNA
tagagcaagagctgtccaa

SEQ ID NO: 60879 - RNA, 19 nt, synthetic construct
  misc_feature 1..19: note = siRNA antisense sequence
  source 1..19: mol_type = other RNA
ttggacagctcttgctcta

SEQ ID NO: 60880 - RNA, 19 nt, synthetic construct
  misc_feature 1..19: note = siRNA sense sequence
  source 1..19: mol_type = other RNA
agagcaagagctgtccaaa

SEQ ID NO: 60881 - RNA, 19 nt, synthetic construct
  misc_feature 1..19: note = siRNA antisense sequence
  source 1..19: mol_type = other RNA
tttggacagctcttgctct

SEQ ID NO: 60882 - RNA, 19 nt, synthetic construct
  misc_feature 1..19: note = siRNA sense sequence
  source 1..19: mol_type = other RNA
accaatgacctcctatatg

SEQ ID NO: 60883 - RNA, 19 nt, synthetic construct
  misc_feature 1..19: note = siRNA antisense sequence
  source 1..19: mol_type = other RNA
catataggaggtcattggt

SEQ ID NO: 60884 - RNA, 19 nt, synthetic construct
  misc_feature 1..19: note = siRNA sense sequence
  source 1..19: mol_type = other RNA
ccaatgacctcctatatgt

SEQ ID NO: 60885 - RNA, 19 nt, synthetic construct
  misc_feature 1..19: note = siRNA antisense sequence
  source 1..19: mol_type = other RNA
acatataggaggtcattgg

SEQ ID NO: 60886 - RNA, 19 nt, synthetic construct
  misc_feature 1..19: note = siRNA sense sequence
  source 1..19: mol_type = other RNA
caatgacctcctatatgtt

SEQ ID NO: 60887 - RNA, 19 nt, synthetic construct
  misc_feature 1..19: note = siRNA antisense sequence
  source 1..19: mol_type = other RNA
aacatataggaggtcattg

SEQ ID NO: 60888 - RNA, 19 nt, synthetic construct
  misc_feature 1..19: note = siRNA sense sequence
  source 1..19: mol_type = other RNA
aatgacctcctatatgttt

SEQ ID NO: 60889 - RNA, 19 nt, synthetic construct
  misc_feature 1..19: note = siRNA antisense sequence
  source 1..19: mol_type = other RNA
aaacatataggaggtcatt

SEQ ID NO: 60890 - RNA, 19 nt, synthetic construct
  misc_feature 1..19: note = siRNA sense sequence
  source 1..19: mol_type = other RNA
atgacctcctatatgtttt

SEQ ID NO: 60891 - RNA, 19 nt, synthetic construct
  misc_feature 1..19: note = siRNA antisense sequence
  source 1..19: mol_type = other RNA
aaaacatataggaggtcat

SEQ ID NO: 60892 - RNA, 19 nt, synthetic construct
  misc_feature 1..19: note = siRNA sense sequence
  source 1..19: mol_type = other RNA
tgacctcctatatgtttta

SEQ ID NO: 60893 - RNA, 19 nt, synthetic construct
  misc_feature 1..19: note = siRNA antisense sequence
  source 1..19: mol_type = other RNA
taaaacatataggaggtca

SEQ ID NO: 60894 - RNA, 19 nt, synthetic construct
  misc_feature 1..19: note = siRNA sense sequence
  source 1..19: mol_type = other RNA
gacctcctatatgttttac

SEQ ID NO: 60895 - RNA, 19 nt, synthetic construct
  misc_feature 1..19: note = siRNA antisense sequence
  source 1..19: mol_type = other RNA
gtaaaacatataggaggtc

SEQ ID NO: 60896 - RNA, 19 nt, synthetic construct
  misc_feature 1..19: note = siRNA sense sequence
  source 1..19: mol_type = other RNA
acctcctatatgttttact

SEQ ID NO: 60897 - RNA, 19 nt, synthetic construct
  misc_feature 1..19: note = siRNA antisense sequence
  source 1..19: mol_type = other RNA
agtaaaacatataggaggt

SEQ ID NO: 60898 - RNA, 19 nt, synthetic construct
  misc_feature 1..19: note = siRNA sense sequence
  source 1..19: mol_type = other RNA
cctcctatatgttttactt

SEQ ID NO: 60899 - RNA, 19 nt, synthetic construct
  misc_feature 1..19: note = siRNA antisense sequence
  source 1..19: mol_type = other RNA
aagtaaaacatataggagg

SEQ ID NO: 60900 - RNA, 19 nt, synthetic construct
  misc_feature 1..19: note = siRNA sense sequence
  source 1..19: mol_type = other RNA
catgtttcttagtctattc

SEQ ID NO: 60901 - RNA, 19 nt, synthetic construct
  misc_feature 1..19: note = siRNA antisense sequence
  source 1..19: mol_type = other RNA
gaatagactaagaaacatg

SEQ ID NO: 60902 - RNA, 19 nt, synthetic construct
  misc_feature 1..19: note = siRNA sense sequence
  source 1..19: mol_type = other RNA
tattctggctgctataact

SEQ ID NO: 60903 - RNA, 19 nt, synthetic construct
  misc_feature 1..19: note = siRNA antisense sequence
  source 1..19: mol_type = other RNA
agttatagcagccagaata

SEQ ID NO: 60904 - RNA, 19 nt, synthetic construct
  misc_feature 1..19: note = siRNA sense sequence
  source 1..19: mol_type = other RNA
aactgagtagcttaaaagc

SEQ ID NO: 60905 - RNA, 19 nt, synthetic construct
  misc_feature 1..19: note = siRNA antisense sequence
  source 1..19: mol_type = other RNA
gcttttaagctactcagtt

SEQ ID NO: 60906 - RNA, 19 nt, synthetic construct
  misc_feature 1..19: note = siRNA sense sequence
  source 1..19: mol_type = other RNA
actgagtagcttaaaagcc

SEQ ID NO: 60907 - RNA, 19 nt, synthetic construct
  misc_feature 1..19: note = siRNA antisense sequence
  source 1..19: mol_type = other RNA
ggcttttaagctactcagt

SEQ ID NO: 60908 - RNA, 19 nt, synthetic construct
  misc_feature 1..19: note = siRNA sense sequence
  source 1..19: mol_type = other RNA
ctgagtagcttaaaagcca

SEQ ID NO: 60909 - RNA, 19 nt, synthetic construct
  misc_feature 1..19: note = siRNA antisense sequence
  source 1..19: mol_type = other RNA
tggcttttaagctactcag

SEQ ID NO: 60910 - RNA, 19 nt, synthetic construct
  misc_feature 1..19: note = siRNA sense sequence
  source 1..19: mol_type = other RNA
gtagcttaaaagccagaag

SEQ ID NO: 60911 - RNA, 19 nt, synthetic construct
  misc_feature 1..19: note = siRNA antisense sequence
  source 1..19: mol_type = other RNA
cttctggcttttaagctac

SEQ ID NO: 60912 - RNA, 19 nt, synthetic construct
  misc_feature 1..19: note = siRNA sense sequence
  source 1..19: mol_type = other RNA
aaagccagaagtttatttc

SEQ ID NO: 60913 - RNA, 19 nt, synthetic construct
  misc_feature 1..19: note = siRNA antisense sequence
  source 1..19: mol_type = other RNA
gaaataaacttctggcttt

SEQ ID NO: 60914 - RNA, 19 nt, synthetic construct
  misc_feature 1..19: note = siRNA sense sequence
  source 1..19: mol_type = other RNA
actggtagatctagtgtct

SEQ ID NO: 60915 - RNA, 19 nt, synthetic construct
  misc_feature 1..19: note = siRNA antisense sequence
  source 1..19: mol_type = other RNA
agacactagatctaccagt

SEQ ID NO: 60916 - RNA, 19 nt, synthetic construct
  misc_feature 1..19: note = siRNA sense sequence
  source 1..19: mol_type = other RNA
ctggtagatctagtgtctg

SEQ ID NO: 60917 - RNA, 19 nt, synthetic construct
  misc_feature 1..19: note = siRNA antisense sequence
  source 1..19: mol_type = other RNA
cagacactagatctaccag

SEQ ID NO: 60918 - RNA, 19 nt, synthetic construct
  misc_feature 1..19: note = siRNA sense sequence
  source 1..19: mol_type = other RNA
tggtagatctagtgtctgg

SEQ ID NO: 60919 - RNA, 19 nt, synthetic construct
  misc_feature 1..19: note = siRNA antisense sequence
  source 1..19: mol_type = other RNA
ccagacactagatctacca

SEQ ID NO: 60920 - RNA, 19 nt, synthetic construct
  misc_feature 1..19: note = siRNA sense sequence
  source 1..19: mol_type = other RNA
cccatttcatgcttcatag

SEQ ID NO: 60921 - RNA, 19 nt, synthetic construct
  misc_feature 1..19: note = siRNA antisense sequence
  source 1..19: mol_type = other RNA
ctatgaagcatgaaatggg

SEQ ID NO: 60922 - RNA, 19 nt, synthetic construct
  misc_feature 1..19: note = siRNA sense sequence
  source 1..19: mol_type = other RNA
ccatttcatgcttcataga

SEQ ID NO: 60923 - RNA, 19 nt, synthetic construct
  misc_feature 1..19: note = siRNA antisense sequence
  source 1..19: mol_type = other RNA
tctatgaagcatgaaatgg

SEQ ID NO: 60924 - RNA, 19 nt, synthetic construct
  misc_feature 1..19: note = siRNA sense sequence
  source 1..19: mol_type = other RNA
catagaagatgtcttttca

SEQ ID NO: 60925 - RNA, 19 nt, synthetic construct
  misc_feature 1..19: note = siRNA antisense sequence
  source 1..19: mol_type = other RNA
tgaaaagacatcttctatg

SEQ ID NO: 60926 - RNA, 19 nt, synthetic construct
  misc_feature 1..19: note = siRNA sense sequence
  source 1..19: mol_type = other RNA
atgtcttttcaatgcatcc

SEQ ID NO: 60927 - RNA, 19 nt, synthetic construct
  misc_feature 1..19: note = siRNA antisense sequence
  source 1..19: mol_type = other RNA
ggatgcattgaaaagacat

SEQ ID NO: 60928 - RNA, 19 nt, synthetic construct
  misc_feature 1..19: note = siRNA sense sequence
  source 1..19: mol_type = other RNA
tgtcttttcaatgcatcct

SEQ ID NO: 60929 - RNA, 19 nt, synthetic construct
  misc_feature 1..19: note = siRNA antisense sequence
  source 1..19: mol_type = other RNA
aggatgcattgaaaagaca

SEQ ID NO: 60930 - RNA, 19 nt, synthetic construct
  misc_feature 1..19: note = siRNA sense sequence
  source 1..19: mol_type = other RNA
gtcttttcaatgcatcctg

SEQ ID NO: 60931 - RNA, 19 nt, synthetic construct
  misc_feature 1..19: note = siRNA antisense sequence
  source 1..19: mol_type = other RNA
caggatgcattgaaaagac

SEQ ID NO: 60932 - RNA, 19 nt, synthetic construct
  misc_feature 1..19: note = siRNA sense sequence
  source 1..19: mol_type = other RNA
cttttcaatgcatcctgag

SEQ ID NO: 60933 - RNA, 19 nt, synthetic construct
  misc_feature 1..19: note = siRNA antisense sequence
  source 1..19: mol_type = other RNA
ctcaggatgcattgaaaag

SEQ ID NO: 60934 - RNA, 19 nt, synthetic construct
  misc_feature 1..19: note = siRNA sense sequence
  source 1..19: mol_type = other RNA
aaccaggaaggcagcattc

SEQ ID NO: 60935 - RNA, 19 nt, synthetic construct
  misc_feature 1..19: note = siRNA antisense sequence
  source 1..19: mol_type = other RNA
gaatgctgccttcctggtt

SEQ ID NO: 60936 - RNA, 19 nt, synthetic construct
  misc_feature 1..19: note = siRNA sense sequence
  source 1..19: mol_type = other RNA
accaggaaggcagcattct

SEQ ID NO: 60937 - RNA, 19 nt, synthetic construct
  misc_feature 1..19: note = siRNA antisense sequence
  source 1..19: mol_type = other RNA
agaatgctgccttcctggt

SEQ ID NO: 60938 - RNA, 19 nt, synthetic construct
  misc_feature 1..19: note = siRNA sense sequence
  source 1..19: mol_type = other RNA
ccaggaaggcagcattctg

SEQ ID NO: 60939 - RNA, 19 nt, synthetic construct
  misc_feature 1..19: note = siRNA antisense sequence
  source 1..19: mol_type = other RNA
cagaatgctgccttcctgg

SEQ ID NO: 60940 - RNA, 19 nt, synthetic construct
  misc_feature 1..19: note = siRNA sense sequence
  source 1..19: mol_type = other RNA
caggaaggcagcattctga

SEQ ID NO: 60941 - RNA, 19 nt, synthetic construct
  misc_feature 1..19: note = siRNA antisense sequence
  source 1..19: mol_type = other RNA
tcagaatgctgccttcctg

SEQ ID NO: 60942 - RNA, 19 nt, synthetic construct
  misc_feature 1..19: note = siRNA sense sequence
  source 1..19: mol_type = other RNA
aggcagcattctgagttac

SEQ ID NO: 60943 - RNA, 19 nt, synthetic construct
  misc_feature 1..19: note = siRNA antisense sequence
  source 1..19: mol_type = other RNA
gtaactcagaatgctgcct

SEQ ID NO: 60944 - RNA, 19 nt, synthetic construct
  misc_feature 1..19: note = siRNA sense sequence
  source 1..19: mol_type = other RNA
ggcagcattctgagttaca

SEQ ID NO: 60945 - RNA, 19 nt, synthetic construct
  misc_feature 1..19: note = siRNA antisense sequence
  source 1..19: mol_type = other RNA
tgtaactcagaatgctgcc

SEQ ID NO: 60946 - RNA, 19 nt, synthetic construct
  misc_feature 1..19: note = siRNA sense sequence
  source 1..19: mol_type = other RNA
gatctcatcacctgcccaa

SEQ ID NO: 60947 - RNA, 19 nt, synthetic construct
  misc_feature 1..19: note = siRNA antisense sequence
  source 1..19: mol_type = other RNA
ttgggcaggtgatgagatc

SEQ ID NO: 60948 - RNA, 19 nt, synthetic construct
  misc_feature 1..19: note = siRNA sense sequence
  source 1..19: mol_type = other RNA
atctcatcacctgcccaaa

SEQ ID NO: 60949 - RNA, 19 nt, synthetic construct
  misc_feature 1..19: note = siRNA antisense sequence
  source 1..19: mol_type = other RNA
tttgggcaggtgatgagat

SEQ ID NO: 60950 - RNA, 19 nt, synthetic construct
  misc_feature 1..19: note = siRNA sense sequence
  source 1..19: mol_type = other RNA
tcatcacattagtgtttag

SEQ ID NO: 60951 - RNA, 19 nt, synthetic construct
  misc_feature 1..19: note = siRNA antisense sequence
  source 1..19: mol_type = other RNA
ctaaacactaatgtgatga

SEQ ID NO: 60952 - RNA, 19 nt, synthetic construct
  misc_feature 1..19: note = siRNA sense sequence
  source 1..19: mol_type = other RNA
catcacattagtgtttagg

SEQ ID NO: 60953 - RNA, 19 nt, synthetic construct
  misc_feature 1..19: note = siRNA antisense sequence
  source 1..19: mol_type = other RNA
cctaaacactaatgtgatg

SEQ ID NO: 60954 - RNA, 19 nt, synthetic construct
  misc_feature 1..19: note = siRNA sense sequence
  source 1..19: mol_type = other RNA
atcacattagtgtttaggt

SEQ ID NO: 60955 - RNA, 19 nt, synthetic construct
  misc_feature 1..19: note = siRNA antisense sequence
  source 1..19: mol_type = other RNA
acctaaacactaatgtgat

SEQ ID NO: 60956 - RNA, 19 nt, synthetic construct
  misc_feature 1..19: note = siRNA sense sequence
  source 1..19: mol_type = other RNA
cacattagtgtttaggttt

SEQ ID NO: 60957 - RNA, 19 nt, synthetic construct
  misc_feature 1..19: note = siRNA antisense sequence
  source 1..19: mol_type = other RNA
aaacctaaacactaatgtg

SEQ ID NO: 60958 - RNA, 19 nt, synthetic construct
  misc_feature 1..19: note = siRNA sense sequence
  source 1..19: mol_type = other RNA
acattagtgtttaggtttc

SEQ ID NO: 60959 - RNA, 19 nt, synthetic construct
  misc_feature 1..19: note = siRNA antisense sequence
  source 1..19: mol_type = other RNA
gaaacctaaacactaatgt

SEQ ID NO: 60960 - RNA, 19 nt, synthetic construct
  misc_feature 1..19: note = siRNA sense sequence
  source 1..19: mol_type = other RNA
cattagtgtttaggtttca

SEQ ID NO: 60961 - RNA, 19 nt, synthetic construct
  misc_feature 1..19: note = siRNA antisense sequence
  source 1..19: mol_type = other RNA
tgaaacctaaacactaatg

SEQ ID NO: 60962 - RNA, 19 nt, synthetic construct
  misc_feature 1..19: note = siRNA sense sequence
  source 1..19: mol_type = other RNA
catggtagacattcacatt

SEQ ID NO: 60963 - RNA, 19 nt, synthetic construct
  misc_feature 1..19: note = siRNA antisense sequence
  source 1..19: mol_type = other RNA
aatgtgaatgtctaccatg

SEQ ID NO: 60964 - RNA, 19 nt, synthetic construct
  misc_feature 1..19: note = siRNA sense sequence
  source 1..19: mol_type = other RNA
atggtagacattcacattg

SEQ ID NO: 60965 - RNA, 19 nt, synthetic construct
  misc_feature 1..19: note = siRNA antisense sequence
  source 1..19: mol_type = other RNA
caatgtgaatgtctaccat

SEQ ID NO: 60966 - RNA, 19 nt, synthetic construct
  misc_feature 1..19: note = siRNA sense sequence
  source 1..19: mol_type = other RNA
tggtagacattcacattga

SEQ ID NO: 60967 - RNA, 19 nt, synthetic construct
  misc_feature 1..19: note = siRNA antisense sequence
  source 1..19: mol_type = other RNA
tcaatgtgaatgtctacca

SEQ ID NO: 60968 - RNA, 19 nt, synthetic construct
  misc_feature 1..19: note = siRNA sense sequence
  source 1..19: mol_type = other RNA
taggtaatgtcatttatgg

SEQ ID NO: 60969 - RNA, 19 nt, synthetic construct
  misc_feature 1..19: note = siRNA antisense sequence
  source 1..19: mol_type = other RNA
ccataaatgacattaccta

SEQ ID NO: 60970 - RNA, 19 nt, synthetic construct
  misc_feature 1..19: note = siRNA sense sequence
  source 1..19: mol_type = other RNA
aggtaatgtcatttatgga

SEQ ID NO: 60971 - RNA, 19 nt, synthetic construct
  misc_feature 1..19: note = siRNA antisense sequence
  source 1..19: mol_type = other RNA
tccataaatgacattacct

SEQ ID NO: 60972 - RNA, 19 nt, synthetic construct
  misc_feature 1..19: note = siRNA sense sequence
  source 1..19: mol_type = other RNA
ggtaatgtcatttatggaa

SEQ ID NO: 60973 - RNA, 19 nt, synthetic construct
  misc_feature 1..19: note = siRNA antisense sequence
  source 1..19: mol_type = other RNA
ttccataaatgacattacc

SEQ ID NO: 60974 - RNA, 19 nt, synthetic construct
  misc_feature 1..19: note = siRNA sense sequence
  source 1..19: mol_type = other RNA
cttatctgttactaaagac

SEQ ID NO: 60975 - RNA, 19 nt, synthetic construct
  misc_feature 1..19: note = siRNA antisense sequence
  source 1..19: mol_type = other RNA
gtctttagtaacagataag

SEQ ID NO: 60976 - RNA, 19 nt, synthetic construct
  misc_feature 1..19: note = siRNA sense sequence
  source 1..19: mol_type = other RNA
cacatcctatctcatggaa

SEQ ID NO: 60977 - RNA, 19 nt, synthetic construct
  misc_feature 1..19: note = siRNA antisense sequence
  source 1..19: mol_type = other RNA
ttccatgagataggatgtg

SEQ ID NO: 60978 - RNA, 19 nt, synthetic construct
  misc_feature 1..19: note = siRNA sense sequence
  source 1..19: mol_type = other RNA
gtgaccatttatttaagtg

SEQ ID NO: 60979 - RNA, 19 nt, synthetic construct
  misc_feature 1..19: note = siRNA antisense sequence
  source 1..19: mol_type = other RNA
cacttaaataaatggtcac

SEQ ID NO: 60980 - RNA, 19 nt, synthetic construct
  misc_feature 1..19: note = siRNA sense sequence
  source 1..19: mol_type = other RNA
tgaccatttatttaagtgc

SEQ ID NO: 60981 - RNA, 19 nt, synthetic construct
  misc_feature 1..19: note = siRNA antisense sequence
  source 1..19: mol_type = other RNA
gcacttaaataaatggtca

SEQ ID NO: 60982 - RNA, 19 nt, synthetic construct
  misc_feature 1..19: note = siRNA sense sequence
  source 1..19: mol_type = other RNA
gaccatttatttaagtgca

SEQ ID NO: 60983 - RNA, 19 nt, synthetic construct
  misc_feature 1..19: note = siRNA antisense sequence
  source 1..19: mol_type = other RNA
tgcacttaaataaatggtc

SEQ ID NO: 60984 - RNA, 19 nt, synthetic construct
  misc_feature 1..19: note = siRNA sense sequence
  source 1..19: mol_type = other RNA
caaggttggtttacatgtg

SEQ ID NO: 60985 - RNA, 19 nt, synthetic construct
  misc_feature 1..19: note = siRNA antisense sequence
  source 1..19: mol_type = other RNA
cacatgtaaaccaaccttg

SEQ ID NO: 60986 - RNA, 19 nt, synthetic construct
  misc_feature 1..19: note = siRNA sense sequence
  source 1..19: mol_type = other RNA
aaggttggtttacatgtgt

SEQ ID NO: 60987 - RNA, 19 nt, synthetic construct
  misc_feature 1..19: note = siRNA antisense sequence
  source 1..19: mol_type = other RNA
acacatgtaaaccaacctt

SEQ ID NO: 60988 - RNA, 19 nt, synthetic construct
  misc_feature 1..19: note = siRNA sense sequence
  source 1..19: mol_type = other RNA
aggttggtttacatgtgta

SEQ ID NO: 60989 - RNA, 19 nt, synthetic construct
  misc_feature 1..19: note = siRNA antisense sequence
  source 1..19: mol_type = other RNA
tacacatgtaaaccaacct

SEQ ID NO: 60990 - RNA, 19 nt, synthetic construct
  misc_feature 1..19: note = siRNA sense sequence
  source 1..19: mol_type = other RNA
ggttggtttacatgtgtat

SEQ ID NO: 60991 - RNA, 19 nt, synthetic construct
  misc_feature 1..19: note = siRNA antisense sequence
  source 1..19: mol_type = other RNA
atacacatgtaaaccaacc

SEQ ID NO: 60992 - RNA, 19 nt, synthetic construct
  misc_feature 1..19: note = siRNA sense sequence
  source 1..19: mol_type = other RNA
gtatattgcttcttctgtg

SEQ ID NO: 60993 - RNA, 19 nt, synthetic construct
  misc_feature 1..19: note = siRNA antisense sequence
  source 1..19: mol_type = other RNA
cacagaagaagcaatatac

SEQ ID NO: 60994 - RNA, 19 nt, synthetic construct
  misc_feature 1..19: note = siRNA sense sequence
  source 1..19: mol_type = other RNA
tatattgcttcttctgtgt

SEQ ID NO: 60995 - RNA, 19 nt, synthetic construct
  misc_feature 1..19: note = siRNA antisense sequence
  source 1..19: mol_type = other RNA
acacagaagaagcaatata

SEQ ID NO: 60996 - RNA, 19 nt, synthetic construct
  misc_feature 1..19: note = siRNA sense sequence
  source 1..19: mol_type = other RNA
atattgcttcttctgtgta

SEQ ID NO: 60997 - RNA, 19 nt, synthetic construct
  misc_feature 1..19: note = siRNA antisense sequence
  source 1..19: mol_type = other RNA
tacacagaagaagcaatat

SEQ ID NO: 60998 - RNA, 19 nt, synthetic construct
  misc_feature 1..19: note = siRNA sense sequence
  source 1..19: mol_type = other RNA
attgcttcttctgtgtatg

SEQ ID NO: 60999 - RNA, 19 nt, synthetic construct
  misc_feature 1..19: note = siRNA antisense sequence
  source 1..19: mol_type = other RNA
catacacagaagaagcaat

SEQ ID NO: 61000 - RNA, 19 nt, synthetic construct
  misc_feature 1..19: note = siRNA sense sequence
  source 1..19: mol_type = other RNA
ttgcttcttctgtgtatgt

SEQ ID NO: 61001 - RNA, 19 nt, synthetic construct
  misc_feature 1..19: note = siRNA antisense sequence
  source 1..19: mol_type = other RNA
acatacacagaagaagcaa

SEQ ID NO: 61002 - RNA, 19 nt, synthetic construct
  misc_feature 1..19: note = siRNA sense sequence
  source 1..19: mol_type = other RNA
tgcttcttctgtgtatgtc

SEQ ID NO: 61003 - RNA, 19 nt, synthetic construct
  misc_feature 1..19: note = siRNA antisense sequence
  source 1..19: mol_type = other RNA
gacatacacagaagaagca

SEQ ID NO: 61004 - RNA, 19 nt, synthetic construct
  misc_feature 1..19: note = siRNA sense sequence
  source 1..19: mol_type = other RNA
gcttcttctgtgtatgtcg

SEQ ID NO: 61005 - RNA, 19 nt, synthetic construct
  misc_feature 1..19: note = siRNA antisense sequence
  source 1..19: mol_type = other RNA
cgacatacacagaagaagc

SEQ ID NO: 61006 - RNA, 19 nt, synthetic construct
  misc_feature 1..19: note = siRNA sense sequence
  source 1..19: mol_type = other RNA
cttcttctgtgtatgtcga

SEQ ID NO: 61007 - RNA, 19 nt, synthetic construct
  misc_feature 1..19: note = siRNA antisense sequence
  source 1..19: mol_type = other RNA
tcgacatacacagaagaag

SEQ ID NO: 61008 - RNA, 19 nt, synthetic construct
  misc_feature 1..19: note = siRNA sense sequence
  source 1..19: mol_type = other RNA
ttcttctgtgtatgtcgaa

SEQ ID NO: 61009 - RNA, 19 nt, synthetic construct
  misc_feature 1..19: note = siRNA antisense sequence
  source 1..19: mol_type = other RNA
ttcgacatacacagaagaa

SEQ ID NO: 61010 - RNA, 19 nt, synthetic construct
  misc_feature 1..19: note = siRNA sense sequence
  source 1..19: mol_type = other RNA
tcttctgtgtatgtcgaat

SEQ ID NO: 61011 - RNA, 19 nt, synthetic construct
  misc_feature 1..19: note = siRNA antisense sequence
  source 1..19: mol_type = other RNA
attcgacatacacagaaga

SEQ ID NO: 61012 - RNA, 19 nt, synthetic construct
  misc_feature 1..19: note = siRNA sense sequence
  source 1..19: mol_type = other RNA
cttctgtgtatgtcgaata

SEQ ID NO: 61013 - RNA, 19 nt, synthetic construct
  misc_feature 1..19: note = siRNA antisense sequence
  source 1..19: mol_type = other RNA
tattcgacatacacagaag

SEQ ID NO: 61014 - RNA, 19 nt, synthetic construct
  misc_feature 1..19: note = siRNA sense sequence
  source 1..19: mol_type = other RNA
ttctgtgtatgtcgaatat

SEQ ID NO: 61015 - RNA, 19 nt, synthetic construct
  misc_feature 1..19: note = siRNA antisense sequence
  source 1..19: mol_type = other RNA
atattcgacatacacagaa

SEQ ID NO: 61016 - RNA, 19 nt, synthetic construct
  misc_feature 1..19: note = siRNA sense sequence
  source 1..19: mol_type = other RNA
tctgtgtatgtcgaatatt

SEQ ID NO: 61017 - RNA, 19 nt, synthetic construct
  misc_feature 1..19: note = siRNA antisense sequence
  source 1..19: mol_type = other RNA
aatattcgacatacacaga

SEQ ID NO: 61018 - RNA, 19 nt, synthetic construct
  misc_feature 1..19: note = siRNA sense sequence
  source 1..19: mol_type = other RNA
ctgtgtatgtcgaatattt

SEQ ID NO: 61019 - RNA, 19 nt, synthetic construct
  misc_feature 1..19: note = siRNA antisense sequence
  source 1..19: mol_type = other RNA
aaatattcgacatacacag

SEQ ID NO: 61020 - RNA, 19 nt, synthetic construct
  misc_feature 1..19: note = siRNA sense sequence
  source 1..19: mol_type = other RNA
gtgtatgtcgaatattttg

SEQ ID NO: 61021 - RNA, 19 nt, synthetic construct
  misc_feature 1..19: note = siRNA antisense sequence
  source 1..19: mol_type = other RNA
caaaatattcgacatacac

SEQ ID NO: 61022 - RNA, 19 nt, synthetic construct
  misc_feature 1..19: note = siRNA sense sequence
  source 1..19: mol_type = other RNA
tgtatgtcgaatattttgc

SEQ ID NO: 61023 - RNA, 19 nt, synthetic construct
  misc_feature 1..19: note = siRNA antisense sequence
  source 1..19: mol_type = other RNA
gcaaaatattcgacataca

SEQ ID NO: 61024 - RNA, 19 nt, synthetic construct
  misc_feature 1..19: note = siRNA sense sequence
  source 1..19: mol_type = other RNA
gtatgtcgaatattttgct

SEQ ID NO: 61025 - RNA, 19 nt, synthetic construct
  misc_feature 1..19: note = siRNA antisense sequence
  source 1..19: mol_type = other RNA
agcaaaatattcgacatac

SEQ ID NO: 61026 - RNA, 19 nt, synthetic construct
  misc_feature 1..19: note = siRNA sense sequence
  source 1..19: mol_type = other RNA
tatgtcgaatattttgctc

SEQ ID NO: 61027 - RNA, 19 nt, synthetic construct
  misc_feature 1..19: note = siRNA antisense sequence
  source 1..19: mol_type = other RNA
gagcaaaatattcgacata

SEQ ID NO: 61028 - RNA, 19 nt, synthetic construct
  misc_feature 1..19: note = siRNA sense sequence
  source 1..19: mol_type = other RNA
atgtcgaatattttgctct

SEQ ID NO: 61029 - RNA, 19 nt, synthetic construct
  misc_feature 1..19: note = siRNA antisense sequence
  source 1..19: mol_type = other RNA
agagcaaaatattcgacat

SEQ ID NO: 61030 - RNA, 19 nt, synthetic construct
  misc_feature 1..19: note = siRNA sense sequence
  source 1..19: mol_type = other RNA
tgtcgaatattttgctcta

SEQ ID NO: 61031 - RNA, 19 nt, synthetic construct
  misc_feature 1..19: note = siRNA antisense sequence
  source 1..19: mol_type = other RNA
tagagcaaaatattcgaca

SEQ ID NO: 61032 - RNA, 19 nt, synthetic construct
  misc_feature 1..19: note = siRNA sense sequence
  source 1..19: mol_type = other RNA
gtcgaatattttgctctat

SEQ ID NO: 61033 - RNA, 19 nt, synthetic construct
  misc_feature 1..19: note = siRNA antisense sequence
  source 1..19: mol_type = other RNA
atagagcaaaatattcgac

SEQ ID NO: 61034 - RNA, 19 nt, synthetic construct
  misc_feature 1..19: note = siRNA sense sequence
  source 1..19: mol_type = other RNA
actcactgacagtttcttc

SEQ ID NO: 61035 - RNA, 19 nt, synthetic construct
  misc_feature 1..19: note = siRNA antisense sequence
  source 1..19: mol_type = other RNA
gaagaaactgtcagtgagt

SEQ ID NO: 61036 - RNA, 19 nt, synthetic construct
  misc_feature 1..19: note = siRNA sense sequence
  source 1..19: mol_type = other RNA
actgacagtttcttccagg

SEQ ID NO: 61037 - RNA, 19 nt, synthetic construct
  misc_feature 1..19: note = siRNA antisense sequence
  source 1..19: mol_type = other RNA
cctggaagaaactgtcagt

SEQ ID NO: 61038 - RNA, 19 nt, synthetic construct
  misc_feature 1..19: note = siRNA sense sequence
  source 1..19: mol_type = other RNA
agtttcttccaggttgtag

SEQ ID NO: 61039 - RNA, 19 nt, synthetic construct
  misc_feature 1..19: note = siRNA antisense sequence
  source 1..19: mol_type = other RNA
ctacaacctggaagaaact

SEQ ID NO: 61040 - RNA, 19 nt, synthetic construct
  misc_feature 1..19: note = siRNA sense sequence
  source 1..19: mol_type = other RNA
gtttcttccaggttgtagg

SEQ ID NO: 61041 - RNA, 19 nt, synthetic construct
  misc_feature 1..19: note = siRNA antisense sequence
  source 1..19: mol_type = other RNA
cctacaacctggaagaaac

SEQ ID NO: 61042 - RNA, 19 nt, synthetic construct
  misc_feature 1..19: note = siRNA sense sequence
  source 1..19: mol_type = other RNA
agatcagtagaagtggaag

SEQ ID NO: 61043 - RNA, 19 nt, synthetic construct
  misc_feature 1..19: note = siRNA antisense sequence
  source 1..19: mol_type = other RNA
cttccacttctactgatct

SEQ ID NO: 61044 - RNA, 19 nt, synthetic construct
  misc_feature 1..19: note = siRNA sense sequence
  source 1..19: mol_type = other RNA
tcagtagaagtggaaggca

SEQ ID NO: 61045 - RNA, 19 nt, synthetic construct
  misc_feature 1..19: note = siRNA antisense sequence
  source 1..19: mol_type = other RNA
tgccttccacttctactga

SEQ ID NO: 61046 - RNA, 19 nt, synthetic construct
  misc_feature 1..19: note = siRNA sense sequence
  source 1..19: mol_type = other RNA
gtagaagtggaaggcaatt

SEQ ID NO: 61047 - RNA, 19 nt, synthetic construct
  misc_feature 1..19: note = siRNA antisense sequence
  source 1..19: mol_type = other RNA
aattgccttccacttctac

SEQ ID NO: 61048 - RNA, 19 nt, synthetic construct
  misc_feature 1..19: note = siRNA sense sequence
  source 1..19: mol_type = other RNA
aagtggaaggcaattaacc

SEQ ID NO: 61049 - RNA, 19 nt, synthetic construct
  misc_feature 1..19: note = siRNA antisense sequence
  source 1..19: mol_type = other RNA
ggttaattgccttccactt

SEQ ID NO: 61050 - RNA, 19 nt, synthetic construct
  misc_feature 1..19: note = siRNA sense sequence
  source 1..19: mol_type = other RNA
agtggaaggcaattaacca

SEQ ID NO: 61051 - RNA, 19 nt, synthetic construct
  misc_feature 1..19: note = siRNA antisense sequence
  source 1..19: mol_type = other RNA
tggttaattgccttccact

SEQ ID NO: 61052 - RNA, 19 nt, synthetic construct
  misc_feature 1..19: note = siRNA sense sequence
  source 1..19: mol_type = other RNA
caattaaccactttgcttc

SEQ ID NO: 61053 - RNA, 19 nt, synthetic construct
  misc_feature 1..19: note = siRNA antisense sequence
  source 1..19: mol_type = other RNA
gaagcaaagtggttaattg

SEQ ID NO: 61054 - RNA, 19 nt, synthetic construct
  misc_feature 1..19: note = siRNA sense sequence
  source 1..19: mol_type = other RNA
cacccttaagaataattag

SEQ ID NO: 61055 - RNA, 19 nt, synthetic construct
  misc_feature 1..19: note = siRNA antisense sequence
  source 1..19: mol_type = other RNA
ctaattattcttaagggtg

SEQ ID NO: 61056 - RNA, 19 nt, synthetic construct
  misc_feature 1..19: note = siRNA sense sequence
  source 1..19: mol_type = other RNA
acccttaagaataattagc

SEQ ID NO: 61057 - RNA, 19 nt, synthetic construct
  misc_feature 1..19: note = siRNA antisense sequence
  source 1..19: mol_type = other RNA
gctaattattcttaagggt

SEQ ID NO: 61058 - RNA, 19 nt, synthetic construct
  misc_feature 1..19: note = siRNA sense sequence
  source 1..19: mol_type = other RNA
cccttaagaataattagca

SEQ ID NO: 61059 - RNA, 19 nt, synthetic construct
  misc_feature 1..19: note = siRNA antisense sequence
  source 1..19: mol_type = other RNA
tgctaattattcttaaggg

SEQ ID NO: 61060 - RNA, 19 nt, synthetic construct
  misc_feature 1..19: note = siRNA sense sequence
  source 1..19: mol_type = other RNA
aattcacctagattaaagc

SEQ ID NO: 61061 - RNA, 19 nt, synthetic construct
  misc_feature 1..19: note = siRNA antisense sequence
  source 1..19: mol_type = other RNA
gctttaatctaggtgaatt

SEQ ID NO: 61062 - RNA, 19 nt, synthetic construct
  misc_feature 1..19: note = siRNA sense sequence
  source 1..19: mol_type = other RNA
attcacctagattaaagca

SEQ ID NO: 61063 - RNA, 19 nt, synthetic construct
  misc_feature 1..19: note = siRNA antisense sequence
  source 1..19: mol_type = other RNA
tgctttaatctaggtgaat

SEQ ID NO: 61064 - RNA, 19 nt, synthetic construct
  misc_feature 1..19: note = siRNA sense sequence
  source 1..19: mol_type = other RNA
ttcacctagattaaagcaa

SEQ ID NO: 61065 - RNA, 19 nt, synthetic construct
  misc_feature 1..19: note = siRNA antisense sequence
  source 1..19: mol_type = other RNA
ttgctttaatctaggtgaa

SEQ ID NO: 61066 - RNA, 19 nt, synthetic construct
  misc_feature 1..19: note = siRNA sense sequence
  source 1..19: mol_type = other RNA
cacctagattaaagcaatg

SEQ ID NO: 61067 - RNA, 19 nt, synthetic construct
  misc_feature 1..19: note = siRNA antisense sequence
  source 1..19: mol_type = other RNA
cattgctttaatctaggtg

SEQ ID NO: 61068 - RNA, 19 nt, synthetic construct
  misc_feature 1..19: note = siRNA sense sequence
  source 1..19: mol_type = other RNA
acctagattaaagcaatgg

SEQ ID NO: 61069 - RNA, 19 nt, synthetic construct
  misc_feature 1..19: note = siRNA antisense sequence
  source 1..19: mol_type = other RNA
ccattgctttaatctaggt

SEQ ID NO: 61070 - RNA, 19 nt, synthetic construct
  misc_feature 1..19: note = siRNA sense sequence
  source 1..19: mol_type = other RNA
cctagattaaagcaatggt

SEQ ID NO: 61071 - RNA, 19 nt, synthetic construct
  misc_feature 1..19: note = siRNA antisense sequence
  source 1..19: mol_type = other RNA
accattgctttaatctagg

SEQ ID NO: 61072 - RNA, 19 nt, synthetic construct
  misc_feature 1..19: note = siRNA sense sequence
  source 1..19: mol_type = other RNA
ctagattaaagcaatggtt

SEQ ID NO: 61073 - RNA, 19 nt, synthetic construct
  misc_feature 1..19: note = siRNA antisense sequence
  source 1..19: mol_type = other RNA
aaccattgctttaatctag

SEQ ID NO: 61074 - RNA, 19 nt, synthetic construct
  misc_feature 1..19: note = siRNA sense sequence
  source 1..19: mol_type = other RNA
gattaaagcaatggttcta

SEQ ID NO: 61075 - RNA, 19 nt, synthetic construct
  misc_feature 1..19: note = siRNA antisense sequence
  source 1..19: mol_type = other RNA
tagaaccattgctttaatc

SEQ ID NO: 61076 - RNA, 19 nt, synthetic construct
  misc_feature 1..19: note = siRNA sense sequence
  source 1..19: mol_type = other RNA
ttaaagcaatggttctatg

SEQ ID NO: 61077 - RNA, 19 nt, synthetic construct
  misc_feature 1..19: note = siRNA antisense sequence
  source 1..19: mol_type = other RNA
catagaaccattgctttaa

SEQ ID NO: 61078 - RNA, 19 nt, synthetic construct
  misc_feature 1..19: note = siRNA sense sequence
  source 1..19: mol_type = other RNA
caatggttctatgagctat

SEQ ID NO: 61079 - RNA, 19 nt, synthetic construct
  misc_feature 1..19: note = siRNA antisense sequence
  source 1..19: mol_type = other RNA
atagctcatagaaccattg

SEQ ID NO: 61080 - RNA, 19 nt, synthetic construct
  misc_feature 1..19: note = siRNA sense sequence
  source 1..19: mol_type = other RNA
aatggttctatgagctata

SEQ ID NO: 61081 - RNA, 19 nt, synthetic construct
  misc_feature 1..19: note = siRNA antisense sequence
  source 1..19: mol_type = other RNA
tatagctcatagaaccatt

SEQ ID NO: 61082 - RNA, 19 nt, synthetic construct
  misc_feature 1..19: note = siRNA sense sequence
  source 1..19: mol_type = other RNA
tatgagctatagaagatac

SEQ ID NO: 61083 - RNA, 19 nt, synthetic construct
  misc_feature 1..19: note = siRNA antisense sequence
  source 1..19: mol_type = other RNA
gtatcttctatagctcata

SEQ ID NO: 61084 - RNA, 19 nt, synthetic construct
  misc_feature 1..19: note = siRNA sense sequence
  source 1..19: mol_type = other RNA
gagctatagaagataccat

SEQ ID NO: 61085 - RNA, 19 nt, synthetic construct
  misc_feature 1..19: note = siRNA antisense sequence
  source 1..19: mol_type = other RNA
atggtatcttctatagctc

SEQ ID NO: 61086 - RNA, 19 nt, synthetic construct
  misc_feature 1..19: note = siRNA sense sequence
  source 1..19: mol_type = other RNA
agctatagaagataccata

SEQ ID NO: 61087 - RNA, 19 nt, synthetic construct
  misc_feature 1..19: note = siRNA antisense sequence
  source 1..19: mol_type = other RNA
tatggtatcttctatagct

SEQ ID NO: 61088 - RNA, 19 nt, synthetic construct
  misc_feature 1..19: note = siRNA sense sequence
  source 1..19: mol_type = other RNA
gctatagaagataccataa

SEQ ID NO: 61089 - RNA, 19 nt, synthetic construct
  misc_feature 1..19: note = siRNA antisense sequence
  source 1..19: mol_type = other RNA
ttatggtatcttctatagc

SEQ ID NO: 61090 - RNA, 19 nt, synthetic construct
  misc_feature 1..19: note = siRNA sense sequence
  source 1..19: mol_type = other RNA
tagaagataccataatcac

SEQ ID NO: 61091 - RNA, 19 nt, synthetic construct
  misc_feature 1..19: note = siRNA antisense sequence
  source 1..19: mol_type = other RNA
gtgattatggtatcttcta

SEQ ID NO: 61092 - RNA, 19 nt, synthetic construct
  misc_feature 1..19: note = siRNA sense sequence
  source 1..19: mol_type = other RNA
agaagataccataatcaca

SEQ ID NO: 61093 - RNA, 19 nt, synthetic construct
  misc_feature 1..19: note = siRNA antisense sequence
  source 1..19: mol_type = other RNA
tgtgattatggtatcttct

SEQ ID NO: 61094 - RNA, 19 nt, synthetic construct
  misc_feature 1..19: note = siRNA sense sequence
  source 1..19: mol_type = other RNA
gaagataccataatcacac

SEQ ID NO: 61095 - RNA, 19 nt, synthetic construct
  misc_feature 1..19: note = siRNA antisense sequence
  source 1..19: mol_type = other RNA
gtgtgattatggtatcttc

SEQ ID NO: 61096 - RNA, 19 nt, synthetic construct
  misc_feature 1..19: note = siRNA sense sequence
  source 1..19: mol_type = other RNA
cacatcatttatatctgcc

SEQ ID NO: 61097 - RNA, 19 nt, synthetic construct
  misc_feature 1..19: note = siRNA antisense sequence
  source 1..19: mol_type = other RNA
ggcagatataaatgatgtg

SEQ ID NO: 61098 - RNA, 19 nt, synthetic construct
  misc_feature 1..19: note = siRNA sense sequence
  source 1..19: mol_type = other RNA
acatcatttatatctgcca

SEQ ID NO: 61099 - RNA, 19 nt, synthetic construct
  misc_feature 1..19: note = siRNA antisense sequence
  source 1..19: mol_type = other RNA
tggcagatataaatgatgt

SEQ ID NO: 61100 - RNA, 19 nt, synthetic construct
  misc_feature 1..19: note = siRNA sense sequence
  source 1..19: mol_type = other RNA
tttatatctgccaaattgc

SEQ ID NO: 61101 - RNA, 19 nt, synthetic construct
  misc_feature 1..19: note = siRNA antisense sequence
  source 1..19: mol_type = other RNA
gcaatttggcagatataaa

SEQ ID NO: 61102 - RNA, 19 nt, synthetic construct
  misc_feature 1..19: note = siRNA sense sequence
  source 1..19: mol_type = other RNA
ttatatctgccaaattgca

SEQ ID NO: 61103 - RNA, 19 nt, synthetic construct
  misc_feature 1..19: note = siRNA antisense sequence
  source 1..19: mol_type = other RNA
tgcaatttggcagatataa

SEQ ID NO: 61104 - RNA, 19 nt, synthetic construct
  misc_feature 1..19: note = siRNA sense sequence
  source 1..19: mol_type = other RNA
tatatctgccaaattgcat

SEQ ID NO: 61105 - RNA, 19 nt, synthetic construct
  misc_feature 1..19: note = siRNA antisense sequence
  source 1..19: mol_type = other RNA
atgcaatttggcagatata

SEQ ID NO: 61106 - RNA, 19 nt, synthetic construct
  misc_feature 1..19: note = siRNA sense sequence
  source 1..19: mol_type = other RNA
atatctgccaaattgcatt

SEQ ID NO: 61107 - RNA, 19 nt, synthetic construct
  misc_feature 1..19: note = siRNA antisense sequence
  source 1..19: mol_type = other RNA
aatgcaatttggcagatat

SEQ ID NO: 61108 - RNA, 19 nt, synthetic construct
  misc_feature 1..19: note = siRNA sense sequence
  source 1..19: mol_type = other RNA
actttcactggctgcccat

SEQ ID NO: 61109 - RNA, 19 nt, synthetic construct
  misc_feature 1..19: note = siRNA antisense sequence
  source 1..19: mol_type = other RNA
atgggcagccagtgaaagt

SEQ ID NO: 61110 - RNA, 19 nt, synthetic construct
  misc_feature 1..19: note = siRNA sense sequence
  source 1..19: mol_type = other RNA
ctttcactggctgcccatc

SEQ ID NO: 61111 - RNA, 19 nt, synthetic construct
  misc_feature 1..19: note = siRNA antisense sequence
  source 1..19: mol_type = other RNA
gatgggcagccagtgaaag

SEQ ID NO: 61112 - RNA, 19 nt, synthetic construct
  misc_feature 1..19: note = siRNA sense sequence
  source 1..19: mol_type = other RNA
tttcactggctgcccatca

SEQ ID NO: 61113 - RNA, 19 nt, synthetic construct
  misc_feature 1..19: note = siRNA antisense sequence
  source 1..19: mol_type = other RNA
tgatgggcagccagtgaaa

SEQ ID NO: 61114 - RNA, 19 nt, synthetic construct
  misc_feature 1..19: note = siRNA sense sequence
  source 1..19: mol_type = other RNA
ttcactggctgcccatcaa

SEQ ID NO: 61115 - RNA, 19 nt, synthetic construct
  misc_feature 1..19: note = siRNA antisense sequence
  source 1..19: mol_type = other RNA
ttgatgggcagccagtgaa

SEQ ID NO: 61116 - RNA, 19 nt, synthetic construct
  misc_feature 1..19: note = siRNA sense sequence
  source 1..19: mol_type = other RNA
tcactggctgcccatcaag

SEQ ID NO: 61117 - RNA, 19 nt, synthetic construct
  misc_feature 1..19: note = siRNA antisense sequence
  source 1..19: mol_type = other RNA
cttgatgggcagccagtga

SEQ ID NO: 61118 - RNA, 19 nt, synthetic construct
  misc_feature 1..19: note = siRNA sense sequence
  source 1..19: mol_type = other RNA
cactggctgcccatcaagg

SEQ ID NO: 61119 - RNA, 19 nt, synthetic construct
  misc_feature 1..19: note = siRNA antisense sequence
  source 1..19: mol_type = other RNA
ccttgatgggcagccagtg

SEQ ID NO: 61120 - RNA, 19 nt, synthetic construct
  misc_feature 1..19: note = siRNA sense sequence
  source 1..19: mol_type = other RNA
actggctgcccatcaaggt

SEQ ID NO: 61121 - RNA, 19 nt, synthetic construct
  misc_feature 1..19: note = siRNA antisense sequence
  source 1..19: mol_type = other RNA
accttgatgggcagccagt

SEQ ID NO: 61122 - RNA, 19 nt, synthetic construct
  misc_feature 1..19: note = siRNA sense sequence
  source 1..19: mol_type = other RNA
ctggctgcccatcaaggtc

SEQ ID NO: 61123 - RNA, 19 nt, synthetic construct
  misc_feature 1..19: note = siRNA antisense sequence
  source 1..19: mol_type = other RNA
gaccttgatgggcagccag

SEQ ID NO: 61124 - RNA, 19 nt, synthetic construct
  misc_feature 1..19: note = siRNA sense sequence
  source 1..19: mol_type = other RNA
ctgcccatcaaggtcaaat

SEQ ID NO: 61125 - RNA, 19 nt, synthetic construct
  misc_feature 1..19: note = siRNA antisense sequence
  source 1..19: mol_type = other RNA
atttgaccttgatgggcag

SEQ ID NO: 61126 - RNA, 19 nt, synthetic construct
  misc_feature 1..19: note = siRNA sense sequence
  source 1..19: mol_type = other RNA
tgcccatcaaggtcaaatg

SEQ ID NO: 61127 - RNA, 19 nt, synthetic construct
  misc_feature 1..19: note = siRNA antisense sequence
  source 1..19: mol_type = other RNA
catttgaccttgatgggca

SEQ ID NO: 61128 - RNA, 19 nt, synthetic construct
  misc_feature 1..19: note = siRNA sense sequence
  source 1..19: mol_type = other RNA
atgaatcattagatggact

SEQ ID NO: 61129 - RNA, 19 nt, synthetic construct
  misc_feature 1..19: note = siRNA antisense sequence
  source 1..19: mol_type = other RNA
agtccatctaatgattcat

SEQ ID NO: 61130 - RNA, 19 nt, synthetic construct
  misc_feature 1..19: note = siRNA sense sequence
  source 1..19: mol_type = other RNA
tgaatcattagatggactt

SEQ ID NO: 61131 - RNA, 19 nt, synthetic construct
  misc_feature 1..19: note = siRNA antisense sequence
  source 1..19: mol_type = other RNA
aagtccatctaatgattca

SEQ ID NO: 61132 - RNA, 19 nt, synthetic construct
  misc_feature 1..19: note = siRNA sense sequence
  source 1..19: mol_type = other RNA
gaatcattagatggactta

SEQ ID NO: 61133 - RNA, 19 nt, synthetic construct
  misc_feature 1..19: note = siRNA antisense sequence
  source 1..19: mol_type = other RNA
taagtccatctaatgattc

SEQ ID NO: 61134 - RNA, 19 nt, synthetic construct
  misc_feature 1..19: note = siRNA sense sequence
  source 1..19: mol_type = other RNA
tcattagatggacttaaag

SEQ ID NO: 61135 - RNA, 19 nt, synthetic construct
  misc_feature 1..19: note = siRNA antisense sequence
  source 1..19: mol_type = other RNA
ctttaagtccatctaatga

SEQ ID NO: 61136 - RNA, 19 nt, synthetic construct
  misc_feature 1..19: note = siRNA sense sequence
  source 1..19: mol_type = other RNA
cattagatggacttaaagt

SEQ ID NO: 61137 - RNA, 19 nt, synthetic construct
  misc_feature 1..19: note = siRNA antisense sequence
  source 1..19: mol_type = other RNA
actttaagtccatctaatg

SEQ ID NO: 61138 - RNA, 19 nt, synthetic construct
  misc_feature 1..19: note = siRNA sense sequence
  source 1..19: mol_type = other RNA
ttcaaatcagtcagtactt

SEQ ID NO: 61139 - RNA, 19 nt, synthetic construct
  misc_feature 1..19: note = siRNA antisense sequence
  source 1..19: mol_type = other RNA
aagtactgactgatttgaa

SEQ ID NO: 61140 - RNA, 19 nt, synthetic construct
  misc_feature 1..19: note = siRNA sense sequence
  source 1..19: mol_type = other RNA
tcaaatcagtcagtacttc

SEQ ID NO: 61141 - RNA, 19 nt, synthetic construct
  misc_feature 1..19: note = siRNA antisense sequence
  source 1..19: mol_type = other RNA
gaagtactgactgatttga

SEQ ID NO: 61142 - RNA, 19 nt, synthetic construct
  misc_feature 1..19: note = siRNA sense sequence
  source 1..19: mol_type = other RNA
caaatcagtcagtacttct

SEQ ID NO: 61143 - RNA, 19 nt, synthetic construct
  misc_feature 1..19: note = siRNA antisense sequence
  source 1..19: mol_type = other RNA
agaagtactgactgatttg

SEQ ID NO: 61144 - RNA, 19 nt, synthetic construct
  misc_feature 1..19: note = siRNA sense sequence
  source 1..19: mol_type = other RNA
aaatcagtcagtacttctg

SEQ ID NO: 61145 - RNA, 19 nt, synthetic construct
  misc_feature 1..19: note = siRNA antisense sequence
  source 1..19: mol_type = other RNA
cagaagtactgactgattt

SEQ ID NO: 61146 - RNA, 19 nt, synthetic construct
  misc_feature 1..19: note = siRNA sense sequence
  source 1..19: mol_type = other RNA
cagcaaaggctcaataagg

SEQ ID NO: 61147 - RNA, 19 nt, synthetic construct
  misc_feature 1..19: note = siRNA antisense sequence
  source 1..19: mol_type = other RNA
ccttattgagcctttgctg

SEQ ID NO: 61148 - RNA, 19 nt, synthetic construct
  misc_feature 1..19: note = siRNA sense sequence
  source 1..19: mol_type = other RNA
agcaaaggctcaataagga

SEQ ID NO: 61149 - RNA, 19 nt, synthetic construct
  misc_feature 1..19: note = siRNA antisense sequence
  source 1..19: mol_type = other RNA
tccttattgagcctttgct

SEQ ID NO: 61150 - RNA, 19 nt, synthetic construct
  misc_feature 1..19: note = siRNA sense sequence
  source 1..19: mol_type = other RNA
gcaaaggctcaataaggaa

SEQ ID NO: 61151 - RNA, 19 nt, synthetic construct
  misc_feature 1..19: note = siRNA antisense sequence
  source 1..19: mol_type = other RNA
ttccttattgagcctttgc

SEQ ID NO: 61152 - RNA, 19 nt, synthetic construct
  misc_feature 1..19: note = siRNA sense sequence
  source 1..19: mol_type = other RNA
aaatagtggtctaactttc

SEQ ID NO: 61153 - RNA, 19 nt, synthetic construct
  misc_feature 1..19: note = siRNA antisense sequence
  source 1..19: mol_type = other RNA
gaaagttagaccactattt

SEQ ID NO: 61154 - RNA, 19 nt, synthetic construct
  misc_feature 1..19: note = siRNA sense sequence
  source 1..19: mol_type = other RNA
aatagtggtctaactttct

SEQ ID NO: 61155 - RNA, 19 nt, synthetic construct
  misc_feature 1..19: note = siRNA antisense sequence
  source 1..19: mol_type = other RNA
agaaagttagaccactatt

SEQ ID NO: 61156 - RNA, 19 nt, synthetic construct
  misc_feature 1..19: note = siRNA sense sequence
  source 1..19: mol_type = other RNA
atagtggtctaactttctt

SEQ ID NO: 61157 - RNA, 19 nt, synthetic construct
  misc_feature 1..19: note = siRNA antisense sequence
  source 1..19: mol_type = other RNA
aagaaagttagaccactat

SEQ ID NO: 61158 - RNA, 19 nt, synthetic construct
  misc_feature 1..19: note = siRNA sense sequence
  source 1..19: mol_type = other RNA
tagtggtctaactttcttc

SEQ ID NO: 61159 - RNA, 19 nt, synthetic construct
  misc_feature 1..19: note = siRNA antisense sequence
  source 1..19: mol_type = other RNA
gaagaaagttagaccacta

SEQ ID NO: 61160 - RNA, 19 nt, synthetic construct
  misc_feature 1..19: note = siRNA sense sequence
  source 1..19: mol_type = other RNA
agtggtctaactttcttct

SEQ ID NO: 61161 - RNA, 19 nt, synthetic construct
  misc_feature 1..19: note = siRNA antisense sequence
  source 1..19: mol_type = other RNA
agaagaaagttagaccact

SEQ ID NO: 61162 - RNA, 19 nt, synthetic construct
  misc_feature 1..19: note = siRNA sense sequence
  source 1..19: mol_type = other RNA
gtggtctaactttcttcta

SEQ ID NO: 61163 - RNA, 19 nt, synthetic construct
  misc_feature 1..19: note = siRNA antisense sequence
  source 1..19: mol_type = other RNA
tagaagaaagttagaccac

SEQ ID NO: 61164 - RNA, 19 nt, synthetic construct
  misc_feature 1..19: note = siRNA sense sequence
  source 1..19: mol_type = other RNA
tggtctaactttcttctaa

SEQ ID NO: 61165 - RNA, 19 nt, synthetic construct
  misc_feature 1..19: note = siRNA antisense sequence
  source 1..19: mol_type = other RNA
ttagaagaaagttagacca

SEQ ID NO: 61166 - RNA, 19 nt, synthetic construct
  misc_feature 1..19: note = siRNA sense sequence
  source 1..19: mol_type = other RNA
ggtctaactttcttctaat

SEQ ID NO: 61167 - RNA, 19 nt, synthetic construct
  misc_feature 1..19: note = siRNA antisense sequence
  source 1..19: mol_type = other RNA
attagaagaaagttagacc

SEQ ID NO: 61168 - RNA, 19 nt, synthetic construct
  misc_feature 1..19: note = siRNA sense sequence
  source 1..19: mol_type = other RNA
aattatccactgacctgtc

SEQ ID NO: 61169 - RNA, 19 nt, synthetic construct
  misc_feature 1..19: note = siRNA antisense sequence
  source 1..19: mol_type = other RNA
gacaggtcagtggataatt

SEQ ID NO: 61170 - RNA, 19 nt, synthetic construct
  misc_feature 1..19: note = siRNA sense sequence
  source 1..19: mol_type = other RNA
attatccactgacctgtct

SEQ ID NO: 61171 - RNA, 19 nt, synthetic construct
  misc_feature 1..19: note = siRNA antisense sequence
  source 1..19: mol_type = other RNA
agacaggtcagtggataat

SEQ ID NO: 61172 - RNA, 19 nt, synthetic construct
  misc_feature 1..19: note = siRNA sense sequence
  source 1..19: mol_type = other RNA
ttatccactgacctgtctg

SEQ ID NO: 61173 - RNA, 19 nt, synthetic construct
  misc_feature 1..19: note = siRNA antisense sequence
  source 1..19: mol_type = other RNA
cagacaggtcagtggataa

SEQ ID NO: 61174 - RNA, 19 nt, synthetic construct
  misc_feature 1..19: note = siRNA sense sequence
  source 1..19: mol_type = other RNA
ttattcacagtgactagca

SEQ ID NO: 61175 - RNA, 19 nt, synthetic construct
  misc_feature 1..19: note = siRNA antisense sequence
  source 1..19: mol_type = other RNA
tgctagtcactgtgaataa

SEQ ID NO: 61176 - RNA, 19 nt, synthetic construct
  misc_feature 1..19: note = siRNA sense sequence
  source 1..19: mol_type = other RNA
attcacagtgactagcatt

SEQ ID NO: 61177 - RNA, 19 nt, synthetic construct
  misc_feature 1..19: note = siRNA antisense sequence
  source 1..19: mol_type = other RNA
aatgctagtcactgtgaat

SEQ ID NO: 61178 - RNA, 19 nt, synthetic construct
  misc_feature 1..19: note = siRNA sense sequence
  source 1..19: mol_type = other RNA
ttcacagtgactagcattg

SEQ ID NO: 61179 - RNA, 19 nt, synthetic construct
  misc_feature 1..19: note = siRNA antisense sequence
  source 1..19: mol_type = other RNA
caatgctagtcactgtgaa

SEQ ID NO: 61180 - RNA, 19 nt, synthetic construct
  misc_feature 1..19: note = siRNA sense sequence
  source 1..19: mol_type = other RNA
acagtgactagcattgtgc

SEQ ID NO: 61181 - RNA, 19 nt, synthetic construct
  misc_feature 1..19: note = siRNA antisense sequence
  source 1..19: mol_type = other RNA
gcacaatgctagtcactgt

SEQ ID NO: 61182 - RNA, 19 nt, synthetic construct
  misc_feature 1..19: note = siRNA sense sequence
  source 1..19: mol_type = other RNA
tgactagcattgtgcctgc

SEQ ID NO: 61183 - RNA, 19 nt, synthetic construct
  misc_feature 1..19: note = siRNA antisense sequence
  source 1..19: mol_type = other RNA
gcaggcacaatgctagtca

SEQ ID NO: 61184 - RNA, 19 nt, synthetic construct
  misc_feature 1..19: note = siRNA sense sequence
  source 1..19: mol_type = other RNA
gactagcattgtgcctgcc

SEQ ID NO: 61185 - RNA, 19 nt, synthetic construct
  misc_feature 1..19: note = siRNA antisense sequence
  source 1..19: mol_type = other RNA
ggcaggcacaatgctagtc

SEQ ID NO: 61186 - RNA, 19 nt, synthetic construct
  misc_feature 1..19: note = siRNA sense sequence
  source 1..19: mol_type = other RNA
actagcattgtgcctgcca

SEQ ID NO: 61187 - RNA, 19 nt, synthetic construct
  misc_feature 1..19: note = siRNA antisense sequence
  source 1..19: mol_type = other RNA
tggcaggcacaatgctagt

SEQ ID NO: 61188 - RNA, 19 nt, synthetic construct
  misc_feature 1..19: note = siRNA sense sequence
  source 1..19: mol_type = other RNA
gcattgtgcctgccatatt

SEQ ID NO: 61189 - RNA, 19 nt, synthetic construct
  misc_feature 1..19: note = siRNA antisense sequence
  source 1..19: mol_type = other RNA
aatatggcaggcacaatgc

SEQ ID NO: 61190 - RNA, 19 nt, synthetic construct
  misc_feature 1..19: note = siRNA sense sequence
  source 1..19: mol_type = other RNA
cattgtgcctgccatatta

SEQ ID NO: 61191 - RNA, 19 nt, synthetic construct
  misc_feature 1..19: note = siRNA antisense sequence
  source 1..19: mol_type = other RNA
taatatggcaggcacaatg

SEQ ID NO: 61192 - RNA, 19 nt, synthetic construct
  misc_feature 1..19: note = siRNA sense sequence
  source 1..19: mol_type = other RNA
tgcctgccatattataatc

SEQ ID NO: 61193 - RNA, 19 nt, synthetic construct
  misc_feature 1..19: note = siRNA antisense sequence
  source 1..19: mol_type = other RNA
gattataatatggcaggca

SEQ ID NO: 61194 - RNA, 19 nt, synthetic construct
  misc_feature 1..19: note = siRNA sense sequence
  source 1..19: mol_type = other RNA
cctgccatattataatcac

SEQ ID NO: 61195 - RNA, 19 nt, synthetic construct
  misc_feature 1..19: note = siRNA antisense sequence
  source 1..19: mol_type = other RNA
gtgattataatatggcagg

SEQ ID NO: 61196 - RNA, 19 nt, synthetic construct
  misc_feature 1..19: note = siRNA sense sequence
  source 1..19: mol_type = other RNA
ctgccatattataatcact

SEQ ID NO: 61197 - RNA, 19 nt, synthetic construct
  misc_feature 1..19: note = siRNA antisense sequence
  source 1..19: mol_type = other RNA
agtgattataatatggcag

SEQ ID NO: 61198 - RNA, 19 nt, synthetic construct
  misc_feature 1..19: note = siRNA sense sequence
  source 1..19: mol_type = other RNA
aattctgtatgttcaagtc

SEQ ID NO: 61199 - RNA, 19 nt, synthetic construct
  misc_feature 1..19: note = siRNA antisense sequence
  source 1..19: mol_type = other RNA
gacttgaacatacagaatt

SEQ ID NO: 61200 - RNA, 19 nt, synthetic construct
  misc_feature 1..19: note = siRNA sense sequence
  source 1..19: mol_type = other RNA
attctgtatgttcaagtca

SEQ ID NO: 61201 - RNA, 19 nt, synthetic construct
  misc_feature 1..19: note = siRNA antisense sequence
  source 1..19: mol_type = other RNA
tgacttgaacatacagaat

SEQ ID NO: 61202 - RNA, 19 nt, synthetic construct
  misc_feature 1..19: note = siRNA sense sequence
  source 1..19: mol_type = other RNA
ttctgtatgttcaagtcaa

SEQ ID NO: 61203 - RNA, 19 nt, synthetic construct
  misc_feature 1..19: note = siRNA antisense sequence
  source 1..19: mol_type = other RNA
ttgacttgaacatacagaa

SEQ ID NO: 61204 - RNA, 19 nt, synthetic construct
  misc_feature 1..19: note = siRNA sense sequence
  source 1..19: mol_type = other RNA
tctgtatgttcaagtcaac

SEQ ID NO: 61205 - RNA, 19 nt, synthetic construct
  misc_feature 1..19: note = siRNA antisense sequence
  source 1..19: mol_type = other RNA
gttgacttgaacatacaga

SEQ ID NO: 61206 - RNA, 19 nt, synthetic construct
  misc_feature 1..19: note = siRNA sense sequence
  source 1..19: mol_type = other RNA
ctgtatgttcaagtcaact

SEQ ID NO: 61207 - RNA, 19 nt, synthetic construct
  misc_feature 1..19: note = siRNA antisense sequence
  source 1..19: mol_type = other RNA
agttgacttgaacatacag

SEQ ID NO: 61208 - RNA, 19 nt, synthetic construct
  misc_feature 1..19: note = siRNA sense sequence
  source 1..19: mol_type = other RNA
atgttcaagtcaactcaac

SEQ ID NO: 61209 - RNA, 19 nt, synthetic construct
  misc_feature 1..19: note = siRNA antisense sequence
  source 1..19: mol_type = other RNA
gttgagttgacttgaacat

SEQ ID NO: 61210 - RNA, 19 nt, synthetic construct
  misc_feature 1..19: note = siRNA sense sequence
  source 1..19: mol_type = other RNA
attgagttagtcactgtaa

SEQ ID NO: 61211 - RNA, 19 nt, synthetic construct
  misc_feature 1..19: note = siRNA antisense sequence
  source 1..19: mol_type = other RNA
ttacagtgactaactcaat

SEQ ID NO: 61212 - RNA, 19 nt, synthetic construct
  misc_feature 1..19: note = siRNA sense sequence
  source 1..19: mol_type = other RNA
ttgagttagtcactgtaag

SEQ ID NO: 61213 - RNA, 19 nt, synthetic construct
  misc_feature 1..19: note = siRNA antisense sequence
  source 1..19: mol_type = other RNA
cttacagtgactaactcaa

SEQ ID NO: 61214 - RNA, 19 nt, synthetic construct
  misc_feature 1..19: note = siRNA sense sequence
  source 1..19: mol_type = other RNA
tgagttagtcactgtaagg

SEQ ID NO: 61215 - RNA, 19 nt, synthetic construct
  misc_feature 1..19: note = siRNA antisense sequence
  source 1..19: mol_type = other RNA
ccttacagtgactaactca

SEQ ID NO: 61216 - RNA, 19 nt, synthetic construct
  misc_feature 1..19: note = siRNA sense sequence
  source 1..19: mol_type = other RNA
gagttagtcactgtaagga

SEQ ID NO: 61217 - RNA, 19 nt, synthetic construct
  misc_feature 1..19: note = siRNA antisense sequence
  source 1..19: mol_type = other RNA
tccttacagtgactaactc

SEQ ID NO: 61218 - RNA, 19 nt, synthetic construct
  misc_feature 1..19: note = siRNA sense sequence
  source 1..19: mol_type = other RNA
agttagtcactgtaaggaa

SEQ ID NO: 61219 - RNA, 19 nt, synthetic construct
  misc_feature 1..19: note = siRNA antisense sequence
  source 1..19: mol_type = other RNA
ttccttacagtgactaact

SEQ ID NO: 61220 - RNA, 19 nt, synthetic construct
  misc_feature 1..19: note = siRNA sense sequence
  source 1..19: mol_type = other RNA
gttagtcactgtaaggaat

SEQ ID NO: 61221 - RNA, 19 nt, synthetic construct
  misc_feature 1..19: note = siRNA antisense sequence
  source 1..19: mol_type = other RNA
attccttacagtgactaac

SEQ ID NO: 61222 - RNA, 19 nt, synthetic construct
  misc_feature 1..19: note = siRNA sense sequence
  source 1..19: mol_type = other RNA
ttagtcactgtaaggaata

SEQ ID NO: 61223 - RNA, 19 nt, synthetic construct
  misc_feature 1..19: note = siRNA antisense sequence
  source 1..19: mol_type = other RNA
tattccttacagtgactaa

SEQ ID NO: 61224 - RNA, 19 nt, synthetic construct
  misc_feature 1..19: note = siRNA sense sequence
  source 1..19: mol_type = other RNA
agtcactgtaaggaatata

SEQ ID NO: 61225 - RNA, 19 nt, synthetic construct
  misc_feature 1..19: note = siRNA antisense sequence
  source 1..19: mol_type = other RNA
tatattccttacagtgact

SEQ ID NO: 61226 - RNA, 19 nt, synthetic construct
  misc_feature 1..19: note = siRNA sense sequence
  source 1..19: mol_type = other RNA
aaaattactaagggcatga

SEQ ID NO: 61227 - RNA, 19 nt, synthetic construct
  misc_feature 1..19: note = siRNA antisense sequence
  source 1..19: mol_type = other RNA
tcatgcccttagtaatttt

SEQ ID NO: 61228 - RNA, 19 nt, synthetic construct
  misc_feature 1..19: note = siRNA sense sequence
  source 1..19: mol_type = other RNA
aaattactaagggcatgaa

SEQ ID NO: 61229 - RNA, 19 nt, synthetic construct
  misc_feature 1..19: note = siRNA antisense sequence
  source 1..19: mol_type = other RNA
ttcatgcccttagtaattt

SEQ ID NO: 61230 - RNA, 19 nt, synthetic construct
  misc_feature 1..19: note = siRNA sense sequence
  source 1..19: mol_type = other RNA
aactcctcatagggtaagt

SEQ ID NO: 61231 - RNA, 19 nt, synthetic construct
  misc_feature 1..19: note = siRNA antisense sequence
  source 1..19: mol_type = other RNA
acttaccctatgaggagtt

SEQ ID NO: 61232 - RNA, 19 nt, synthetic construct
  misc_feature 1..19: note = siRNA sense sequence
  source 1..19: mol_type = other RNA
actcctcatagggtaagta

SEQ ID NO: 61233 - RNA, 19 nt, synthetic construct
  misc_feature 1..19: note = siRNA antisense sequence
  source 1..19: mol_type = other RNA
tacttaccctatgaggagt

SEQ ID NO: 61234 - RNA, 19 nt, synthetic construct
  misc_feature 1..19: note = siRNA sense sequence
  source 1..19: mol_type = other RNA
ctcctcatagggtaagtat

SEQ ID NO: 61235 - RNA, 19 nt, synthetic construct
  misc_feature 1..19: note = siRNA antisense sequence
  source 1..19: mol_type = other RNA
atacttaccctatgaggag

SEQ ID NO: 61236 - RNA, 19 nt, synthetic construct
  misc_feature 1..19: note = siRNA sense sequence
  source 1..19: mol_type = other RNA
gggttgagtctagtataaa

SEQ ID NO: 61237 - RNA, 19 nt, synthetic construct
  misc_feature 1..19: note = siRNA antisense sequence
  source 1..19: mol_type = other RNA
tttatactagactcaaccc

SEQ ID NO: 61238 - RNA, 19 nt, synthetic construct
  misc_feature 1..19: note = siRNA sense sequence
  source 1..19: mol_type = other RNA
ggttgagtctagtataaaa

SEQ ID NO: 61239 - RNA, 19 nt, synthetic construct
  misc_feature 1..19: note = siRNA antisense sequence
  source 1..19: mol_type = other RNA
ttttatactagactcaacc

SEQ ID NO: 61240 - RNA, 19 nt, synthetic construct
  misc_feature 1..19: note = siRNA sense sequence
  source 1..19: mol_type = other RNA
aaattattgtaacctggga

SEQ ID NO: 61241 - RNA, 19 nt, synthetic construct
  misc_feature 1..19: note = siRNA antisense sequence
  source 1..19: mol_type = other RNA
tcccaggttacaataattt

SEQ ID NO: 61242 - RNA, 19 nt, synthetic construct
  misc_feature 1..19: note = siRNA sense sequence
  source 1..19: mol_type = other RNA
attattgtaacctgggata

SEQ ID NO: 61243 - RNA, 19 nt, synthetic construct
  misc_feature 1..19: note = siRNA antisense sequence
  source 1..19: mol_type = other RNA
tatcccaggttacaataat

SEQ ID NO: 61244 - RNA, 19 nt, synthetic construct
  misc_feature 1..19: note = siRNA sense sequence
  source 1..19: mol_type = other RNA
ttattgtaacctgggatag

SEQ ID NO: 61245 - RNA, 19 nt, synthetic construct
  misc_feature 1..19: note = siRNA antisense sequence
  source 1..19: mol_type = other RNA
ctatcccaggttacaataa

SEQ ID NO: 61246 - RNA, 19 nt, synthetic construct
  misc_feature 1..19: note = siRNA sense sequence
  source 1..19: mol_type = other RNA
tattgtaacctgggataga

SEQ ID NO: 61247 - RNA, 19 nt, synthetic construct
  misc_feature 1..19: note = siRNA antisense sequence
  source 1..19: mol_type = other RNA
tctatcccaggttacaata

SEQ ID NO: 61248 - RNA, 19 nt, synthetic construct
  misc_feature 1..19: note = siRNA sense sequence
  source 1..19: mol_type = other RNA
attgtaacctgggatagaa

SEQ ID NO: 61249 - RNA, 19 nt, synthetic construct
  misc_feature 1..19: note = siRNA antisense sequence
  source 1..19: mol_type = other RNA
ttctatcccaggttacaat

SEQ ID NO: 61250 - RNA, 19 nt, synthetic construct
  misc_feature 1..19: note = siRNA sense sequence
  source 1..19: mol_type = other RNA
ttgtaacctgggatagaat

SEQ ID NO: 61251 - RNA, 19 nt, synthetic construct
  misc_feature 1..19: note = siRNA antisense sequence
  source 1..19: mol_type = other RNA
attctatcccaggttacaa

SEQ ID NO: 61252 - RNA, 19 nt, synthetic construct
  misc_feature 1..19: note = siRNA sense sequence
  source 1..19: mol_type = other RNA
tgtaacctgggatagaata

SEQ ID NO: 61253 - RNA, 19 nt, synthetic construct
  misc_feature 1..19: note = siRNA antisense sequence
  source 1..19: mol_type = other RNA
tattctatcccaggttaca

SEQ ID NO: 61254 - RNA, 19 nt, synthetic construct
  misc_feature 1..19: note = siRNA sense sequence
  source 1..19: mol_type = other RNA
taacctgggatagaataaa

SEQ ID NO: 61255 - RNA, 19 nt, synthetic construct
  misc_feature 1..19: note = siRNA antisense sequence
  source 1..19: mol_type = other RNA
tttattctatcccaggtta

SEQ ID NO: 61256 - RNA, 19 nt, synthetic construct
  misc_feature 1..19: note = siRNA sense sequence
  source 1..19: mol_type = other RNA
aacctgggatagaataaaa

SEQ ID NO: 61257 - RNA, 19 nt, synthetic construct
  misc_feature 1..19: note = siRNA antisense sequence
  source 1..19: mol_type = other RNA
ttttattctatcccaggtt

SEQ ID NO: 61258 - RNA, 19 nt, synthetic construct
  misc_feature 1..19: note = siRNA sense sequence
  source 1..19: mol_type = other RNA
taatatctacttggcaatg

SEQ ID NO: 61259 - RNA, 19 nt, synthetic construct
  misc_feature 1..19: note = siRNA antisense sequence
  source 1..19: mol_type = other RNA
cattgccaagtagatatta

SEQ ID NO: 61260 - RNA, 19 nt, synthetic construct
  misc_feature 1..19: note = siRNA sense sequence
  source 1..19: mol_type = other RNA
aatatctacttggcaatgg

SEQ ID NO: 61261 - RNA, 19 nt, synthetic construct
  misc_feature 1..19: note = siRNA antisense sequence
  source 1..19: mol_type = other RNA
ccattgccaagtagatatt

SEQ ID NO: 61262 - RNA, 19 nt, synthetic construct
  misc_feature 1..19: note = siRNA sense sequence
  source 1..19: mol_type = other RNA
tatctacttggcaatggga

SEQ ID NO: 61263 - RNA, 19 nt, synthetic construct
  misc_feature 1..19: note = siRNA antisense sequence
  source 1..19: mol_type = other RNA
tcccattgccaagtagata

SEQ ID NO: 61264 - RNA, 19 nt, synthetic construct
  misc_feature 1..19: note = siRNA sense sequence
  source 1..19: mol_type = other RNA
aaagaccttgaagggtaga

SEQ ID NO: 61265 - RNA, 19 nt, synthetic construct
  misc_feature 1..19: note = siRNA antisense sequence
  source 1..19: mol_type = other RNA
tctacccttcaaggtcttt

SEQ ID NO: 61266 - RNA, 19 nt, synthetic construct
  misc_feature 1..19: note = siRNA sense sequence
  source 1..19: mol_type = other RNA
agaccttgaagggtagata

SEQ ID NO: 61267 - RNA, 19 nt, synthetic construct
  misc_feature 1..19: note = siRNA antisense sequence
  source 1..19: mol_type = other RNA
tatctacccttcaaggtct

SEQ ID NO: 61268 - RNA, 19 nt, synthetic construct
  misc_feature 1..19: note = siRNA sense sequence
  source 1..19: mol_type = other RNA
gaccttgaagggtagatag

SEQ ID NO: 61269 - RNA, 19 nt, synthetic construct
  misc_feature 1..19: note = siRNA antisense sequence
  source 1..19: mol_type = other RNA
ctatctacccttcaaggtc

SEQ ID NO: 61270 - RNA, 19 nt, synthetic construct
  misc_feature 1..19: note = siRNA sense sequence
  source 1..19: mol_type = other RNA
ccttgaagggtagatagca

SEQ ID NO: 61271 - RNA, 19 nt, synthetic construct
  misc_feature 1..19: note = siRNA antisense sequence
  source 1..19: mol_type = other RNA
tgctatctacccttcaagg

SEQ ID NO: 61272 - RNA, 19 nt, synthetic construct
  misc_feature 1..19: note = siRNA sense sequence
  source 1..19: mol_type = other RNA
cttgaagggtagatagcat

SEQ ID NO: 61273 - RNA, 19 nt, synthetic construct
  misc_feature 1..19: note = siRNA antisense sequence
  source 1..19: mol_type = other RNA
atgctatctacccttcaag

SEQ ID NO: 61274 - RNA, 19 nt, synthetic construct
  misc_feature 1..19: note = siRNA sense sequence
  source 1..19: mol_type = other RNA
ttgaagggtagatagcatt

SEQ ID NO: 61275 - RNA, 19 nt, synthetic construct
  misc_feature 1..19: note = siRNA antisense sequence
  source 1..19: mol_type = other RNA
aatgctatctacccttcaa

SEQ ID NO: 61276 - RNA, 19 nt, synthetic construct
  misc_feature 1..19: note = siRNA sense sequence
  source 1..19: mol_type = other RNA
tgaagggtagatagcattt

SEQ ID NO: 61277 - RNA, 19 nt, synthetic construct
  misc_feature 1..19: note = siRNA antisense sequence
  source 1..19: mol_type = other RNA
aaatgctatctacccttca

SEQ ID NO: 61278 - RNA, 19 nt, synthetic construct
  misc_feature 1..19: note = siRNA sense sequence
  source 1..19: mol_type = other RNA
gaagggtagatagcatttc

SEQ ID NO: 61279 - RNA, 19 nt, synthetic construct
  misc_feature 1..19: note = siRNA antisense sequence
  source 1..19: mol_type = other RNA
gaaatgctatctacccttc

SEQ ID NO: 61280 - RNA, 19 nt, synthetic construct
  misc_feature 1..19: note = siRNA sense sequence
  source 1..19: mol_type = other RNA
ggtagatagcatttcacag

SEQ ID NO: 61281 - RNA, 19 nt, synthetic construct
  misc_feature 1..19: note = siRNA antisense sequence
  source 1..19: mol_type = other RNA
ctgtgaaatgctatctacc

SEQ ID NO: 61282 - RNA, 19 nt, synthetic construct
  misc_feature 1..19: note = siRNA sense sequence
  source 1..19: mol_type = other RNA
gtagatagcatttcacaga

SEQ ID NO: 61283 - RNA, 19 nt, synthetic construct
  misc_feature 1..19: note = siRNA antisense sequence
  source 1..19: mol_type = other RNA
tctgtgaaatgctatctac

SEQ ID NO: 61284 - RNA, 19 nt, synthetic construct
  misc_feature 1..19: note = siRNA sense sequence
  source 1..19: mol_type = other RNA
tagatagcatttcacagag

SEQ ID NO: 61285 - RNA, 19 nt, synthetic construct
  misc_feature 1..19: note = siRNA antisense sequence
  source 1..19: mol_type = other RNA
ctctgtgaaatgctatcta

SEQ ID NO: 61286 - RNA, 19 nt, synthetic construct
  misc_feature 1..19: note = siRNA sense sequence
  source 1..19: mol_type = other RNA
agaggtcactgaatagcac

SEQ ID NO: 61287 - RNA, 19 nt, synthetic construct
  misc_feature 1..19: note = siRNA antisense sequence
  source 1..19: mol_type = other RNA
gtgctattcagtgacctct

SEQ ID NO: 61288 - RNA, 19 nt, synthetic construct
  misc_feature 1..19: note = siRNA sense sequence
  source 1..19: mol_type = other RNA
gtcactgaatagcaccagg

SEQ ID NO: 61289 - RNA, 19 nt, synthetic construct
  misc_feature 1..19: note = siRNA antisense sequence
  source 1..19: mol_type = other RNA
cctggtgctattcagtgac

SEQ ID NO: 61290 - RNA, 19 nt, synthetic construct
  misc_feature 1..19: note = siRNA sense sequence
  source 1..19: mol_type = other RNA
tcactgaatagcaccaggt

SEQ ID NO: 61291 - RNA, 19 nt, synthetic construct
  misc_feature 1..19: note = siRNA antisense sequence
  source 1..19: mol_type = other RNA
acctggtgctattcagtga

SEQ ID NO: 61292 - RNA, 19 nt, synthetic construct
  misc_feature 1..19: note = siRNA sense sequence
  source 1..19: mol_type = other RNA
cactgaatagcaccaggtg

SEQ ID NO: 61293 - RNA, 19 nt, synthetic construct
  misc_feature 1..19: note = siRNA antisense sequence
  source 1..19: mol_type = other RNA
cacctggtgctattcagtg

SEQ ID NO: 61294 - RNA, 19 nt, synthetic construct
  misc_feature 1..19: note = siRNA sense sequence
  source 1..19: mol_type = other RNA
actgaatagcaccaggtgg

SEQ ID NO: 61295 - RNA, 19 nt, synthetic construct
  misc_feature 1..19: note = siRNA antisense sequence
  source 1..19: mol_type = other RNA
ccacctggtgctattcagt

SEQ ID NO: 61296 - RNA, 19 nt, synthetic construct
  misc_feature 1..19: note = siRNA sense sequence
  source 1..19: mol_type = other RNA
ctgaatagcaccaggtgga

SEQ ID NO: 61297 - RNA, 19 nt, synthetic construct
  misc_feature 1..19: note = siRNA antisense sequence
  source 1..19: mol_type = other RNA
tccacctggtgctattcag

SEQ ID NO: 61298 - RNA, 19 nt, synthetic construct
  misc_feature 1..19: note = siRNA sense sequence
  source 1..19: mol_type = other RNA
tgaatagcaccaggtggag

SEQ ID NO: 61299 - RNA, 19 nt, synthetic construct
  misc_feature 1..19: note = siRNA antisense sequence
  source 1..19: mol_type = other RNA
ctccacctggtgctattca

SEQ ID NO: 61300 - RNA, 19 nt, synthetic construct
  misc_feature 1..19: note = siRNA sense sequence
  source 1..19: mol_type = other RNA
gaatagcaccaggtggagc

SEQ ID NO: 61301 - RNA, 19 nt, synthetic construct
  misc_feature 1..19: note = siRNA antisense sequence
  source 1..19: mol_type = other RNA
gctccacctggtgctattc

SEQ ID NO: 61302 - RNA, 19 nt, synthetic construct
  misc_feature 1..19: note = siRNA sense sequence
  source 1..19: mol_type = other RNA
aatagcaccaggtggagca

SEQ ID NO: 61303 - RNA, 19 nt, synthetic construct
  misc_feature 1..19: note = siRNA antisense sequence
  source 1..19: mol_type = other RNA
tgctccacctggtgctatt

SEQ ID NO: 61304 - RNA, 19 nt, synthetic construct
  misc_feature 1..19: note = siRNA sense sequence
  source 1..19: mol_type = other RNA
tagcaccaggtggagcatt

SEQ ID NO: 61305 - RNA, 19 nt, synthetic construct
  misc_feature 1..19: note = siRNA antisense sequence
  source 1..19: mol_type = other RNA
aatgctccacctggtgcta

SEQ ID NO: 61306 - RNA, 19 nt, synthetic construct
  misc_feature 1..19: note = siRNA sense sequence
  source 1..19: mol_type = other RNA
agcaccaggtggagcattt

SEQ ID NO: 61307 - RNA, 19 nt, synthetic construct
  misc_feature 1..19: note = siRNA antisense sequence
  source 1..19: mol_type = other RNA
aaatgctccacctggtgct

SEQ ID NO: 61308 - RNA, 19 nt, synthetic construct
  misc_feature 1..19: note = siRNA sense sequence
  source 1..19: mol_type = other RNA
gcaccaggtggagcatttc

SEQ ID NO: 61309 - RNA, 19 nt, synthetic construct
  misc_feature 1..19: note = siRNA antisense sequence
  source 1..19: mol_type = other RNA
gaaatgctccacctggtgc

SEQ ID NO: 61310 - RNA, 19 nt, synthetic construct
  misc_feature 1..19: note = siRNA sense sequence
  source 1..19: mol_type = other RNA
caggtggagcatttcaggc

SEQ ID NO: 61311 - RNA, 19 nt, synthetic construct
  misc_feature 1..19: note = siRNA antisense sequence
  source 1..19: mol_type = other RNA
gcctgaaatgctccacctg

SEQ ID NO: 61312 - RNA, 19 nt, synthetic construct
  misc_feature 1..19: note = siRNA sense sequence
  source 1..19: mol_type = other RNA
tggagcatttcaggcaaaa

SEQ ID NO: 61313 - RNA, 19 nt, synthetic construct
  misc_feature 1..19: note = siRNA antisense sequence
  source 1..19: mol_type = other RNA
ttttgcctgaaatgctcca

SEQ ID NO: 61314 - RNA, 19 nt, synthetic construct
  misc_feature 1..19: note = siRNA sense sequence
  source 1..19: mol_type = other RNA
ttcaggcaaaatatatagc

SEQ ID NO: 61315 - RNA, 19 nt, synthetic construct
  misc_feature 1..19: note = siRNA antisense sequence
  source 1..19: mol_type = other RNA
gctatatattttgcctgaa

SEQ ID NO: 61316 - RNA, 19 nt, synthetic construct
  misc_feature 1..19: note = siRNA sense sequence
  source 1..19: mol_type = other RNA
tcaggcaaaatatatagct

SEQ ID NO: 61317 - RNA, 19 nt, synthetic construct
  misc_feature 1..19: note = siRNA antisense sequence
  source 1..19: mol_type = other RNA
agctatatattttgcctga

SEQ ID NO: 61318 - RNA, 19 nt, synthetic construct
  misc_feature 1..19: note = siRNA sense sequence
  source 1..19: mol_type = other RNA
caggcaaaatatatagctt

SEQ ID NO: 61319 - RNA, 19 nt, synthetic construct
  misc_feature 1..19: note = siRNA antisense sequence
  source 1..19: mol_type = other RNA
aagctatatattttgcctg

SEQ ID NO: 61320 - RNA, 19 nt, synthetic construct
  misc_feature 1..19: note = siRNA sense sequence
  source 1..19: mol_type = other RNA
aggcaaaatatatagcttg

SEQ ID NO: 61321 - RNA, 19 nt, synthetic construct
  misc_feature 1..19: note = siRNA antisense sequence
  source 1..19: mol_type = other RNA
caagctatatattttgcct

SEQ ID NO: 61322 - RNA, 19 nt, synthetic construct
  misc_feature 1..19: note = siRNA sense sequence
  source 1..19: mol_type = other RNA
ggcaaaatatatagcttga

SEQ ID NO: 61323 - RNA, 19 nt, synthetic construct
  misc_feature 1..19: note = siRNA antisense sequence
  source 1..19: mol_type = other RNA
tcaagctatatattttgcc

SEQ ID NO: 61324 - RNA, 19 nt, synthetic construct
  misc_feature 1..19: note = siRNA sense sequence
  source 1..19: mol_type = other RNA
aggttatcaattttagctg

SEQ ID NO: 61325 - RNA, 19 nt, synthetic construct
  misc_feature 1..19: note = siRNA antisense sequence
  source 1..19: mol_type = other RNA
cagctaaaattgataacct

SEQ ID NO: 61326 - RNA, 19 nt, synthetic construct
  misc_feature 1..19: note = siRNA sense sequence
  source 1..19: mol_type = other RNA
ggttatcaattttagctga

SEQ ID NO: 61327 - RNA, 19 nt, synthetic construct
  misc_feature 1..19: note = siRNA antisense sequence
  source 1..19: mol_type = other RNA
tcagctaaaattgataacc

SEQ ID NO: 61328 - RNA, 19 nt, synthetic construct
  misc_feature 1..19: note = siRNA sense sequence
  source 1..19: mol_type = other RNA
acagggagtgtgcattcta

SEQ ID NO: 61329 - RNA, 19 nt, synthetic construct
  misc_feature 1..19: note = siRNA antisense sequence
  source 1..19: mol_type = other RNA
tagaatgcacactccctgt

SEQ ID NO: 61330 - RNA, 19 nt, synthetic construct
  misc_feature 1..19: note = siRNA sense sequence
  source 1..19: mol_type = other RNA
cagggagtgtgcattctat

SEQ ID NO: 61331 - RNA, 19 nt, synthetic construct
  misc_feature 1..19: note = siRNA antisense sequence
  source 1..19: mol_type = other RNA
atagaatgcacactccctg

SEQ ID NO: 61332 - RNA, 19 nt, synthetic construct
  misc_feature 1..19: note = siRNA sense sequence
  source 1..19: mol_type = other RNA
agggagtgtgcattctatc

SEQ ID NO: 61333 - RNA, 19 nt, synthetic construct
  misc_feature 1..19: note = siRNA antisense sequence
  source 1..19: mol_type = other RNA
gatagaatgcacactccct

SEQ ID NO: 61334 - RNA, 19 nt, synthetic construct
  misc_feature 1..19: note = siRNA sense sequence
  source 1..19: mol_type = other RNA
gggagtgtgcattctatca

SEQ ID NO: 61335 - RNA, 19 nt, synthetic construct
  misc_feature 1..19: note = siRNA antisense sequence
  source 1..19: mol_type = other RNA
tgatagaatgcacactccc

SEQ ID NO: 61336 - RNA, 19 nt, synthetic construct
  misc_feature 1..19: note = siRNA sense sequence
  source 1..19: mol_type = other RNA
ggagtgtgcattctatcat

SEQ ID NO: 61337 - RNA, 19 nt, synthetic construct
  misc_feature 1..19: note = siRNA antisense sequence
  source 1..19: mol_type = other RNA
atgatagaatgcacactcc

SEQ ID NO: 61338 - RNA, 19 nt, synthetic construct
  misc_feature 1..19: note = siRNA sense sequence
  source 1..19: mol_type = other RNA
gagtgtgcattctatcata

SEQ ID NO: 61339 - RNA, 19 nt, synthetic construct
  misc_feature 1..19: note = siRNA antisense sequence
  source 1..19: mol_type = other RNA
tatgatagaatgcacactc

SEQ ID NO: 61340 - RNA, 19 nt, synthetic construct
  misc_feature 1..19: note = siRNA sense sequence
  source 1..19: mol_type = other RNA
agtgtgcattctatcatat

SEQ ID NO: 61341 - RNA, 19 nt, synthetic construct
  misc_feature 1..19: note = siRNA antisense sequence
  source 1..19: mol_type = other RNA
atatgatagaatgcacact

SEQ ID NO: 61342 - RNA, 19 nt, synthetic construct
  misc_feature 1..19: note = siRNA sense sequence
  source 1..19: mol_type = other RNA
gtgtgcattctatcatatt

SEQ ID NO: 61343 - RNA, 19 nt, synthetic construct
  misc_feature 1..19: note = siRNA antisense sequence
  source 1..19: mol_type = other RNA
aatatgatagaatgcacac

SEQ ID NO: 61344 - RNA, 19 nt, synthetic construct
  misc_feature 1..19: note = siRNA sense sequence
  source 1..19: mol_type = other RNA
gtgcattctatcatattac

SEQ ID NO: 61345 - RNA, 19 nt, synthetic construct
  misc_feature 1..19: note = siRNA antisense sequence
  source 1..19: mol_type = other RNA
gtaatatgatagaatgcac

SEQ ID NO: 61346 - RNA, 19 nt, synthetic construct
  misc_feature 1..19: note = siRNA sense sequence
  source 1..19: mol_type = other RNA
tcagtcaaggtattatttc

SEQ ID NO: 61347 - RNA, 19 nt, synthetic construct
  misc_feature 1..19: note = siRNA antisense sequence
  source 1..19: mol_type = other RNA
gaaataataccttgactga

SEQ ID NO: 61348 - RNA, 19 nt, synthetic construct
  misc_feature 1..19: note = siRNA sense sequence
  source 1..19: mol_type = other RNA
agaggtaaagtcatctgta

SEQ ID NO: 61349 - RNA, 19 nt, synthetic construct
  misc_feature 1..19: note = siRNA antisense sequence
  source 1..19: mol_type = other RNA
tacagatgactttacctct

SEQ ID NO: 61350 - RNA, 19 nt, synthetic construct
  misc_feature 1..19: note = siRNA sense sequence
  source 1..19: mol_type = other RNA
gaggtaaagtcatctgtac

SEQ ID NO: 61351 - RNA, 19 nt, synthetic construct
  misc_feature 1..19: note = siRNA antisense sequence
  source 1..19: mol_type = other RNA
gtacagatgactttacctc

SEQ ID NO: 61352 - RNA, 19 nt, synthetic construct
  misc_feature 1..19: note = siRNA sense sequence
  source 1..19: mol_type = other RNA
aaagtcatctgtacagagc

SEQ ID NO: 61353 - RNA, 19 nt, synthetic construct
  misc_feature 1..19: note = siRNA antisense sequence
  source 1..19: mol_type = other RNA
gctctgtacagatgacttt

SEQ ID NO: 61354 - RNA, 19 nt, synthetic construct
  misc_feature 1..19: note = siRNA sense sequence
  source 1..19: mol_type = other RNA
aagtcatctgtacagagct

SEQ ID NO: 61355 - RNA, 19 nt, synthetic construct
  misc_feature 1..19: note = siRNA antisense sequence
  source 1..19: mol_type = other RNA
agctctgtacagatgactt

SEQ ID NO: 61356 - RNA, 19 nt, synthetic construct
  misc_feature 1..19: note = siRNA sense sequence
  source 1..19: mol_type = other RNA
agtcatctgtacagagctg

SEQ ID NO: 61357 - RNA, 19 nt, synthetic construct
  misc_feature 1..19: note = siRNA antisense sequence
  source 1..19: mol_type = other RNA
cagctctgtacagatgact

SEQ ID NO: 61358 - RNA, 19 nt, synthetic construct
  misc_feature 1..19: note = siRNA sense sequence
  source 1..19: mol_type = other RNA
gtcatctgtacagagctgc

SEQ ID NO: 61359 - RNA, 19 nt, synthetic construct
  misc_feature 1..19: note = siRNA antisense sequence
  source 1..19: mol_type = other RNA
gcagctctgtacagatgac

SEQ ID NO: 61360 - RNA, 19 nt, synthetic construct
  misc_feature 1..19: note = siRNA sense sequence
  source 1..19: mol_type = other RNA
gtacagagctgctgcttat

SEQ ID NO: 61361 - RNA, 19 nt, synthetic construct
  misc_feature 1..19: note = siRNA antisense sequence
  source 1..19: mol_type = other RNA
ataagcagcagctctgtac

SEQ ID NO: 61362 - RNA, 19 nt, synthetic construct
  misc_feature 1..19: note = siRNA sense sequence
  source 1..19: mol_type = other RNA
tacagagctgctgcttatg

SEQ ID NO: 61363 - RNA, 19 nt, synthetic construct
  misc_feature 1..19: note = siRNA antisense sequence
  source 1..19: mol_type = other RNA
cataagcagcagctctgta

SEQ ID NO: 61364 - RNA, 19 nt, synthetic construct
  misc_feature 1..19: note = siRNA sense sequence
  source 1..19: mol_type = other RNA
acagagctgctgcttatgg

SEQ ID NO: 61365 - RNA, 19 nt, synthetic construct
  misc_feature 1..19: note = siRNA antisense sequence
  source 1..19: mol_type = other RNA
ccataagcagcagctctgt

SEQ ID NO: 61366 - RNA, 19 nt, synthetic construct
  misc_feature 1..19: note = siRNA sense sequence
  source 1..19: mol_type = other RNA
cagagctgctgcttatgga

SEQ ID NO: 61367 - RNA, 19 nt, synthetic construct
  misc_feature 1..19: note = siRNA antisense sequence
  source 1..19: mol_type = other RNA
tccataagcagcagctctg

SEQ ID NO: 61368 - RNA, 19 nt, synthetic construct
  misc_feature 1..19: note = siRNA sense sequence
  source 1..19: mol_type = other RNA
gatgaatttaggaaggctg

SEQ ID NO: 61369 - RNA, 19 nt, synthetic construct
  misc_feature 1..19: note = siRNA antisense sequence
  source 1..19: mol_type = other RNA
cagccttcctaaattcatc

SEQ ID NO: 61370 - RNA, 19 nt, synthetic construct
  misc_feature 1..19: note = siRNA sense sequence
  source 1..19: mol_type = other RNA
atgaatttaggaaggctgc

SEQ ID NO: 61371 - RNA, 19 nt, synthetic construct
  misc_feature 1..19: note = siRNA antisense sequence
  source 1..19: mol_type = other RNA
gcagccttcctaaattcat

SEQ ID NO: 61372 - RNA, 19 nt, synthetic construct
  misc_feature 1..19: note = siRNA sense sequence
  source 1..19: mol_type = other RNA
ggaaggctgcagtgtggaa

SEQ ID NO: 61373 - RNA, 19 nt, synthetic construct
  misc_feature 1..19: note = siRNA antisense sequence
  source 1..19: mol_type = other RNA
ttccacactgcagccttcc

SEQ ID NO: 61374 - RNA, 19 nt, synthetic construct
  misc_feature 1..19: note = siRNA sense sequence
  source 1..19: mol_type = other RNA
gaaggctgcagtgtggaat

SEQ ID NO: 61375 - RNA, 19 nt, synthetic construct
  misc_feature 1..19: note = siRNA antisense sequence
  source 1..19: mol_type = other RNA
attccacactgcagccttc

SEQ ID NO: 61376 - RNA, 19 nt, synthetic construct
  misc_feature 1..19: note = siRNA sense sequence
  source 1..19: mol_type = other RNA
aaggctgcagtgtggaatg

SEQ ID NO: 61377 - RNA, 19 nt, synthetic construct
  misc_feature 1..19: note = siRNA antisense sequence
  source 1..19: mol_type = other RNA
cattccacactgcagcctt

SEQ ID NO: 61378 - RNA, 19 nt, synthetic construct
  misc_feature 1..19: note = siRNA sense sequence
  source 1..19: mol_type = other RNA
aggctgcagtgtggaatgg

SEQ ID NO: 61379 - RNA, 19 nt, synthetic construct
  misc_feature 1..19: note = siRNA antisense sequence
  source 1..19: mol_type = other RNA
ccattccacactgcagcct

SEQ ID NO: 61380 - RNA, 19 nt, synthetic construct
  misc_feature 1..19: note = siRNA sense sequence
  source 1..19: mol_type = other RNA
ggctgcagtgtggaatggg

SEQ ID NO: 61381 - RNA, 19 nt, synthetic construct
  misc_feature 1..19: note = siRNA antisense sequence
  source 1..19: mol_type = other RNA
cccattccacactgcagcc

SEQ ID NO: 61382 - RNA, 19 nt, synthetic construct
  misc_feature 1..19: note = siRNA sense sequence
  source 1..19: mol_type = other RNA
gctgcagtgtggaatgggt

SEQ ID NO: 61383 - RNA, 19 nt, synthetic construct
  misc_feature 1..19: note = siRNA antisense sequence
  source 1..19: mol_type = other RNA
acccattccacactgcagc

SEQ ID NO: 61384 - RNA, 19 nt, synthetic construct
  misc_feature 1..19: note = siRNA sense sequence
  source 1..19: mol_type = other RNA
gggaccattcatgctaaga

SEQ ID NO: 61385 - RNA, 19 nt, synthetic construct
  misc_feature 1..19: note = siRNA antisense sequence
  source 1..19: mol_type = other RNA
tcttagcatgaatggtccc

SEQ ID NO: 61386 - RNA, 19 nt, synthetic construct
  misc_feature 1..19: note = siRNA sense sequence
  source 1..19: mol_type = other RNA
ggaccattcatgctaagag

SEQ ID NO: 61387 - RNA, 19 nt, synthetic construct
  misc_feature 1..19: note = siRNA antisense sequence
  source 1..19: mol_type = other RNA
ctcttagcatgaatggtcc

SEQ ID NO: 61388 - RNA, 19 nt, synthetic construct
  misc_feature 1..19: note = siRNA sense sequence
  source 1..19: mol_type = other RNA
gaccattcatgctaagagc

SEQ ID NO: 61389 - RNA, 19 nt, synthetic construct
  misc_feature 1..19: note = siRNA antisense sequence
  source 1..19: mol_type = other RNA
gctcttagcatgaatggtc

SEQ ID NO: 61390 - RNA, 19 nt, synthetic construct
  misc_feature 1..19: note = siRNA sense sequence
  source 1..19: mol_type = other RNA
accattcatgctaagagct

SEQ ID NO: 61391 - RNA, 19 nt, synthetic construct
  misc_feature 1..19: note = siRNA antisense sequence
  source 1..19: mol_type = other RNA
agctcttagcatgaatggt

SEQ ID NO: 61392 - RNA, 19 nt, synthetic construct
  misc_feature 1..19: note = siRNA sense sequence
  source 1..19: mol_type = other RNA
ccattcatgctaagagctg

SEQ ID NO: 61393 - RNA, 19 nt, synthetic construct
  misc_feature 1..19: note = siRNA antisense sequence
  source 1..19: mol_type = other RNA
cagctcttagcatgaatgg

SEQ ID NO: 61394 - RNA, 19 nt, synthetic construct
  misc_feature 1..19: note = siRNA sense sequence
  source 1..19: mol_type = other RNA
attcatgctaagagctgag

SEQ ID NO: 61395 - RNA, 19 nt, synthetic construct
  misc_feature 1..19: note = siRNA antisense sequence
  source 1..19: mol_type = other RNA
ctcagctcttagcatgaat

SEQ ID NO: 61396 - RNA, 19 nt, synthetic construct
  misc_feature 1..19: note = siRNA sense sequence
  source 1..19: mol_type = other RNA
caaatacctataatccaag

SEQ ID NO: 61397 - RNA, 19 nt, synthetic construct
  misc_feature 1..19: note = siRNA antisense sequence
  source 1..19: mol_type = other RNA
cttggattataggtatttg

SEQ ID NO: 61398 - RNA, 19 nt, synthetic construct
  misc_feature 1..19: note = siRNA sense sequence
  source 1..19: mol_type = other RNA
tacctataatccaaggcag

SEQ ID NO: 61399 - RNA, 19 nt, synthetic construct
  misc_feature 1..19: note = siRNA antisense sequence
  source 1..19: mol_type = other RNA
ctgccttggattataggta

SEQ ID NO: 61400 - RNA, 19 nt, synthetic construct
  misc_feature 1..19: note = siRNA sense sequence
  source 1..19: mol_type = other RNA
acctataatccaaggcagc

SEQ ID NO: 61401 - RNA, 19 nt, synthetic construct
  misc_feature 1..19: note = siRNA antisense sequence
  source 1..19: mol_type = other RNA
gctgccttggattataggt

SEQ ID NO: 61402 - RNA, 19 nt, synthetic construct
  misc_feature 1..19: note = siRNA sense sequence
  source 1..19: mol_type = other RNA
cctataatccaaggcagca

SEQ ID NO: 61403 - RNA, 19 nt, synthetic construct
  misc_feature 1..19: note = siRNA antisense sequence
  source 1..19: mol_type = other RNA
tgctgccttggattatagg

SEQ ID NO: 61404 - RNA, 19 nt, synthetic construct
  misc_feature 1..19: note = siRNA sense sequence
  source 1..19: mol_type = other RNA
ctataatccaaggcagcat

SEQ ID NO: 61405 - RNA, 19 nt, synthetic construct
  misc_feature 1..19: note = siRNA antisense sequence
  source 1..19: mol_type = other RNA
atgctgccttggattatag

SEQ ID NO: 61406 - RNA, 19 nt, synthetic construct
  misc_feature 1..19: note = siRNA sense sequence
  source 1..19: mol_type = other RNA
ataatccaaggcagcatgc

SEQ ID NO: 61407 - RNA, 19 nt, synthetic construct
  misc_feature 1..19: note = siRNA antisense sequence
  source 1..19: mol_type = other RNA
gcatgctgccttggattat

SEQ ID NO: 61408 - RNA, 19 nt, synthetic construct
  misc_feature 1..19: note = siRNA sense sequence
  source 1..19: mol_type = other RNA
taatccaaggcagcatgct

SEQ ID NO: 61409 - RNA, 19 nt, synthetic construct
  misc_feature 1..19: note = siRNA antisense sequence
  source 1..19: mol_type = other RNA
agcatgctgccttggatta

SEQ ID NO: 61410 - RNA, 19 nt, synthetic construct
  misc_feature 1..19: note = siRNA sense sequence
  source 1..19: mol_type = other RNA
aatccaaggcagcatgctg

SEQ ID NO: 61411 - RNA, 19 nt, synthetic construct
  misc_feature 1..19: note = siRNA antisense sequence
  source 1..19: mol_type = other RNA
cagcatgctgccttggatt

SEQ ID NO: 61412 - RNA, 19 nt, synthetic construct
  misc_feature 1..19: note = siRNA sense sequence
  source 1..19: mol_type = other RNA
gcatgctgctttctctgtc

SEQ ID NO: 61413 - RNA, 19 nt, synthetic construct
  misc_feature 1..19: note = siRNA antisense sequence
  source 1..19: mol_type = other RNA
gacagagaaagcagcatgc

SEQ ID NO: 61414 - RNA, 19 nt, synthetic construct
  misc_feature 1..19: note = siRNA sense sequence
  source 1..19: mol_type = other RNA
catgctgctttctctgtcc

SEQ ID NO: 61415 - RNA, 19 nt, synthetic construct
  misc_feature 1..19: note = siRNA antisense sequence
  source 1..19: mol_type = other RNA
ggacagagaaagcagcatg

SEQ ID NO: 61416 - RNA, 19 nt, synthetic construct
  misc_feature 1..19: note = siRNA sense sequence
  source 1..19: mol_type = other RNA
tgctgctttctctgtcctg

SEQ ID NO: 61417 - RNA, 19 nt, synthetic construct
  misc_feature 1..19: note = siRNA antisense sequence
  source 1..19: mol_type = other RNA
caggacagagaaagcagca

SEQ ID NO: 61418 - RNA, 19 nt, synthetic construct
  misc_feature 1..19: note = siRNA sense sequence
  source 1..19: mol_type = other RNA
gctgctttctctgtcctgc

SEQ ID NO: 61419 - RNA, 19 nt, synthetic construct
  misc_feature 1..19: note = siRNA antisense sequence
  source 1..19: mol_type = other RNA
gcaggacagagaaagcagc

SEQ ID NO: 61420 - RNA, 19 nt, synthetic construct
  misc_feature 1..19: note = siRNA sense sequence
  source 1..19: mol_type = other RNA
tctctgtcctgctgcttat

SEQ ID NO: 61421 - RNA, 19 nt, synthetic construct
  misc_feature 1..19: note = siRNA antisense sequence
  source 1..19: mol_type = other RNA
ataagcagcaggacagaga

SEQ ID NO: 61422 - RNA, 19 nt, synthetic construct
  misc_feature 1..19: note = siRNA sense sequence
  source 1..19: mol_type = other RNA
ctctgtcctgctgcttatg

SEQ ID NO: 61423 - RNA, 19 nt, synthetic construct
  misc_feature 1..19: note = siRNA antisense sequence
  source 1..19: mol_type = other RNA
cataagcagcaggacagag

SEQ ID NO: 61424 - RNA, 19 nt, synthetic construct
  misc_feature 1..19: note = siRNA sense sequence
  source 1..19: mol_type = other RNA
tctgtcctgctgcttatga

SEQ ID NO: 61425 - RNA, 19 nt, synthetic construct
  misc_feature 1..19: note = siRNA antisense sequence
  source 1..19: mol_type = other RNA
tcataagcagcaggacaga

SEQ ID NO: 61426 - RNA, 19 nt, synthetic construct
  misc_feature 1..19: note = siRNA sense sequence
  source 1..19: mol_type = other RNA
ctgtcctgctgcttatgag

SEQ ID NO: 61427 - RNA, 19 nt, synthetic construct
  misc_feature 1..19: note = siRNA antisense sequence
  source 1..19: mol_type = other RNA
ctcataagcagcaggacag

SEQ ID NO: 61428 - RNA, 19 nt, synthetic construct
  misc_feature 1..19: note = siRNA sense sequence
  source 1..19: mol_type = other RNA
ctgctgcttatgagccact

SEQ ID NO: 61429 - RNA, 19 nt, synthetic construct
  misc_feature 1..19: note = siRNA antisense sequence
  source 1..19: mol_type = other RNA
agtggctcataagcagcag

SEQ ID NO: 61430 - RNA, 19 nt, synthetic construct
  misc_feature 1..19: note = siRNA sense sequence
  source 1..19: mol_type = other RNA
tgctgcttatgagccactt

SEQ ID NO: 61431 - RNA, 19 nt, synthetic construct
  misc_feature 1..19: note = siRNA antisense sequence
  source 1..19: mol_type = other RNA
aagtggctcataagcagca

SEQ ID NO: 61432 - RNA, 19 nt, synthetic construct
  misc_feature 1..19: note = siRNA sense sequence
  source 1..19: mol_type = other RNA
tgagccactttatacattt

SEQ ID NO: 61433 - RNA, 19 nt, synthetic construct
  misc_feature 1..19: note = siRNA antisense sequence
  source 1..19: mol_type = other RNA
aaatgtataaagtggctca

SEQ ID NO: 61434 - RNA, 19 nt, synthetic construct
  misc_feature 1..19: note = siRNA sense sequence
  source 1..19: mol_type = other RNA
gagccactttatacatttg

SEQ ID NO: 61435 - RNA, 19 nt, synthetic construct
  misc_feature 1..19: note = siRNA antisense sequence
  source 1..19: mol_type = other RNA
caaatgtataaagtggctc

SEQ ID NO: 61436 - RNA, 19 nt, synthetic construct
  misc_feature 1..19: note = siRNA sense sequence
  source 1..19: mol_type = other RNA
agccactttatacatttgg

SEQ ID NO: 61437 - RNA, 19 nt, synthetic construct
  misc_feature 1..19: note = siRNA antisense sequence
  source 1..19: mol_type = other RNA
ccaaatgtataaagtggct

SEQ ID NO: 61438 - RNA, 19 nt, synthetic construct
  misc_feature 1..19: note = siRNA sense sequence
  source 1..19: mol_type = other RNA
gccactttatacatttggg

SEQ ID NO: 61439 - RNA, 19 nt, synthetic construct
  misc_feature 1..19: note = siRNA antisense sequence
  source 1..19: mol_type = other RNA
cccaaatgtataaagtggc

SEQ ID NO: 61440 - RNA, 19 nt, synthetic construct
  misc_feature 1..19: note = siRNA sense sequence
  source 1..19: mol_type = other RNA
tatacatttgggaataagc

SEQ ID NO: 61441 - RNA, 19 nt, synthetic construct
  misc_feature 1..19: note = siRNA antisense sequence
  source 1..19: mol_type = other RNA
gcttattcccaaatgtata

SEQ ID NO: 61442 - RNA, 19 nt, synthetic construct
  misc_feature 1..19: note = siRNA sense sequence
  source 1..19: mol_type = other RNA
atacatttgggaataagca

SEQ ID NO: 61443 - RNA, 19 nt, synthetic construct
  misc_feature 1..19: note = siRNA antisense sequence
  source 1..19: mol_type = other RNA
tgcttattcccaaatgtat

SEQ ID NO: 61444 - RNA, 19 nt, synthetic construct
  misc_feature 1..19: note = siRNA sense sequence
  source 1..19: mol_type = other RNA
tacatttgggaataagcag

SEQ ID NO: 61445 - RNA, 19 nt, synthetic construct
  misc_feature 1..19: note = siRNA antisense sequence
  source 1..19: mol_type = other RNA
ctgcttattcccaaatgta

SEQ ID NO: 61446 - RNA, 19 nt, synthetic construct
  misc_feature 1..19: note = siRNA sense sequence
  source 1..19: mol_type = other RNA
acatttgggaataagcaga

SEQ ID NO: 61447 - RNA, 19 nt, synthetic construct
  misc_feature 1..19: note = siRNA antisense sequence
  source 1..19: mol_type = other RNA
tctgcttattcccaaatgt

SEQ ID NO: 61448 - RNA, 19 nt, synthetic construct
  misc_feature 1..19: note = siRNA sense sequence
  source 1..19: mol_type = other RNA
catttgggaataagcagag

SEQ ID NO: 61449 - RNA, 19 nt, synthetic construct
  misc_feature 1..19: note = siRNA antisense sequence
  source 1..19: mol_type = other RNA
ctctgcttattcccaaatg

SEQ ID NO: 61450 - RNA, 19 nt, synthetic construct
  misc_feature 1..19: note = siRNA sense sequence
  source 1..19: mol_type = other RNA
atttgggaataagcagagc

SEQ ID NO: 61451 - RNA, 19 nt, synthetic construct
  misc_feature 1..19: note = siRNA antisense sequence
  source 1..19: mol_type = other RNA
gctctgcttattcccaaat

SEQ ID NO: 61452 - RNA, 19 nt, synthetic construct
  misc_feature 1..19: note = siRNA sense sequence
  source 1..19: mol_type = other RNA
caatatgttaggtgcttgg

SEQ ID NO: 61453 - RNA, 19 nt, synthetic construct
  misc_feature 1..19: note = siRNA antisense sequence
  source 1..19: mol_type = other RNA
ccaagcacctaacatattg

SEQ ID NO: 61454 - RNA, 19 nt, synthetic construct
  misc_feature 1..19: note = siRNA sense sequence
  source 1..19: mol_type = other RNA
aatatgttaggtgcttggt

SEQ ID NO: 61455 - RNA, 19 nt, synthetic construct
  misc_feature 1..19: note = siRNA antisense sequence
  source 1..19: mol_type = other RNA
accaagcacctaacatatt

SEQ ID NO: 61456 - RNA, 19 nt, synthetic construct
  misc_feature 1..19: note = siRNA sense sequence
  source 1..19: mol_type = other RNA
atatgttaggtgcttggtc

SEQ ID NO: 61457 - RNA, 19 nt, synthetic construct
  misc_feature 1..19: note = siRNA antisense sequence
  source 1..19: mol_type = other RNA
gaccaagcacctaacatat

SEQ ID NO: 61458 - RNA, 19 nt, synthetic construct
  misc_feature 1..19: note = siRNA sense sequence
  source 1..19: mol_type = other RNA
tatgttaggtgcttggtca

SEQ ID NO: 61459 - RNA, 19 nt, synthetic construct
  misc_feature 1..19: note = siRNA antisense sequence
  source 1..19: mol_type = other RNA
tgaccaagcacctaacata

SEQ ID NO: 61460 - RNA, 19 nt, synthetic construct
  misc_feature 1..19: note = siRNA sense sequence
  source 1..19: mol_type = other RNA
atgttaggtgcttggtcag

SEQ ID NO: 61461 - RNA, 19 nt, synthetic construct
  misc_feature 1..19: note = siRNA antisense sequence
  source 1..19: mol_type = other RNA
ctgaccaagcacctaacat

SEQ ID NO: 61462 - RNA, 19 nt, synthetic construct
  misc_feature 1..19: note = siRNA sense sequence
  source 1..19: mol_type = other RNA
tgttaggtgcttggtcagt

SEQ ID NO: 61463 - RNA, 19 nt, synthetic construct
  misc_feature 1..19: note = siRNA antisense sequence
  source 1..19: mol_type = other RNA
actgaccaagcacctaaca

SEQ ID NO: 61464 - RNA, 19 nt, synthetic construct
  misc_feature 1..19: note = siRNA sense sequence
  source 1..19: mol_type = other RNA
gttaggtgcttggtcagtt

SEQ ID NO: 61465 - RNA, 19 nt, synthetic construct
  misc_feature 1..19: note = siRNA antisense sequence
  source 1..19: mol_type = other RNA
aactgaccaagcacctaac

SEQ ID NO: 61466 - RNA, 19 nt, synthetic construct
  misc_feature 1..19: note = siRNA sense sequence
  source 1..19: mol_type = other RNA
ttaggtgcttggtcagttg

SEQ ID NO: 61467 - RNA, 19 nt, synthetic construct
  misc_feature 1..19: note = siRNA antisense sequence
  source 1..19: mol_type = other RNA
caactgaccaagcacctaa

SEQ ID NO: 61468 - RNA, 19 nt, synthetic construct
  misc_feature 1..19: note = siRNA sense sequence
  source 1..19: mol_type = other RNA
taggtgcttggtcagttgg

SEQ ID NO: 61469 - RNA, 19 nt, synthetic construct
  misc_feature 1..19: note = siRNA antisense sequence
  source 1..19: mol_type = other RNA
ccaactgaccaagcaccta

SEQ ID NO: 61470 - RNA, 19 nt, synthetic construct
  misc_feature 1..19: note = siRNA sense sequence
  source 1..19: mol_type = other RNA
aggtgcttggtcagttggt

SEQ ID NO: 61471 - RNA, 19 nt, synthetic construct
  misc_feature 1..19: note = siRNA antisense sequence
  source 1..19: mol_type = other RNA
accaactgaccaagcacct

SEQ ID NO: 61472 - RNA, 19 nt, synthetic construct
  misc_feature 1..19: note = siRNA sense sequence
  source 1..19: mol_type = other RNA
ggtgcttggtcagttggtg

SEQ ID NO: 61473 - RNA, 19 nt, synthetic construct
  misc_feature 1..19: note = siRNA antisense sequence
  source 1..19: mol_type = other RNA
caccaactgaccaagcacc

SEQ ID NO: 61474 - RNA, 19 nt, synthetic construct
  misc_feature 1..19: note = siRNA sense sequence
  source 1..19: mol_type = other RNA
tgcttggtcagttggtgga

SEQ ID NO: 61475 - RNA, 19 nt, synthetic construct
  misc_feature 1..19: note = siRNA antisense sequence
  source 1..19: mol_type = other RNA
tccaccaactgaccaagca

SEQ ID NO: 61476 - RNA, 19 nt, synthetic construct
  misc_feature 1..19: note = siRNA sense sequence
  source 1..19: mol_type = other RNA
gcttggtcagttggtggag

SEQ ID NO: 61477 - RNA, 19 nt, synthetic construct
  misc_feature 1..19: note = siRNA antisense sequence
  source 1..19: mol_type = other RNA
ctccaccaactgaccaagc

SEQ ID NO: 61478 - RNA, 19 nt, synthetic construct
  misc_feature 1..19: note = siRNA sense sequence
  source 1..19: mol_type = other RNA
cttggtcagttggtggagg

SEQ ID NO: 61479 - RNA, 19 nt, synthetic construct
  misc_feature 1..19: note = siRNA antisense sequence
  source 1..19: mol_type = other RNA
cctccaccaactgaccaag

SEQ ID NO: 61480 - RNA, 19 nt, synthetic construct
  misc_feature 1..19: note = siRNA sense sequence
  source 1..19: mol_type = other RNA
ttggtcagttggtggaggg

SEQ ID NO: 61481 - RNA, 19 nt, synthetic construct
  misc_feature 1..19: note = siRNA antisense sequence
  source 1..19: mol_type = other RNA
ccctccaccaactgaccaa

SEQ ID NO: 61482 - RNA, 19 nt, synthetic construct
  misc_feature 1..19: note = siRNA sense sequence
  source 1..19: mol_type = other RNA
tgaatatttcctatgtcct

SEQ ID NO: 61483 - RNA, 19 nt, synthetic construct
  misc_feature 1..19: note = siRNA antisense sequence
  source 1..19: mol_type = other RNA
aggacataggaaatattca

SEQ ID NO: 61484 - RNA, 19 nt, synthetic construct
  misc_feature 1..19: note = siRNA sense sequence
  source 1..19: mol_type = other RNA
gaatatttcctatgtccta

SEQ ID NO: 61485 - RNA, 19 nt, synthetic construct
  misc_feature 1..19: note = siRNA antisense sequence
  source 1..19: mol_type = other RNA
taggacataggaaatattc

SEQ ID NO: 61486 - RNA, 19 nt, synthetic construct
  misc_feature 1..19: note = siRNA sense sequence
  source 1..19: mol_type = other RNA
aatatttcctatgtcctag

SEQ ID NO: 61487 - RNA, 19 nt, synthetic construct
  misc_feature 1..19: note = siRNA antisense sequence
  source 1..19: mol_type = other RNA
ctaggacataggaaatatt

SEQ ID NO: 61488 - RNA, 19 nt, synthetic construct
  misc_feature 1..19: note = siRNA sense sequence
  source 1..19: mol_type = other RNA
gacagataagtaatttgac

SEQ ID NO: 61489 - RNA, 19 nt, synthetic construct
  misc_feature 1..19: note = siRNA antisense sequence
  source 1..19: mol_type = other RNA
gtcaaattacttatctgtc

SEQ ID NO: 61490 - RNA, 19 nt, synthetic construct
  misc_feature 1..19: note = siRNA sense sequence
  source 1..19: mol_type = other RNA
acagataagtaatttgacc

SEQ ID NO: 61491 - RNA, 19 nt, synthetic construct
  misc_feature 1..19: note = siRNA antisense sequence
  source 1..19: mol_type = other RNA
ggtcaaattacttatctgt

SEQ ID NO: 61492 - RNA, 19 nt, synthetic construct
  misc_feature 1..19: note = siRNA sense sequence
  source 1..19: mol_type = other RNA
cagataagtaatttgacca

SEQ ID NO: 61493 - RNA, 19 nt, synthetic construct
  misc_feature 1..19: note = siRNA antisense sequence
  source 1..19: mol_type = other RNA
tggtcaaattacttatctg

SEQ ID NO: 61494 - RNA, 19 nt, synthetic construct
  misc_feature 1..19: note = siRNA sense sequence
  source 1..19: mol_type = other RNA
agtaatttgaccaaagtgt

SEQ ID NO: 61495 - RNA, 19 nt, synthetic construct
  misc_feature 1..19: note = siRNA antisense sequence
  source 1..19: mol_type = other RNA
acactttggtcaaattact

SEQ ID NO: 61496 - RNA, 19 nt, synthetic construct
  misc_feature 1..19: note = siRNA sense sequence
  source 1..19: mol_type = other RNA
gtaatttgaccaaagtgta

SEQ ID NO: 61497 - RNA, 19 nt, synthetic construct
  misc_feature 1..19: note = siRNA antisense sequence
  source 1..19: mol_type = other RNA
tacactttggtcaaattac

SEQ ID NO: 61498 - RNA, 19 nt, synthetic construct
  misc_feature 1..19: note = siRNA sense sequence
  source 1..19: mol_type = other RNA
aatttgaccaaagtgtatc

SEQ ID NO: 61499 - RNA, 19 nt, synthetic construct
  misc_feature 1..19: note = siRNA antisense sequence
  source 1..19: mol_type = other RNA
gatacactttggtcaaatt

SEQ ID NO: 61500 - RNA, 19 nt, synthetic construct
  misc_feature 1..19: note = siRNA sense sequence
  source 1..19: mol_type = other RNA
atttgaccaaagtgtatca

SEQ ID NO: 61501 - RNA, 19 nt, synthetic construct
  misc_feature 1..19: note = siRNA antisense sequence
  source 1..19: mol_type = other RNA
tgatacactttggtcaaat

SEQ ID NO: 61502 - RNA, 19 nt, synthetic construct
  misc_feature 1..19: note = siRNA sense sequence
  source 1..19: mol_type = other RNA
tttgaccaaagtgtatcag

SEQ ID NO: 61503 - RNA, 19 nt, synthetic construct
  misc_feature 1..19: note = siRNA antisense sequence
  source 1..19: mol_type = other RNA
ctgatacactttggtcaaa

SEQ ID NO: 61504 - RNA, 19 nt, synthetic construct
  misc_feature 1..19: note = siRNA sense sequence
  source 1..19: mol_type = other RNA
ttgaccaaagtgtatcagt

SEQ ID NO: 61505 - RNA, 19 nt, synthetic construct
  misc_feature 1..19: note = siRNA antisense sequence
  source 1..19: mol_type = other RNA
actgatacactttggtcaa

SEQ ID NO: 61506 - RNA, 19 nt, synthetic construct
  misc_feature 1..19: note = siRNA sense sequence
  source 1..19: mol_type = other RNA
tgaccaaagtgtatcagtg

SEQ ID NO: 61507 - RNA, 19 nt, synthetic construct
  misc_feature 1..19: note = siRNA antisense sequence
  source 1..19: mol_type = other RNA
cactgatacactttggtca

SEQ ID NO: 61508 - RNA, 19 nt, synthetic construct
  misc_feature 1..19: note = siRNA sense sequence
  source 1..19: mol_type = other RNA
gaccaaagtgtatcagtgt

SEQ ID NO: 61509 - RNA, 19 nt, synthetic construct
  misc_feature 1..19: note = siRNA antisense sequence
  source 1..19: mol_type = other RNA
acactgatacactttggtc

SEQ ID NO: 61510 - RNA, 19 nt, synthetic construct
  misc_feature 1..19: note = siRNA sense sequence
  source 1..19: mol_type = other RNA
accaaagtgtatcagtgtc

SEQ ID NO: 61511 - RNA, 19 nt, synthetic construct
  misc_feature 1..19: note = siRNA antisense sequence
  source 1..19: mol_type = other RNA
gacactgatacactttggt

SEQ ID NO: 61512 - RNA, 19 nt, synthetic construct
  misc_feature 1..19: note = siRNA sense sequence
  source 1..19: mol_type = other RNA
ccaaagtgtatcagtgtcc

SEQ ID NO: 61513 - RNA, 19 nt, synthetic construct
  misc_feature 1..19: note = siRNA antisense sequence
  source 1..19: mol_type = other RNA
ggacactgatacactttgg

SEQ ID NO: 61514 - RNA, 19 nt, synthetic construct
  misc_feature 1..19: note = siRNA sense sequence
  source 1..19: mol_type = other RNA
caaagtgtatcagtgtcca

SEQ ID NO: 61515 - RNA, 19 nt, synthetic construct
  misc_feature 1..19: note = siRNA antisense sequence
  source 1..19: mol_type = other RNA
tggacactgatacactttg

SEQ ID NO: 61516 - RNA, 19 nt, synthetic construct
  misc_feature 1..19: note = siRNA sense sequence
  source 1..19: mol_type = other RNA
aaagtgtatcagtgtccaa

SEQ ID NO: 61517 - RNA, 19 nt, synthetic construct
  misc_feature 1..19: note = siRNA antisense sequence
  source 1..19: mol_type = other RNA
ttggacactgatacacttt

SEQ ID NO: 61518 - RNA, 19 nt, synthetic construct
  misc_feature 1..19: note = siRNA sense sequence
  source 1..19: mol_type = other RNA
aagtgtatcagtgtccaag

SEQ ID NO: 61519 - RNA, 19 nt, synthetic construct
  misc_feature 1..19: note = siRNA antisense sequence
  source 1..19: mol_type = other RNA
cttggacactgatacactt

SEQ ID NO: 61520 - RNA, 19 nt, synthetic construct
  misc_feature 1..19: note = siRNA sense sequence
  source 1..19: mol_type = other RNA
agtgtatcagtgtccaaga

SEQ ID NO: 61521 - RNA, 19 nt, synthetic construct
  misc_feature 1..19: note = siRNA antisense sequence
  source 1..19: mol_type = other RNA
tcttggacactgatacact

SEQ ID NO: 61522 - RNA, 19 nt, synthetic construct
  misc_feature 1..19: note = siRNA sense sequence
  source 1..19: mol_type = other RNA
gtgtatcagtgtccaagaa

SEQ ID NO: 61523 - RNA, 19 nt, synthetic construct
  misc_feature 1..19: note = siRNA antisense sequence
  source 1..19: mol_type = other RNA
ttcttggacactgatacac

SEQ ID NO: 61524 - RNA, 19 nt, synthetic construct
  misc_feature 1..19: note = siRNA sense sequence
  source 1..19: mol_type = other RNA
caatctcattctctggccc

SEQ ID NO: 61525 - RNA, 19 nt, synthetic construct
  misc_feature 1..19: note = siRNA antisense sequence
  source 1..19: mol_type = other RNA
gggccagagaatgagattg

SEQ ID NO: 61526 - RNA, 19 nt, synthetic construct
  misc_feature 1..19: note = siRNA sense sequence
  source 1..19: mol_type = other RNA
cccagagccagtgttcatt

SEQ ID NO: 61527 - RNA, 19 nt, synthetic construct
  misc_feature 1..19: note = siRNA antisense sequence
  source 1..19: mol_type = other RNA
aatgaacactggctctggg

SEQ ID NO: 61528 - RNA, 19 nt, synthetic construct
  misc_feature 1..19: note = siRNA sense sequence
  source 1..19: mol_type = other RNA
ccagagccagtgttcatta

SEQ ID NO: 61529 - RNA, 19 nt, synthetic construct
  misc_feature 1..19: note = siRNA antisense sequence
  source 1..19: mol_type = other RNA
taatgaacactggctctgg

SEQ ID NO: 61530 - RNA, 19 nt, synthetic construct
  misc_feature 1..19: note = siRNA sense sequence
  source 1..19: mol_type = other RNA
cagagccagtgttcattac

SEQ ID NO: 61531 - RNA, 19 nt, synthetic construct
  misc_feature 1..19: note = siRNA antisense sequence
  source 1..19: mol_type = other RNA
gtaatgaacactggctctg

SEQ ID NO: 61532 - RNA, 19 nt, synthetic construct
  misc_feature 1..19: note = siRNA sense sequence
  source 1..19: mol_type = other RNA
agagccagtgttcattact

SEQ ID NO: 61533 - RNA, 19 nt, synthetic construct
  misc_feature 1..19: note = siRNA antisense sequence
  source 1..19: mol_type = other RNA
agtaatgaacactggctct

SEQ ID NO: 61534 - RNA, 19 nt, synthetic construct
  misc_feature 1..19: note = siRNA sense sequence
  source 1..19: mol_type = other RNA
gagccagtgttcattactc

SEQ ID NO: 61535 - RNA, 19 nt, synthetic construct
  misc_feature 1..19: note = siRNA antisense sequence
  source 1..19: mol_type = other RNA
gagtaatgaacactggctc

SEQ ID NO: 61536 - RNA, 19 nt, synthetic construct
  misc_feature 1..19: note = siRNA sense sequence
  source 1..19: mol_type = other RNA
agccagtgttcattactcg

SEQ ID NO: 61537 - RNA, 19 nt, synthetic construct
  misc_feature 1..19: note = siRNA antisense sequence
  source 1..19: mol_type = other RNA
cgagtaatgaacactggct

SEQ ID NO: 61538 - RNA, 19 nt, synthetic construct
  misc_feature 1..19: note = siRNA sense sequence
  source 1..19: mol_type = other RNA
gccagtgttcattactcgt

SEQ ID NO: 61539 - RNA, 19 nt, synthetic construct
  misc_feature 1..19: note = siRNA antisense sequence
  source 1..19: mol_type = other RNA
acgagtaatgaacactggc

SEQ ID NO: 61540 - RNA, 19 nt, synthetic construct
  misc_feature 1..19: note = siRNA sense sequence
  source 1..19: mol_type = other RNA
ccagtgttcattactcgtt

SEQ ID NO: 61541 - RNA, 19 nt, synthetic construct
  misc_feature 1..19: note = siRNA antisense sequence
  source 1..19: mol_type = other RNA
aacgagtaatgaacactgg

SEQ ID NO: 61542 - RNA, 19 nt, synthetic construct
  misc_feature 1..19: note = siRNA sense sequence
  source 1..19: mol_type = other RNA
cagtgttcattactcgtta

SEQ ID NO: 61543 - RNA, 19 nt, synthetic construct
  misc_feature 1..19: note = siRNA antisense sequence
  source 1..19: mol_type = other RNA
taacgagtaatgaacactg

SEQ ID NO: 61544 - RNA, 19 nt, synthetic construct
  misc_feature 1..19: note = siRNA sense sequence
  source 1..19: mol_type = other RNA
agtgttcattactcgttat

SEQ ID NO: 61545 - RNA, 19 nt, synthetic construct
  misc_feature 1..19: note = siRNA antisense sequence
  source 1..19: mol_type = other RNA
ataacgagtaatgaacact

SEQ ID NO: 61546 - RNA, 19 nt, synthetic construct
  misc_feature 1..19: note = siRNA sense sequence
  source 1..19: mol_type = other RNA
gtgttcattactcgttata

SEQ ID NO: 61547 - RNA, 19 nt, synthetic construct
  misc_feature 1..19: note = siRNA antisense sequence
  source 1..19: mol_type = other RNA
tataacgagtaatgaacac

SEQ ID NO: 61548 - RNA, 19 nt, synthetic construct
  misc_feature 1..19: note = siRNA sense sequence
  source 1..19: mol_type = other RNA
tgtgttttctaatacgagg

SEQ ID NO: 61549 - RNA, 19 nt, synthetic construct
  misc_feature 1..19: note = siRNA antisense sequence
  source 1..19: mol_type = other RNA
cctcgtattagaaaacaca

SEQ ID NO: 61550 - RNA, 19 nt, synthetic construct
  misc_feature 1..19: note = siRNA sense sequence
  source 1..19: mol_type = other RNA
gtgttttctaatacgagga

SEQ ID NO: 61551 - RNA, 19 nt, synthetic construct
  misc_feature 1..19: note = siRNA antisense sequence
  source 1..19: mol_type = other RNA
tcctcgtattagaaaacac

SEQ ID NO: 61552 - RNA, 19 nt, synthetic construct
  misc_feature 1..19: note = siRNA sense sequence
  source 1..19: mol_type = other RNA
tttctaatacgaggaagta

SEQ ID NO: 61553 - RNA, 19 nt, synthetic construct
  misc_feature 1..19: note = siRNA antisense sequence
  source 1..19: mol_type = other RNA
tacttcctcgtattagaaa

SEQ ID NO: 61554 - RNA, 19 nt, synthetic construct
  misc_feature 1..19: note = siRNA sense sequence
  source 1..19: mol_type = other RNA
cgaggaagtatgtatatgt

SEQ ID NO: 61555 - RNA, 19 nt, synthetic construct
  misc_feature 1..19: note = siRNA antisense sequence
  source 1..19: mol_type = other RNA
acatatacatacttcctcg

SEQ ID NO: 61556 - RNA, 19 nt, synthetic construct
  misc_feature 1..19: note = siRNA sense sequence
  source 1..19: mol_type = other RNA
gaggaagtatgtatatgtg

SEQ ID NO: 61557 - RNA, 19 nt, synthetic construct
  misc_feature 1..19: note = siRNA antisense sequence
  source 1..19: mol_type = other RNA
cacatatacatacttcctc

SEQ ID NO: 61558 - RNA, 19 nt, synthetic construct
  misc_feature 1..19: note = siRNA sense sequence
  source 1..19: mol_type = other RNA
aggaagtatgtatatgtgt

SEQ ID NO: 61559 - RNA, 19 nt, synthetic construct
  misc_feature 1..19: note = siRNA antisense sequence
  source 1..19: mol_type = other RNA
acacatatacatacttcct

SEQ ID NO: 61560 - RNA, 19 nt, synthetic construct
  misc_feature 1..19: note = siRNA sense sequence
  source 1..19: mol_type = other RNA
gtatgtatatgtgtgtatg

SEQ ID NO: 61561 - RNA, 19 nt, synthetic construct
  misc_feature 1..19: note = siRNA antisense sequence
  source 1..19: mol_type = other RNA
catacacacatatacatac

SEQ ID NO: 61562 - RNA, 19 nt, synthetic construct
  misc_feature 1..19: note = siRNA sense sequence
  source 1..19: mol_type = other RNA
atgatcatcaagtacttag

SEQ ID NO: 61563 - RNA, 19 nt, synthetic construct
  misc_feature 1..19: note = siRNA antisense sequence
  source 1..19: mol_type = other RNA
ctaagtacttgatgatcat

SEQ ID NO: 61564 - RNA, 19 nt, synthetic construct
  misc_feature 1..19: note = siRNA sense sequence
  source 1..19: mol_type = other RNA
tgatcatcaagtacttagt

SEQ ID NO: 61565 - RNA, 19 nt, synthetic construct
  misc_feature 1..19: note = siRNA antisense sequence
  source 1..19: mol_type = other RNA
actaagtacttgatgatca

SEQ ID NO: 61566 - RNA, 19 nt, synthetic construct
  misc_feature 1..19: note = siRNA sense sequence
  source 1..19: mol_type = other RNA
gatcatcaagtacttagta

SEQ ID NO: 61567 - RNA, 19 nt, synthetic construct
  misc_feature 1..19: note = siRNA antisense sequence
  source 1..19: mol_type = other RNA
tactaagtacttgatgatc

SEQ ID NO: 61568 - RNA, 19 nt, synthetic construct
  misc_feature 1..19: note = siRNA sense sequence
  source 1..19: mol_type = other RNA
tcatcaagtacttagtatg

SEQ ID NO: 61569 - RNA, 19 nt, synthetic construct
  misc_feature 1..19: note = siRNA antisense sequence
  source 1..19: mol_type = other RNA
catactaagtacttgatga

SEQ ID NO: 61570 - RNA, 19 nt, synthetic construct
  misc_feature 1..19: note = siRNA sense sequence
  source 1..19: mol_type = other RNA
atcaagtacttagtatgga

SEQ ID NO: 61571 - RNA, 19 nt, synthetic construct
  misc_feature 1..19: note = siRNA antisense sequence
  source 1..19: mol_type = other RNA
tccatactaagtacttgat

SEQ ID NO: 61572 - RNA, 19 nt, synthetic construct
  misc_feature 1..19: note = siRNA sense sequence
  source 1..19: mol_type = other RNA
tcaagtacttagtatggaa

SEQ ID NO: 61573 - RNA, 19 nt, synthetic construct
  misc_feature 1..19: note = siRNA antisense sequence
  source 1..19: mol_type = other RNA
ttccatactaagtacttga

SEQ ID NO: 61574 - RNA, 19 nt, synthetic construct
  misc_feature 1..19: note = siRNA sense sequence
  source 1..19: mol_type = other RNA
tagatttactctcagctgt

SEQ ID NO: 61575 - RNA, 19 nt, synthetic construct
  misc_feature 1..19: note = siRNA antisense sequence
  source 1..19: mol_type = other RNA
acagctgagagtaaatcta

SEQ ID NO: 61576 - RNA, 19 nt, synthetic construct
  misc_feature 1..19: note = siRNA sense sequence
  source 1..19: mol_type = other RNA
atttactctcagctgtgtg

SEQ ID NO: 61577 - RNA, 19 nt, synthetic construct
  misc_feature 1..19: note = siRNA antisense sequence
  source 1..19: mol_type = other RNA
cacacagctgagagtaaat

SEQ ID NO: 61578 - RNA, 19 nt, synthetic construct
  misc_feature 1..19: note = siRNA sense sequence
  source 1..19: mol_type = other RNA
tttactctcagctgtgtga

SEQ ID NO: 61579 - RNA, 19 nt, synthetic construct
  misc_feature 1..19: note = siRNA antisense sequence
  source 1..19: mol_type = other RNA
tcacacagctgagagtaaa

SEQ ID NO: 61580 - RNA, 19 nt, synthetic construct
  misc_feature 1..19: note = siRNA sense sequence
  source 1..19: mol_type = other RNA
tcagctgtgtgaccctaat

SEQ ID NO: 61581 - RNA, 19 nt, synthetic construct
  misc_feature 1..19: note = siRNA antisense sequence
  source 1..19: mol_type = other RNA
attagggtcacacagctga

SEQ ID NO: 61582 - RNA, 19 nt, synthetic construct
  misc_feature 1..19: note = siRNA sense sequence
  source 1..19: mol_type = other RNA
cagctgtgtgaccctaatc

SEQ ID NO: 61583 - RNA, 19 nt, synthetic construct
  misc_feature 1..19: note = siRNA antisense sequence
  source 1..19: mol_type = other RNA
gattagggtcacacagctg

SEQ ID NO: 61584 - RNA, 19 nt, synthetic construct
  misc_feature 1..19: note = siRNA sense sequence
  source 1..19: mol_type = other RNA
tgaccctaatcacttatct

SEQ ID NO: 61585 - RNA, 19 nt, synthetic construct
  misc_feature 1..19: note = siRNA antisense sequence
  source 1..19: mol_type = other RNA
agataagtgattagggtca

SEQ ID NO: 61586 - RNA, 19 nt, synthetic construct
  misc_feature 1..19: note = siRNA sense sequence
  source 1..19: mol_type = other RNA
gaccctaatcacttatctt

SEQ ID NO: 61587 - RNA, 19 nt, synthetic construct
  misc_feature 1..19: note = siRNA antisense sequence
  source 1..19: mol_type = other RNA
aagataagtgattagggtc

SEQ ID NO: 61588 - RNA, 19 nt, synthetic construct
  misc_feature 1..19: note = siRNA sense sequence
  source 1..19: mol_type = other RNA
accctaatcacttatcttt

SEQ ID NO: 61589 - RNA, 19 nt, synthetic construct
  misc_feature 1..19: note = siRNA antisense sequence
  source 1..19: mol_type = other RNA
aaagataagtgattagggt

SEQ ID NO: 61590 - RNA, 19 nt, synthetic construct
  misc_feature 1..19: note = siRNA sense sequence
  source 1..19: mol_type = other RNA
cctaatcacttatctttac

SEQ ID NO: 61591 - RNA, 19 nt, synthetic construct
  misc_feature 1..19: note = siRNA antisense sequence
  source 1..19: mol_type = other RNA
gtaaagataagtgattagg

SEQ ID NO: 61592 - RNA, 19 nt, synthetic construct
  misc_feature 1..19: note = siRNA sense sequence
  source 1..19: mol_type = other RNA
ttatctttactaagtcctc

SEQ ID NO: 61593 - RNA, 19 nt, synthetic construct
  misc_feature 1..19: note = siRNA antisense sequence
  source 1..19: mol_type = other RNA
gaggacttagtaaagataa

SEQ ID NO: 61594 - RNA, 19 nt, synthetic construct
  misc_feature 1..19: note = siRNA sense sequence
  source 1..19: mol_type = other RNA
ctttactaagtcctcatct

SEQ ID NO: 61595 - RNA, 19 nt, synthetic construct
  misc_feature 1..19: note = siRNA antisense sequence
  source 1..19: mol_type = other RNA
agatgaggacttagtaaag

SEQ ID NO: 61596 - RNA, 19 nt, synthetic construct
  misc_feature 1..19: note = siRNA sense sequence
  source 1..19: mol_type = other RNA
tttactaagtcctcatctg

SEQ ID NO: 61597 - RNA, 19 nt, synthetic construct
  misc_feature 1..19: note = siRNA antisense sequence
  source 1..19: mol_type = other RNA
cagatgaggacttagtaaa

SEQ ID NO: 61598 - RNA, 19 nt, synthetic construct
  misc_feature 1..19: note = siRNA sense sequence
  source 1..19: mol_type = other RNA
ttactaagtcctcatctgt

SEQ ID NO: 61599 - RNA, 19 nt, synthetic construct
  misc_feature 1..19: note = siRNA antisense sequence
  source 1..19: mol_type = other RNA
acagatgaggacttagtaa

SEQ ID NO: 61600 - RNA, 19 nt, synthetic construct
  misc_feature 1..19: note = siRNA sense sequence
  source 1..19: mol_type = other RNA
tactaagtcctcatctgtg

SEQ ID NO: 61601 - RNA, 19 nt, synthetic construct
  misc_feature 1..19: note = siRNA antisense sequence
  source 1..19: mol_type = other RNA
cacagatgaggacttagta

SEQ ID NO: 61602 - RNA, 19 nt, synthetic construct
  misc_feature 1..19: note = siRNA sense sequence
  source 1..19: mol_type = other RNA
aagtcctcatctgtgataa

SEQ ID NO: 61603 - RNA, 19 nt, synthetic construct
  misc_feature 1..19: note = siRNA antisense sequence
  source 1..19: mol_type = other RNA
ttatcacagatgaggactt

SEQ ID NO: 61604 - RNA, 19 nt, synthetic construct
  misc_feature 1..19: note = siRNA sense sequence
  source 1..19: mol_type = other RNA
agtcctcatctgtgataaa

SEQ ID NO: 61605 - RNA, 19 nt, synthetic construct
  misc_feature 1..19: note = siRNA antisense sequence
  source 1..19: mol_type = other RNA
tttatcacagatgaggact

SEQ ID NO: 61606 - RNA, 19 nt, synthetic construct
  misc_feature 1..19: note = siRNA sense sequence
  source 1..19: mol_type = other RNA
gtcctcatctgtgataaat

SEQ ID NO: 61607 - RNA, 19 nt, synthetic construct
  misc_feature 1..19: note = siRNA antisense sequence
  source 1..19: mol_type = other RNA
atttatcacagatgaggac

SEQ ID NO: 61608 - RNA, 19 nt, synthetic construct
  misc_feature 1..19: note = siRNA sense sequence
  source 1..19: mol_type = other RNA
tcctcatctgtgataaata

SEQ ID NO: 61609 - RNA, 19 nt, synthetic construct
  misc_feature 1..19: note = siRNA antisense sequence
  source 1..19: mol_type = other RNA
tatttatcacagatgagga

SEQ ID NO: 61610 - RNA, 19 nt, synthetic construct
  misc_feature 1..19: note = siRNA sense sequence
  source 1..19: mol_type = other RNA
cctcatctgtgataaataa

SEQ ID NO: 61611 - RNA, 19 nt, synthetic construct
  misc_feature 1..19: note = siRNA antisense sequence
  source 1..19: mol_type = other RNA
ttatttatcacagatgagg

SEQ ID NO: 61612 - RNA, 19 nt, synthetic construct
  misc_feature 1..19: note = siRNA sense sequence
  source 1..19: mol_type = other RNA
ctcatctgtgataaataag

SEQ ID NO: 61613 - RNA, 19 nt, synthetic construct
  misc_feature 1..19: note = siRNA antisense sequence
  source 1..19: mol_type = other RNA
cttatttatcacagatgag

SEQ ID NO: 61614 - RNA, 19 nt, synthetic construct
  misc_feature 1..19: note = siRNA sense sequence
  source 1..19: mol_type = other RNA
tcatctgtgataaataagc

SEQ ID NO: 61615 - RNA, 19 nt, synthetic construct
  misc_feature 1..19: note = siRNA antisense sequence
  source 1..19: mol_type = other RNA
gcttatttatcacagatga

SEQ ID NO: 61616 - RNA, 19 nt, synthetic construct
  misc_feature 1..19: note = siRNA sense sequence
  source 1..19: mol_type = other RNA
catctgtgataaataagca

SEQ ID NO: 61617 - RNA, 19 nt, synthetic construct
  misc_feature 1..19: note = siRNA antisense sequence
  source 1..19: mol_type = other RNA
tgcttatttatcacagatg

SEQ ID NO: 61618 - RNA, 19 nt, synthetic construct
  misc_feature 1..19: note = siRNA sense sequence
  source 1..19: mol_type = other RNA
tctgtgataaataagcatc

SEQ ID NO: 61619 - RNA, 19 nt, synthetic construct
  misc_feature 1..19: note = siRNA antisense sequence
  source 1..19: mol_type = other RNA
gatgcttatttatcacaga

SEQ ID NO: 61620 - RNA, 19 nt, synthetic construct
  misc_feature 1..19: note = siRNA sense sequence
  source 1..19: mol_type = other RNA
gggcagatatgtggttaaa

SEQ ID NO: 61621 - RNA, 19 nt, synthetic construct
  misc_feature 1..19: note = siRNA antisense sequence
  source 1..19: mol_type = other RNA
tttaaccacatatctgccc

SEQ ID NO: 61622 - RNA, 19 nt, synthetic construct
  misc_feature 1..19: note = siRNA sense sequence
  source 1..19: mol_type = other RNA
ggcagatatgtggttaaaa

SEQ ID NO: 61623 - RNA, 19 nt, synthetic construct
  misc_feature 1..19: note = siRNA antisense sequence
  source 1..19: mol_type = other RNA
ttttaaccacatatctgcc

SEQ ID NO: 61624 - RNA, 19 nt, synthetic construct
  misc_feature 1..19: note = siRNA sense sequence
  source 1..19: mol_type = other RNA
ccatatttctaagggaagc

SEQ ID NO: 61625 - RNA, 19 nt, synthetic construct
  misc_feature 1..19: note = siRNA antisense sequence
  source 1..19: mol_type = other RNA
gcttcccttagaaatatgg

SEQ ID NO: 61626 - RNA, 19 nt, synthetic construct
  misc_feature 1..19: note = siRNA sense sequence
  source 1..19: mol_type = other RNA
catatttctaagggaagcc

SEQ ID NO: 61627 - RNA, 19 nt, synthetic construct
  misc_feature 1..19: note = siRNA antisense sequence
  source 1..19: mol_type = other RNA
ggcttcccttagaaatatg

SEQ ID NO: 61628 - RNA, 19 nt, synthetic construct
  misc_feature 1..19: note = siRNA sense sequence
  source 1..19: mol_type = other RNA
tttctaagggaagcccagt

SEQ ID NO: 61629 - RNA, 19 nt, synthetic construct
  misc_feature 1..19: note = siRNA antisense sequence
  source 1..19: mol_type = other RNA
actgggcttcccttagaaa

SEQ ID NO: 61630 - RNA, 19 nt, synthetic construct
  misc_feature 1..19: note = siRNA sense sequence
  source 1..19: mol_type = other RNA
ttctaagggaagcccagta

SEQ ID NO: 61631 - RNA, 19 nt, synthetic construct
  misc_feature 1..19: note = siRNA antisense sequence
  source 1..19: mol_type = other RNA
tactgggcttcccttagaa

SEQ ID NO: 61632 - RNA, 19 nt, synthetic construct
  misc_feature 1..19: note = siRNA sense sequence
  source 1..19: mol_type = other RNA
tctaagggaagcccagtaa

SEQ ID NO: 61633 - RNA, 19 nt, synthetic construct
  misc_feature 1..19: note = siRNA antisense sequence
  source 1..19: mol_type = other RNA
ttactgggcttcccttaga

SEQ ID NO: 61634 - RNA, 19 nt, synthetic construct
  misc_feature 1..19: note = siRNA sense sequence
  source 1..19: mol_type = other RNA
gaagcccagtaacctttgt

SEQ ID NO: 61635 - RNA, 19 nt, synthetic construct
  misc_feature 1..19: note = siRNA antisense sequence
  source 1..19: mol_type = other RNA
acaaaggttactgggcttc

SEQ ID NO: 61636 - RNA, 19 nt, synthetic construct
  misc_feature 1..19: note = siRNA sense sequence
  source 1..19: mol_type = other RNA
aagcccagtaacctttgta

SEQ ID NO: 61637 - RNA, 19 nt, synthetic construct
  misc_feature 1..19: note = siRNA antisense sequence
  source 1..19: mol_type = other RNA
tacaaaggttactgggctt

SEQ ID NO: 61638 - RNA, 19 nt, synthetic construct
  misc_feature 1..19: note = siRNA sense sequence
  source 1..19: mol_type = other RNA
ccagtaacctttgtatttt

SEQ ID NO: 61639 - RNA, 19 nt, synthetic construct
  misc_feature 1..19: note = siRNA antisense sequence
  source 1..19: mol_type = other RNA
aaaatacaaaggttactgg

SEQ ID NO: 61640 - RNA, 19 nt, synthetic construct
  misc_feature 1..19: note = siRNA sense sequence
  source 1..19: mol_type = other RNA
aactgagggattcttatca

SEQ ID NO: 61641 - RNA, 19 nt, synthetic construct
  misc_feature 1..19: note = siRNA antisense sequence
  source 1..19: mol_type = other RNA
tgataagaatccctcagtt

SEQ ID NO: 61642 - RNA, 19 nt, synthetic construct
  misc_feature 1..19: note = siRNA sense sequence
  source 1..19: mol_type = other RNA
actgagggattcttatcaa

SEQ ID NO: 61643 - RNA, 19 nt, synthetic construct
  misc_feature 1..19: note = siRNA antisense sequence
  source 1..19: mol_type = other RNA
ttgataagaatccctcagt

SEQ ID NO: 61644 - RNA, 19 nt, synthetic construct
  misc_feature 1..19: note = siRNA sense sequence
  source 1..19: mol_type = other RNA
ctgagggattcttatcaat

SEQ ID NO: 61645 - RNA, 19 nt, synthetic construct
  misc_feature 1..19: note = siRNA antisense sequence
  source 1..19: mol_type = other RNA
attgataagaatccctcag

SEQ ID NO: 61646 - RNA, 19 nt, synthetic construct
  misc_feature 1..19: note = siRNA sense sequence
  source 1..19: mol_type = other RNA
tgagggattcttatcaata

SEQ ID NO: 61647 - RNA, 19 nt, synthetic construct
  misc_feature 1..19: note = siRNA antisense sequence
  source 1..19: mol_type = other RNA
tattgataagaatccctca

SEQ ID NO: 61648 - RNA, 19 nt, synthetic construct
  misc_feature 1..19: note = siRNA sense sequence
  source 1..19: mol_type = other RNA
gagggattcttatcaatat

SEQ ID NO: 61649 - RNA, 19 nt, synthetic construct
  misc_feature 1..19: note = siRNA antisense sequence
  source 1..19: mol_type = other RNA
atattgataagaatccctc

SEQ ID NO: 61650 - RNA, 19 nt, synthetic construct
  misc_feature 1..19: note = siRNA sense sequence
  source 1..19: mol_type = other RNA
tcagtgtgattgtcaagtc

SEQ ID NO: 61651 - RNA, 19 nt, synthetic construct
  misc_feature 1..19: note = siRNA antisense sequence
  source 1..19: mol_type = other RNA
gacttgacaatcacactga

SEQ ID NO: 61652 - RNA, 19 nt, synthetic construct
  misc_feature 1..19: note = siRNA sense sequence
  source 1..19: mol_type = other RNA
cagtgtgattgtcaagtct

SEQ ID NO: 61653 - RNA, 19 nt, synthetic construct
  misc_feature 1..19: note = siRNA antisense sequence
  source 1..19: mol_type = other RNA
agacttgacaatcacactg

SEQ ID NO: 61654 - RNA, 19 nt, synthetic construct
  misc_feature 1..19: note = siRNA sense sequence
  source 1..19: mol_type = other RNA
gattgtcaagtctagtcgc

SEQ ID NO: 61655 - RNA, 19 nt, synthetic construct
  misc_feature 1..19: note = siRNA antisense sequence
  source 1..19: mol_type = other RNA
gcgactagacttgacaatc

SEQ ID NO: 61656 - RNA, 19 nt, synthetic construct
  misc_feature 1..19: note = siRNA sense sequence
  source 1..19: mol_type = other RNA
ttgtcaagtctagtcgcac

SEQ ID NO: 61657 - RNA, 19 nt, synthetic construct
  misc_feature 1..19: note = siRNA antisense sequence
  source 1..19: mol_type = other RNA
gtgcgactagacttgacaa

SEQ ID NO: 61658 - RNA, 19 nt, synthetic construct
  misc_feature 1..19: note = siRNA sense sequence
  source 1..19: mol_type = other RNA
tctagtcgcacatcagaat

SEQ ID NO: 61659 - RNA, 19 nt, synthetic construct
  misc_feature 1..19: note = siRNA antisense sequence
  source 1..19: mol_type = other RNA
attctgatgtgcgactaga

SEQ ID NO: 61660 - RNA, 19 nt, synthetic construct
  misc_feature 1..19: note = siRNA sense sequence
  source 1..19: mol_type = other RNA
ctagtcgcacatcagaatc

SEQ ID NO: 61661 - RNA, 19 nt, synthetic construct
  misc_feature 1..19: note = siRNA antisense sequence
  source 1..19: mol_type = other RNA
gattctgatgtgcgactag

SEQ ID NO: 61662 - RNA, 19 nt, synthetic construct
  misc_feature 1..19: note = siRNA sense sequence
  source 1..19: mol_type = other RNA
tagtcgcacatcagaatca

SEQ ID NO: 61663 - RNA, 19 nt, synthetic construct
  misc_feature 1..19: note = siRNA antisense sequence
  source 1..19: mol_type = other RNA
tgattctgatgtgcgacta

SEQ ID NO: 61664 - RNA, 19 nt, synthetic construct
  misc_feature 1..19: note = siRNA sense sequence
  source 1..19: mol_type = other RNA
agtcgcacatcagaatcaa

SEQ ID NO: 61665 - RNA, 19 nt, synthetic construct
  misc_feature 1..19: note = siRNA antisense sequence
  source 1..19: mol_type = other RNA
ttgattctgatgtgcgact

SEQ ID NO: 61666 - RNA, 19 nt, synthetic construct
  misc_feature 1..19: note = siRNA sense sequence
  source 1..19: mol_type = other RNA
gtcgcacatcagaatcaac

SEQ ID NO: 61667 - RNA, 19 nt, synthetic construct
  misc_feature 1..19: note = siRNA antisense sequence
  source 1..19: mol_type = other RNA
gttgattctgatgtgcgac

SEQ ID NO: 61668 - RNA, 19 nt, synthetic construct
  misc_feature 1..19: note = siRNA sense sequence
  source 1..19: mol_type = other RNA
tcgcacatcagaatcaact

SEQ ID NO: 61669 - RNA, 19 nt, synthetic construct
  misc_feature 1..19: note = siRNA antisense sequence
  source 1..19: mol_type = other RNA
agttgattctgatgtgcga

SEQ ID NO: 61670 - RNA, 19 nt, synthetic construct
  misc_feature 1..19: note = siRNA sense sequence
  source 1..19: mol_type = other RNA
acatcagaatcaacttggg

SEQ ID NO: 61671 - RNA, 19 nt, synthetic construct
  misc_feature 1..19: note = siRNA antisense sequence
  source 1..19: mol_type = other RNA
cccaagttgattctgatgt

SEQ ID NO: 61672 - RNA, 19 nt, synthetic construct
  misc_feature 1..19: note = siRNA sense sequence
  source 1..19: mol_type = other RNA
catcagaatcaacttggga

SEQ ID NO: 61673 - RNA, 19 nt, synthetic construct
  misc_feature 1..19: note = siRNA antisense sequence
  source 1..19: mol_type = other RNA
tcccaagttgattctgatg

SEQ ID NO: 61674 - RNA, 19 nt, synthetic construct
  misc_feature 1..19: note = siRNA sense sequence
  source 1..19: mol_type = other RNA
atcagaatcaacttgggaa

SEQ ID NO: 61675 - RNA, 19 nt, synthetic construct
  misc_feature 1..19: note = siRNA antisense sequence
  source 1..19: mol_type = other RNA
ttcccaagttgattctgat

SEQ ID NO: 61676 - RNA, 19 nt, synthetic construct
  misc_feature 1..19: note = siRNA sense sequence
  source 1..19: mol_type = other RNA
aactttcaaccataccaat

SEQ ID NO: 61677 - RNA, 19 nt, synthetic construct
  misc_feature 1..19: note = siRNA antisense sequence
  source 1..19: mol_type = other RNA
attggtatggttgaaagtt

SEQ ID NO: 61678 - RNA, 19 nt, synthetic construct
  misc_feature 1..19: note = siRNA sense sequence
  source 1..19: mol_type = other RNA
actttcaaccataccaatc

SEQ ID NO: 61679 - RNA, 19 nt, synthetic construct
  misc_feature 1..19: note = siRNA antisense sequence
  source 1..19: mol_type = other RNA
gattggtatggttgaaagt

SEQ ID NO: 61680 - RNA, 19 nt, synthetic construct
  misc_feature 1..19: note = siRNA sense sequence
  source 1..19: mol_type = other RNA
ctttcaaccataccaatca

SEQ ID NO: 61681 - RNA, 19 nt, synthetic construct
  misc_feature 1..19: note = siRNA antisense sequence
  source 1..19: mol_type = other RNA
tgattggtatggttgaaag

SEQ ID NO: 61682 - RNA, 19 nt, synthetic construct
  misc_feature 1..19: note = siRNA sense sequence
  source 1..19: mol_type = other RNA
tttcaaccataccaatcat

SEQ ID NO: 61683 - RNA, 19 nt, synthetic construct
  misc_feature 1..19: note = siRNA antisense sequence
  source 1..19: mol_type = other RNA
atgattggtatggttgaaa

SEQ ID NO: 61684 - RNA, 19 nt, synthetic construct
  misc_feature 1..19: note = siRNA sense sequence
  source 1..19: mol_type = other RNA
ttcaaccataccaatcatc

SEQ ID NO: 61685 - RNA, 19 nt, synthetic construct
  misc_feature 1..19: note = siRNA antisense sequence
  source 1..19: mol_type = other RNA
gatgattggtatggttgaa

SEQ ID NO: 61686 - RNA, 19 nt, synthetic construct
  misc_feature 1..19: note = siRNA sense sequence
  source 1..19: mol_type = other RNA
tcaaccataccaatcatct

SEQ ID NO: 61687 - RNA, 19 nt, synthetic construct
  misc_feature 1..19: note = siRNA antisense sequence
  source 1..19: mol_type = other RNA
agatgattggtatggttga

SEQ ID NO: 61688 - RNA, 19 nt, synthetic construct
  misc_feature 1..19: note = siRNA sense sequence
  source 1..19: mol_type = other RNA
ccataccaatcatctctga

SEQ ID NO: 61689 - RNA, 19 nt, synthetic construct
  misc_feature 1..19: note = siRNA antisense sequence
  source 1..19: mol_type = other RNA
tcagagatgattggtatgg

SEQ ID NO: 61690 - RNA, 19 nt, synthetic construct
  misc_feature 1..19: note = siRNA sense sequence
  source 1..19: mol_type = other RNA
catctctgatctccttctt

SEQ ID NO: 61691 - RNA, 19 nt, synthetic construct
  misc_feature 1..19: note = siRNA antisense sequence
  source 1..19: mol_type = other RNA
aagaaggagatcagagatg

SEQ ID NO: 61692 - RNA, 19 nt, synthetic construct
  misc_feature 1..19: note = siRNA sense sequence
  source 1..19: mol_type = other RNA
atctctgatctccttcttc

SEQ ID NO: 61693 - RNA, 19 nt, synthetic construct
  misc_feature 1..19: note = siRNA antisense sequence
  source 1..19: mol_type = other RNA
gaagaaggagatcagagat

SEQ ID NO: 61694 - RNA, 19 nt, synthetic construct
  misc_feature 1..19: note = siRNA sense sequence
  source 1..19: mol_type = other RNA
catgcttttatttagttgc

SEQ ID NO: 61695 - RNA, 19 nt, synthetic construct
  misc_feature 1..19: note = siRNA antisense sequence
  source 1..19: mol_type = other RNA
gcaactaaataaaagcatg

SEQ ID NO: 61696 - RNA, 19 nt, synthetic construct
  misc_feature 1..19: note = siRNA sense sequence
  source 1..19: mol_type = other RNA
atgcttttatttagttgcc

SEQ ID NO: 61697 - RNA, 19 nt, synthetic construct
  misc_feature 1..19: note = siRNA antisense sequence
  source 1..19: mol_type = other RNA
ggcaactaaataaaagcat

SEQ ID NO: 61698 - RNA, 19 nt, synthetic construct
  misc_feature 1..19: note = siRNA sense sequence
  source 1..19: mol_type = other RNA
tgcttttatttagttgcca

SEQ ID NO: 61699 - RNA, 19 nt, synthetic construct
  misc_feature 1..19: note = siRNA antisense sequence
  source 1..19: mol_type = other RNA
tggcaactaaataaaagca

SEQ ID NO: 61700 - RNA, 19 nt, synthetic construct
  misc_feature 1..19: note = siRNA sense sequence
  source 1..19: mol_type = other RNA
gcttttatttagttgccag

SEQ ID NO: 61701 - RNA, 19 nt, synthetic construct
  misc_feature 1..19: note = siRNA antisense sequence
  source 1..19: mol_type = other RNA
ctggcaactaaataaaagc

SEQ ID NO: 61702 - RNA, 19 nt, synthetic construct
  misc_feature 1..19: note = siRNA sense sequence
  source 1..19: mol_type = other RNA
tatttagttgccaggataa

SEQ ID NO: 61703 - RNA, 19 nt, synthetic construct
  misc_feature 1..19: note = siRNA antisense sequence
  source 1..19: mol_type = other RNA
ttatcctggcaactaaata

SEQ ID NO: 61704 - RNA, 19 nt, synthetic construct
  misc_feature 1..19: note = siRNA sense sequence
  source 1..19: mol_type = other RNA
atttagttgccaggataag

SEQ ID NO: 61705 - RNA, 19 nt, synthetic construct
  misc_feature 1..19: note = siRNA antisense sequence
  source 1..19: mol_type = other RNA
cttatcctggcaactaaat

SEQ ID NO: 61706 - RNA, 19 nt, synthetic construct
  misc_feature 1..19: note = siRNA sense sequence
  source 1..19: mol_type = other RNA
tttagttgccaggataagc

SEQ ID NO: 61707 - RNA, 19 nt, synthetic construct
  misc_feature 1..19: note = siRNA antisense sequence
  source 1..19: mol_type = other RNA
gcttatcctggcaactaaa

SEQ ID NO: 61708 - RNA, 19 nt, synthetic construct
  misc_feature 1..19: note = siRNA sense sequence
  source 1..19: mol_type = other RNA
gattttaatggtttgtctg

SEQ ID NO: 61709 - RNA, 19 nt, synthetic construct
  misc_feature 1..19: note = siRNA antisense sequence
  source 1..19: mol_type = other RNA
cagacaaaccattaaaatc

SEQ ID NO: 61710 - RNA, 19 nt, synthetic construct
  misc_feature 1..19: note = siRNA sense sequence
  source 1..19: mol_type = other RNA
tggtttgtctgaatgtgcc

SEQ ID NO: 61711 - RNA, 19 nt, synthetic construct
  misc_feature 1..19: note = siRNA antisense sequence
  source 1..19: mol_type = other RNA
ggcacattcagacaaacca

SEQ ID NO: 61712 - RNA, 19 nt, synthetic construct
  misc_feature 1..19: note = siRNA sense sequence
  source 1..19: mol_type = other RNA
ggtttgtctgaatgtgccg

SEQ ID NO: 61713 - RNA, 19 nt, synthetic construct
  misc_feature 1..19: note = siRNA antisense sequence
  source 1..19: mol_type = other RNA
cggcacattcagacaaacc

SEQ ID NO: 61714 - RNA, 19 nt, synthetic construct
  misc_feature 1..19: note = siRNA sense sequence
  source 1..19: mol_type = other RNA
gtttgtctgaatgtgccgt

SEQ ID NO: 61715 - RNA, 19 nt, synthetic construct
  misc_feature 1..19: note = siRNA antisense sequence
  source 1..19: mol_type = other RNA
acggcacattcagacaaac

SEQ ID NO: 61716 - RNA, 19 nt, synthetic construct
  misc_feature 1..19: note = siRNA sense sequence
  source 1..19: mol_type = other RNA
tttgtctgaatgtgccgtg

SEQ ID NO: 61717 - RNA, 19 nt, synthetic construct
  misc_feature 1..19: note = siRNA antisense sequence
  source 1..19: mol_type = other RNA
cacggcacattcagacaaa

SEQ ID NO: 61718 - RNA, 19 nt, synthetic construct
  misc_feature 1..19: note = siRNA sense sequence
  source 1..19: mol_type = other RNA
ttgtctgaatgtgccgtgt

SEQ ID NO: 61719 - RNA, 19 nt, synthetic construct
  misc_feature 1..19: note = siRNA antisense sequence
  source 1..19: mol_type = other RNA
acacggcacattcagacaa

SEQ ID NO: 61720 - RNA, 19 nt, synthetic construct
  misc_feature 1..19: note = siRNA sense sequence
  source 1..19: mol_type = other RNA
tgtctgaatgtgccgtgta

SEQ ID NO: 61721 - RNA, 19 nt, synthetic construct
  misc_feature 1..19: note = siRNA antisense sequence
  source 1..19: mol_type = other RNA
tacacggcacattcagaca

SEQ ID NO: 61722 - RNA, 19 nt, synthetic construct
  misc_feature 1..19: note = siRNA sense sequence
  source 1..19: mol_type = other RNA
gtctgaatgtgccgtgtat

SEQ ID NO: 61723 - RNA, 19 nt, synthetic construct
  misc_feature 1..19: note = siRNA antisense sequence
  source 1..19: mol_type = other RNA
atacacggcacattcagac

SEQ ID NO: 61724 - RNA, 19 nt, synthetic construct
  misc_feature 1..19: note = siRNA sense sequence
  source 1..19: mol_type = other RNA
tctgaatgtgccgtgtatt

SEQ ID NO: 61725 - RNA, 19 nt, synthetic construct
  misc_feature 1..19: note = siRNA antisense sequence
  source 1..19: mol_type = other RNA
aatacacggcacattcaga

SEQ ID NO: 61726 - RNA, 19 nt, synthetic construct
  misc_feature 1..19: note = siRNA sense sequence
  source 1..19: mol_type = other RNA
ctgaatgtgccgtgtattt

SEQ ID NO: 61727 - RNA, 19 nt, synthetic construct
  misc_feature 1..19: note = siRNA antisense sequence
  source 1..19: mol_type = other RNA
aaatacacggcacattcag

SEQ ID NO: 61728 - RNA, 19 nt, synthetic construct
  misc_feature 1..19: note = siRNA sense sequence
  source 1..19: mol_type = other RNA
tgaatgtgccgtgtatttt

SEQ ID NO: 61729 - RNA, 19 nt, synthetic construct
  misc_feature 1..19: note = siRNA antisense sequence
  source 1..19: mol_type = other RNA
aaaatacacggcacattca

SEQ ID NO: 61730 - RNA, 19 nt, synthetic construct
  misc_feature 1..19: note = siRNA sense sequence
  source 1..19: mol_type = other RNA
gaatgtgccgtgtattttc

SEQ ID NO: 61731 - RNA, 19 nt, synthetic construct
  misc_feature 1..19: note = siRNA antisense sequence
  source 1..19: mol_type = other RNA
gaaaatacacggcacattc

SEQ ID NO: 61732 - RNA, 19 nt, synthetic construct
  misc_feature 1..19: note = siRNA sense sequence
  source 1..19: mol_type = other RNA
aatgtgccgtgtattttct

SEQ ID NO: 61733 - RNA, 19 nt, synthetic construct
  misc_feature 1..19: note = siRNA antisense sequence
  source 1..19: mol_type = other RNA
agaaaatacacggcacatt

SEQ ID NO: 61734 - RNA, 19 nt, synthetic construct
  misc_feature 1..19: note = siRNA sense sequence
  source 1..19: mol_type = other RNA
atgtgccgtgtattttcta

SEQ ID NO: 61735 - RNA, 19 nt, synthetic construct
  misc_feature 1..19: note = siRNA antisense sequence
  source 1..19: mol_type = other RNA
tagaaaatacacggcacat

SEQ ID NO: 61736 - RNA, 19 nt, synthetic construct
  misc_feature 1..19: note = siRNA sense sequence
  source 1..19: mol_type = other RNA
tgtgccgtgtattttctag

SEQ ID NO: 61737 - RNA, 19 nt, synthetic construct
  misc_feature 1..19: note = siRNA antisense sequence
  source 1..19: mol_type = other RNA
ctagaaaatacacggcaca

SEQ ID NO: 61738 - RNA, 19 nt, synthetic construct
  misc_feature 1..19: note = siRNA sense sequence
  source 1..19: mol_type = other RNA
tgtattttctagtgacagc

SEQ ID NO: 61739 - RNA, 19 nt, synthetic construct
  misc_feature 1..19: note = siRNA antisense sequence
  source 1..19: mol_type = other RNA
gctgtcactagaaaataca

SEQ ID NO: 61740 - RNA, 19 nt, synthetic construct
  misc_feature 1..19: note = siRNA sense sequence
  source 1..19: mol_type = other RNA
gtattttctagtgacagcg

SEQ ID NO: 61741 - RNA, 19 nt, synthetic construct
  misc_feature 1..19: note = siRNA antisense sequence
  source 1..19: mol_type = other RNA
cgctgtcactagaaaatac

SEQ ID NO: 61742 - RNA, 19 nt, synthetic construct
  misc_feature 1..19: note = siRNA sense sequence
  source 1..19: mol_type = other RNA
tattttctagtgacagcga

SEQ ID NO: 61743 - RNA, 19 nt, synthetic construct
  misc_feature 1..19: note = siRNA antisense sequence
  source 1..19: mol_type = other RNA
tcgctgtcactagaaaata

SEQ ID NO: 61744 - RNA, 19 nt, synthetic construct
  misc_feature 1..19: note = siRNA sense sequence
  source 1..19: mol_type = other RNA
attttctagtgacagcgaa

SEQ ID NO: 61745 - RNA, 19 nt, synthetic construct
  misc_feature 1..19: note = siRNA antisense sequence
  source 1..19: mol_type = other RNA
ttcgctgtcactagaaaat

SEQ ID NO: 61746 - RNA, 19 nt, synthetic construct
  misc_feature 1..19: note = siRNA sense sequence
  source 1..19: mol_type = other RNA
ttttctagtgacagcgaag

SEQ ID NO: 61747 - RNA, 19 nt, synthetic construct
  misc_feature 1..19: note = siRNA antisense sequence
  source 1..19: mol_type = other RNA
cttcgctgtcactagaaaa

SEQ ID NO: 61748 - RNA, 19 nt, synthetic construct
  misc_feature 1..19: note = siRNA sense sequence
  source 1..19: mol_type = other RNA
tttctagtgacagcgaaga

SEQ ID NO: 61749 - RNA, 19 nt, synthetic construct
  misc_feature 1..19: note = siRNA antisense sequence
  source 1..19: mol_type = other RNA
tcttcgctgtcactagaaa

SEQ ID NO: 61750 - RNA, 19 nt, synthetic construct
  misc_feature 1..19: note = siRNA sense sequence
  source 1..19: mol_type = other RNA
ccctttctgataatgtagt

SEQ ID NO: 61751 - RNA, 19 nt, synthetic construct
  misc_feature 1..19: note = siRNA antisense sequence
  source 1..19: mol_type = other RNA
actacattatcagaaaggg

SEQ ID NO: 61752 - RNA, 19 nt, synthetic construct
  misc_feature 1..19: note = siRNA sense sequence
  source 1..19: mol_type = other RNA
acatttctatcccggtaaa

SEQ ID NO: 61753 - RNA, 19 nt, synthetic construct
  misc_feature 1..19: note = siRNA antisense sequence
  source 1..19: mol_type = other RNA
tttaccgggatagaaatgt

SEQ ID NO: 61754 - RNA, 19 nt, synthetic construct
  misc_feature 1..19: note = siRNA sense sequence
  source 1..19: mol_type = other RNA
catttctatcccggtaaaa

SEQ ID NO: 61755 - RNA, 19 nt, synthetic construct
  misc_feature 1..19: note = siRNA antisense sequence
  source 1..19: mol_type = other RNA
ttttaccgggatagaaatg

SEQ ID NO: 61756 - RNA, 19 nt, synthetic construct
  misc_feature 1..19: note = siRNA sense sequence
  source 1..19: mol_type = other RNA
tttctatcccggtaaaata

SEQ ID NO: 61757 - RNA, 19 nt, synthetic construct
  misc_feature 1..19: note = siRNA antisense sequence
  source 1..19: mol_type = other RNA
tattttaccgggatagaaa

SEQ ID NO: 61758 - RNA, 19 nt, synthetic construct
  misc_feature 1..19: note = siRNA sense sequence
  source 1..19: mol_type = other RNA
ttctatcccggtaaaatat

SEQ ID NO: 61759 - RNA, 19 nt, synthetic construct
  misc_feature 1..19: note = siRNA antisense sequence
  source 1..19: mol_type = other RNA
atattttaccgggatagaa

SEQ ID NO: 61760 - RNA, 19 nt, synthetic construct
  misc_feature 1..19: note = siRNA sense sequence
  source 1..19: mol_type = other RNA
tctatcccggtaaaatatg

SEQ ID NO: 61761 - RNA, 19 nt, synthetic construct
  misc_feature 1..19: note = siRNA antisense sequence
  source 1..19: mol_type = other RNA
catattttaccgggataga

SEQ ID NO: 61762 - RNA, 19 nt, synthetic construct
  misc_feature 1..19: note = siRNA sense sequence
  source 1..19: mol_type = other RNA
ctatcccggtaaaatatga

SEQ ID NO: 61763 - RNA, 19 nt, synthetic construct
  misc_feature 1..19: note = siRNA antisense sequence
  source 1..19: mol_type = other RNA
tcatattttaccgggatag

SEQ ID NO: 61764 - RNA, 19 nt, synthetic construct
  misc_feature 1..19: note = siRNA sense sequence
  source 1..19: mol_type = other RNA
tatcccggtaaaatatgaa

SEQ ID NO: 61765 - RNA, 19 nt, synthetic construct
  misc_feature 1..19: note = siRNA antisense sequence
  source 1..19: mol_type = other RNA
ttcatattttaccgggata

SEQ ID NO: 61766 - RNA, 19 nt, synthetic construct
  misc_feature 1..19: note = siRNA sense sequence
  source 1..19: mol_type = other RNA
atcccggtaaaatatgaag

SEQ ID NO: 61767 - RNA, 19 nt, synthetic construct
  misc_feature 1..19: note = siRNA antisense sequence
  source 1..19: mol_type = other RNA
cttcatattttaccgggat

SEQ ID NO: 61768 - RNA, 19 nt, synthetic construct
  misc_feature 1..19: note = siRNA sense sequence
  source 1..19: mol_type = other RNA
tcccggtaaaatatgaagt

SEQ ID NO: 61769 - RNA, 19 nt, synthetic construct
  misc_feature 1..19: note = siRNA antisense sequence
  source 1..19: mol_type = other RNA
acttcatattttaccggga

SEQ ID NO: 61770 - RNA, 19 nt, synthetic construct
  misc_feature 1..19: note = siRNA sense sequence
  source 1..19: mol_type = other RNA
cccggtaaaatatgaagtt

SEQ ID NO: 61771 - RNA, 19 nt, synthetic construct
  misc_feature 1..19: note = siRNA antisense sequence
  source 1..19: mol_type = other RNA
aacttcatattttaccggg

SEQ ID NO: 61772 - RNA, 19 nt, synthetic construct
  misc_feature 1..19: note = siRNA sense sequence
  source 1..19: mol_type = other RNA
ccggtaaaatatgaagttg

SEQ ID NO: 61773 - RNA, 19 nt, synthetic construct
  misc_feature 1..19: note = siRNA antisense sequence
  source 1..19: mol_type = other RNA
caacttcatattttaccgg

SEQ ID NO: 61774 - RNA, 19 nt, synthetic construct
  misc_feature 1..19: note = siRNA sense sequence
  source 1..19: mol_type = other RNA
cggtaaaatatgaagttgg

SEQ ID NO: 61775 - RNA, 19 nt, synthetic construct
  misc_feature 1..19: note = siRNA antisense sequence
  source 1..19: mol_type = other RNA
ccaacttcatattttaccg

SEQ ID NO: 61776 - RNA, 19 nt, synthetic construct
  misc_feature 1..19: note = siRNA sense sequence
  source 1..19: mol_type = other RNA
ggtaaaatatgaagttgga

SEQ ID NO: 61777 - RNA, 19 nt, synthetic construct
  misc_feature 1..19: note = siRNA antisense sequence
  source 1..19: mol_type = other RNA
tccaacttcatattttacc

SEQ ID NO: 61778 - RNA, 19 nt, synthetic construct
  misc_feature 1..19: note = siRNA sense sequence
  source 1..19: mol_type = other RNA
gtaaaatatgaagttggac

SEQ ID NO: 61779 - RNA, 19 nt, synthetic construct
  misc_feature 1..19: note = siRNA antisense sequence
  source 1..19: mol_type = other RNA
gtccaacttcatattttac

SEQ ID NO: 61780 - RNA, 19 nt, synthetic construct
  misc_feature 1..19: note = siRNA sense sequence
  source 1..19: mol_type = other RNA
aaatatgaagttggactac

SEQ ID NO: 61781 - RNA, 19 nt, synthetic construct
  misc_feature 1..19: note = siRNA antisense sequence
  source 1..19: mol_type = other RNA
gtagtccaacttcatattt

SEQ ID NO: 61782 - RNA, 19 nt, synthetic construct
  misc_feature 1..19: note = siRNA sense sequence
  source 1..19: mol_type = other RNA
aatatgaagttggactaca

SEQ ID NO: 61783 - RNA, 19 nt, synthetic construct
  misc_feature 1..19: note = siRNA antisense sequence
  source 1..19: mol_type = other RNA
tgtagtccaacttcatatt

SEQ ID NO: 61784 - RNA, 19 nt, synthetic construct
  misc_feature 1..19: note = siRNA sense sequence
  source 1..19: mol_type = other RNA
atatgaagttggactacag

SEQ ID NO: 61785 - RNA, 19 nt, synthetic construct
  misc_feature 1..19: note = siRNA antisense sequence
  source 1..19: mol_type = other RNA
ctgtagtccaacttcatat

SEQ ID NO: 61786 - RNA, 19 nt, synthetic construct
  misc_feature 1..19: note = siRNA sense sequence
  source 1..19: mol_type = other RNA
tatgaagttggactacagt

SEQ ID NO: 61787 - RNA, 19 nt, synthetic construct
  misc_feature 1..19: note = siRNA antisense sequence
  source 1..19: mol_type = other RNA
actgtagtccaacttcata

SEQ ID NO: 61788 - RNA, 19 nt, synthetic construct
  misc_feature 1..19: note = siRNA sense sequence
  source 1..19: mol_type = other RNA
atgaagttggactacagtt

SEQ ID NO: 61789 - RNA, 19 nt, synthetic construct
  misc_feature 1..19: note = siRNA antisense sequence
  source 1..19: mol_type = other RNA
aactgtagtccaacttcat

SEQ ID NO: 61790 - RNA, 19 nt, synthetic construct
  misc_feature 1..19: note = siRNA sense sequence
  source 1..19: mol_type = other RNA
tgaagttggactacagttt

SEQ ID NO: 61791 - RNA, 19 nt, synthetic construct
  misc_feature 1..19: note = siRNA antisense sequence
  source 1..19: mol_type = other RNA
aaactgtagtccaacttca

SEQ ID NO: 61792 - RNA, 19 nt, synthetic construct
  misc_feature 1..19: note = siRNA sense sequence
  source 1..19: mol_type = other RNA
aagttggactacagtttta

SEQ ID NO: 61793 - RNA, 19 nt, synthetic construct
  misc_feature 1..19: note = siRNA antisense sequence
  source 1..19: mol_type = other RNA
taaaactgtagtccaactt

SEQ ID NO: 61794 - RNA, 19 nt, synthetic construct
  misc_feature 1..19: note = siRNA sense sequence
  source 1..19: mol_type = other RNA
agttggactacagttttac

SEQ ID NO: 61795 - RNA, 19 nt, synthetic construct
  misc_feature 1..19: note = siRNA antisense sequence
  source 1..19: mol_type = other RNA
gtaaaactgtagtccaact

SEQ ID NO: 61796 - RNA, 19 nt, synthetic construct
  misc_feature 1..19: note = siRNA sense sequence
  source 1..19: mol_type = other RNA
gttggactacagttttaca

SEQ ID NO: 61797 - RNA, 19 nt, synthetic construct
  misc_feature 1..19: note = siRNA antisense sequence
  source 1..19: mol_type = other RNA
tgtaaaactgtagtccaac

SEQ ID NO: 61798 - RNA, 19 nt, synthetic construct
  misc_feature 1..19: note = siRNA sense sequence
  source 1..19: mol_type = other RNA
tatgtggatgcctttctat

SEQ ID NO: 61799 - RNA, 19 nt, synthetic construct
  misc_feature 1..19: note = siRNA antisense sequence
  source 1..19: mol_type = other RNA
atagaaaggcatccacata

SEQ ID NO: 61800 - RNA, 19 nt, synthetic construct
  misc_feature 1..19: note = siRNA sense sequence
  source 1..19: mol_type = other RNA
atgtggatgcctttctatt

SEQ ID NO: 61801 - RNA, 19 nt, synthetic construct
  misc_feature 1..19: note = siRNA antisense sequence
  source 1..19: mol_type = other RNA
aatagaaaggcatccacat

SEQ ID NO: 61802 - RNA, 19 nt, synthetic construct
  misc_feature 1..19: note = siRNA sense sequence
  source 1..19: mol_type = other RNA
tgtggatgcctttctatta

SEQ ID NO: 61803 - RNA, 19 nt, synthetic construct
  misc_feature 1..19: note = siRNA antisense sequence
  source 1..19: mol_type = other RNA
taatagaaaggcatccaca

SEQ ID NO: 61804 - RNA, 19 nt, synthetic construct
  misc_feature 1..19: note = siRNA sense sequence
  source 1..19: mol_type = other RNA
gtggatgcctttctattaa

SEQ ID NO: 61805 - RNA, 19 nt, synthetic construct
  misc_feature 1..19: note = siRNA antisense sequence
  source 1..19: mol_type = other RNA
ttaatagaaaggcatccac

SEQ ID NO: 61806 - RNA, 19 nt, synthetic construct
  misc_feature 1..19: note = siRNA sense sequence
  source 1..19: mol_type = other RNA
tggatgcctttctattaac

SEQ ID NO: 61807 - RNA, 19 nt, synthetic construct
  misc_feature 1..19: note = siRNA antisense sequence
  source 1..19: mol_type = other RNA
gttaatagaaaggcatcca

SEQ ID NO: 61808 - RNA, 19 nt, synthetic construct
  misc_feature 1..19: note = siRNA sense sequence
  source 1..19: mol_type = other RNA
ggatgcctttctattaacc

SEQ ID NO: 61809 - RNA, 19 nt, synthetic construct
  misc_feature 1..19: note = siRNA antisense sequence
  source 1..19: mol_type = other RNA
ggttaatagaaaggcatcc

SEQ ID NO: 61810 - RNA, 19 nt, synthetic construct
  misc_feature 1..19: note = siRNA sense sequence
  source 1..19: mol_type = other RNA
gatgcctttctattaaccc

SEQ ID NO: 61811 - RNA, 19 nt, synthetic construct
  misc_feature 1..19: note = siRNA antisense sequence
  source 1..19: mol_type = other RNA
gggttaatagaaaggcatc

SEQ ID NO: 61812 - RNA, 19 nt, synthetic construct
  misc_feature 1..19: note = siRNA sense sequence
  source 1..19: mol_type = other RNA
atgcctttctattaaccca

SEQ ID NO: 61813 - RNA, 19 nt, synthetic construct
  misc_feature 1..19: note = siRNA antisense sequence
  source 1..19: mol_type = other RNA
tgggttaatagaaaggcat

SEQ ID NO: 61814 - RNA, 19 nt, synthetic construct
  misc_feature 1..19: note = siRNA sense sequence
  source 1..19: mol_type = other RNA
tgcctttctattaacccag

SEQ ID NO: 61815 - RNA, 19 nt, synthetic construct
  misc_feature 1..19: note = siRNA antisense sequence
  source 1..19: mol_type = other RNA
ctgggttaatagaaaggca

SEQ ID NO: 61816 - RNA, 19 nt, synthetic construct
  misc_feature 1..19: note = siRNA sense sequence
  source 1..19: mol_type = other RNA
gcctttctattaacccagt

SEQ ID NO: 61817 - RNA, 19 nt, synthetic construct
  misc_feature 1..19: note = siRNA antisense sequence
  source 1..19: mol_type = other RNA
actgggttaatagaaaggc

SEQ ID NO: 61818 - RNA, 19 nt, synthetic construct
  misc_feature 1..19: note = siRNA sense sequence
  source 1..19: mol_type = other RNA
cctttctattaacccagtg

SEQ ID NO: 61819 - RNA, 19 nt, synthetic construct
  misc_feature 1..19: note = siRNA antisense sequence
  source 1..19: mol_type = other RNA
cactgggttaatagaaagg

SEQ ID NO: 61820 - RNA, 19 nt, synthetic construct
  misc_feature 1..19: note = siRNA sense sequence
  source 1..19: mol_type = other RNA
ctttctattaacccagtgg

SEQ ID NO: 61821 - RNA, 19 nt, synthetic construct
  misc_feature 1..19: note = siRNA antisense sequence
  source 1..19: mol_type = other RNA
ccactgggttaatagaaag

SEQ ID NO: 61822 - RNA, 19 nt, synthetic construct
  misc_feature 1..19: note = siRNA sense sequence
  source 1..19: mol_type = other RNA
tttctattaacccagtggt

SEQ ID NO: 61823 - RNA, 19 nt, synthetic construct
  misc_feature 1..19: note = siRNA antisense sequence
  source 1..19: mol_type = other RNA
accactgggttaatagaaa

SEQ ID NO: 61824 - RNA, 19 nt, synthetic construct
  misc_feature 1..19: note = siRNA sense sequence
  source 1..19: mol_type = other RNA
cttgttaggcaaattctct

SEQ ID NO: 61825 - RNA, 19 nt, synthetic construct
  misc_feature 1..19: note = siRNA antisense sequence
  source 1..19: mol_type = other RNA
agagaatttgcctaacaag

SEQ ID NO: 61826 - RNA, 19 nt, synthetic construct
  misc_feature 1..19: note = siRNA sense sequence
  source 1..19: mol_type = other RNA
ttgttaggcaaattctctg

SEQ ID NO: 61827 - RNA, 19 nt, synthetic construct
  misc_feature 1..19: note = siRNA antisense sequence
  source 1..19: mol_type = other RNA
cagagaatttgcctaacaa

SEQ ID NO: 61828 - RNA, 19 nt, synthetic construct
  misc_feature 1..19: note = siRNA sense sequence
  source 1..19: mol_type = other RNA
tgttaggcaaattctctgg

SEQ ID NO: 61829 - RNA, 19 nt, synthetic construct
  misc_feature 1..19: note = siRNA antisense sequence
  source 1..19: mol_type = other RNA
ccagagaatttgcctaaca

SEQ ID NO: 61830 - RNA, 19 nt, synthetic construct
  misc_feature 1..19: note = siRNA sense sequence
  source 1..19: mol_type = other RNA
gttaggcaaattctctggc

SEQ ID NO: 61831 - RNA, 19 nt, synthetic construct
  misc_feature 1..19: note = siRNA antisense sequence
  source 1..19: mol_type = other RNA
gccagagaatttgcctaac

SEQ ID NO: 61832 - RNA, 19 nt, synthetic construct
  misc_feature 1..19: note = siRNA sense sequence
  source 1..19: mol_type = other RNA
ttaggcaaattctctggcc

SEQ ID NO: 61833 - RNA, 19 nt, synthetic construct
  misc_feature 1..19: note = siRNA antisense sequence
  source 1..19: mol_type = other RNA
ggccagagaatttgcctaa

SEQ ID NO: 61834 - RNA, 19 nt, synthetic construct
  misc_feature 1..19: note = siRNA sense sequence
  source 1..19: mol_type = other RNA
taggcaaattctctggccc

SEQ ID NO: 61835 - RNA, 19 nt, synthetic construct
  misc_feature 1..19: note = siRNA antisense sequence
  source 1..19: mol_type = other RNA
gggccagagaatttgccta

SEQ ID NO: 61836 - RNA, 19 nt, synthetic construct
  misc_feature 1..19: note = siRNA sense sequence
  source 1..19: mol_type = other RNA
ttccaggtaattctcatgc

SEQ ID NO: 61837 - RNA, 19 nt, synthetic construct
  misc_feature 1..19: note = siRNA antisense sequence
  source 1..19: mol_type = other RNA
gcatgagaattacctggaa

SEQ ID NO: 61838 - RNA, 19 nt, synthetic construct
  misc_feature 1..19: note = siRNA sense sequence
  source 1..19: mol_type = other RNA
aggtaattctcatgcatcc

SEQ ID NO: 61839 - RNA, 19 nt, synthetic construct
  misc_feature 1..19: note = siRNA antisense sequence
  source 1..19: mol_type = other RNA
ggatgcatgagaattacct

SEQ ID NO: 61840 - RNA, 19 nt, synthetic construct
  misc_feature 1..19: note = siRNA sense sequence
  source 1..19: mol_type = other RNA
ggtaattctcatgcatcct

SEQ ID NO: 61841 - RNA, 19 nt, synthetic construct
  misc_feature 1..19: note = siRNA antisense sequence
  source 1..19: mol_type = other RNA
aggatgcatgagaattacc

SEQ ID NO: 61842 - RNA, 19 nt, synthetic construct
  misc_feature 1..19: note = siRNA sense sequence
  source 1..19: mol_type = other RNA
gtaattctcatgcatccta

SEQ ID NO: 61843 - RNA, 19 nt, synthetic construct
  misc_feature 1..19: note = siRNA antisense sequence
  source 1..19: mol_type = other RNA
taggatgcatgagaattac

SEQ ID NO: 61844 - RNA, 19 nt, synthetic construct
  misc_feature 1..19: note = siRNA sense sequence
  source 1..19: mol_type = other RNA
taattctcatgcatcctaa

SEQ ID NO: 61845 - RNA, 19 nt, synthetic construct
  misc_feature 1..19: note = siRNA antisense sequence
  source 1..19: mol_type = other RNA
ttaggatgcatgagaatta

SEQ ID NO: 61846 - RNA, 19 nt, synthetic construct
  misc_feature 1..19: note = siRNA sense sequence
  source 1..19: mol_type = other RNA
aattctcatgcatcctaat

SEQ ID NO: 61847 - RNA, 19 nt, synthetic construct
  misc_feature 1..19: note = siRNA antisense sequence
  source 1..19: mol_type = other RNA
attaggatgcatgagaatt

SEQ ID NO: 61848 - RNA, 19 nt, synthetic construct
  misc_feature 1..19: note = siRNA sense sequence
  source 1..19: mol_type = other RNA
actaaataacccaaagtgt

SEQ ID NO: 61849 - RNA, 19 nt, synthetic construct
  misc_feature 1..19: note = siRNA antisense sequence
  source 1..19: mol_type = other RNA
acactttgggttatttagt

SEQ ID NO: 61850 - RNA, 19 nt, synthetic construct
  misc_feature 1..19: note = siRNA sense sequence
  source 1..19: mol_type = other RNA
aacccaaagtgttaggtgt

SEQ ID NO: 61851 - RNA, 19 nt, synthetic construct
  misc_feature 1..19: note = siRNA antisense sequence
  source 1..19: mol_type = other RNA
acacctaacactttgggtt

SEQ ID NO: 61852 - RNA, 19 nt, synthetic construct
  misc_feature 1..19: note = siRNA sense sequence
  source 1..19: mol_type = other RNA
cccaaagtgttaggtgtta

SEQ ID NO: 61853 - RNA, 19 nt, synthetic construct
  misc_feature 1..19: note = siRNA antisense sequence
  source 1..19: mol_type = other RNA
taacacctaacactttggg

SEQ ID NO: 61854 - RNA, 19 nt, synthetic construct
  misc_feature 1..19: note = siRNA sense sequence
  source 1..19: mol_type = other RNA
ccaaagtgttaggtgttag

SEQ ID NO: 61855 - RNA, 19 nt, synthetic construct
  misc_feature 1..19: note = siRNA antisense sequence
  source 1..19: mol_type = other RNA
ctaacacctaacactttgg

SEQ ID NO: 61856 - RNA, 19 nt, synthetic construct
  misc_feature 1..19: note = siRNA sense sequence
  source 1..19: mol_type = other RNA
caaagtgttaggtgttagt

SEQ ID NO: 61857 - RNA, 19 nt, synthetic construct
  misc_feature 1..19: note = siRNA antisense sequence
  source 1..19: mol_type = other RNA
actaacacctaacactttg

SEQ ID NO: 61858 - RNA, 19 nt, synthetic construct
  misc_feature 1..19: note = siRNA sense sequence
  source 1..19: mol_type = other RNA
aaagtgttaggtgttagtg

SEQ ID NO: 61859 - RNA, 19 nt, synthetic construct
  misc_feature 1..19: note = siRNA antisense sequence
  source 1..19: mol_type = other RNA
cactaacacctaacacttt

SEQ ID NO: 61860 - RNA, 19 nt, synthetic construct
  misc_feature 1..19: note = siRNA sense sequence
  source 1..19: mol_type = other RNA
gttaggtgttagtgatacc

SEQ ID NO: 61861 - RNA, 19 nt, synthetic construct
  misc_feature 1..19: note = siRNA antisense sequence
  source 1..19: mol_type = other RNA
ggtatcactaacacctaac

SEQ ID NO: 61862 - RNA, 19 nt, synthetic construct
  misc_feature 1..19: note = siRNA sense sequence
  source 1..19: mol_type = other RNA
ttaggtgttagtgataccg

SEQ ID NO: 61863 - RNA, 19 nt, synthetic construct
  misc_feature 1..19: note = siRNA antisense sequence
  source 1..19: mol_type = other RNA
cggtatcactaacacctaa

SEQ ID NO: 61864 - RNA, 19 nt, synthetic construct
  misc_feature 1..19: note = siRNA sense sequence
  source 1..19: mol_type = other RNA
taggtgttagtgataccgg

SEQ ID NO: 61865 - RNA, 19 nt, synthetic construct
  misc_feature 1..19: note = siRNA antisense sequence
  source 1..19: mol_type = other RNA
ccggtatcactaacaccta

SEQ ID NO: 61866 - RNA, 19 nt, synthetic construct
  misc_feature 1..19: note = siRNA sense sequence
  source 1..19: mol_type = other RNA
aggtgttagtgataccgga

SEQ ID NO: 61867 - RNA, 19 nt, synthetic construct
  misc_feature 1..19: note = siRNA antisense sequence
  source 1..19: mol_type = other RNA
tccggtatcactaacacct

SEQ ID NO: 61868 - RNA, 19 nt, synthetic construct
  misc_feature 1..19: note = siRNA sense sequence
  source 1..19: mol_type = other RNA
ggtgttagtgataccggat

SEQ ID NO: 61869 - RNA, 19 nt, synthetic construct
  misc_feature 1..19: note = siRNA antisense sequence
  source 1..19: mol_type = other RNA
atccggtatcactaacacc

SEQ ID NO: 61870 - RNA, 19 nt, synthetic construct
  misc_feature 1..19: note = siRNA sense sequence
  source 1..19: mol_type = other RNA
gtgttagtgataccggatt

SEQ ID NO: 61871 - RNA, 19 nt, synthetic construct
  misc_feature 1..19: note = siRNA antisense sequence
  source 1..19: mol_type = other RNA
aatccggtatcactaacac

SEQ ID NO: 61872 - RNA, 19 nt, synthetic construct
  misc_feature 1..19: note = siRNA sense sequence
  source 1..19: mol_type = other RNA
tgttagtgataccggattg

SEQ ID NO: 61873 - RNA, 19 nt, synthetic construct
  misc_feature 1..19: note = siRNA antisense sequence
  source 1..19: mol_type = other RNA
caatccggtatcactaaca

SEQ ID NO: 61874 - RNA, 19 nt, synthetic construct
  misc_feature 1..19: note = siRNA sense sequence
  source 1..19: mol_type = other RNA
gttagtgataccggattgc

SEQ ID NO: 61875 - RNA, 19 nt, synthetic construct
  misc_feature 1..19: note = siRNA antisense sequence
  source 1..19: mol_type = other RNA
gcaatccggtatcactaac

SEQ ID NO: 61876 - RNA, 19 nt, synthetic construct
  misc_feature 1..19: note = siRNA sense sequence
  source 1..19: mol_type = other RNA
ttagtgataccggattgca

SEQ ID NO: 61877 - RNA, 19 nt, synthetic construct
  misc_feature 1..19: note = siRNA antisense sequence
  source 1..19: mol_type = other RNA
tgcaatccggtatcactaa

SEQ ID NO: 61878 - RNA, 19 nt, synthetic construct
  misc_feature 1..19: note = siRNA sense sequence
  source 1..19: mol_type = other RNA
tagtgataccggattgcat

SEQ ID NO: 61879 - RNA, 19 nt, synthetic construct
  misc_feature 1..19: note = siRNA antisense sequence
  source 1..19: mol_type = other RNA
atgcaatccggtatcacta

SEQ ID NO: 61880 - RNA, 19 nt, synthetic construct
  misc_feature 1..19: note = siRNA sense sequence
  source 1..19: mol_type = other RNA
agtgataccggattgcatt

SEQ ID NO: 61881 - RNA, 19 nt, synthetic construct
  misc_feature 1..19: note = siRNA antisense sequence
  source 1..19: mol_type = other RNA
aatgcaatccggtatcact

SEQ ID NO: 61882 - RNA, 19 nt, synthetic construct
  misc_feature 1..19: note = siRNA sense sequence
  source 1..19: mol_type = other RNA
gtgataccggattgcattt

SEQ ID NO: 61883 - RNA, 19 nt, synthetic construct
  misc_feature 1..19: note = siRNA antisense sequence
  source 1..19: mol_type = other RNA
aaatgcaatccggtatcac

SEQ ID NO: 61884 - RNA, 19 nt, synthetic construct
  misc_feature 1..19: note = siRNA sense sequence
  source 1..19: mol_type = other RNA
tgataccggattgcatttg

SEQ ID NO: 61885 - RNA, 19 nt, synthetic construct
  misc_feature 1..19: note = siRNA antisense sequence
  source 1..19: mol_type = other RNA
caaatgcaatccggtatca

SEQ ID NO: 61886 - RNA, 19 nt, synthetic construct
  misc_feature 1..19: note = siRNA sense sequence
  source 1..19: mol_type = other RNA
gataccggattgcatttgc

SEQ ID NO: 61887 - RNA, 19 nt, synthetic construct
  misc_feature 1..19: note = siRNA antisense sequence
  source 1..19: mol_type = other RNA
gcaaatgcaatccggtatc

SEQ ID NO: 61888 - RNA, 19 nt, synthetic construct
  misc_feature 1..19: note = siRNA sense sequence
  source 1..19: mol_type = other RNA
ataccggattgcatttgct

SEQ ID NO: 61889 - RNA, 19 nt, synthetic construct
  misc_feature 1..19: note = siRNA antisense sequence
  source 1..19: mol_type = other RNA
agcaaatgcaatccggtat

SEQ ID NO: 61890 - RNA, 19 nt, synthetic construct
  misc_feature 1..19: note = siRNA sense sequence
  source 1..19: mol_type = other RNA
taccggattgcatttgctg

SEQ ID NO: 61891 - RNA, 19 nt, synthetic construct
  misc_feature 1..19: note = siRNA antisense sequence
  source 1..19: mol_type = other RNA
cagcaaatgcaatccggta

SEQ ID NO: 61892 - RNA, 19 nt, synthetic construct
  misc_feature 1..19: note = siRNA sense sequence
  source 1..19: mol_type = other RNA
accggattgcatttgctgt

SEQ ID NO: 61893 - RNA, 19 nt, synthetic construct
  misc_feature 1..19: note = siRNA antisense sequence
  source 1..19: mol_type = other RNA
acagcaaatgcaatccggt

SEQ ID NO: 61894 - RNA, 19 nt, synthetic construct
  misc_feature 1..19: note = siRNA sense sequence
  source 1..19: mol_type = other RNA
ccggattgcatttgctgtc

SEQ ID NO: 61895 - RNA, 19 nt, synthetic construct
  misc_feature 1..19: note = siRNA antisense sequence
  source 1..19: mol_type = other RNA
gacagcaaatgcaatccgg

SEQ ID NO: 61896 - RNA, 19 nt, synthetic construct
  misc_feature 1..19: note = siRNA sense sequence
  source 1..19: mol_type = other RNA
cggattgcatttgctgtcc

SEQ ID NO: 61897 - RNA, 19 nt, synthetic construct
  misc_feature 1..19: note = siRNA antisense sequence
  source 1..19: mol_type = other RNA
ggacagcaaatgcaatccg

SEQ ID NO: 61898 - RNA, 19 nt, synthetic construct
  misc_feature 1..19: note = siRNA sense sequence
  source 1..19: mol_type = other RNA
ggattgcatttgctgtcca

SEQ ID NO: 61899 - RNA, 19 nt, synthetic construct
  misc_feature 1..19: note = siRNA antisense sequence
  source 1..19: mol_type = other RNA
tggacagcaaatgcaatcc

SEQ ID NO: 61900 - RNA, 19 nt, synthetic construct
  misc_feature 1..19: note = siRNA sense sequence
  source 1..19: mol_type = other RNA
ttgctgtccagtcttaatt

SEQ ID NO: 61901 - RNA, 19 nt, synthetic construct
  misc_feature 1..19: note = siRNA antisense sequence
  source 1..19: mol_type = other RNA
aattaagactggacagcaa

SEQ ID NO: 61902 - RNA, 19 nt, synthetic construct
  misc_feature 1..19: note = siRNA sense sequence
  source 1..19: mol_type = other RNA
gctgtccagtcttaattcc

SEQ ID NO: 61903 - RNA, 19 nt, synthetic construct
  misc_feature 1..19: note = siRNA antisense sequence
  source 1..19: mol_type = other RNA
ggaattaagactggacagc

SEQ ID NO: 61904 - RNA, 19 nt, synthetic construct
  misc_feature 1..19: note = siRNA sense sequence
  source 1..19: mol_type = other RNA
ctgtccagtcttaattccc

SEQ ID NO: 61905 - RNA, 19 nt, synthetic construct
  misc_feature 1..19: note = siRNA antisense sequence
  source 1..19: mol_type = other RNA
gggaattaagactggacag

SEQ ID NO: 61906 - RNA, 19 nt, synthetic construct
  misc_feature 1..19: note = siRNA sense sequence
  source 1..19: mol_type = other RNA
tgtccagtcttaattcccg

SEQ ID NO: 61907 - RNA, 19 nt, synthetic construct
  misc_feature 1..19: note = siRNA antisense sequence
  source 1..19: mol_type = other RNA
cgggaattaagactggaca

SEQ ID NO: 61908 - RNA, 19 nt, synthetic construct
  misc_feature 1..19: note = siRNA sense sequence
  source 1..19: mol_type = other RNA
cagtcttaattcccgaatg

SEQ ID NO: 61909 - RNA, 19 nt, synthetic construct
  misc_feature 1..19: note = siRNA antisense sequence
  source 1..19: mol_type = other RNA
cattcgggaattaagactg

SEQ ID NO: 61910 - RNA, 19 nt, synthetic construct
  misc_feature 1..19: note = siRNA sense sequence
  source 1..19: mol_type = other RNA
agtcttaattcccgaatgc

SEQ ID NO: 61911 - RNA, 19 nt, synthetic construct
  misc_feature 1..19: note = siRNA antisense sequence
  source 1..19: mol_type = other RNA
gcattcgggaattaagact

SEQ ID NO: 61912 - RNA, 19 nt, synthetic construct
  misc_feature 1..19: note = siRNA sense sequence
  source 1..19: mol_type = other RNA
ttaattcccgaatgcaagt

SEQ ID NO: 61913 - RNA, 19 nt, synthetic construct
  misc_feature 1..19: note = siRNA antisense sequence
  source 1..19: mol_type = other RNA
acttgcattcgggaattaa

SEQ ID NO: 61914 - RNA, 19 nt, synthetic construct
  misc_feature 1..19: note = siRNA sense sequence
  source 1..19: mol_type = other RNA
taattcccgaatgcaagtt

SEQ ID NO: 61915 - RNA, 19 nt, synthetic construct
  misc_feature 1..19: note = siRNA antisense sequence
  source 1..19: mol_type = other RNA
aacttgcattcgggaatta

SEQ ID NO: 61916 - RNA, 19 nt, synthetic construct
  misc_feature 1..19: note = siRNA sense sequence
  source 1..19: mol_type = other RNA
aattcccgaatgcaagttg

SEQ ID NO: 61917 - RNA, 19 nt, synthetic construct
  misc_feature 1..19: note = siRNA antisense sequence
  source 1..19: mol_type = other RNA
caacttgcattcgggaatt

SEQ ID NO: 61918 - RNA, 19 nt, synthetic construct
  misc_feature 1..19: note = siRNA sense sequence
  source 1..19: mol_type = other RNA
attcccgaatgcaagttga

SEQ ID NO: 61919 - RNA, 19 nt, synthetic construct
  misc_feature 1..19: note = siRNA antisense sequence
  source 1..19: mol_type = other RNA
tcaacttgcattcgggaat

SEQ ID NO: 61920 - RNA, 19 nt, synthetic construct
  misc_feature 1..19: note = siRNA sense sequence
  source 1..19: mol_type = other RNA
ttcccgaatgcaagttgaa

SEQ ID NO: 61921 - RNA, 19 nt, synthetic construct
  misc_feature 1..19: note = siRNA antisense sequence
  source 1..19: mol_type = other RNA
ttcaacttgcattcgggaa

SEQ ID NO: 61922 - RNA, 19 nt, synthetic construct
  misc_feature 1..19: note = siRNA sense sequence
  source 1..19: mol_type = other RNA
tcccgaatgcaagttgaag

SEQ ID NO: 61923 - RNA, 19 nt, synthetic construct
  misc_feature 1..19: note = siRNA antisense sequence
  source 1..19: mol_type = other RNA
cttcaacttgcattcggga

SEQ ID NO: 61924 - RNA, 19 nt, synthetic construct
  misc_feature 1..19: note = siRNA sense sequence
  source 1..19: mol_type = other RNA
cccgaatgcaagttgaaga

SEQ ID NO: 61925 - RNA, 19 nt, synthetic construct
  misc_feature 1..19: note = siRNA antisense sequence
  source 1..19: mol_type = other RNA
tcttcaacttgcattcggg

SEQ ID NO: 61926 - RNA, 19 nt, synthetic construct
  misc_feature 1..19: note = siRNA sense sequence
  source 1..19: mol_type = other RNA
ccgaatgcaagttgaagac

SEQ ID NO: 61927 - RNA, 19 nt, synthetic construct
  misc_feature 1..19: note = siRNA antisense sequence
  source 1..19: mol_type = other RNA
gtcttcaacttgcattcgg

SEQ ID NO: 61928 - RNA, 19 nt, synthetic construct
  misc_feature 1..19: note = siRNA sense sequence
  source 1..19: mol_type = other RNA
cgaatgcaagttgaagacc

SEQ ID NO: 61929 - RNA, 19 nt, synthetic construct
  misc_feature 1..19: note = siRNA antisense sequence
  source 1..19: mol_type = other RNA
ggtcttcaacttgcattcg

SEQ ID NO: 61930 - RNA, 19 nt, synthetic construct
  misc_feature 1..19: note = siRNA sense sequence
  source 1..19: mol_type = other RNA
caagttgaagacccagaag

SEQ ID NO: 61931 - RNA, 19 nt, synthetic construct
  misc_feature 1..19: note = siRNA antisense sequence
  source 1..19: mol_type = other RNA
cttctgggtcttcaacttg

SEQ ID NO: 61932 - RNA, 19 nt, synthetic construct
  misc_feature 1..19: note = siRNA sense sequence
  source 1..19: mol_type = other RNA
aagttgaagacccagaagt

SEQ ID NO: 61933 - RNA, 19 nt, synthetic construct
  misc_feature 1..19: note = siRNA antisense sequence
  source 1..19: mol_type = other RNA
acttctgggtcttcaactt

SEQ ID NO: 61934 - RNA, 19 nt, synthetic construct
  misc_feature 1..19: note = siRNA sense sequence
  source 1..19: mol_type = other RNA
agttgaagacccagaagtc

SEQ ID NO: 61935 - RNA, 19 nt, synthetic construct
  misc_feature 1..19: note = siRNA antisense sequence
  source 1..19: mol_type = other RNA
gacttctgggtcttcaact

SEQ ID NO: 61936 - RNA, 19 nt, synthetic construct
  misc_feature 1..19: note = siRNA sense sequence
  source 1..19: mol_type = other RNA
gttgaagacccagaagtcc

SEQ ID NO: 61937 - RNA, 19 nt, synthetic construct
  misc_feature 1..19: note = siRNA antisense sequence
  source 1..19: mol_type = other RNA
ggacttctgggtcttcaac

SEQ ID NO: 61938 - RNA, 19 nt, synthetic construct
  misc_feature 1..19: note = siRNA sense sequence
  source 1..19: mol_type = other RNA
ttgaagacccagaagtcct

SEQ ID NO: 61939 - RNA, 19 nt, synthetic construct
  misc_feature 1..19: note = siRNA antisense sequence
  source 1..19: mol_type = other RNA
aggacttctgggtcttcaa

SEQ ID NO: 61940 - RNA, 19 nt, synthetic construct
  misc_feature 1..19: note = siRNA sense sequence
  source 1..19: mol_type = other RNA
tgaagacccagaagtcctt

SEQ ID NO: 61941 - RNA, 19 nt, synthetic construct
  misc_feature 1..19: note = siRNA antisense sequence
  source 1..19: mol_type = other RNA
aaggacttctgggtcttca

SEQ ID NO: 61942 - RNA, 19 nt, synthetic construct
  misc_feature 1..19: note = siRNA sense sequence
  source 1..19: mol_type = other RNA
aagacccagaagtccttcg

SEQ ID NO: 61943 - RNA, 19 nt, synthetic construct
  misc_feature 1..19: note = siRNA antisense sequence
  source 1..19: mol_type = other RNA
cgaaggacttctgggtctt

SEQ ID NO: 61944 - RNA, 19 nt, synthetic construct
  misc_feature 1..19: note = siRNA sense sequence
  source 1..19: mol_type = other RNA
agacccagaagtccttcgc

SEQ ID NO: 61945 - RNA, 19 nt, synthetic construct
  misc_feature 1..19: note = siRNA antisense sequence
  source 1..19: mol_type = other RNA
gcgaaggacttctgggtct

SEQ ID NO: 61946 - RNA, 19 nt, synthetic construct
  misc_feature 1..19: note = siRNA sense sequence
  source 1..19: mol_type = other RNA
gacccagaagtccttcgca

SEQ ID NO: 61947 - RNA, 19 nt, synthetic construct
  misc_feature 1..19: note = siRNA antisense sequence
  source 1..19: mol_type = other RNA
tgcgaaggacttctgggtc

SEQ ID NO: 61948 - RNA, 19 nt, synthetic construct
  misc_feature 1..19: note = siRNA sense sequence
  source 1..19: mol_type = other RNA
acccagaagtccttcgcaa

SEQ ID NO: 61949 - RNA, 19 nt, synthetic construct
  misc_feature 1..19: note = siRNA antisense sequence
  source 1..19: mol_type = other RNA
ttgcgaaggacttctgggt

SEQ ID NO: 61950 - RNA, 19 nt, synthetic construct
  misc_feature 1..19: note = siRNA sense sequence
  source 1..19: mol_type = other RNA
acacgatattttcttagag

SEQ ID NO: 61951 - RNA, 19 nt, synthetic construct
  misc_feature 1..19: note = siRNA antisense sequence
  source 1..19: mol_type = other RNA
ctctaagaaaatatcgtgt

SEQ ID NO: 61952 - RNA, 19 nt, synthetic construct
  misc_feature 1..19: note = siRNA sense sequence
  source 1..19: mol_type = other RNA
cacgatattttcttagagg

SEQ ID NO: 61953 - RNA, 19 nt, synthetic construct
  misc_feature 1..19: note = siRNA antisense sequence
  source 1..19: mol_type = other RNA
cctctaagaaaatatcgtg

SEQ ID NO: 61954 - RNA, 19 nt, synthetic construct
  misc_feature 1..19: note = siRNA sense sequence
  source 1..19: mol_type = other RNA
acgatattttcttagaggc

SEQ ID NO: 61955 - RNA, 19 nt, synthetic construct
  misc_feature 1..19: note = siRNA antisense sequence
  source 1..19: mol_type = other RNA
gcctctaagaaaatatcgt

SEQ ID NO: 61956 - RNA, 19 nt, synthetic construct
  misc_feature 1..19: note = siRNA sense sequence
  source 1..19: mol_type = other RNA
cgatattttcttagaggcc

SEQ ID NO: 61957 - RNA, 19 nt, synthetic construct
  misc_feature 1..19: note = siRNA antisense sequence
  source 1..19: mol_type = other RNA
ggcctctaagaaaatatcg

SEQ ID NO: 61958 - RNA, 19 nt, synthetic construct
  misc_feature 1..19: note = siRNA sense sequence
  source 1..19: mol_type = other RNA
ccgccagcatatttcttgg

SEQ ID NO: 61959 - RNA, 19 nt, synthetic construct
  misc_feature 1..19: note = siRNA antisense sequence
  source 1..19: mol_type = other RNA
ccaagaaatatgctggcgg

SEQ ID NO: 61960 - RNA, 19 nt, synthetic construct
  misc_feature 1..19: note = siRNA sense sequence
  source 1..19: mol_type = other RNA
cgccagcatatttcttggt

SEQ ID NO: 61961 - RNA, 19 nt, synthetic construct
  misc_feature 1..19: note = siRNA antisense sequence
  source 1..19: mol_type = other RNA
accaagaaatatgctggcg

SEQ ID NO: 61962 - RNA, 19 nt, synthetic construct
  misc_feature 1..19: note = siRNA sense sequence
  source 1..19: mol_type = other RNA
gccagcatatttcttggtc

SEQ ID NO: 61963 - RNA, 19 nt, synthetic construct
  misc_feature 1..19: note = siRNA antisense sequence
  source 1..19: mol_type = other RNA
gaccaagaaatatgctggc

SEQ ID NO: 61964 - RNA, 19 nt, synthetic construct
  misc_feature 1..19: note = siRNA sense sequence
  source 1..19: mol_type = other RNA
ccagcatatttcttggtca

SEQ ID NO: 61965 - RNA, 19 nt, synthetic construct
  misc_feature 1..19: note = siRNA antisense sequence
  source 1..19: mol_type = other RNA
tgaccaagaaatatgctgg

SEQ ID NO: 61966 - RNA, 19 nt, synthetic construct
  misc_feature 1..19: note = siRNA sense sequence
  source 1..19: mol_type = other RNA
cagcatatttcttggtcat

SEQ ID NO: 61967 - RNA, 19 nt, synthetic construct
  misc_feature 1..19: note = siRNA antisense sequence
  source 1..19: mol_type = other RNA
atgaccaagaaatatgctg

SEQ ID NO: 61968 - RNA, 19 nt, synthetic construct
  misc_feature 1..19: note = siRNA sense sequence
  source 1..19: mol_type = other RNA
agcatatttcttggtcatc

SEQ ID NO: 61969 - RNA, 19 nt, synthetic construct
  misc_feature 1..19: note = siRNA antisense sequence
  source 1..19: mol_type = other RNA
gatgaccaagaaatatgct

SEQ ID NO: 61970 - RNA, 19 nt, synthetic construct
  misc_feature 1..19: note = siRNA sense sequence
  source 1..19: mol_type = other RNA
catatttcttggtcatcgt

SEQ ID NO: 61971 - RNA, 19 nt, synthetic construct
  misc_feature 1..19: note = siRNA antisense sequence
  source 1..19: mol_type = other RNA
acgatgaccaagaaatatg

SEQ ID NO: 61972 - RNA, 19 nt, synthetic construct
  misc_feature 1..19: note = siRNA sense sequence
  source 1..19: mol_type = other RNA
atatttcttggtcatcgtt

SEQ ID NO: 61973 - RNA, 19 nt, synthetic construct
  misc_feature 1..19: note = siRNA antisense sequence
  source 1..19: mol_type = other RNA
aacgatgaccaagaaatat

SEQ ID NO: 61974 - RNA, 19 nt, synthetic construct
  misc_feature 1..19: note = siRNA sense sequence
  source 1..19: mol_type = other RNA
tatttcttggtcatcgttc

SEQ ID NO: 61975 - RNA, 19 nt, synthetic construct
  misc_feature 1..19: note = siRNA antisense sequence
  source 1..19: mol_type = other RNA
gaacgatgaccaagaaata

SEQ ID NO: 61976 - RNA, 19 nt, synthetic construct
  misc_feature 1..19: note = siRNA sense sequence
  source 1..19: mol_type = other RNA
atttcttggtcatcgttct

SEQ ID NO: 61977 - RNA, 19 nt, synthetic construct
  misc_feature 1..19: note = siRNA antisense sequence
  source 1..19: mol_type = other RNA
agaacgatgaccaagaaat

SEQ ID NO: 61978 - RNA, 19 nt, synthetic construct
  misc_feature 1..19: note = siRNA sense sequence
  source 1..19: mol_type = other RNA
ttggtcatcgttctcatcc

SEQ ID NO: 61979 - RNA, 19 nt, synthetic construct
  misc_feature 1..19: note = siRNA antisense sequence
  source 1..19: mol_type = other RNA
ggatgagaacgatgaccaa

SEQ ID NO: 61980 - RNA, 19 nt, synthetic construct
  misc_feature 1..19: note = siRNA sense sequence
  source 1..19: mol_type = other RNA
tggtcatcgttctcatcct

SEQ ID NO: 61981 - RNA, 19 nt, synthetic construct
  misc_feature 1..19: note = siRNA antisense sequence
  source 1..19: mol_type = other RNA
aggatgagaacgatgacca

SEQ ID NO: 61982 - RNA, 19 nt, synthetic construct
  misc_feature 1..19: note = siRNA sense sequence
  source 1..19: mol_type = other RNA
ggtcatcgttctcatcctg

SEQ ID NO: 61983 - RNA, 19 nt, synthetic construct
  misc_feature 1..19: note = siRNA antisense sequence
  source 1..19: mol_type = other RNA
caggatgagaacgatgacc

SEQ ID NO: 61984 - RNA, 19 nt, synthetic construct
  misc_feature 1..19: note = siRNA sense sequence
  source 1..19: mol_type = other RNA
gtcatcgttctcatcctgt

SEQ ID NO: 61985 - RNA, 19 nt, synthetic construct
  misc_feature 1..19: note = siRNA antisense sequence
  source 1..19: mol_type = other RNA
acaggatgagaacgatgac

SEQ ID NO: 61986 - RNA, 19 nt, synthetic construct
  misc_feature 1..19: note = siRNA sense sequence
  source 1..19: mol_type = other RNA
catcgttctcatcctgtgg

SEQ ID NO: 61987 - RNA, 19 nt, synthetic construct
  misc_feature 1..19: note = siRNA antisense sequence
  source 1..19: mol_type = other RNA
ccacaggatgagaacgatg

SEQ ID NO: 61988 - RNA, 19 nt, synthetic construct
  misc_feature 1..19: note = siRNA sense sequence
  source 1..19: mol_type = other RNA
tcgttctcatcctgtggaa

SEQ ID NO: 61989 - RNA, 19 nt, synthetic construct
  misc_feature 1..19: note = siRNA antisense sequence
  source 1..19: mol_type = other RNA
ttccacaggatgagaacga

SEQ ID NO: 61990 - RNA, 19 nt, synthetic construct
  misc_feature 1..19: note = siRNA sense sequence
  source 1..19: mol_type = other RNA
cgttctcatcctgtggaag

SEQ ID NO: 61991 - RNA, 19 nt, synthetic construct
  misc_feature 1..19: note = siRNA antisense sequence
  source 1..19: mol_type = other RNA
cttccacaggatgagaacg

SEQ ID NO: 61992 - RNA, 19 nt, synthetic construct
  misc_feature 1..19: note = siRNA sense sequence
  source 1..19: mol_type = other RNA
gttctcatcctgtggaagc

SEQ ID NO: 61993 - RNA, 19 nt, synthetic construct
  misc_feature 1..19: note = siRNA antisense sequence
  source 1..19: mol_type = other RNA
gcttccacaggatgagaac

SEQ ID NO: 61994 - RNA, 19 nt, synthetic construct
  misc_feature 1..19: note = siRNA sense sequence
  source 1..19: mol_type = other RNA
ttctcatcctgtggaagct

SEQ ID NO: 61995 - RNA, 19 nt, synthetic construct
  misc_feature 1..19: note = siRNA antisense sequence
  source 1..19: mol_type = other RNA
agcttccacaggatgagaa

SEQ ID NO: 61996 - RNA, 19 nt, synthetic construct
  misc_feature 1..19: note = siRNA sense sequence
  source 1..19: mol_type = other RNA
tctcatcctgtggaagctg

SEQ ID NO: 61997 - RNA, 19 nt, synthetic construct
  misc_feature 1..19: note = siRNA antisense sequence
  source 1..19: mol_type = other RNA
cagcttccacaggatgaga

SEQ ID NO: 61998 - RNA, 19 nt, synthetic construct
  misc_feature 1..19: note = siRNA sense sequence
  source 1..19: mol_type = other RNA
aagctgatcagtcttctca

SEQ ID NO: 61999 - RNA, 19 nt, synthetic construct
  misc_feature 1..19: note = siRNA antisense sequence
  source 1..19: mol_type = other RNA
tgagaagactgatcagctt

SEQ ID NO: 62000 - RNA, 19 nt, synthetic construct
  misc_feature 1..19: note = siRNA sense sequence
  source 1..19: mol_type = other RNA
agctgatcagtcttctcaa

SEQ ID NO: 62001 - RNA, 19 nt, synthetic construct
  misc_feature 1..19: note = siRNA antisense sequence
  source 1..19: mol_type = other RNA
ttgagaagactgatcagct

SEQ ID NO: 62002 - RNA, 19 nt, synthetic construct
  misc_feature 1..19: note = siRNA sense sequence
  source 1..19: mol_type = other RNA
gctgatcagtcttctcaat

SEQ ID NO: 62003 - RNA, 19 nt, synthetic construct
  misc_feature 1..19: note = siRNA antisense sequence
  source 1..19: mol_type = other RNA
attgagaagactgatcagc

SEQ ID NO: 62004 - RNA, 19 nt, synthetic construct
  misc_feature 1..19: note = siRNA sense sequence
  source 1..19: mol_type = other RNA
ctgatcagtcttctcaatc

SEQ ID NO: 62005 - RNA, 19 nt, synthetic construct
  misc_feature 1..19: note = siRNA antisense sequence
  source 1..19: mol_type = other RNA
gattgagaagactgatcag

SEQ ID NO: 62006 - RNA, 19 nt, synthetic construct
  misc_feature 1..19: note = siRNA sense sequence
  source 1..19: mol_type = other RNA
tgatcagtcttctcaatct

SEQ ID NO: 62007 - RNA, 19 nt, synthetic construct
  misc_feature 1..19: note = siRNA antisense sequence
  source 1..19: mol_type = other RNA
agattgagaagactgatca

SEQ ID NO: 62008 - RNA, 19 nt, synthetic construct
  misc_feature 1..19: note = siRNA sense sequence
  source 1..19: mol_type = other RNA
gatcagtcttctcaatctg

SEQ ID NO: 62009 - RNA, 19 nt, synthetic construct
  misc_feature 1..19: note = siRNA antisense sequence
  source 1..19: mol_type = other RNA
cagattgagaagactgatc

SEQ ID NO: 62010 - RNA, 19 nt, synthetic construct
  misc_feature 1..19: note = siRNA sense sequence
  source 1..19: mol_type = other RNA
gcatttctcattgataaga

SEQ ID NO: 62011 - RNA, 19 nt, synthetic construct
  misc_feature 1..19: note = siRNA antisense sequence
  source 1..19: mol_type = other RNA
tcttatcaatgagaaatgc

SEQ ID NO: 62012 - RNA, 19 nt, synthetic construct
  misc_feature 1..19: note = siRNA sense sequence
  source 1..19: mol_type = other RNA
catttctcattgataagag

SEQ ID NO: 62013 - RNA, 19 nt, synthetic construct
  misc_feature 1..19: note = siRNA antisense sequence
  source 1..19: mol_type = other RNA
ctcttatcaatgagaaatg

SEQ ID NO: 62014 - RNA, 19 nt, synthetic construct
  misc_feature 1..19: note = siRNA sense sequence
  source 1..19: mol_type = other RNA
atttctcattgataagagc

SEQ ID NO: 62015 - RNA, 19 nt, synthetic construct
  misc_feature 1..19: note = siRNA antisense sequence
  source 1..19: mol_type = other RNA
gctcttatcaatgagaaat

SEQ ID NO: 62016 - RNA, 19 nt, synthetic construct
  misc_feature 1..19: note = siRNA sense sequence
  source 1..19: mol_type = other RNA
ttctcattgataagagctg

SEQ ID NO: 62017 - RNA, 19 nt, synthetic construct
  misc_feature 1..19: note = siRNA antisense sequence
  source 1..19: mol_type = other RNA
cagctcttatcaatgagaa

SEQ ID NO: 62018 - RNA, 19 nt, synthetic construct
  misc_feature 1..19: note = siRNA sense sequence
  source 1..19: mol_type = other RNA
tctcattgataagagctgt

SEQ ID NO: 62019 - RNA, 19 nt, synthetic construct
  misc_feature 1..19: note = siRNA antisense sequence
  source 1..19: mol_type = other RNA
acagctcttatcaatgaga

SEQ ID NO: 62020 - RNA, 19 nt, synthetic construct
  misc_feature 1..19: note = siRNA sense sequence
  source 1..19: mol_type = other RNA
ctcattgataagagctgtt

SEQ ID NO: 62021 - RNA, 19 nt, synthetic construct
  misc_feature 1..19: note = siRNA antisense sequence
  source 1..19: mol_type = other RNA
aacagctcttatcaatgag

SEQ ID NO: 62022 - RNA, 19 nt, synthetic construct
  misc_feature 1..19: note = siRNA sense sequence
  source 1..19: mol_type = other RNA
tcattgataagagctgttt

SEQ ID NO: 62023 - RNA, 19 nt, synthetic construct
  misc_feature 1..19: note = siRNA antisense sequence
  source 1..19: mol_type = other RNA
aaacagctcttatcaatga

SEQ ID NO: 62024 - RNA, 19 nt, synthetic construct
  misc_feature 1..19: note = siRNA sense sequence
  source 1..19: mol_type = other RNA
ctgtttatttcttccacca

SEQ ID NO: 62025 - RNA, 19 nt, synthetic construct
  misc_feature 1..19: note = siRNA antisense sequence
  source 1..19: mol_type = other RNA
tggtggaagaaataaacag

SEQ ID NO: 62026 - RNA, 19 nt, synthetic construct
  misc_feature 1..19: note = siRNA sense sequence
  source 1..19: mol_type = other RNA
tgtttatttcttccaccat

SEQ ID NO: 62027 - RNA, 19 nt, synthetic construct
  misc_feature 1..19: note = siRNA antisense sequence
  source 1..19: mol_type = other RNA
atggtggaagaaataaaca

SEQ ID NO: 62028 - RNA, 19 nt, synthetic construct
  misc_feature 1..19: note = siRNA sense sequence
  source 1..19: mol_type = other RNA
tatttcttccaccattcat

SEQ ID NO: 62029 - RNA, 19 nt, synthetic construct
  misc_feature 1..19: note = siRNA antisense sequence
  source 1..19: mol_type = other RNA
atgaatggtggaagaaata

SEQ ID NO: 62030 - RNA, 19 nt, synthetic construct
  misc_feature 1..19: note = siRNA sense sequence
  source 1..19: mol_type = other RNA
atttcttccaccattcata

SEQ ID NO: 62031 - RNA, 19 nt, synthetic construct
  misc_feature 1..19: note = siRNA antisense sequence
  source 1..19: mol_type = other RNA
tatgaatggtggaagaaat

SEQ ID NO: 62032 - RNA, 19 nt, synthetic construct
  misc_feature 1..19: note = siRNA sense sequence
  source 1..19: mol_type = other RNA
tttcttccaccattcataa

SEQ ID NO: 62033 - RNA, 19 nt, synthetic construct
  misc_feature 1..19: note = siRNA antisense sequence
  source 1..19: mol_type = other RNA
ttatgaatggtggaagaaa

SEQ ID NO: 62034 - RNA, 19 nt, synthetic construct
  misc_feature 1..19: note = siRNA sense sequence
  source 1..19: mol_type = other RNA
ttcttccaccattcataaa

SEQ ID NO: 62035 - RNA, 19 nt, synthetic construct
  misc_feature 1..19: note = siRNA antisense sequence
  source 1..19: mol_type = other RNA
tttatgaatggtggaagaa

SEQ ID NO: 62036 - RNA, 19 nt, synthetic construct
  misc_feature 1..19: note = siRNA sense sequence
  source 1..19: mol_type = other RNA
ctttccctctataatttcc

SEQ ID NO: 62037 - RNA, 19 nt, synthetic construct
  misc_feature 1..19: note = siRNA antisense sequence
  source 1..19: mol_type = other RNA
ggaaattatagagggaaag

SEQ ID NO: 62038 - RNA, 19 nt, synthetic construct
  misc_feature 1..19: note = siRNA sense sequence
  source 1..19: mol_type = other RNA
tccaagcttttgccaaata

SEQ ID NO: 62039 - RNA, 19 nt, synthetic construct
  misc_feature 1..19: note = siRNA antisense sequence
  source 1..19: mol_type = other RNA
tatttggcaaaagcttgga

SEQ ID NO: 62040 - RNA, 19 nt, synthetic construct
  misc_feature 1..19: note = siRNA sense sequence
  source 1..19: mol_type = other RNA
gtgcaatatacttaaaagg

SEQ ID NO: 62041 - RNA, 19 nt, synthetic construct
  misc_feature 1..19: note = siRNA antisense sequence
  source 1..19: mol_type = other RNA
ccttttaagtatattgcac

SEQ ID NO: 62042 - RNA, 19 nt, synthetic construct
  misc_feature 1..19: note = siRNA sense sequence
  source 1..19: mol_type = other RNA
aaaggataagaatcagtgg

SEQ ID NO: 62043 - RNA, 19 nt, synthetic construct
  misc_feature 1..19: note = siRNA antisense sequence
  source 1..19: mol_type = other RNA
ccactgattcttatccttt

SEQ ID NO: 62044 - RNA, 19 nt, synthetic construct
  misc_feature 1..19: note = siRNA sense sequence
  source 1..19: mol_type = other RNA
gataagaatcagtggcaag

SEQ ID NO: 62045 - RNA, 19 nt, synthetic construct
  misc_feature 1..19: note = siRNA antisense sequence
  source 1..19: mol_type = other RNA
cttgccactgattcttatc

SEQ ID NO: 62046 - RNA, 19 nt, synthetic construct
  misc_feature 1..19: note = siRNA sense sequence
  source 1..19: mol_type = other RNA
ataagaatcagtggcaagt

SEQ ID NO: 62047 - RNA, 19 nt, synthetic construct
  misc_feature 1..19: note = siRNA antisense sequence
  source 1..19: mol_type = other RNA
acttgccactgattcttat

SEQ ID NO: 62048 - RNA, 19 nt, synthetic construct
  misc_feature 1..19: note = siRNA sense sequence
  source 1..19: mol_type = other RNA
taagaatcagtggcaagta

SEQ ID NO: 62049 - RNA, 19 nt, synthetic construct
  misc_feature 1..19: note = siRNA antisense sequence
  source 1..19: mol_type = other RNA
tacttgccactgattctta

SEQ ID NO: 62050 - RNA, 19 nt, synthetic construct
  misc_feature 1..19: note = siRNA sense sequence
  source 1..19: mol_type = other RNA
aagaatcagtggcaagtag

SEQ ID NO: 62051 - RNA, 19 nt, synthetic construct
  misc_feature 1..19: note = siRNA antisense sequence
  source 1..19: mol_type = other RNA
ctacttgccactgattctt

SEQ ID NO: 62052 - RNA, 19 nt, synthetic construct
  misc_feature 1..19: note = siRNA sense sequence
  source 1..19: mol_type = other RNA
agaatcagtggcaagtagg

SEQ ID NO: 62053 - RNA, 19 nt, synthetic construct
  misc_feature 1..19: note = siRNA antisense sequence
  source 1..19: mol_type = other RNA
cctacttgccactgattct

SEQ ID NO: 62054 - RNA, 19 nt, synthetic construct
  misc_feature 1..19: note = siRNA sense sequence
  source 1..19: mol_type = other RNA
gaatcagtggcaagtaggt

SEQ ID NO: 62055 - RNA, 19 nt, synthetic construct
  misc_feature 1..19: note = siRNA antisense sequence
  source 1..19: mol_type = other RNA
acctacttgccactgattc

SEQ ID NO: 62056 - RNA, 19 nt, synthetic construct
  misc_feature 1..19: note = siRNA sense sequence
  source 1..19: mol_type = other RNA
aatcagtggcaagtaggtt

SEQ ID NO: 62057 - RNA, 19 nt, synthetic construct
  misc_feature 1..19: note = siRNA antisense sequence
  source 1..19: mol_type = other RNA
aacctacttgccactgatt

SEQ ID NO: 62058 - RNA, 19 nt, synthetic construct
  misc_feature 1..19: note = siRNA sense sequence
  source 1..19: mol_type = other RNA
atcagtggcaagtaggttt

SEQ ID NO: 62059 - RNA, 19 nt, synthetic construct
  misc_feature 1..19: note = siRNA antisense sequence
  source 1..19: mol_type = other RNA
aaacctacttgccactgat

SEQ ID NO: 62060 - RNA, 19 nt, synthetic construct
  misc_feature 1..19: note = siRNA sense sequence
  source 1..19: mol_type = other RNA
tcagtggcaagtaggttta

SEQ ID NO: 62061 - RNA, 19 nt, synthetic construct
  misc_feature 1..19: note = siRNA antisense sequence
  source 1..19: mol_type = other RNA
taaacctacttgccactga

SEQ ID NO: 62062 - RNA, 19 nt, synthetic construct
  misc_feature 1..19: note = siRNA sense sequence
  source 1..19: mol_type = other RNA
cagtggcaagtaggtttat

SEQ ID NO: 62063 - RNA, 19 nt, synthetic construct
  misc_feature 1..19: note = siRNA antisense sequence
  source 1..19: mol_type = other RNA
ataaacctacttgccactg

SEQ ID NO: 62064 - RNA, 19 nt, synthetic construct
  misc_feature 1..19: note = siRNA sense sequence
  source 1..19: mol_type = other RNA
agtggcaagtaggtttatt

SEQ ID NO: 62065 - RNA, 19 nt, synthetic construct
  misc_feature 1..19: note = siRNA antisense sequence
  source 1..19: mol_type = other RNA
aataaacctacttgccact

SEQ ID NO: 62066 - RNA, 19 nt, synthetic construct
  misc_feature 1..19: note = siRNA sense sequence
  source 1..19: mol_type = other RNA
gtggcaagtaggtttattc

SEQ ID NO: 62067 - RNA, 19 nt, synthetic construct
  misc_feature 1..19: note = siRNA antisense sequence
  source 1..19: mol_type = other RNA
gaataaacctacttgccac

SEQ ID NO: 62068 - RNA, 19 nt, synthetic construct
  misc_feature 1..19: note = siRNA sense sequence
  source 1..19: mol_type = other RNA
tggcaagtaggtttattct

SEQ ID NO: 62069 - RNA, 19 nt, synthetic construct
  misc_feature 1..19: note = siRNA antisense sequence
  source 1..19: mol_type = other RNA
agaataaacctacttgcca

SEQ ID NO: 62070 - RNA, 19 nt, synthetic construct
  misc_feature 1..19: note = siRNA sense sequence
  source 1..19: mol_type = other RNA
ggcaagtaggtttattcta

SEQ ID NO: 62071 - RNA, 19 nt, synthetic construct
  misc_feature 1..19: note = siRNA antisense sequence
  source 1..19: mol_type = other RNA
tagaataaacctacttgcc

SEQ ID NO: 62072 - RNA, 19 nt, synthetic construct
  misc_feature 1..19: note = siRNA sense sequence
  source 1..19: mol_type = other RNA
gcaagtaggtttattctaa

SEQ ID NO: 62073 - RNA, 19 nt, synthetic construct
  misc_feature 1..19: note = siRNA antisense sequence
  source 1..19: mol_type = other RNA
ttagaataaacctacttgc

SEQ ID NO: 62074 - RNA, 19 nt, synthetic construct
  misc_feature 1..19: note = siRNA sense sequence
  source 1..19: mol_type = other RNA
ttattgagcctttgtgttc

SEQ ID NO: 62075 - RNA, 19 nt, synthetic construct
  misc_feature 1..19: note = siRNA antisense sequence
  source 1..19: mol_type = other RNA
gaacacaaaggctcaataa

SEQ ID NO: 62076 - RNA, 19 nt, synthetic construct
  misc_feature 1..19: note = siRNA sense sequence
  source 1..19: mol_type = other RNA
tattgagcctttgtgttct

SEQ ID NO: 62077 - RNA, 19 nt, synthetic construct
  misc_feature 1..19: note = siRNA antisense sequence
  source 1..19: mol_type = other RNA
agaacacaaaggctcaata

SEQ ID NO: 62078 - RNA, 19 nt, synthetic construct
  misc_feature 1..19: note = siRNA sense sequence
  source 1..19: mol_type = other RNA
attgagcctttgtgttctg

SEQ ID NO: 62079 - RNA, 19 nt, synthetic construct
  misc_feature 1..19: note = siRNA antisense sequence
  source 1..19: mol_type = other RNA
cagaacacaaaggctcaat

SEQ ID NO: 62080 - RNA, 19 nt, synthetic construct
  misc_feature 1..19: note = siRNA sense sequence
  source 1..19: mol_type = other RNA
ttgagcctttgtgttctgt

SEQ ID NO: 62081 - RNA, 19 nt, synthetic construct
  misc_feature 1..19: note = siRNA antisense sequence
  source 1..19: mol_type = other RNA
acagaacacaaaggctcaa

SEQ ID NO: 62082 - RNA, 19 nt, synthetic construct
  misc_feature 1..19: note = siRNA sense sequence
  source 1..19: mol_type = other RNA
tgagcctttgtgttctgtc

SEQ ID NO: 62083 - RNA, 19 nt, synthetic construct
  misc_feature 1..19: note = siRNA antisense sequence
  source 1..19: mol_type = other RNA
gacagaacacaaaggctca

SEQ ID NO: 62084 - RNA, 19 nt, synthetic construct
  misc_feature 1..19: note = siRNA sense sequence
  source 1..19: mol_type = other RNA
gagcctttgtgttctgtct

SEQ ID NO: 62085 - RNA, 19 nt, synthetic construct
  misc_feature 1..19: note = siRNA antisense sequence
  source 1..19: mol_type = other RNA
agacagaacacaaaggctc

SEQ ID NO: 62086 - RNA, 19 nt, synthetic construct
  misc_feature 1..19: note = siRNA sense sequence
  source 1..19: mol_type = other RNA
agcctttgtgttctgtctt

SEQ ID NO: 62087 - RNA, 19 nt, synthetic construct
  misc_feature 1..19: note = siRNA antisense sequence
  source 1..19: mol_type = other RNA
aagacagaacacaaaggct

SEQ ID NO: 62088 - RNA, 19 nt, synthetic construct
  misc_feature 1..19: note = siRNA sense sequence
  source 1..19: mol_type = other RNA
ttgtgttctgtcttatgtg

SEQ ID NO: 62089 - RNA, 19 nt, synthetic construct
  misc_feature 1..19: note = siRNA antisense sequence
  source 1..19: mol_type = other RNA
cacataagacagaacacaa

SEQ ID NO: 62090 - RNA, 19 nt, synthetic construct
  misc_feature 1..19: note = siRNA sense sequence
  source 1..19: mol_type = other RNA
gttctgtcttatgtgatcc

SEQ ID NO: 62091 - RNA, 19 nt, synthetic construct
  misc_feature 1..19: note = siRNA antisense sequence
  source 1..19: mol_type = other RNA
ggatcacataagacagaac

SEQ ID NO: 62092 - RNA, 19 nt, synthetic construct
  misc_feature 1..19: note = siRNA sense sequence
  source 1..19: mol_type = other RNA
tatgtgatcctcatgataa

SEQ ID NO: 62093 - RNA, 19 nt, synthetic construct
  misc_feature 1..19: note = siRNA antisense sequence
  source 1..19: mol_type = other RNA
ttatcatgaggatcacata

SEQ ID NO: 62094 - RNA, 19 nt, synthetic construct
  misc_feature 1..19: note = siRNA sense sequence
  source 1..19: mol_type = other RNA
atgtgatcctcatgataac

SEQ ID NO: 62095 - RNA, 19 nt, synthetic construct
  misc_feature 1..19: note = siRNA antisense sequence
  source 1..19: mol_type = other RNA
gttatcatgaggatcacat

SEQ ID NO: 62096 - RNA, 19 nt, synthetic construct
  misc_feature 1..19: note = siRNA sense sequence
  source 1..19: mol_type = other RNA
acactatggttcaaataca

SEQ ID NO: 62097 - RNA, 19 nt, synthetic construct
  misc_feature 1..19: note = siRNA antisense sequence
  source 1..19: mol_type = other RNA
tgtatttgaaccatagtgt

SEQ ID NO: 62098 - RNA, 19 nt, synthetic construct
  misc_feature 1..19: note = siRNA sense sequence
  source 1..19: mol_type = other RNA
caactactatctccatttt

SEQ ID NO: 62099 - RNA, 19 nt, synthetic construct
  misc_feature 1..19: note = siRNA antisense sequence
  source 1..19: mol_type = other RNA
aaaatggagatagtagttg

SEQ ID NO: 62100 - RNA, 19 nt, synthetic construct
  misc_feature 1..19: note = siRNA sense sequence
  source 1..19: mol_type = other RNA
agttgaagaatttgaggtt

SEQ ID NO: 62101 - RNA, 19 nt, synthetic construct
  misc_feature 1..19: note = siRNA antisense sequence
  source 1..19: mol_type = other RNA
aacctcaaattcttcaact

SEQ ID NO: 62102 - RNA, 19 nt, synthetic construct
  misc_feature 1..19: note = siRNA sense sequence
  source 1..19: mol_type = other RNA
gttgaagaatttgaggttc

SEQ ID NO: 62103 - RNA, 19 nt, synthetic construct
  misc_feature 1..19: note = siRNA antisense sequence
  source 1..19: mol_type = other RNA
gaacctcaaattcttcaac

SEQ ID NO: 62104 - RNA, 19 nt, synthetic construct
  misc_feature 1..19: note = siRNA sense sequence
  source 1..19: mol_type = other RNA
agaggctaatttacccaag

SEQ ID NO: 62105 - RNA, 19 nt, synthetic construct
  misc_feature 1..19: note = siRNA antisense sequence
  source 1..19: mol_type = other RNA
cttgggtaaattagcctct

SEQ ID NO: 62106 - RNA, 19 nt, synthetic construct
  misc_feature 1..19: note = siRNA sense sequence
  source 1..19: mol_type = other RNA
ttcaggaagtgttagttta

SEQ ID NO: 62107 - RNA, 19 nt, synthetic construct
  misc_feature 1..19: note = siRNA antisense sequence
  source 1..19: mol_type = other RNA
taaactaacacttcctgaa

SEQ ID NO: 62108 - RNA, 19 nt, synthetic construct
  misc_feature 1..19: note = siRNA sense sequence
  source 1..19: mol_type = other RNA
tcaggaagtgttagtttaa

SEQ ID NO: 62109 - RNA, 19 nt, synthetic construct
  misc_feature 1..19: note = siRNA antisense sequence
  source 1..19: mol_type = other RNA
ttaaactaacacttcctga

SEQ ID NO: 62110 - RNA, 19 nt, synthetic construct
  misc_feature 1..19: note = siRNA sense sequence
  source 1..19: mol_type = other RNA
caggaagtgttagtttaaa

SEQ ID NO: 62111 - RNA, 19 nt, synthetic construct
  misc_feature 1..19: note = siRNA antisense sequence
  source 1..19: mol_type = other RNA
tttaaactaacacttcctg

SEQ ID NO: 62112 - RNA, 19 nt, synthetic construct
  misc_feature 1..19: note = siRNA sense sequence
  source 1..19: mol_type = other RNA
aaccatttcacatgctttt

SEQ ID NO: 62113 - RNA, 19 nt, synthetic construct
  misc_feature 1..19: note = siRNA antisense sequence
  source 1..19: mol_type = other RNA
aaaagcatgtgaaatggtt

SEQ ID NO: 62114 - RNA, 19 nt, synthetic construct
  misc_feature 1..19: note = siRNA sense sequence
  source 1..19: mol_type = other RNA
tacatatttataaggcgct

SEQ ID NO: 62115 - RNA, 19 nt, synthetic construct
  misc_feature 1..19: note = siRNA antisense sequence
  source 1..19: mol_type = other RNA
agcgccttataaatatgta

SEQ ID NO: 62116 - RNA, 19 nt, synthetic construct
  misc_feature 1..19: note = siRNA sense sequence
  source 1..19: mol_type = other RNA
acatatttataaggcgctt

SEQ ID NO: 62117 - RNA, 19 nt, synthetic construct
  misc_feature 1..19: note = siRNA antisense sequence
  source 1..19: mol_type = other RNA
aagcgccttataaatatgt

SEQ ID NO: 62118 - RNA, 19 nt, synthetic construct
  misc_feature 1..19: note = siRNA sense sequence
  source 1..19: mol_type = other RNA
catatttataaggcgcttg

SEQ ID NO: 62119 - RNA, 19 nt, synthetic construct
  misc_feature 1..19: note = siRNA antisense sequence
  source 1..19: mol_type = other RNA
caagcgccttataaatatg

SEQ ID NO: 62120 - RNA, 19 nt, synthetic construct
  misc_feature 1..19: note = siRNA sense sequence
  source 1..19: mol_type = other RNA
atatttataaggcgcttgg

SEQ ID NO: 62121 - RNA, 19 nt, synthetic construct
  misc_feature 1..19: note = siRNA antisense sequence
  source 1..19: mol_type = other RNA
ccaagcgccttataaatat

SEQ ID NO: 62122 - RNA, 19 nt, synthetic construct
  misc_feature 1..19: note = siRNA sense sequence
  source 1..19: mol_type = other RNA
tatttataaggcgcttgga

SEQ ID NO: 62123 - RNA, 19 nt, synthetic construct
  misc_feature 1..19: note = siRNA antisense sequence
  source 1..19: mol_type = other RNA
tccaagcgccttataaata

SEQ ID NO: 62124 - RNA, 19 nt, synthetic construct
  misc_feature 1..19: note = siRNA sense sequence
  source 1..19: mol_type = other RNA
atttataaggcgcttggag

SEQ ID NO: 62125 - RNA, 19 nt, synthetic construct
  misc_feature 1..19: note = siRNA antisense sequence
  source 1..19: mol_type = other RNA
ctccaagcgccttataaat

SEQ ID NO: 62126 - RNA, 19 nt, synthetic construct
  misc_feature 1..19: note = siRNA sense sequence
  source 1..19: mol_type = other RNA
agacgttgtgatgcaagta

SEQ ID NO: 62127 - RNA, 19 nt, synthetic construct
  misc_feature 1..19: note = siRNA antisense sequence
  source 1..19: mol_type = other RNA
tacttgcatcacaacgtct

SEQ ID NO: 62128 - RNA, 19 nt, synthetic construct
  misc_feature 1..19: note = siRNA sense sequence
  source 1..19: mol_type = other RNA
gacgttgtgatgcaagtaa

SEQ ID NO: 62129 - RNA, 19 nt, synthetic construct
  misc_feature 1..19: note = siRNA antisense sequence
  source 1..19: mol_type = other RNA
ttacttgcatcacaacgtc

SEQ ID NO: 62130 - RNA, 19 nt, synthetic construct
  misc_feature 1..19: note = siRNA sense sequence
  source 1..19: mol_type = other RNA
acgttgtgatgcaagtaat

SEQ ID NO: 62131 - RNA, 19 nt, synthetic construct
  misc_feature 1..19: note = siRNA antisense sequence
  source 1..19: mol_type = other RNA
attacttgcatcacaacgt

SEQ ID NO: 62132 - RNA, 19 nt, synthetic construct
  misc_feature 1..19: note = siRNA sense sequence
  source 1..19: mol_type = other RNA
cgttgtgatgcaagtaata

SEQ ID NO: 62133 - RNA, 19 nt, synthetic construct
  misc_feature 1..19: note = siRNA antisense sequence
  source 1..19: mol_type = other RNA
tattacttgcatcacaacg

SEQ ID NO: 62134 - RNA, 19 nt, synthetic construct
  misc_feature 1..19: note = siRNA sense sequence
  source 1..19: mol_type = other RNA
gttgtgatgcaagtaatat

SEQ ID NO: 62135 - RNA, 19 nt, synthetic construct
  misc_feature 1..19: note = siRNA antisense sequence
  source 1..19: mol_type = other RNA
atattacttgcatcacaac

SEQ ID NO: 62136 - RNA, 19 nt, synthetic construct
  misc_feature 1..19: note = siRNA sense sequence
  source 1..19: mol_type = other RNA
gatgcaagtaatatatagc

SEQ ID NO: 62137 - RNA, 19 nt, synthetic construct
  misc_feature 1..19: note = siRNA antisense sequence
  source 1..19: mol_type = other RNA
gctatatattacttgcatc

SEQ ID NO: 62138 - RNA, 19 nt, synthetic construct
  misc_feature 1..19: note = siRNA sense sequence
  source 1..19: mol_type = other RNA
ttcaatatcttctttctgg

SEQ ID NO: 62139 - RNA, 19 nt, synthetic construct
  misc_feature 1..19: note = siRNA antisense sequence
  source 1..19: mol_type = other RNA
ccagaaagaagatattgaa

SEQ ID NO: 62140 - RNA, 19 nt, synthetic construct
  misc_feature 1..19: note = siRNA sense sequence
  source 1..19: mol_type = other RNA
caatatcttctttctggct

SEQ ID NO: 62141 - RNA, 19 nt, synthetic construct
  misc_feature 1..19: note = siRNA antisense sequence
  source 1..19: mol_type = other RNA
agccagaaagaagatattg

SEQ ID NO: 62142 - RNA, 19 nt, synthetic construct
  misc_feature 1..19: note = siRNA sense sequence
  source 1..19: mol_type = other RNA
tatcttctttctggcttaa

SEQ ID NO: 62143 - RNA, 19 nt, synthetic construct
  misc_feature 1..19: note = siRNA antisense sequence
  source 1..19: mol_type = other RNA
ttaagccagaaagaagata

SEQ ID NO: 62144 - RNA, 19 nt, synthetic construct
  misc_feature 1..19: note = siRNA sense sequence
  source 1..19: mol_type = other RNA
cttctttctggcttaataa

SEQ ID NO: 62145 - RNA, 19 nt, synthetic construct
  misc_feature 1..19: note = siRNA antisense sequence
  source 1..19: mol_type = other RNA
ttattaagccagaaagaag

SEQ ID NO: 62146 - RNA, 19 nt, synthetic construct
  misc_feature 1..19: note = siRNA sense sequence
  source 1..19: mol_type = other RNA
tattatctatggcactctc

SEQ ID NO: 62147 - RNA, 19 nt, synthetic construct
  misc_feature 1..19: note = siRNA antisense sequence
  source 1..19: mol_type = other RNA
gagagtgccatagataata

SEQ ID NO: 62148 - RNA, 19 nt, synthetic construct
  misc_feature 1..19: note = siRNA sense sequence
  source 1..19: mol_type = other RNA
attatctatggcactctct

SEQ ID NO: 62149 - RNA, 19 nt, synthetic construct
  misc_feature 1..19: note = siRNA antisense sequence
  source 1..19: mol_type = other RNA
agagagtgccatagataat

SEQ ID NO: 62150 - RNA, 19 nt, synthetic construct
  misc_feature 1..19: note = siRNA sense sequence
  source 1..19: mol_type = other RNA
ttatctatggcactctctc

SEQ ID NO: 62151 - RNA, 19 nt, synthetic construct
  misc_feature 1..19: note = siRNA antisense sequence
  source 1..19: mol_type = other RNA
gagagagtgccatagataa

SEQ ID NO: 62152 - RNA, 19 nt, synthetic construct
  misc_feature 1..19: note = siRNA sense sequence
  source 1..19: mol_type = other RNA
tatctatggcactctctct

SEQ ID NO: 62153 - RNA, 19 nt, synthetic construct
  misc_feature 1..19: note = siRNA antisense sequence
  source 1..19: mol_type = other RNA
agagagagtgccatagata

SEQ ID NO: 62154 - RNA, 19 nt, synthetic construct
  misc_feature 1..19: note = siRNA sense sequence
  source 1..19: mol_type = other RNA
atctatggcactctctctt

SEQ ID NO: 62155 - RNA, 19 nt, synthetic construct
  misc_feature 1..19: note = siRNA antisense sequence
  source 1..19: mol_type = other RNA
aagagagagtgccatagat

SEQ ID NO: 62156 - RNA, 19 nt, synthetic construct
  misc_feature 1..19: note = siRNA sense sequence
  source 1..19: mol_type = other RNA
tctatggcactctctcttt

SEQ ID NO: 62157 - RNA, 19 nt, synthetic construct
  misc_feature 1..19: note = siRNA antisense sequence
  source 1..19: mol_type = other RNA
aaagagagagtgccataga

SEQ ID NO: 62158 - RNA, 19 nt, synthetic construct
  misc_feature 1..19: note = siRNA sense sequence
  source 1..19: mol_type = other RNA
ctatggcactctctcttta

SEQ ID NO: 62159 - RNA, 19 nt, synthetic construct
  misc_feature 1..19: note = siRNA antisense sequence
  source 1..19: mol_type = other RNA
taaagagagagtgccatag

SEQ ID NO: 62160 - RNA, 19 nt, synthetic construct
  misc_feature 1..19: note = siRNA sense sequence
  source 1..19: mol_type = other RNA
tatggcactctctctttac

SEQ ID NO: 62161 - RNA, 19 nt, synthetic construct
  misc_feature 1..19: note = siRNA antisense sequence
  source 1..19: mol_type = other RNA
gtaaagagagagtgccata

SEQ ID NO: 62162 - RNA, 19 nt, synthetic construct
  misc_feature 1..19: note = siRNA sense sequence
  source 1..19: mol_type = other RNA
atggcactctctctttact

SEQ ID NO: 62163 - RNA, 19 nt, synthetic construct
  misc_feature 1..19: note = siRNA antisense sequence
  source 1..19: mol_type = other RNA
agtaaagagagagtgccat

SEQ ID NO: 62164 - RNA, 19 nt, synthetic construct
  misc_feature 1..19: note = siRNA sense sequence
  source 1..19: mol_type = other RNA
tggcactctctctttacta

SEQ ID NO: 62165 - RNA, 19 nt, synthetic construct
  misc_feature 1..19: note = siRNA antisense sequence
  source 1..19: mol_type = other RNA
tagtaaagagagagtgcca

SEQ ID NO: 62166 - RNA, 19 nt, synthetic construct
  misc_feature 1..19: note = siRNA sense sequence
  source 1..19: mol_type = other RNA
ggcactctctctttactaa

SEQ ID NO: 62167 - RNA, 19 nt, synthetic construct
  misc_feature 1..19: note = siRNA antisense sequence
  source 1..19: mol_type = other RNA
ttagtaaagagagagtgcc

SEQ ID NO: 62168 - RNA, 19 nt, synthetic construct
  misc_feature 1..19: note = siRNA sense sequence
  source 1..19: mol_type = other RNA
gcactctctctttactaaa

SEQ ID NO: 62169 - RNA, 19 nt, synthetic construct
  misc_feature 1..19: note = siRNA antisense sequence
  source 1..19: mol_type = other RNA
tttagtaaagagagagtgc

SEQ ID NO: 62170 - RNA, 19 nt, synthetic construct
  misc_feature 1..19: note = siRNA sense sequence
  source 1..19: mol_type = other RNA
cactctctctttactaaat

SEQ ID NO: 62171 - RNA, 19 nt, synthetic construct
  misc_feature 1..19: note = siRNA antisense sequence
  source 1..19: mol_type = other RNA
atttagtaaagagagagtg

SEQ ID NO: 62172 - RNA, 19 nt, synthetic construct
  misc_feature 1..19: note = siRNA sense sequence
  source 1..19: mol_type = other RNA
actctctctttactaaatg

SEQ ID NO: 62173 - RNA, 19 nt, synthetic construct
  misc_feature 1..19: note = siRNA antisense sequence
  source 1..19: mol_type = other RNA
catttagtaaagagagagt

SEQ ID NO: 62174 - RNA, 19 nt, synthetic construct
  misc_feature 1..19: note = siRNA sense sequence
  source 1..19: mol_type = other RNA
ctctctctttactaaatgg

SEQ ID NO: 62175 - RNA, 19 nt, synthetic construct
  misc_feature 1..19: note = siRNA antisense sequence
  source 1..19: mol_type = other RNA
ccatttagtaaagagagag

SEQ ID NO: 62176 - RNA, 19 nt, synthetic construct
  misc_feature 1..19: note = siRNA sense sequence
  source 1..19: mol_type = other RNA
tctctctttactaaatgga

SEQ ID NO: 62177 - RNA, 19 nt, synthetic construct
  misc_feature 1..19: note = siRNA antisense sequence
  source 1..19: mol_type = other RNA
tccatttagtaaagagaga

SEQ ID NO: 62178 - RNA, 19 nt, synthetic construct
  misc_feature 1..19: note = siRNA sense sequence
  source 1..19: mol_type = other RNA
tggcatgattataggacat

SEQ ID NO: 62179 - RNA, 19 nt, synthetic construct
  misc_feature 1..19: note = siRNA antisense sequence
  source 1..19: mol_type = other RNA
atgtcctataatcatgcca

SEQ ID NO: 62180 - RNA, 19 nt, synthetic construct
  misc_feature 1..19: note = siRNA sense sequence
  source 1..19: mol_type = other RNA
ggcatgattataggacata

SEQ ID NO: 62181 - RNA, 19 nt, synthetic construct
  misc_feature 1..19: note = siRNA antisense sequence
  source 1..19: mol_type = other RNA
tatgtcctataatcatgcc

SEQ ID NO: 62182 - RNA, 19 nt, synthetic construct
  misc_feature 1..19: note = siRNA sense sequence
  source 1..19: mol_type = other RNA
gcatgattataggacatac

SEQ ID NO: 62183 - RNA, 19 nt, synthetic construct
  misc_feature 1..19: note = siRNA antisense sequence
  source 1..19: mol_type = other RNA
gtatgtcctataatcatgc

SEQ ID NO: 62184 - RNA, 19 nt, synthetic construct
  misc_feature 1..19: note = siRNA sense sequence
  source 1..19: mol_type = other RNA
gattataggacatacatgt

SEQ ID NO: 62185 - RNA, 19 nt, synthetic construct
  misc_feature 1..19: note = siRNA antisense sequence
  source 1..19: mol_type = other RNA
acatgtatgtcctataatc

SEQ ID NO: 62186 - RNA, 19 nt, synthetic construct
  misc_feature 1..19: note = siRNA sense sequence
  source 1..19: mol_type = other RNA
ttataggacatacatgtag

SEQ ID NO: 62187 - RNA, 19 nt, synthetic construct
  misc_feature 1..19: note = siRNA antisense sequence
  source 1..19: mol_type = other RNA
ctacatgtatgtcctataa

SEQ ID NO: 62188 - RNA, 19 nt, synthetic construct
  misc_feature 1..19: note = siRNA sense sequence
  source 1..19: mol_type = other RNA
tataggacatacatgtaga

SEQ ID NO: 62189 - RNA, 19 nt, synthetic construct
  misc_feature 1..19: note = siRNA antisense sequence
  source 1..19: mol_type = other RNA
tctacatgtatgtcctata

SEQ ID NO: 62190 - RNA, 19 nt, synthetic construct
  misc_feature 1..19: note = siRNA sense sequence
  source 1..19: mol_type = other RNA
taggacatacatgtagatt

SEQ ID NO: 62191 - RNA, 19 nt, synthetic construct
  misc_feature 1..19: note = siRNA antisense sequence
  source 1..19: mol_type = other RNA
aatctacatgtatgtccta

SEQ ID NO: 62192 - RNA, 19 nt, synthetic construct
  misc_feature 1..19: note = siRNA sense sequence
  source 1..19: mol_type = other RNA
ggacatacatgtagattgt

SEQ ID NO: 62193 - RNA, 19 nt, synthetic construct
  misc_feature 1..19: note = siRNA antisense sequence
  source 1..19: mol_type = other RNA
acaatctacatgtatgtcc

SEQ ID NO: 62194 - RNA, 19 nt, synthetic construct
  misc_feature 1..19: note = siRNA sense sequence
  source 1..19: mol_type = other RNA
gacatacatgtagattgtg

SEQ ID NO: 62195 - RNA, 19 nt, synthetic construct
  misc_feature 1..19: note = siRNA antisense sequence
  source 1..19: mol_type = other RNA
cacaatctacatgtatgtc

SEQ ID NO: 62196 - RNA, 19 nt, synthetic construct
  misc_feature 1..19: note = siRNA sense sequence
  source 1..19: mol_type = other RNA
acatacatgtagattgtgc

SEQ ID NO: 62197 - RNA, 19 nt, synthetic construct
  misc_feature 1..19: note = siRNA antisense sequence
  source 1..19: mol_type = other RNA
gcacaatctacatgtatgt

SEQ ID NO: 62198 - RNA, 19 nt, synthetic construct
  misc_feature 1..19: note = siRNA sense sequence
  source 1..19: mol_type = other RNA
catacatgtagattgtgct

SEQ ID NO: 62199 - RNA, 19 nt, synthetic construct
  misc_feature 1..19: note = siRNA antisense sequence
  source 1..19: mol_type = other RNA
agcacaatctacatgtatg

SEQ ID NO: 62200 - RNA, 19 nt, synthetic construct
  misc_feature 1..19: note = siRNA sense sequence
  source 1..19: mol_type = other RNA
atacatgtagattgtgcta

SEQ ID NO: 62201 - RNA, 19 nt, synthetic construct
  misc_feature 1..19: note = siRNA antisense sequence
  source 1..19: mol_type = other RNA
tagcacaatctacatgtat

SEQ ID NO: 62202 - RNA, 19 nt, synthetic construct
  misc_feature 1..19: note = siRNA sense sequence
  source 1..19: mol_type = other RNA
tacatgtagattgtgctaa

SEQ ID NO: 62203 - RNA, 19 nt, synthetic construct
  misc_feature 1..19: note = siRNA antisense sequence
  source 1..19: mol_type = other RNA
ttagcacaatctacatgta

SEQ ID NO: 62204 - RNA, 19 nt, synthetic construct
  misc_feature 1..19: note = siRNA sense sequence
  source 1..19: mol_type = other RNA
acatgtagattgtgctaat

SEQ ID NO: 62205 - RNA, 19 nt, synthetic construct
  misc_feature 1..19: note = siRNA antisense sequence
  source 1..19: mol_type = other RNA
attagcacaatctacatgt

SEQ ID NO: 62206 - RNA, 19 nt, synthetic construct
  misc_feature 1..19: note = siRNA sense sequence
  source 1..19: mol_type = other RNA
catgtagattgtgctaata

SEQ ID NO: 62207 - RNA, 19 nt, synthetic construct
  misc_feature 1..19: note = siRNA antisense sequence
  source 1..19: mol_type = other RNA
tattagcacaatctacatg

SEQ ID NO: 62208 - RNA, 19 nt, synthetic construct
  misc_feature 1..19: note = siRNA sense sequence
  source 1..19: mol_type = other RNA
ctccacttttctgtatttt

SEQ ID NO: 62209 - RNA, 19 nt, synthetic construct
  misc_feature 1..19: note = siRNA antisense sequence
  source 1..19: mol_type = other RNA
aaaatacagaaaagtggag

SEQ ID NO: 62210 - RNA, 19 nt, synthetic construct
  misc_feature 1..19: note = siRNA sense sequence
  source 1..19: mol_type = other RNA
ctattggtgcactgacttt

SEQ ID NO: 62211 - RNA, 19 nt, synthetic construct
  misc_feature 1..19: note = siRNA antisense sequence
  source 1..19: mol_type = other RNA
aaagtcagtgcaccaatag

SEQ ID NO: 62212 - RNA, 19 nt, synthetic construct
  misc_feature 1..19: note = siRNA sense sequence
  source 1..19: mol_type = other RNA
tattggtgcactgactttt

SEQ ID NO: 62213 - RNA, 19 nt, synthetic construct
  misc_feature 1..19: note = siRNA antisense sequence
  source 1..19: mol_type = other RNA
aaaagtcagtgcaccaata

SEQ ID NO: 62214 - RNA, 19 nt, synthetic construct
  misc_feature 1..19: note = siRNA sense sequence
  source 1..19: mol_type = other RNA
attggtgcactgacttttc

SEQ ID NO: 62215 - RNA, 19 nt, synthetic construct
  misc_feature 1..19: note = siRNA antisense sequence
  source 1..19: mol_type = other RNA
gaaaagtcagtgcaccaat

SEQ ID NO: 62216 - RNA, 19 nt, synthetic construct
  misc_feature 1..19: note = siRNA sense sequence
  source 1..19: mol_type = other RNA
ttggtgcactgacttttcc

SEQ ID NO: 62217 - RNA, 19 nt, synthetic construct
  misc_feature 1..19: note = siRNA antisense sequence
  source 1..19: mol_type = other RNA
ggaaaagtcagtgcaccaa

SEQ ID NO: 62218 - RNA, 19 nt, synthetic construct
  misc_feature 1..19: note = siRNA sense sequence
  source 1..19: mol_type = other RNA
cccaagagttttccattta

SEQ ID NO: 62219 - RNA, 19 nt, synthetic construct
  misc_feature 1..19: note = siRNA antisense sequence
  source 1..19: mol_type = other RNA
taaatggaaaactcttggg

SEQ ID NO: 62220 - RNA, 19 nt, synthetic construct
  misc_feature 1..19: note = siRNA sense sequence
  source 1..19: mol_type = other RNA
ccaagagttttccatttac

SEQ ID NO: 62221 - RNA, 19 nt, synthetic construct
  misc_feature 1..19: note = siRNA antisense sequence
  source 1..19: mol_type = other RNA
gtaaatggaaaactcttgg

SEQ ID NO: 62222 - RNA, 19 nt, synthetic construct
  misc_feature 1..19: note = siRNA sense sequence
  source 1..19: mol_type = other RNA
caagagttttccatttact

SEQ ID NO: 62223 - RNA, 19 nt, synthetic construct
  misc_feature 1..19: note = siRNA antisense sequence
  source 1..19: mol_type = other RNA
agtaaatggaaaactcttg

SEQ ID NO: 62224 - RNA, 19 nt, synthetic construct
  misc_feature 1..19: note = siRNA sense sequence
  source 1..19: mol_type = other RNA
tttgtcttcccttgactga

SEQ ID NO: 62225 - RNA, 19 nt, synthetic construct
  misc_feature 1..19: note = siRNA antisense sequence
  source 1..19: mol_type = other RNA
tcagtcaagggaagacaaa

SEQ ID NO: 62226 - RNA, 19 nt, synthetic construct
  misc_feature 1..19: note = siRNA sense sequence
  source 1..19: mol_type = other RNA
ttgtcttcccttgactgaa

SEQ ID NO: 62227 - RNA, 19 nt, synthetic construct
  misc_feature 1..19: note = siRNA antisense sequence
  source 1..19: mol_type = other RNA
ttcagtcaagggaagacaa

SEQ ID NO: 62228 - RNA, 19 nt, synthetic construct
  misc_feature 1..19: note = siRNA sense sequence
  source 1..19: mol_type = other RNA
ttcccttgactgaagtgct

SEQ ID NO: 62229 - RNA, 19 nt, synthetic construct
  misc_feature 1..19: note = siRNA antisense sequence
  source 1..19: mol_type = other RNA
agcacttcagtcaagggaa

SEQ ID NO: 62230 - RNA, 19 nt, synthetic construct
  misc_feature 1..19: note = siRNA sense sequence
  source 1..19: mol_type = other RNA
tgactgaagtgctgcttaa

SEQ ID NO: 62231 - RNA, 19 nt, synthetic construct
  misc_feature 1..19: note = siRNA antisense sequence
  source 1..19: mol_type = other RNA
ttaagcagcacttcagtca

SEQ ID NO: 62232 - RNA, 19 nt, synthetic construct
  misc_feature 1..19: note = siRNA sense sequence
  source 1..19: mol_type = other RNA
gactgaagtgctgcttaaa

SEQ ID NO: 62233 - RNA, 19 nt, synthetic construct
  misc_feature 1..19: note = siRNA antisense sequence
  source 1..19: mol_type = other RNA
tttaagcagcacttcagtc

SEQ ID NO: 62234 - RNA, 19 nt, synthetic construct
  misc_feature 1..19: note = siRNA sense sequence
  source 1..19: mol_type = other RNA
actgaagtgctgcttaaaa

SEQ ID NO: 62235 - RNA, 19 nt, synthetic construct
  misc_feature 1..19: note = siRNA antisense sequence
  source 1..19: mol_type = other RNA
ttttaagcagcacttcagt

SEQ ID NO: 62236 - RNA, 19 nt, synthetic construct
  misc_feature 1..19: note = siRNA sense sequence
  source 1..19: mol_type = other RNA
actattttactctaccaag

SEQ ID NO: 62237 - RNA, 19 nt, synthetic construct
  misc_feature 1..19: note = siRNA antisense sequence
  source 1..19: mol_type = other RNA
cttggtagagtaaaatagt

SEQ ID NO: 62238 - RNA, 19 nt, synthetic construct
  misc_feature 1..19: note = siRNA sense sequence
  source 1..19: mol_type = other RNA
attttactctaccaagttc

SEQ ID NO: 62239 - RNA, 19 nt, synthetic construct
  misc_feature 1..19: note = siRNA antisense sequence
  source 1..19: mol_type = other RNA
gaacttggtagagtaaaat

SEQ ID NO: 62240 - RNA, 19 nt, synthetic construct
  misc_feature 1..19: note = siRNA sense sequence
  source 1..19: mol_type = other RNA
acatgatgaagctgtgtag

SEQ ID NO: 62241 - RNA, 19 nt, synthetic construct
  misc_feature 1..19: note = siRNA antisense sequence
  source 1..19: mol_type = other RNA
ctacacagcttcatcatgt

SEQ ID NO: 62242 - RNA, 19 nt, synthetic construct
  misc_feature 1..19: note = siRNA sense sequence
  source 1..19: mol_type = other RNA
catgatgaagctgtgtaga

SEQ ID NO: 62243 - RNA, 19 nt, synthetic construct
  misc_feature 1..19: note = siRNA antisense sequence
  source 1..19: mol_type = other RNA
tctacacagcttcatcatg

SEQ ID NO: 62244 - RNA, 19 nt, synthetic construct
  misc_feature 1..19: note = siRNA sense sequence
  source 1..19: mol_type = other RNA
atgatgaagctgtgtagag

SEQ ID NO: 62245 - RNA, 19 nt, synthetic construct
  misc_feature 1..19: note = siRNA antisense sequence
  source 1..19: mol_type = other RNA
ctctacacagcttcatcat

SEQ ID NO: 62246 - RNA, 19 nt, synthetic construct
  misc_feature 1..19: note = siRNA sense sequence
  source 1..19: mol_type = other RNA
tttcactaggtataaatgg

SEQ ID NO: 62247 - RNA, 19 nt, synthetic construct
  misc_feature 1..19: note = siRNA antisense sequence
  source 1..19: mol_type = other RNA
ccatttatacctagtgaaa

SEQ ID NO: 62248 - RNA, 19 nt, synthetic construct
  misc_feature 1..19: note = siRNA sense sequence
  source 1..19: mol_type = other RNA
ttcactaggtataaatggt

SEQ ID NO: 62249 - RNA, 19 nt, synthetic construct
  misc_feature 1..19: note = siRNA antisense sequence
  source 1..19: mol_type = other RNA
accatttatacctagtgaa

SEQ ID NO: 62250 - RNA, 19 nt, synthetic construct
  misc_feature 1..19: note = siRNA sense sequence
  source 1..19: mol_type = other RNA
tcactaggtataaatggta

SEQ ID NO: 62251 - RNA, 19 nt, synthetic construct
  misc_feature 1..19: note = siRNA antisense sequence
  source 1..19: mol_type = other RNA
taccatttatacctagtga

SEQ ID NO: 62252 - RNA, 19 nt, synthetic construct
  misc_feature 1..19: note = siRNA sense sequence
  source 1..19: mol_type = other RNA
cactaggtataaatggtat

SEQ ID NO: 62253 - RNA, 19 nt, synthetic construct
  misc_feature 1..19: note = siRNA antisense sequence
  source 1..19: mol_type = other RNA
ataccatttatacctagtg

SEQ ID NO: 62254 - RNA, 19 nt, synthetic construct
  misc_feature 1..19: note = siRNA sense sequence
  source 1..19: mol_type = other RNA
ggtataaatggtattagtg

SEQ ID NO: 62255 - RNA, 19 nt, synthetic construct
  misc_feature 1..19: note = siRNA antisense sequence
  source 1..19: mol_type = other RNA
cactaataccatttatacc

SEQ ID NO: 62256 - RNA, 19 nt, synthetic construct
  misc_feature 1..19: note = siRNA sense sequence
  source 1..19: mol_type = other RNA
ggtattagtgaatttacag

SEQ ID NO: 62257 - RNA, 19 nt, synthetic construct
  misc_feature 1..19: note = siRNA antisense sequence
  source 1..19: mol_type = other RNA
ctgtaaattcactaatacc

SEQ ID NO: 62258 - RNA, 19 nt, synthetic construct
  misc_feature 1..19: note = siRNA sense sequence
  source 1..19: mol_type = other RNA
aacttttcacttgttaacc

SEQ ID NO: 62259 - RNA, 19 nt, synthetic construct
  misc_feature 1..19: note = siRNA antisense sequence
  source 1..19: mol_type = other RNA
ggttaacaagtgaaaagtt

SEQ ID NO: 62260 - RNA, 19 nt, synthetic construct
  misc_feature 1..19: note = siRNA sense sequence
  source 1..19: mol_type = other RNA
acttttcacttgttaacca

SEQ ID NO: 62261 - RNA, 19 nt, synthetic construct
  misc_feature 1..19: note = siRNA antisense sequence
  source 1..19: mol_type = other RNA
tggttaacaagtgaaaagt

SEQ ID NO: 62262 - RNA, 19 nt, synthetic construct
  misc_feature 1..19: note = siRNA sense sequence
  source 1..19: mol_type = other RNA
ctcatattctagcattttg

SEQ ID NO: 62263 - RNA, 19 nt, synthetic construct
  misc_feature 1..19: note = siRNA antisense sequence
  source 1..19: mol_type = other RNA
caaaatgctagaatatgag

SEQ ID NO: 62264 - RNA, 19 nt, synthetic construct
  misc_feature 1..19: note = siRNA sense sequence
  source 1..19: mol_type = other RNA
tcatattctagcattttgg

SEQ ID NO: 62265 - RNA, 19 nt, synthetic construct
  misc_feature 1..19: note = siRNA antisense sequence
  source 1..19: mol_type = other RNA
ccaaaatgctagaatatga

SEQ ID NO: 62266 - RNA, 19 nt, synthetic construct
  misc_feature 1..19: note = siRNA sense sequence
  source 1..19: mol_type = other RNA
catattctagcattttggg

SEQ ID NO: 62267 - RNA, 19 nt, synthetic construct
  misc_feature 1..19: note = siRNA antisense sequence
  source 1..19: mol_type = other RNA
cccaaaatgctagaatatg

SEQ ID NO: 62268 - RNA, 19 nt, synthetic construct
  misc_feature 1..19: note = siRNA sense sequence
  source 1..19: mol_type = other RNA
aataagcatcagtgactat

SEQ ID NO: 62269 - RNA, 19 nt, synthetic construct
  misc_feature 1..19: note = siRNA antisense sequence
  source 1..19: mol_type = other RNA
atagtcactgatgcttatt

SEQ ID NO: 62270 - RNA, 19 nt, synthetic construct
  misc_feature 1..19: note = siRNA sense sequence
  source 1..19: mol_type = other RNA
ataagcatcagtgactatt

SEQ ID NO: 62271 - RNA, 19 nt, synthetic construct
  misc_feature 1..19: note = siRNA antisense sequence
  source 1..19: mol_type = other RNA
aatagtcactgatgcttat

SEQ ID NO: 62272 - RNA, 19 nt, synthetic construct
  misc_feature 1..19: note = siRNA sense sequence
  source 1..19: mol_type = other RNA
taagcatcagtgactattg

SEQ ID NO: 62273 - RNA, 19 nt, synthetic construct
  misc_feature 1..19: note = siRNA antisense sequence
  source 1..19: mol_type = other RNA
caatagtcactgatgctta

SEQ ID NO: 62274 - RNA, 19 nt, synthetic construct
  misc_feature 1..19: note = siRNA sense sequence
  source 1..19: mol_type = other RNA
aagcatcagtgactattga

SEQ ID NO: 62275 - RNA, 19 nt, synthetic construct
  misc_feature 1..19: note = siRNA antisense sequence
  source 1..19: mol_type = other RNA
tcaatagtcactgatgctt

SEQ ID NO: 62276 - RNA, 19 nt, synthetic construct
  misc_feature 1..19: note = siRNA sense sequence
  source 1..19: mol_type = other RNA
agcatcagtgactattgaa

SEQ ID NO: 62277 - RNA, 19 nt, synthetic construct
  misc_feature 1..19: note = siRNA antisense sequence
  source 1..19: mol_type = other RNA
ttcaatagtcactgatgct

SEQ ID NO: 62278 - RNA, 19 nt, synthetic construct
  misc_feature 1..19: note = siRNA sense sequence
  source 1..19: mol_type = other RNA
cttctcactctcctcaaag

SEQ ID NO: 62279 - RNA, 19 nt, synthetic construct
  misc_feature 1..19: note = siRNA antisense sequence
  source 1..19: mol_type = other RNA
ctttgaggagagtgagaag

SEQ ID NO: 62280 - RNA, 19 nt, synthetic construct
  misc_feature 1..19: note = siRNA sense sequence
  source 1..19: mol_type = other RNA
tctcactctcctcaaagat

SEQ ID NO: 62281 - RNA, 19 nt, synthetic construct
  misc_feature 1..19: note = siRNA antisense sequence
  source 1..19: mol_type = other RNA
atctttgaggagagtgaga

SEQ ID NO: 62282 - RNA, 19 nt, synthetic construct
  misc_feature 1..19: note = siRNA sense sequence
  source 1..19: mol_type = other RNA
ctcactctcctcaaagatt

SEQ ID NO: 62283 - RNA, 19 nt, synthetic construct
  misc_feature 1..19: note = siRNA antisense sequence
  source 1..19: mol_type = other RNA
aatctttgaggagagtgag

SEQ ID NO: 62284 - RNA, 19 nt, synthetic construct
  misc_feature 1..19: note = siRNA sense sequence
  source 1..19: mol_type = other RNA
tcactctcctcaaagattt

SEQ ID NO: 62285 - RNA, 19 nt, synthetic construct
  misc_feature 1..19: note = siRNA antisense sequence
  source 1..19: mol_type = other RNA
aaatctttgaggagagtga

SEQ ID NO: 62286 - RNA, 19 nt, synthetic construct
  misc_feature 1..19: note = siRNA sense sequence
  source 1..19: mol_type = other RNA
cactctcctcaaagattta

SEQ ID NO: 62287 - RNA, 19 nt, synthetic construct
  misc_feature 1..19: note = siRNA antisense sequence
  source 1..19: mol_type = other RNA
taaatctttgaggagagtg

SEQ ID NO: 62288 - RNA, 19 nt, synthetic construct
  misc_feature 1..19: note = siRNA sense sequence
  source 1..19: mol_type = other RNA
actctcctcaaagatttaa

SEQ ID NO: 62289 - RNA, 19 nt, synthetic construct
  misc_feature 1..19: note = siRNA antisense sequence
  source 1..19: mol_type = other RNA
ttaaatctttgaggagagt

SEQ ID NO: 62290 - RNA, 19 nt, synthetic construct
  misc_feature 1..19: note = siRNA sense sequence
  source 1..19: mol_type = other RNA
tcaaggtaaatgaattccc

SEQ ID NO: 62291 - RNA, 19 nt, synthetic construct
  misc_feature 1..19: note = siRNA antisense sequence
  source 1..19: mol_type = other RNA
gggaattcatttaccttga

SEQ ID NO: 62292 - RNA, 19 nt, synthetic construct
  misc_feature 1..19: note = siRNA sense sequence
  source 1..19: mol_type = other RNA
tggaattacatgatatgga

SEQ ID NO: 62293 - RNA, 19 nt, synthetic construct
  misc_feature 1..19: note = siRNA antisense sequence
  source 1..19: mol_type = other RNA
tccatatcatgtaattcca

SEQ ID NO: 62294 - RNA, 19 nt, synthetic construct
  misc_feature 1..19: note = siRNA sense sequence
  source 1..19: mol_type = other RNA
taatgaggccaaataaaag

SEQ ID NO: 62295 - RNA, 19 nt, synthetic construct
  misc_feature 1..19: note = siRNA antisense sequence
  source 1..19: mol_type = other RNA
cttttatttggcctcatta

SEQ ID NO: 62296 - RNA, 19 nt, synthetic construct
  misc_feature 1..19: note = siRNA sense sequence
  source 1..19: mol_type = other RNA
aatgaggccaaataaaagt

SEQ ID NO: 62297 - RNA, 19 nt, synthetic construct
  misc_feature 1..19: note = siRNA antisense sequence
  source 1..19: mol_type = other RNA
acttttatttggcctcatt

SEQ ID NO: 62298 - RNA, 19 nt, synthetic construct
  misc_feature 1..19: note = siRNA sense sequence
  source 1..19: mol_type = other RNA
atgaggccaaataaaagtt

SEQ ID NO: 62299 - RNA, 19 nt, synthetic construct
  misc_feature 1..19: note = siRNA antisense sequence
  source 1..19: mol_type = other RNA
aacttttatttggcctcat

SEQ ID NO: 62300 - RNA, 19 nt, synthetic construct
  misc_feature 1..19: note = siRNA sense sequence
  source 1..19: mol_type = other RNA
tgaggccaaataaaagtta

SEQ ID NO: 62301 - RNA, 19 nt, synthetic construct
  misc_feature 1..19: note = siRNA antisense sequence
  source 1..19: mol_type = other RNA
taacttttatttggcctca

SEQ ID NO: 62302 - RNA, 19 nt, synthetic construct
  misc_feature 1..19: note = siRNA sense sequence
  source 1..19: mol_type = other RNA
gaggccaaataaaagttaa

SEQ ID NO: 62303 - RNA, 19 nt, synthetic construct
  misc_feature 1..19: note = siRNA antisense sequence
  source 1..19: mol_type = other RNA
ttaacttttatttggcctc

SEQ ID NO: 62304 - RNA, 19 nt, synthetic construct
  misc_feature 1..19: note = siRNA sense sequence
  source 1..19: mol_type = other RNA
ttttaagctctgcaagtga

SEQ ID NO: 62305 - RNA, 19 nt, synthetic construct
  misc_feature 1..19: note = siRNA antisense sequence
  source 1..19: mol_type = other RNA
tcacttgcagagcttaaaa

SEQ ID NO: 62306 - RNA, 19 nt, synthetic construct
  misc_feature 1..19: note = siRNA sense sequence
  source 1..19: mol_type = other RNA
tttaagctctgcaagtgaa

SEQ ID NO: 62307 - RNA, 19 nt, synthetic construct
  misc_feature 1..19: note = siRNA antisense sequence
  source 1..19: mol_type = other RNA
ttcacttgcagagcttaaa

SEQ ID NO: 62308 - RNA, 19 nt, synthetic construct
  misc_feature 1..19: note = siRNA sense sequence
  source 1..19: mol_type = other RNA
ttaagctctgcaagtgaat

SEQ ID NO: 62309 - RNA, 19 nt, synthetic construct
  misc_feature 1..19: note = siRNA antisense sequence
  source 1..19: mol_type = other RNA
attcacttgcagagcttaa

SEQ ID NO: 62310 - RNA, 19 nt, synthetic construct
  misc_feature 1..19: note = siRNA sense sequence
  source 1..19: mol_type = other RNA
taagctctgcaagtgaata

SEQ ID NO: 62311 - RNA, 19 nt, synthetic construct
  misc_feature 1..19: note = siRNA antisense sequence
  source 1..19: mol_type = other RNA
tattcacttgcagagctta

SEQ ID NO: 62312 - RNA, 19 nt, synthetic construct
  misc_feature 1..19: note = siRNA sense sequence
  source 1..19: mol_type = other RNA
aagctctgcaagtgaatac

SEQ ID NO: 62313 - RNA, 19 nt, synthetic construct
  misc_feature 1..19: note = siRNA antisense sequence
  source 1..19: mol_type = other RNA
gtattcacttgcagagctt

SEQ ID NO: 62314 - RNA, 19 nt, synthetic construct
  misc_feature 1..19: note = siRNA sense sequence
  source 1..19: mol_type = other RNA
agctctgcaagtgaatacc

SEQ ID NO: 62315 - RNA, 19 nt, synthetic construct
  misc_feature 1..19: note = siRNA antisense sequence
  source 1..19: mol_type = other RNA
ggtattcacttgcagagct

SEQ ID NO: 62316 - RNA, 19 nt, synthetic construct
  misc_feature 1..19: note = siRNA sense sequence
  source 1..19: mol_type = other RNA
gctctgcaagtgaatacca

SEQ ID NO: 62317 - RNA, 19 nt, synthetic construct
  misc_feature 1..19: note = siRNA antisense sequence
  source 1..19: mol_type = other RNA
tggtattcacttgcagagc

SEQ ID NO: 62318 - RNA, 19 nt, synthetic construct
  misc_feature 1..19: note = siRNA sense sequence
  source 1..19: mol_type = other RNA
ctctgcaagtgaataccac

SEQ ID NO: 62319 - RNA, 19 nt, synthetic construct
  misc_feature 1..19: note = siRNA antisense sequence
  source 1..19: mol_type = other RNA
gtggtattcacttgcagag

SEQ ID NO: 62320 - RNA, 19 nt, synthetic construct
  misc_feature 1..19: note = siRNA sense sequence
  source 1..19: mol_type = other RNA
tctgcaagtgaataccaca

SEQ ID NO: 62321 - RNA, 19 nt, synthetic construct
  misc_feature 1..19: note = siRNA antisense sequence
  source 1..19: mol_type = other RNA
tgtggtattcacttgcaga

SEQ ID NO: 62322 - RNA, 19 nt, synthetic construct
  misc_feature 1..19: note = siRNA sense sequence
  source 1..19: mol_type = other RNA
agacagtccctgaagttat

SEQ ID NO: 62323 - RNA, 19 nt, synthetic construct
  misc_feature 1..19: note = siRNA antisense sequence
  source 1..19: mol_type = other RNA
ataacttcagggactgtct

SEQ ID NO: 62324 - RNA, 19 nt, synthetic construct
  misc_feature 1..19: note = siRNA sense sequence
  source 1..19: mol_type = other RNA
gacagtccctgaagttatt

SEQ ID NO: 62325 - RNA, 19 nt, synthetic construct
  misc_feature 1..19: note = siRNA antisense sequence
  source 1..19: mol_type = other RNA
aataacttcagggactgtc

SEQ ID NO: 62326 - RNA, 19 nt, synthetic construct
  misc_feature 1..19: note = siRNA sense sequence
  source 1..19: mol_type = other RNA
cagtccctgaagttattaa

SEQ ID NO: 62327 - RNA, 19 nt, synthetic construct
  misc_feature 1..19: note = siRNA antisense sequence
  source 1..19: mol_type = other RNA
ttaataacttcagggactg

SEQ ID NO: 62328 - RNA, 19 nt, synthetic construct
  misc_feature 1..19: note = siRNA sense sequence
  source 1..19: mol_type = other RNA
agtccctgaagttattaat

SEQ ID NO: 62329 - RNA, 19 nt, synthetic construct
  misc_feature 1..19: note = siRNA antisense sequence
  source 1..19: mol_type = other RNA
attaataacttcagggact

SEQ ID NO: 62330 - RNA, 19 nt, synthetic construct
  misc_feature 1..19: note = siRNA sense sequence
  source 1..19: mol_type = other RNA
gtccctgaagttattaatt

SEQ ID NO: 62331 - RNA, 19 nt, synthetic construct
  misc_feature 1..19: note = siRNA antisense sequence
  source 1..19: mol_type = other RNA
aattaataacttcagggac

SEQ ID NO: 62332 - RNA, 19 nt, synthetic construct
  misc_feature 1..19: note = siRNA sense sequence
  source 1..19: mol_type = other RNA
gttattaattctactgagg

SEQ ID NO: 62333 - RNA, 19 nt, synthetic construct
  misc_feature 1..19: note = siRNA antisense sequence
  source 1..19: mol_type = other RNA
cctcagtagaattaataac

SEQ ID NO: 62334 - RNA, 19 nt, synthetic construct
  misc_feature 1..19: note = siRNA sense sequence
  source 1..19: mol_type = other RNA
tattaattctactgaggac

SEQ ID NO: 62335 - RNA, 19 nt, synthetic construct
  misc_feature 1..19: note = siRNA antisense sequence
  source 1..19: mol_type = other RNA
gtcctcagtagaattaata

SEQ ID NO: 62336 - RNA, 19 nt, synthetic construct
  misc_feature 1..19: note = siRNA sense sequence
  source 1..19: mol_type = other RNA
ttaattctactgaggacat

SEQ ID NO: 62337 - RNA, 19 nt, synthetic construct
  misc_feature 1..19: note = siRNA antisense sequence
  source 1..19: mol_type = other RNA
atgtcctcagtagaattaa

SEQ ID NO: 62338 - RNA, 19 nt, synthetic construct
  misc_feature 1..19: note = siRNA sense sequence
  source 1..19: mol_type = other RNA
aattctactgaggacattg

SEQ ID NO: 62339 - RNA, 19 nt, synthetic construct
  misc_feature 1..19: note = siRNA antisense sequence
  source 1..19: mol_type = other RNA
caatgtcctcagtagaatt

SEQ ID NO: 62340 - RNA, 19 nt, synthetic construct
  misc_feature 1..19: note = siRNA sense sequence
  source 1..19: mol_type = other RNA
ttctactgaggacattgga

SEQ ID NO: 62341 - RNA, 19 nt, synthetic construct
  misc_feature 1..19: note = siRNA antisense sequence
  source 1..19: mol_type = other RNA
tccaatgtcctcagtagaa

SEQ ID NO: 62342 - RNA, 19 nt, synthetic construct
  misc_feature 1..19: note = siRNA sense sequence
  source 1..19: mol_type = other RNA
tctactgaggacattggaa

SEQ ID NO: 62343 - RNA, 19 nt, synthetic construct
  misc_feature 1..19: note = siRNA antisense sequence
  source 1..19: mol_type = other RNA
ttccaatgtcctcagtaga

SEQ ID NO: 62344 - RNA, 19 nt, synthetic construct
  misc_feature 1..19: note = siRNA sense sequence
  source 1..19: mol_type = other RNA
atatcttctacttggtaag

SEQ ID NO: 62345 - RNA, 19 nt, synthetic construct
  misc_feature 1..19: note = siRNA antisense sequence
  source 1..19: mol_type = other RNA
cttaccaagtagaagatat

SEQ ID NO: 62346 - RNA, 19 nt, synthetic construct
  misc_feature 1..19: note = siRNA sense sequence
  source 1..19: mol_type = other RNA
gttgcttcaatgtttaatc

SEQ ID NO: 62347 - RNA, 19 nt, synthetic construct
  misc_feature 1..19: note = siRNA antisense sequence
  source 1..19: mol_type = other RNA
gattaaacattgaagcaac

SEQ ID NO: 62348 - RNA, 19 nt, synthetic construct
  misc_feature 1..19: note = siRNA sense sequence
  source 1..19: mol_type = other RNA
tgcttcaatgtttaatctc

SEQ ID NO: 62349 - RNA, 19 nt, synthetic construct
  misc_feature 1..19: note = siRNA antisense sequence
  source 1..19: mol_type = other RNA
gagattaaacattgaagca

SEQ ID NO: 62350 - RNA, 19 nt, synthetic construct
  misc_feature 1..19: note = siRNA sense sequence
  source 1..19: mol_type = other RNA
gcttcaatgtttaatctct

SEQ ID NO: 62351 - RNA, 19 nt, synthetic construct
  misc_feature 1..19: note = siRNA antisense sequence
  source 1..19: mol_type = other RNA
agagattaaacattgaagc

SEQ ID NO: 62352 - RNA, 19 nt, synthetic construct
  misc_feature 1..19: note = siRNA sense sequence
  source 1..19: mol_type = other RNA
ttaatctctatattccagc

SEQ ID NO: 62353 - RNA, 19 nt, synthetic construct
  misc_feature 1..19: note = siRNA antisense sequence
  source 1..19: mol_type = other RNA
gctggaatatagagattaa

SEQ ID NO: 62354 - RNA, 19 nt, synthetic construct
  misc_feature 1..19: note = siRNA sense sequence
  source 1..19: mol_type = other RNA
taatctctatattccagca

SEQ ID NO: 62355 - RNA, 19 nt, synthetic construct
  misc_feature 1..19: note = siRNA antisense sequence
  source 1..19: mol_type = other RNA
tgctggaatatagagatta

SEQ ID NO: 62356 - RNA, 19 nt, synthetic construct
  misc_feature 1..19: note = siRNA sense sequence
  source 1..19: mol_type = other RNA
aatctctatattccagcat

SEQ ID NO: 62357 - RNA, 19 nt, synthetic construct
  misc_feature 1..19: note = siRNA antisense sequence
  source 1..19: mol_type = other RNA
atgctggaatatagagatt

SEQ ID NO: 62358 - RNA, 19 nt, synthetic construct
  misc_feature 1..19: note = siRNA sense sequence
  source 1..19: mol_type = other RNA
atctctatattccagcata

SEQ ID NO: 62359 - RNA, 19 nt, synthetic construct
  misc_feature 1..19: note = siRNA antisense sequence
  source 1..19: mol_type = other RNA
tatgctggaatatagagat

SEQ ID NO: 62360 - RNA, 19 nt, synthetic construct
  misc_feature 1..19: note = siRNA sense sequence
  source 1..19: mol_type = other RNA
ttttcacatcagtttagag

SEQ ID NO: 62361 - RNA, 19 nt, synthetic construct
  misc_feature 1..19: note = siRNA antisense sequence
  source 1..19: mol_type = other RNA
ctctaaactgatgtgaaaa

SEQ ID NO: 62362 - RNA, 19 nt, synthetic construct
  misc_feature 1..19: note = siRNA sense sequence
  source 1..19: mol_type = other RNA
agatctaagcctctaattt

SEQ ID NO: 62363 - RNA, 19 nt, synthetic construct
  misc_feature 1..19: note = siRNA antisense sequence
  source 1..19: mol_type = other RNA
aaattagaggcttagatct

SEQ ID NO: 62364 - RNA, 19 nt, synthetic construct
  misc_feature 1..19: note = siRNA sense sequence
  source 1..19: mol_type = other RNA
gatctaagcctctaatttc

SEQ ID NO: 62365 - RNA, 19 nt, synthetic construct
  misc_feature 1..19: note = siRNA antisense sequence
  source 1..19: mol_type = other RNA
gaaattagaggcttagatc

SEQ ID NO: 62366 - RNA, 19 nt, synthetic construct
  misc_feature 1..19: note = siRNA sense sequence
  source 1..19: mol_type = other RNA
atctaagcctctaatttcc

SEQ ID NO: 62367 - RNA, 19 nt, synthetic construct
  misc_feature 1..19: note = siRNA antisense sequence
  source 1..19: mol_type = other RNA
ggaaattagaggcttagat

SEQ ID NO: 62368 - RNA, 19 nt, synthetic construct
  misc_feature 1..19: note = siRNA sense sequence
  source 1..19: mol_type = other RNA
gcctctaatttcctcaaaa

SEQ ID NO: 62369 - RNA, 19 nt, synthetic construct
  misc_feature 1..19: note = siRNA antisense sequence
  source 1..19: mol_type = other RNA
ttttgaggaaattagaggc

SEQ ID NO: 62370 - RNA, 19 nt, synthetic construct
  misc_feature 1..19: note = siRNA sense sequence
  source 1..19: mol_type = other RNA
ttcctcaaaataagatacc

SEQ ID NO: 62371 - RNA, 19 nt, synthetic construct
  misc_feature 1..19: note = siRNA antisense sequence
  source 1..19: mol_type = other RNA
ggtatcttattttgaggaa

SEQ ID NO: 62372 - RNA, 19 nt, synthetic construct
  misc_feature 1..19: note = siRNA sense sequence
  source 1..19: mol_type = other RNA
cctcaaaataagataccac

SEQ ID NO: 62373 - RNA, 19 nt, synthetic construct
  misc_feature 1..19: note = siRNA antisense sequence
  source 1..19: mol_type = other RNA
gtggtatcttattttgagg

SEQ ID NO: 62374 - RNA, 19 nt, synthetic construct
  misc_feature 1..19: note = siRNA sense sequence
  source 1..19: mol_type = other RNA
ataagataccactagaatg

SEQ ID NO: 62375 - RNA, 19 nt, synthetic construct
  misc_feature 1..19: note = siRNA antisense sequence
  source 1..19: mol_type = other RNA
cattctagtggtatcttat

SEQ ID NO: 62376 - RNA, 19 nt, synthetic construct
  misc_feature 1..19: note = siRNA sense sequence
  source 1..19: mol_type = other RNA
gataccactagaatgactt

SEQ ID NO: 62377 - RNA, 19 nt, synthetic construct
  misc_feature 1..19: note = siRNA antisense sequence
  source 1..19: mol_type = other RNA
aagtcattctagtggtatc

SEQ ID NO: 62378 - RNA, 19 nt, synthetic construct
  misc_feature 1..19: note = siRNA sense sequence
  source 1..19: mol_type = other RNA
ataccactagaatgacttt

SEQ ID NO: 62379 - RNA, 19 nt, synthetic construct
  misc_feature 1..19: note = siRNA antisense sequence
  source 1..19: mol_type = other RNA
aaagtcattctagtggtat

SEQ ID NO: 62380 - RNA, 19 nt, synthetic construct
  misc_feature 1..19: note = siRNA sense sequence
  source 1..19: mol_type = other RNA
taccactagaatgactttc

SEQ ID NO: 62381 - RNA, 19 nt, synthetic construct
  misc_feature 1..19: note = siRNA antisense sequence
  source 1..19: mol_type = other RNA
gaaagtcattctagtggta

SEQ ID NO: 62382 - RNA, 19 nt, synthetic construct
  misc_feature 1..19: note = siRNA sense sequence
  source 1..19: mol_type = other RNA
tatgggactagatagatgc

SEQ ID NO: 62383 - RNA, 19 nt, synthetic construct
  misc_feature 1..19: note = siRNA antisense sequence
  source 1..19: mol_type = other RNA
gcatctatctagtcccata

SEQ ID NO: 62384 - RNA, 19 nt, synthetic construct
  misc_feature 1..19: note = siRNA sense sequence
  source 1..19: mol_type = other RNA
atgggactagatagatgct

SEQ ID NO: 62385 - RNA, 19 nt, synthetic construct
  misc_feature 1..19: note = siRNA antisense sequence
  source 1..19: mol_type = other RNA
agcatctatctagtcccat

SEQ ID NO: 62386 - RNA, 19 nt, synthetic construct
  misc_feature 1..19: note = siRNA sense sequence
  source 1..19: mol_type = other RNA
tgggactagatagatgcta

SEQ ID NO: 62387 - RNA, 19 nt, synthetic construct
  misc_feature 1..19: note = siRNA antisense sequence
  source 1..19: mol_type = other RNA
tagcatctatctagtccca

SEQ ID NO: 62388 - RNA, 19 nt, synthetic construct
  misc_feature 1..19: note = siRNA sense sequence
  source 1..19: mol_type = other RNA
gggactagatagatgctac

SEQ ID NO: 62389 - RNA, 19 nt, synthetic construct
  misc_feature 1..19: note = siRNA antisense sequence
  source 1..19: mol_type = other RNA
gtagcatctatctagtccc

SEQ ID NO: 62390 - RNA, 19 nt, synthetic construct
  misc_feature 1..19: note = siRNA sense sequence
  source 1..19: mol_type = other RNA
ggactagatagatgctacc

SEQ ID NO: 62391 - RNA, 19 nt, synthetic construct
  misc_feature 1..19: note = siRNA antisense sequence
  source 1..19: mol_type = other RNA
ggtagcatctatctagtcc

SEQ ID NO: 62392 - RNA, 19 nt, synthetic construct
  misc_feature 1..19: note = siRNA sense sequence
  source 1..19: mol_type = other RNA
gactagatagatgctaccg

SEQ ID NO: 62393 - RNA, 19 nt, synthetic construct
  misc_feature 1..19: note = siRNA antisense sequence
  source 1..19: mol_type = other RNA
cggtagcatctatctagtc

SEQ ID NO: 62394 - RNA, 19 nt, synthetic construct
  misc_feature 1..19: note = siRNA sense sequence
  source 1..19: mol_type = other RNA
actagatagatgctaccga

SEQ ID NO: 62395 - RNA, 19 nt, synthetic construct
  misc_feature 1..19: note = siRNA antisense sequence
  source 1..19: mol_type = other RNA
tcggtagcatctatctagt

SEQ ID NO: 62396 - RNA, 19 nt, synthetic construct
  misc_feature 1..19: note = siRNA sense sequence
  source 1..19: mol_type = other RNA
ctagatagatgctaccgat

SEQ ID NO: 62397 - RNA, 19 nt, synthetic construct
  misc_feature 1..19: note = siRNA antisense sequence
  source 1..19: mol_type = other RNA
atcggtagcatctatctag

SEQ ID NO: 62398 - RNA, 19 nt, synthetic construct
  misc_feature 1..19: note = siRNA sense sequence
  source 1..19: mol_type = other RNA
tagatagatgctaccgata

SEQ ID NO: 62399 - RNA, 19 nt, synthetic construct
  misc_feature 1..19: note = siRNA antisense sequence
  source 1..19: mol_type = other RNA
tatcggtagcatctatcta

SEQ ID NO: 62400 - RNA, 19 nt, synthetic construct
  misc_feature 1..19: note = siRNA sense sequence
  source 1..19: mol_type = other RNA
agatagatgctaccgataa

SEQ ID NO: 62401 - RNA, 19 nt, synthetic construct
  misc_feature 1..19: note = siRNA antisense sequence
  source 1..19: mol_type = other RNA
ttatcggtagcatctatct

SEQ ID NO: 62402 - RNA, 19 nt, synthetic construct
  misc_feature 1..19: note = siRNA sense sequence
  source 1..19: mol_type = other RNA
gatagatgctaccgataaa

SEQ ID NO: 62403 - RNA, 19 nt, synthetic construct
  misc_feature 1..19: note = siRNA antisense sequence
  source 1..19: mol_type = other RNA
tttatcggtagcatctatc

SEQ ID NO: 62404 - RNA, 19 nt, synthetic construct
  misc_feature 1..19: note = siRNA sense sequence
  source 1..19: mol_type = other RNA
aacctgtagactttactta

SEQ ID NO: 62405 - RNA, 19 nt, synthetic construct
  misc_feature 1..19: note = siRNA antisense sequence
  source 1..19: mol_type = other RNA
taagtaaagtctacaggtt

SEQ ID NO: 62406 - RNA, 19 nt, synthetic construct
  misc_feature 1..19: note = siRNA sense sequence
  source 1..19: mol_type = other RNA
acctgtagactttacttac

SEQ ID NO: 62407 - RNA, 19 nt, synthetic construct
  misc_feature 1..19: note = siRNA antisense sequence
  source 1..19: mol_type = other RNA
gtaagtaaagtctacaggt

SEQ ID NO: 62408 - RNA, 19 nt, synthetic construct
  misc_feature 1..19: note = siRNA sense sequence
  source 1..19: mol_type = other RNA
ttctccttattgttacctt

SEQ ID NO: 62409 - RNA, 19 nt, synthetic construct
  misc_feature 1..19: note = siRNA antisense sequence
  source 1..19: mol_type = other RNA
aaggtaacaataaggagaa

SEQ ID NO: 62410 - RNA, 19 nt, synthetic construct
  misc_feature 1..19: note = siRNA sense sequence
  source 1..19: mol_type = other RNA
tctccttattgttaccttt

SEQ ID NO: 62411 - RNA, 19 nt, synthetic construct
  misc_feature 1..19: note = siRNA antisense sequence
  source 1..19: mol_type = other RNA
aaaggtaacaataaggaga

SEQ ID NO: 62412 - RNA, 19 nt, synthetic construct
  misc_feature 1..19: note = siRNA sense sequence
  source 1..19: mol_type = other RNA
tattgttacctttcacatg

SEQ ID NO: 62413 - RNA, 19 nt, synthetic construct
  misc_feature 1..19: note = siRNA antisense sequence
  source 1..19: mol_type = other RNA
catgtgaaaggtaacaata

SEQ ID NO: 62414 - RNA, 19 nt, synthetic construct
  misc_feature 1..19: note = siRNA sense sequence
  source 1..19: mol_type = other RNA
attgttacctttcacatgc

SEQ ID NO: 62415 - RNA, 19 nt, synthetic construct
  misc_feature 1..19: note = siRNA antisense sequence
  source 1..19: mol_type = other RNA
gcatgtgaaaggtaacaat

SEQ ID NO: 62416 - RNA, 19 nt, synthetic construct
  misc_feature 1..19: note = siRNA sense sequence
  source 1..19: mol_type = other RNA
ttgttacctttcacatgca

SEQ ID NO: 62417 - RNA, 19 nt, synthetic construct
  misc_feature 1..19: note = siRNA antisense sequence
  source 1..19: mol_type = other RNA
tgcatgtgaaaggtaacaa

SEQ ID NO: 62418 - RNA, 19 nt, synthetic construct
  misc_feature 1..19: note = siRNA sense sequence
  source 1..19: mol_type = other RNA
tgttacctttcacatgcat

SEQ ID NO: 62419 - RNA, 19 nt, synthetic construct
  misc_feature 1..19: note = siRNA antisense sequence
  source 1..19: mol_type = other RNA
atgcatgtgaaaggtaaca

SEQ ID NO: 62420 - RNA, 19 nt, synthetic construct
  misc_feature 1..19: note = siRNA sense sequence
  source 1..19: mol_type = other RNA
gttacctttcacatgcatt

SEQ ID NO: 62421 - RNA, 19 nt, synthetic construct
  misc_feature 1..19: note = siRNA antisense sequence
  source 1..19: mol_type = other RNA
aatgcatgtgaaaggtaac

SEQ ID NO: 62422 - RNA, 19 nt, synthetic construct
  misc_feature 1..19: note = siRNA sense sequence
  source 1..19: mol_type = other RNA
ttacctttcacatgcattg

SEQ ID NO: 62423 - RNA, 19 nt, synthetic construct
  misc_feature 1..19: note = siRNA antisense sequence
  source 1..19: mol_type = other RNA
caatgcatgtgaaaggtaa

SEQ ID NO: 62424 - RNA, 19 nt, synthetic construct
  misc_feature 1..19: note = siRNA sense sequence
  source 1..19: mol_type = other RNA
tacctttcacatgcattgt

SEQ ID NO: 62425 - RNA, 19 nt, synthetic construct
  misc_feature 1..19: note = siRNA antisense sequence
  source 1..19: mol_type = other RNA
acaatgcatgtgaaaggta

SEQ ID NO: 62426 - RNA, 19 nt, synthetic construct
  misc_feature 1..19: note = siRNA sense sequence
  source 1..19: mol_type = other RNA
acctttcacatgcattgta

SEQ ID NO: 62427 - RNA, 19 nt, synthetic construct
  misc_feature 1..19: note = siRNA antisense sequence
  source 1..19: mol_type = other RNA
tacaatgcatgtgaaaggt

SEQ ID NO: 62428 - RNA, 19 nt, synthetic construct
  misc_feature 1..19: note = siRNA sense sequence
  source 1..19: mol_type = other RNA
cctttcacatgcattgtac

SEQ ID NO: 62429 - RNA, 19 nt, synthetic construct
  misc_feature 1..19: note = siRNA antisense sequence
  source 1..19: mol_type = other RNA
gtacaatgcatgtgaaagg

SEQ ID NO: 62430 - RNA, 19 nt, synthetic construct
  misc_feature 1..19: note = siRNA sense sequence
  source 1..19: mol_type = other RNA
ctttcacatgcattgtact

SEQ ID NO: 62431 - RNA, 19 nt, synthetic construct
  misc_feature 1..19: note = siRNA antisense sequence
  source 1..19: mol_type = other RNA
agtacaatgcatgtgaaag

SEQ ID NO: 62432 - RNA, 19 nt, synthetic construct
  misc_feature 1..19: note = siRNA sense sequence
  source 1..19: mol_type = other RNA
tttcacatgcattgtacta

SEQ ID NO: 62433 - RNA, 19 nt, synthetic construct
  misc_feature 1..19: note = siRNA antisense sequence
  source 1..19: mol_type = other RNA
tagtacaatgcatgtgaaa

SEQ ID NO: 62434 - RNA, 19 nt, synthetic construct
  misc_feature 1..19: note = siRNA sense sequence
  source 1..19: mol_type = other RNA
ttcacatgcattgtactat

SEQ ID NO: 62435 - RNA, 19 nt, synthetic construct
  misc_feature 1..19: note = siRNA antisense sequence
  source 1..19: mol_type = other RNA
atagtacaatgcatgtgaa

SEQ ID NO: 62436 - RNA, 19 nt, synthetic construct
  misc_feature 1..19: note = siRNA sense sequence
  source 1..19: mol_type = other RNA
tcacatgcattgtactata

SEQ ID NO: 62437 - RNA, 19 nt, synthetic construct
  misc_feature 1..19: note = siRNA antisense sequence
  source 1..19: mol_type = other RNA
tatagtacaatgcatgtga

SEQ ID NO: 62438 - RNA, 19 nt, synthetic construct
  misc_feature 1..19: note = siRNA sense sequence
  source 1..19: mol_type = other RNA
cacatgcattgtactataa

SEQ ID NO: 62439 - RNA, 19 nt, synthetic construct
  misc_feature 1..19: note = siRNA antisense sequence
  source 1..19: mol_type = other RNA
ttatagtacaatgcatgtg

SEQ ID NO: 62440 - RNA, 19 nt, synthetic construct
  misc_feature 1..19: note = siRNA sense sequence
  source 1..19: mol_type = other RNA
aaattactcatgttggtac

SEQ ID NO: 62441 - RNA, 19 nt, synthetic construct
  misc_feature 1..19: note = siRNA antisense sequence
  source 1..19: mol_type = other RNA
gtaccaacatgagtaattt

SEQ ID NO: 62442 - RNA, 19 nt, synthetic construct
  misc_feature 1..19: note = siRNA sense sequence
  source 1..19: mol_type = other RNA
aattactcatgttggtact

SEQ ID NO: 62443 - RNA, 19 nt, synthetic construct
  misc_feature 1..19: note = siRNA antisense sequence
  source 1..19: mol_type = other RNA
agtaccaacatgagtaatt

SEQ ID NO: 62444 - RNA, 19 nt, synthetic construct
  misc_feature 1..19: note = siRNA sense sequence
  source 1..19: mol_type = other RNA
attactcatgttggtacta

SEQ ID NO: 62445 - RNA, 19 nt, synthetic construct
  misc_feature 1..19: note = siRNA antisense sequence
  source 1..19: mol_type = other RNA
tagtaccaacatgagtaat

SEQ ID NO: 62446 - RNA, 19 nt, synthetic construct
  misc_feature 1..19: note = siRNA sense sequence
  source 1..19: mol_type = other RNA
ttactcatgttggtactac

SEQ ID NO: 62447 - RNA, 19 nt, synthetic construct
  misc_feature 1..19: note = siRNA antisense sequence
  source 1..19: mol_type = other RNA
gtagtaccaacatgagtaa

SEQ ID NO: 62448 - RNA, 19 nt, synthetic construct
  misc_feature 1..19: note = siRNA sense sequence
  source 1..19: mol_type = other RNA
tactcatgttggtactacc

SEQ ID NO: 62449 - RNA, 19 nt, synthetic construct
  misc_feature 1..19: note = siRNA antisense sequence
  source 1..19: mol_type = other RNA
ggtagtaccaacatgagta

SEQ ID NO: 62450 - RNA, 19 nt, synthetic construct
  misc_feature 1..19: note = siRNA sense sequence
  source 1..19: mol_type = other RNA
ggtactaccacctccttaa

SEQ ID NO: 62451 - RNA, 19 nt, synthetic construct
  misc_feature 1..19: note = siRNA antisense sequence
  source 1..19: mol_type = other RNA
ttaaggaggtggtagtacc

SEQ ID NO: 62452 - RNA, 19 nt, synthetic construct
  misc_feature 1..19: note = siRNA sense sequence
  source 1..19: mol_type = other RNA
gtactaccacctccttaaa

SEQ ID NO: 62453 - RNA, 19 nt, synthetic construct
  misc_feature 1..19: note = siRNA antisense sequence
  source 1..19: mol_type = other RNA
tttaaggaggtggtagtac

SEQ ID NO: 62454 - RNA, 19 nt, synthetic construct
  misc_feature 1..19: note = siRNA sense sequence
  source 1..19: mol_type = other RNA
tactaccacctccttaaat

SEQ ID NO: 62455 - RNA, 19 nt, synthetic construct
  misc_feature 1..19: note = siRNA antisense sequence
  source 1..19: mol_type = other RNA
atttaaggaggtggtagta

SEQ ID NO: 62456 - RNA, 19 nt, synthetic construct
  misc_feature 1..19: note = siRNA sense sequence
  source 1..19: mol_type = other RNA
actaccacctccttaaatg

SEQ ID NO: 62457 - RNA, 19 nt, synthetic construct
  misc_feature 1..19: note = siRNA antisense sequence
  source 1..19: mol_type = other RNA
catttaaggaggtggtagt

SEQ ID NO: 62458 - RNA, 19 nt, synthetic construct
  misc_feature 1..19: note = siRNA sense sequence
  source 1..19: mol_type = other RNA
ccacctccttaaatgatgt

SEQ ID NO: 62459 - RNA, 19 nt, synthetic construct
  misc_feature 1..19: note = siRNA antisense sequence
  source 1..19: mol_type = other RNA
acatcatttaaggaggtgg

SEQ ID NO: 62460 - RNA, 19 nt, synthetic construct
  misc_feature 1..19: note = siRNA sense sequence
  source 1..19: mol_type = other RNA
cacctccttaaatgatgtt

SEQ ID NO: 62461 - RNA, 19 nt, synthetic construct
  misc_feature 1..19: note = siRNA antisense sequence
  source 1..19: mol_type = other RNA
aacatcatttaaggaggtg

SEQ ID NO: 62462 - RNA, 19 nt, synthetic construct
  misc_feature 1..19: note = siRNA sense sequence
  source 1..19: mol_type = other RNA
acctccttaaatgatgttt

SEQ ID NO: 62463 - RNA, 19 nt, synthetic construct
  misc_feature 1..19: note = siRNA antisense sequence
  source 1..19: mol_type = other RNA
aaacatcatttaaggaggt

SEQ ID NO: 62464 - RNA, 19 nt, synthetic construct
  misc_feature 1..19: note = siRNA sense sequence
  source 1..19: mol_type = other RNA
cctccttaaatgatgtttt

SEQ ID NO: 62465 - RNA, 19 nt, synthetic construct
  misc_feature 1..19: note = siRNA antisense sequence
  source 1..19: mol_type = other RNA
aaaacatcatttaaggagg

SEQ ID NO: 62466 - RNA, 19 nt, synthetic construct
  misc_feature 1..19: note = siRNA sense sequence
  source 1..19: mol_type = other RNA
ctccttaaatgatgttttc

SEQ ID NO: 62467 - RNA, 19 nt, synthetic construct
  misc_feature 1..19: note = siRNA antisense sequence
  source 1..19: mol_type = other RNA
gaaaacatcatttaaggag

SEQ ID NO: 62468 - RNA, 19 nt, synthetic construct
  misc_feature 1..19: note = siRNA sense sequence
  source 1..19: mol_type = other RNA
cacagactcaagttaaaat

SEQ ID NO: 62469 - RNA, 19 nt, synthetic construct
  misc_feature 1..19: note = siRNA antisense sequence
  source 1..19: mol_type = other RNA
attttaacttgagtctgtg

SEQ ID NO: 62470 - RNA, 19 nt, synthetic construct
  misc_feature 1..19: note = siRNA sense sequence
  source 1..19: mol_type = other RNA
acagactcaagttaaaatc

SEQ ID NO: 62471 - RNA, 19 nt, synthetic construct
  misc_feature 1..19: note = siRNA antisense sequence
  source 1..19: mol_type = other RNA
gattttaacttgagtctgt

SEQ ID NO: 62472 - RNA, 19 nt, synthetic construct
  misc_feature 1..19: note = siRNA sense sequence
  source 1..19: mol_type = other RNA
cagactcaagttaaaatca

SEQ ID NO: 62473 - RNA, 19 nt, synthetic construct
  misc_feature 1..19: note = siRNA antisense sequence
  source 1..19: mol_type = other RNA
tgattttaacttgagtctg

SEQ ID NO: 62474 - RNA, 19 nt, synthetic construct
  misc_feature 1..19: note = siRNA sense sequence
  source 1..19: mol_type = other RNA
agactcaagttaaaatcac

SEQ ID NO: 62475 - RNA, 19 nt, synthetic construct
  misc_feature 1..19: note = siRNA antisense sequence
  source 1..19: mol_type = other RNA
gtgattttaacttgagtct

SEQ ID NO: 62476 - RNA, 19 nt, synthetic construct
  misc_feature 1..19: note = siRNA sense sequence
  source 1..19: mol_type = other RNA
gactcaagttaaaatcact

SEQ ID NO: 62477 - RNA, 19 nt, synthetic construct
  misc_feature 1..19: note = siRNA antisense sequence
  source 1..19: mol_type = other RNA
agtgattttaacttgagtc

SEQ ID NO: 62478 - RNA, 19 nt, synthetic construct
  misc_feature 1..19: note = siRNA sense sequence
  source 1..19: mol_type = other RNA
actcaagttaaaatcactc

SEQ ID NO: 62479 - RNA, 19 nt, synthetic construct
  misc_feature 1..19: note = siRNA antisense sequence
  source 1..19: mol_type = other RNA
gagtgattttaacttgagt

SEQ ID NO: 62480 - RNA, 19 nt, synthetic construct
  misc_feature 1..19: note = siRNA sense sequence
  source 1..19: mol_type = other RNA
aagttaaaatcactcaagg

SEQ ID NO: 62481 - RNA, 19 nt, synthetic construct
  misc_feature 1..19: note = siRNA antisense sequence
  source 1..19: mol_type = other RNA
ccttgagtgattttaactt

SEQ ID NO: 62482 - RNA, 19 nt, synthetic construct
  misc_feature 1..19: note = siRNA sense sequence
  source 1..19: mol_type = other RNA
agttaaaatcactcaagga

SEQ ID NO: 62483 - RNA, 19 nt, synthetic construct
  misc_feature 1..19: note = siRNA antisense sequence
  source 1..19: mol_type = other RNA
tccttgagtgattttaact

SEQ ID NO: 62484 - RNA, 19 nt, synthetic construct
  misc_feature 1..19: note = siRNA sense sequence
  source 1..19: mol_type = other RNA
gttaaaatcactcaaggaa

SEQ ID NO: 62485 - RNA, 19 nt, synthetic construct
  misc_feature 1..19: note = siRNA antisense sequence
  source 1..19: mol_type = other RNA
ttccttgagtgattttaac

SEQ ID NO: 62486 - RNA, 19 nt, synthetic construct
  misc_feature 1..19: note = siRNA sense sequence
  source 1..19: mol_type = other RNA
aaatgaagacagcctcaat

SEQ ID NO: 62487 - RNA, 19 nt, synthetic construct
  misc_feature 1..19: note = siRNA antisense sequence
  source 1..19: mol_type = other RNA
attgaggctgtcttcattt

SEQ ID NO: 62488 - RNA, 19 nt, synthetic construct
  misc_feature 1..19: note = siRNA sense sequence
  source 1..19: mol_type = other RNA
aatgaagacagcctcaatc

SEQ ID NO: 62489 - RNA, 19 nt, synthetic construct
  misc_feature 1..19: note = siRNA antisense sequence
  source 1..19: mol_type = other RNA
gattgaggctgtcttcatt

SEQ ID NO: 62490 - RNA, 19 nt, synthetic construct
  misc_feature 1..19: note = siRNA sense sequence
  source 1..19: mol_type = other RNA
atgaagacagcctcaatcc

SEQ ID NO: 62491 - RNA, 19 nt, synthetic construct
  misc_feature 1..19: note = siRNA antisense sequence
  source 1..19: mol_type = other RNA
ggattgaggctgtcttcat

SEQ ID NO: 62492 - RNA, 19 nt, synthetic construct
  misc_feature 1..19: note = siRNA sense sequence
  source 1..19: mol_type = other RNA
aagacagcctcaatccttt

SEQ ID NO: 62493 - RNA, 19 nt, synthetic construct
  misc_feature 1..19: note = siRNA antisense sequence
  source 1..19: mol_type = other RNA
aaaggattgaggctgtctt

SEQ ID NO: 62494 - RNA, 19 nt, synthetic construct
  misc_feature 1..19: note = siRNA sense sequence
  source 1..19: mol_type = other RNA
agacagcctcaatcctttt

SEQ ID NO: 62495 - RNA, 19 nt, synthetic construct
  misc_feature 1..19: note = siRNA antisense sequence
  source 1..19: mol_type = other RNA
aaaaggattgaggctgtct

SEQ ID NO: 62496 - RNA, 19 nt, synthetic construct
  misc_feature 1..19: note = siRNA sense sequence
  source 1..19: mol_type = other RNA
gacagcctcaatccttttg

SEQ ID NO: 62497 - RNA, 19 nt, synthetic construct
  misc_feature 1..19: note = siRNA antisense sequence
  source 1..19: mol_type = other RNA
caaaaggattgaggctgtc

SEQ ID NO: 62498 - RNA, 19 nt, synthetic construct
  misc_feature 1..19: note = siRNA sense sequence
  source 1..19: mol_type = other RNA
agcctcaatccttttggga

SEQ ID NO: 62499 - RNA, 19 nt, synthetic construct
  misc_feature 1..19: note = siRNA antisense sequence
  source 1..19: mol_type = other RNA
tcccaaaaggattgaggct

SEQ ID NO: 62500 - RNA, 19 nt, synthetic construct
  misc_feature 1..19: note = siRNA sense sequence
  source 1..19: mol_type = other RNA
gcctcaatccttttgggaa

SEQ ID NO: 62501 - RNA, 19 nt, synthetic construct
  misc_feature 1..19: note = siRNA antisense sequence
  source 1..19: mol_type = other RNA
ttcccaaaaggattgaggc

SEQ ID NO: 62502 - RNA, 19 nt, synthetic construct
  misc_feature 1..19: note = siRNA sense sequence
  source 1..19: mol_type = other RNA
cctcaatccttttgggaat

SEQ ID NO: 62503 - RNA, 19 nt, synthetic construct
  misc_feature 1..19: note = siRNA antisense sequence
  source 1..19: mol_type = other RNA
attcccaaaaggattgagg

SEQ ID NO: 62504 - RNA, 19 nt, synthetic construct
  misc_feature 1..19: note = siRNA sense sequence
  source 1..19: mol_type = other RNA
ctcaatccttttgggaatt

SEQ ID NO: 62505 - RNA, 19 nt, synthetic construct
  misc_feature 1..19: note = siRNA antisense sequence
  source 1..19: mol_type = other RNA
aattcccaaaaggattgag

SEQ ID NO: 62506 - RNA, 19 nt, synthetic construct
  misc_feature 1..19: note = siRNA sense sequence
  source 1..19: mol_type = other RNA
aatccttttgggaattgcc

SEQ ID NO: 62507 - RNA, 19 nt, synthetic construct
  misc_feature 1..19: note = siRNA antisense sequence
  source 1..19: mol_type = other RNA
ggcaattcccaaaaggatt

SEQ ID NO: 62508 - RNA, 19 nt, synthetic construct
  misc_feature 1..19: note = siRNA sense sequence
  source 1..19: mol_type = other RNA
atccttttgggaattgcca

SEQ ID NO: 62509 - RNA, 19 nt, synthetic construct
  misc_feature 1..19: note = siRNA antisense sequence
  source 1..19: mol_type = other RNA
tggcaattcccaaaaggat

SEQ ID NO: 62510 - RNA, 19 nt, synthetic construct
  misc_feature 1..19: note = siRNA sense sequence
  source 1..19: mol_type = other RNA
aacgtatactcccaagatt

SEQ ID NO: 62511 - RNA, 19 nt, synthetic construct
  misc_feature 1..19: note = siRNA antisense sequence
  source 1..19: mol_type = other RNA
aatcttgggagtatacgtt

SEQ ID NO: 62512 - RNA, 19 nt, synthetic construct
  misc_feature 1..19: note = siRNA sense sequence
  source 1..19: mol_type = other RNA
acgtatactcccaagatta

SEQ ID NO: 62513 - RNA, 19 nt, synthetic construct
  misc_feature 1..19: note = siRNA antisense sequence
  source 1..19: mol_type = other RNA
taatcttgggagtatacgt

SEQ ID NO: 62514 - RNA, 19 nt, synthetic construct
  misc_feature 1..19: note = siRNA sense sequence
  source 1..19: mol_type = other RNA
cgtatactcccaagattaa

SEQ ID NO: 62515 - RNA, 19 nt, synthetic construct
  misc_feature 1..19: note = siRNA antisense sequence
  source 1..19: mol_type = other RNA
ttaatcttgggagtatacg

SEQ ID NO: 62516 - RNA, 19 nt, synthetic construct
  misc_feature 1..19: note = siRNA sense sequence
  source 1..19: mol_type = other RNA
gtatactcccaagattaat

SEQ ID NO: 62517 - RNA, 19 nt, synthetic construct
  misc_feature 1..19: note = siRNA antisense sequence
  source 1..19: mol_type = other RNA
attaatcttgggagtatac

SEQ ID NO: 62518 - RNA, 19 nt, synthetic construct
  misc_feature 1..19: note = siRNA sense sequence
  source 1..19: mol_type = other RNA
tactcccaagattaatttc

SEQ ID NO: 62519 - RNA, 19 nt, synthetic construct
  misc_feature 1..19: note = siRNA antisense sequence
  source 1..19: mol_type = other RNA
gaaattaatcttgggagta

SEQ ID NO: 62520 - RNA, 19 nt, synthetic construct
  misc_feature 1..19: note = siRNA sense sequence
  source 1..19: mol_type = other RNA
aatttgtactctttgctag

SEQ ID NO: 62521 - RNA, 19 nt, synthetic construct
  misc_feature 1..19: note = siRNA antisense sequence
  source 1..19: mol_type = other RNA
ctagcaaagagtacaaatt

SEQ ID NO: 62522 - RNA, 19 nt, synthetic construct
  misc_feature 1..19: note = siRNA sense sequence
  source 1..19: mol_type = other RNA
tgtactctttgctagaatt

SEQ ID NO: 62523 - RNA, 19 nt, synthetic construct
  misc_feature 1..19: note = siRNA antisense sequence
  source 1..19: mol_type = other RNA
aattctagcaaagagtaca

SEQ ID NO: 62524 - RNA, 19 nt, synthetic construct
  misc_feature 1..19: note = siRNA sense sequence
  source 1..19: mol_type = other RNA
gtactctttgctagaattc

SEQ ID NO: 62525 - RNA, 19 nt, synthetic construct
  misc_feature 1..19: note = siRNA antisense sequence
  source 1..19: mol_type = other RNA
gaattctagcaaagagtac

SEQ ID NO: 62526 - RNA, 19 nt, synthetic construct
  misc_feature 1..19: note = siRNA sense sequence
  source 1..19: mol_type = other RNA
tactctttgctagaattcc

SEQ ID NO: 62527 - RNA, 19 nt, synthetic construct
  misc_feature 1..19: note = siRNA antisense sequence
  source 1..19: mol_type = other RNA
ggaattctagcaaagagta

SEQ ID NO: 62528 - RNA, 19 nt, synthetic construct
  misc_feature 1..19: note = siRNA sense sequence
  source 1..19: mol_type = other RNA
actctttgctagaattcct

SEQ ID NO: 62529 - RNA, 19 nt, synthetic construct
  misc_feature 1..19: note = siRNA antisense sequence
  source 1..19: mol_type = other RNA
aggaattctagcaaagagt

SEQ ID NO: 62530 - RNA, 19 nt, synthetic construct
  misc_feature 1..19: note = siRNA sense sequence
  source 1..19: mol_type = other RNA
ctctttgctagaattccta

SEQ ID NO: 62531 - RNA, 19 nt, synthetic construct
  misc_feature 1..19: note = siRNA antisense sequence
  source 1..19: mol_type = other RNA
taggaattctagcaaagag

SEQ ID NO: 62532 - RNA, 19 nt, synthetic construct
  misc_feature 1..19: note = siRNA sense sequence
  source 1..19: mol_type = other RNA
tctttgctagaattcctat

SEQ ID NO: 62533 - RNA, 19 nt, synthetic construct
  misc_feature 1..19: note = siRNA antisense sequence
  source 1..19: mol_type = other RNA
ataggaattctagcaaaga

SEQ ID NO: 62534 - RNA, 19 nt, synthetic construct
  misc_feature 1..19: note = siRNA sense sequence
  source 1..19: mol_type = other RNA
ctttgctagaattcctatg

SEQ ID NO: 62535 - RNA, 19 nt, synthetic construct
  misc_feature 1..19: note = siRNA antisense sequence
  source 1..19: mol_type = other RNA
cataggaattctagcaaag

SEQ ID NO: 62536 - RNA, 19 nt, synthetic construct
  misc_feature 1..19: note = siRNA sense sequence
  source 1..19: mol_type = other RNA
ttagcataaatgccaatca

SEQ ID NO: 62537 - RNA, 19 nt, synthetic construct
  misc_feature 1..19: note = siRNA antisense sequence
  source 1..19: mol_type = other RNA
tgattggcatttatgctaa

SEQ ID NO: 62538 - RNA, 19 nt, synthetic construct
  misc_feature 1..19: note = siRNA sense sequence
  source 1..19: mol_type = other RNA
tagcataaatgccaatcac

SEQ ID NO: 62539 - RNA, 19 nt, synthetic construct
  misc_feature 1..19: note = siRNA antisense sequence
  source 1..19: mol_type = other RNA
gtgattggcatttatgcta

SEQ ID NO: 62540 - RNA, 19 nt, synthetic construct
  misc_feature 1..19: note = siRNA sense sequence
  source 1..19: mol_type = other RNA
ctactggattctaggacag

SEQ ID NO: 62541 - RNA, 19 nt, synthetic construct
  misc_feature 1..19: note = siRNA antisense sequence
  source 1..19: mol_type = other RNA
ctgtcctagaatccagtag

SEQ ID NO: 62542 - RNA, 19 nt, synthetic construct
  misc_feature 1..19: note = siRNA sense sequence
  source 1..19: mol_type = other RNA
tactggattctaggacaga

SEQ ID NO: 62543 - RNA, 19 nt, synthetic construct
  misc_feature 1..19: note = siRNA antisense sequence
  source 1..19: mol_type = other RNA
tctgtcctagaatccagta

SEQ ID NO: 62544 - RNA, 19 nt, synthetic construct
  misc_feature 1..19: note = siRNA sense sequence
  source 1..19: mol_type = other RNA
actggattctaggacagat

SEQ ID NO: 62545 - RNA, 19 nt, synthetic construct
  misc_feature 1..19: note = siRNA antisense sequence
  source 1..19: mol_type = other RNA
atctgtcctagaatccagt

SEQ ID NO: 62546 - RNA, 19 nt, synthetic construct
  misc_feature 1..19: note = siRNA sense sequence
  source 1..19: mol_type = other RNA
ctggattctaggacagatt

SEQ ID NO: 62547 - RNA, 19 nt, synthetic construct
  misc_feature 1..19: note = siRNA antisense sequence
  source 1..19: mol_type = other RNA
aatctgtcctagaatccag

SEQ ID NO: 62548 - RNA, 19 nt, synthetic construct
  misc_feature 1..19: note = siRNA sense sequence
  source 1..19: mol_type = other RNA
tggattctaggacagattt

SEQ ID NO: 62549 - RNA, 19 nt, synthetic construct
  misc_feature 1..19: note = siRNA antisense sequence
  source 1..19: mol_type = other RNA
aaatctgtcctagaatcca

SEQ ID NO: 62550 - RNA, 19 nt, synthetic construct
  misc_feature 1..19: note = siRNA sense sequence
  source 1..19: mol_type = other RNA
ttttggaattcaggctatc

SEQ ID NO: 62551 - RNA, 19 nt, synthetic construct
  misc_feature 1..19: note = siRNA antisense sequence
  source 1..19: mol_type = other RNA
gatagcctgaattccaaaa

SEQ ID NO: 62552 - RNA, 19 nt, synthetic construct
  misc_feature 1..19: note = siRNA sense sequence
  source 1..19: mol_type = other RNA
tttggaattcaggctatca

SEQ ID NO: 62553 - RNA, 19 nt, synthetic construct
  misc_feature 1..19: note = siRNA antisense sequence
  source 1..19: mol_type = other RNA
tgatagcctgaattccaaa

SEQ ID NO: 62554 - RNA, 19 nt, synthetic construct
  misc_feature 1..19: note = siRNA sense sequence
  source 1..19: mol_type = other RNA
tggaattcaggctatcaga

SEQ ID NO: 62555 - RNA, 19 nt, synthetic construct
  misc_feature 1..19: note = siRNA antisense sequence
  source 1..19: mol_type = other RNA
tctgatagcctgaattcca

SEQ ID NO: 62556 - RNA, 19 nt, synthetic construct
  misc_feature 1..19: note = siRNA sense sequence
  source 1..19: mol_type = other RNA
ggaattcaggctatcagat

SEQ ID NO: 62557 - RNA, 19 nt, synthetic construct
  misc_feature 1..19: note = siRNA antisense sequence
  source 1..19: mol_type = other RNA
atctgatagcctgaattcc

SEQ ID NO: 62558 - RNA, 19 nt, synthetic construct
  misc_feature 1..19: note = siRNA sense sequence
  source 1..19: mol_type = other RNA
gaattcaggctatcagatt

SEQ ID NO: 62559 - RNA, 19 nt, synthetic construct
  misc_feature 1..19: note = siRNA antisense sequence
  source 1..19: mol_type = other RNA
aatctgatagcctgaattc

SEQ ID NO: 62560 - RNA, 19 nt, synthetic construct
  misc_feature 1..19: note = siRNA sense sequence
  source 1..19: mol_type = other RNA
aattcaggctatcagattt

SEQ ID NO: 62561 - RNA, 19 nt, synthetic construct
  misc_feature 1..19: note = siRNA antisense sequence
  source 1..19: mol_type = other RNA
aaatctgatagcctgaatt

SEQ ID NO: 62562 - RNA, 19 nt, synthetic construct
  misc_feature 1..19: note = siRNA sense sequence
  source 1..19: mol_type = other RNA
attcaggctatcagatttc

SEQ ID NO: 62563 - RNA, 19 nt, synthetic construct
  misc_feature 1..19: note = siRNA antisense sequence
  source 1..19: mol_type = other RNA
gaaatctgatagcctgaat

SEQ ID NO: 62564 - RNA, 19 nt, synthetic construct
  misc_feature 1..19: note = siRNA sense sequence
  source 1..19: mol_type = other RNA
ttcaggctatcagatttct

SEQ ID NO: 62565 - RNA, 19 nt, synthetic construct
  misc_feature 1..19: note = siRNA antisense sequence
  source 1..19: mol_type = other RNA
agaaatctgatagcctgaa

SEQ ID NO: 62566 - RNA, 19 nt, synthetic construct
  misc_feature 1..19: note = siRNA sense sequence
  source 1..19: mol_type = other RNA
ggctatcagatttctccag

SEQ ID NO: 62567 - RNA, 19 nt, synthetic construct
  misc_feature 1..19: note = siRNA antisense sequence
  source 1..19: mol_type = other RNA
ctggagaaatctgatagcc

SEQ ID NO: 62568 - RNA, 19 nt, synthetic construct
  misc_feature 1..19: note = siRNA sense sequence
  source 1..19: mol_type = other RNA
tcagatttctccagcccta

SEQ ID NO: 62569 - RNA, 19 nt, synthetic construct
  misc_feature 1..19: note = siRNA antisense sequence
  source 1..19: mol_type = other RNA
tagggctggagaaatctga

SEQ ID NO: 62570 - RNA, 19 nt, synthetic construct
  misc_feature 1..19: note = siRNA sense sequence
  source 1..19: mol_type = other RNA
gatttctccagccctattc

SEQ ID NO: 62571 - RNA, 19 nt, synthetic construct
  misc_feature 1..19: note = siRNA antisense sequence
  source 1..19: mol_type = other RNA
gaatagggctggagaaatc

SEQ ID NO: 62572 - RNA, 19 nt, synthetic construct
  misc_feature 1..19: note = siRNA sense sequence
  source 1..19: mol_type = other RNA
atttctccagccctattca

SEQ ID NO: 62573 - RNA, 19 nt, synthetic construct
  misc_feature 1..19: note = siRNA antisense sequence
  source 1..19: mol_type = other RNA
tgaatagggctggagaaat

SEQ ID NO: 62574 - RNA, 19 nt, synthetic construct
  misc_feature 1..19: note = siRNA sense sequence
  source 1..19: mol_type = other RNA
ccctattcactttccctga

SEQ ID NO: 62575 - RNA, 19 nt, synthetic construct
  misc_feature 1..19: note = siRNA antisense sequence
  source 1..19: mol_type = other RNA
tcagggaaagtgaataggg

SEQ ID NO: 62576 - RNA, 19 nt, synthetic construct
  misc_feature 1..19: note = siRNA sense sequence
  source 1..19: mol_type = other RNA
acttattagggtccagatt

SEQ ID NO: 62577 - RNA, 19 nt, synthetic construct
  misc_feature 1..19: note = siRNA antisense sequence
  source 1..19: mol_type = other RNA
aatctggaccctaataagt

SEQ ID NO: 62578 - RNA, 19 nt, synthetic construct
  misc_feature 1..19: note = siRNA sense sequence
  source 1..19: mol_type = other RNA
cttattagggtccagattt

SEQ ID NO: 62579 - RNA, 19 nt, synthetic construct
  misc_feature 1..19: note = siRNA antisense sequence
  source 1..19: mol_type = other RNA
aaatctggaccctaataag

SEQ ID NO: 62580 - RNA, 19 nt, synthetic construct
  misc_feature 1..19: note = siRNA sense sequence
  source 1..19: mol_type = other RNA
ttattagggtccagatttg

SEQ ID NO: 62581 - RNA, 19 nt, synthetic construct
  misc_feature 1..19: note = siRNA antisense sequence
  source 1..19: mol_type = other RNA
caaatctggaccctaataa

SEQ ID NO: 62582 - RNA, 19 nt, synthetic construct
  misc_feature 1..19: note = siRNA sense sequence
  source 1..19: mol_type = other RNA
tattagggtccagatttga

SEQ ID NO: 62583 - RNA, 19 nt, synthetic construct
  misc_feature 1..19: note = siRNA antisense sequence
  source 1..19: mol_type = other RNA
tcaaatctggaccctaata

SEQ ID NO: 62584 - RNA, 19 nt, synthetic construct
  misc_feature 1..19: note = siRNA sense sequence
  source 1..19: mol_type = other RNA
attagggtccagatttgaa

SEQ ID NO: 62585 - RNA, 19 nt, synthetic construct
  misc_feature 1..19: note = siRNA antisense sequence
  source 1..19: mol_type = other RNA
ttcaaatctggaccctaat

SEQ ID NO: 62586 - RNA, 19 nt, synthetic construct
  misc_feature 1..19: note = siRNA sense sequence
  source 1..19: mol_type = other RNA
aataggtactctctcttat

SEQ ID NO: 62587 - RNA, 19 nt, synthetic construct
  misc_feature 1..19: note = siRNA antisense sequence
  source 1..19: mol_type = other RNA
ataagagagagtacctatt

SEQ ID NO: 62588 - RNA, 19 nt, synthetic construct
  misc_feature 1..19: note = siRNA sense sequence
  source 1..19: mol_type = other RNA
ataggtactctctcttata

SEQ ID NO: 62589 - RNA, 19 nt, synthetic construct
  misc_feature 1..19: note = siRNA antisense sequence
  source 1..19: mol_type = other RNA
tataagagagagtacctat

SEQ ID NO: 62590 - RNA, 19 nt, synthetic construct
  misc_feature 1..19: note = siRNA sense sequence
  source 1..19: mol_type = other RNA
taggtactctctcttataa

SEQ ID NO: 62591 - RNA, 19 nt, synthetic construct
  misc_feature 1..19: note = siRNA antisense sequence
  source 1..19: mol_type = other RNA
ttataagagagagtaccta

SEQ ID NO: 62592 - RNA, 19 nt, synthetic construct
  misc_feature 1..19: note = siRNA sense sequence
  source 1..19: mol_type = other RNA
aggtactctctcttataaa

SEQ ID NO: 62593 - RNA, 19 nt, synthetic construct
  misc_feature 1..19: note = siRNA antisense sequence
  source 1..19: mol_type = other RNA
tttataagagagagtacct

SEQ ID NO: 62594 - RNA, 19 nt, synthetic construct
  misc_feature 1..19: note = siRNA sense sequence
  source 1..19: mol_type = other RNA
ggtactctctcttataaaa

SEQ ID NO: 62595 - RNA, 19 nt, synthetic construct
  misc_feature 1..19: note = siRNA antisense sequence
  source 1..19: mol_type = other RNA
ttttataagagagagtacc

SEQ ID NO: 62596 - RNA, 19 nt, synthetic construct
  misc_feature 1..19: note = siRNA sense sequence
  source 1..19: mol_type = other RNA
gtactctctcttataaaag

SEQ ID NO: 62597 - RNA, 19 nt, synthetic construct
  misc_feature 1..19: note = siRNA antisense sequence
  source 1..19: mol_type = other RNA
cttttataagagagagtac

SEQ ID NO: 62598 - RNA, 19 nt, synthetic construct
  misc_feature 1..19: note = siRNA sense sequence
  source 1..19: mol_type = other RNA
actctctcttataaaagtg

SEQ ID NO: 62599 - RNA, 19 nt, synthetic construct
  misc_feature 1..19: note = siRNA antisense sequence
  source 1..19: mol_type = other RNA
cacttttataagagagagt

SEQ ID NO: 62600 - RNA, 19 nt, synthetic construct
  misc_feature 1..19: note = siRNA sense sequence
  source 1..19: mol_type = other RNA
actttgtgtgtatctctga

SEQ ID NO: 62601 - RNA, 19 nt, synthetic construct
  misc_feature 1..19: note = siRNA antisense sequence
  source 1..19: mol_type = other RNA
tcagagatacacacaaagt

SEQ ID NO: 62602 - RNA, 19 nt, synthetic construct
  misc_feature 1..19: note = siRNA sense sequence
  source 1..19: mol_type = other RNA
ctgattattttgctgaagt

SEQ ID NO: 62603 - RNA, 19 nt, synthetic construct
  misc_feature 1..19: note = siRNA antisense sequence
  source 1..19: mol_type = other RNA
acttcagcaaaataatcag

SEQ ID NO: 62604 - RNA, 19 nt, synthetic construct
  misc_feature 1..19: note = siRNA sense sequence
  source 1..19: mol_type = other RNA
ttgctgaagtaaattctag

SEQ ID NO: 62605 - RNA, 19 nt, synthetic construct
  misc_feature 1..19: note = siRNA antisense sequence
  source 1..19: mol_type = other RNA
ctagaatttacttcagcaa

SEQ ID NO: 62606 - RNA, 19 nt, synthetic construct
  misc_feature 1..19: note = siRNA sense sequence
  source 1..19: mol_type = other RNA
tgctgaagtaaattctaga

SEQ ID NO: 62607 - RNA, 19 nt, synthetic construct
  misc_feature 1..19: note = siRNA antisense sequence
  source 1..19: mol_type = other RNA
tctagaatttacttcagca

SEQ ID NO: 62608 - RNA, 19 nt, synthetic construct
  misc_feature 1..19: note = siRNA sense sequence
  source 1..19: mol_type = other RNA
tctagaattggaataaagg

SEQ ID NO: 62609 - RNA, 19 nt, synthetic construct
  misc_feature 1..19: note = siRNA antisense sequence
  source 1..19: mol_type = other RNA
cctttattccaattctaga

SEQ ID NO: 62610 - RNA, 19 nt, synthetic construct
  misc_feature 1..19: note = siRNA sense sequence
  source 1..19: mol_type = other RNA
tagaattggaataaaggag

SEQ ID NO: 62611 - RNA, 19 nt, synthetic construct
  misc_feature 1..19: note = siRNA antisense sequence
  source 1..19: mol_type = other RNA
ctcctttattccaattcta

SEQ ID NO: 62612 - RNA, 19 nt, synthetic construct
  misc_feature 1..19: note = siRNA sense sequence
  source 1..19: mol_type = other RNA
agaattggaataaaggagt

SEQ ID NO: 62613 - RNA, 19 nt, synthetic construct
  misc_feature 1..19: note = siRNA antisense sequence
  source 1..19: mol_type = other RNA
actcctttattccaattct

SEQ ID NO: 62614 - RNA, 19 nt, synthetic construct
  misc_feature 1..19: note = siRNA sense sequence
  source 1..19: mol_type = other RNA
gaattggaataaaggagtt

SEQ ID NO: 62615 - RNA, 19 nt, synthetic construct
  misc_feature 1..19: note = siRNA antisense sequence
  source 1..19: mol_type = other RNA
aactcctttattccaattc

SEQ ID NO: 62616 - RNA, 19 nt, synthetic construct
  misc_feature 1..19: note = siRNA sense sequence
  source 1..19: mol_type = other RNA
cccggtaagtttactgctc

SEQ ID NO: 62617 - RNA, 19 nt, synthetic construct
  misc_feature 1..19: note = siRNA antisense sequence
  source 1..19: mol_type = other RNA
gagcagtaaacttaccggg

SEQ ID NO: 62618 - RNA, 19 nt, synthetic construct
  misc_feature 1..19: note = siRNA sense sequence
  source 1..19: mol_type = other RNA
ccggtaagtttactgctcg

SEQ ID NO: 62619 - RNA, 19 nt, synthetic construct
  misc_feature 1..19: note = siRNA antisense sequence
  source 1..19: mol_type = other RNA
cgagcagtaaacttaccgg

SEQ ID NO: 62620 - RNA, 19 nt, synthetic construct
  misc_feature 1..19: note = siRNA sense sequence
  source 1..19: mol_type = other RNA
cggtaagtttactgctcgg

SEQ ID NO: 62621 - RNA, 19 nt, synthetic construct
  misc_feature 1..19: note = siRNA antisense sequence
  source 1..19: mol_type = other RNA
ccgagcagtaaacttaccg

SEQ ID NO: 62622 - RNA, 19 nt, synthetic construct
  misc_feature 1..19: note = siRNA sense sequence
  source 1..19: mol_type = other RNA
ggtaagtttactgctcgga

SEQ ID NO: 62623 - RNA, 19 nt, synthetic construct
  misc_feature 1..19: note = siRNA antisense sequence
  source 1..19: mol_type = other RNA
tccgagcagtaaacttacc

SEQ ID NO: 62624 - RNA, 19 nt, synthetic construct
  misc_feature 1..19: note = siRNA sense sequence
  source 1..19: mol_type = other RNA
gtaagtttactgctcggaa

SEQ ID NO: 62625 - RNA, 19 nt, synthetic construct
  misc_feature 1..19: note = siRNA antisense sequence
  source 1..19: mol_type = other RNA
ttccgagcagtaaacttac

SEQ ID NO: 62626 - RNA, 19 nt, synthetic construct
  misc_feature 1..19: note = siRNA sense sequence
  source 1..19: mol_type = other RNA
taagtttactgctcggaat

SEQ ID NO: 62627 - RNA, 19 nt, synthetic construct
  misc_feature 1..19: note = siRNA antisense sequence
  source 1..19: mol_type = other RNA
attccgagcagtaaactta

SEQ ID NO: 62628 - RNA, 19 nt, synthetic construct
  misc_feature 1..19: note = siRNA sense sequence
  source 1..19: mol_type = other RNA
aagtttactgctcggaatt

SEQ ID NO: 62629 - RNA, 19 nt, synthetic construct
  misc_feature 1..19: note = siRNA antisense sequence
  source 1..19: mol_type = other RNA
aattccgagcagtaaactt

SEQ ID NO: 62630 - RNA, 19 nt, synthetic construct
  misc_feature 1..19: note = siRNA sense sequence
  source 1..19: mol_type = other RNA
ttactgctcggaattttcc

SEQ ID NO: 62631 - RNA, 19 nt, synthetic construct
  misc_feature 1..19: note = siRNA antisense sequence
  source 1..19: mol_type = other RNA
ggaaaattccgagcagtaa

SEQ ID NO: 62632 - RNA, 19 nt, synthetic construct
  misc_feature 1..19: note = siRNA sense sequence
  source 1..19: mol_type = other RNA
tgctcggaattttccctag

SEQ ID NO: 62633 - RNA, 19 nt, synthetic construct
  misc_feature 1..19: note = siRNA antisense sequence
  source 1..19: mol_type = other RNA
ctagggaaaattccgagca

SEQ ID NO: 62634 - RNA, 19 nt, synthetic construct
  misc_feature 1..19: note = siRNA sense sequence
  source 1..19: mol_type = other RNA
gctcggaattttccctagg

SEQ ID NO: 62635 - RNA, 19 nt, synthetic construct
  misc_feature 1..19: note = siRNA antisense sequence
  source 1..19: mol_type = other RNA
cctagggaaaattccgagc

SEQ ID NO: 62636 - RNA, 19 nt, synthetic construct
  misc_feature 1..19: note = siRNA sense sequence
  source 1..19: mol_type = other RNA
ctcggaattttccctagga

SEQ ID NO: 62637 - RNA, 19 nt, synthetic construct
  misc_feature 1..19: note = siRNA antisense sequence
  source 1..19: mol_type = other RNA
tcctagggaaaattccgag

SEQ ID NO: 62638 - RNA, 19 nt, synthetic construct
  misc_feature 1..19: note = siRNA sense sequence
  source 1..19: mol_type = other RNA
aagatttcagggatgttct

SEQ ID NO: 62639 - RNA, 19 nt, synthetic construct
  misc_feature 1..19: note = siRNA antisense sequence
  source 1..19: mol_type = other RNA
agaacatccctgaaatctt

SEQ ID NO: 62640 - RNA, 19 nt, synthetic construct
  misc_feature 1..19: note = siRNA sense sequence
  source 1..19: mol_type = other RNA
agatttcagggatgttctt

SEQ ID NO: 62641 - RNA, 19 nt, synthetic construct
  misc_feature 1..19: note = siRNA antisense sequence
  source 1..19: mol_type = other RNA
aagaacatccctgaaatct

SEQ ID NO: 62642 - RNA, 19 nt, synthetic construct
  misc_feature 1..19: note = siRNA sense sequence
  source 1..19: mol_type = other RNA
gatttcagggatgttctta

SEQ ID NO: 62643 - RNA, 19 nt, synthetic construct
  misc_feature 1..19: note = siRNA antisense sequence
  source 1..19: mol_type = other RNA
taagaacatccctgaaatc

SEQ ID NO: 62644 - RNA, 19 nt, synthetic construct
  misc_feature 1..19: note = siRNA sense sequence
  source 1..19: mol_type = other RNA
atttcagggatgttcttaa

SEQ ID NO: 62645 - RNA, 19 nt, synthetic construct
  misc_feature 1..19: note = siRNA antisense sequence
  source 1..19: mol_type = other RNA
ttaagaacatccctgaaat

SEQ ID NO: 62646 - RNA, 19 nt, synthetic construct
  misc_feature 1..19: note = siRNA sense sequence
  source 1..19: mol_type = other RNA
tttcagggatgttcttaac

SEQ ID NO: 62647 - RNA, 19 nt, synthetic construct
  misc_feature 1..19: note = siRNA antisense sequence
  source 1..19: mol_type = other RNA
gttaagaacatccctgaaa

SEQ ID NO: 62648 - RNA, 19 nt, synthetic construct
  misc_feature 1..19: note = siRNA sense sequence
  source 1..19: mol_type = other RNA
aaaattaaagcctgggcac

SEQ ID NO: 62649 - RNA, 19 nt, synthetic construct
  misc_feature 1..19: note = siRNA antisense sequence
  source 1..19: mol_type = other RNA
gtgcccaggctttaatttt

SEQ ID NO: 62650 - RNA, 19 nt, synthetic construct
  misc_feature 1..19: note = siRNA sense sequence
  source 1..19: mol_type = other RNA
aaattaaagcctgggcaca

SEQ ID NO: 62651 - RNA, 19 nt, synthetic construct
  misc_feature 1..19: note = siRNA antisense sequence
  source 1..19: mol_type = other RNA
tgtgcccaggctttaattt

SEQ ID NO: 62652 - RNA, 19 nt, synthetic construct
  misc_feature 1..19: note = siRNA sense sequence
  source 1..19: mol_type = other RNA
gtaatattttagaaggcac

SEQ ID NO: 62653 - RNA, 19 nt, synthetic construct
  misc_feature 1..19: note = siRNA antisense sequence
  source 1..19: mol_type = other RNA
gtgccttctaaaatattac

SEQ ID NO: 62654 - RNA, 19 nt, synthetic construct
  misc_feature 1..19: note = siRNA sense sequence
  source 1..19: mol_type = other RNA
tttagaaggcacattttgg

SEQ ID NO: 62655 - RNA, 19 nt, synthetic construct
  misc_feature 1..19: note = siRNA antisense sequence
  source 1..19: mol_type = other RNA
ccaaaatgtgccttctaaa

SEQ ID NO: 62656 - RNA, 19 nt, synthetic construct
  misc_feature 1..19: note = siRNA sense sequence
  source 1..19: mol_type = other RNA
ttagaaggcacattttgga

SEQ ID NO: 62657 - RNA, 19 nt, synthetic construct
  misc_feature 1..19: note = siRNA antisense sequence
  source 1..19: mol_type = other RNA
tccaaaatgtgccttctaa

SEQ ID NO: 62658 - RNA, 19 nt, synthetic construct
  misc_feature 1..19: note = siRNA sense sequence
  source 1..19: mol_type = other RNA
aggcacattttggagtaag

SEQ ID NO: 62659 - RNA, 19 nt, synthetic construct
  misc_feature 1..19: note = siRNA antisense sequence
  source 1..19: mol_type = other RNA
cttactccaaaatgtgcct

SEQ ID NO: 62660 - RNA, 19 nt, synthetic construct
  misc_feature 1..19: note = siRNA sense sequence
  source 1..19: mol_type = other RNA
ggcacattttggagtaaga

SEQ ID NO: 62661 - RNA, 19 nt, synthetic construct
  misc_feature 1..19: note = siRNA antisense sequence
  source 1..19: mol_type = other RNA
tcttactccaaaatgtgcc

SEQ ID NO: 62662 - RNA, 19 nt, synthetic construct
  misc_feature 1..19: note = siRNA sense sequence
  source 1..19: mol_type = other RNA
gcacattttggagtaagaa

SEQ ID NO: 62663 - RNA, 19 nt, synthetic construct
  misc_feature 1..19: note = siRNA antisense sequence
  source 1..19: mol_type = other RNA
ttcttactccaaaatgtgc

SEQ ID NO: 62664 - RNA, 19 nt, synthetic construct
  misc_feature 1..19: note = siRNA sense sequence
  source 1..19: mol_type = other RNA
aaccataatgctgctattt

SEQ ID NO: 62665 - RNA, 19 nt, synthetic construct
  misc_feature 1..19: note = siRNA antisense sequence
  source 1..19: mol_type = other RNA
aaatagcagcattatggtt

SEQ ID NO: 62666 - RNA, 19 nt, synthetic construct
  misc_feature 1..19: note = siRNA sense sequence
  source 1..19: mol_type = other RNA
accataatgctgctattta

SEQ ID NO: 62667 - RNA, 19 nt, synthetic construct
  misc_feature 1..19: note = siRNA antisense sequence
  source 1..19: mol_type = other RNA
taaatagcagcattatggt

SEQ ID NO: 62668 - RNA, 19 nt, synthetic construct
  misc_feature 1..19: note = siRNA sense sequence
  source 1..19: mol_type = other RNA
ccataatgctgctatttac

SEQ ID NO: 62669 - RNA, 19 nt, synthetic construct
  misc_feature 1..19: note = siRNA antisense sequence
  source 1..19: mol_type = other RNA
gtaaatagcagcattatgg

SEQ ID NO: 62670 - RNA, 19 nt, synthetic construct
  misc_feature 1..19: note = siRNA sense sequence
  source 1..19: mol_type = other RNA
ctttgtgatcttggaagtt

SEQ ID NO: 62671 - RNA, 19 nt, synthetic construct
  misc_feature 1..19: note = siRNA antisense sequence
  source 1..19: mol_type = other RNA
aacttccaagatcacaaag

SEQ ID NO: 62672 - RNA, 19 nt, synthetic construct
  misc_feature 1..19: note = siRNA sense sequence
  source 1..19: mol_type = other RNA
tttgtgatcttggaagttc

SEQ ID NO: 62673 - RNA, 19 nt, synthetic construct
  misc_feature 1..19: note = siRNA antisense sequence
  source 1..19: mol_type = other RNA
gaacttccaagatcacaaa

SEQ ID NO: 62674 - RNA, 19 nt, synthetic construct
  misc_feature 1..19: note = siRNA sense sequence
  source 1..19: mol_type = other RNA
ttgtgatcttggaagttct

SEQ ID NO: 62675 - RNA, 19 nt, synthetic construct
  misc_feature 1..19: note = siRNA antisense sequence
  source 1..19: mol_type = other RNA
agaacttccaagatcacaa

SEQ ID NO: 62676 - RNA, 19 nt, synthetic construct
  misc_feature 1..19: note = siRNA sense sequence
  source 1..19: mol_type = other RNA
tgtgatcttggaagttctt

SEQ ID NO: 62677 - RNA, 19 nt, synthetic construct
  misc_feature 1..19: note = siRNA antisense sequence
  source 1..19: mol_type = other RNA
aagaacttccaagatcaca

SEQ ID NO: 62678 - RNA, 19 nt, synthetic construct
  misc_feature 1..19: note = siRNA sense sequence
  source 1..19: mol_type = other RNA
gtgatcttggaagttctta

SEQ ID NO: 62679 - RNA, 19 nt, synthetic construct
  misc_feature 1..19: note = siRNA antisense sequence
  source 1..19: mol_type = other RNA
taagaacttccaagatcac

SEQ ID NO: 62680 - RNA, 19 nt, synthetic construct
  misc_feature 1..19: note = siRNA sense sequence
  source 1..19: mol_type = other RNA
tgatcttggaagttcttaa

SEQ ID NO: 62681 - RNA, 19 nt, synthetic construct
  misc_feature 1..19: note = siRNA antisense sequence
  source 1..19: mol_type = other RNA
ttaagaacttccaagatca

SEQ ID NO: 62682 - RNA, 19 nt, synthetic construct
  misc_feature 1..19: note = siRNA sense sequence
  source 1..19: mol_type = other RNA
gatcttggaagttcttaat

SEQ ID NO: 62683 - RNA, 19 nt, synthetic construct
  misc_feature 1..19: note = siRNA antisense sequence
  source 1..19: mol_type = other RNA
attaagaacttccaagatc

SEQ ID NO: 62684 - RNA, 19 nt, synthetic construct
  misc_feature 1..19: note = siRNA sense sequence
  source 1..19: mol_type = other RNA
tcattccaaccttcttacc

SEQ ID NO: 62685 - RNA, 19 nt, synthetic construct
  misc_feature 1..19: note = siRNA antisense sequence
  source 1..19: mol_type = other RNA
ggtaagaaggttggaatga

SEQ ID NO: 62686 - RNA, 19 nt, synthetic construct
  misc_feature 1..19: note = siRNA sense sequence
  source 1..19: mol_type = other RNA
cattccaaccttcttacct

SEQ ID NO: 62687 - RNA, 19 nt, synthetic construct
  misc_feature 1..19: note = siRNA antisense sequence
  source 1..19: mol_type = other RNA
aggtaagaaggttggaatg

SEQ ID NO: 62688 - RNA, 19 nt, synthetic construct
  misc_feature 1..19: note = siRNA sense sequence
  source 1..19: mol_type = other RNA
ccaaccttcttacctcata

SEQ ID NO: 62689 - RNA, 19 nt, synthetic construct
  misc_feature 1..19: note = siRNA antisense sequence
  source 1..19: mol_type = other RNA
tatgaggtaagaaggttgg

SEQ ID NO: 62690 - RNA, 19 nt, synthetic construct
  misc_feature 1..19: note = siRNA sense sequence
  source 1..19: mol_type = other RNA
accttcttacctcatagat

SEQ ID NO: 62691 - RNA, 19 nt, synthetic construct
  misc_feature 1..19: note = siRNA antisense sequence
  source 1..19: mol_type = other RNA
atctatgaggtaagaaggt

SEQ ID NO: 62692 - RNA, 19 nt, synthetic construct
  misc_feature 1..19: note = siRNA sense sequence
  source 1..19: mol_type = other RNA
ccttcttacctcatagata

SEQ ID NO: 62693 - RNA, 19 nt, synthetic construct
  misc_feature 1..19: note = siRNA antisense sequence
  source 1..19: mol_type = other RNA
tatctatgaggtaagaagg

SEQ ID NO: 62694 - RNA, 19 nt, synthetic construct
  misc_feature 1..19: note = siRNA sense sequence
  source 1..19: mol_type = other RNA
caaagataatatgaggatc

SEQ ID NO: 62695 - RNA, 19 nt, synthetic construct
  misc_feature 1..19: note = siRNA antisense sequence
  source 1..19: mol_type = other RNA
gatcctcatattatctttg

SEQ ID NO: 62696 - RNA, 19 nt, synthetic construct
  misc_feature 1..19: note = siRNA sense sequence
  source 1..19: mol_type = other RNA
gataatatgaggatctgct

SEQ ID NO: 62697 - RNA, 19 nt, synthetic construct
  misc_feature 1..19: note = siRNA antisense sequence
  source 1..19: mol_type = other RNA
agcagatcctcatattatc

SEQ ID NO: 62698 - RNA, 19 nt, synthetic construct
  misc_feature 1..19: note = siRNA sense sequence
  source 1..19: mol_type = other RNA
ataatatgaggatctgctt

SEQ ID NO: 62699 - RNA, 19 nt, synthetic construct
  misc_feature 1..19: note = siRNA antisense sequence
  source 1..19: mol_type = other RNA
aagcagatcctcatattat

SEQ ID NO: 62700 - RNA, 19 nt, synthetic construct
  misc_feature 1..19: note = siRNA sense sequence
  source 1..19: mol_type = other RNA
taatatgaggatctgcttc

SEQ ID NO: 62701 - RNA, 19 nt, synthetic construct
  misc_feature 1..19: note = siRNA antisense sequence
  source 1..19: mol_type = other RNA
gaagcagatcctcatatta

SEQ ID NO: 62702 - RNA, 19 nt, synthetic construct
  misc_feature 1..19: note = siRNA sense sequence
  source 1..19: mol_type = other RNA
aatatgaggatctgcttcc

SEQ ID NO: 62703 - RNA, 19 nt, synthetic construct
  misc_feature 1..19: note = siRNA antisense sequence
  source 1..19: mol_type = other RNA
ggaagcagatcctcatatt

SEQ ID NO: 62704 - RNA, 19 nt, synthetic construct
  misc_feature 1..19: note = siRNA sense sequence
  source 1..19: mol_type = other RNA
tgcatataagaagattagc

SEQ ID NO: 62705 - RNA, 19 nt, synthetic construct
  misc_feature 1..19: note = siRNA antisense sequence
  source 1..19: mol_type = other RNA
gctaatcttcttatatgca

SEQ ID NO: 62706 - RNA, 19 nt, synthetic construct
  misc_feature 1..19: note = siRNA sense sequence
  source 1..19: mol_type = other RNA
gcatataagaagattagca

SEQ ID NO: 62707 - RNA, 19 nt, synthetic construct
  misc_feature 1..19: note = siRNA antisense sequence
  source 1..19: mol_type = other RNA
tgctaatcttcttatatgc

SEQ ID NO: 62708 - RNA, 19 nt, synthetic construct
  misc_feature 1..19: note = siRNA sense sequence
  source 1..19: mol_type = other RNA
catataagaagattagcac

SEQ ID NO: 62709 - RNA, 19 nt, synthetic construct
  misc_feature 1..19: note = siRNA antisense sequence
  source 1..19: mol_type = other RNA
gtgctaatcttcttatatg

SEQ ID NO: 62710 - RNA, 19 nt, synthetic construct
  misc_feature 1..19: note = siRNA sense sequence
  source 1..19: mol_type = other RNA
taagaagattagcacagca

SEQ ID NO: 62711 - RNA, 19 nt, synthetic construct
  misc_feature 1..19: note = siRNA antisense sequence
  source 1..19: mol_type = other RNA
tgctgtgctaatcttctta

SEQ ID NO: 62712 - RNA, 19 nt, synthetic construct
  misc_feature 1..19: note = siRNA sense sequence
  source 1..19: mol_type = other RNA
gatattgtggttgttatga

SEQ ID NO: 62713 - RNA, 19 nt, synthetic construct
  misc_feature 1..19: note = siRNA antisense sequence
  source 1..19: mol_type = other RNA
tcataacaaccacaatatc

SEQ ID NO: 62714 - RNA, 19 nt, synthetic construct
  misc_feature 1..19: note = siRNA sense sequence
  source 1..19: mol_type = other RNA
gccatagcataatacattt

SEQ ID NO: 62715 - RNA, 19 nt, synthetic construct
  misc_feature 1..19: note = siRNA antisense sequence
  source 1..19: mol_type = other RNA
aaatgtattatgctatggc

SEQ ID NO: 62716 - RNA, 19 nt, synthetic construct
  misc_feature 1..19: note = siRNA sense sequence
  source 1..19: mol_type = other RNA
aatacattttacagacagg

SEQ ID NO: 62717 - RNA, 19 nt, synthetic construct
  misc_feature 1..19: note = siRNA antisense sequence
  source 1..19: mol_type = other RNA
cctgtctgtaaaatgtatt

SEQ ID NO: 62718 - RNA, 19 nt, synthetic construct
  misc_feature 1..19: note = siRNA sense sequence
  source 1..19: mol_type = other RNA
attttacagacagggtaca

SEQ ID NO: 62719 - RNA, 19 nt, synthetic construct
  misc_feature 1..19: note = siRNA antisense sequence
  source 1..19: mol_type = other RNA
tgtaccctgtctgtaaaat

SEQ ID NO: 62720 - RNA, 19 nt, synthetic construct
  misc_feature 1..19: note = siRNA sense sequence
  source 1..19: mol_type = other RNA
atatgcaaataggacaggt

SEQ ID NO: 62721 - RNA, 19 nt, synthetic construct
  misc_feature 1..19: note = siRNA antisense sequence
  source 1..19: mol_type = other RNA
acctgtcctatttgcatat

SEQ ID NO: 62722 - RNA, 19 nt, synthetic construct
  misc_feature 1..19: note = siRNA sense sequence
  source 1..19: mol_type = other RNA
tatgcaaataggacaggta

SEQ ID NO: 62723 - RNA, 19 nt, synthetic construct
  misc_feature 1..19: note = siRNA antisense sequence
  source 1..19: mol_type = other RNA
tacctgtcctatttgcata

SEQ ID NO: 62724 - RNA, 19 nt, synthetic construct
  misc_feature 1..19: note = siRNA sense sequence
  source 1..19: mol_type = other RNA
atgcaaataggacaggtaa

SEQ ID NO: 62725 - RNA, 19 nt, synthetic construct
  misc_feature 1..19: note = siRNA antisense sequence
  source 1..19: mol_type = other RNA
ttacctgtcctatttgcat

SEQ ID NO: 62726 - RNA, 19 nt, synthetic construct
  misc_feature 1..19: note = siRNA sense sequence
  source 1..19: mol_type = other RNA
tgcaaataggacaggtaac

SEQ ID NO: 62727 - RNA, 19 nt, synthetic construct
  misc_feature 1..19: note = siRNA antisense sequence
  source 1..19: mol_type = other RNA
gttacctgtcctatttgca

SEQ ID NO: 62728 - RNA, 19 nt, synthetic construct
  misc_feature 1..19: note = siRNA sense sequence
  source 1..19: mol_type = other RNA
ggacaggtaacctacacta

SEQ ID NO: 62729 - RNA, 19 nt, synthetic construct
  misc_feature 1..19: note = siRNA antisense sequence
  source 1..19: mol_type = other RNA
tagtgtaggttacctgtcc

SEQ ID NO: 62730 - RNA, 19 nt, synthetic construct
  misc_feature 1..19: note = siRNA sense sequence
  source 1..19: mol_type = other RNA
gacaggtaacctacactaa

SEQ ID NO: 62731 - RNA, 19 nt, synthetic construct
  misc_feature 1..19: note = siRNA antisense sequence
  source 1..19: mol_type = other RNA
ttagtgtaggttacctgtc

SEQ ID NO: 62732 - RNA, 19 nt, synthetic construct
  misc_feature 1..19: note = siRNA sense sequence
  source 1..19: mol_type = other RNA
acaggtaacctacactaaa

SEQ ID NO: 62733 - RNA, 19 nt, synthetic construct
  misc_feature 1..19: note = siRNA antisense sequence
  source 1..19: mol_type = other RNA
tttagtgtaggttacctgt

SEQ ID NO: 62734 - RNA, 19 nt, synthetic construct
  misc_feature 1..19: note = siRNA sense sequence
  source 1..19: mol_type = other RNA
caggtaacctacactaaaa

SEQ ID NO: 62735 - RNA, 19 nt, synthetic construct
  misc_feature 1..19: note = siRNA antisense sequence
  source 1..19: mol_type = other RNA
ttttagtgtaggttacctg

SEQ ID NO: 62736 - RNA, 19 nt, synthetic construct
  misc_feature 1..19: note = siRNA sense sequence
  source 1..19: mol_type = other RNA
aggtaacctacactaaaat

SEQ ID NO: 62737 - RNA, 19 nt, synthetic construct
  misc_feature 1..19: note = siRNA antisense sequence
  source 1..19: mol_type = other RNA
attttagtgtaggttacct

SEQ ID NO: 62738 - RNA, 19 nt, synthetic construct
  misc_feature 1..19: note = siRNA sense sequence
  source 1..19: mol_type = other RNA
ggtaacctacactaaaatg

SEQ ID NO: 62739 - RNA, 19 nt, synthetic construct
  misc_feature 1..19: note = siRNA antisense sequence
  source 1..19: mol_type = other RNA
cattttagtgtaggttacc

SEQ ID NO: 62740 - RNA, 19 nt, synthetic construct
  misc_feature 1..19: note = siRNA sense sequence
  source 1..19: mol_type = other RNA
gtaacctacactaaaatgt

SEQ ID NO: 62741 - RNA, 19 nt, synthetic construct
  misc_feature 1..19: note = siRNA antisense sequence
  source 1..19: mol_type = other RNA
acattttagtgtaggttac

SEQ ID NO: 62742 - RNA, 19 nt, synthetic construct
  misc_feature 1..19: note = siRNA sense sequence
  source 1..19: mol_type = other RNA
acactaaaatgttaccaag

SEQ ID NO: 62743 - RNA, 19 nt, synthetic construct
  misc_feature 1..19: note = siRNA antisense sequence
  source 1..19: mol_type = other RNA
cttggtaacattttagtgt

SEQ ID NO: 62744 - RNA, 19 nt, synthetic construct
  misc_feature 1..19: note = siRNA sense sequence
  source 1..19: mol_type = other RNA
taaaatgttaccaaggtag

SEQ ID NO: 62745 - RNA, 19 nt, synthetic construct
  misc_feature 1..19: note = siRNA antisense sequence
  source 1..19: mol_type = other RNA
ctaccttggtaacatttta

SEQ ID NO: 62746 - RNA, 19 nt, synthetic construct
  misc_feature 1..19: note = siRNA sense sequence
  source 1..19: mol_type = other RNA
aaaatgttaccaaggtagt

SEQ ID NO: 62747 - RNA, 19 nt, synthetic construct
  misc_feature 1..19: note = siRNA antisense sequence
  source 1..19: mol_type = other RNA
actaccttggtaacatttt

SEQ ID NO: 62748 - RNA, 19 nt, synthetic construct
  misc_feature 1..19: note = siRNA sense sequence
  source 1..19: mol_type = other RNA
aaatgttaccaaggtagtt

SEQ ID NO: 62749 - RNA, 19 nt, synthetic construct
  misc_feature 1..19: note = siRNA antisense sequence
  source 1..19: mol_type = other RNA
aactaccttggtaacattt

SEQ ID NO: 62750 - RNA, 19 nt, synthetic construct
  misc_feature 1..19: note = siRNA sense sequence
  source 1..19: mol_type = other RNA
aatgttaccaaggtagttg

SEQ ID NO: 62751 - RNA, 19 nt, synthetic construct
  misc_feature 1..19: note = siRNA antisense sequence
  source 1..19: mol_type = other RNA
caactaccttggtaacatt

SEQ ID NO: 62752 - RNA, 19 nt, synthetic construct
  misc_feature 1..19: note = siRNA sense sequence
  source 1..19: mol_type = other RNA
atgttaccaaggtagttga

SEQ ID NO: 62753 - RNA, 19 nt, synthetic construct
  misc_feature 1..19: note = siRNA antisense sequence
  source 1..19: mol_type = other RNA
tcaactaccttggtaacat

SEQ ID NO: 62754 - RNA, 19 nt, synthetic construct
  misc_feature 1..19: note = siRNA sense sequence
  source 1..19: mol_type = other RNA
tgttaccaaggtagttgaa

SEQ ID NO: 62755 - RNA, 19 nt, synthetic construct
  misc_feature 1..19: note = siRNA antisense sequence
  source 1..19: mol_type = other RNA
ttcaactaccttggtaaca

SEQ ID NO: 62756 - RNA, 19 nt, synthetic construct
  misc_feature 1..19: note = siRNA sense sequence
  source 1..19: mol_type = other RNA
gttaccaaggtagttgaag

SEQ ID NO: 62757 - RNA, 19 nt, synthetic construct
  misc_feature 1..19: note = siRNA antisense sequence
  source 1..19: mol_type = other RNA
cttcaactaccttggtaac

SEQ ID NO: 62758 - RNA, 19 nt, synthetic construct
  misc_feature 1..19: note = siRNA sense sequence
  source 1..19: mol_type = other RNA
ttaccaaggtagttgaagt

SEQ ID NO: 62759 - RNA, 19 nt, synthetic construct
  misc_feature 1..19: note = siRNA antisense sequence
  source 1..19: mol_type = other RNA
acttcaactaccttggtaa

SEQ ID NO: 62760 - RNA, 19 nt, synthetic construct
  misc_feature 1..19: note = siRNA sense sequence
  source 1..19: mol_type = other RNA
taccaaggtagttgaagta

SEQ ID NO: 62761 - RNA, 19 nt, synthetic construct
  misc_feature 1..19: note = siRNA antisense sequence
  source 1..19: mol_type = other RNA
tacttcaactaccttggta

SEQ ID NO: 62762 - RNA, 19 nt, synthetic construct
  misc_feature 1..19: note = siRNA sense sequence
  source 1..19: mol_type = other RNA
accaaggtagttgaagtat

SEQ ID NO: 62763 - RNA, 19 nt, synthetic construct
  misc_feature 1..19: note = siRNA antisense sequence
  source 1..19: mol_type = other RNA
atacttcaactaccttggt

SEQ ID NO: 62764 - RNA, 19 nt, synthetic construct
  misc_feature 1..19: note = siRNA sense sequence
  source 1..19: mol_type = other RNA
ccaaggtagttgaagtata

SEQ ID NO: 62765 - RNA, 19 nt, synthetic construct
  misc_feature 1..19: note = siRNA antisense sequence
  source 1..19: mol_type = other RNA
tatacttcaactaccttgg

SEQ ID NO: 62766 - RNA, 19 nt, synthetic construct
  misc_feature 1..19: note = siRNA sense sequence
  source 1..19: mol_type = other RNA
caaggtagttgaagtatag

SEQ ID NO: 62767 - RNA, 19 nt, synthetic construct
  misc_feature 1..19: note = siRNA antisense sequence
  source 1..19: mol_type = other RNA
ctatacttcaactaccttg

SEQ ID NO: 62768 - RNA, 19 nt, synthetic construct
  misc_feature 1..19: note = siRNA sense sequence
  source 1..19: mol_type = other RNA
aaggtagttgaagtatagg

SEQ ID NO: 62769 - RNA, 19 nt, synthetic construct
  misc_feature 1..19: note = siRNA antisense sequence
  source 1..19: mol_type = other RNA
cctatacttcaactacctt

SEQ ID NO: 62770 - RNA, 19 nt, synthetic construct
  misc_feature 1..19: note = siRNA sense sequence
  source 1..19: mol_type = other RNA
gacggagtctcgctctgtc

SEQ ID NO: 62771 - RNA, 19 nt, synthetic construct
  misc_feature 1..19: note = siRNA antisense sequence
  source 1..19: mol_type = other RNA
gacagagcgagactccgtc

SEQ ID NO: 62772 - RNA, 19 nt, synthetic construct
  misc_feature 1..19: note = siRNA sense sequence
  source 1..19: mol_type = other RNA
agtctcgctctgtcgccca

SEQ ID NO: 62773 - RNA, 19 nt, synthetic construct
  misc_feature 1..19: note = siRNA antisense sequence
  source 1..19: mol_type = other RNA
tgggcgacagagcgagact

SEQ ID NO: 62774 - RNA, 19 nt, synthetic construct
  misc_feature 1..19: note = siRNA sense sequence
  source 1..19: mol_type = other RNA
gggatctcggctcactgca

SEQ ID NO: 62775 - RNA, 19 nt, synthetic construct
  misc_feature 1..19: note = siRNA antisense sequence
  source 1..19: mol_type = other RNA
tgcagtgagccgagatccc

SEQ ID NO: 62776 - RNA, 19 nt, synthetic construct
  misc_feature 1..19: note = siRNA sense sequence
  source 1..19: mol_type = other RNA
ggatctcggctcactgcaa

SEQ ID NO: 62777 - RNA, 19 nt, synthetic construct
  misc_feature 1..19: note = siRNA antisense sequence
  source 1..19: mol_type = other RNA
ttgcagtgagccgagatcc

SEQ ID NO: 62778 - RNA, 19 nt, synthetic construct
  misc_feature 1..19: note = siRNA sense sequence
  source 1..19: mol_type = other RNA
gatctcggctcactgcaag

SEQ ID NO: 62779 - RNA, 19 nt, synthetic construct
  misc_feature 1..19: note = siRNA antisense sequence
  source 1..19: mol_type = other RNA
cttgcagtgagccgagatc

SEQ ID NO: 62780 - RNA, 19 nt, synthetic construct
  misc_feature 1..19: note = siRNA sense sequence
  source 1..19: mol_type = other RNA
atctcggctcactgcaagc

SEQ ID NO: 62781 - RNA, 19 nt, synthetic construct
  misc_feature 1..19: note = siRNA antisense sequence
  source 1..19: mol_type = other RNA
gcttgcagtgagccgagat

SEQ ID NO: 62782 - RNA, 19 nt, synthetic construct
  misc_feature 1..19: note = siRNA sense sequence
  source 1..19: mol_type = other RNA
tctcggctcactgcaagct

SEQ ID NO: 62783 - RNA, 19 nt, synthetic construct
  misc_feature 1..19: note = siRNA antisense sequence
  source 1..19: mol_type = other RNA
agcttgcagtgagccgaga

SEQ ID NO: 62784 - RNA, 19 nt, synthetic construct
  misc_feature 1..19: note = siRNA sense sequence
  source 1..19: mol_type = other RNA
ccgggttcacgccattctc

SEQ ID NO: 62785 - RNA, 19 nt, synthetic construct
  misc_feature 1..19: note = siRNA antisense sequence
  source 1..19: mol_type = other RNA
gagaatggcgtgaacccgg

SEQ ID NO: 62786 - RNA, 19 nt, synthetic construct
  misc_feature 1..19: note = siRNA sense sequence
  source 1..19: mol_type = other RNA
cgggttcacgccattctcc

SEQ ID NO: 62787 - RNA, 19 nt, synthetic construct
  misc_feature 1..19: note = siRNA antisense sequence
  source 1..19: mol_type = other RNA
ggagaatggcgtgaacccg

SEQ ID NO: 62788 - RNA, 19 nt, synthetic construct
  misc_feature 1..19: note = siRNA sense sequence
  source 1..19: mol_type = other RNA
gggttcacgccattctcct

SEQ ID NO: 62789 - RNA, 19 nt, synthetic construct
  misc_feature 1..19: note = siRNA antisense sequence
  source 1..19: mol_type = other RNA
aggagaatggcgtgaaccc

SEQ ID NO: 62790 - RNA, 19 nt, synthetic construct
  misc_feature 1..19: note = siRNA sense sequence
  source 1..19: mol_type = other RNA
ggttcacgccattctcctg

SEQ ID NO: 62791 - RNA, 19 nt, synthetic construct
  misc_feature 1..19: note = siRNA antisense sequence
  source 1..19: mol_type = other RNA
caggagaatggcgtgaacc

SEQ ID NO: 62792 - RNA, 19 nt, synthetic construct
  misc_feature 1..19: note = siRNA sense sequence
  source 1..19: mol_type = other RNA
gttcacgccattctcctgc

SEQ ID NO: 62793 - RNA, 19 nt, synthetic construct
  misc_feature 1..19: note = siRNA antisense sequence
  source 1..19: mol_type = other RNA
gcaggagaatggcgtgaac

SEQ ID NO: 62794 - RNA, 19 nt, synthetic construct
  misc_feature 1..19: note = siRNA sense sequence
  source 1..19: mol_type = other RNA
ttcacgccattctcctgcc

SEQ ID NO: 62795 - RNA, 19 nt, synthetic construct
  misc_feature 1..19: note = siRNA antisense sequence
  source 1..19: mol_type = other RNA
ggcaggagaatggcgtgaa

SEQ ID NO: 62796 - RNA, 19 nt, synthetic construct
  misc_feature 1..19: note = siRNA sense sequence
  source 1..19: mol_type = other RNA
tcacgccattctcctgcct

SEQ ID NO: 62797 - RNA, 19 nt, synthetic construct
  misc_feature 1..19: note = siRNA antisense sequence
  source 1..19: mol_type = other RNA
aggcaggagaatggcgtga

SEQ ID NO: 62798 - RNA, 19 nt, synthetic construct
  misc_feature 1..19: note = siRNA sense sequence
  source 1..19: mol_type = other RNA
ctgcctcagcctcccaagt

SEQ ID NO: 62799 - RNA, 19 nt, synthetic construct
  misc_feature 1..19: note = siRNA antisense sequence
  source 1..19: mol_type = other RNA
acttgggaggctgaggcag

SEQ ID NO: 62800 - RNA, 19 nt, synthetic construct
  misc_feature 1..19: note = siRNA sense sequence
  source 1..19: mol_type = other RNA
tgcctcagcctcccaagta

SEQ ID NO: 62801 - RNA, 19 nt, synthetic construct
  misc_feature 1..19: note = siRNA antisense sequence
  source 1..19: mol_type = other RNA
tacttgggaggctgaggca

SEQ ID NO: 62802 - RNA, 19 nt, synthetic construct
  misc_feature 1..19: note = siRNA sense sequence
  source 1..19: mol_type = other RNA
gcctcagcctcccaagtag

SEQ ID NO: 62803 - RNA, 19 nt, synthetic construct
  misc_feature 1..19: note = siRNA antisense sequence
  source 1..19: mol_type = other RNA
ctacttgggaggctgaggc

SEQ ID NO: 62804 - RNA, 19 nt, synthetic construct
  misc_feature 1..19: note = siRNA sense sequence
  source 1..19: mol_type = other RNA
cctcagcctcccaagtagc

SEQ ID NO: 62805 - RNA, 19 nt, synthetic construct
  misc_feature 1..19: note = siRNA antisense sequence
  source 1..19: mol_type = other RNA
gctacttgggaggctgagg

SEQ ID NO: 62806 - RNA, 19 nt, synthetic construct
  misc_feature 1..19: note = siRNA sense sequence
  source 1..19: mol_type = other RNA
ctcagcctcccaagtagct

SEQ ID NO: 62807 - RNA, 19 nt, synthetic construct
  misc_feature 1..19: note = siRNA antisense sequence
  source 1..19: mol_type = other RNA
agctacttgggaggctgag

SEQ ID NO: 62808 - RNA, 19 nt, synthetic construct
  misc_feature 1..19: note = siRNA sense sequence
  source 1..19: mol_type = other RNA
ccaagtagctgggaccaca

SEQ ID NO: 62809 - RNA, 19 nt, synthetic construct
  misc_feature 1..19: note = siRNA antisense sequence
  source 1..19: mol_type = other RNA
tgtggtcccagctacttgg

SEQ ID NO: 62810 - RNA, 19 nt, synthetic construct
  misc_feature 1..19: note = siRNA sense sequence
  source 1..19: mol_type = other RNA
cgggatggtctcgatctcc

SEQ ID NO: 62811 - RNA, 19 nt, synthetic construct
  misc_feature 1..19: note = siRNA antisense sequence
  source 1..19: mol_type = other RNA
ggagatcgagaccatcccg

SEQ ID NO: 62812 - RNA, 19 nt, synthetic construct
  misc_feature 1..19: note = siRNA sense sequence
  source 1..19: mol_type = other RNA
gggatggtctcgatctcct

SEQ ID NO: 62813 - RNA, 19 nt, synthetic construct
  misc_feature 1..19: note = siRNA antisense sequence
  source 1..19: mol_type = other RNA
aggagatcgagaccatccc

SEQ ID NO: 62814 - RNA, 19 nt, synthetic construct
  misc_feature 1..19: note = siRNA sense sequence
  source 1..19: mol_type = other RNA
ggatggtctcgatctcctg

SEQ ID NO: 62815 - RNA, 19 nt, synthetic construct
  misc_feature 1..19: note = siRNA antisense sequence
  source 1..19: mol_type = other RNA
caggagatcgagaccatcc

SEQ ID NO: 62816 - RNA, 19 nt, synthetic construct
  misc_feature 1..19: note = siRNA sense sequence
  source 1..19: mol_type = other RNA
gatggtctcgatctcctga

SEQ ID NO: 62817 - RNA, 19 nt, synthetic construct
  misc_feature 1..19: note = siRNA antisense sequence
  source 1..19: mol_type = other RNA
tcaggagatcgagaccatc

SEQ ID NO: 62818 - RNA, 19 nt, synthetic construct
  misc_feature 1..19: note = siRNA sense sequence
  source 1..19: mol_type = other RNA
atggtctcgatctcctgac

SEQ ID NO: 62819 - RNA, 19 nt, synthetic construct
  misc_feature 1..19: note = siRNA antisense sequence
  source 1..19: mol_type = other RNA
gtcaggagatcgagaccat

SEQ ID NO: 62820 - RNA, 19 nt, synthetic construct
  misc_feature 1..19: note = siRNA sense sequence
  source 1..19: mol_type = other RNA
ctcgatctcctgacctcgt

SEQ ID NO: 62821 - RNA, 19 nt, synthetic construct
  misc_feature 1..19: note = siRNA antisense sequence
  source 1..19: mol_type = other RNA
acgaggtcaggagatcgag

SEQ ID NO: 62822 - RNA, 19 nt, synthetic construct
  misc_feature 1..19: note = siRNA sense sequence
  source 1..19: mol_type = other RNA
tcgatctcctgacctcgtg

SEQ ID NO: 62823 - RNA, 19 nt, synthetic construct
  misc_feature 1..19: note = siRNA antisense sequence
  source 1..19: mol_type = other RNA
cacgaggtcaggagatcga

SEQ ID NO: 62824 - RNA, 19 nt, synthetic construct
  misc_feature 1..19: note = siRNA sense sequence
  source 1..19: mol_type = other RNA
cgatctcctgacctcgtga

SEQ ID NO: 62825 - RNA, 19 nt, synthetic construct
  misc_feature 1..19: note = siRNA antisense sequence
  source 1..19: mol_type = other RNA
tcacgaggtcaggagatcg

SEQ ID NO: 62826 - RNA, 19 nt, synthetic construct
  misc_feature 1..19: note = siRNA sense sequence
  source 1..19: mol_type = other RNA
gatctcctgacctcgtgat

SEQ ID NO: 62827 - RNA, 19 nt, synthetic construct
  misc_feature 1..19: note = siRNA antisense sequence
  source 1..19: mol_type = other RNA
atcacgaggtcaggagatc

SEQ ID NO: 62828 - RNA, 19 nt, synthetic construct
  misc_feature 1..19: note = siRNA sense sequence
  source 1..19: mol_type = other RNA
atctcctgacctcgtgatc

SEQ ID NO: 62829 - RNA, 19 nt, synthetic construct
  misc_feature 1..19: note = siRNA antisense sequence
  source 1..19: mol_type = other RNA
gatcacgaggtcaggagat

SEQ ID NO: 62830 - RNA, 19 nt, synthetic construct
  misc_feature 1..19: note = siRNA sense sequence
  source 1..19: mol_type = other RNA
tctcctgacctcgtgatcc

SEQ ID NO: 62831 - RNA, 19 nt, synthetic construct
  misc_feature 1..19: note = siRNA antisense sequence
  source 1..19: mol_type = other RNA
ggatcacgaggtcaggaga

SEQ ID NO: 62832 - RNA, 19 nt, synthetic construct
  misc_feature 1..19: note = siRNA sense sequence
  source 1..19: mol_type = other RNA
ctcggcctcccaaagtgct

SEQ ID NO: 62833 - RNA, 19 nt, synthetic construct
  misc_feature 1..19: note = siRNA antisense sequence
  source 1..19: mol_type = other RNA
agcactttgggaggccgag

SEQ ID NO: 62834 - RNA, 19 nt, synthetic construct
  misc_feature 1..19: note = siRNA sense sequence
  source 1..19: mol_type = other RNA
ccaaagtgctgggattaca

SEQ ID NO: 62835 - RNA, 19 nt, synthetic construct
  misc_feature 1..19: note = siRNA antisense sequence
  source 1..19: mol_type = other RNA
tgtaatcccagcactttgg

SEQ ID NO: 62836 - RNA, 19 nt, synthetic construct
  misc_feature 1..19: note = siRNA sense sequence
  source 1..19: mol_type = other RNA
caaagtgctgggattacag

SEQ ID NO: 62837 - RNA, 19 nt, synthetic construct
  misc_feature 1..19: note = siRNA antisense sequence
  source 1..19: mol_type = other RNA
ctgtaatcccagcactttg

SEQ ID NO: 62838 - RNA, 19 nt, synthetic construct
  misc_feature 1..19: note = siRNA sense sequence
  source 1..19: mol_type = other RNA
gtgctgggattacaggcgt

SEQ ID NO: 62839 - RNA, 19 nt, synthetic construct
  misc_feature 1..19: note = siRNA antisense sequence
  source 1..19: mol_type = other RNA
acgcctgtaatcccagcac

SEQ ID NO: 62840 - RNA, 19 nt, synthetic construct
  misc_feature 1..19: note = siRNA sense sequence
  source 1..19: mol_type = other RNA
tgctgggattacaggcgtg

SEQ ID NO: 62841 - RNA, 19 nt, synthetic construct
  misc_feature 1..19: note = siRNA antisense sequence
  source 1..19: mol_type = other RNA
cacgcctgtaatcccagca

SEQ ID NO: 62842 - RNA, 19 nt, synthetic construct
  misc_feature 1..19: note = siRNA sense sequence
  source 1..19: mol_type = other RNA
gctgggattacaggcgtga

SEQ ID NO: 62843 - RNA, 19 nt, synthetic construct
  misc_feature 1..19: note = siRNA antisense sequence
  source 1..19: mol_type = other RNA
tcacgcctgtaatcccagc

SEQ ID NO: 62844 - RNA, 19 nt, synthetic construct
  misc_feature 1..19: note = siRNA sense sequence
  source 1..19: mol_type = other RNA
ctgggattacaggcgtgag

SEQ ID NO: 62845 - RNA, 19 nt, synthetic construct
  misc_feature 1..19: note = siRNA antisense sequence
  source 1..19: mol_type = other RNA
ctcacgcctgtaatcccag

SEQ ID NO: 62846 - RNA, 19 nt, synthetic construct
  misc_feature 1..19: note = siRNA sense sequence
  source 1..19: mol_type = other RNA
tgggattacaggcgtgagc

SEQ ID NO: 62847 - RNA, 19 nt, synthetic construct
  misc_feature 1..19: note = siRNA antisense sequence
  source 1..19: mol_type = other RNA
gctcacgcctgtaatccca

SEQ ID NO: 62848 - RNA, 19 nt, synthetic construct
  misc_feature 1..19: note = siRNA sense sequence
  source 1..19: mol_type = other RNA
attacaggcgtgagccacc

SEQ ID NO: 62849 - RNA, 19 nt, synthetic construct
  misc_feature 1..19: note = siRNA antisense sequence
  source 1..19: mol_type = other RNA
ggtggctcacgcctgtaat

SEQ ID NO: 62850 - RNA, 19 nt, synthetic construct
  misc_feature 1..19: note = siRNA sense sequence
  source 1..19: mol_type = other RNA
ttacaggcgtgagccaccg

SEQ ID NO: 62851 - RNA, 19 nt, synthetic construct
  misc_feature 1..19: note = siRNA antisense sequence
  source 1..19: mol_type = other RNA
cggtggctcacgcctgtaa

SEQ ID NO: 62852 - RNA, 19 nt, synthetic construct
  misc_feature 1..19: note = siRNA sense sequence
  source 1..19: mol_type = other RNA
ggatttctaactgaatatc

SEQ ID NO: 62853 - RNA, 19 nt, synthetic construct
  misc_feature 1..19: note = siRNA antisense sequence
  source 1..19: mol_type = other RNA
gatattcagttagaaatcc

SEQ ID NO: 62854 - RNA, 19 nt, synthetic construct
  misc_feature 1..19: note = siRNA sense sequence
  source 1..19: mol_type = other RNA
tagggagcatgtttaaggg

SEQ ID NO: 62855 - RNA, 19 nt, synthetic construct
  misc_feature 1..19: note = siRNA antisense sequence
  source 1..19: mol_type = other RNA
cccttaaacatgctcccta

SEQ ID NO: 62856 - RNA, 19 nt, synthetic construct
  misc_feature 1..19: note = siRNA sense sequence
  source 1..19: mol_type = other RNA
agggagcatgtttaagggt

SEQ ID NO: 62857 - RNA, 19 nt, synthetic construct
  misc_feature 1..19: note = siRNA antisense sequence
  source 1..19: mol_type = other RNA
acccttaaacatgctccct

SEQ ID NO: 62858 - RNA, 19 nt, synthetic construct
  misc_feature 1..19: note = siRNA sense sequence
  source 1..19: mol_type = other RNA
atgtttaagggtccaggtg

SEQ ID NO: 62859 - RNA, 19 nt, synthetic construct
  misc_feature 1..19: note = siRNA antisense sequence
  source 1..19: mol_type = other RNA
cacctggacccttaaacat

SEQ ID NO: 62860 - RNA, 19 nt, synthetic construct
  misc_feature 1..19: note = siRNA sense sequence
  source 1..19: mol_type = other RNA
tgtttaagggtccaggtgc

SEQ ID NO: 62861 - RNA, 19 nt, synthetic construct
  misc_feature 1..19: note = siRNA antisense sequence
  source 1..19: mol_type = other RNA
gcacctggacccttaaaca

SEQ ID NO: 62862 - RNA, 19 nt, synthetic construct
  misc_feature 1..19: note = siRNA sense sequence
  source 1..19: mol_type = other RNA
gtttaagggtccaggtgca

SEQ ID NO: 62863 - RNA, 19 nt, synthetic construct
  misc_feature 1..19: note = siRNA antisense sequence
  source 1..19: mol_type = other RNA
tgcacctggacccttaaac

SEQ ID NO: 62864 - RNA, 19 nt, synthetic construct
  misc_feature 1..19: note = siRNA sense sequence
  source 1..19: mol_type = other RNA
acctccagaattccagaat

SEQ ID NO: 62865 - RNA, 19 nt, synthetic construct
  misc_feature 1..19: note = siRNA antisense sequence
  source 1..19: mol_type = other RNA
attctggaattctggaggt

SEQ ID NO: 62866 - RNA, 19 nt, synthetic construct
  misc_feature 1..19: note = siRNA sense sequence
  source 1..19: mol_type = other RNA
tccagaattaaaggatgta

SEQ ID NO: 62867 - RNA, 19 nt, synthetic construct
  misc_feature 1..19: note = siRNA antisense sequence
  source 1..19: mol_type = other RNA
tacatcctttaattctgga

SEQ ID NO: 62868 - RNA, 19 nt, synthetic construct
  misc_feature 1..19: note = siRNA sense sequence
  source 1..19: mol_type = other RNA
ccagaattaaaggatgtat

SEQ ID NO: 62869 - RNA, 19 nt, synthetic construct
  misc_feature 1..19: note = siRNA antisense sequence
  source 1..19: mol_type = other RNA
atacatcctttaattctgg

SEQ ID NO: 62870 - RNA, 19 nt, synthetic construct
  misc_feature 1..19: note = siRNA sense sequence
  source 1..19: mol_type = other RNA
taaaggatgtatttcgtct

SEQ ID NO: 62871 - RNA, 19 nt, synthetic construct
  misc_feature 1..19: note = siRNA antisense sequence
  source 1..19: mol_type = other RNA
agacgaaatacatccttta

SEQ ID NO: 62872 - RNA, 19 nt, synthetic construct
  misc_feature 1..19: note = siRNA sense sequence
  source 1..19: mol_type = other RNA
aaaggatgtatttcgtctt

SEQ ID NO: 62873 - RNA, 19 nt, synthetic construct
  misc_feature 1..19: note = siRNA antisense sequence
  source 1..19: mol_type = other RNA
aagacgaaatacatccttt

SEQ ID NO: 62874 - RNA, 19 nt, synthetic construct
  misc_feature 1..19: note = siRNA sense sequence
  source 1..19: mol_type = other RNA
aactgcttcagatctgagg

SEQ ID NO: 62875 - RNA, 19 nt, synthetic construct
  misc_feature 1..19: note = siRNA antisense sequence
  source 1..19: mol_type = other RNA
cctcagatctgaagcagtt

SEQ ID NO: 62876 - RNA, 19 nt, synthetic construct
  misc_feature 1..19: note = siRNA sense sequence
  source 1..19: mol_type = other RNA
ctgcttcagatctgaggag

SEQ ID NO: 62877 - RNA, 19 nt, synthetic construct
  misc_feature 1..19: note = siRNA antisense sequence
  source 1..19: mol_type = other RNA
ctcctcagatctgaagcag

SEQ ID NO: 62878 - RNA, 19 nt, synthetic construct
  misc_feature 1..19: note = siRNA sense sequence
  source 1..19: mol_type = other RNA
tgcttcagatctgaggagc

SEQ ID NO: 62879 - RNA, 19 nt, synthetic construct
  misc_feature 1..19: note = siRNA antisense sequence
  source 1..19: mol_type = other RNA
gctcctcagatctgaagca

SEQ ID NO: 62880 - RNA, 19 nt, synthetic construct
  misc_feature 1..19: note = siRNA sense sequence
  source 1..19: mol_type = other RNA
cttcagatctgaggagctc

SEQ ID NO: 62881 - RNA, 19 nt, synthetic construct
  misc_feature 1..19: note = siRNA antisense sequence
  source 1..19: mol_type = other RNA
gagctcctcagatctgaag

SEQ ID NO: 62882 - RNA, 19 nt, synthetic construct
  misc_feature 1..19: note = siRNA sense sequence
  source 1..19: mol_type = other RNA
ttcagatctgaggagctct

SEQ ID NO: 62883 - RNA, 19 nt, synthetic construct
  misc_feature 1..19: note = siRNA antisense sequence
  source 1..19: mol_type = other RNA
agagctcctcagatctgaa

SEQ ID NO: 62884 - RNA, 19 nt, synthetic construct
  misc_feature 1..19: note = siRNA sense sequence
  source 1..19: mol_type = other RNA
tcagatctgaggagctctc

SEQ ID NO: 62885 - RNA, 19 nt, synthetic construct
  misc_feature 1..19: note = siRNA antisense sequence
  source 1..19: mol_type = other RNA
gagagctcctcagatctga

SEQ ID NO: 62886 - RNA, 19 nt, synthetic construct
  misc_feature 1..19: note = siRNA sense sequence
  source 1..19: mol_type = other RNA
gaggagctctcagtctgga

SEQ ID NO: 62887 - RNA, 19 nt, synthetic construct
  misc_feature 1..19: note = siRNA antisense sequence
  source 1..19: mol_type = other RNA
tccagactgagagctcctc

SEQ ID NO: 62888 - RNA, 19 nt, synthetic construct
  misc_feature 1..19: note = siRNA sense sequence
  source 1..19: mol_type = other RNA
gagctctcagtctggaagg

SEQ ID NO: 62889 - RNA, 19 nt, synthetic construct
  misc_feature 1..19: note = siRNA antisense sequence
  source 1..19: mol_type = other RNA
ccttccagactgagagctc

SEQ ID NO: 62890 - RNA, 19 nt, synthetic construct
  misc_feature 1..19: note = siRNA sense sequence
  source 1..19: mol_type = other RNA
agctctcagtctggaaggc

SEQ ID NO: 62891 - RNA, 19 nt, synthetic construct
  misc_feature 1..19: note = siRNA antisense sequence
  source 1..19: mol_type = other RNA
gccttccagactgagagct

SEQ ID NO: 62892 - RNA, 19 nt, synthetic construct
  misc_feature 1..19: note = siRNA sense sequence
  source 1..19: mol_type = other RNA
gctctcagtctggaaggct

SEQ ID NO: 62893 - RNA, 19 nt, synthetic construct
  misc_feature 1..19: note = siRNA antisense sequence
  source 1..19: mol_type = other RNA
agccttccagactgagagc

SEQ ID NO: 62894 - RNA, 19 nt, synthetic construct
  misc_feature 1..19: note = siRNA sense sequence
  source 1..19: mol_type = other RNA
ctctcagtctggaaggctc

SEQ ID NO: 62895 - RNA, 19 nt, synthetic construct
  misc_feature 1..19: note = siRNA antisense sequence
  source 1..19: mol_type = other RNA
gagccttccagactgagag

SEQ ID NO: 62896 - RNA, 19 nt, synthetic construct
  misc_feature 1..19: note = siRNA sense sequence
  source 1..19: mol_type = other RNA
tctcagtctggaaggctca

SEQ ID NO: 62897 - RNA, 19 nt, synthetic construct
  misc_feature 1..19: note = siRNA antisense sequence
  source 1..19: mol_type = other RNA
tgagccttccagactgaga

SEQ ID NO: 62898 - RNA, 19 nt, synthetic construct
  misc_feature 1..19: note = siRNA sense sequence
  source 1..19: mol_type = other RNA
ctcagtctggaaggctcag

SEQ ID NO: 62899 - RNA, 19 nt, synthetic construct
  misc_feature 1..19: note = siRNA antisense sequence
  source 1..19: mol_type = other RNA
ctgagccttccagactgag

SEQ ID NO: 62900 - RNA, 19 nt, synthetic construct
  misc_feature 1..19: note = siRNA sense sequence
  source 1..19: mol_type = other RNA
tcagtctggaaggctcagt

SEQ ID NO: 62901 - RNA, 19 nt, synthetic construct
  misc_feature 1..19: note = siRNA antisense sequence
  source 1..19: mol_type = other RNA
actgagccttccagactga

SEQ ID NO: 62902 - RNA, 19 nt, synthetic construct
  misc_feature 1..19: note = siRNA sense sequence
  source 1..19: mol_type = other RNA
cagtctggaaggctcagtt

SEQ ID NO: 62903 - RNA, 19 nt, synthetic construct
  misc_feature 1..19: note = siRNA antisense sequence
  source 1..19: mol_type = other RNA
aactgagccttccagactg

SEQ ID NO: 62904 - RNA, 19 nt, synthetic construct
  misc_feature 1..19: note = siRNA sense sequence
  source 1..19: mol_type = other RNA
agtctggaaggctcagttg

SEQ ID NO: 62905 - RNA, 19 nt, synthetic construct
  misc_feature 1..19: note = siRNA antisense sequence
  source 1..19: mol_type = other RNA
caactgagccttccagact

SEQ ID NO: 62906 - RNA, 19 nt, synthetic construct
  misc_feature 1..19: note = siRNA sense sequence
  source 1..19: mol_type = other RNA
tctggaaggctcagttggg

SEQ ID NO: 62907 - RNA, 19 nt, synthetic construct
  misc_feature 1..19: note = siRNA antisense sequence
  source 1..19: mol_type = other RNA
cccaactgagccttccaga

SEQ ID NO: 62908 - RNA, 19 nt, synthetic construct
  misc_feature 1..19: note = siRNA sense sequence
  source 1..19: mol_type = other RNA
ctggaaggctcagttgggt

SEQ ID NO: 62909 - RNA, 19 nt, synthetic construct
  misc_feature 1..19: note = siRNA antisense sequence
  source 1..19: mol_type = other RNA
acccaactgagccttccag

SEQ ID NO: 62910 - RNA, 19 nt, synthetic construct
  misc_feature 1..19: note = siRNA sense sequence
  source 1..19: mol_type = other RNA
tggaaggctcagttgggta

SEQ ID NO: 62911 - RNA, 19 nt, synthetic construct
  misc_feature 1..19: note = siRNA antisense sequence
  source 1..19: mol_type = other RNA
tacccaactgagccttcca

SEQ ID NO: 62912 - RNA, 19 nt, synthetic construct
  misc_feature 1..19: note = siRNA sense sequence
  source 1..19: mol_type = other RNA
ggaaggctcagttgggtag

SEQ ID NO: 62913 - RNA, 19 nt, synthetic construct
  misc_feature 1..19: note = siRNA antisense sequence
  source 1..19: mol_type = other RNA
ctacccaactgagccttcc

SEQ ID NO: 62914 - RNA, 19 nt, synthetic construct
  misc_feature 1..19: note = siRNA sense sequence
  source 1..19: mol_type = other RNA
aaggctcagttgggtagat

SEQ ID NO: 62915 - RNA, 19 nt, synthetic construct
  misc_feature 1..19: note = siRNA antisense sequence
  source 1..19: mol_type = other RNA
atctacccaactgagcctt

SEQ ID NO: 62916 - RNA, 19 nt, synthetic construct
  misc_feature 1..19: note = siRNA sense sequence
  source 1..19: mol_type = other RNA
aggctcagttgggtagatc

SEQ ID NO: 62917 - RNA, 19 nt, synthetic construct
  misc_feature 1..19: note = siRNA antisense sequence
  source 1..19: mol_type = other RNA
gatctacccaactgagcct

SEQ ID NO: 62918 - RNA, 19 nt, synthetic construct
  misc_feature 1..19: note = siRNA sense sequence
  source 1..19: mol_type = other RNA
ggctcagttgggtagatca

SEQ ID NO: 62919 - RNA, 19 nt, synthetic construct
  misc_feature 1..19: note = siRNA antisense sequence
  source 1..19: mol_type = other RNA
tgatctacccaactgagcc

SEQ ID NO: 62920 - RNA, 19 nt, synthetic construct
  misc_feature 1..19: note = siRNA sense sequence
  source 1..19: mol_type = other RNA
gctcagttgggtagatcac

SEQ ID NO: 62921 - RNA, 19 nt, synthetic construct
  misc_feature 1..19: note = siRNA antisense sequence
  source 1..19: mol_type = other RNA
gtgatctacccaactgagc

SEQ ID NO: 62922 - RNA, 19 nt, synthetic construct
  misc_feature 1..19: note = siRNA sense sequence
  source 1..19: mol_type = other RNA
ctcagttgggtagatcact

SEQ ID NO: 62923 - RNA, 19 nt, synthetic construct
  misc_feature 1..19: note = siRNA antisense sequence
  source 1..19: mol_type = other RNA
agtgatctacccaactgag

SEQ ID NO: 62924 - RNA, 19 nt, synthetic construct
  misc_feature 1..19: note = siRNA sense sequence
  source 1..19: mol_type = other RNA
ttgggtagatcactggctt

SEQ ID NO: 62925 - RNA, 19 nt, synthetic construct
  misc_feature 1..19: note = siRNA antisense sequence
  source 1..19: mol_type = other RNA
aagccagtgatctacccaa

SEQ ID NO: 62926 - RNA, 19 nt, synthetic construct
  misc_feature 1..19: note = siRNA sense sequence
  source 1..19: mol_type = other RNA
atcactggctttccttggg

SEQ ID NO: 62927 - RNA, 19 nt, synthetic construct
  misc_feature 1..19: note = siRNA antisense sequence
  source 1..19: mol_type = other RNA
cccaaggaaagccagtgat

SEQ ID NO: 62928 - RNA, 19 nt, synthetic construct
  misc_feature 1..19: note = siRNA sense sequence
  source 1..19: mol_type = other RNA
ctggctttccttgggtcta

SEQ ID NO: 62929 - RNA, 19 nt, synthetic construct
  misc_feature 1..19: note = siRNA antisense sequence
  source 1..19: mol_type = other RNA
tagacccaaggaaagccag

SEQ ID NO: 62930 - RNA, 19 nt, synthetic construct
  misc_feature 1..19: note = siRNA sense sequence
  source 1..19: mol_type = other RNA
tggctttccttgggtctat

SEQ ID NO: 62931 - RNA, 19 nt, synthetic construct
  misc_feature 1..19: note = siRNA antisense sequence
  source 1..19: mol_type = other RNA
atagacccaaggaaagcca

SEQ ID NO: 62932 - RNA, 19 nt, synthetic construct
  misc_feature 1..19: note = siRNA sense sequence
  source 1..19: mol_type = other RNA
aaggcgttccctacccagc

SEQ ID NO: 62933 - RNA, 19 nt, synthetic construct
  misc_feature 1..19: note = siRNA antisense sequence
  source 1..19: mol_type = other RNA
gctgggtagggaacgcctt

SEQ ID NO: 62934 - RNA, 19 nt, synthetic construct
  misc_feature 1..19: note = siRNA sense sequence
  source 1..19: mol_type = other RNA
aggcgttccctacccagct

SEQ ID NO: 62935 - RNA, 19 nt, synthetic construct
  misc_feature 1..19: note = siRNA antisense sequence
  source 1..19: mol_type = other RNA
agctgggtagggaacgcct

SEQ ID NO: 62936 - RNA, 19 nt, synthetic construct
  misc_feature 1..19: note = siRNA sense sequence
  source 1..19: mol_type = other RNA
ggcgttccctacccagcta

SEQ ID NO: 62937 - RNA, 19 nt, synthetic construct
  misc_feature 1..19: note = siRNA antisense sequence
  source 1..19: mol_type = other RNA
tagctgggtagggaacgcc

SEQ ID NO: 62938 - RNA, 19 nt, synthetic construct
  misc_feature 1..19: note = siRNA sense sequence
  source 1..19: mol_type = other RNA
gcgttccctacccagctaa

SEQ ID NO: 62939 - RNA, 19 nt, synthetic construct
  misc_feature 1..19: note = siRNA antisense sequence
  source 1..19: mol_type = other RNA
ttagctgggtagggaacgc

SEQ ID NO: 62940 - RNA, 19 nt, synthetic construct
  misc_feature 1..19: note = siRNA sense sequence
  source 1..19: mol_type = other RNA
cgttccctacccagctaaa

SEQ ID NO: 62941 - RNA, 19 nt, synthetic construct
  misc_feature 1..19: note = siRNA antisense sequence
  source 1..19: mol_type = other RNA
tttagctgggtagggaacg

SEQ ID NO: 62942 - RNA, 19 nt, synthetic construct
  misc_feature 1..19: note = siRNA sense sequence
  source 1..19: mol_type = other RNA
gttccctacccagctaaag

SEQ ID NO: 62943 - RNA, 19 nt, synthetic construct
  misc_feature 1..19: note = siRNA antisense sequence
  source 1..19: mol_type = other RNA
ctttagctgggtagggaac

SEQ ID NO: 62944 - RNA, 19 nt, synthetic construct
  misc_feature 1..19: note = siRNA sense sequence
  source 1..19: mol_type = other RNA
ttccctacccagctaaaga

SEQ ID NO: 62945 - RNA, 19 nt, synthetic construct
  misc_feature 1..19: note = siRNA antisense sequence
  source 1..19: mol_type = other RNA
tctttagctgggtagggaa

SEQ ID NO: 62946 - RNA, 19 nt, synthetic construct
  misc_feature 1..19: note = siRNA sense sequence
  source 1..19: mol_type = other RNA
tccctacccagctaaagaa

SEQ ID NO: 62947 - RNA, 19 nt, synthetic construct
  misc_feature 1..19: note = siRNA antisense sequence
  source 1..19: mol_type = other RNA
ttctttagctgggtaggga

SEQ ID NO: 62948 - RNA, 19 nt, synthetic construct
  misc_feature 1..19: note = siRNA sense sequence
  source 1..19: mol_type = other RNA
ccctacccagctaaagaag

SEQ ID NO: 62949 - RNA, 19 nt, synthetic construct
  misc_feature 1..19: note = siRNA antisense sequence
  source 1..19: mol_type = other RNA
cttctttagctgggtaggg

SEQ ID NO: 62950 - RNA, 19 nt, synthetic construct
  misc_feature 1..19: note = siRNA sense sequence
  source 1..19: mol_type = other RNA
gctaaagaagctgcacagg

SEQ ID NO: 62951 - RNA, 19 nt, synthetic construct
  misc_feature 1..19: note = siRNA antisense sequence
  source 1..19: mol_type = other RNA
cctgtgcagcttctttagc

SEQ ID NO: 62952 - RNA, 19 nt, synthetic construct
  misc_feature 1..19: note = siRNA sense sequence
  source 1..19: mol_type = other RNA
tgcacagggatgccatagg

SEQ ID NO: 62953 - RNA, 19 nt, synthetic construct
  misc_feature 1..19: note = siRNA antisense sequence
  source 1..19: mol_type = other RNA
cctatggcatccctgtgca

SEQ ID NO: 62954 - RNA, 19 nt, synthetic construct
  misc_feature 1..19: note = siRNA sense sequence
  source 1..19: mol_type = other RNA
gcacagggatgccataggt

SEQ ID NO: 62955 - RNA, 19 nt, synthetic construct
  misc_feature 1..19: note = siRNA antisense sequence
  source 1..19: mol_type = other RNA
acctatggcatccctgtgc

SEQ ID NO: 62956 - RNA, 19 nt, synthetic construct
  misc_feature 1..19: note = siRNA sense sequence
  source 1..19: mol_type = other RNA
cacagggatgccataggtt

SEQ ID NO: 62957 - RNA, 19 nt, synthetic construct
  misc_feature 1..19: note = siRNA antisense sequence
  source 1..19: mol_type = other RNA
aacctatggcatccctgtg

SEQ ID NO: 62958 - RNA, 19 nt, synthetic construct
  misc_feature 1..19: note = siRNA sense sequence
  source 1..19: mol_type = other RNA
acagggatgccataggttt

SEQ ID NO: 62959 - RNA, 19 nt, synthetic construct
  misc_feature 1..19: note = siRNA antisense sequence
  source 1..19: mol_type = other RNA
aaacctatggcatccctgt

SEQ ID NO: 62960 - RNA, 19 nt, synthetic construct
  misc_feature 1..19: note = siRNA sense sequence
  source 1..19: mol_type = other RNA
cagggatgccataggtttc

SEQ ID NO: 62961 - RNA, 19 nt, synthetic construct
  misc_feature 1..19: note = siRNA antisense sequence
  source 1..19: mol_type = other RNA
gaaacctatggcatccctg

SEQ ID NO: 62962 - RNA, 19 nt, synthetic construct
  misc_feature 1..19: note = siRNA sense sequence
  source 1..19: mol_type = other RNA
agggatgccataggtttca

SEQ ID NO: 62963 - RNA, 19 nt, synthetic construct
  misc_feature 1..19: note = siRNA antisense sequence
  source 1..19: mol_type = other RNA
tgaaacctatggcatccct

SEQ ID NO: 62964 - RNA, 19 nt, synthetic construct
  misc_feature 1..19: note = siRNA sense sequence
  source 1..19: mol_type = other RNA
gggatgccataggtttcag

SEQ ID NO: 62965 - RNA, 19 nt, synthetic construct
  misc_feature 1..19: note = siRNA antisense sequence
  source 1..19: mol_type = other RNA
ctgaaacctatggcatccc

SEQ ID NO: 62966 - RNA, 19 nt, synthetic construct
  misc_feature 1..19: note = siRNA sense sequence
  source 1..19: mol_type = other RNA
ggatgccataggtttcagg

SEQ ID NO: 62967 - RNA, 19 nt, synthetic construct
  misc_feature 1..19: note = siRNA antisense sequence
  source 1..19: mol_type = other RNA
cctgaaacctatggcatcc

SEQ ID NO: 62968 - RNA, 19 nt, synthetic construct
  misc_feature 1..19: note = siRNA sense sequence
  source 1..19: mol_type = other RNA
gatgccataggtttcaggc

SEQ ID NO: 62969 - RNA, 19 nt, synthetic construct
  misc_feature 1..19: note = siRNA antisense sequence
  source 1..19: mol_type = other RNA
gcctgaaacctatggcatc

SEQ ID NO: 62970 - RNA, 19 nt, synthetic construct
  misc_feature 1..19: note = siRNA sense sequence
  source 1..19: mol_type = other RNA
atgccataggtttcaggcc

SEQ ID NO: 62971 - RNA, 19 nt, synthetic construct
  misc_feature 1..19: note = siRNA antisense sequence
  source 1..19: mol_type = other RNA
ggcctgaaacctatggcat

SEQ ID NO: 62972 - RNA, 19 nt, synthetic construct
  misc_feature 1..19: note = siRNA sense sequence
  source 1..19: mol_type = other RNA
tgccataggtttcaggcct

SEQ ID NO: 62973 - RNA, 19 nt, synthetic construct
  misc_feature 1..19: note = siRNA antisense sequence
  source 1..19: mol_type = other RNA
aggcctgaaacctatggca

SEQ ID NO: 62974 - RNA, 19 nt, synthetic construct
  misc_feature 1..19: note = siRNA sense sequence
  source 1..19: mol_type = other RNA
gccataggtttcaggcctg

SEQ ID NO: 62975 - RNA, 19 nt, synthetic construct
  misc_feature 1..19: note = siRNA antisense sequence
  source 1..19: mol_type = other RNA
caggcctgaaacctatggc

SEQ ID NO: 62976 - RNA, 19 nt, synthetic construct
  misc_feature 1..19: note = siRNA sense sequence
  source 1..19: mol_type = other RNA
ccataggtttcaggcctgc

SEQ ID NO: 62977 - RNA, 19 nt, synthetic construct
  misc_feature 1..19: note = siRNA antisense sequence
  source 1..19: mol_type = other RNA
gcaggcctgaaacctatgg

SEQ ID NO: 62978 - RNA, 19 nt, synthetic construct
  misc_feature 1..19: note = siRNA sense sequence
  source 1..19: mol_type = other RNA
cataggtttcaggcctgca

SEQ ID NO: 62979 - RNA, 19 nt, synthetic construct
  misc_feature 1..19: note = siRNA antisense sequence
  source 1..19: mol_type = other RNA
tgcaggcctgaaacctatg

SEQ ID NO: 62980 - RNA, 19 nt, synthetic construct
  misc_feature 1..19: note = siRNA sense sequence
  source 1..19: mol_type = other RNA
ggtttcaggcctgcagatt

SEQ ID NO: 62981 - RNA, 19 nt, synthetic construct
  misc_feature 1..19: note = siRNA antisense sequence
  source 1..19: mol_type = other RNA
aatctgcaggcctgaaacc

SEQ ID NO: 62982 - RNA, 19 nt, synthetic construct
  misc_feature 1..19: note = siRNA sense sequence
  source 1..19: mol_type = other RNA
gtttcaggcctgcagatta

SEQ ID NO: 62983 - RNA, 19 nt, synthetic construct
  misc_feature 1..19: note = siRNA antisense sequence
  source 1..19: mol_type = other RNA
taatctgcaggcctgaaac

SEQ ID NO: 62984 - RNA, 19 nt, synthetic construct
  misc_feature 1..19: note = siRNA sense sequence
  source 1..19: mol_type = other RNA
tttcaggcctgcagattat

SEQ ID NO: 62985 - RNA, 19 nt, synthetic construct
  misc_feature 1..19: note = siRNA antisense sequence
  source 1..19: mol_type = other RNA
ataatctgcaggcctgaaa

SEQ ID NO: 62986 - RNA, 19 nt, synthetic construct
  misc_feature 1..19: note = siRNA sense sequence
  source 1..19: mol_type = other RNA
ttcaggcctgcagattatg

SEQ ID NO: 62987 - RNA, 19 nt, synthetic construct
  misc_feature 1..19: note = siRNA antisense sequence
  source 1..19: mol_type = other RNA
cataatctgcaggcctgaa

SEQ ID NO: 62988 - RNA, 19 nt, synthetic construct
  misc_feature 1..19: note = siRNA sense sequence
  source 1..19: mol_type = other RNA
tcaggcctgcagattatgc

SEQ ID NO: 62989 - RNA, 19 nt, synthetic construct
  misc_feature 1..19: note = siRNA antisense sequence
  source 1..19: mol_type = other RNA
gcataatctgcaggcctga

SEQ ID NO: 62990 - RNA, 19 nt, synthetic construct
  misc_feature 1..19: note = siRNA sense sequence
  source 1..19: mol_type = other RNA
caggcctgcagattatgct

SEQ ID NO: 62991 - RNA, 19 nt, synthetic construct
  misc_feature 1..19: note = siRNA antisense sequence
  source 1..19: mol_type = other RNA
agcataatctgcaggcctg

SEQ ID NO: 62992 - RNA, 19 nt, synthetic construct
  misc_feature 1..19: note = siRNA sense sequence
  source 1..19: mol_type = other RNA
aggcctgcagattatgctt

SEQ ID NO: 62993 - RNA, 19 nt, synthetic construct
  misc_feature 1..19: note = siRNA antisense sequence
  source 1..19: mol_type = other RNA
aagcataatctgcaggcct

SEQ ID NO: 62994 - RNA, 19 nt, synthetic construct
  misc_feature 1..19: note = siRNA sense sequence
  source 1..19: mol_type = other RNA
ggcctgcagattatgcttc

SEQ ID NO: 62995 - RNA, 19 nt, synthetic construct
  misc_feature 1..19: note = siRNA antisense sequence
  source 1..19: mol_type = other RNA
gaagcataatctgcaggcc

SEQ ID NO: 62996 - RNA, 19 nt, synthetic construct
  misc_feature 1..19: note = siRNA sense sequence
  source 1..19: mol_type = other RNA
gattatgcttcagcagtag

SEQ ID NO: 62997 - RNA, 19 nt, synthetic construct
  misc_feature 1..19: note = siRNA antisense sequence
  source 1..19: mol_type = other RNA
ctactgctgaagcataatc

SEQ ID NO: 62998 - RNA, 19 nt, synthetic construct
  misc_feature 1..19: note = siRNA sense sequence
  source 1..19: mol_type = other RNA
attatgcttcagcagtagg

SEQ ID NO: 62999 - RNA, 19 nt, synthetic construct
  misc_feature 1..19: note = siRNA antisense sequence
  source 1..19: mol_type = other RNA
cctactgctgaagcataat

SEQ ID NO: 63000 - RNA, 19 nt, synthetic construct
  misc_feature 1..19: note = siRNA sense sequence
  source 1..19: mol_type = other RNA
actgcatctggttgtccca

SEQ ID NO: 63001 - RNA, 19 nt, synthetic construct
  misc_feature 1..19: note = siRNA antisense sequence
  source 1..19: mol_type = other RNA
tgggacaaccagatgcagt

SEQ ID NO: 63002 - RNA, 19 nt, synthetic construct
  misc_feature 1..19: note = siRNA sense sequence
  source 1..19: mol_type = other RNA
tggttgtcccagttcagtt

SEQ ID NO: 63003 - RNA, 19 nt, synthetic construct
  misc_feature 1..19: note = siRNA antisense sequence
  source 1..19: mol_type = other RNA
aactgaactgggacaacca

SEQ ID NO: 63004 - RNA, 19 nt, synthetic construct
  misc_feature 1..19: note = siRNA sense sequence
  source 1..19: mol_type = other RNA
ggttgtcccagttcagttg

SEQ ID NO: 63005 - RNA, 19 nt, synthetic construct
  misc_feature 1..19: note = siRNA antisense sequence
  source 1..19: mol_type = other RNA
caactgaactgggacaacc

SEQ ID NO: 63006 - RNA, 19 nt, synthetic construct
  misc_feature 1..19: note = siRNA sense sequence
  source 1..19: mol_type = other RNA
gttgtcccagttcagttgt

SEQ ID NO: 63007 - RNA, 19 nt, synthetic construct
  misc_feature 1..19: note = siRNA antisense sequence
  source 1..19: mol_type = other RNA
acaactgaactgggacaac

SEQ ID NO: 63008 - RNA, 19 nt, synthetic construct
  misc_feature 1..19: note = siRNA sense sequence
  source 1..19: mol_type = other RNA
ttgtcccagttcagttgta

SEQ ID NO: 63009 - RNA, 19 nt, synthetic construct
  misc_feature 1..19: note = siRNA antisense sequence
  source 1..19: mol_type = other RNA
tacaactgaactgggacaa

SEQ ID NO: 63010 - RNA, 19 nt, synthetic construct
  misc_feature 1..19: note = siRNA sense sequence
  source 1..19: mol_type = other RNA
tgtcccagttcagttgtac

SEQ ID NO: 63011 - RNA, 19 nt, synthetic construct
  misc_feature 1..19: note = siRNA antisense sequence
  source 1..19: mol_type = other RNA
gtacaactgaactgggaca

SEQ ID NO: 63012 - RNA, 19 nt, synthetic construct
  misc_feature 1..19: note = siRNA sense sequence
  source 1..19: mol_type = other RNA
gtcccagttcagttgtacc

SEQ ID NO: 63013 - RNA, 19 nt, synthetic construct
  misc_feature 1..19: note = siRNA antisense sequence
  source 1..19: mol_type = other RNA
ggtacaactgaactgggac

SEQ ID NO: 63014 - RNA, 19 nt, synthetic construct
  misc_feature 1..19: note = siRNA sense sequence
  source 1..19: mol_type = other RNA
tcccagttcagttgtacct

SEQ ID NO: 63015 - RNA, 19 nt, synthetic construct
  misc_feature 1..19: note = siRNA antisense sequence
  source 1..19: mol_type = other RNA
aggtacaactgaactggga

SEQ ID NO: 63016 - RNA, 19 nt, synthetic construct
  misc_feature 1..19: note = siRNA sense sequence
  source 1..19: mol_type = other RNA
cccagttcagttgtacctt

SEQ ID NO: 63017 - RNA, 19 nt, synthetic construct
  misc_feature 1..19: note = siRNA antisense sequence
  source 1..19: mol_type = other RNA
aaggtacaactgaactggg

SEQ ID NO: 63018 - RNA, 19 nt, synthetic construct
  misc_feature 1..19: note = siRNA sense sequence
  source 1..19: mol_type = other RNA
ccagttcagttgtaccttt

SEQ ID NO: 63019 - RNA, 19 nt, synthetic construct
  misc_feature 1..19: note = siRNA antisense sequence
  source 1..19: mol_type = other RNA
aaaggtacaactgaactgg

SEQ ID NO: 63020 - RNA, 19 nt, synthetic construct
  misc_feature 1..19: note = siRNA sense sequence
  source 1..19: mol_type = other RNA
cagttcagttgtacctttt

SEQ ID NO: 63021 - RNA, 19 nt, synthetic construct
  misc_feature 1..19: note = siRNA antisense sequence
  source 1..19: mol_type = other RNA
aaaaggtacaactgaactg

SEQ ID NO: 63022 - RNA, 19 nt, synthetic construct
  misc_feature 1..19: note = siRNA sense sequence
  source 1..19: mol_type = other RNA
agttcagttgtacctttta

SEQ ID NO: 63023 - RNA, 19 nt, synthetic construct
  misc_feature 1..19: note = siRNA antisense sequence
  source 1..19: mol_type = other RNA
taaaaggtacaactgaact

SEQ ID NO: 63024 - RNA, 19 nt, synthetic construct
  misc_feature 1..19: note = siRNA sense sequence
  source 1..19: mol_type = other RNA
gttcagttgtaccttttaa

SEQ ID NO: 63025 - RNA, 19 nt, synthetic construct
  misc_feature 1..19: note = siRNA antisense sequence
  source 1..19: mol_type = other RNA
ttaaaaggtacaactgaac

SEQ ID NO: 63026 - RNA, 19 nt, synthetic construct
  misc_feature 1..19: note = siRNA sense sequence
  source 1..19: mol_type = other RNA
ttcagttgtaccttttaag

SEQ ID NO: 63027 - RNA, 19 nt, synthetic construct
  misc_feature 1..19: note = siRNA antisense sequence
  source 1..19: mol_type = other RNA
cttaaaaggtacaactgaa

SEQ ID NO: 63028 - RNA, 19 nt, synthetic construct
  misc_feature 1..19: note = siRNA sense sequence
  source 1..19: mol_type = other RNA
tcagttgtaccttttaagc

SEQ ID NO: 63029 - RNA, 19 nt, synthetic construct
  misc_feature 1..19: note = siRNA antisense sequence
  source 1..19: mol_type = other RNA
gcttaaaaggtacaactga

SEQ ID NO: 63030 - RNA, 19 nt, synthetic construct
  misc_feature 1..19: note = siRNA sense sequence
  source 1..19: mol_type = other RNA
cagttgtaccttttaagca

SEQ ID NO: 63031 - RNA, 19 nt, synthetic construct
  misc_feature 1..19: note = siRNA antisense sequence
  source 1..19: mol_type = other RNA
tgcttaaaaggtacaactg

SEQ ID NO: 63032 - RNA, 19 nt, synthetic construct
  misc_feature 1..19: note = siRNA sense sequence
  source 1..19: mol_type = other RNA
agttgtaccttttaagcag

SEQ ID NO: 63033 - RNA, 19 nt, synthetic construct
  misc_feature 1..19: note = siRNA antisense sequence
  source 1..19: mol_type = other RNA
ctgcttaaaaggtacaact

SEQ ID NO: 63034 - RNA, 19 nt, synthetic construct
  misc_feature 1..19: note = siRNA sense sequence
  source 1..19: mol_type = other RNA
gtaccttttaagcagggaa

SEQ ID NO: 63035 - RNA, 19 nt, synthetic construct
  misc_feature 1..19: note = siRNA antisense sequence
  source 1..19: mol_type = other RNA
ttccctgcttaaaaggtac

SEQ ID NO: 63036 - RNA, 19 nt, synthetic construct
  misc_feature 1..19: note = siRNA sense sequence
  source 1..19: mol_type = other RNA
taccttttaagcagggaag

SEQ ID NO: 63037 - RNA, 19 nt, synthetic construct
  misc_feature 1..19: note = siRNA antisense sequence
  source 1..19: mol_type = other RNA
cttccctgcttaaaaggta

SEQ ID NO: 63038 - RNA, 19 nt, synthetic construct
  misc_feature 1..19: note = siRNA sense sequence
  source 1..19: mol_type = other RNA
cttttaagcagggaaggac

SEQ ID NO: 63039 - RNA, 19 nt, synthetic construct
  misc_feature 1..19: note = siRNA antisense sequence
  source 1..19: mol_type = other RNA
gtccttccctgcttaaaag

SEQ ID NO: 63040 - RNA, 19 nt, synthetic construct
  misc_feature 1..19: note = siRNA sense sequence
  source 1..19: mol_type = other RNA
ttttaagcagggaaggacc

SEQ ID NO: 63041 - RNA, 19 nt, synthetic construct
  misc_feature 1..19: note = siRNA antisense sequence
  source 1..19: mol_type = other RNA
ggtccttccctgcttaaaa

SEQ ID NO: 63042 - RNA, 19 nt, synthetic construct
  misc_feature 1..19: note = siRNA sense sequence
  source 1..19: mol_type = other RNA
tttaagcagggaaggacct

SEQ ID NO: 63043 - RNA, 19 nt, synthetic construct
  misc_feature 1..19: note = siRNA antisense sequence
  source 1..19: mol_type = other RNA
aggtccttccctgcttaaa

SEQ ID NO: 63044 - RNA, 19 nt, synthetic construct
  misc_feature 1..19: note = siRNA sense sequence
  source 1..19: mol_type = other RNA
ttaagcagggaaggacctc

SEQ ID NO: 63045 - RNA, 19 nt, synthetic construct
  misc_feature 1..19: note = siRNA antisense sequence
  source 1..19: mol_type = other RNA
gaggtccttccctgcttaa

SEQ ID NO: 63046 - RNA, 19 nt, synthetic construct
  misc_feature 1..19: note = siRNA sense sequence
  source 1..19: mol_type = other RNA
aagcagggaaggacctctg

SEQ ID NO: 63047 - RNA, 19 nt, synthetic construct
  misc_feature 1..19: note = siRNA antisense sequence
  source 1..19: mol_type = other RNA
cagaggtccttccctgctt

SEQ ID NO: 63048 - RNA, 19 nt, synthetic construct
  misc_feature 1..19: note = siRNA sense sequence
  source 1..19: mol_type = other RNA
ggaaggacctctggatagt

SEQ ID NO: 63049 - RNA, 19 nt, synthetic construct
  misc_feature 1..19: note = siRNA antisense sequence
  source 1..19: mol_type = other RNA
actatccagaggtccttcc

SEQ ID NO: 63050 - RNA, 19 nt, synthetic construct
  misc_feature 1..19: note = siRNA sense sequence
  source 1..19: mol_type = other RNA
gaaggacctctggatagtg

SEQ ID NO: 63051 - RNA, 19 nt, synthetic construct
  misc_feature 1..19: note = siRNA antisense sequence
  source 1..19: mol_type = other RNA
cactatccagaggtccttc

SEQ ID NO: 63052 - RNA, 19 nt, synthetic construct
  misc_feature 1..19: note = siRNA sense sequence
  source 1..19: mol_type = other RNA
aaggacctctggatagtga

SEQ ID NO: 63053 - RNA, 19 nt, synthetic construct
  misc_feature 1..19: note = siRNA antisense sequence
  source 1..19: mol_type = other RNA
tcactatccagaggtcctt

SEQ ID NO: 63054 - RNA, 19 nt, synthetic construct
  misc_feature 1..19: note = siRNA sense sequence
  source 1..19: mol_type = other RNA
aggacctctggatagtgag

SEQ ID NO: 63055 - RNA, 19 nt, synthetic construct
  misc_feature 1..19: note = siRNA antisense sequence
  source 1..19: mol_type = other RNA
ctcactatccagaggtcct

SEQ ID NO: 63056 - RNA, 19 nt, synthetic construct
  misc_feature 1..19: note = siRNA sense sequence
  source 1..19: mol_type = other RNA
ctggatagtgagttcagtt

SEQ ID NO: 63057 - RNA, 19 nt, synthetic construct
  misc_feature 1..19: note = siRNA antisense sequence
  source 1..19: mol_type = other RNA
aactgaactcactatccag

SEQ ID NO: 63058 - RNA, 19 nt, synthetic construct
  misc_feature 1..19: note = siRNA sense sequence
  source 1..19: mol_type = other RNA
tggatagtgagttcagttt

SEQ ID NO: 63059 - RNA, 19 nt, synthetic construct
  misc_feature 1..19: note = siRNA antisense sequence
  source 1..19: mol_type = other RNA
aaactgaactcactatcca

SEQ ID NO: 63060 - RNA, 19 nt, synthetic construct
  misc_feature 1..19: note = siRNA sense sequence
  source 1..19: mol_type = other RNA
gatagtgagttcagtttcc

SEQ ID NO: 63061 - RNA, 19 nt, synthetic construct
  misc_feature 1..19: note = siRNA antisense sequence
  source 1..19: mol_type = other RNA
ggaaactgaactcactatc

SEQ ID NO: 63062 - RNA, 19 nt, synthetic construct
  misc_feature 1..19: note = siRNA sense sequence
  source 1..19: mol_type = other RNA
tgagttcagtttcctgttg

SEQ ID NO: 63063 - RNA, 19 nt, synthetic construct
  misc_feature 1..19: note = siRNA antisense sequence
  source 1..19: mol_type = other RNA
caacaggaaactgaactca

SEQ ID NO: 63064 - RNA, 19 nt, synthetic construct
  misc_feature 1..19: note = siRNA sense sequence
  source 1..19: mol_type = other RNA
tgcccacctttccctctga

SEQ ID NO: 63065 - RNA, 19 nt, synthetic construct
  misc_feature 1..19: note = siRNA antisense sequence
  source 1..19: mol_type = other RNA
tcagagggaaaggtgggca

SEQ ID NO: 63066 - RNA, 19 nt, synthetic construct
  misc_feature 1..19: note = siRNA sense sequence
  source 1..19: mol_type = other RNA
ccacctttccctctgagct

SEQ ID NO: 63067 - RNA, 19 nt, synthetic construct
  misc_feature 1..19: note = siRNA antisense sequence
  source 1..19: mol_type = other RNA
agctcagagggaaaggtgg

SEQ ID NO: 63068 - RNA, 19 nt, synthetic construct
  misc_feature 1..19: note = siRNA sense sequence
  source 1..19: mol_type = other RNA
acctttccctctgagctac

SEQ ID NO: 63069 - RNA, 19 nt, synthetic construct
  misc_feature 1..19: note = siRNA antisense sequence
  source 1..19: mol_type = other RNA
gtagctcagagggaaaggt

SEQ ID NO: 63070 - RNA, 19 nt, synthetic construct
  misc_feature 1..19: note = siRNA sense sequence
  source 1..19: mol_type = other RNA
cctttccctctgagctaca

SEQ ID NO: 63071 - RNA, 19 nt, synthetic construct
  misc_feature 1..19: note = siRNA antisense sequence
  source 1..19: mol_type = other RNA
tgtagctcagagggaaagg

SEQ ID NO: 63072 - RNA, 19 nt, synthetic construct
  misc_feature 1..19: note = siRNA sense sequence
  source 1..19: mol_type = other RNA
ctttccctctgagctacac

SEQ ID NO: 63073 - RNA, 19 nt, synthetic construct
  misc_feature 1..19: note = siRNA antisense sequence
  source 1..19: mol_type = other RNA
gtgtagctcagagggaaag

SEQ ID NO: 63074 - RNA, 19 nt, synthetic construct
  misc_feature 1..19: note = siRNA sense sequence
  source 1..19: mol_type = other RNA
tttccctctgagctacact

SEQ ID NO: 63075 - RNA, 19 nt, synthetic construct
  misc_feature 1..19: note = siRNA antisense sequence
  source 1..19: mol_type = other RNA
agtgtagctcagagggaaa

SEQ ID NO: 63076 - RNA, 19 nt, synthetic construct
  misc_feature 1..19: note = siRNA sense sequence
  source 1..19: mol_type = other RNA
ttccctctgagctacactc

SEQ ID NO: 63077 - RNA, 19 nt, synthetic construct
  misc_feature 1..19: note = siRNA antisense sequence
  source 1..19: mol_type = other RNA
gagtgtagctcagagggaa

SEQ ID NO: 63078 - RNA, 19 nt, synthetic construct
  misc_feature 1..19: note = siRNA sense sequence
  source 1..19: mol_type = other RNA
aactttgggttagtggata

SEQ ID NO: 63079 - RNA, 19 nt, synthetic construct
  misc_feature 1..19: note = siRNA antisense sequence
  source 1..19: mol_type = other RNA
tatccactaacccaaagtt

SEQ ID NO: 63080 - RNA, 19 nt, synthetic construct
  misc_feature 1..19: note = siRNA sense sequence
  source 1..19: mol_type = other RNA
actttgggttagtggataa

SEQ ID NO: 63081 - RNA, 19 nt, synthetic construct
  misc_feature 1..19: note = siRNA antisense sequence
  source 1..19: mol_type = other RNA
ttatccactaacccaaagt

SEQ ID NO: 63082 - RNA, 19 nt, synthetic construct
  misc_feature 1..19: note = siRNA sense sequence
  source 1..19: mol_type = other RNA
ctttgggttagtggataaa

SEQ ID NO: 63083 - RNA, 19 nt, synthetic construct
  misc_feature 1..19: note = siRNA antisense sequence
  source 1..19: mol_type = other RNA
tttatccactaacccaaag

SEQ ID NO: 63084 - RNA, 19 nt, synthetic construct
  misc_feature 1..19: note = siRNA sense sequence
  source 1..19: mol_type = other RNA
tttgggttagtggataaaa

SEQ ID NO: 63085 - RNA, 19 nt, synthetic construct
  misc_feature 1..19: note = siRNA antisense sequence
  source 1..19: mol_type = other RNA
ttttatccactaacccaaa

SEQ ID NO: 63086 - RNA, 19 nt, synthetic construct
  misc_feature 1..19: note = siRNA sense sequence
  source 1..19: mol_type = other RNA
ttgggttagtggataaaat

SEQ ID NO: 63087 - RNA, 19 nt, synthetic construct
  misc_feature 1..19: note = siRNA antisense sequence
  source 1..19: mol_type = other RNA
attttatccactaacccaa

SEQ ID NO: 63088 - RNA, 19 nt, synthetic construct
  misc_feature 1..19: note = siRNA sense sequence
  source 1..19: mol_type = other RNA
tgggttagtggataaaatc

SEQ ID NO: 63089 - RNA, 19 nt, synthetic construct
  misc_feature 1..19: note = siRNA antisense sequence
  source 1..19: mol_type = other RNA
gattttatccactaaccca

SEQ ID NO: 63090 - RNA, 19 nt, synthetic construct
  misc_feature 1..19: note = siRNA sense sequence
  source 1..19: mol_type = other RNA
gggttagtggataaaatcg

SEQ ID NO: 63091 - RNA, 19 nt, synthetic construct
  misc_feature 1..19: note = siRNA antisense sequence
  source 1..19: mol_type = other RNA
cgattttatccactaaccc

SEQ ID NO: 63092 - RNA, 19 nt, synthetic construct
  misc_feature 1..19: note = siRNA sense sequence
  source 1..19: mol_type = other RNA
ggttagtggataaaatcga

SEQ ID NO: 63093 - RNA, 19 nt, synthetic construct
  misc_feature 1..19: note = siRNA antisense sequence
  source 1..19: mol_type = other RNA
tcgattttatccactaacc

SEQ ID NO: 63094 - RNA, 19 nt, synthetic construct
  misc_feature 1..19: note = siRNA sense sequence
  source 1..19: mol_type = other RNA
gttagtggataaaatcgaa

SEQ ID NO: 63095 - RNA, 19 nt, synthetic construct
  misc_feature 1..19: note = siRNA antisense sequence
  source 1..19: mol_type = other RNA
ttcgattttatccactaac

SEQ ID NO: 63096 - RNA, 19 nt, synthetic construct
  misc_feature 1..19: note = siRNA sense sequence
  source 1..19: mol_type = other RNA
tagtggataaaatcgaatg

SEQ ID NO: 63097 - RNA, 19 nt, synthetic construct
  misc_feature 1..19: note = siRNA antisense sequence
  source 1..19: mol_type = other RNA
cattcgattttatccacta

SEQ ID NO: 63098 - RNA, 19 nt, synthetic construct
  misc_feature 1..19: note = siRNA sense sequence
  source 1..19: mol_type = other RNA
agtggataaaatcgaatgg

SEQ ID NO: 63099 - RNA, 19 nt, synthetic construct
  misc_feature 1..19: note = siRNA antisense sequence
  source 1..19: mol_type = other RNA
ccattcgattttatccact

SEQ ID NO: 63100 - RNA, 19 nt, synthetic construct
  misc_feature 1..19: note = siRNA sense sequence
  source 1..19: mol_type = other RNA
gtggataaaatcgaatgga

SEQ ID NO: 63101 - RNA, 19 nt, synthetic construct
  misc_feature 1..19: note = siRNA antisense sequence
  source 1..19: mol_type = other RNA
tccattcgattttatccac

SEQ ID NO: 63102 - RNA, 19 nt, synthetic construct
  misc_feature 1..19: note = siRNA sense sequence
  source 1..19: mol_type = other RNA
acagccagtgtcacggtag

SEQ ID NO: 63103 - RNA, 19 nt, synthetic construct
  misc_feature 1..19: note = siRNA antisense sequence
  source 1..19: mol_type = other RNA
ctaccgtgacactggctgt

SEQ ID NO: 63104 - RNA, 19 nt, synthetic construct
  misc_feature 1..19: note = siRNA sense sequence
  source 1..19: mol_type = other RNA
cagccagtgtcacggtagc

SEQ ID NO: 63105 - RNA, 19 nt, synthetic construct
  misc_feature 1..19: note = siRNA antisense sequence
  source 1..19: mol_type = other RNA
gctaccgtgacactggctg

SEQ ID NO: 63106 - RNA, 19 nt, synthetic construct
  misc_feature 1..19: note = siRNA sense sequence
  source 1..19: mol_type = other RNA
agccagtgtcacggtagcc

SEQ ID NO: 63107 - RNA, 19 nt, synthetic construct
  misc_feature 1..19: note = siRNA antisense sequence
  source 1..19: mol_type = other RNA
ggctaccgtgacactggct

SEQ ID NO: 63108 - RNA, 19 nt, synthetic construct
  misc_feature 1..19: note = siRNA sense sequence
  source 1..19: mol_type = other RNA
ccagtgtcacggtagccct

SEQ ID NO: 63109 - RNA, 19 nt, synthetic construct
  misc_feature 1..19: note = siRNA antisense sequence
  source 1..19: mol_type = other RNA
agggctaccgtgacactgg

SEQ ID NO: 63110 - RNA, 19 nt, synthetic construct
  misc_feature 1..19: note = siRNA sense sequence
  source 1..19: mol_type = other RNA
cagtgtcacggtagcccta

SEQ ID NO: 63111 - RNA, 19 nt, synthetic construct
  misc_feature 1..19: note = siRNA antisense sequence
  source 1..19: mol_type = other RNA
tagggctaccgtgacactg

SEQ ID NO: 63112 - RNA, 19 nt, synthetic construct
  misc_feature 1..19: note = siRNA sense sequence
  source 1..19: mol_type = other RNA
agtgtcacggtagccctag

SEQ ID NO: 63113 - RNA, 19 nt, synthetic construct
  misc_feature 1..19: note = siRNA antisense sequence
  source 1..19: mol_type = other RNA
ctagggctaccgtgacact

SEQ ID NO: 63114 - RNA, 19 nt, synthetic construct
  misc_feature 1..19: note = siRNA sense sequence
  source 1..19: mol_type = other RNA
gtgtcacggtagccctagc

SEQ ID NO: 63115 - RNA, 19 nt, synthetic construct
  misc_feature 1..19: note = siRNA antisense sequence
  source 1..19: mol_type = other RNA
gctagggctaccgtgacac

SEQ ID NO: 63116 - RNA, 19 nt, synthetic construct
  misc_feature 1..19: note = siRNA sense sequence
  source 1..19: mol_type = other RNA
tgtcacggtagccctagct

SEQ ID NO: 63117 - RNA, 19 nt, synthetic construct
  misc_feature 1..19: note = siRNA antisense sequence
  source 1..19: mol_type = other RNA
agctagggctaccgtgaca

SEQ ID NO: 63118 - RNA, 19 nt, synthetic construct
  misc_feature 1..19: note = siRNA sense sequence
  source 1..19: mol_type = other RNA
gtcacggtagccctagctg

SEQ ID NO: 63119 - RNA, 19 nt, synthetic construct
  misc_feature 1..19: note = siRNA antisense sequence
  source 1..19: mol_type = other RNA
cagctagggctaccgtgac

SEQ ID NO: 63120 - RNA, 19 nt, synthetic construct
  misc_feature 1..19: note = siRNA sense sequence
  source 1..19: mol_type = other RNA
tcacggtagccctagctgg

SEQ ID NO: 63121 - RNA, 19 nt, synthetic construct
  misc_feature 1..19: note = siRNA antisense sequence
  source 1..19: mol_type = other RNA
ccagctagggctaccgtga

SEQ ID NO: 63122 - RNA, 19 nt, synthetic construct
  misc_feature 1..19: note = siRNA sense sequence
  source 1..19: mol_type = other RNA
agaattgtgaagggaagca

SEQ ID NO: 63123 - RNA, 19 nt, synthetic construct
  misc_feature 1..19: note = siRNA antisense sequence
  source 1..19: mol_type = other RNA
tgcttcccttcacaattct

SEQ ID NO: 63124 - RNA, 19 nt, synthetic construct
  misc_feature 1..19: note = siRNA sense sequence
  source 1..19: mol_type = other RNA
gaattgtgaagggaagcag

SEQ ID NO: 63125 - RNA, 19 nt, synthetic construct
  misc_feature 1..19: note = siRNA antisense sequence
  source 1..19: mol_type = other RNA
ctgcttcccttcacaattc

SEQ ID NO: 63126 - RNA, 19 nt, synthetic construct
  misc_feature 1..19: note = siRNA sense sequence
  source 1..19: mol_type = other RNA
attgtgaagggaagcagat

SEQ ID NO: 63127 - RNA, 19 nt, synthetic construct
  misc_feature 1..19: note = siRNA antisense sequence
  source 1..19: mol_type = other RNA
atctgcttcccttcacaat

SEQ ID NO: 63128 - RNA, 19 nt, synthetic construct
  misc_feature 1..19: note = siRNA sense sequence
  source 1..19: mol_type = other RNA
tgtgaagggaagcagatgg

SEQ ID NO: 63129 - RNA, 19 nt, synthetic construct
  misc_feature 1..19: note = siRNA antisense sequence
  source 1..19: mol_type = other RNA
ccatctgcttcccttcaca

SEQ ID NO: 63130 - RNA, 19 nt, synthetic construct
  misc_feature 1..19: note = siRNA sense sequence
  source 1..19: mol_type = other RNA
gtgaagggaagcagatggg

SEQ ID NO: 63131 - RNA, 19 nt, synthetic construct
  misc_feature 1..19: note = siRNA antisense sequence
  source 1..19: mol_type = other RNA
cccatctgcttcccttcac

SEQ ID NO: 63132 - RNA, 19 nt, synthetic construct
  misc_feature 1..19: note = siRNA sense sequence
  source 1..19: mol_type = other RNA
gggaagcagatgggagtct

SEQ ID NO: 63133 - RNA, 19 nt, synthetic construct
  misc_feature 1..19: note = siRNA antisense sequence
  source 1..19: mol_type = other RNA
agactcccatctgcttccc

SEQ ID NO: 63134 - RNA, 19 nt, synthetic construct
  misc_feature 1..19: note = siRNA sense sequence
  source 1..19: mol_type = other RNA
agatgggagtctggttttc

SEQ ID NO: 63135 - RNA, 19 nt, synthetic construct
  misc_feature 1..19: note = siRNA antisense sequence
  source 1..19: mol_type = other RNA
gaaaaccagactcccatct

SEQ ID NO: 63136 - RNA, 19 nt, synthetic construct
  misc_feature 1..19: note = siRNA sense sequence
  source 1..19: mol_type = other RNA
gatgggagtctggttttcc

SEQ ID NO: 63137 - RNA, 19 nt, synthetic construct
  misc_feature 1..19: note = siRNA antisense sequence
  source 1..19: mol_type = other RNA
ggaaaaccagactcccatc

SEQ ID NO: 63138 - RNA, 19 nt, synthetic construct
  misc_feature 1..19: note = siRNA sense sequence
  source 1..19: mol_type = other RNA
gagtctggttttcctgtat

SEQ ID NO: 63139 - RNA, 19 nt, synthetic construct
  misc_feature 1..19: note = siRNA antisense sequence
  source 1..19: mol_type = other RNA
atacaggaaaaccagactc

SEQ ID NO: 63140 - RNA, 19 nt, synthetic construct
  misc_feature 1..19: note = siRNA sense sequence
  source 1..19: mol_type = other RNA
ctggttttcctgtatagtg

SEQ ID NO: 63141 - RNA, 19 nt, synthetic construct
  misc_feature 1..19: note = siRNA antisense sequence
  source 1..19: mol_type = other RNA
cactatacaggaaaaccag

SEQ ID NO: 63142 - RNA, 19 nt, synthetic construct
  misc_feature 1..19: note = siRNA sense sequence
  source 1..19: mol_type = other RNA
tggttttcctgtatagtgg

SEQ ID NO: 63143 - RNA, 19 nt, synthetic construct
  misc_feature 1..19: note = siRNA antisense sequence
  source 1..19: mol_type = other RNA
ccactatacaggaaaacca

SEQ ID NO: 63144 - RNA, 19 nt, synthetic construct
  misc_feature 1..19: note = siRNA sense sequence
  source 1..19: mol_type = other RNA
ggttttcctgtatagtggt

SEQ ID NO: 63145 - RNA, 19 nt, synthetic construct
  misc_feature 1..19: note = siRNA antisense sequence
  source 1..19: mol_type = other RNA
accactatacaggaaaacc

SEQ ID NO: 63146 - RNA, 19 nt, synthetic construct
  misc_feature 1..19: note = siRNA sense sequence
  source 1..19: mol_type = other RNA
gttttcctgtatagtggtg

SEQ ID NO: 63147 - RNA, 19 nt, synthetic construct
  misc_feature 1..19: note = siRNA antisense sequence
  source 1..19: mol_type = other RNA
caccactatacaggaaaac

SEQ ID NO: 63148 - RNA, 19 nt, synthetic construct
  misc_feature 1..19: note = siRNA sense sequence
  source 1..19: mol_type = other RNA
ttttcctgtatagtggtgg

SEQ ID NO: 63149 - RNA, 19 nt, synthetic construct
  misc_feature 1..19: note = siRNA antisense sequence
  source 1..19: mol_type = other RNA
ccaccactatacaggaaaa

SEQ ID NO: 63150 - RNA, 19 nt, synthetic construct
  misc_feature 1..19: note = siRNA sense sequence
  source 1..19: mol_type = other RNA
tttcctgtatagtggtggc

SEQ ID NO: 63151 - RNA, 19 nt, synthetic construct
  misc_feature 1..19: note = siRNA antisense sequence
  source 1..19: mol_type = other RNA
gccaccactatacaggaaa

SEQ ID NO: 63152 - RNA, 19 nt, synthetic construct
  misc_feature 1..19: note = siRNA sense sequence
  source 1..19: mol_type = other RNA
tcctgtatagtggtggcag

SEQ ID NO: 63153 - RNA, 19 nt, synthetic construct
  misc_feature 1..19: note = siRNA antisense sequence
  source 1..19: mol_type = other RNA
ctgccaccactatacagga

SEQ ID NO: 63154 - RNA, 19 nt, synthetic construct
  misc_feature 1..19: note = siRNA sense sequence
  source 1..19: mol_type = other RNA
gtatagtggtggcagatcc

SEQ ID NO: 63155 - RNA, 19 nt, synthetic construct
  misc_feature 1..19: note = siRNA antisense sequence
  source 1..19: mol_type = other RNA
ggatctgccaccactatac

SEQ ID NO: 63156 - RNA, 19 nt, synthetic construct
  misc_feature 1..19: note = siRNA sense sequence
  source 1..19: mol_type = other RNA
tatagtggtggcagatccc

SEQ ID NO: 63157 - RNA, 19 nt, synthetic construct
  misc_feature 1..19: note = siRNA antisense sequence
  source 1..19: mol_type = other RNA
gggatctgccaccactata

SEQ ID NO: 63158 - RNA, 19 nt, synthetic construct
  misc_feature 1..19: note = siRNA sense sequence
  source 1..19: mol_type = other RNA
tcccatctagccaggatta

SEQ ID NO: 63159 - RNA, 19 nt, synthetic construct
  misc_feature 1..19: note = siRNA antisense sequence
  source 1..19: mol_type = other RNA
taatcctggctagatggga

SEQ ID NO: 63160 - RNA, 19 nt, synthetic construct
  misc_feature 1..19: note = siRNA sense sequence
  source 1..19: mol_type = other RNA
cccatctagccaggattag

SEQ ID NO: 63161 - RNA, 19 nt, synthetic construct
  misc_feature 1..19: note = siRNA antisense sequence
  source 1..19: mol_type = other RNA
ctaatcctggctagatggg

SEQ ID NO: 63162 - RNA, 19 nt, synthetic construct
  misc_feature 1..19: note = siRNA sense sequence
  source 1..19: mol_type = other RNA
gatgatttatgggtttaag

SEQ ID NO: 63163 - RNA, 19 nt, synthetic construct
  misc_feature 1..19: note = siRNA antisense sequence
  source 1..19: mol_type = other RNA
cttaaacccataaatcatc

SEQ ID NO: 63164 - RNA, 19 nt, synthetic construct
  misc_feature 1..19: note = siRNA sense sequence
  source 1..19: mol_type = other RNA
atgatttatgggtttaagg

SEQ ID NO: 63165 - RNA, 19 nt, synthetic construct
  misc_feature 1..19: note = siRNA antisense sequence
  source 1..19: mol_type = other RNA
ccttaaacccataaatcat

SEQ ID NO: 63166 - RNA, 19 nt, synthetic construct
  misc_feature 1..19: note = siRNA sense sequence
  source 1..19: mol_type = other RNA
tgatttatgggtttaagga

SEQ ID NO: 63167 - RNA, 19 nt, synthetic construct
  misc_feature 1..19: note = siRNA antisense sequence
  source 1..19: mol_type = other RNA
tccttaaacccataaatca

SEQ ID NO: 63168 - RNA, 19 nt, synthetic construct
  misc_feature 1..19: note = siRNA sense sequence
  source 1..19: mol_type = other RNA
gatttatgggtttaaggaa

SEQ ID NO: 63169 - RNA, 19 nt, synthetic construct
  misc_feature 1..19: note = siRNA antisense sequence
  source 1..19: mol_type = other RNA
ttccttaaacccataaatc

SEQ ID NO: 63170 - RNA, 19 nt, synthetic construct
  misc_feature 1..19: note = siRNA sense sequence
  source 1..19: mol_type = other RNA
atgggtttaaggaattatg

SEQ ID NO: 63171 - RNA, 19 nt, synthetic construct
  misc_feature 1..19: note = siRNA antisense sequence
  source 1..19: mol_type = other RNA
cataattccttaaacccat

SEQ ID NO: 63172 - RNA, 19 nt, synthetic construct
  misc_feature 1..19: note = siRNA sense sequence
  source 1..19: mol_type = other RNA
tgggtttaaggaattatgg

SEQ ID NO: 63173 - RNA, 19 nt, synthetic construct
  misc_feature 1..19: note = siRNA antisense sequence
  source 1..19: mol_type = other RNA
ccataattccttaaaccca

SEQ ID NO: 63174 - RNA, 19 nt, synthetic construct
  misc_feature 1..19: note = siRNA sense sequence
  source 1..19: mol_type = other RNA
gggtttaaggaattatggc

SEQ ID NO: 63175 - RNA, 19 nt, synthetic construct
  misc_feature 1..19: note = siRNA antisense sequence
  source 1..19: mol_type = other RNA
gccataattccttaaaccc

SEQ ID NO: 63176 - RNA, 19 nt, synthetic construct
  misc_feature 1..19: note = siRNA sense sequence
  source 1..19: mol_type = other RNA
ggtttaaggaattatggca

SEQ ID NO: 63177 - RNA, 19 nt, synthetic construct
  misc_feature 1..19: note = siRNA antisense sequence
  source 1..19: mol_type = other RNA
tgccataattccttaaacc

SEQ ID NO: 63178 - RNA, 19 nt, synthetic construct
  misc_feature 1..19: note = siRNA sense sequence
  source 1..19: mol_type = other RNA
gtttaaggaattatggcaa

SEQ ID NO: 63179 - RNA, 19 nt, synthetic construct
  misc_feature 1..19: note = siRNA antisense sequence
  source 1..19: mol_type = other RNA
ttgccataattccttaaac

SEQ ID NO: 63180 - RNA, 19 nt, synthetic construct
  misc_feature 1..19: note = siRNA sense sequence
  source 1..19: mol_type = other RNA
aactgggtaaaggcaacca

SEQ ID NO: 63181 - RNA, 19 nt, synthetic construct
  misc_feature 1..19: note = siRNA antisense sequence
  source 1..19: mol_type = other RNA
tggttgcctttacccagtt

SEQ ID NO: 63182 - RNA, 19 nt, synthetic construct
  misc_feature 1..19: note = siRNA sense sequence
  source 1..19: mol_type = other RNA
actgggtaaaggcaaccaa

SEQ ID NO: 63183 - RNA, 19 nt, synthetic construct
  misc_feature 1..19: note = siRNA antisense sequence
  source 1..19: mol_type = other RNA
ttggttgcctttacccagt

SEQ ID NO: 63184 - RNA, 19 nt, synthetic construct
  misc_feature 1..19: note = siRNA sense sequence
  source 1..19: mol_type = other RNA
ctgggtaaaggcaaccaaa

SEQ ID NO: 63185 - RNA, 19 nt, synthetic construct
  misc_feature 1..19: note = siRNA antisense sequence
  source 1..19: mol_type = other RNA
tttggttgcctttacccag

SEQ ID NO: 63186 - RNA, 19 nt, synthetic construct
  misc_feature 1..19: note = siRNA sense sequence
  source 1..19: mol_type = other RNA
tgggtaaaggcaaccaaaa

SEQ ID NO: 63187 - RNA, 19 nt, synthetic construct
  misc_feature 1..19: note = siRNA antisense sequence
  source 1..19: mol_type = other RNA
ttttggttgcctttaccca

SEQ ID NO: 63188 - RNA, 19 nt, synthetic construct
  misc_feature 1..19: note = siRNA sense sequence
  source 1..19: mol_type = other RNA
tctcccttctttccagttt

SEQ ID NO: 63189 - RNA, 19 nt, synthetic construct
  misc_feature 1..19: note = siRNA antisense sequence
  source 1..19: mol_type = other RNA
aaactggaaagaagggaga

SEQ ID NO: 63190 - RNA, 19 nt, synthetic construct
  misc_feature 1..19: note = siRNA sense sequence
  source 1..19: mol_type = other RNA
cccttctttccagtttcaa

SEQ ID NO: 63191 - RNA, 19 nt, synthetic construct
  misc_feature 1..19: note = siRNA antisense sequence
  source 1..19: mol_type = other RNA
ttgaaactggaaagaaggg

SEQ ID NO: 63192 - RNA, 19 nt, synthetic construct
  misc_feature 1..19: note = siRNA sense sequence
  source 1..19: mol_type = other RNA
cttctttccagtttcaaaa

SEQ ID NO: 63193 - RNA, 19 nt, synthetic construct
  misc_feature 1..19: note = siRNA antisense sequence
  source 1..19: mol_type = other RNA
ttttgaaactggaaagaag

SEQ ID NO: 63194 - RNA, 19 nt, synthetic construct
  misc_feature 1..19: note = siRNA sense sequence
  source 1..19: mol_type = other RNA
aaaagaatgagcatggcaa

SEQ ID NO: 63195 - RNA, 19 nt, synthetic construct
  misc_feature 1..19: note = siRNA antisense sequence
  source 1..19: mol_type = other RNA
ttgccatgctcattctttt

SEQ ID NO: 63196 - RNA, 19 nt, synthetic construct
  misc_feature 1..19: note = siRNA sense sequence
  source 1..19: mol_type = other RNA
aacttccaattctggtctt

SEQ ID NO: 63197 - RNA, 19 nt, synthetic construct
  misc_feature 1..19: note = siRNA antisense sequence
  source 1..19: mol_type = other RNA
aagaccagaattggaagtt

SEQ ID NO: 63198 - RNA, 19 nt, synthetic construct
  misc_feature 1..19: note = siRNA sense sequence
  source 1..19: mol_type = other RNA
ttccaattctggtcttctg

SEQ ID NO: 63199 - RNA, 19 nt, synthetic construct
  misc_feature 1..19: note = siRNA antisense sequence
  source 1..19: mol_type = other RNA
cagaagaccagaattggaa

SEQ ID NO: 63200 - RNA, 19 nt, synthetic construct
  misc_feature 1..19: note = siRNA sense sequence
  source 1..19: mol_type = other RNA
tccaattctggtcttctgt

SEQ ID NO: 63201 - RNA, 19 nt, synthetic construct
  misc_feature 1..19: note = siRNA antisense sequence
  source 1..19: mol_type = other RNA
acagaagaccagaattgga

SEQ ID NO: 63202 - RNA, 19 nt, synthetic construct
  misc_feature 1..19: note = siRNA sense sequence
  source 1..19: mol_type = other RNA
ccaattctggtcttctgtt

SEQ ID NO: 63203 - RNA, 19 nt, synthetic construct
  misc_feature 1..19: note = siRNA antisense sequence
  source 1..19: mol_type = other RNA
aacagaagaccagaattgg

SEQ ID NO: 63204 - RNA, 19 nt, synthetic construct
  misc_feature 1..19: note = siRNA sense sequence
  source 1..19: mol_type = other RNA
caattctggtcttctgtta

SEQ ID NO: 63205 - RNA, 19 nt, synthetic construct
  misc_feature 1..19: note = siRNA antisense sequence
  source 1..19: mol_type = other RNA
taacagaagaccagaattg

SEQ ID NO: 63206 - RNA, 19 nt, synthetic construct
  misc_feature 1..19: note = siRNA sense sequence
  source 1..19: mol_type = other RNA
attctggtcttctgttaat

SEQ ID NO: 63207 - RNA, 19 nt, synthetic construct
  misc_feature 1..19: note = siRNA antisense sequence
  source 1..19: mol_type = other RNA
attaacagaagaccagaat

SEQ ID NO: 63208 - RNA, 19 nt, synthetic construct
  misc_feature 1..19: note = siRNA sense sequence
  source 1..19: mol_type = other RNA
ttctggtcttctgttaatc

SEQ ID NO: 63209 - RNA, 19 nt, synthetic construct
  misc_feature 1..19: note = siRNA antisense sequence
  source 1..19: mol_type = other RNA
gattaacagaagaccagaa

SEQ ID NO: 63210 - RNA, 19 nt, synthetic construct
  misc_feature 1..19: note = siRNA sense sequence
  source 1..19: mol_type = other RNA
tctggtcttctgttaatcc

SEQ ID NO: 63211 - RNA, 19 nt, synthetic construct
  misc_feature 1..19: note = siRNA antisense sequence
  source 1..19: mol_type = other RNA
ggattaacagaagaccaga

SEQ ID NO: 63212 - RNA, 19 nt, synthetic construct
  misc_feature 1..19: note = siRNA sense sequence
  source 1..19: mol_type = other RNA
tggtcttctgttaatccta

SEQ ID NO: 63213 - RNA, 19 nt, synthetic construct
  misc_feature 1..19: note = siRNA antisense sequence
  source 1..19: mol_type = other RNA
taggattaacagaagacca

SEQ ID NO: 63214 - RNA, 19 nt, synthetic construct
  misc_feature 1..19: note = siRNA sense sequence
  source 1..19: mol_type = other RNA
ggtcttctgttaatcctag

SEQ ID NO: 63215 - RNA, 19 nt, synthetic construct
  misc_feature 1..19: note = siRNA antisense sequence
  source 1..19: mol_type = other RNA
ctaggattaacagaagacc

SEQ ID NO: 63216 - RNA, 19 nt, synthetic construct
  misc_feature 1..19: note = siRNA sense sequence
  source 1..19: mol_type = other RNA
gtcttctgttaatcctagg

SEQ ID NO: 63217 - RNA, 19 nt, synthetic construct
  misc_feature 1..19: note = siRNA antisense sequence
  source 1..19: mol_type = other RNA
cctaggattaacagaagac

SEQ ID NO: 63218 - RNA, 19 nt, synthetic construct
  misc_feature 1..19: note = siRNA sense sequence
  source 1..19: mol_type = other RNA
tcttctgttaatcctaggt

SEQ ID NO: 63219 - RNA, 19 nt, synthetic construct
  misc_feature 1..19: note = siRNA antisense sequence
  source 1..19: mol_type = other RNA
acctaggattaacagaaga

SEQ ID NO: 63220 - RNA, 19 nt, synthetic construct
  misc_feature 1..19: note = siRNA sense sequence
  source 1..19: mol_type = other RNA
cttctgttaatcctaggtc

SEQ ID NO: 63221 - RNA, 19 nt, synthetic construct
  misc_feature 1..19: note = siRNA antisense sequence
  source 1..19: mol_type = other RNA
gacctaggattaacagaag

SEQ ID NO: 63222 - RNA, 19 nt, synthetic construct
  misc_feature 1..19: note = siRNA sense sequence
  source 1..19: mol_type = other RNA
ttctgttaatcctaggtct

SEQ ID NO: 63223 - RNA, 19 nt, synthetic construct
  misc_feature 1..19: note = siRNA antisense sequence
  source 1..19: mol_type = other RNA
agacctaggattaacagaa

SEQ ID NO: 63224 - RNA, 19 nt, synthetic construct
  misc_feature 1..19: note = siRNA sense sequence
  source 1..19: mol_type = other RNA
tctgttaatcctaggtcta

SEQ ID NO: 63225 - RNA, 19 nt, synthetic construct
  misc_feature 1..19: note = siRNA antisense sequence
  source 1..19: mol_type = other RNA
tagacctaggattaacaga

SEQ ID NO: 63226 - RNA, 19 nt, synthetic construct
  misc_feature 1..19: note = siRNA sense sequence
  source 1..19: mol_type = other RNA
ctgttaatcctaggtctat

SEQ ID NO: 63227 - RNA, 19 nt, synthetic construct
  misc_feature 1..19: note = siRNA antisense sequence
  source 1..19: mol_type = other RNA
atagacctaggattaacag

SEQ ID NO: 63228 - RNA, 19 nt, synthetic construct
  misc_feature 1..19: note = siRNA sense sequence
  source 1..19: mol_type = other RNA
tgttaatcctaggtctatt

SEQ ID NO: 63229 - RNA, 19 nt, synthetic construct
  misc_feature 1..19: note = siRNA antisense sequence
  source 1..19: mol_type = other RNA
aatagacctaggattaaca

SEQ ID NO: 63230 - RNA, 19 nt, synthetic construct
  misc_feature 1..19: note = siRNA sense sequence
  source 1..19: mol_type = other RNA
aatcctaggtctattaaga

SEQ ID NO: 63231 - RNA, 19 nt, synthetic construct
  misc_feature 1..19: note = siRNA antisense sequence
  source 1..19: mol_type = other RNA
tcttaatagacctaggatt

SEQ ID NO: 63232 - RNA, 19 nt, synthetic construct
  misc_feature 1..19: note = siRNA sense sequence
  source 1..19: mol_type = other RNA
atcctaggtctattaagag

SEQ ID NO: 63233 - RNA, 19 nt, synthetic construct
  misc_feature 1..19: note = siRNA antisense sequence
  source 1..19: mol_type = other RNA
ctcttaatagacctaggat

SEQ ID NO: 63234 - RNA, 19 nt, synthetic construct
  misc_feature 1..19: note = siRNA sense sequence
  source 1..19: mol_type = other RNA
ggctactgaccattaagtg

SEQ ID NO: 63235 - RNA, 19 nt, synthetic construct
  misc_feature 1..19: note = siRNA antisense sequence
  source 1..19: mol_type = other RNA
cacttaatggtcagtagcc

SEQ ID NO: 63236 - RNA, 19 nt, synthetic construct
  misc_feature 1..19: note = siRNA sense sequence
  source 1..19: mol_type = other RNA
gctactgaccattaagtgt

SEQ ID NO: 63237 - RNA, 19 nt, synthetic construct
  misc_feature 1..19: note = siRNA antisense sequence
  source 1..19: mol_type = other RNA
acacttaatggtcagtagc

SEQ ID NO: 63238 - RNA, 19 nt, synthetic construct
  misc_feature 1..19: note = siRNA sense sequence
  source 1..19: mol_type = other RNA
ctactgaccattaagtgtc

SEQ ID NO: 63239 - RNA, 19 nt, synthetic construct
  misc_feature 1..19: note = siRNA antisense sequence
  source 1..19: mol_type = other RNA
gacacttaatggtcagtag

SEQ ID NO: 63240 - RNA, 19 nt, synthetic construct
  misc_feature 1..19: note = siRNA sense sequence
  source 1..19: mol_type = other RNA
tactgaccattaagtgtcc

SEQ ID NO: 63241 - RNA, 19 nt, synthetic construct
  misc_feature 1..19: note = siRNA antisense sequence
  source 1..19: mol_type = other RNA
ggacacttaatggtcagta

SEQ ID NO: 63242 - RNA, 19 nt, synthetic construct
  misc_feature 1..19: note = siRNA sense sequence
  source 1..19: mol_type = other RNA
tttctgctggctgaattat

SEQ ID NO: 63243 - RNA, 19 nt, synthetic construct
  misc_feature 1..19: note = siRNA antisense sequence
  source 1..19: mol_type = other RNA
ataattcagccagcagaaa

SEQ ID NO: 63244 - RNA, 19 nt, synthetic construct
  misc_feature 1..19: note = siRNA sense sequence
  source 1..19: mol_type = other RNA
ttctgctggctgaattatg

SEQ ID NO: 63245 - RNA, 19 nt, synthetic construct
  misc_feature 1..19: note = siRNA antisense sequence
  source 1..19: mol_type = other RNA
cataattcagccagcagaa

SEQ ID NO: 63246 - RNA, 19 nt, synthetic construct
  misc_feature 1..19: note = siRNA sense sequence
  source 1..19: mol_type = other RNA
tctgctggctgaattatgc

SEQ ID NO: 63247 - RNA, 19 nt, synthetic construct
  misc_feature 1..19: note = siRNA antisense sequence
  source 1..19: mol_type = other RNA
gcataattcagccagcaga

SEQ ID NO: 63248 - RNA, 19 nt, synthetic construct
  misc_feature 1..19: note = siRNA sense sequence
  source 1..19: mol_type = other RNA
ctgctggctgaattatgcc

SEQ ID NO: 63249 - RNA, 19 nt, synthetic construct
  misc_feature 1..19: note = siRNA antisense sequence
  source 1..19: mol_type = other RNA
ggcataattcagccagcag

SEQ ID NO: 63250 - RNA, 19 nt, synthetic construct
  misc_feature 1..19: note = siRNA sense sequence
  source 1..19: mol_type = other RNA
attatgccaattctctgta

SEQ ID NO: 63251 - RNA, 19 nt, synthetic construct
  misc_feature 1..19: note = siRNA antisense sequence
  source 1..19: mol_type = other RNA
tacagagaattggcataat

SEQ ID NO: 63252 - RNA, 19 nt, synthetic construct
  misc_feature 1..19: note = siRNA sense sequence
  source 1..19: mol_type = other RNA
ttatgccaattctctgtac

SEQ ID NO: 63253 - RNA, 19 nt, synthetic construct
  misc_feature 1..19: note = siRNA antisense sequence
  source 1..19: mol_type = other RNA
gtacagagaattggcataa

SEQ ID NO: 63254 - RNA, 19 nt, synthetic construct
  misc_feature 1..19: note = siRNA sense sequence
  source 1..19: mol_type = other RNA
gccaattctctgtacagca

SEQ ID NO: 63255 - RNA, 19 nt, synthetic construct
  misc_feature 1..19: note = siRNA antisense sequence
  source 1..19: mol_type = other RNA
tgctgtacagagaattggc

SEQ ID NO: 63256 - RNA, 19 nt, synthetic construct
  misc_feature 1..19: note = siRNA sense sequence
  source 1..19: mol_type = other RNA
ccaattctctgtacagcac

SEQ ID NO: 63257 - RNA, 19 nt, synthetic construct
  misc_feature 1..19: note = siRNA antisense sequence
  source 1..19: mol_type = other RNA
gtgctgtacagagaattgg

SEQ ID NO: 63258 - RNA, 19 nt, synthetic construct
  misc_feature 1..19: note = siRNA sense sequence
  source 1..19: mol_type = other RNA
ttctctgtacagcaccata

SEQ ID NO: 63259 - RNA, 19 nt, synthetic construct
  misc_feature 1..19: note = siRNA antisense sequence
  source 1..19: mol_type = other RNA
tatggtgctgtacagagaa

SEQ ID NO: 63260 - RNA, 19 nt, synthetic construct
  misc_feature 1..19: note = siRNA sense sequence
  source 1..19: mol_type = other RNA
tctctgtacagcaccataa

SEQ ID NO: 63261 - RNA, 19 nt, synthetic construct
  misc_feature 1..19: note = siRNA antisense sequence
  source 1..19: mol_type = other RNA
ttatggtgctgtacagaga

SEQ ID NO: 63262 - RNA, 19 nt, synthetic construct
  misc_feature 1..19: note = siRNA sense sequence
  source 1..19: mol_type = other RNA
ctctgtacagcaccataaa

SEQ ID NO: 63263 - RNA, 19 nt, synthetic construct
  misc_feature 1..19: note = siRNA antisense sequence
  source 1..19: mol_type = other RNA
tttatggtgctgtacagag

SEQ ID NO: 63264 - RNA, 19 nt, synthetic construct
  misc_feature 1..19: note = siRNA sense sequence
  source 1..19: mol_type = other RNA
tctgtacagcaccataaag

SEQ ID NO: 63265 - RNA, 19 nt, synthetic construct
  misc_feature 1..19: note = siRNA antisense sequence
  source 1..19: mol_type = other RNA
ctttatggtgctgtacaga

SEQ ID NO: 63266 - RNA, 19 nt, synthetic construct
  misc_feature 1..19: note = siRNA sense sequence
  source 1..19: mol_type = other RNA
ctgtacagcaccataaagg

SEQ ID NO: 63267 - RNA, 19 nt, synthetic construct
  misc_feature 1..19: note = siRNA antisense sequence
  source 1..19: mol_type = other RNA
cctttatggtgctgtacag

SEQ ID NO: 63268 - RNA, 19 nt, synthetic construct
  misc_feature 1..19: note = siRNA sense sequence
  source 1..19: mol_type = other RNA
tgtacagcaccataaagga

SEQ ID NO: 63269 - RNA, 19 nt, synthetic construct
  misc_feature 1..19: note = siRNA antisense sequence
  source 1..19: mol_type = other RNA
tcctttatggtgctgtaca

SEQ ID NO: 63270 - RNA, 19 nt, synthetic construct
  misc_feature 1..19: note = siRNA sense sequence
  source 1..19: mol_type = other RNA
cagcaccataaaggatcta

SEQ ID NO: 63271 - RNA, 19 nt, synthetic construct
  misc_feature 1..19: note = siRNA antisense sequence
  source 1..19: mol_type = other RNA
tagatcctttatggtgctg

SEQ ID NO: 63272 - RNA, 19 nt, synthetic construct
  misc_feature 1..19: note = siRNA sense sequence
  source 1..19: mol_type = other RNA
cataaaggatctacatttg

SEQ ID NO: 63273 - RNA, 19 nt, synthetic construct
  misc_feature 1..19: note = siRNA antisense sequence
  source 1..19: mol_type = other RNA
caaatgtagatcctttatg

SEQ ID NO: 63274 - RNA, 19 nt, synthetic construct
  misc_feature 1..19: note = siRNA sense sequence
  source 1..19: mol_type = other RNA
aggatctacatttgtttgg

SEQ ID NO: 63275 - RNA, 19 nt, synthetic construct
  misc_feature 1..19: note = siRNA antisense sequence
  source 1..19: mol_type = other RNA
ccaaacaaatgtagatcct

SEQ ID NO: 63276 - RNA, 19 nt, synthetic construct
  misc_feature 1..19: note = siRNA sense sequence
  source 1..19: mol_type = other RNA
ggatctacatttgtttggg

SEQ ID NO: 63277 - RNA, 19 nt, synthetic construct
  misc_feature 1..19: note = siRNA antisense sequence
  source 1..19: mol_type = other RNA
cccaaacaaatgtagatcc

SEQ ID NO: 63278 - RNA, 19 nt, synthetic construct
  misc_feature 1..19: note = siRNA sense sequence
  source 1..19: mol_type = other RNA
gggattcaaaatattacac

SEQ ID NO: 63279 - RNA, 19 nt, synthetic construct
  misc_feature 1..19: note = siRNA antisense sequence
  source 1..19: mol_type = other RNA
gtgtaatattttgaatccc

SEQ ID NO: 63280 - RNA, 19 nt, synthetic construct
  misc_feature 1..19: note = siRNA sense sequence
  source 1..19: mol_type = other RNA
caatttacttcatcagcta

SEQ ID NO: 63281 - RNA, 19 nt, synthetic construct
  misc_feature 1..19: note = siRNA antisense sequence
  source 1..19: mol_type = other RNA
tagctgatgaagtaaattg

SEQ ID NO: 63282 - RNA, 19 nt, synthetic construct
  misc_feature 1..19: note = siRNA sense sequence
  source 1..19: mol_type = other RNA
aatttacttcatcagctag

SEQ ID NO: 63283 - RNA, 19 nt, synthetic construct
  misc_feature 1..19: note = siRNA antisense sequence
  source 1..19: mol_type = other RNA
ctagctgatgaagtaaatt

SEQ ID NO: 63284 - RNA, 19 nt, synthetic construct
  misc_feature 1..19: note = siRNA sense sequence
  source 1..19: mol_type = other RNA
aagccctacataagacaga

SEQ ID NO: 63285 - RNA, 19 nt, synthetic construct
  misc_feature 1..19: note = siRNA antisense sequence
  source 1..19: mol_type = other RNA
tctgtcttatgtagggctt

SEQ ID NO: 63286 - RNA, 19 nt, synthetic construct
  misc_feature 1..19: note = siRNA sense sequence
  source 1..19: mol_type = other RNA
agccctacataagacagaa

SEQ ID NO: 63287 - RNA, 19 nt, synthetic construct
  misc_feature 1..19: note = siRNA antisense sequence
  source 1..19: mol_type = other RNA
ttctgtcttatgtagggct

SEQ ID NO: 63288 - RNA, 19 nt, synthetic construct
  misc_feature 1..19: note = siRNA sense sequence
  source 1..19: mol_type = other RNA
gccctacataagacagaag

SEQ ID NO: 63289 - RNA, 19 nt, synthetic construct
  misc_feature 1..19: note = siRNA antisense sequence
  source 1..19: mol_type = other RNA
cttctgtcttatgtagggc

SEQ ID NO: 63290 - RNA, 19 nt, synthetic construct
  misc_feature 1..19: note = siRNA sense sequence
  source 1..19: mol_type = other RNA
ccctacataagacagaaga

SEQ ID NO: 63291 - RNA, 19 nt, synthetic construct
  misc_feature 1..19: note = siRNA antisense sequence
  source 1..19: mol_type = other RNA
tcttctgtcttatgtaggg

SEQ ID NO: 63292 - RNA, 19 nt, synthetic construct
  misc_feature 1..19: note = siRNA sense sequence
  source 1..19: mol_type = other RNA
cctacataagacagaagaa

SEQ ID NO: 63293 - RNA, 19 nt, synthetic construct
  misc_feature 1..19: note = siRNA antisense sequence
  source 1..19: mol_type = other RNA
ttcttctgtcttatgtagg

SEQ ID NO: 63294 - RNA, 19 nt, synthetic construct
  misc_feature 1..19: note = siRNA sense sequence
  source 1..19: mol_type = other RNA
ctacataagacagaagaat

SEQ ID NO: 63295 - RNA, 19 nt, synthetic construct
  misc_feature 1..19: note = siRNA antisense sequence
  source 1..19: mol_type = other RNA
attcttctgtcttatgtag

SEQ ID NO: 63296 - RNA, 19 nt, synthetic construct
  misc_feature 1..19: note = siRNA sense sequence
  source 1..19: mol_type = other RNA
acataagacagaagaattc

SEQ ID NO: 63297 - RNA, 19 nt, synthetic construct
  misc_feature 1..19: note = siRNA antisense sequence
  source 1..19: mol_type = other RNA
gaattcttctgtcttatgt

SEQ ID NO: 63298 - RNA, 19 nt, synthetic construct
  misc_feature 1..19: note = siRNA sense sequence
  source 1..19: mol_type = other RNA
ggatcttttccaatgccag

SEQ ID NO: 63299 - RNA, 19 nt, synthetic construct
  misc_feature 1..19: note = siRNA antisense sequence
  source 1..19: mol_type = other RNA
ctggcattggaaaagatcc

SEQ ID NO: 63300 - RNA, 19 nt, synthetic construct
  misc_feature 1..19: note = siRNA sense sequence
  source 1..19: mol_type = other RNA
ccaatgccagagcttaagc

SEQ ID NO: 63301 - RNA, 19 nt, synthetic construct
  misc_feature 1..19: note = siRNA antisense sequence
  source 1..19: mol_type = other RNA
gcttaagctctggcattgg

SEQ ID NO: 63302 - RNA, 19 nt, synthetic construct
  misc_feature 1..19: note = siRNA sense sequence
  source 1..19: mol_type = other RNA
tgccagagcttaagctgtc

SEQ ID NO: 63303 - RNA, 19 nt, synthetic construct
  misc_feature 1..19: note = siRNA antisense sequence
  source 1..19: mol_type = other RNA
gacagcttaagctctggca

SEQ ID NO: 63304 - RNA, 19 nt, synthetic construct
  misc_feature 1..19: note = siRNA sense sequence
  source 1..19: mol_type = other RNA
gccagagcttaagctgtca

SEQ ID NO: 63305 - RNA, 19 nt, synthetic construct
  misc_feature 1..19: note = siRNA antisense sequence
  source 1..19: mol_type = other RNA
tgacagcttaagctctggc

SEQ ID NO: 63306 - RNA, 19 nt, synthetic construct
  misc_feature 1..19: note = siRNA sense sequence
  source 1..19: mol_type = other RNA
ccagagcttaagctgtcaa

SEQ ID NO: 63307 - RNA, 19 nt, synthetic construct
  misc_feature 1..19: note = siRNA antisense sequence
  source 1..19: mol_type = other RNA
ttgacagcttaagctctgg

SEQ ID NO: 63308 - RNA, 19 nt, synthetic construct
  misc_feature 1..19: note = siRNA sense sequence
  source 1..19: mol_type = other RNA
cagagcttaagctgtcaat

SEQ ID NO: 63309 - RNA, 19 nt, synthetic construct
  misc_feature 1..19: note = siRNA antisense sequence
  source 1..19: mol_type = other RNA
attgacagcttaagctctg

SEQ ID NO: 63310 - RNA, 19 nt, synthetic construct
  misc_feature 1..19: note = siRNA sense sequence
  source 1..19: mol_type = other RNA
gagcttaagctgtcaattt

SEQ ID NO: 63311 - RNA, 19 nt, synthetic construct
  misc_feature 1..19: note = siRNA antisense sequence
  source 1..19: mol_type = other RNA
aaattgacagcttaagctc

SEQ ID NO: 63312 - RNA, 19 nt, synthetic construct
  misc_feature 1..19: note = siRNA sense sequence
  source 1..19: mol_type = other RNA
agcttaagctgtcaatttc

SEQ ID NO: 63313 - RNA, 19 nt, synthetic construct
  misc_feature 1..19: note = siRNA antisense sequence
  source 1..19: mol_type = other RNA
gaaattgacagcttaagct

SEQ ID NO: 63314 - RNA, 19 nt, synthetic construct
  misc_feature 1..19: note = siRNA sense sequence
  source 1..19: mol_type = other RNA
taagctgtcaatttcattc

SEQ ID NO: 63315 - RNA, 19 nt, synthetic construct
  misc_feature 1..19: note = siRNA antisense sequence
  source 1..19: mol_type = other RNA
gaatgaaattgacagctta

SEQ ID NO: 63316 - RNA, 19 nt, synthetic construct
  misc_feature 1..19: note = siRNA sense sequence
  source 1..19: mol_type = other RNA
cccaatatgacatcaaatg

SEQ ID NO: 63317 - RNA, 19 nt, synthetic construct
  misc_feature 1..19: note = siRNA antisense sequence
  source 1..19: mol_type = other RNA
catttgatgtcatattggg

SEQ ID NO: 63318 - RNA, 19 nt, synthetic construct
  misc_feature 1..19: note = siRNA sense sequence
  source 1..19: mol_type = other RNA
ccaatatgacatcaaatgg

SEQ ID NO: 63319 - RNA, 19 nt, synthetic construct
  misc_feature 1..19: note = siRNA antisense sequence
  source 1..19: mol_type = other RNA
ccatttgatgtcatattgg

SEQ ID NO: 63320 - RNA, 19 nt, synthetic construct
  misc_feature 1..19: note = siRNA sense sequence
  source 1..19: mol_type = other RNA
caatatgacatcaaatggt

SEQ ID NO: 63321 - RNA, 19 nt, synthetic construct
  misc_feature 1..19: note = siRNA antisense sequence
  source 1..19: mol_type = other RNA
accatttgatgtcatattg

SEQ ID NO: 63322 - RNA, 19 nt, synthetic construct
  misc_feature 1..19: note = siRNA sense sequence
  source 1..19: mol_type = other RNA
tatgacatcaaatggttac

SEQ ID NO: 63323 - RNA, 19 nt, synthetic construct
  misc_feature 1..19: note = siRNA antisense sequence
  source 1..19: mol_type = other RNA
gtaaccatttgatgtcata

SEQ ID NO: 63324 - RNA, 19 nt, synthetic construct
  misc_feature 1..19: note = siRNA sense sequence
  source 1..19: mol_type = other RNA
atgacatcaaatggttacc

SEQ ID NO: 63325 - RNA, 19 nt, synthetic construct
  misc_feature 1..19: note = siRNA antisense sequence
  source 1..19: mol_type = other RNA
ggtaaccatttgatgtcat

SEQ ID NO: 63326 - RNA, 19 nt, synthetic construct
  misc_feature 1..19: note = siRNA sense sequence
  source 1..19: mol_type = other RNA
tgacatcaaatggttaccc

SEQ ID NO: 63327 - RNA, 19 nt, synthetic construct
  misc_feature 1..19: note = siRNA antisense sequence
  source 1..19: mol_type = other RNA
gggtaaccatttgatgtca

SEQ ID NO: 63328 - RNA, 19 nt, synthetic construct
  misc_feature 1..19: note = siRNA sense sequence
  source 1..19: mol_type = other RNA
gacatcaaatggttaccct

SEQ ID NO: 63329 - RNA, 19 nt, synthetic construct
  misc_feature 1..19: note = siRNA antisense sequence
  source 1..19: mol_type = other RNA
agggtaaccatttgatgtc

SEQ ID NO: 63330 - RNA, 19 nt, synthetic construct
  misc_feature 1..19: note = siRNA sense sequence
  source 1..19: mol_type = other RNA
acatcaaatggttaccctg

SEQ ID NO: 63331 - RNA, 19 nt, synthetic construct
  misc_feature 1..19: note = siRNA antisense sequence
  source 1..19: mol_type = other RNA
cagggtaaccatttgatgt

SEQ ID NO: 63332 - RNA, 19 nt, synthetic construct
  misc_feature 1..19: note = siRNA sense sequence
  source 1..19: mol_type = other RNA
catcaaatggttaccctgt

SEQ ID NO: 63333 - RNA, 19 nt, synthetic construct
  misc_feature 1..19: note = siRNA antisense sequence
  source 1..19: mol_type = other RNA
acagggtaaccatttgatg

SEQ ID NO: 63334 - RNA, 19 nt, synthetic construct
  misc_feature 1..19: note = siRNA sense sequence
  source 1..19: mol_type = other RNA
atcaaatggttaccctgtg

SEQ ID NO: 63335 - RNA, 19 nt, synthetic construct
  misc_feature 1..19: note = siRNA antisense sequence
  source 1..19: mol_type = other RNA
cacagggtaaccatttgat

SEQ ID NO: 63336 - RNA, 19 nt, synthetic construct
  misc_feature 1..19: note = siRNA sense sequence
  source 1..19: mol_type = other RNA
tcaaatggttaccctgtgc

SEQ ID NO: 63337 - RNA, 19 nt, synthetic construct
  misc_feature 1..19: note = siRNA antisense sequence
  source 1..19: mol_type = other RNA
gcacagggtaaccatttga

SEQ ID NO: 63338 - RNA, 19 nt, synthetic construct
  misc_feature 1..19: note = siRNA sense sequence
  source 1..19: mol_type = other RNA
caaatggttaccctgtgct

SEQ ID NO: 63339 - RNA, 19 nt, synthetic construct
  misc_feature 1..19: note = siRNA antisense sequence
  source 1..19: mol_type = other RNA
agcacagggtaaccatttg

SEQ ID NO: 63340 - RNA, 19 nt, synthetic construct
  misc_feature 1..19: note = siRNA sense sequence
  source 1..19: mol_type = other RNA
tggttaccctgtgctgtac

SEQ ID NO: 63341 - RNA, 19 nt, synthetic construct
  misc_feature 1..19: note = siRNA antisense sequence
  source 1..19: mol_type = other RNA
gtacagcacagggtaacca

SEQ ID NO: 63342 - RNA, 19 nt, synthetic construct
  misc_feature 1..19: note = siRNA sense sequence
  source 1..19: mol_type = other RNA
ggttaccctgtgctgtacc

SEQ ID NO: 63343 - RNA, 19 nt, synthetic construct
  misc_feature 1..19: note = siRNA antisense sequence
  source 1..19: mol_type = other RNA
ggtacagcacagggtaacc

SEQ ID NO: 63344 - RNA, 19 nt, synthetic construct
  misc_feature 1..19: note = siRNA sense sequence
  source 1..19: mol_type = other RNA
gttaccctgtgctgtaccc

SEQ ID NO: 63345 - RNA, 19 nt, synthetic construct
  misc_feature 1..19: note = siRNA antisense sequence
  source 1..19: mol_type = other RNA
gggtacagcacagggtaac

SEQ ID NO: 63346 - RNA, 19 nt, synthetic construct
  misc_feature 1..19: note = siRNA sense sequence
  source 1..19: mol_type = other RNA
ttaccctgtgctgtaccca

SEQ ID NO: 63347 - RNA, 19 nt, synthetic construct
  misc_feature 1..19: note = siRNA antisense sequence
  source 1..19: mol_type = other RNA
tgggtacagcacagggtaa

SEQ ID NO: 63348 - RNA, 19 nt, synthetic construct
  misc_feature 1..19: note = siRNA sense sequence
  source 1..19: mol_type = other RNA
accctgtgctgtacccaac

SEQ ID NO: 63349 - RNA, 19 nt, synthetic construct
  misc_feature 1..19: note = siRNA antisense sequence
  source 1..19: mol_type = other RNA
gttgggtacagcacagggt

SEQ ID NO: 63350 - RNA, 19 nt, synthetic construct
  misc_feature 1..19: note = siRNA sense sequence
  source 1..19: mol_type = other RNA
ccctgtgctgtacccaact

SEQ ID NO: 63351 - RNA, 19 nt, synthetic construct
  misc_feature 1..19: note = siRNA antisense sequence
  source 1..19: mol_type = other RNA
agttgggtacagcacaggg

SEQ ID NO: 63352 - RNA, 19 nt, synthetic construct
  misc_feature 1..19: note = siRNA sense sequence
  source 1..19: mol_type = other RNA
cctgtgctgtacccaactg

SEQ ID NO: 63353 - RNA, 19 nt, synthetic construct
  misc_feature 1..19: note = siRNA antisense sequence
  source 1..19: mol_type = other RNA
cagttgggtacagcacagg

SEQ ID NO: 63354 - RNA, 19 nt, synthetic construct
  misc_feature 1..19: note = siRNA sense sequence
  source 1..19: mol_type = other RNA
ctgtgctgtacccaactgg

SEQ ID NO: 63355 - RNA, 19 nt, synthetic construct
  misc_feature 1..19: note = siRNA antisense sequence
  source 1..19: mol_type = other RNA
ccagttgggtacagcacag

SEQ ID NO: 63356 - RNA, 19 nt, synthetic construct
  misc_feature 1..19: note = siRNA sense sequence
  source 1..19: mol_type = other RNA
ctgtacccaactggattgt

SEQ ID NO: 63357 - RNA, 19 nt, synthetic construct
  misc_feature 1..19: note = siRNA antisense sequence
  source 1..19: mol_type = other RNA
acaatccagttgggtacag

SEQ ID NO: 63358 - RNA, 19 nt, synthetic construct
  misc_feature 1..19: note = siRNA sense sequence
  source 1..19: mol_type = other RNA
tgtacccaactggattgtc

SEQ ID NO: 63359 - RNA, 19 nt, synthetic construct
  misc_feature 1..19: note = siRNA antisense sequence
  source 1..19: mol_type = other RNA
gacaatccagttgggtaca

SEQ ID NO: 63360 - RNA, 19 nt, synthetic construct
  misc_feature 1..19: note = siRNA sense sequence
  source 1..19: mol_type = other RNA
gtacccaactggattgtca

SEQ ID NO: 63361 - RNA, 19 nt, synthetic construct
  misc_feature 1..19: note = siRNA antisense sequence
  source 1..19: mol_type = other RNA
tgacaatccagttgggtac

SEQ ID NO: 63362 - RNA, 19 nt, synthetic construct
  misc_feature 1..19: note = siRNA sense sequence
  source 1..19: mol_type = other RNA
ccaactggattgtcatctt

SEQ ID NO: 63363 - RNA, 19 nt, synthetic construct
  misc_feature 1..19: note = siRNA antisense sequence
  source 1..19: mol_type = other RNA
aagatgacaatccagttgg

SEQ ID NO: 63364 - RNA, 19 nt, synthetic construct
  misc_feature 1..19: note = siRNA sense sequence
  source 1..19: mol_type = other RNA
caactggattgtcatcttc

SEQ ID NO: 63365 - RNA, 19 nt, synthetic construct
  misc_feature 1..19: note = siRNA antisense sequence
  source 1..19: mol_type = other RNA
gaagatgacaatccagttg

SEQ ID NO: 63366 - RNA, 19 nt, synthetic construct
  misc_feature 1..19: note = siRNA sense sequence
  source 1..19: mol_type = other RNA
aactggattgtcatcttct

SEQ ID NO: 63367 - RNA, 19 nt, synthetic construct
  misc_feature 1..19: note = siRNA antisense sequence
  source 1..19: mol_type = other RNA
agaagatgacaatccagtt

SEQ ID NO: 63368 - RNA, 19 nt, synthetic construct
  misc_feature 1..19: note = siRNA sense sequence
  source 1..19: mol_type = other RNA
actggattgtcatcttctg

SEQ ID NO: 63369 - RNA, 19 nt, synthetic construct
  misc_feature 1..19: note = siRNA antisense sequence
  source 1..19: mol_type = other RNA
cagaagatgacaatccagt

SEQ ID NO: 63370 - RNA, 19 nt, synthetic construct
  misc_feature 1..19: note = siRNA sense sequence
  source 1..19: mol_type = other RNA
ctggattgtcatcttctga

SEQ ID NO: 63371 - RNA, 19 nt, synthetic construct
  misc_feature 1..19: note = siRNA antisense sequence
  source 1..19: mol_type = other RNA
tcagaagatgacaatccag

SEQ ID NO: 63372 - RNA, 19 nt, synthetic construct
  misc_feature 1..19: note = siRNA sense sequence
  source 1..19: mol_type = other RNA
tggattgtcatcttctgag

SEQ ID NO: 63373 - RNA, 19 nt, synthetic construct
  misc_feature 1..19: note = siRNA antisense sequence
  source 1..19: mol_type = other RNA
ctcagaagatgacaatcca

SEQ ID NO: 63374 - RNA, 19 nt, synthetic construct
  misc_feature 1..19: note = siRNA sense sequence
  source 1..19: mol_type = other RNA
ggattgtcatcttctgagg

SEQ ID NO: 63375 - RNA, 19 nt, synthetic construct
  misc_feature 1..19: note = siRNA antisense sequence
  source 1..19: mol_type = other RNA
cctcagaagatgacaatcc

SEQ ID NO: 63376 - RNA, 19 nt, synthetic construct
  misc_feature 1..19: note = siRNA sense sequence
  source 1..19: mol_type = other RNA
gattgtcatcttctgaggt

SEQ ID NO: 63377 - RNA, 19 nt, synthetic construct
  misc_feature 1..19: note = siRNA antisense sequence
  source 1..19: mol_type = other RNA
acctcagaagatgacaatc

SEQ ID NO: 63378 - RNA, 19 nt, synthetic construct
  misc_feature 1..19: note = siRNA sense sequence
  source 1..19: mol_type = other RNA
attgtcatcttctgaggta

SEQ ID NO: 63379 - RNA, 19 nt, synthetic construct
  misc_feature 1..19: note = siRNA antisense sequence
  source 1..19: mol_type = other RNA
tacctcagaagatgacaat

SEQ ID NO: 63380 - RNA, 19 nt, synthetic construct
  misc_feature 1..19: note = siRNA sense sequence
  source 1..19: mol_type = other RNA
ttgtcatcttctgaggtaa

SEQ ID NO: 63381 - RNA, 19 nt, synthetic construct
  misc_feature 1..19: note = siRNA antisense sequence
  source 1..19: mol_type = other RNA
ttacctcagaagatgacaa

SEQ ID NO: 63382 - RNA, 19 nt, synthetic construct
  misc_feature 1..19: note = siRNA sense sequence
  source 1..19: mol_type = other RNA
tgtcatcttctgaggtaag

SEQ ID NO: 63383 - RNA, 19 nt, synthetic construct
  misc_feature 1..19: note = siRNA antisense sequence
  source 1..19: mol_type = other RNA
cttacctcagaagatgaca

SEQ ID NO: 63384 - RNA, 19 nt, synthetic construct
  misc_feature 1..19: note = siRNA sense sequence
  source 1..19: mol_type = other RNA
gtcatcttctgaggtaagt

SEQ ID NO: 63385 - RNA, 19 nt, synthetic construct
  misc_feature 1..19: note = siRNA antisense sequence
  source 1..19: mol_type = other RNA
acttacctcagaagatgac

SEQ ID NO: 63386 - RNA, 19 nt, synthetic construct
  misc_feature 1..19: note = siRNA sense sequence
  source 1..19: mol_type = other RNA
tcatcttctgaggtaagtc

SEQ ID NO: 63387 - RNA, 19 nt, synthetic construct
  misc_feature 1..19: note = siRNA antisense sequence
  source 1..19: mol_type = other RNA
gacttacctcagaagatga

SEQ ID NO: 63388 - RNA, 19 nt, synthetic construct
  misc_feature 1..19: note = siRNA sense sequence
  source 1..19: mol_type = other RNA
catcttctgaggtaagtca

SEQ ID NO: 63389 - RNA, 19 nt, synthetic construct
  misc_feature 1..19: note = siRNA antisense sequence
  source 1..19: mol_type = other RNA
tgacttacctcagaagatg

SEQ ID NO: 63390 - RNA, 19 nt, synthetic construct
  misc_feature 1..19: note = siRNA sense sequence
  source 1..19: mol_type = other RNA
atcttctgaggtaagtcat

SEQ ID NO: 63391 - RNA, 19 nt, synthetic construct
  misc_feature 1..19: note = siRNA antisense sequence
  source 1..19: mol_type = other RNA
atgacttacctcagaagat

SEQ ID NO: 63392 - RNA, 19 nt, synthetic construct
  misc_feature 1..19: note = siRNA sense sequence
  source 1..19: mol_type = other RNA
tcttctgaggtaagtcatg

SEQ ID NO: 63393 - RNA, 19 nt, synthetic construct
  misc_feature 1..19: note = siRNA antisense sequence
  source 1..19: mol_type = other RNA
catgacttacctcagaaga

SEQ ID NO: 63394 - RNA, 19 nt, synthetic construct
  misc_feature 1..19: note = siRNA sense sequence
  source 1..19: mol_type = other RNA
cttctgaggtaagtcatgt

SEQ ID NO: 63395 - RNA, 19 nt, synthetic construct
  misc_feature 1..19: note = siRNA antisense sequence
  source 1..19: mol_type = other RNA
acatgacttacctcagaag

SEQ ID NO: 63396 - RNA, 19 nt, synthetic construct
  misc_feature 1..19: note = siRNA sense sequence
  source 1..19: mol_type = other RNA
ttctgaggtaagtcatgtg

SEQ ID NO: 63397 - RNA, 19 nt, synthetic construct
  misc_feature 1..19: note = siRNA antisense sequence
  source 1..19: mol_type = other RNA
cacatgacttacctcagaa

SEQ ID NO: 63398 - RNA, 19 nt, synthetic construct
  misc_feature 1..19: note = siRNA sense sequence
  source 1..19: mol_type = other RNA
tctgaggtaagtcatgtgt

SEQ ID NO: 63399 - RNA, 19 nt, synthetic construct
  misc_feature 1..19: note = siRNA antisense sequence
  source 1..19: mol_type = other RNA
acacatgacttacctcaga

SEQ ID NO: 63400 - RNA, 19 nt, synthetic construct
  misc_feature 1..19: note = siRNA sense sequence
  source 1..19: mol_type = other RNA
ctgaggtaagtcatgtgtg

SEQ ID NO: 63401 - RNA, 19 nt, synthetic construct
  misc_feature 1..19: note = siRNA antisense sequence
  source 1..19: mol_type = other RNA
cacacatgacttacctcag

SEQ ID NO: 63402 - RNA, 19 nt, synthetic construct
  misc_feature 1..19: note = siRNA sense sequence
  source 1..19: mol_type = other RNA
tgaggtaagtcatgtgtgc

SEQ ID NO: 63403 - RNA, 19 nt, synthetic construct
  misc_feature 1..19: note = siRNA antisense sequence
  source 1..19: mol_type = other RNA
gcacacatgacttacctca

SEQ ID NO: 63404 - RNA, 19 nt, synthetic construct
  misc_feature 1..19: note = siRNA sense sequence
  source 1..19: mol_type = other RNA
gaggtaagtcatgtgtgcc

SEQ ID NO: 63405 - RNA, 19 nt, synthetic construct
  misc_feature 1..19: note = siRNA antisense sequence
  source 1..19: mol_type = other RNA
ggcacacatgacttacctc

SEQ ID NO: 63406 - RNA, 19 nt, synthetic construct
  misc_feature 1..19: note = siRNA sense sequence
  source 1..19: mol_type = other RNA
aggtaagtcatgtgtgcct

SEQ ID NO: 63407 - RNA, 19 nt, synthetic construct
  misc_feature 1..19: note = siRNA antisense sequence
  source 1..19: mol_type = other RNA
aggcacacatgacttacct

SEQ ID NO: 63408 - RNA, 19 nt, synthetic construct
  misc_feature 1..19: note = siRNA sense sequence
  source 1..19: mol_type = other RNA
aagtcatgtgtgccttgga

SEQ ID NO: 63409 - RNA, 19 nt, synthetic construct
  misc_feature 1..19: note = siRNA antisense sequence
  source 1..19: mol_type = other RNA
tccaaggcacacatgactt

SEQ ID NO: 63410 - RNA, 19 nt, synthetic construct
  misc_feature 1..19: note = siRNA sense sequence
  source 1..19: mol_type = other RNA
agtcatgtgtgccttggaa

SEQ ID NO: 63411 - RNA, 19 nt, synthetic construct
  misc_feature 1..19: note = siRNA antisense sequence
  source 1..19: mol_type = other RNA
ttccaaggcacacatgact

SEQ ID NO: 63412 - RNA, 19 nt, synthetic construct
  misc_feature 1..19: note = siRNA sense sequence
  source 1..19: mol_type = other RNA
gtcatgtgtgccttggaat

SEQ ID NO: 63413 - RNA, 19 nt, synthetic construct
  misc_feature 1..19: note = siRNA antisense sequence
  source 1..19: mol_type = other RNA
attccaaggcacacatgac

SEQ ID NO: 63414 - RNA, 19 nt, synthetic construct
  misc_feature 1..19: note = siRNA sense sequence
  source 1..19: mol_type = other RNA
tcatgtgtgccttggaatt

SEQ ID NO: 63415 - RNA, 19 nt, synthetic construct
  misc_feature 1..19: note = siRNA antisense sequence
  source 1..19: mol_type = other RNA
aattccaaggcacacatga

SEQ ID NO: 63416 - RNA, 19 nt, synthetic construct
  misc_feature 1..19: note = siRNA sense sequence
  source 1..19: mol_type = other RNA
catgtgtgccttggaatta

SEQ ID NO: 63417 - RNA, 19 nt, synthetic construct
  misc_feature 1..19: note = siRNA antisense sequence
  source 1..19: mol_type = other RNA
taattccaaggcacacatg

SEQ ID NO: 63418 - RNA, 19 nt, synthetic construct
  misc_feature 1..19: note = siRNA sense sequence
  source 1..19: mol_type = other RNA
atgtgtgccttggaattat

SEQ ID NO: 63419 - RNA, 19 nt, synthetic construct
  misc_feature 1..19: note = siRNA antisense sequence
  source 1..19: mol_type = other RNA
ataattccaaggcacacat

SEQ ID NO: 63420 - RNA, 19 nt, synthetic construct
  misc_feature 1..19: note = siRNA sense sequence
  source 1..19: mol_type = other RNA
tgtgtgccttggaattatg

SEQ ID NO: 63421 - RNA, 19 nt, synthetic construct
  misc_feature 1..19: note = siRNA antisense sequence
  source 1..19: mol_type = other RNA
cataattccaaggcacaca

SEQ ID NO: 63422 - RNA, 19 nt, synthetic construct
  misc_feature 1..19: note = siRNA sense sequence
  source 1..19: mol_type = other RNA
gtgtgccttggaattatgt

SEQ ID NO: 63423 - RNA, 19 nt, synthetic construct
  misc_feature 1..19: note = siRNA antisense sequence
  source 1..19: mol_type = other RNA
acataattccaaggcacac

SEQ ID NO: 63424 - RNA, 19 nt, synthetic construct
  misc_feature 1..19: note = siRNA sense sequence
  source 1..19: mol_type = other RNA
tgtgccttggaattatgtc

SEQ ID NO: 63425 - RNA, 19 nt, synthetic construct
  misc_feature 1..19: note = siRNA antisense sequence
  source 1..19: mol_type = other RNA
gacataattccaaggcaca

SEQ ID NO: 63426 - RNA, 19 nt, synthetic construct
  misc_feature 1..19: note = siRNA sense sequence
  source 1..19: mol_type = other RNA
gtgccttggaattatgtca

SEQ ID NO: 63427 - RNA, 19 nt, synthetic construct
  misc_feature 1..19: note = siRNA antisense sequence
  source 1..19: mol_type = other RNA
tgacataattccaaggcac

SEQ ID NO: 63428 - RNA, 19 nt, synthetic construct
  misc_feature 1..19: note = siRNA sense sequence
  source 1..19: mol_type = other RNA
cttggaattatgtcattac

SEQ ID NO: 63429 - RNA, 19 nt, synthetic construct
  misc_feature 1..19: note = siRNA antisense sequence
  source 1..19: mol_type = other RNA
gtaatgacataattccaag

SEQ ID NO: 63430 - RNA, 19 nt, synthetic construct
  misc_feature 1..19: note = siRNA sense sequence
  source 1..19: mol_type = other RNA
cattactgttatcttttcc

SEQ ID NO: 63431 - RNA, 19 nt, synthetic construct
  misc_feature 1..19: note = siRNA antisense sequence
  source 1..19: mol_type = other RNA
ggaaaagataacagtaatg

SEQ ID NO: 63432 - RNA, 19 nt, synthetic construct
  misc_feature 1..19: note = siRNA sense sequence
  source 1..19: mol_type = other RNA
tttaagccttttgttctgc

SEQ ID NO: 63433 - RNA, 19 nt, synthetic construct
  misc_feature 1..19: note = siRNA antisense sequence
  source 1..19: mol_type = other RNA
gcagaacaaaaggcttaaa

SEQ ID NO: 63434 - RNA, 19 nt, synthetic construct
  misc_feature 1..19: note = siRNA sense sequence
  source 1..19: mol_type = other RNA
ttaagccttttgttctgca

SEQ ID NO: 63435 - RNA, 19 nt, synthetic construct
  misc_feature 1..19: note = siRNA antisense sequence
  source 1..19: mol_type = other RNA
tgcagaacaaaaggcttaa

SEQ ID NO: 63436 - RNA, 19 nt, synthetic construct
  misc_feature 1..19: note = siRNA sense sequence
  source 1..19: mol_type = other RNA
taagccttttgttctgcat

SEQ ID NO: 63437 - RNA, 19 nt, synthetic construct
  misc_feature 1..19: note = siRNA antisense sequence
  source 1..19: mol_type = other RNA
atgcagaacaaaaggctta

SEQ ID NO: 63438 - RNA, 19 nt, synthetic construct
  misc_feature 1..19: note = siRNA sense sequence
  source 1..19: mol_type = other RNA
gccttttgttctgcatgat

SEQ ID NO: 63439 - RNA, 19 nt, synthetic construct
  misc_feature 1..19: note = siRNA antisense sequence
  source 1..19: mol_type = other RNA
atcatgcagaacaaaaggc

SEQ ID NO: 63440 - RNA, 19 nt, synthetic construct
  misc_feature 1..19: note = siRNA sense sequence
  source 1..19: mol_type = other RNA
ccttttgttctgcatgata

SEQ ID NO: 63441 - RNA, 19 nt, synthetic construct
  misc_feature 1..19: note = siRNA antisense sequence
  source 1..19: mol_type = other RNA
tatcatgcagaacaaaagg

SEQ ID NO: 63442 - RNA, 19 nt, synthetic construct
  misc_feature 1..19: note = siRNA sense sequence
  source 1..19: mol_type = other RNA
cttttgttctgcatgatac

SEQ ID NO: 63443 - RNA, 19 nt, synthetic construct
  misc_feature 1..19: note = siRNA antisense sequence
  source 1..19: mol_type = other RNA
gtatcatgcagaacaaaag

SEQ ID NO: 63444 - RNA, 19 nt, synthetic construct
  misc_feature 1..19: note = siRNA sense sequence
  source 1..19: mol_type = other RNA
ttttgttctgcatgatact

SEQ ID NO: 63445 - RNA, 19 nt, synthetic construct
  misc_feature 1..19: note = siRNA antisense sequence
  source 1..19: mol_type = other RNA
agtatcatgcagaacaaaa

SEQ ID NO: 63446 - RNA, 19 nt, synthetic construct
  misc_feature 1..19: note = siRNA sense sequence
  source 1..19: mol_type = other RNA
tttgttctgcatgatactt

SEQ ID NO: 63447 - RNA, 19 nt, synthetic construct
  misc_feature 1..19: note = siRNA antisense sequence
  source 1..19: mol_type = other RNA
aagtatcatgcagaacaaa

SEQ ID NO: 63448 - RNA, 19 nt, synthetic construct
  misc_feature 1..19: note = siRNA sense sequence
  source 1..19: mol_type = other RNA
ttgttctgcatgatacttg

SEQ ID NO: 63449 - RNA, 19 nt, synthetic construct
  misc_feature 1..19: note = siRNA antisense sequence
  source 1..19: mol_type = other RNA
caagtatcatgcagaacaa

SEQ ID NO: 63450 - RNA, 19 nt, synthetic construct
  misc_feature 1..19: note = siRNA sense sequence
  source 1..19: mol_type = other RNA
tgttctgcatgatacttgt

SEQ ID NO: 63451 - RNA, 19 nt, synthetic construct
  misc_feature 1..19: note = siRNA antisense sequence
  source 1..19: mol_type = other RNA
acaagtatcatgcagaaca

SEQ ID NO: 63452 - RNA, 19 nt, synthetic construct
  misc_feature 1..19: note = siRNA sense sequence
  source 1..19: mol_type = other RNA
gttctgcatgatacttgta

SEQ ID NO: 63453 - RNA, 19 nt, synthetic construct
  misc_feature 1..19: note = siRNA antisense sequence
  source 1..19: mol_type = other RNA
tacaagtatcatgcagaac

SEQ ID NO: 63454 - RNA, 19 nt, synthetic construct
  misc_feature 1..19: note = siRNA sense sequence
  source 1..19: mol_type = other RNA
ttctgcatgatacttgtaa

SEQ ID NO: 63455 - RNA, 19 nt, synthetic construct
  misc_feature 1..19: note = siRNA antisense sequence
  source 1..19: mol_type = other RNA
ttacaagtatcatgcagaa

SEQ ID NO: 63456 - RNA, 19 nt, synthetic construct
  misc_feature 1..19: note = siRNA sense sequence
  source 1..19: mol_type = other RNA
tctgcatgatacttgtaat

SEQ ID NO: 63457 - RNA, 19 nt, synthetic construct
  misc_feature 1..19: note = siRNA antisense sequence
  source 1..19: mol_type = other RNA
attacaagtatcatgcaga

SEQ ID NO: 63458 - RNA, 19 nt, synthetic construct
  misc_feature 1..19: note = siRNA sense sequence
  source 1..19: mol_type = other RNA
ctgcatgatacttgtaata

SEQ ID NO: 63459 - RNA, 19 nt, synthetic construct
  misc_feature 1..19: note = siRNA antisense sequence
  source 1..19: mol_type = other RNA
tattacaagtatcatgcag

SEQ ID NO: 63460 - RNA, 19 nt, synthetic construct
  misc_feature 1..19: note = siRNA sense sequence
  source 1..19: mol_type = other RNA
agatgtattattccctaga

SEQ ID NO: 63461 - RNA, 19 nt, synthetic construct
  misc_feature 1..19: note = siRNA antisense sequence
  source 1..19: mol_type = other RNA
tctagggaataatacatct

SEQ ID NO: 63462 - RNA, 19 nt, synthetic construct
  misc_feature 1..19: note = siRNA sense sequence
  source 1..19: mol_type = other RNA
gatgtattattccctagag

SEQ ID NO: 63463 - RNA, 19 nt, synthetic construct
  misc_feature 1..19: note = siRNA antisense sequence
  source 1..19: mol_type = other RNA
ctctagggaataatacatc

SEQ ID NO: 63464 - RNA, 19 nt, synthetic construct
  misc_feature 1..19: note = siRNA sense sequence
  source 1..19: mol_type = other RNA
gtattattccctagagctg

SEQ ID NO: 63465 - RNA, 19 nt, synthetic construct
  misc_feature 1..19: note = siRNA antisense sequence
  source 1..19: mol_type = other RNA
cagctctagggaataatac

SEQ ID NO: 63466 - RNA, 19 nt, synthetic construct
  misc_feature 1..19: note = siRNA sense sequence
  source 1..19: mol_type = other RNA
tattattccctagagctgc

SEQ ID NO: 63467 - RNA, 19 nt, synthetic construct
  misc_feature 1..19: note = siRNA antisense sequence
  source 1..19: mol_type = other RNA
gcagctctagggaataata

SEQ ID NO: 63468 - RNA, 19 nt, synthetic construct
  misc_feature 1..19: note = siRNA sense sequence
  source 1..19: mol_type = other RNA
aggtgttgacagtgttaat

SEQ ID NO: 63469 - RNA, 19 nt, synthetic construct
  misc_feature 1..19: note = siRNA antisense sequence
  source 1..19: mol_type = other RNA
attaacactgtcaacacct

SEQ ID NO: 63470 - RNA, 19 nt, synthetic construct
  misc_feature 1..19: note = siRNA sense sequence
  source 1..19: mol_type = other RNA
ggtgttgacagtgttaatt

SEQ ID NO: 63471 - RNA, 19 nt, synthetic construct
  misc_feature 1..19: note = siRNA antisense sequence
  source 1..19: mol_type = other RNA
aattaacactgtcaacacc

SEQ ID NO: 63472 - RNA, 19 nt, synthetic construct
  misc_feature 1..19: note = siRNA sense sequence
  source 1..19: mol_type = other RNA
gtgttgacagtgttaattc

SEQ ID NO: 63473 - RNA, 19 nt, synthetic construct
  misc_feature 1..19: note = siRNA antisense sequence
  source 1..19: mol_type = other RNA
gaattaacactgtcaacac

SEQ ID NO: 63474 - RNA, 19 nt, synthetic construct
  misc_feature 1..19: note = siRNA sense sequence
  source 1..19: mol_type = other RNA
tgttgacagtgttaattcc

SEQ ID NO: 63475 - RNA, 19 nt, synthetic construct
  misc_feature 1..19: note = siRNA antisense sequence
  source 1..19: mol_type = other RNA
ggaattaacactgtcaaca

SEQ ID NO: 63476 - RNA, 19 nt, synthetic construct
  misc_feature 1..19: note = siRNA sense sequence
  source 1..19: mol_type = other RNA
gttgacagtgttaattccc

SEQ ID NO: 63477 - RNA, 19 nt, synthetic construct
  misc_feature 1..19: note = siRNA antisense sequence
  source 1..19: mol_type = other RNA
gggaattaacactgtcaac

SEQ ID NO: 63478 - RNA, 19 nt, synthetic construct
  misc_feature 1..19: note = siRNA sense sequence
  source 1..19: mol_type = other RNA
ttgacagtgttaattccct

SEQ ID NO: 63479 - RNA, 19 nt, synthetic construct
  misc_feature 1..19: note = siRNA antisense sequence
  source 1..19: mol_type = other RNA
agggaattaacactgtcaa

SEQ ID NO: 63480 - RNA, 19 nt, synthetic construct
  misc_feature 1..19: note = siRNA sense sequence
  source 1..19: mol_type = other RNA
tgacagtgttaattccctc

SEQ ID NO: 63481 - RNA, 19 nt, synthetic construct
  misc_feature 1..19: note = siRNA antisense sequence
  source 1..19: mol_type = other RNA
gagggaattaacactgtca

SEQ ID NO: 63482 - RNA, 19 nt, synthetic construct
  misc_feature 1..19: note = siRNA sense sequence
  source 1..19: mol_type = other RNA
gacagtgttaattccctct

SEQ ID NO: 63483 - RNA, 19 nt, synthetic construct
  misc_feature 1..19: note = siRNA antisense sequence
  source 1..19: mol_type = other RNA
agagggaattaacactgtc

SEQ ID NO: 63484 - RNA, 19 nt, synthetic construct
  misc_feature 1..19: note = siRNA sense sequence
  source 1..19: mol_type = other RNA
acagtgttaattccctctg

SEQ ID NO: 63485 - RNA, 19 nt, synthetic construct
  misc_feature 1..19: note = siRNA antisense sequence
  source 1..19: mol_type = other RNA
cagagggaattaacactgt

SEQ ID NO: 63486 - RNA, 19 nt, synthetic construct
  misc_feature 1..19: note = siRNA sense sequence
  source 1..19: mol_type = other RNA
cagtgttaattccctctgg

SEQ ID NO: 63487 - RNA, 19 nt, synthetic construct
  misc_feature 1..19: note = siRNA antisense sequence
  source 1..19: mol_type = other RNA
ccagagggaattaacactg

SEQ ID NO: 63488 - RNA, 19 nt, synthetic construct
  misc_feature 1..19: note = siRNA sense sequence
  source 1..19: mol_type = other RNA
agtgttaattccctctgga

SEQ ID NO: 63489 - RNA, 19 nt, synthetic construct
  misc_feature 1..19: note = siRNA antisense sequence
  source 1..19: mol_type = other RNA
tccagagggaattaacact

SEQ ID NO: 63490 - RNA, 19 nt, synthetic construct
  misc_feature 1..19: note = siRNA sense sequence
  source 1..19: mol_type = other RNA
gtgttaattccctctggag

SEQ ID NO: 63491 - RNA, 19 nt, synthetic construct
  misc_feature 1..19: note = siRNA antisense sequence
  source 1..19: mol_type = other RNA
ctccagagggaattaacac

SEQ ID NO: 63492 - RNA, 19 nt, synthetic construct
  misc_feature 1..19: note = siRNA sense sequence
  source 1..19: mol_type = other RNA
tgttaattccctctggagg

SEQ ID NO: 63493 - RNA, 19 nt, synthetic construct
  misc_feature 1..19: note = siRNA antisense sequence
  source 1..19: mol_type = other RNA
cctccagagggaattaaca

SEQ ID NO: 63494 - RNA, 19 nt, synthetic construct
  misc_feature 1..19: note = siRNA sense sequence
  source 1..19: mol_type = other RNA
gttaattccctctggaggc

SEQ ID NO: 63495 - RNA, 19 nt, synthetic construct
  misc_feature 1..19: note = siRNA antisense sequence
  source 1..19: mol_type = other RNA
gcctccagagggaattaac

SEQ ID NO: 63496 - RNA, 19 nt, synthetic construct
  misc_feature 1..19: note = siRNA sense sequence
  source 1..19: mol_type = other RNA
ttaattccctctggaggct

SEQ ID NO: 63497 - RNA, 19 nt, synthetic construct
  misc_feature 1..19: note = siRNA antisense sequence
  source 1..19: mol_type = other RNA
agcctccagagggaattaa

SEQ ID NO: 63498 - RNA, 19 nt, synthetic construct
  misc_feature 1..19: note = siRNA sense sequence
  source 1..19: mol_type = other RNA
agactctttctcatgctgt

SEQ ID NO: 63499 - RNA, 19 nt, synthetic construct
  misc_feature 1..19: note = siRNA antisense sequence
  source 1..19: mol_type = other RNA
acagcatgagaaagagtct

SEQ ID NO: 63500 - RNA, 19 nt, synthetic construct
  misc_feature 1..19: note = siRNA sense sequence
  source 1..19: mol_type = other RNA
cttgcggcagcatagctcc

SEQ ID NO: 63501 - RNA, 19 nt, synthetic construct
  misc_feature 1..19: note = siRNA antisense sequence
  source 1..19: mol_type = other RNA
ggagctatgctgccgcaag

SEQ ID NO: 63502 - RNA, 19 nt, synthetic construct
  misc_feature 1..19: note = siRNA sense sequence
  source 1..19: mol_type = other RNA
cctctgtcttcacctggcc

SEQ ID NO: 63503 - RNA, 19 nt, synthetic construct
  misc_feature 1..19: note = siRNA antisense sequence
  source 1..19: mol_type = other RNA
ggccaggtgaagacagagg

SEQ ID NO: 63504 - RNA, 19 nt, synthetic construct
  misc_feature 1..19: note = siRNA sense sequence
  source 1..19: mol_type = other RNA
tctatgtgttctccttctc

SEQ ID NO: 63505 - RNA, 19 nt, synthetic construct
  misc_feature 1..19: note = siRNA antisense sequence
  source 1..19: mol_type = other RNA
gagaaggagaacacataga

SEQ ID NO: 63506 - RNA, 19 nt, synthetic construct
  misc_feature 1..19: note = siRNA sense sequence
  source 1..19: mol_type = other RNA
ctatgtgttctccttctct

SEQ ID NO: 63507 - RNA, 19 nt, synthetic construct
  misc_feature 1..19: note = siRNA antisense sequence
  source 1..19: mol_type = other RNA
agagaaggagaacacatag

SEQ ID NO: 63508 - RNA, 19 nt, synthetic construct
  misc_feature 1..19: note = siRNA sense sequence
  source 1..19: mol_type = other RNA
tatgtgttctccttctctc

SEQ ID NO: 63509 - RNA, 19 nt, synthetic construct
  misc_feature 1..19: note = siRNA antisense sequence
  source 1..19: mol_type = other RNA
gagagaaggagaacacata

SEQ ID NO: 63510 - RNA, 19 nt, synthetic construct
  misc_feature 1..19: note = siRNA sense sequence
  source 1..19: mol_type = other RNA
atgtgttctccttctctct

SEQ ID NO: 63511 - RNA, 19 nt, synthetic construct
  misc_feature 1..19: note = siRNA antisense sequence
  source 1..19: mol_type = other RNA
agagagaaggagaacacat

SEQ ID NO: 63512 - RNA, 19 nt, synthetic construct
  misc_feature 1..19: note = siRNA sense sequence
  source 1..19: mol_type = other RNA
tgtgttctccttctctctt

SEQ ID NO: 63513 - RNA, 19 nt, synthetic construct
  misc_feature 1..19: note = siRNA antisense sequence
  source 1..19: mol_type = other RNA
aagagagaaggagaacaca

SEQ ID NO: 63514 - RNA, 19 nt, synthetic construct
  misc_feature 1..19: note = siRNA sense sequence
  source 1..19: mol_type = other RNA
gtgttctccttctctcttt

SEQ ID NO: 63515 - RNA, 19 nt, synthetic construct
  misc_feature 1..19: note = siRNA antisense sequence
  source 1..19: mol_type = other RNA
aaagagagaaggagaacac

SEQ ID NO: 63516 - RNA, 19 nt, synthetic construct
  misc_feature 1..19: note = siRNA sense sequence
  source 1..19: mol_type = other RNA
tgttctccttctctctttg

SEQ ID NO: 63517 - RNA, 19 nt, synthetic construct
  misc_feature 1..19: note = siRNA antisense sequence
  source 1..19: mol_type = other RNA
caaagagagaaggagaaca

SEQ ID NO: 63518 - RNA, 19 nt, synthetic construct
  misc_feature 1..19: note = siRNA sense sequence
  source 1..19: mol_type = other RNA
gttctccttctctctttgt

SEQ ID NO: 63519 - RNA, 19 nt, synthetic construct
  misc_feature 1..19: note = siRNA antisense sequence
  source 1..19: mol_type = other RNA
acaaagagagaaggagaac

SEQ ID NO: 63520 - RNA, 19 nt, synthetic construct
  misc_feature 1..19: note = siRNA sense sequence
  source 1..19: mol_type = other RNA
tccttctctctttgtgttt

SEQ ID NO: 63521 - RNA, 19 nt, synthetic construct
  misc_feature 1..19: note = siRNA antisense sequence
  source 1..19: mol_type = other RNA
aaacacaaagagagaagga

SEQ ID NO: 63522 - RNA, 19 nt, synthetic construct
  misc_feature 1..19: note = siRNA sense sequence
  source 1..19: mol_type = other RNA
tctctctttgtgtttctgc

SEQ ID NO: 63523 - RNA, 19 nt, synthetic construct
  misc_feature 1..19: note = siRNA antisense sequence
  source 1..19: mol_type = other RNA
gcagaaacacaaagagaga

SEQ ID NO: 63524 - RNA, 19 nt, synthetic construct
  misc_feature 1..19: note = siRNA sense sequence
  source 1..19: mol_type = other RNA
ctctctttgtgtttctgca

SEQ ID NO: 63525 - RNA, 19 nt, synthetic construct
  misc_feature 1..19: note = siRNA antisense sequence
  source 1..19: mol_type = other RNA
tgcagaaacacaaagagag

SEQ ID NO: 63526 - RNA, 19 nt, synthetic construct
  misc_feature 1..19: note = siRNA sense sequence
  source 1..19: mol_type = other RNA
tgtttctgcacactcacca

SEQ ID NO: 63527 - RNA, 19 nt, synthetic construct
  misc_feature 1..19: note = siRNA antisense sequence
  source 1..19: mol_type = other RNA
tggtgagtgtgcagaaaca

SEQ ID NO: 63528 - RNA, 19 nt, synthetic construct
  misc_feature 1..19: note = siRNA sense sequence
  source 1..19: mol_type = other RNA
gtttctgcacactcaccat

SEQ ID NO: 63529 - RNA, 19 nt, synthetic construct
  misc_feature 1..19: note = siRNA antisense sequence
  source 1..19: mol_type = other RNA
atggtgagtgtgcagaaac

SEQ ID NO: 63530 - RNA, 19 nt, synthetic construct
  misc_feature 1..19: note = siRNA sense sequence
  source 1..19: mol_type = other RNA
tttctgcacactcaccatt

SEQ ID NO: 63531 - RNA, 19 nt, synthetic construct
  misc_feature 1..19: note = siRNA antisense sequence
  source 1..19: mol_type = other RNA
aatggtgagtgtgcagaaa

SEQ ID NO: 63532 - RNA, 19 nt, synthetic construct
  misc_feature 1..19: note = siRNA sense sequence
  source 1..19: mol_type = other RNA
ttctgcacactcaccatta

SEQ ID NO: 63533 - RNA, 19 nt, synthetic construct
  misc_feature 1..19: note = siRNA antisense sequence
  source 1..19: mol_type = other RNA
taatggtgagtgtgcagaa

SEQ ID NO: 63534 - RNA, 19 nt, synthetic construct
  misc_feature 1..19: note = siRNA sense sequence
  source 1..19: mol_type = other RNA
tctgcacactcaccattag

SEQ ID NO: 63535 - RNA, 19 nt, synthetic construct
  misc_feature 1..19: note = siRNA antisense sequence
  source 1..19: mol_type = other RNA
ctaatggtgagtgtgcaga

SEQ ID NO: 63536 - RNA, 19 nt, synthetic construct
  misc_feature 1..19: note = siRNA sense sequence
  source 1..19: mol_type = other RNA
ctgcacactcaccattaga

SEQ ID NO: 63537 - RNA, 19 nt, synthetic construct
  misc_feature 1..19: note = siRNA antisense sequence
  source 1..19: mol_type = other RNA
tctaatggtgagtgtgcag

SEQ ID NO: 63538 - RNA, 19 nt, synthetic construct
  misc_feature 1..19: note = siRNA sense sequence
  source 1..19: mol_type = other RNA
tgcacactcaccattagat

SEQ ID NO: 63539 - RNA, 19 nt, synthetic construct
  misc_feature 1..19: note = siRNA antisense sequence
  source 1..19: mol_type = other RNA
atctaatggtgagtgtgca

SEQ ID NO: 63540 - RNA, 19 nt, synthetic construct
  misc_feature 1..19: note = siRNA sense sequence
  source 1..19: mol_type = other RNA
gcacactcaccattagatt

SEQ ID NO: 63541 - RNA, 19 nt, synthetic construct
  misc_feature 1..19: note = siRNA antisense sequence
  source 1..19: mol_type = other RNA
aatctaatggtgagtgtgc

SEQ ID NO: 63542 - RNA, 19 nt, synthetic construct
  misc_feature 1..19: note = siRNA sense sequence
  source 1..19: mol_type = other RNA
cacactcaccattagattt

SEQ ID NO: 63543 - RNA, 19 nt, synthetic construct
  misc_feature 1..19: note = siRNA antisense sequence
  source 1..19: mol_type = other RNA
aaatctaatggtgagtgtg

SEQ ID NO: 63544 - RNA, 19 nt, synthetic construct
  misc_feature 1..19: note = siRNA sense sequence
  source 1..19: mol_type = other RNA
acactcaccattagattta

SEQ ID NO: 63545 - RNA, 19 nt, synthetic construct
  misc_feature 1..19: note = siRNA antisense sequence
  source 1..19: mol_type = other RNA
taaatctaatggtgagtgt

SEQ ID NO: 63546 - RNA, 19 nt, synthetic construct
  misc_feature 1..19: note = siRNA sense sequence
  source 1..19: mol_type = other RNA
cactcaccattagatttag

SEQ ID NO: 63547 - RNA, 19 nt, synthetic construct
  misc_feature 1..19: note = siRNA antisense sequence
  source 1..19: mol_type = other RNA
ctaaatctaatggtgagtg

SEQ ID NO: 63548 - RNA, 19 nt, synthetic construct
  misc_feature 1..19: note = siRNA sense sequence
  source 1..19: mol_type = other RNA
actcaccattagatttagg

SEQ ID NO: 63549 - RNA, 19 nt, synthetic construct
  misc_feature 1..19: note = siRNA antisense sequence
  source 1..19: mol_type = other RNA
cctaaatctaatggtgagt

SEQ ID NO: 63550 - RNA, 19 nt, synthetic construct
  misc_feature 1..19: note = siRNA sense sequence
  source 1..19: mol_type = other RNA
ctcaccattagatttaggg

SEQ ID NO: 63551 - RNA, 19 nt, synthetic construct
  misc_feature 1..19: note = siRNA antisense sequence
  source 1..19: mol_type = other RNA
ccctaaatctaatggtgag

SEQ ID NO: 63552 - RNA, 19 nt, synthetic construct
  misc_feature 1..19: note = siRNA sense sequence
  source 1..19: mol_type = other RNA
tcaccattagatttagggt

SEQ ID NO: 63553 - RNA, 19 nt, synthetic construct
  misc_feature 1..19: note = siRNA antisense sequence
  source 1..19: mol_type = other RNA
accctaaatctaatggtga

SEQ ID NO: 63554 - RNA, 19 nt, synthetic construct
  misc_feature 1..19: note = siRNA sense sequence
  source 1..19: mol_type = other RNA
caccctaaatccagagtga

SEQ ID NO: 63555 - RNA, 19 nt, synthetic construct
  misc_feature 1..19: note = siRNA antisense sequence
  source 1..19: mol_type = other RNA
tcactctggatttagggtg

SEQ ID NO: 63556 - RNA, 19 nt, synthetic construct
  misc_feature 1..19: note = siRNA sense sequence
  source 1..19: mol_type = other RNA
taaatccagagtgatctca

SEQ ID NO: 63557 - RNA, 19 nt, synthetic construct
  misc_feature 1..19: note = siRNA antisense sequence
  source 1..19: mol_type = other RNA
tgagatcactctggattta

SEQ ID NO: 63558 - RNA, 19 nt, synthetic construct
  misc_feature 1..19: note = siRNA sense sequence
  source 1..19: mol_type = other RNA
aaatccagagtgatctcat

SEQ ID NO: 63559 - RNA, 19 nt, synthetic construct
  misc_feature 1..19: note = siRNA antisense sequence
  source 1..19: mol_type = other RNA
atgagatcactctggattt

SEQ ID NO: 63560 - RNA, 19 nt, synthetic construct
  misc_feature 1..19: note = siRNA sense sequence
  source 1..19: mol_type = other RNA
aatccagagtgatctcatc

SEQ ID NO: 63561 - RNA, 19 nt, synthetic construct
  misc_feature 1..19: note = siRNA antisense sequence
  source 1..19: mol_type = other RNA
gatgagatcactctggatt

SEQ ID NO: 63562 - RNA, 19 nt, synthetic construct
  misc_feature 1..19: note = siRNA sense sequence
  source 1..19: mol_type = other RNA
atccagagtgatctcatct

SEQ ID NO: 63563 - RNA, 19 nt, synthetic construct
  misc_feature 1..19: note = siRNA antisense sequence
  source 1..19: mol_type = other RNA
agatgagatcactctggat

SEQ ID NO: 63564 - RNA, 19 nt, synthetic construct
  misc_feature 1..19: note = siRNA sense sequence
  source 1..19: mol_type = other RNA
catatttactagttctagg

SEQ ID NO: 63565 - RNA, 19 nt, synthetic construct
  misc_feature 1..19: note = siRNA antisense sequence
  source 1..19: mol_type = other RNA
cctagaactagtaaatatg

SEQ ID NO: 63566 - RNA, 19 nt, synthetic construct
  misc_feature 1..19: note = siRNA sense sequence
  source 1..19: mol_type = other RNA
atatttactagttctaggg

SEQ ID NO: 63567 - RNA, 19 nt, synthetic construct
  misc_feature 1..19: note = siRNA antisense sequence
  source 1..19: mol_type = other RNA
ccctagaactagtaaatat

SEQ ID NO: 63568 - RNA, 19 nt, synthetic construct
  misc_feature 1..19: note = siRNA sense sequence
  source 1..19: mol_type = other RNA
tatttactagttctaggga

SEQ ID NO: 63569 - RNA, 19 nt, synthetic construct
  misc_feature 1..19: note = siRNA antisense sequence
  source 1..19: mol_type = other RNA
tccctagaactagtaaata

SEQ ID NO: 63570 - RNA, 19 nt, synthetic construct
  misc_feature 1..19: note = siRNA sense sequence
  source 1..19: mol_type = other RNA
gggaccactattcaatcca

SEQ ID NO: 63571 - RNA, 19 nt, synthetic construct
  misc_feature 1..19: note = siRNA antisense sequence
  source 1..19: mol_type = other RNA
tggattgaatagtggtccc

SEQ ID NO: 63572 - RNA, 19 nt, synthetic construct
  misc_feature 1..19: note = siRNA sense sequence
  source 1..19: mol_type = other RNA
ggaccactattcaatccac

SEQ ID NO: 63573 - RNA, 19 nt, synthetic construct
  misc_feature 1..19: note = siRNA antisense sequence
  source 1..19: mol_type = other RNA
gtggattgaatagtggtcc

SEQ ID NO: 63574 - RNA, 19 nt, synthetic construct
  misc_feature 1..19: note = siRNA sense sequence
  source 1..19: mol_type = other RNA
actattcaatccactagag

SEQ ID NO: 63575 - RNA, 19 nt, synthetic construct
  misc_feature 1..19: note = siRNA antisense sequence
  source 1..19: mol_type = other RNA
ctctagtggattgaatagt

SEQ ID NO: 63576 - RNA, 19 nt, synthetic construct
  misc_feature 1..19: note = siRNA sense sequence
  source 1..19: mol_type = other RNA
tattcaatccactagagta

SEQ ID NO: 63577 - RNA, 19 nt, synthetic construct
  misc_feature 1..19: note = siRNA antisense sequence
  source 1..19: mol_type = other RNA
tactctagtggattgaata

SEQ ID NO: 63578 - RNA, 19 nt, synthetic construct
  misc_feature 1..19: note = siRNA sense sequence
  source 1..19: mol_type = other RNA
attcaatccactagagtag

SEQ ID NO: 63579 - RNA, 19 nt, synthetic construct
  misc_feature 1..19: note = siRNA antisense sequence
  source 1..19: mol_type = other RNA
ctactctagtggattgaat

SEQ ID NO: 63580 - RNA, 19 nt, synthetic construct
  misc_feature 1..19: note = siRNA sense sequence
  source 1..19: mol_type = other RNA
ttcaatccactagagtaga

SEQ ID NO: 63581 - RNA, 19 nt, synthetic construct
  misc_feature 1..19: note = siRNA antisense sequence
  source 1..19: mol_type = other RNA
tctactctagtggattgaa

SEQ ID NO: 63582 - RNA, 19 nt, synthetic construct
  misc_feature 1..19: note = siRNA sense sequence
  source 1..19: mol_type = other RNA
tcaatccactagagtagat

SEQ ID NO: 63583 - RNA, 19 nt, synthetic construct
  misc_feature 1..19: note = siRNA antisense sequence
  source 1..19: mol_type = other RNA
atctactctagtggattga

SEQ ID NO: 63584 - RNA, 19 nt, synthetic construct
  misc_feature 1..19: note = siRNA sense sequence
  source 1..19: mol_type = other RNA
atccactagagtagatttt

SEQ ID NO: 63585 - RNA, 19 nt, synthetic construct
  misc_feature 1..19: note = siRNA antisense sequence
  source 1..19: mol_type = other RNA
aaaatctactctagtggat

SEQ ID NO: 63586 - RNA, 19 nt, synthetic construct
  misc_feature 1..19: note = siRNA sense sequence
  source 1..19: mol_type = other RNA
tccactagagtagatttta

SEQ ID NO: 63587 - RNA, 19 nt, synthetic construct
  misc_feature 1..19: note = siRNA antisense sequence
  source 1..19: mol_type = other RNA
taaaatctactctagtgga

SEQ ID NO: 63588 - RNA, 19 nt, synthetic construct
  misc_feature 1..19: note = siRNA sense sequence
  source 1..19: mol_type = other RNA
ccactagagtagattttaa

SEQ ID NO: 63589 - RNA, 19 nt, synthetic construct
  misc_feature 1..19: note = siRNA antisense sequence
  source 1..19: mol_type = other RNA
ttaaaatctactctagtgg

SEQ ID NO: 63590 - RNA, 19 nt, synthetic construct
  misc_feature 1..19: note = siRNA sense sequence
  source 1..19: mol_type = other RNA
ttcttacacttttccttga

SEQ ID NO: 63591 - RNA, 19 nt, synthetic construct
  misc_feature 1..19: note = siRNA antisense sequence
  source 1..19: mol_type = other RNA
tcaaggaaaagtgtaagaa

SEQ ID NO: 63592 - RNA, 19 nt, synthetic construct
  misc_feature 1..19: note = siRNA sense sequence
  source 1..19: mol_type = other RNA
tcttacacttttccttgat

SEQ ID NO: 63593 - RNA, 19 nt, synthetic construct
  misc_feature 1..19: note = siRNA antisense sequence
  source 1..19: mol_type = other RNA
atcaaggaaaagtgtaaga

SEQ ID NO: 63594 - RNA, 19 nt, synthetic construct
  misc_feature 1..19: note = siRNA sense sequence
  source 1..19: mol_type = other RNA
cacttttccttgatttgtg

SEQ ID NO: 63595 - RNA, 19 nt, synthetic construct
  misc_feature 1..19: note = siRNA antisense sequence
  source 1..19: mol_type = other RNA
cacaaatcaaggaaaagtg

SEQ ID NO: 63596 - RNA, 19 nt, synthetic construct
  misc_feature 1..19: note = siRNA sense sequence
  source 1..19: mol_type = other RNA
ttccttgatttgtggtaat

SEQ ID NO: 63597 - RNA, 19 nt, synthetic construct
  misc_feature 1..19: note = siRNA antisense sequence
  source 1..19: mol_type = other RNA
attaccacaaatcaaggaa

SEQ ID NO: 63598 - RNA, 19 nt, synthetic construct
  misc_feature 1..19: note = siRNA sense sequence
  source 1..19: mol_type = other RNA
aactctataaagtgacttc

SEQ ID NO: 63599 - RNA, 19 nt, synthetic construct
  misc_feature 1..19: note = siRNA antisense sequence
  source 1..19: mol_type = other RNA
gaagtcactttatagagtt

SEQ ID NO: 63600 - RNA, 19 nt, synthetic construct
  misc_feature 1..19: note = siRNA sense sequence
  source 1..19: mol_type = other RNA
actctataaagtgacttct

SEQ ID NO: 63601 - RNA, 19 nt, synthetic construct
  misc_feature 1..19: note = siRNA antisense sequence
  source 1..19: mol_type = other RNA
agaagtcactttatagagt

SEQ ID NO: 63602 - RNA, 19 nt, synthetic construct
  misc_feature 1..19: note = siRNA sense sequence
  source 1..19: mol_type = other RNA
ctctataaagtgacttctt

SEQ ID NO: 63603 - RNA, 19 nt, synthetic construct
  misc_feature 1..19: note = siRNA antisense sequence
  source 1..19: mol_type = other RNA
aagaagtcactttatagag

SEQ ID NO: 63604 - RNA, 19 nt, synthetic construct
  misc_feature 1..19: note = siRNA sense sequence
  source 1..19: mol_type = other RNA
agtgacttcttaattgtac

SEQ ID NO: 63605 - RNA, 19 nt, synthetic construct
  misc_feature 1..19: note = siRNA antisense sequence
  source 1..19: mol_type = other RNA
gtacaattaagaagtcact

SEQ ID NO: 63606 - RNA, 19 nt, synthetic construct
  misc_feature 1..19: note = siRNA sense sequence
  source 1..19: mol_type = other RNA
gtgacttcttaattgtacc

SEQ ID NO: 63607 - RNA, 19 nt, synthetic construct
  misc_feature 1..19: note = siRNA antisense sequence
  source 1..19: mol_type = other RNA
ggtacaattaagaagtcac

SEQ ID NO: 63608 - RNA, 19 nt, synthetic construct
  misc_feature 1..19: note = siRNA sense sequence
  source 1..19: mol_type = other RNA
tgacttcttaattgtacct

SEQ ID NO: 63609 - RNA, 19 nt, synthetic construct
  misc_feature 1..19: note = siRNA antisense sequence
  source 1..19: mol_type = other RNA
aggtacaattaagaagtca

SEQ ID NO: 63610 - RNA, 19 nt, synthetic construct
  misc_feature 1..19: note = siRNA sense sequence
  source 1..19: mol_type = other RNA
gacttcttaattgtaccta

SEQ ID NO: 63611 - RNA, 19 nt, synthetic construct
  misc_feature 1..19: note = siRNA antisense sequence
  source 1..19: mol_type = other RNA
taggtacaattaagaagtc

SEQ ID NO: 63612 - RNA, 19 nt, synthetic construct
  misc_feature 1..19: note = siRNA sense sequence
  source 1..19: mol_type = other RNA
ttaattgtacctaagcatg

SEQ ID NO: 63613 - RNA, 19 nt, synthetic construct
  misc_feature 1..19: note = siRNA antisense sequence
  source 1..19: mol_type = other RNA
catgcttaggtacaattaa

SEQ ID NO: 63614 - RNA, 19 nt, synthetic construct
  misc_feature 1..19: note = siRNA sense sequence
  source 1..19: mol_type = other RNA
taattgtacctaagcatgc

SEQ ID NO: 63615 - RNA, 19 nt, synthetic construct
  misc_feature 1..19: note = siRNA antisense sequence
  source 1..19: mol_type = other RNA
gcatgcttaggtacaatta

SEQ ID NO: 63616 - RNA, 19 nt, synthetic construct
  misc_feature 1..19: note = siRNA sense sequence
  source 1..19: mol_type = other RNA
aattgtacctaagcatgca

SEQ ID NO: 63617 - RNA, 19 nt, synthetic construct
  misc_feature 1..19: note = siRNA antisense sequence
  source 1..19: mol_type = other RNA
tgcatgcttaggtacaatt

SEQ ID NO: 63618 - RNA, 19 nt, synthetic construct
  misc_feature 1..19: note = siRNA sense sequence
  source 1..19: mol_type = other RNA
attgtatttactcacatcc

SEQ ID NO: 63619 - RNA, 19 nt, synthetic construct
  misc_feature 1..19: note = siRNA antisense sequence
  source 1..19: mol_type = other RNA
ggatgtgagtaaatacaat

SEQ ID NO: 63620 - RNA, 19 nt, synthetic construct
  misc_feature 1..19: note = siRNA sense sequence
  source 1..19: mol_type = other RNA
ttgtatttactcacatccc

SEQ ID NO: 63621 - RNA, 19 nt, synthetic construct
  misc_feature 1..19: note = siRNA antisense sequence
  source 1..19: mol_type = other RNA
gggatgtgagtaaatacaa

SEQ ID NO: 63622 - RNA, 19 nt, synthetic construct
  misc_feature 1..19: note = siRNA sense sequence
  source 1..19: mol_type = other RNA
tttactcacatcccaaata

SEQ ID NO: 63623 - RNA, 19 nt, synthetic construct
  misc_feature 1..19: note = siRNA antisense sequence
  source 1..19: mol_type = other RNA
tatttgggatgtgagtaaa

SEQ ID NO: 63624 - RNA, 19 nt, synthetic construct
  misc_feature 1..19: note = siRNA sense sequence
  source 1..19: mol_type = other RNA
ttactcacatcccaaataa

SEQ ID NO: 63625 - RNA, 19 nt, synthetic construct
  misc_feature 1..19: note = siRNA antisense sequence
  source 1..19: mol_type = other RNA
ttatttgggatgtgagtaa

SEQ ID NO: 63626 - RNA, 19 nt, synthetic construct
  misc_feature 1..19: note = siRNA sense sequence
  source 1..19: mol_type = other RNA
tcacatcccaaataatagc

SEQ ID NO: 63627 - RNA, 19 nt, synthetic construct
  misc_feature 1..19: note = siRNA antisense sequence
  source 1..19: mol_type = other RNA
gctattatttgggatgtga

SEQ ID NO: 63628 - RNA, 19 nt, synthetic construct
  misc_feature 1..19: note = siRNA sense sequence
  source 1..19: mol_type = other RNA
cacatcccaaataatagca

SEQ ID NO: 63629 - RNA, 19 nt, synthetic construct
  misc_feature 1..19: note = siRNA antisense sequence
  source 1..19: mol_type = other RNA
tgctattatttgggatgtg

SEQ ID NO: 63630 - RNA, 19 nt, synthetic construct
  misc_feature 1..19: note = siRNA sense sequence
  source 1..19: mol_type = other RNA
acatcccaaataatagcaa

SEQ ID NO: 63631 - RNA, 19 nt, synthetic construct
  misc_feature 1..19: note = siRNA antisense sequence
  source 1..19: mol_type = other RNA
ttgctattatttgggatgt

SEQ ID NO: 63632 - RNA, 19 nt, synthetic construct
  misc_feature 1..19: note = siRNA sense sequence
  source 1..19: mol_type = other RNA
tgatggttcattatggttt

SEQ ID NO: 63633 - RNA, 19 nt, synthetic construct
  misc_feature 1..19: note = siRNA antisense sequence
  source 1..19: mol_type = other RNA
aaaccataatgaaccatca

SEQ ID NO: 63634 - RNA, 19 nt, synthetic construct
  misc_feature 1..19: note = siRNA sense sequence
  source 1..19: mol_type = other RNA
gatggttcattatggttta

SEQ ID NO: 63635 - RNA, 19 nt, synthetic construct
  misc_feature 1..19: note = siRNA antisense sequence
  source 1..19: mol_type = other RNA
taaaccataatgaaccatc

SEQ ID NO: 63636 - RNA, 19 nt, synthetic construct
  misc_feature 1..19: note = siRNA sense sequence
  source 1..19: mol_type = other RNA
atggttcattatggtttag

SEQ ID NO: 63637 - RNA, 19 nt, synthetic construct
  misc_feature 1..19: note = siRNA antisense sequence
  source 1..19: mol_type = other RNA
ctaaaccataatgaaccat

SEQ ID NO: 63638 - RNA, 19 nt, synthetic construct
  misc_feature 1..19: note = siRNA sense sequence
  source 1..19: mol_type = other RNA
tggttcattatggtttagt

SEQ ID NO: 63639 - RNA, 19 nt, synthetic construct
  misc_feature 1..19: note = siRNA antisense sequence
  source 1..19: mol_type = other RNA
actaaaccataatgaacca

SEQ ID NO: 63640 - RNA, 19 nt, synthetic construct
  misc_feature 1..19: note = siRNA sense sequence
  source 1..19: mol_type = other RNA
ggttcattatggtttagtg

SEQ ID NO: 63641 - RNA, 19 nt, synthetic construct
  misc_feature 1..19: note = siRNA antisense sequence
  source 1..19: mol_type = other RNA
cactaaaccataatgaacc

SEQ ID NO: 63642 - RNA, 19 nt, synthetic construct
  misc_feature 1..19: note = siRNA sense sequence
  source 1..19: mol_type = other RNA
gttcattatggtttagtgc

SEQ ID NO: 63643 - RNA, 19 nt, synthetic construct
  misc_feature 1..19: note = siRNA antisense sequence
  source 1..19: mol_type = other RNA
gcactaaaccataatgaac

SEQ ID NO: 63644 - RNA, 19 nt, synthetic construct
  misc_feature 1..19: note = siRNA sense sequence
  source 1..19: mol_type = other RNA
ttcattatggtttagtgcc

SEQ ID NO: 63645 - RNA, 19 nt, synthetic construct
  misc_feature 1..19: note = siRNA antisense sequence
  source 1..19: mol_type = other RNA
ggcactaaaccataatgaa

SEQ ID NO: 63646 - RNA, 19 nt, synthetic construct
  misc_feature 1..19: note = siRNA sense sequence
  source 1..19: mol_type = other RNA
tcattatggtttagtgcct

SEQ ID NO: 63647 - RNA, 19 nt, synthetic construct
  misc_feature 1..19: note = siRNA antisense sequence
  source 1..19: mol_type = other RNA
aggcactaaaccataatga

SEQ ID NO: 63648 - RNA, 19 nt, synthetic construct
  misc_feature 1..19: note = siRNA sense sequence
  source 1..19: mol_type = other RNA
cattatggtttagtgccta

SEQ ID NO: 63649 - RNA, 19 nt, synthetic construct
  misc_feature 1..19: note = siRNA antisense sequence
  source 1..19: mol_type = other RNA
taggcactaaaccataatg

SEQ ID NO: 63650 - RNA, 19 nt, synthetic construct
  misc_feature 1..19: note = siRNA sense sequence
  source 1..19: mol_type = other RNA
gtattgaattaatgtgtgc

SEQ ID NO: 63651 - RNA, 19 nt, synthetic construct
  misc_feature 1..19: note = siRNA antisense sequence
  source 1..19: mol_type = other RNA
gcacacattaattcaatac

SEQ ID NO: 63652 - RNA, 19 nt, synthetic construct
  misc_feature 1..19: note = siRNA sense sequence
  source 1..19: mol_type = other RNA
gaattaatgtgtgcatgat

SEQ ID NO: 63653 - RNA, 19 nt, synthetic construct
  misc_feature 1..19: note = siRNA antisense sequence
  source 1..19: mol_type = other RNA
atcatgcacacattaattc

SEQ ID NO: 63654 - RNA, 19 nt, synthetic construct
  misc_feature 1..19: note = siRNA sense sequence
  source 1..19: mol_type = other RNA
ttaatgtgtgcatgatgtc

SEQ ID NO: 63655 - RNA, 19 nt, synthetic construct
  misc_feature 1..19: note = siRNA antisense sequence
  source 1..19: mol_type = other RNA
gacatcatgcacacattaa

SEQ ID NO: 63656 - RNA, 19 nt, synthetic construct
  misc_feature 1..19: note = siRNA sense sequence
  source 1..19: mol_type = other RNA
taatgtgtgcatgatgtca

SEQ ID NO: 63657 - RNA, 19 nt, synthetic construct
  misc_feature 1..19: note = siRNA antisense sequence
  source 1..19: mol_type = other RNA
tgacatcatgcacacatta

SEQ ID NO: 63658 - RNA, 19 nt, synthetic construct
  misc_feature 1..19: note = siRNA sense sequence
  source 1..19: mol_type = other RNA
aatgtgtgcatgatgtcag

SEQ ID NO: 63659 - RNA, 19 nt, synthetic construct
  misc_feature 1..19: note = siRNA antisense sequence
  source 1..19: mol_type = other RNA
ctgacatcatgcacacatt

SEQ ID NO: 63660 - RNA, 19 nt, synthetic construct
  misc_feature 1..19: note = siRNA sense sequence
  source 1..19: mol_type = other RNA
atgtgtgcatgatgtcaga

SEQ ID NO: 63661 - RNA, 19 nt, synthetic construct
  misc_feature 1..19: note = siRNA antisense sequence
  source 1..19: mol_type = other RNA
tctgacatcatgcacacat

SEQ ID NO: 63662 - RNA, 19 nt, synthetic construct
  misc_feature 1..19: note = siRNA sense sequence
  source 1..19: mol_type = other RNA
tgtgtgcatgatgtcagaa

SEQ ID NO: 63663 - RNA, 19 nt, synthetic construct
  misc_feature 1..19: note = siRNA antisense sequence
  source 1..19: mol_type = other RNA
ttctgacatcatgcacaca

SEQ ID NO: 63664 - RNA, 19 nt, synthetic construct
  misc_feature 1..19: note = siRNA sense sequence
  source 1..19: mol_type = other RNA
gtgtgcatgatgtcagaat

SEQ ID NO: 63665 - RNA, 19 nt, synthetic construct
  misc_feature 1..19: note = siRNA antisense sequence
  source 1..19: mol_type = other RNA
attctgacatcatgcacac

SEQ ID NO: 63666 - RNA, 19 nt, synthetic construct
  misc_feature 1..19: note = siRNA sense sequence
  source 1..19: mol_type = other RNA
tgtgcatgatgtcagaatt

SEQ ID NO: 63667 - RNA, 19 nt, synthetic construct
  misc_feature 1..19: note = siRNA antisense sequence
  source 1..19: mol_type = other RNA
aattctgacatcatgcaca

SEQ ID NO: 63668 - RNA, 19 nt, synthetic construct
  misc_feature 1..19: note = siRNA sense sequence
  source 1..19: mol_type = other RNA
catgatgtcagaatttgga

SEQ ID NO: 63669 - RNA, 19 nt, synthetic construct
  misc_feature 1..19: note = siRNA antisense sequence
  source 1..19: mol_type = other RNA
tccaaattctgacatcatg

SEQ ID NO: 63670 - RNA, 19 nt, synthetic construct
  misc_feature 1..19: note = siRNA sense sequence
  source 1..19: mol_type = other RNA
atgatgtcagaatttggaa

SEQ ID NO: 63671 - RNA, 19 nt, synthetic construct
  misc_feature 1..19: note = siRNA antisense sequence
  source 1..19: mol_type = other RNA
ttccaaattctgacatcat

SEQ ID NO: 63672 - RNA, 19 nt, synthetic construct
  misc_feature 1..19: note = siRNA sense sequence
  source 1..19: mol_type = other RNA
aatctgtcttttcatgcat

SEQ ID NO: 63673 - RNA, 19 nt, synthetic construct
  misc_feature 1..19: note = siRNA antisense sequence
  source 1..19: mol_type = other RNA
atgcatgaaaagacagatt

SEQ ID NO: 63674 - RNA, 19 nt, synthetic construct
  misc_feature 1..19: note = siRNA sense sequence
  source 1..19: mol_type = other RNA
atctgtcttttcatgcatt

SEQ ID NO: 63675 - RNA, 19 nt, synthetic construct
  misc_feature 1..19: note = siRNA antisense sequence
  source 1..19: mol_type = other RNA
aatgcatgaaaagacagat

SEQ ID NO: 63676 - RNA, 19 nt, synthetic construct
  misc_feature 1..19: note = siRNA sense sequence
  source 1..19: mol_type = other RNA
tgttttcctaagggcaagg

SEQ ID NO: 63677 - RNA, 19 nt, synthetic construct
  misc_feature 1..19: note = siRNA antisense sequence
  source 1..19: mol_type = other RNA
ccttgcccttaggaaaaca

SEQ ID NO: 63678 - RNA, 19 nt, synthetic construct
  misc_feature 1..19: note = siRNA sense sequence
  source 1..19: mol_type = other RNA
gcctttggaatttccctct

SEQ ID NO: 63679 - RNA, 19 nt, synthetic construct
  misc_feature 1..19: note = siRNA antisense sequence
  source 1..19: mol_type = other RNA
agagggaaattccaaaggc

SEQ ID NO: 63680 - RNA, 19 nt, synthetic construct
  misc_feature 1..19: note = siRNA sense sequence
  source 1..19: mol_type = other RNA
ttggaatttccctctaatc

SEQ ID NO: 63681 - RNA, 19 nt, synthetic construct
  misc_feature 1..19: note = siRNA antisense sequence
  source 1..19: mol_type = other RNA
gattagagggaaattccaa

SEQ ID NO: 63682 - RNA, 19 nt, synthetic construct
  misc_feature 1..19: note = siRNA sense sequence
  source 1..19: mol_type = other RNA
tggaatttccctctaatcc

SEQ ID NO: 63683 - RNA, 19 nt, synthetic construct
  misc_feature 1..19: note = siRNA antisense sequence
  source 1..19: mol_type = other RNA
ggattagagggaaattcca

SEQ ID NO: 63684 - RNA, 19 nt, synthetic construct
  misc_feature 1..19: note = siRNA sense sequence
  source 1..19: mol_type = other RNA
ggaatttccctctaatcca

SEQ ID NO: 63685 - RNA, 19 nt, synthetic construct
  misc_feature 1..19: note = siRNA antisense sequence
  source 1..19: mol_type = other RNA
tggattagagggaaattcc

SEQ ID NO: 63686 - RNA, 19 nt, synthetic construct
  misc_feature 1..19: note = siRNA sense sequence
  source 1..19: mol_type = other RNA
gaatttccctctaatccaa

SEQ ID NO: 63687 - RNA, 19 nt, synthetic construct
  misc_feature 1..19: note = siRNA antisense sequence
  source 1..19: mol_type = other RNA
ttggattagagggaaattc

SEQ ID NO: 63688 - RNA, 19 nt, synthetic construct
  misc_feature 1..19: note = siRNA sense sequence
  source 1..19: mol_type = other RNA
attgtacttttcatactgc

SEQ ID NO: 63689 - RNA, 19 nt, synthetic construct
  misc_feature 1..19: note = siRNA antisense sequence
  source 1..19: mol_type = other RNA
gcagtatgaaaagtacaat

SEQ ID NO: 63690 - RNA, 19 nt, synthetic construct
  misc_feature 1..19: note = siRNA sense sequence
  source 1..19: mol_type = other RNA
tgtacttttcatactgctt

SEQ ID NO: 63691 - RNA, 19 nt, synthetic construct
  misc_feature 1..19: note = siRNA antisense sequence
  source 1..19: mol_type = other RNA
aagcagtatgaaaagtaca

SEQ ID NO: 63692 - RNA, 19 nt, synthetic construct
  misc_feature 1..19: note = siRNA sense sequence
  source 1..19: mol_type = other RNA
gtacttttcatactgctta

SEQ ID NO: 63693 - RNA, 19 nt, synthetic construct
  misc_feature 1..19: note = siRNA antisense sequence
  source 1..19: mol_type = other RNA
taagcagtatgaaaagtac

SEQ ID NO: 63694 - RNA, 19 nt, synthetic construct
  misc_feature 1..19: note = siRNA sense sequence
  source 1..19: mol_type = other RNA
acttttcatactgcttagg

SEQ ID NO: 63695 - RNA, 19 nt, synthetic construct
  misc_feature 1..19: note = siRNA antisense sequence
  source 1..19: mol_type = other RNA
cctaagcagtatgaaaagt

SEQ ID NO: 63696 - RNA, 19 nt, synthetic construct
  misc_feature 1..19: note = siRNA sense sequence
  source 1..19: mol_type = other RNA
cttttcatactgcttagga

SEQ ID NO: 63697 - RNA, 19 nt, synthetic construct
  misc_feature 1..19: note = siRNA antisense sequence
  source 1..19: mol_type = other RNA
tcctaagcagtatgaaaag

SEQ ID NO: 63698 - RNA, 19 nt, synthetic construct
  misc_feature 1..19: note = siRNA sense sequence
  source 1..19: mol_type = other RNA
caaggatattgacagtact

SEQ ID NO: 63699 - RNA, 19 nt, synthetic construct
  misc_feature 1..19: note = siRNA antisense sequence
  source 1..19: mol_type = other RNA
agtactgtcaatatccttg

SEQ ID NO: 63700 - RNA, 19 nt, synthetic construct
  misc_feature 1..19: note = siRNA sense sequence
  source 1..19: mol_type = other RNA
aaggatattgacagtactg

SEQ ID NO: 63701 - RNA, 19 nt, synthetic construct
  misc_feature 1..19: note = siRNA antisense sequence
  source 1..19: mol_type = other RNA
cagtactgtcaatatcctt

SEQ ID NO: 63702 - RNA, 19 nt, synthetic construct
  misc_feature 1..19: note = siRNA sense sequence
  source 1..19: mol_type = other RNA
aggatattgacagtactgg

SEQ ID NO: 63703 - RNA, 19 nt, synthetic construct
  misc_feature 1..19: note = siRNA antisense sequence
  source 1..19: mol_type = other RNA
ccagtactgtcaatatcct

SEQ ID NO: 63704 - RNA, 19 nt, synthetic construct
  misc_feature 1..19: note = siRNA sense sequence
  source 1..19: mol_type = other RNA
ggatattgacagtactggg

SEQ ID NO: 63705 - RNA, 19 nt, synthetic construct
  misc_feature 1..19: note = siRNA antisense sequence
  source 1..19: mol_type = other RNA
cccagtactgtcaatatcc

SEQ ID NO: 63706 - RNA, 19 nt, synthetic construct
  misc_feature 1..19: note = siRNA sense sequence
  source 1..19: mol_type = other RNA
caaaaggtttactaggtta

SEQ ID NO: 63707 - RNA, 19 nt, synthetic construct
  misc_feature 1..19: note = siRNA antisense sequence
  source 1..19: mol_type = other RNA
taacctagtaaaccttttg

SEQ ID NO: 63708 - RNA, 19 nt, synthetic construct
  misc_feature 1..19: note = siRNA sense sequence
  source 1..19: mol_type = other RNA
aaaggtttactaggttaag

SEQ ID NO: 63709 - RNA, 19 nt, synthetic construct
  misc_feature 1..19: note = siRNA antisense sequence
  source 1..19: mol_type = other RNA
cttaacctagtaaaccttt

SEQ ID NO: 63710 - RNA, 19 nt, synthetic construct
  misc_feature 1..19: note = siRNA sense sequence
  source 1..19: mol_type = other RNA
aaggtttactaggttaagt

SEQ ID NO: 63711 - RNA, 19 nt, synthetic construct
  misc_feature 1..19: note = siRNA antisense sequence
  source 1..19: mol_type = other RNA
acttaacctagtaaacctt

SEQ ID NO: 63712 - RNA, 19 nt, synthetic construct
  misc_feature 1..19: note = siRNA sense sequence
  source 1..19: mol_type = other RNA
aggtttactaggttaagtc

SEQ ID NO: 63713 - RNA, 19 nt, synthetic construct
  misc_feature 1..19: note = siRNA antisense sequence
  source 1..19: mol_type = other RNA
gacttaacctagtaaacct

SEQ ID NO: 63714 - RNA, 19 nt, synthetic construct
  misc_feature 1..19: note = siRNA sense sequence
  source 1..19: mol_type = other RNA
ggtttactaggttaagtct

SEQ ID NO: 63715 - RNA, 19 nt, synthetic construct
  misc_feature 1..19: note = siRNA antisense sequence
  source 1..19: mol_type = other RNA
agacttaacctagtaaacc

SEQ ID NO: 63716 - RNA, 19 nt, synthetic construct
  misc_feature 1..19: note = siRNA sense sequence
  source 1..19: mol_type = other RNA
tatagggctgtctgcttac

SEQ ID NO: 63717 - RNA, 19 nt, synthetic construct
  misc_feature 1..19: note = siRNA antisense sequence
  source 1..19: mol_type = other RNA
gtaagcagacagccctata

SEQ ID NO: 63718 - RNA, 19 nt, synthetic construct
  misc_feature 1..19: note = siRNA sense sequence
  source 1..19: mol_type = other RNA
cccatgtagactgagtgtc

SEQ ID NO: 63719 - RNA, 19 nt, synthetic construct
  misc_feature 1..19: note = siRNA antisense sequence
  source 1..19: mol_type = other RNA
gacactcagtctacatggg

SEQ ID NO: 63720 - RNA, 19 nt, synthetic construct
  misc_feature 1..19: note = siRNA sense sequence
  source 1..19: mol_type = other RNA
aaatacagatgaaggtctc

SEQ ID NO: 63721 - RNA, 19 nt, synthetic construct
  misc_feature 1..19: note = siRNA antisense sequence
  source 1..19: mol_type = other RNA
gagaccttcatctgtattt

SEQ ID NO: 63722 - RNA, 19 nt, synthetic construct
  misc_feature 1..19: note = siRNA sense sequence
  source 1..19: mol_type = other RNA
aatacagatgaaggtctct

SEQ ID NO: 63723 - RNA, 19 nt, synthetic construct
  misc_feature 1..19: note = siRNA antisense sequence
  source 1..19: mol_type = other RNA
agagaccttcatctgtatt

SEQ ID NO: 63724 - RNA, 19 nt, synthetic construct
  misc_feature 1..19: note = siRNA sense sequence
  source 1..19: mol_type = other RNA
atacagatgaaggtctctc

SEQ ID NO: 63725 - RNA, 19 nt, synthetic construct
  misc_feature 1..19: note = siRNA antisense sequence
  source 1..19: mol_type = other RNA
gagagaccttcatctgtat

SEQ ID NO: 63726 - RNA, 19 nt, synthetic construct
  misc_feature 1..19: note = siRNA sense sequence
  source 1..19: mol_type = other RNA
tacagatgaaggtctctcg

SEQ ID NO: 63727 - RNA, 19 nt, synthetic construct
  misc_feature 1..19: note = siRNA antisense sequence
  source 1..19: mol_type = other RNA
cgagagaccttcatctgta

SEQ ID NO: 63728 - RNA, 19 nt, synthetic construct
  misc_feature 1..19: note = siRNA sense sequence
  source 1..19: mol_type = other RNA
acagatgaaggtctctcgc

SEQ ID NO: 63729 - RNA, 19 nt, synthetic construct
  misc_feature 1..19: note = siRNA antisense sequence
  source 1..19: mol_type = other RNA
gcgagagaccttcatctgt

SEQ ID NO: 63730 - RNA, 19 nt, synthetic construct
  misc_feature 1..19: note = siRNA sense sequence
  source 1..19: mol_type = other RNA
cagatgaaggtctctcgct

SEQ ID NO: 63731 - RNA, 19 nt, synthetic construct
  misc_feature 1..19: note = siRNA antisense sequence
  source 1..19: mol_type = other RNA
agcgagagaccttcatctg

SEQ ID NO: 63732 - RNA, 19 nt, synthetic construct
  misc_feature 1..19: note = siRNA sense sequence
  source 1..19: mol_type = other RNA
agatgaaggtctctcgctt

SEQ ID NO: 63733 - RNA, 19 nt, synthetic construct
  misc_feature 1..19: note = siRNA antisense sequence
  source 1..19: mol_type = other RNA
aagcgagagaccttcatct

SEQ ID NO: 63734 - RNA, 19 nt, synthetic construct
  misc_feature 1..19: note = siRNA sense sequence
  source 1..19: mol_type = other RNA
gatgaaggtctctcgcttt

SEQ ID NO: 63735 - RNA, 19 nt, synthetic construct
  misc_feature 1..19: note = siRNA antisense sequence
  source 1..19: mol_type = other RNA
aaagcgagagaccttcatc

SEQ ID NO: 63736 - RNA, 19 nt, synthetic construct
  misc_feature 1..19: note = siRNA sense sequence
  source 1..19: mol_type = other RNA
atgaaggtctctcgctttt

SEQ ID NO: 63737 - RNA, 19 nt, synthetic construct
  misc_feature 1..19: note = siRNA antisense sequence
  source 1..19: mol_type = other RNA
aaaagcgagagaccttcat

SEQ ID NO: 63738 - RNA, 19 nt, synthetic construct
  misc_feature 1..19: note = siRNA sense sequence
  source 1..19: mol_type = other RNA
tgaaggtctctcgcttttc

SEQ ID NO: 63739 - RNA, 19 nt, synthetic construct
  misc_feature 1..19: note = siRNA antisense sequence
  source 1..19: mol_type = other RNA
gaaaagcgagagaccttca

SEQ ID NO: 63740 - RNA, 19 nt, synthetic construct
  misc_feature 1..19: note = siRNA sense sequence
  source 1..19: mol_type = other RNA
gaaggtctctcgcttttca

SEQ ID NO: 63741 - RNA, 19 nt, synthetic construct
  misc_feature 1..19: note = siRNA antisense sequence
  source 1..19: mol_type = other RNA
tgaaaagcgagagaccttc

SEQ ID NO: 63742 - RNA, 19 nt, synthetic construct
  misc_feature 1..19: note = siRNA sense sequence
  source 1..19: mol_type = other RNA
aaggtctctcgcttttcaa

SEQ ID NO: 63743 - RNA, 19 nt, synthetic construct
  misc_feature 1..19: note = siRNA antisense sequence
  source 1..19: mol_type = other RNA
ttgaaaagcgagagacctt

SEQ ID NO: 63744 - RNA, 19 nt, synthetic construct
  misc_feature 1..19: note = siRNA sense sequence
  source 1..19: mol_type = other RNA
aggtctctcgcttttcaat

SEQ ID NO: 63745 - RNA, 19 nt, synthetic construct
  misc_feature 1..19: note = siRNA antisense sequence
  source 1..19: mol_type = other RNA
attgaaaagcgagagacct

SEQ ID NO: 63746 - RNA, 19 nt, synthetic construct
  misc_feature 1..19: note = siRNA sense sequence
  source 1..19: mol_type = other RNA
ggtctctcgcttttcaatt

SEQ ID NO: 63747 - RNA, 19 nt, synthetic construct
  misc_feature 1..19: note = siRNA antisense sequence
  source 1..19: mol_type = other RNA
aattgaaaagcgagagacc

SEQ ID NO: 63748 - RNA, 19 nt, synthetic construct
  misc_feature 1..19: note = siRNA sense sequence
  source 1..19: mol_type = other RNA
gtctctcgcttttcaattg

SEQ ID NO: 63749 - RNA, 19 nt, synthetic construct
  misc_feature 1..19: note = siRNA antisense sequence
  source 1..19: mol_type = other RNA
caattgaaaagcgagagac

SEQ ID NO: 63750 - RNA, 19 nt, synthetic construct
  misc_feature 1..19: note = siRNA sense sequence
  source 1..19: mol_type = other RNA
tctctcgcttttcaattgt

SEQ ID NO: 63751 - RNA, 19 nt, synthetic construct
  misc_feature 1..19: note = siRNA antisense sequence
  source 1..19: mol_type = other RNA
acaattgaaaagcgagaga

SEQ ID NO: 63752 - RNA, 19 nt, synthetic construct
  misc_feature 1..19: note = siRNA sense sequence
  source 1..19: mol_type = other RNA
ctctcgcttttcaattgtt

SEQ ID NO: 63753 - RNA, 19 nt, synthetic construct
  misc_feature 1..19: note = siRNA antisense sequence
  source 1..19: mol_type = other RNA
aacaattgaaaagcgagag

SEQ ID NO: 63754 - RNA, 19 nt, synthetic construct
  misc_feature 1..19: note = siRNA sense sequence
  source 1..19: mol_type = other RNA
tctcgcttttcaattgttt

SEQ ID NO: 63755 - RNA, 19 nt, synthetic construct
  misc_feature 1..19: note = siRNA antisense sequence
  source 1..19: mol_type = other RNA
aaacaattgaaaagcgaga

SEQ ID NO: 63756 - RNA, 19 nt, synthetic construct
  misc_feature 1..19: note = siRNA sense sequence
  source 1..19: mol_type = other RNA
ttgtttcatgagccataat

SEQ ID NO: 63757 - RNA, 19 nt, synthetic construct
  misc_feature 1..19: note = siRNA antisense sequence
  source 1..19: mol_type = other RNA
attatggctcatgaaacaa

SEQ ID NO: 63758 - RNA, 19 nt, synthetic construct
  misc_feature 1..19: note = siRNA sense sequence
  source 1..19: mol_type = other RNA
tgtttcatgagccataata

SEQ ID NO: 63759 - RNA, 19 nt, synthetic construct
  misc_feature 1..19: note = siRNA antisense sequence
  source 1..19: mol_type = other RNA
tattatggctcatgaaaca

SEQ ID NO: 63760 - RNA, 19 nt, synthetic construct
  misc_feature 1..19: note = siRNA sense sequence
  source 1..19: mol_type = other RNA
gtttcatgagccataatat

SEQ ID NO: 63761 - RNA, 19 nt, synthetic construct
  misc_feature 1..19: note = siRNA antisense sequence
  source 1..19: mol_type = other RNA
atattatggctcatgaaac

SEQ ID NO: 63762 - RNA, 19 nt, synthetic construct
  misc_feature 1..19: note = siRNA sense sequence
  source 1..19: mol_type = other RNA
tctctctctgtcacccagg

SEQ ID NO: 63763 - RNA, 19 nt, synthetic construct
  misc_feature 1..19: note = siRNA antisense sequence
  source 1..19: mol_type = other RNA
cctgggtgacagagagaga

SEQ ID NO: 63764 - RNA, 19 nt, synthetic construct
  misc_feature 1..19: note = siRNA sense sequence
  source 1..19: mol_type = other RNA
ctctctctgtcacccaggc

SEQ ID NO: 63765 - RNA, 19 nt, synthetic construct
  misc_feature 1..19: note = siRNA antisense sequence
  source 1..19: mol_type = other RNA
gcctgggtgacagagagag

SEQ ID NO: 63766 - RNA, 19 nt, synthetic construct
  misc_feature 1..19: note = siRNA sense sequence
  source 1..19: mol_type = other RNA
tctctctgtcacccaggct

SEQ ID NO: 63767 - RNA, 19 nt, synthetic construct
  misc_feature 1..19: note = siRNA antisense sequence
  source 1..19: mol_type = other RNA
agcctgggtgacagagaga

SEQ ID NO: 63768 - RNA, 19 nt, synthetic construct
  misc_feature 1..19: note = siRNA sense sequence
  source 1..19: mol_type = other RNA
ctctctgtcacccaggctg

SEQ ID NO: 63769 - RNA, 19 nt, synthetic construct
  misc_feature 1..19: note = siRNA antisense sequence
  source 1..19: mol_type = other RNA
cagcctgggtgacagagag

SEQ ID NO: 63770 - RNA, 19 nt, synthetic construct
  misc_feature 1..19: note = siRNA sense sequence
  source 1..19: mol_type = other RNA
tctctgtcacccaggctgg

SEQ ID NO: 63771 - RNA, 19 nt, synthetic construct
  misc_feature 1..19: note = siRNA antisense sequence
  source 1..19: mol_type = other RNA
ccagcctgggtgacagaga

SEQ ID NO: 63772 - RNA, 19 nt, synthetic construct
  misc_feature 1..19: note = siRNA sense sequence
  source 1..19: mol_type = other RNA
ctctgtcacccaggctgga

SEQ ID NO: 63773 - RNA, 19 nt, synthetic construct
  misc_feature 1..19: note = siRNA antisense sequence
  source 1..19: mol_type = other RNA
tccagcctgggtgacagag

SEQ ID NO: 63774 - RNA, 19 nt, synthetic construct
  misc_feature 1..19: note = siRNA sense sequence
  source 1..19: mol_type = other RNA
tctgtcacccaggctggag

SEQ ID NO: 63775 - RNA, 19 nt, synthetic construct
  misc_feature 1..19: note = siRNA antisense sequence
  source 1..19: mol_type = other RNA
ctccagcctgggtgacaga

SEQ ID NO: 63776 - RNA, 19 nt, synthetic construct
  misc_feature 1..19: note = siRNA sense sequence
  source 1..19: mol_type = other RNA
tcacccaggctggagtgca

SEQ ID NO: 63777 - RNA, 19 nt, synthetic construct
  misc_feature 1..19: note = siRNA antisense sequence
  source 1..19: mol_type = other RNA
tgcactccagcctgggtga

SEQ ID NO: 63778 - RNA, 19 nt, synthetic construct
  misc_feature 1..19: note = siRNA sense sequence
  source 1..19: mol_type = other RNA
cctcctcctcccatgtcca

SEQ ID NO: 63779 - RNA, 19 nt, synthetic construct
  misc_feature 1..19: note = siRNA antisense sequence
  source 1..19: mol_type = other RNA
tggacatgggaggaggagg

SEQ ID NO: 63780 - RNA, 19 nt, synthetic construct
  misc_feature 1..19: note = siRNA sense sequence
  source 1..19: mol_type = other RNA
cctcctcccatgtccaaat

SEQ ID NO: 63781 - RNA, 19 nt, synthetic construct
  misc_feature 1..19: note = siRNA antisense sequence
  source 1..19: mol_type = other RNA
atttggacatgggaggagg

SEQ ID NO: 63782 - RNA, 19 nt, synthetic construct
  misc_feature 1..19: note = siRNA sense sequence
  source 1..19: mol_type = other RNA
ccaaatgattctcctgcct

SEQ ID NO: 63783 - RNA, 19 nt, synthetic construct
  misc_feature 1..19: note = siRNA antisense sequence
  source 1..19: mol_type = other RNA
aggcaggagaatcatttgg

SEQ ID NO: 63784 - RNA, 19 nt, synthetic construct
  misc_feature 1..19: note = siRNA sense sequence
  source 1..19: mol_type = other RNA
atgattctcctgcctcaga

SEQ ID NO: 63785 - RNA, 19 nt, synthetic construct
  misc_feature 1..19: note = siRNA antisense sequence
  source 1..19: mol_type = other RNA
tctgaggcaggagaatcat

SEQ ID NO: 63786 - RNA, 19 nt, synthetic construct
  misc_feature 1..19: note = siRNA sense sequence
  source 1..19: mol_type = other RNA
tgattctcctgcctcagac

SEQ ID NO: 63787 - RNA, 19 nt, synthetic construct
  misc_feature 1..19: note = siRNA antisense sequence
  source 1..19: mol_type = other RNA
gtctgaggcaggagaatca

SEQ ID NO: 63788 - RNA, 19 nt, synthetic construct
  misc_feature 1..19: note = siRNA sense sequence
  source 1..19: mol_type = other RNA
gattctcctgcctcagact

SEQ ID NO: 63789 - RNA, 19 nt, synthetic construct
  misc_feature 1..19: note = siRNA antisense sequence
  source 1..19: mol_type = other RNA
agtctgaggcaggagaatc

SEQ ID NO: 63790 - RNA, 19 nt, synthetic construct
  misc_feature 1..19: note = siRNA sense sequence
  source 1..19: mol_type = other RNA
attctcctgcctcagactc

SEQ ID NO: 63791 - RNA, 19 nt, synthetic construct
  misc_feature 1..19: note = siRNA antisense sequence
  source 1..19: mol_type = other RNA
gagtctgaggcaggagaat

SEQ ID NO: 63792 - RNA, 19 nt, synthetic construct
  misc_feature 1..19: note = siRNA sense sequence
  source 1..19: mol_type = other RNA
ttctcctgcctcagactcc

SEQ ID NO: 63793 - RNA, 19 nt, synthetic construct
  misc_feature 1..19: note = siRNA antisense sequence
  source 1..19: mol_type = other RNA
ggagtctgaggcaggagaa

SEQ ID NO: 63794 - RNA, 19 nt, synthetic construct
  misc_feature 1..19: note = siRNA sense sequence
  source 1..19: mol_type = other RNA
tcagactcccaagtagctg

SEQ ID NO: 63795 - RNA, 19 nt, synthetic construct
  misc_feature 1..19: note = siRNA antisense sequence
  source 1..19: mol_type = other RNA
cagctacttgggagtctga

SEQ ID NO: 63796 - RNA, 19 nt, synthetic construct
  misc_feature 1..19: note = siRNA sense sequence
  source 1..19: mol_type = other RNA
cagactcccaagtagctgg

SEQ ID NO: 63797 - RNA, 19 nt, synthetic construct
  misc_feature 1..19: note = siRNA antisense sequence
  source 1..19: mol_type = other RNA
ccagctacttgggagtctg

SEQ ID NO: 63798 - RNA, 19 nt, synthetic construct
  misc_feature 1..19: note = siRNA sense sequence
  source 1..19: mol_type = other RNA
tagctgggactacaggcgc

SEQ ID NO: 63799 - RNA, 19 nt, synthetic construct
  misc_feature 1..19: note = siRNA antisense sequence
  source 1..19: mol_type = other RNA
gcgcctgtagtcccagcta

SEQ ID NO: 63800 - RNA, 19 nt, synthetic construct
  misc_feature 1..19: note = siRNA sense sequence
  source 1..19: mol_type = other RNA
tgccaccacacccaactaa

SEQ ID NO: 63801 - RNA, 19 nt, synthetic construct
  misc_feature 1..19: note = siRNA antisense sequence
  source 1..19: mol_type = other RNA
ttagttgggtgtggtggca

SEQ ID NO: 63802 - RNA, 19 nt, synthetic construct
  misc_feature 1..19: note = siRNA sense sequence
  source 1..19: mol_type = other RNA
gcctcaccatgttggccag

SEQ ID NO: 63803 - RNA, 19 nt, synthetic construct
  misc_feature 1..19: note = siRNA antisense sequence
  source 1..19: mol_type = other RNA
ctggccaacatggtgaggc

SEQ ID NO: 63804 - RNA, 19 nt, synthetic construct
  misc_feature 1..19: note = siRNA sense sequence
  source 1..19: mol_type = other RNA
caccatgttggccaggctg

SEQ ID NO: 63805 - RNA, 19 nt, synthetic construct
  misc_feature 1..19: note = siRNA antisense sequence
  source 1..19: mol_type = other RNA
cagcctggccaacatggtg

SEQ ID NO: 63806 - RNA, 19 nt, synthetic construct
  misc_feature 1..19: note = siRNA sense sequence
  source 1..19: mol_type = other RNA
accatgttggccaggctgg

SEQ ID NO: 63807 - RNA, 19 nt, synthetic construct
  misc_feature 1..19: note = siRNA antisense sequence
  source 1..19: mol_type = other RNA
ccagcctggccaacatggt

SEQ ID NO: 63808 - RNA, 19 nt, synthetic construct
  misc_feature 1..19: note = siRNA sense sequence
  source 1..19: mol_type = other RNA
ccatgttggccaggctggt

SEQ ID NO: 63809 - RNA, 19 nt, synthetic construct
  misc_feature 1..19: note = siRNA antisense sequence
  source 1..19: mol_type = other RNA
accagcctggccaacatgg

SEQ ID NO: 63810 - RNA, 19 nt, synthetic construct
  misc_feature 1..19: note = siRNA sense sequence
  source 1..19: mol_type = other RNA
catgttggccaggctggtc

SEQ ID NO: 63811 - RNA, 19 nt, synthetic construct
  misc_feature 1..19: note = siRNA antisense sequence
  source 1..19: mol_type = other RNA
gaccagcctggccaacatg

SEQ ID NO: 63812 - RNA, 19 nt, synthetic construct
  misc_feature 1..19: note = siRNA sense sequence
  source 1..19: mol_type = other RNA
atgttggccaggctggtct

SEQ ID NO: 63813 - RNA, 19 nt, synthetic construct
  misc_feature 1..19: note = siRNA antisense sequence
  source 1..19: mol_type = other RNA
agaccagcctggccaacat

SEQ ID NO: 63814 - RNA, 19 nt, synthetic construct
  misc_feature 1..19: note = siRNA sense sequence
  source 1..19: mol_type = other RNA
ctgacctcaggtgatccac

SEQ ID NO: 63815 - RNA, 19 nt, synthetic construct
  misc_feature 1..19: note = siRNA antisense sequence
  source 1..19: mol_type = other RNA
gtggatcacctgaggtcag

SEQ ID NO: 63816 - RNA, 19 nt, synthetic construct
  misc_feature 1..19: note = siRNA sense sequence
  source 1..19: mol_type = other RNA
attacaggtgtgagccact

SEQ ID NO: 63817 - RNA, 19 nt, synthetic construct
  misc_feature 1..19: note = siRNA antisense sequence
  source 1..19: mol_type = other RNA
agtggctcacacctgtaat

SEQ ID NO: 63818 - RNA, 19 nt, synthetic construct
  misc_feature 1..19: note = siRNA sense sequence
  source 1..19: mol_type = other RNA
aatgcttttctctctctgt

SEQ ID NO: 63819 - RNA, 19 nt, synthetic construct
  misc_feature 1..19: note = siRNA antisense sequence
  source 1..19: mol_type = other RNA
acagagagagaaaagcatt

SEQ ID NO: 63820 - RNA, 19 nt, synthetic construct
  misc_feature 1..19: note = siRNA sense sequence
  source 1..19: mol_type = other RNA
atgcttttctctctctgta

SEQ ID NO: 63821 - RNA, 19 nt, synthetic construct
  misc_feature 1..19: note = siRNA antisense sequence
  source 1..19: mol_type = other RNA
tacagagagagaaaagcat

SEQ ID NO: 63822 - RNA, 19 nt, synthetic construct
  misc_feature 1..19: note = siRNA sense sequence
  source 1..19: mol_type = other RNA
ttttctctctctgtagtat

SEQ ID NO: 63823 - RNA, 19 nt, synthetic construct
  misc_feature 1..19: note = siRNA antisense sequence
  source 1..19: mol_type = other RNA
atactacagagagagaaaa

SEQ ID NO: 63824 - RNA, 19 nt, synthetic construct
  misc_feature 1..19: note = siRNA sense sequence
  source 1..19: mol_type = other RNA
tttctctctctgtagtata

SEQ ID NO: 63825 - RNA, 19 nt, synthetic construct
  misc_feature 1..19: note = siRNA antisense sequence
  source 1..19: mol_type = other RNA
tatactacagagagagaaa

SEQ ID NO: 63826 - RNA, 19 nt, synthetic construct
  misc_feature 1..19: note = siRNA sense sequence
  source 1..19: mol_type = other RNA
ttctctctctgtagtatag

SEQ ID NO: 63827 - RNA, 19 nt, synthetic construct
  misc_feature 1..19: note = siRNA antisense sequence
  source 1..19: mol_type = other RNA
ctatactacagagagagaa

SEQ ID NO: 63828 - RNA, 19 nt, synthetic construct
  misc_feature 1..19: note = siRNA sense sequence
  source 1..19: mol_type = other RNA
tctctctctgtagtataga

SEQ ID NO: 63829 - RNA, 19 nt, synthetic construct
  misc_feature 1..19: note = siRNA antisense sequence
  source 1..19: mol_type = other RNA
tctatactacagagagaga

SEQ ID NO: 63830 - RNA, 19 nt, synthetic construct
  misc_feature 1..19: note = siRNA sense sequence
  source 1..19: mol_type = other RNA
ctctctctgtagtatagaa

SEQ ID NO: 63831 - RNA, 19 nt, synthetic construct
  misc_feature 1..19: note = siRNA antisense sequence
  source 1..19: mol_type = other RNA
ttctatactacagagagag

SEQ ID NO: 63832 - RNA, 19 nt, synthetic construct
  misc_feature 1..19: note = siRNA sense sequence
  source 1..19: mol_type = other RNA
gtaagttctattagcattc

SEQ ID NO: 63833 - RNA, 19 nt, synthetic construct
  misc_feature 1..19: note = siRNA antisense sequence
  source 1..19: mol_type = other RNA
gaatgctaatagaacttac

SEQ ID NO: 63834 - RNA, 19 nt, synthetic construct
  misc_feature 1..19: note = siRNA sense sequence
  source 1..19: mol_type = other RNA
aacctcactagtttccatt

SEQ ID NO: 63835 - RNA, 19 nt, synthetic construct
  misc_feature 1..19: note = siRNA antisense sequence
  source 1..19: mol_type = other RNA
aatggaaactagtgaggtt

SEQ ID NO: 63836 - RNA, 19 nt, synthetic construct
  misc_feature 1..19: note = siRNA sense sequence
  source 1..19: mol_type = other RNA
cctcactagtttccattac

SEQ ID NO: 63837 - RNA, 19 nt, synthetic construct
  misc_feature 1..19: note = siRNA antisense sequence
  source 1..19: mol_type = other RNA
gtaatggaaactagtgagg

SEQ ID NO: 63838 - RNA, 19 nt, synthetic construct
  misc_feature 1..19: note = siRNA sense sequence
  source 1..19: mol_type = other RNA
ctcactagtttccattaca

SEQ ID NO: 63839 - RNA, 19 nt, synthetic construct
  misc_feature 1..19: note = siRNA antisense sequence
  source 1..19: mol_type = other RNA
tgtaatggaaactagtgag

SEQ ID NO: 63840 - RNA, 19 nt, synthetic construct
  misc_feature 1..19: note = siRNA sense sequence
  source 1..19: mol_type = other RNA
caattcaaaagtagcatgg

SEQ ID NO: 63841 - RNA, 19 nt, synthetic construct
  misc_feature 1..19: note = siRNA antisense sequence
  source 1..19: mol_type = other RNA
ccatgctacttttgaattg

SEQ ID NO: 63842 - RNA, 19 nt, synthetic construct
  misc_feature 1..19: note = siRNA sense sequence
  source 1..19: mol_type = other RNA
aattcaaaagtagcatggt

SEQ ID NO: 63843 - RNA, 19 nt, synthetic construct
  misc_feature 1..19: note = siRNA antisense sequence
  source 1..19: mol_type = other RNA
accatgctacttttgaatt

SEQ ID NO: 63844 - RNA, 19 nt, synthetic construct
  misc_feature 1..19: note = siRNA sense sequence
  source 1..19: mol_type = other RNA
attcaaaagtagcatggta

SEQ ID NO: 63845 - RNA, 19 nt, synthetic construct
  misc_feature 1..19: note = siRNA antisense sequence
  source 1..19: mol_type = other RNA
taccatgctacttttgaat

SEQ ID NO: 63846 - RNA, 19 nt, synthetic construct
  misc_feature 1..19: note = siRNA sense sequence
  source 1..19: mol_type = other RNA
ttcaaaagtagcatggtaa

SEQ ID NO: 63847 - RNA, 19 nt, synthetic construct
  misc_feature 1..19: note = siRNA antisense sequence
  source 1..19: mol_type = other RNA
ttaccatgctacttttgaa

SEQ ID NO: 63848 - RNA, 19 nt, synthetic construct
  misc_feature 1..19: note = siRNA sense sequence
  source 1..19: mol_type = other RNA
tcaaaagtagcatggtaag

SEQ ID NO: 63849 - RNA, 19 nt, synthetic construct
  misc_feature 1..19: note = siRNA antisense sequence
  source 1..19: mol_type = other RNA
cttaccatgctacttttga

SEQ ID NO: 63850 - RNA, 19 nt, synthetic construct
  misc_feature 1..19: note = siRNA sense sequence
  source 1..19: mol_type = other RNA
caaaagtagcatggtaaga

SEQ ID NO: 63851 - RNA, 19 nt, synthetic construct
  misc_feature 1..19: note = siRNA antisense sequence
  source 1..19: mol_type = other RNA
tcttaccatgctacttttg

SEQ ID NO: 63852 - RNA, 19 nt, synthetic construct
  misc_feature 1..19: note = siRNA sense sequence
  source 1..19: mol_type = other RNA
aagtagcatggtaagagta

SEQ ID NO: 63853 - RNA, 19 nt, synthetic construct
  misc_feature 1..19: note = siRNA antisense sequence
  source 1..19: mol_type = other RNA
tactcttaccatgctactt

SEQ ID NO: 63854 - RNA, 19 nt, synthetic construct
  misc_feature 1..19: note = siRNA sense sequence
  source 1..19: mol_type = other RNA
agtagcatggtaagagtac

SEQ ID NO: 63855 - RNA, 19 nt, synthetic construct
  misc_feature 1..19: note = siRNA antisense sequence
  source 1..19: mol_type = other RNA
gtactcttaccatgctact

SEQ ID NO: 63856 - RNA, 19 nt, synthetic construct
  misc_feature 1..19: note = siRNA sense sequence
  source 1..19: mol_type = other RNA
gggtggatatatatgtatg

SEQ ID NO: 63857 - RNA, 19 nt, synthetic construct
  misc_feature 1..19: note = siRNA antisense sequence
  source 1..19: mol_type = other RNA
catacatatatatccaccc

SEQ ID NO: 63858 - RNA, 19 nt, synthetic construct
  misc_feature 1..19: note = siRNA sense sequence
  source 1..19: mol_type = other RNA
ggtggatatatatgtatgt

SEQ ID NO: 63859 - RNA, 19 nt, synthetic construct
  misc_feature 1..19: note = siRNA antisense sequence
  source 1..19: mol_type = other RNA
acatacatatatatccacc

SEQ ID NO: 63860 - RNA, 19 nt, synthetic construct
  misc_feature 1..19: note = siRNA sense sequence
  source 1..19: mol_type = other RNA
atatatgtatgtatggctg

SEQ ID NO: 63861 - RNA, 19 nt, synthetic construct
  misc_feature 1..19: note = siRNA antisense sequence
  source 1..19: mol_type = other RNA
cagccatacatacatatat

SEQ ID NO: 63862 - RNA, 19 nt, synthetic construct
  misc_feature 1..19: note = siRNA sense sequence
  source 1..19: mol_type = other RNA
tatatgtatgtatggctgg

SEQ ID NO: 63863 - RNA, 19 nt, synthetic construct
  misc_feature 1..19: note = siRNA antisense sequence
  source 1..19: mol_type = other RNA
ccagccatacatacatata

SEQ ID NO: 63864 - RNA, 19 nt, synthetic construct
  misc_feature 1..19: note = siRNA sense sequence
  source 1..19: mol_type = other RNA
atatgtatgtatggctggt

SEQ ID NO: 63865 - RNA, 19 nt, synthetic construct
  misc_feature 1..19: note = siRNA antisense sequence
  source 1..19: mol_type = other RNA
accagccatacatacatat

SEQ ID NO: 63866 - RNA, 19 nt, synthetic construct
  misc_feature 1..19: note = siRNA sense sequence
  source 1..19: mol_type = other RNA
tatgtatgtatggctggtg

SEQ ID NO: 63867 - RNA, 19 nt, synthetic construct
  misc_feature 1..19: note = siRNA antisense sequence
  source 1..19: mol_type = other RNA
caccagccatacatacata

SEQ ID NO: 63868 - RNA, 19 nt, synthetic construct
  misc_feature 1..19: note = siRNA sense sequence
  source 1..19: mol_type = other RNA
aacctttcccatacagcac

SEQ ID NO: 63869 - RNA, 19 nt, synthetic construct
  misc_feature 1..19: note = siRNA antisense sequence
  source 1..19: mol_type = other RNA
gtgctgtatgggaaaggtt

SEQ ID NO: 63870 - RNA, 19 nt, synthetic construct
  misc_feature 1..19: note = siRNA sense sequence
  source 1..19: mol_type = other RNA
tttcccatacagcacactt

SEQ ID NO: 63871 - RNA, 19 nt, synthetic construct
  misc_feature 1..19: note = siRNA antisense sequence
  source 1..19: mol_type = other RNA
aagtgtgctgtatgggaaa

SEQ ID NO: 63872 - RNA, 19 nt, synthetic construct
  misc_feature 1..19: note = siRNA sense sequence
  source 1..19: mol_type = other RNA
ttcccatacagcacactta

SEQ ID NO: 63873 - RNA, 19 nt, synthetic construct
  misc_feature 1..19: note = siRNA antisense sequence
  source 1..19: mol_type = other RNA
taagtgtgctgtatgggaa

SEQ ID NO: 63874 - RNA, 19 nt, synthetic construct
  misc_feature 1..19: note = siRNA sense sequence
  source 1..19: mol_type = other RNA
tcccatacagcacacttac

SEQ ID NO: 63875 - RNA, 19 nt, synthetic construct
  misc_feature 1..19: note = siRNA antisense sequence
  source 1..19: mol_type = other RNA
gtaagtgtgctgtatggga

SEQ ID NO: 63876 - RNA, 19 nt, synthetic construct
  misc_feature 1..19: note = siRNA sense sequence
  source 1..19: mol_type = other RNA
cccatacagcacacttaca

SEQ ID NO: 63877 - RNA, 19 nt, synthetic construct
  misc_feature 1..19: note = siRNA antisense sequence
  source 1..19: mol_type = other RNA
tgtaagtgtgctgtatggg

SEQ ID NO: 63878 - RNA, 19 nt, synthetic construct
  misc_feature 1..19: note = siRNA sense sequence
  source 1..19: mol_type = other RNA
caaagatggatctctaata

SEQ ID NO: 63879 - RNA, 19 nt, synthetic construct
  misc_feature 1..19: note = siRNA antisense sequence
  source 1..19: mol_type = other RNA
tattagagatccatctttg

SEQ ID NO: 63880 - RNA, 19 nt, synthetic construct
  misc_feature 1..19: note = siRNA sense sequence
  source 1..19: mol_type = other RNA
gatggatctctaatatatg

SEQ ID NO: 63881 - RNA, 19 nt, synthetic construct
  misc_feature 1..19: note = siRNA antisense sequence
  source 1..19: mol_type = other RNA
catatattagagatccatc

SEQ ID NO: 63882 - RNA, 19 nt, synthetic construct
  misc_feature 1..19: note = siRNA sense sequence
  source 1..19: mol_type = other RNA
atggatctctaatatatgg

SEQ ID NO: 63883 - RNA, 19 nt, synthetic construct
  misc_feature 1..19: note = siRNA antisense sequence
  source 1..19: mol_type = other RNA
ccatatattagagatccat

SEQ ID NO: 63884 - RNA, 19 nt, synthetic construct
  misc_feature 1..19: note = siRNA sense sequence
  source 1..19: mol_type = other RNA
tggatctctaatatatggc

SEQ ID NO: 63885 - RNA, 19 nt, synthetic construct
  misc_feature 1..19: note = siRNA antisense sequence
  source 1..19: mol_type = other RNA
gccatatattagagatcca

SEQ ID NO: 63886 - RNA, 19 nt, synthetic construct
  misc_feature 1..19: note = siRNA sense sequence
  source 1..19: mol_type = other RNA
ggatctctaatatatggca

SEQ ID NO: 63887 - RNA, 19 nt, synthetic construct
  misc_feature 1..19: note = siRNA antisense sequence
  source 1..19: mol_type = other RNA
tgccatatattagagatcc

SEQ ID NO: 63888 - RNA, 19 nt, synthetic construct
  misc_feature 1..19: note = siRNA sense sequence
  source 1..19: mol_type = other RNA
tctctaatatatggcaatg

SEQ ID NO: 63889 - RNA, 19 nt, synthetic construct
  misc_feature 1..19: note = siRNA antisense sequence
  source 1..19: mol_type = other RNA
cattgccatatattagaga

SEQ ID NO: 63890 - RNA, 19 nt, synthetic construct
  misc_feature 1..19: note = siRNA sense sequence
  source 1..19: mol_type = other RNA
ctctaatatatggcaatgg

SEQ ID NO: 63891 - RNA, 19 nt, synthetic construct
  misc_feature 1..19: note = siRNA antisense sequence
  source 1..19: mol_type = other RNA
ccattgccatatattagag

SEQ ID NO: 63892 - RNA, 19 nt, synthetic construct
  misc_feature 1..19: note = siRNA sense sequence
  source 1..19: mol_type = other RNA
tctaatatatggcaatggc

SEQ ID NO: 63893 - RNA, 19 nt, synthetic construct
  misc_feature 1..19: note = siRNA antisense sequence
  source 1..19: mol_type = other RNA
gccattgccatatattaga

SEQ ID NO: 63894 - RNA, 19 nt, synthetic construct
  misc_feature 1..19: note = siRNA sense sequence
  source 1..19: mol_type = other RNA
ctaatatatggcaatggct

SEQ ID NO: 63895 - RNA, 19 nt, synthetic construct
  misc_feature 1..19: note = siRNA antisense sequence
  source 1..19: mol_type = other RNA
agccattgccatatattag

SEQ ID NO: 63896 - RNA, 19 nt, synthetic construct
  misc_feature 1..19: note = siRNA sense sequence
  source 1..19: mol_type = other RNA
aatatatggcaatggctgt

SEQ ID NO: 63897 - RNA, 19 nt, synthetic construct
  misc_feature 1..19: note = siRNA antisense sequence
  source 1..19: mol_type = other RNA
acagccattgccatatatt

SEQ ID NO: 63898 - RNA, 19 nt, synthetic construct
  misc_feature 1..19: note = siRNA sense sequence
  source 1..19: mol_type = other RNA
atatatggcaatggctgtc

SEQ ID NO: 63899 - RNA, 19 nt, synthetic construct
  misc_feature 1..19: note = siRNA antisense sequence
  source 1..19: mol_type = other RNA
gacagccattgccatatat

SEQ ID NO: 63900 - RNA, 19 nt, synthetic construct
  misc_feature 1..19: note = siRNA sense sequence
  source 1..19: mol_type = other RNA
tatatggcaatggctgtca

SEQ ID NO: 63901 - RNA, 19 nt, synthetic construct
  misc_feature 1..19: note = siRNA antisense sequence
  source 1..19: mol_type = other RNA
tgacagccattgccatata

SEQ ID NO: 63902 - RNA, 19 nt, synthetic construct
  misc_feature 1..19: note = siRNA sense sequence
  source 1..19: mol_type = other RNA
cattcacagattctttaca

SEQ ID NO: 63903 - RNA, 19 nt, synthetic construct
  misc_feature 1..19: note = siRNA antisense sequence
  source 1..19: mol_type = other RNA
tgtaaagaatctgtgaatg

SEQ ID NO: 63904 - RNA, 19 nt, synthetic construct
  misc_feature 1..19: note = siRNA sense sequence
  source 1..19: mol_type = other RNA
attcacagattctttacac

SEQ ID NO: 63905 - RNA, 19 nt, synthetic construct
  misc_feature 1..19: note = siRNA antisense sequence
  source 1..19: mol_type = other RNA
gtgtaaagaatctgtgaat

SEQ ID NO: 63906 - RNA, 19 nt, synthetic construct
  misc_feature 1..19: note = siRNA sense sequence
  source 1..19: mol_type = other RNA
ttcacagattctttacact

SEQ ID NO: 63907 - RNA, 19 nt, synthetic construct
  misc_feature 1..19: note = siRNA antisense sequence
  source 1..19: mol_type = other RNA
agtgtaaagaatctgtgaa

SEQ ID NO: 63908 - RNA, 19 nt, synthetic construct
  misc_feature 1..19: note = siRNA sense sequence
  source 1..19: mol_type = other RNA
tcacagattctttacacta

SEQ ID NO: 63909 - RNA, 19 nt, synthetic construct
  misc_feature 1..19: note = siRNA antisense sequence
  source 1..19: mol_type = other RNA
tagtgtaaagaatctgtga

SEQ ID NO: 63910 - RNA, 19 nt, synthetic construct
  misc_feature 1..19: note = siRNA sense sequence
  source 1..19: mol_type = other RNA
cactactgcagcaagtcat

SEQ ID NO: 63911 - RNA, 19 nt, synthetic construct
  misc_feature 1..19: note = siRNA antisense sequence
  source 1..19: mol_type = other RNA
atgacttgctgcagtagtg

SEQ ID NO: 63912 - RNA, 19 nt, synthetic construct
  misc_feature 1..19: note = siRNA sense sequence
  source 1..19: mol_type = other RNA
ctactgcagcaagtcatgt

SEQ ID NO: 63913 - RNA, 19 nt, synthetic construct
  misc_feature 1..19: note = siRNA antisense sequence
  source 1..19: mol_type = other RNA
acatgacttgctgcagtag

SEQ ID NO: 63914 - RNA, 19 nt, synthetic construct
  misc_feature 1..19: note = siRNA sense sequence
  source 1..19: mol_type = other RNA
tactgcagcaagtcatgtt

SEQ ID NO: 63915 - RNA, 19 nt, synthetic construct
  misc_feature 1..19: note = siRNA antisense sequence
  source 1..19: mol_type = other RNA
aacatgacttgctgcagta

SEQ ID NO: 63916 - RNA, 19 nt, synthetic construct
  misc_feature 1..19: note = siRNA sense sequence
  source 1..19: mol_type = other RNA
actgcagcaagtcatgttt

SEQ ID NO: 63917 - RNA, 19 nt, synthetic construct
  misc_feature 1..19: note = siRNA antisense sequence
  source 1..19: mol_type = other RNA
aaacatgacttgctgcagt

SEQ ID NO: 63918 - RNA, 19 nt, synthetic construct
  misc_feature 1..19: note = siRNA sense sequence
  source 1..19: mol_type = other RNA
ctgcagcaagtcatgtttt

SEQ ID NO: 63919 - RNA, 19 nt, synthetic construct
  misc_feature 1..19: note = siRNA antisense sequence
  source 1..19: mol_type = other RNA
aaaacatgacttgctgcag

SEQ ID NO: 63920 - RNA, 19 nt, synthetic construct
  misc_feature 1..19: note = siRNA sense sequence
  source 1..19: mol_type = other RNA
tctgatatctggcattgtc

SEQ ID NO: 63921 - RNA, 19 nt, synthetic construct
  misc_feature 1..19: note = siRNA antisense sequence
  source 1..19: mol_type = other RNA
gacaatgccagatatcaga

SEQ ID NO: 63922 - RNA, 19 nt, synthetic construct
  misc_feature 1..19: note = siRNA sense sequence
  source 1..19: mol_type = other RNA
ctgatatctggcattgtct

SEQ ID NO: 63923 - RNA, 19 nt, synthetic construct
  misc_feature 1..19: note = siRNA antisense sequence
  source 1..19: mol_type = other RNA
agacaatgccagatatcag

SEQ ID NO: 63924 - RNA, 19 nt, synthetic construct
  misc_feature 1..19: note = siRNA sense sequence
  source 1..19: mol_type = other RNA
tgatatctggcattgtctg

SEQ ID NO: 63925 - RNA, 19 nt, synthetic construct
  misc_feature 1..19: note = siRNA antisense sequence
  source 1..19: mol_type = other RNA
cagacaatgccagatatca

SEQ ID NO: 63926 - RNA, 19 nt, synthetic construct
  misc_feature 1..19: note = siRNA sense sequence
  source 1..19: mol_type = other RNA
gatatctggcattgtctga

SEQ ID NO: 63927 - RNA, 19 nt, synthetic construct
  misc_feature 1..19: note = siRNA antisense sequence
  source 1..19: mol_type = other RNA
tcagacaatgccagatatc

SEQ ID NO: 63928 - RNA, 19 nt, synthetic construct
  misc_feature 1..19: note = siRNA sense sequence
  source 1..19: mol_type = other RNA
atatctggcattgtctgat

SEQ ID NO: 63929 - RNA, 19 nt, synthetic construct
  misc_feature 1..19: note = siRNA antisense sequence
  source 1..19: mol_type = other RNA
atcagacaatgccagatat

SEQ ID NO: 63930 - RNA, 19 nt, synthetic construct
  misc_feature 1..19: note = siRNA sense sequence
  source 1..19: mol_type = other RNA
ctggcattgtctgataaat

SEQ ID NO: 63931 - RNA, 19 nt, synthetic construct
  misc_feature 1..19: note = siRNA antisense sequence
  source 1..19: mol_type = other RNA
atttatcagacaatgccag

SEQ ID NO: 63932 - RNA, 19 nt, synthetic construct
  misc_feature 1..19: note = siRNA sense sequence
  source 1..19: mol_type = other RNA
cccatatctttgaggatcc

SEQ ID NO: 63933 - RNA, 19 nt, synthetic construct
  misc_feature 1..19: note = siRNA antisense sequence
  source 1..19: mol_type = other RNA
ggatcctcaaagatatggg

SEQ ID NO: 63934 - RNA, 19 nt, synthetic construct
  misc_feature 1..19: note = siRNA sense sequence
  source 1..19: mol_type = other RNA
ccatatctttgaggatcct

SEQ ID NO: 63935 - RNA, 19 nt, synthetic construct
  misc_feature 1..19: note = siRNA antisense sequence
  source 1..19: mol_type = other RNA
aggatcctcaaagatatgg

SEQ ID NO: 63936 - RNA, 19 nt, synthetic construct
  misc_feature 1..19: note = siRNA sense sequence
  source 1..19: mol_type = other RNA
catatctttgaggatcctt

SEQ ID NO: 63937 - RNA, 19 nt, synthetic construct
  misc_feature 1..19: note = siRNA antisense sequence
  source 1..19: mol_type = other RNA
aaggatcctcaaagatatg

SEQ ID NO: 63938 - RNA, 19 nt, synthetic construct
  misc_feature 1..19: note = siRNA sense sequence
  source 1..19: mol_type = other RNA
atatctttgaggatccttt

SEQ ID NO: 63939 - RNA, 19 nt, synthetic construct
  misc_feature 1..19: note = siRNA antisense sequence
  source 1..19: mol_type = other RNA
aaaggatcctcaaagatat

SEQ ID NO: 63940 - RNA, 19 nt, synthetic construct
  misc_feature 1..19: note = siRNA sense sequence
  source 1..19: mol_type = other RNA
tttgaggatcctttcagta

SEQ ID NO: 63941 - RNA, 19 nt, synthetic construct
  misc_feature 1..19: note = siRNA antisense sequence
  source 1..19: mol_type = other RNA
tactgaaaggatcctcaaa

SEQ ID NO: 63942 - RNA, 19 nt, synthetic construct
  misc_feature 1..19: note = siRNA sense sequence
  source 1..19: mol_type = other RNA
ttgaggatcctttcagtat

SEQ ID NO: 63943 - RNA, 19 nt, synthetic construct
  misc_feature 1..19: note = siRNA antisense sequence
  source 1..19: mol_type = other RNA
atactgaaaggatcctcaa

SEQ ID NO: 63944 - RNA, 19 nt, synthetic construct
  misc_feature 1..19: note = siRNA sense sequence
  source 1..19: mol_type = other RNA
tgaggatcctttcagtatc

SEQ ID NO: 63945 - RNA, 19 nt, synthetic construct
  misc_feature 1..19: note = siRNA antisense sequence
  source 1..19: mol_type = other RNA
gatactgaaaggatcctca

SEQ ID NO: 63946 - RNA, 19 nt, synthetic construct
  misc_feature 1..19: note = siRNA sense sequence
  source 1..19: mol_type = other RNA
gaggatcctttcagtatca

SEQ ID NO: 63947 - RNA, 19 nt, synthetic construct
  misc_feature 1..19: note = siRNA antisense sequence
  source 1..19: mol_type = other RNA
tgatactgaaaggatcctc

SEQ ID NO: 63948 - RNA, 19 nt, synthetic construct
  misc_feature 1..19: note = siRNA sense sequence
  source 1..19: mol_type = other RNA
aggatcctttcagtatcaa

SEQ ID NO: 63949 - RNA, 19 nt, synthetic construct
  misc_feature 1..19: note = siRNA antisense sequence
  source 1..19: mol_type = other RNA
ttgatactgaaaggatcct

SEQ ID NO: 63950 - RNA, 19 nt, synthetic construct
  misc_feature 1..19: note = siRNA sense sequence
  source 1..19: mol_type = other RNA
ggatcctttcagtatcaac

SEQ ID NO: 63951 - RNA, 19 nt, synthetic construct
  misc_feature 1..19: note = siRNA antisense sequence
  source 1..19: mol_type = other RNA
gttgatactgaaaggatcc

SEQ ID NO: 63952 - RNA, 19 nt, synthetic construct
  misc_feature 1..19: note = siRNA sense sequence
  source 1..19: mol_type = other RNA
gatcctttcagtatcaact

SEQ ID NO: 63953 - RNA, 19 nt, synthetic construct
  misc_feature 1..19: note = siRNA antisense sequence
  source 1..19: mol_type = other RNA
agttgatactgaaaggatc

SEQ ID NO: 63954 - RNA, 19 nt, synthetic construct
  misc_feature 1..19: note = siRNA sense sequence
  source 1..19: mol_type = other RNA
aaaatgactacatcaactg

SEQ ID NO: 63955 - RNA, 19 nt, synthetic construct
  misc_feature 1..19: note = siRNA antisense sequence
  source 1..19: mol_type = other RNA
cagttgatgtagtcatttt

SEQ ID NO: 63956 - RNA, 19 nt, synthetic construct
  misc_feature 1..19: note = siRNA sense sequence
  source 1..19: mol_type = other RNA
aaatgactacatcaactga

SEQ ID NO: 63957 - RNA, 19 nt, synthetic construct
  misc_feature 1..19: note = siRNA antisense sequence
  source 1..19: mol_type = other RNA
tcagttgatgtagtcattt

SEQ ID NO: 63958 - RNA, 19 nt, synthetic construct
  misc_feature 1..19: note = siRNA sense sequence
  source 1..19: mol_type = other RNA
actacatcaactgaccatc

SEQ ID NO: 63959 - RNA, 19 nt, synthetic construct
  misc_feature 1..19: note = siRNA antisense sequence
  source 1..19: mol_type = other RNA
gatggtcagttgatgtagt

SEQ ID NO: 63960 - RNA, 19 nt, synthetic construct
  misc_feature 1..19: note = siRNA sense sequence
  source 1..19: mol_type = other RNA
ctacatcaactgaccatct

SEQ ID NO: 63961 - RNA, 19 nt, synthetic construct
  misc_feature 1..19: note = siRNA antisense sequence
  source 1..19: mol_type = other RNA
agatggtcagttgatgtag

SEQ ID NO: 63962 - RNA, 19 nt, synthetic construct
  misc_feature 1..19: note = siRNA sense sequence
  source 1..19: mol_type = other RNA
atcaactgaccatctcaaa

SEQ ID NO: 63963 - RNA, 19 nt, synthetic construct
  misc_feature 1..19: note = siRNA antisense sequence
  source 1..19: mol_type = other RNA
tttgagatggtcagttgat

SEQ ID NO: 63964 - RNA, 19 nt, synthetic construct
  misc_feature 1..19: note = siRNA sense sequence
  source 1..19: mol_type = other RNA
ttttaccttttgctttcca

SEQ ID NO: 63965 - RNA, 19 nt, synthetic construct
  misc_feature 1..19: note = siRNA antisense sequence
  source 1..19: mol_type = other RNA
tggaaagcaaaaggtaaaa

SEQ ID NO: 63966 - RNA, 19 nt, synthetic construct
  misc_feature 1..19: note = siRNA sense sequence
  source 1..19: mol_type = other RNA
tgtatctctggacatttaa

SEQ ID NO: 63967 - RNA, 19 nt, synthetic construct
  misc_feature 1..19: note = siRNA antisense sequence
  source 1..19: mol_type = other RNA
ttaaatgtccagagataca

SEQ ID NO: 63968 - RNA, 19 nt, synthetic construct
  misc_feature 1..19: note = siRNA sense sequence
  source 1..19: mol_type = other RNA
gtatctctggacatttaaa

SEQ ID NO: 63969 - RNA, 19 nt, synthetic construct
  misc_feature 1..19: note = siRNA antisense sequence
  source 1..19: mol_type = other RNA
tttaaatgtccagagatac

SEQ ID NO: 63970 - RNA, 19 nt, synthetic construct
  misc_feature 1..19: note = siRNA sense sequence
  source 1..19: mol_type = other RNA
acaggactgcaatacatgt

SEQ ID NO: 63971 - RNA, 19 nt, synthetic construct
  misc_feature 1..19: note = siRNA antisense sequence
  source 1..19: mol_type = other RNA
acatgtattgcagtcctgt

SEQ ID NO: 63972 - RNA, 19 nt, synthetic construct
  misc_feature 1..19: note = siRNA sense sequence
  source 1..19: mol_type = other RNA
caggactgcaatacatgta

SEQ ID NO: 63973 - RNA, 19 nt, synthetic construct
  misc_feature 1..19: note = siRNA antisense sequence
  source 1..19: mol_type = other RNA
tacatgtattgcagtcctg

SEQ ID NO: 63974 - RNA, 19 nt, synthetic construct
  misc_feature 1..19: note = siRNA sense sequence
  source 1..19: mol_type = other RNA
aggactgcaatacatgtaa

SEQ ID NO: 63975 - RNA, 19 nt, synthetic construct
  misc_feature 1..19: note = siRNA antisense sequence
  source 1..19: mol_type = other RNA
ttacatgtattgcagtcct

SEQ ID NO: 63976 - RNA, 19 nt, synthetic construct
  misc_feature 1..19: note = siRNA sense sequence
  source 1..19: mol_type = other RNA
ggactgcaatacatgtaaa

SEQ ID NO: 63977 - RNA, 19 nt, synthetic construct
  misc_feature 1..19: note = siRNA antisense sequence
  source 1..19: mol_type = other RNA
tttacatgtattgcagtcc

SEQ ID NO: 63978 - RNA, 19 nt, synthetic construct
  misc_feature 1..19: note = siRNA sense sequence
  source 1..19: mol_type = other RNA
gactgcaatacatgtaaat

SEQ ID NO: 63979 - RNA, 19 nt, synthetic construct
  misc_feature 1..19: note = siRNA antisense sequence
  source 1..19: mol_type = other RNA
atttacatgtattgcagtc

SEQ ID NO: 63980 - RNA, 19 nt, synthetic construct
  misc_feature 1..19: note = siRNA sense sequence
  source 1..19: mol_type = other RNA
tacatgtaaatttgctacc

SEQ ID NO: 63981 - RNA, 19 nt, synthetic construct
  misc_feature 1..19: note = siRNA antisense sequence
  source 1..19: mol_type = other RNA
ggtagcaaatttacatgta

SEQ ID NO: 63982 - RNA, 19 nt, synthetic construct
  misc_feature 1..19: note = siRNA sense sequence
  source 1..19: mol_type = other RNA
acatgtaaatttgctacca

SEQ ID NO: 63983 - RNA, 19 nt, synthetic construct
  misc_feature 1..19: note = siRNA antisense sequence
  source 1..19: mol_type = other RNA
tggtagcaaatttacatgt

SEQ ID NO: 63984 - RNA, 19 nt, synthetic construct
  misc_feature 1..19: note = siRNA sense sequence
  source 1..19: mol_type = other RNA
catgtaaatttgctaccat

SEQ ID NO: 63985 - RNA, 19 nt, synthetic construct
  misc_feature 1..19: note = siRNA antisense sequence
  source 1..19: mol_type = other RNA
atggtagcaaatttacatg

SEQ ID NO: 63986 - RNA, 19 nt, synthetic construct
  misc_feature 1..19: note = siRNA sense sequence
  source 1..19: mol_type = other RNA
atgtaaatttgctaccatc

SEQ ID NO: 63987 - RNA, 19 nt, synthetic construct
  misc_feature 1..19: note = siRNA antisense sequence
  source 1..19: mol_type = other RNA
gatggtagcaaatttacat

SEQ ID NO: 63988 - RNA, 19 nt, synthetic construct
  misc_feature 1..19: note = siRNA sense sequence
  source 1..19: mol_type = other RNA
aaatttgctaccatcacat

SEQ ID NO: 63989 - RNA, 19 nt, synthetic construct
  misc_feature 1..19: note = siRNA antisense sequence
  source 1..19: mol_type = other RNA
atgtgatggtagcaaattt

SEQ ID NO: 63990 - RNA, 19 nt, synthetic construct
  misc_feature 1..19: note = siRNA sense sequence
  source 1..19: mol_type = other RNA
aatttgctaccatcacatg

SEQ ID NO: 63991 - RNA, 19 nt, synthetic construct
  misc_feature 1..19: note = siRNA antisense sequence
  source 1..19: mol_type = other RNA
catgtgatggtagcaaatt

SEQ ID NO: 63992 - RNA, 19 nt, synthetic construct
  misc_feature 1..19: note = siRNA sense sequence
  source 1..19: mol_type = other RNA
atttgctaccatcacatgt

SEQ ID NO: 63993 - RNA, 19 nt, synthetic construct
  misc_feature 1..19: note = siRNA antisense sequence
  source 1..19: mol_type = other RNA
acatgtgatggtagcaaat

SEQ ID NO: 63994 - RNA, 19 nt, synthetic construct
  misc_feature 1..19: note = siRNA sense sequence
  source 1..19: mol_type = other RNA
tttgctaccatcacatgta

SEQ ID NO: 63995 - RNA, 19 nt, synthetic construct
  misc_feature 1..19: note = siRNA antisense sequence
  source 1..19: mol_type = other RNA
tacatgtgatggtagcaaa

SEQ ID NO: 63996 - RNA, 19 nt, synthetic construct
  misc_feature 1..19: note = siRNA sense sequence
  source 1..19: mol_type = other RNA
ttgctaccatcacatgtaa

SEQ ID NO: 63997 - RNA, 19 nt, synthetic construct
  misc_feature 1..19: note = siRNA antisense sequence
  source 1..19: mol_type = other RNA
ttacatgtgatggtagcaa

SEQ ID NO: 63998 - RNA, 19 nt, synthetic construct
  misc_feature 1..19: note = siRNA sense sequence
  source 1..19: mol_type = other RNA
tgctaccatcacatgtaat

SEQ ID NO: 63999 - RNA, 19 nt, synthetic construct
  misc_feature 1..19: note = siRNA antisense sequence
  source 1..19: mol_type = other RNA
attacatgtgatggtagca

SEQ ID NO: 64000 - RNA, 19 nt, synthetic construct
  misc_feature 1..19: note = siRNA sense sequence
  source 1..19: mol_type = other RNA
gctaccatcacatgtaatc

SEQ ID NO: 64001 - RNA, 19 nt, synthetic construct
  misc_feature 1..19: note = siRNA antisense sequence
  source 1..19: mol_type = other RNA
gattacatgtgatggtagc

SEQ ID NO: 64002 - RNA, 19 nt, synthetic construct
  misc_feature 1..19: note = siRNA sense sequence
  source 1..19: mol_type = other RNA
ctaccatcacatgtaatct

SEQ ID NO: 64003 - RNA, 19 nt, synthetic construct
  misc_feature 1..19: note = siRNA antisense sequence
  source 1..19: mol_type = other RNA
agattacatgtgatggtag

SEQ ID NO: 64004 - RNA, 19 nt, synthetic construct
  misc_feature 1..19: note = siRNA sense sequence
  source 1..19: mol_type = other RNA
taccatcacatgtaatctc

SEQ ID NO: 64005 - RNA, 19 nt, synthetic construct
  misc_feature 1..19: note = siRNA antisense sequence
  source 1..19: mol_type = other RNA
gagattacatgtgatggta

SEQ ID NO: 64006 - RNA, 19 nt, synthetic construct
  misc_feature 1..19: note = siRNA sense sequence
  source 1..19: mol_type = other RNA
accatcacatgtaatctca

SEQ ID NO: 64007 - RNA, 19 nt, synthetic construct
  misc_feature 1..19: note = siRNA antisense sequence
  source 1..19: mol_type = other RNA
tgagattacatgtgatggt

SEQ ID NO: 64008 - RNA, 19 nt, synthetic construct
  misc_feature 1..19: note = siRNA sense sequence
  source 1..19: mol_type = other RNA
ccatcacatgtaatctcac

SEQ ID NO: 64009 - RNA, 19 nt, synthetic construct
  misc_feature 1..19: note = siRNA antisense sequence
  source 1..19: mol_type = other RNA
gtgagattacatgtgatgg

SEQ ID NO: 64010 - RNA, 19 nt, synthetic construct
  misc_feature 1..19: note = siRNA sense sequence
  source 1..19: mol_type = other RNA
catcacatgtaatctcact

SEQ ID NO: 64011 - RNA, 19 nt, synthetic construct
  misc_feature 1..19: note = siRNA antisense sequence
  source 1..19: mol_type = other RNA
agtgagattacatgtgatg

SEQ ID NO: 64012 - RNA, 19 nt, synthetic construct
  misc_feature 1..19: note = siRNA sense sequence
  source 1..19: mol_type = other RNA
atcacatgtaatctcactt

SEQ ID NO: 64013 - RNA, 19 nt, synthetic construct
  misc_feature 1..19: note = siRNA antisense sequence
  source 1..19: mol_type = other RNA
aagtgagattacatgtgat

SEQ ID NO: 64014 - RNA, 19 nt, synthetic construct
  misc_feature 1..19: note = siRNA sense sequence
  source 1..19: mol_type = other RNA
tcacatgtaatctcacttc

SEQ ID NO: 64015 - RNA, 19 nt, synthetic construct
  misc_feature 1..19: note = siRNA antisense sequence
  source 1..19: mol_type = other RNA
gaagtgagattacatgtga

SEQ ID NO: 64016 - RNA, 19 nt, synthetic construct
  misc_feature 1..19: note = siRNA sense sequence
  source 1..19: mol_type = other RNA
cacatgtaatctcacttct

SEQ ID NO: 64017 - RNA, 19 nt, synthetic construct
  misc_feature 1..19: note = siRNA antisense sequence
  source 1..19: mol_type = other RNA
agaagtgagattacatgtg

SEQ ID NO: 64018 - RNA, 19 nt, synthetic construct
  misc_feature 1..19: note = siRNA sense sequence
  source 1..19: mol_type = other RNA
acatgtaatctcacttctt

SEQ ID NO: 64019 - RNA, 19 nt, synthetic construct
  misc_feature 1..19: note = siRNA antisense sequence
  source 1..19: mol_type = other RNA
aagaagtgagattacatgt

SEQ ID NO: 64020 - RNA, 19 nt, synthetic construct
  misc_feature 1..19: note = siRNA sense sequence
  source 1..19: mol_type = other RNA
catgtaatctcacttcttc

SEQ ID NO: 64021 - RNA, 19 nt, synthetic construct
  misc_feature 1..19: note = siRNA antisense sequence
  source 1..19: mol_type = other RNA
gaagaagtgagattacatg

SEQ ID NO: 64022 - RNA, 19 nt, synthetic construct
  misc_feature 1..19: note = siRNA sense sequence
  source 1..19: mol_type = other RNA
atgtaatctcacttcttct

SEQ ID NO: 64023 - RNA, 19 nt, synthetic construct
  misc_feature 1..19: note = siRNA antisense sequence
  source 1..19: mol_type = other RNA
agaagaagtgagattacat

SEQ ID NO: 64024 - RNA, 19 nt, synthetic construct
  misc_feature 1..19: note = siRNA sense sequence
  source 1..19: mol_type = other RNA
tgtaatctcacttcttctg

SEQ ID NO: 64025 - RNA, 19 nt, synthetic construct
  misc_feature 1..19: note = siRNA antisense sequence
  source 1..19: mol_type = other RNA
cagaagaagtgagattaca

SEQ ID NO: 64026 - RNA, 19 nt, synthetic construct
  misc_feature 1..19: note = siRNA sense sequence
  source 1..19: mol_type = other RNA
gtaatctcacttcttctga

SEQ ID NO: 64027 - RNA, 19 nt, synthetic construct
  misc_feature 1..19: note = siRNA antisense sequence
  source 1..19: mol_type = other RNA
tcagaagaagtgagattac

SEQ ID NO: 64028 - RNA, 19 nt, synthetic construct
  misc_feature 1..19: note = siRNA sense sequence
  source 1..19: mol_type = other RNA
taatctcacttcttctgac

SEQ ID NO: 64029 - RNA, 19 nt, synthetic construct
  misc_feature 1..19: note = siRNA antisense sequence
  source 1..19: mol_type = other RNA
gtcagaagaagtgagatta

SEQ ID NO: 64030 - RNA, 19 nt, synthetic construct
  misc_feature 1..19: note = siRNA sense sequence
  source 1..19: mol_type = other RNA
aatctcacttcttctgaca

SEQ ID NO: 64031 - RNA, 19 nt, synthetic construct
  misc_feature 1..19: note = siRNA antisense sequence
  source 1..19: mol_type = other RNA
tgtcagaagaagtgagatt

SEQ ID NO: 64032 - RNA, 19 nt, synthetic construct
  misc_feature 1..19: note = siRNA sense sequence
  source 1..19: mol_type = other RNA
atctcacttcttctgacat

SEQ ID NO: 64033 - RNA, 19 nt, synthetic construct
  misc_feature 1..19: note = siRNA antisense sequence
  source 1..19: mol_type = other RNA
atgtcagaagaagtgagat

SEQ ID NO: 64034 - RNA, 19 nt, synthetic construct
  misc_feature 1..19: note = siRNA sense sequence
  source 1..19: mol_type = other RNA
cttctgacatcagccaagt

SEQ ID NO: 64035 - RNA, 19 nt, synthetic construct
  misc_feature 1..19: note = siRNA antisense sequence
  source 1..19: mol_type = other RNA
acttggctgatgtcagaag

SEQ ID NO: 64036 - RNA, 19 nt, synthetic construct
  misc_feature 1..19: note = siRNA sense sequence
  source 1..19: mol_type = other RNA
ttctgacatcagccaagtc

SEQ ID NO: 64037 - RNA, 19 nt, synthetic construct
  misc_feature 1..19: note = siRNA antisense sequence
  source 1..19: mol_type = other RNA
gacttggctgatgtcagaa

SEQ ID NO: 64038 - RNA, 19 nt, synthetic construct
  misc_feature 1..19: note = siRNA sense sequence
  source 1..19: mol_type = other RNA
gacatcagccaagtcaatg

SEQ ID NO: 64039 - RNA, 19 nt, synthetic construct
  misc_feature 1..19: note = siRNA antisense sequence
  source 1..19: mol_type = other RNA
cattgacttggctgatgtc

SEQ ID NO: 64040 - RNA, 19 nt, synthetic construct
  misc_feature 1..19: note = siRNA sense sequence
  source 1..19: mol_type = other RNA
gccaagtcaatgtttcgct

SEQ ID NO: 64041 - RNA, 19 nt, synthetic construct
  misc_feature 1..19: note = siRNA antisense sequence
  source 1..19: mol_type = other RNA
agcgaaacattgacttggc

SEQ ID NO: 64042 - RNA, 19 nt, synthetic construct
  misc_feature 1..19: note = siRNA sense sequence
  source 1..19: mol_type = other RNA
ccaagtcaatgtttcgctt

SEQ ID NO: 64043 - RNA, 19 nt, synthetic construct
  misc_feature 1..19: note = siRNA antisense sequence
  source 1..19: mol_type = other RNA
aagcgaaacattgacttgg

SEQ ID NO: 64044 - RNA, 19 nt, synthetic construct
  misc_feature 1..19: note = siRNA sense sequence
  source 1..19: mol_type = other RNA
caagtcaatgtttcgctta

SEQ ID NO: 64045 - RNA, 19 nt, synthetic construct
  misc_feature 1..19: note = siRNA antisense sequence
  source 1..19: mol_type = other RNA
taagcgaaacattgacttg

SEQ ID NO: 64046 - RNA, 19 nt, synthetic construct
  misc_feature 1..19: note = siRNA sense sequence
  source 1..19: mol_type = other RNA
aagtcaatgtttcgcttat

SEQ ID NO: 64047 - RNA, 19 nt, synthetic construct
  misc_feature 1..19: note = siRNA antisense sequence
  source 1..19: mol_type = other RNA
ataagcgaaacattgactt

SEQ ID NO: 64048 - RNA, 19 nt, synthetic construct
  misc_feature 1..19: note = siRNA sense sequence
  source 1..19: mol_type = other RNA
agtcaatgtttcgcttatc

SEQ ID NO: 64049 - RNA, 19 nt, synthetic construct
  misc_feature 1..19: note = siRNA antisense sequence
  source 1..19: mol_type = other RNA
gataagcgaaacattgact

SEQ ID NO: 64050 - RNA, 19 nt, synthetic construct
  misc_feature 1..19: note = siRNA sense sequence
  source 1..19: mol_type = other RNA
gtcaatgtttcgcttatct

SEQ ID NO: 64051 - RNA, 19 nt, synthetic construct
  misc_feature 1..19: note = siRNA antisense sequence
  source 1..19: mol_type = other RNA
agataagcgaaacattgac

SEQ ID NO: 64052 - RNA, 19 nt, synthetic construct
  misc_feature 1..19: note = siRNA sense sequence
  source 1..19: mol_type = other RNA
tcaatgtttcgcttatctt

SEQ ID NO: 64053 - RNA, 19 nt, synthetic construct
  misc_feature 1..19: note = siRNA antisense sequence
  source 1..19: mol_type = other RNA
aagataagcgaaacattga

SEQ ID NO: 64054 - RNA, 19 nt, synthetic construct
  misc_feature 1..19: note = siRNA sense sequence
  source 1..19: mol_type = other RNA
caatgtttcgcttatcttg

SEQ ID NO: 64055 - RNA, 19 nt, synthetic construct
  misc_feature 1..19: note = siRNA antisense sequence
  source 1..19: mol_type = other RNA
caagataagcgaaacattg

SEQ ID NO: 64056 - RNA, 19 nt, synthetic construct
  misc_feature 1..19: note = siRNA sense sequence
  source 1..19: mol_type = other RNA
aatgtttcgcttatcttgt

SEQ ID NO: 64057 - RNA, 19 nt, synthetic construct
  misc_feature 1..19: note = siRNA antisense sequence
  source 1..19: mol_type = other RNA
acaagataagcgaaacatt

SEQ ID NO: 64058 - RNA, 19 nt, synthetic construct
  misc_feature 1..19: note = siRNA sense sequence
  source 1..19: mol_type = other RNA
atgtttcgcttatcttgtg

SEQ ID NO: 64059 - RNA, 19 nt, synthetic construct
  misc_feature 1..19: note = siRNA antisense sequence
  source 1..19: mol_type = other RNA
cacaagataagcgaaacat

SEQ ID NO: 64060 - RNA, 19 nt, synthetic construct
  misc_feature 1..19: note = siRNA sense sequence
  source 1..19: mol_type = other RNA
tgtttcgcttatcttgtgg

SEQ ID NO: 64061 - RNA, 19 nt, synthetic construct
  misc_feature 1..19: note = siRNA antisense sequence
  source 1..19: mol_type = other RNA
ccacaagataagcgaaaca

SEQ ID NO: 64062 - RNA, 19 nt, synthetic construct
  misc_feature 1..19: note = siRNA sense sequence
  source 1..19: mol_type = other RNA
gtttcgcttatcttgtgga

SEQ ID NO: 64063 - RNA, 19 nt, synthetic construct
  misc_feature 1..19: note = siRNA antisense sequence
  source 1..19: mol_type = other RNA
tccacaagataagcgaaac

SEQ ID NO: 64064 - RNA, 19 nt, synthetic construct
  misc_feature 1..19: note = siRNA sense sequence
  source 1..19: mol_type = other RNA
tttcgcttatcttgtggaa

SEQ ID NO: 64065 - RNA, 19 nt, synthetic construct
  misc_feature 1..19: note = siRNA antisense sequence
  source 1..19: mol_type = other RNA
ttccacaagataagcgaaa

SEQ ID NO: 64066 - RNA, 19 nt, synthetic construct
  misc_feature 1..19: note = siRNA sense sequence
  source 1..19: mol_type = other RNA
tttaccacttagaatatgc

SEQ ID NO: 64067 - RNA, 19 nt, synthetic construct
  misc_feature 1..19: note = siRNA antisense sequence
  source 1..19: mol_type = other RNA
gcatattctaagtggtaaa

SEQ ID NO: 64068 - RNA, 19 nt, synthetic construct
  misc_feature 1..19: note = siRNA sense sequence
  source 1..19: mol_type = other RNA
ccacttagaatatgcaagg

SEQ ID NO: 64069 - RNA, 19 nt, synthetic construct
  misc_feature 1..19: note = siRNA antisense sequence
  source 1..19: mol_type = other RNA
ccttgcatattctaagtgg

SEQ ID NO: 64070 - RNA, 19 nt, synthetic construct
  misc_feature 1..19: note = siRNA sense sequence
  source 1..19: mol_type = other RNA
cacttagaatatgcaaggc

SEQ ID NO: 64071 - RNA, 19 nt, synthetic construct
  misc_feature 1..19: note = siRNA antisense sequence
  source 1..19: mol_type = other RNA
gccttgcatattctaagtg

SEQ ID NO: 64072 - RNA, 19 nt, synthetic construct
  misc_feature 1..19: note = siRNA sense sequence
  source 1..19: mol_type = other RNA
acttagaatatgcaaggca

SEQ ID NO: 64073 - RNA, 19 nt, synthetic construct
  misc_feature 1..19: note = siRNA antisense sequence
  source 1..19: mol_type = other RNA
tgccttgcatattctaagt

SEQ ID NO: 64074 - RNA, 19 nt, synthetic construct
  misc_feature 1..19: note = siRNA sense sequence
  source 1..19: mol_type = other RNA
ctggaagtataagaggatg

SEQ ID NO: 64075 - RNA, 19 nt, synthetic construct
  misc_feature 1..19: note = siRNA antisense sequence
  source 1..19: mol_type = other RNA
catcctcttatacttccag

SEQ ID NO: 64076 - RNA, 19 nt, synthetic construct
  misc_feature 1..19: note = siRNA sense sequence
  source 1..19: mol_type = other RNA
tggaagtataagaggatgt

SEQ ID NO: 64077 - RNA, 19 nt, synthetic construct
  misc_feature 1..19: note = siRNA antisense sequence
  source 1..19: mol_type = other RNA
acatcctcttatacttcca

SEQ ID NO: 64078 - RNA, 19 nt, synthetic construct
  misc_feature 1..19: note = siRNA sense sequence
  source 1..19: mol_type = other RNA
ggaagtataagaggatgtg

SEQ ID NO: 64079 - RNA, 19 nt, synthetic construct
  misc_feature 1..19: note = siRNA antisense sequence
  source 1..19: mol_type = other RNA
cacatcctcttatacttcc

SEQ ID NO: 64080 - RNA, 19 nt, synthetic construct
  misc_feature 1..19: note = siRNA sense sequence
  source 1..19: mol_type = other RNA
gtataagaggatgtgacca

SEQ ID NO: 64081 - RNA, 19 nt, synthetic construct
  misc_feature 1..19: note = siRNA antisense sequence
  source 1..19: mol_type = other RNA
tggtcacatcctcttatac

SEQ ID NO: 64082 - RNA, 19 nt, synthetic construct
  misc_feature 1..19: note = siRNA sense sequence
  source 1..19: mol_type = other RNA
aagaggatgtgaccaagcc

SEQ ID NO: 64083 - RNA, 19 nt, synthetic construct
  misc_feature 1..19: note = siRNA antisense sequence
  source 1..19: mol_type = other RNA
ggcttggtcacatcctctt

SEQ ID NO: 64084 - RNA, 19 nt, synthetic construct
  misc_feature 1..19: note = siRNA sense sequence
  source 1..19: mol_type = other RNA
cccagctctacttaaccag

SEQ ID NO: 64085 - RNA, 19 nt, synthetic construct
  misc_feature 1..19: note = siRNA antisense sequence
  source 1..19: mol_type = other RNA
ctggttaagtagagctggg

SEQ ID NO: 64086 - RNA, 19 nt, synthetic construct
  misc_feature 1..19: note = siRNA sense sequence
  source 1..19: mol_type = other RNA
gctctacttaaccagctat

SEQ ID NO: 64087 - RNA, 19 nt, synthetic construct
  misc_feature 1..19: note = siRNA antisense sequence
  source 1..19: mol_type = other RNA
atagctggttaagtagagc

SEQ ID NO: 64088 - RNA, 19 nt, synthetic construct
  misc_feature 1..19: note = siRNA sense sequence
  source 1..19: mol_type = other RNA
ctctacttaaccagctatg

SEQ ID NO: 64089 - RNA, 19 nt, synthetic construct
  misc_feature 1..19: note = siRNA antisense sequence
  source 1..19: mol_type = other RNA
catagctggttaagtagag

SEQ ID NO: 64090 - RNA, 19 nt, synthetic construct
  misc_feature 1..19: note = siRNA sense sequence
  source 1..19: mol_type = other RNA
cagctatgtgtgtctcatc

SEQ ID NO: 64091 - RNA, 19 nt, synthetic construct
  misc_feature 1..19: note = siRNA antisense sequence
  source 1..19: mol_type = other RNA
gatgagacacacatagctg

SEQ ID NO: 64092 - RNA, 19 nt, synthetic construct
  misc_feature 1..19: note = siRNA sense sequence
  source 1..19: mol_type = other RNA
agctatgtgtgtctcatct

SEQ ID NO: 64093 - RNA, 19 nt, synthetic construct
  misc_feature 1..19: note = siRNA antisense sequence
  source 1..19: mol_type = other RNA
agatgagacacacatagct

SEQ ID NO: 64094 - RNA, 19 nt, synthetic construct
  misc_feature 1..19: note = siRNA sense sequence
  source 1..19: mol_type = other RNA
gctatgtgtgtctcatctt

SEQ ID NO: 64095 - RNA, 19 nt, synthetic construct
  misc_feature 1..19: note = siRNA antisense sequence
  source 1..19: mol_type = other RNA
aagatgagacacacatagc

SEQ ID NO: 64096 - RNA, 19 nt, synthetic construct
  misc_feature 1..19: note = siRNA sense sequence
  source 1..19: mol_type = other RNA
ctatgtgtgtctcatcttc

SEQ ID NO: 64097 - RNA, 19 nt, synthetic construct
  misc_feature 1..19: note = siRNA antisense sequence
  source 1..19: mol_type = other RNA
gaagatgagacacacatag

SEQ ID NO: 64098 - RNA, 19 nt, synthetic construct
  misc_feature 1..19: note = siRNA sense sequence
  source 1..19: mol_type = other RNA
gtgtgtctcatcttccttg

SEQ ID NO: 64099 - RNA, 19 nt, synthetic construct
  misc_feature 1..19: note = siRNA antisense sequence
  source 1..19: mol_type = other RNA
caaggaagatgagacacac

SEQ ID NO: 64100 - RNA, 19 nt, synthetic construct
  misc_feature 1..19: note = siRNA sense sequence
  source 1..19: mol_type = other RNA
tgtgtctcatcttccttgt

SEQ ID NO: 64101 - RNA, 19 nt, synthetic construct
  misc_feature 1..19: note = siRNA antisense sequence
  source 1..19: mol_type = other RNA
acaaggaagatgagacaca

SEQ ID NO: 64102 - RNA, 19 nt, synthetic construct
  misc_feature 1..19: note = siRNA sense sequence
  source 1..19: mol_type = other RNA
gtctcatcttccttgtctg

SEQ ID NO: 64103 - RNA, 19 nt, synthetic construct
  misc_feature 1..19: note = siRNA antisense sequence
  source 1..19: mol_type = other RNA
cagacaaggaagatgagac

SEQ ID NO: 64104 - RNA, 19 nt, synthetic construct
  misc_feature 1..19: note = siRNA sense sequence
  source 1..19: mol_type = other RNA
tcatcttccttgtctgtta

SEQ ID NO: 64105 - RNA, 19 nt, synthetic construct
  misc_feature 1..19: note = siRNA antisense sequence
  source 1..19: mol_type = other RNA
taacagacaaggaagatga

SEQ ID NO: 64106 - RNA, 19 nt, synthetic construct
  misc_feature 1..19: note = siRNA sense sequence
  source 1..19: mol_type = other RNA
atcttccttgtctgttaag

SEQ ID NO: 64107 - RNA, 19 nt, synthetic construct
  misc_feature 1..19: note = siRNA antisense sequence
  source 1..19: mol_type = other RNA
cttaacagacaaggaagat

SEQ ID NO: 64108 - RNA, 19 nt, synthetic construct
  misc_feature 1..19: note = siRNA sense sequence
  source 1..19: mol_type = other RNA
cttccttgtctgttaagaa

SEQ ID NO: 64109 - RNA, 19 nt, synthetic construct
  misc_feature 1..19: note = siRNA antisense sequence
  source 1..19: mol_type = other RNA
ttcttaacagacaaggaag

SEQ ID NO: 64110 - RNA, 19 nt, synthetic construct
  misc_feature 1..19: note = siRNA sense sequence
  source 1..19: mol_type = other RNA
taagatattaccaaggtcc

SEQ ID NO: 64111 - RNA, 19 nt, synthetic construct
  misc_feature 1..19: note = siRNA antisense sequence
  source 1..19: mol_type = other RNA
ggaccttggtaatatctta

SEQ ID NO: 64112 - RNA, 19 nt, synthetic construct
  misc_feature 1..19: note = siRNA sense sequence
  source 1..19: mol_type = other RNA
tttcaatctctcttatcct

SEQ ID NO: 64113 - RNA, 19 nt, synthetic construct
  misc_feature 1..19: note = siRNA antisense sequence
  source 1..19: mol_type = other RNA
aggataagagagattgaaa

SEQ ID NO: 64114 - RNA, 19 nt, synthetic construct
  misc_feature 1..19: note = siRNA sense sequence
  source 1..19: mol_type = other RNA
tcaatctctcttatccttt

SEQ ID NO: 64115 - RNA, 19 nt, synthetic construct
  misc_feature 1..19: note = siRNA antisense sequence
  source 1..19: mol_type = other RNA
aaaggataagagagattga

SEQ ID NO: 64116 - RNA, 19 nt, synthetic construct
  misc_feature 1..19: note = siRNA sense sequence
  source 1..19: mol_type = other RNA
caatctctcttatcctttt

SEQ ID NO: 64117 - RNA, 19 nt, synthetic construct
  misc_feature 1..19: note = siRNA antisense sequence
  source 1..19: mol_type = other RNA
aaaaggataagagagattg

SEQ ID NO: 64118 - RNA, 19 nt, synthetic construct
  misc_feature 1..19: note = siRNA sense sequence
  source 1..19: mol_type = other RNA
agataaatacctttccagt

SEQ ID NO: 64119 - RNA, 19 nt, synthetic construct
  misc_feature 1..19: note = siRNA antisense sequence
  source 1..19: mol_type = other RNA
actggaaaggtatttatct

SEQ ID NO: 64120 - RNA, 19 nt, synthetic construct
  misc_feature 1..19: note = siRNA sense sequence
  source 1..19: mol_type = other RNA
gataaatacctttccagta

SEQ ID NO: 64121 - RNA, 19 nt, synthetic construct
  misc_feature 1..19: note = siRNA antisense sequence
  source 1..19: mol_type = other RNA
tactggaaaggtatttatc

SEQ ID NO: 64122 - RNA, 19 nt, synthetic construct
  misc_feature 1..19: note = siRNA sense sequence
  source 1..19: mol_type = other RNA
ttccagtaccaaagcttgc

SEQ ID NO: 64123 - RNA, 19 nt, synthetic construct
  misc_feature 1..19: note = siRNA antisense sequence
  source 1..19: mol_type = other RNA
gcaagctttggtactggaa

SEQ ID NO: 64124 - RNA, 19 nt, synthetic construct
  misc_feature 1..19: note = siRNA sense sequence
  source 1..19: mol_type = other RNA
tccagtaccaaagcttgca

SEQ ID NO: 64125 - RNA, 19 nt, synthetic construct
  misc_feature 1..19: note = siRNA antisense sequence
  source 1..19: mol_type = other RNA
tgcaagctttggtactgga

SEQ ID NO: 64126 - RNA, 19 nt, synthetic construct
  misc_feature 1..19: note = siRNA sense sequence
  source 1..19: mol_type = other RNA
accaaagcttgcacttatc

SEQ ID NO: 64127 - RNA, 19 nt, synthetic construct
  misc_feature 1..19: note = siRNA antisense sequence
  source 1..19: mol_type = other RNA
gataagtgcaagctttggt

SEQ ID NO: 64128 - RNA, 19 nt, synthetic construct
  misc_feature 1..19: note = siRNA sense sequence
  source 1..19: mol_type = other RNA
ccaaagcttgcacttatct

SEQ ID NO: 64129 - RNA, 19 nt, synthetic construct
  misc_feature 1..19: note = siRNA antisense sequence
  source 1..19: mol_type = other RNA
agataagtgcaagctttgg

SEQ ID NO: 64130 - RNA, 19 nt, synthetic construct
  misc_feature 1..19: note = siRNA sense sequence
  source 1..19: mol_type = other RNA
aaagcttgcacttatctta

SEQ ID NO: 64131 - RNA, 19 nt, synthetic construct
  misc_feature 1..19: note = siRNA antisense sequence
  source 1..19: mol_type = other RNA
taagataagtgcaagcttt

SEQ ID NO: 64132 - RNA, 19 nt, synthetic construct
  misc_feature 1..19: note = siRNA sense sequence
  source 1..19: mol_type = other RNA
aagcttgcacttatcttaa

SEQ ID NO: 64133 - RNA, 19 nt, synthetic construct
  misc_feature 1..19: note = siRNA antisense sequence
  source 1..19: mol_type = other RNA
ttaagataagtgcaagctt

SEQ ID NO: 64134 - RNA, 19 nt, synthetic construct
  misc_feature 1..19: note = siRNA sense sequence
  source 1..19: mol_type = other RNA
agcttgcacttatcttaat

SEQ ID NO: 64135 - RNA, 19 nt, synthetic construct
  misc_feature 1..19: note = siRNA antisense sequence
  source 1..19: mol_type = other RNA
attaagataagtgcaagct

SEQ ID NO: 64136 - RNA, 19 nt, synthetic construct
  misc_feature 1..19: note = siRNA sense sequence
  source 1..19: mol_type = other RNA
gcttgcacttatcttaata

SEQ ID NO: 64137 - RNA, 19 nt, synthetic construct
  misc_feature 1..19: note = siRNA antisense sequence
  source 1..19: mol_type = other RNA
tattaagataagtgcaagc

SEQ ID NO: 64138 - RNA, 19 nt, synthetic construct
  misc_feature 1..19: note = siRNA sense sequence
  source 1..19: mol_type = other RNA
cttgcacttatcttaatac

SEQ ID NO: 64139 - RNA, 19 nt, synthetic construct
  misc_feature 1..19: note = siRNA antisense sequence
  source 1..19: mol_type = other RNA
gtattaagataagtgcaag

SEQ ID NO: 64140 - RNA, 19 nt, synthetic construct
  misc_feature 1..19: note = siRNA sense sequence
  source 1..19: mol_type = other RNA
actcagttaatgtacagag

SEQ ID NO: 64141 - RNA, 19 nt, synthetic construct
  misc_feature 1..19: note = siRNA antisense sequence
  source 1..19: mol_type = other RNA
ctctgtacattaactgagt

SEQ ID NO: 64142 - RNA, 19 nt, synthetic construct
  misc_feature 1..19: note = siRNA sense sequence
  source 1..19: mol_type = other RNA
ctcagttaatgtacagagt

SEQ ID NO: 64143 - RNA, 19 nt, synthetic construct
  misc_feature 1..19: note = siRNA antisense sequence
  source 1..19: mol_type = other RNA
actctgtacattaactgag

SEQ ID NO: 64144 - RNA, 19 nt, synthetic construct
  misc_feature 1..19: note = siRNA sense sequence
  source 1..19: mol_type = other RNA
tcagttaatgtacagagta

SEQ ID NO: 64145 - RNA, 19 nt, synthetic construct
  misc_feature 1..19: note = siRNA antisense sequence
  source 1..19: mol_type = other RNA
tactctgtacattaactga

SEQ ID NO: 64146 - RNA, 19 nt, synthetic construct
  misc_feature 1..19: note = siRNA sense sequence
  source 1..19: mol_type = other RNA
cagttaatgtacagagtat

SEQ ID NO: 64147 - RNA, 19 nt, synthetic construct
  misc_feature 1..19: note = siRNA antisense sequence
  source 1..19: mol_type = other RNA
atactctgtacattaactg

SEQ ID NO: 64148 - RNA, 19 nt, synthetic construct
  misc_feature 1..19: note = siRNA sense sequence
  source 1..19: mol_type = other RNA
acagagtataataaagtgg

SEQ ID NO: 64149 - RNA, 19 nt, synthetic construct
  misc_feature 1..19: note = siRNA antisense sequence
  source 1..19: mol_type = other RNA
ccactttattatactctgt

SEQ ID NO: 64150 - RNA, 19 nt, synthetic construct
  misc_feature 1..19: note = siRNA sense sequence
  source 1..19: mol_type = other RNA
agtataataaagtggcaac

SEQ ID NO: 64151 - RNA, 19 nt, synthetic construct
  misc_feature 1..19: note = siRNA antisense sequence
  source 1..19: mol_type = other RNA
gttgccactttattatact

SEQ ID NO: 64152 - RNA, 19 nt, synthetic construct
  misc_feature 1..19: note = siRNA sense sequence
  source 1..19: mol_type = other RNA
gtataataaagtggcaacc

SEQ ID NO: 64153 - RNA, 19 nt, synthetic construct
  misc_feature 1..19: note = siRNA antisense sequence
  source 1..19: mol_type = other RNA
ggttgccactttattatac

SEQ ID NO: 64154 - RNA, 19 nt, synthetic construct
  misc_feature 1..19: note = siRNA sense sequence
  source 1..19: mol_type = other RNA
tataataaagtggcaaccc

SEQ ID NO: 64155 - RNA, 19 nt, synthetic construct
  misc_feature 1..19: note = siRNA antisense sequence
  source 1..19: mol_type = other RNA
gggttgccactttattata

SEQ ID NO: 64156 - RNA, 19 nt, synthetic construct
  misc_feature 1..19: note = siRNA sense sequence
  source 1..19: mol_type = other RNA
ataaagtggcaacccttga

SEQ ID NO: 64157 - RNA, 19 nt, synthetic construct
  misc_feature 1..19: note = siRNA antisense sequence
  source 1..19: mol_type = other RNA
tcaagggttgccactttat

SEQ ID NO: 64158 - RNA, 19 nt, synthetic construct
  misc_feature 1..19: note = siRNA sense sequence
  source 1..19: mol_type = other RNA
taaagtggcaacccttgac

SEQ ID NO: 64159 - RNA, 19 nt, synthetic construct
  misc_feature 1..19: note = siRNA antisense sequence
  source 1..19: mol_type = other RNA
gtcaagggttgccacttta

SEQ ID NO: 64160 - RNA, 19 nt, synthetic construct
  misc_feature 1..19: note = siRNA sense sequence
  source 1..19: mol_type = other RNA
aaagtggcaacccttgacc

SEQ ID NO: 64161 - RNA, 19 nt, synthetic construct
  misc_feature 1..19: note = siRNA antisense sequence
  source 1..19: mol_type = other RNA
ggtcaagggttgccacttt

SEQ ID NO: 64162 - RNA, 19 nt, synthetic construct
  misc_feature 1..19: note = siRNA sense sequence
  source 1..19: mol_type = other RNA
acatataccatagacttac

SEQ ID NO: 64163 - RNA, 19 nt, synthetic construct
  misc_feature 1..19: note = siRNA antisense sequence
  source 1..19: mol_type = other RNA
gtaagtctatggtatatgt

SEQ ID NO: 64164 - RNA, 19 nt, synthetic construct
  misc_feature 1..19: note = siRNA sense sequence
  source 1..19: mol_type = other RNA
catataccatagacttact

SEQ ID NO: 64165 - RNA, 19 nt, synthetic construct
  misc_feature 1..19: note = siRNA antisense sequence
  source 1..19: mol_type = other RNA
agtaagtctatggtatatg

SEQ ID NO: 64166 - RNA, 19 nt, synthetic construct
  misc_feature 1..19: note = siRNA sense sequence
  source 1..19: mol_type = other RNA
ccatagacttactgtgttt

SEQ ID NO: 64167 - RNA, 19 nt, synthetic construct
  misc_feature 1..19: note = siRNA antisense sequence
  source 1..19: mol_type = other RNA
aaacacagtaagtctatgg

SEQ ID NO: 64168 - RNA, 19 nt, synthetic construct
  misc_feature 1..19: note = siRNA sense sequence
  source 1..19: mol_type = other RNA
catagacttactgtgtttt

SEQ ID NO: 64169 - RNA, 19 nt, synthetic construct
  misc_feature 1..19: note = siRNA antisense sequence
  source 1..19: mol_type = other RNA
aaaacacagtaagtctatg

SEQ ID NO: 64170 - RNA, 19 nt, synthetic construct
  misc_feature 1..19: note = siRNA sense sequence
  source 1..19: mol_type = other RNA
agacttactgtgttttatc

SEQ ID NO: 64171 - RNA, 19 nt, synthetic construct
  misc_feature 1..19: note = siRNA antisense sequence
  source 1..19: mol_type = other RNA
gataaaacacagtaagtct

SEQ ID NO: 64172 - RNA, 19 nt, synthetic construct
  misc_feature 1..19: note = siRNA sense sequence
  source 1..19: mol_type = other RNA
gacttactgtgttttatca

SEQ ID NO: 64173 - RNA, 19 nt, synthetic construct
  misc_feature 1..19: note = siRNA antisense sequence
  source 1..19: mol_type = other RNA
tgataaaacacagtaagtc

SEQ ID NO: 64174 - RNA, 19 nt, synthetic construct
  misc_feature 1..19: note = siRNA sense sequence
  source 1..19: mol_type = other RNA
acttactgtgttttatcag

SEQ ID NO: 64175 - RNA, 19 nt, synthetic construct
  misc_feature 1..19: note = siRNA antisense sequence
  source 1..19: mol_type = other RNA
ctgataaaacacagtaagt

SEQ ID NO: 64176 - RNA, 19 nt, synthetic construct
  misc_feature 1..19: note = siRNA sense sequence
  source 1..19: mol_type = other RNA
cttactgtgttttatcaga

SEQ ID NO: 64177 - RNA, 19 nt, synthetic construct
  misc_feature 1..19: note = siRNA antisense sequence
  source 1..19: mol_type = other RNA
tctgataaaacacagtaag

SEQ ID NO: 64178 - RNA, 19 nt, synthetic construct
  misc_feature 1..19: note = siRNA sense sequence
  source 1..19: mol_type = other RNA
ttactgtgttttatcagac

SEQ ID NO: 64179 - RNA, 19 nt, synthetic construct
  misc_feature 1..19: note = siRNA antisense sequence
  source 1..19: mol_type = other RNA
gtctgataaaacacagtaa

SEQ ID NO: 64180 - RNA, 19 nt, synthetic construct
  misc_feature 1..19: note = siRNA sense sequence
  source 1..19: mol_type = other RNA
tactgtgttttatcagact

SEQ ID NO: 64181 - RNA, 19 nt, synthetic construct
  misc_feature 1..19: note = siRNA antisense sequence
  source 1..19: mol_type = other RNA
agtctgataaaacacagta

SEQ ID NO: 64182 - RNA, 19 nt, synthetic construct
  misc_feature 1..19: note = siRNA sense sequence
  source 1..19: mol_type = other RNA
ataggtatatatgaagcct

SEQ ID NO: 64183 - RNA, 19 nt, synthetic construct
  misc_feature 1..19: note = siRNA antisense sequence
  source 1..19: mol_type = other RNA
aggcttcatatatacctat

SEQ ID NO: 64184 - RNA, 19 nt, synthetic construct
  misc_feature 1..19: note = siRNA sense sequence
  source 1..19: mol_type = other RNA
taggtatatatgaagcctt

SEQ ID NO: 64185 - RNA, 19 nt, synthetic construct
  misc_feature 1..19: note = siRNA antisense sequence
  source 1..19: mol_type = other RNA
aaggcttcatatataccta

SEQ ID NO: 64186 - RNA, 19 nt, synthetic construct
  misc_feature 1..19: note = siRNA sense sequence
  source 1..19: mol_type = other RNA
aggtatatatgaagccttt

SEQ ID NO: 64187 - RNA, 19 nt, synthetic construct
  misc_feature 1..19: note = siRNA antisense sequence
  source 1..19: mol_type = other RNA
aaaggcttcatatatacct

SEQ ID NO: 64188 - RNA, 19 nt, synthetic construct
  misc_feature 1..19: note = siRNA sense sequence
  source 1..19: mol_type = other RNA
ggtatatatgaagcctttt

SEQ ID NO: 64189 - RNA, 19 nt, synthetic construct
  misc_feature 1..19: note = siRNA antisense sequence
  source 1..19: mol_type = other RNA
aaaaggcttcatatatacc

SEQ ID NO: 64190 - RNA, 19 nt, synthetic construct
  misc_feature 1..19: note = siRNA sense sequence
  source 1..19: mol_type = other RNA
tgtctctctgtcgcccagg

SEQ ID NO: 64191 - RNA, 19 nt, synthetic construct
  misc_feature 1..19: note = siRNA antisense sequence
  source 1..19: mol_type = other RNA
cctgggcgacagagagaca

SEQ ID NO: 64192 - RNA, 19 nt, synthetic construct
  misc_feature 1..19: note = siRNA sense sequence
  source 1..19: mol_type = other RNA
tctctctgtcgcccaggct

SEQ ID NO: 64193 - RNA, 19 nt, synthetic construct
  misc_feature 1..19: note = siRNA antisense sequence
  source 1..19: mol_type = other RNA
agcctgggcgacagagaga

SEQ ID NO: 64194 - RNA, 19 nt, synthetic construct
  misc_feature 1..19: note = siRNA sense sequence
  source 1..19: mol_type = other RNA
gctcactgcaagctccacc

SEQ ID NO: 64195 - RNA, 19 nt, synthetic construct
  misc_feature 1..19: note = siRNA antisense sequence
  source 1..19: mol_type = other RNA
ggtggagcttgcagtgagc

SEQ ID NO: 64196 - RNA, 19 nt, synthetic construct
  misc_feature 1..19: note = siRNA sense sequence
  source 1..19: mol_type = other RNA
ctcactgcaagctccacct

SEQ ID NO: 64197 - RNA, 19 nt, synthetic construct
  misc_feature 1..19: note = siRNA antisense sequence
  source 1..19: mol_type = other RNA
aggtggagcttgcagtgag

SEQ ID NO: 64198 - RNA, 19 nt, synthetic construct
  misc_feature 1..19: note = siRNA sense sequence
  source 1..19: mol_type = other RNA
tcactgcaagctccacctc

SEQ ID NO: 64199 - RNA, 19 nt, synthetic construct
  misc_feature 1..19: note = siRNA antisense sequence
  source 1..19: mol_type = other RNA
gaggtggagcttgcagtga

SEQ ID NO: 64200 - RNA, 19 nt, synthetic construct
  misc_feature 1..19: note = siRNA sense sequence
  source 1..19: mol_type = other RNA
tgcctcagcctcccgagta

SEQ ID NO: 64201 - RNA, 19 nt, synthetic construct
  misc_feature 1..19: note = siRNA antisense sequence
  source 1..19: mol_type = other RNA
tactcgggaggctgaggca

SEQ ID NO: 64202 - RNA, 19 nt, synthetic construct
  misc_feature 1..19: note = siRNA sense sequence
  source 1..19: mol_type = other RNA
ctcagcctcccgagtagct

SEQ ID NO: 64203 - RNA, 19 nt, synthetic construct
  misc_feature 1..19: note = siRNA antisense sequence
  source 1..19: mol_type = other RNA
agctactcgggaggctgag

SEQ ID NO: 64204 - RNA, 19 nt, synthetic construct
  misc_feature 1..19: note = siRNA sense sequence
  source 1..19: mol_type = other RNA
cccttataaagccaaatct

SEQ ID NO: 64205 - RNA, 19 nt, synthetic construct
  misc_feature 1..19: note = siRNA antisense sequence
  source 1..19: mol_type = other RNA
agatttggctttataaggg

SEQ ID NO: 64206 - RNA, 19 nt, synthetic construct
  misc_feature 1..19: note = siRNA sense sequence
  source 1..19: mol_type = other RNA
cttataaagccaaatctgt

SEQ ID NO: 64207 - RNA, 19 nt, synthetic construct
  misc_feature 1..19: note = siRNA antisense sequence
  source 1..19: mol_type = other RNA
acagatttggctttataag

SEQ ID NO: 64208 - RNA, 19 nt, synthetic construct
  misc_feature 1..19: note = siRNA sense sequence
  source 1..19: mol_type = other RNA
ttataaagccaaatctgtc

SEQ ID NO: 64209 - RNA, 19 nt, synthetic construct
  misc_feature 1..19: note = siRNA antisense sequence
  source 1..19: mol_type = other RNA
gacagatttggctttataa

SEQ ID NO: 64210 - RNA, 19 nt, synthetic construct
  misc_feature 1..19: note = siRNA sense sequence
  source 1..19: mol_type = other RNA
ataaagccaaatctgtctg

SEQ ID NO: 64211 - RNA, 19 nt, synthetic construct
  misc_feature 1..19: note = siRNA antisense sequence
  source 1..19: mol_type = other RNA
cagacagatttggctttat

SEQ ID NO: 64212 - RNA, 19 nt, synthetic construct
  misc_feature 1..19: note = siRNA sense sequence
  source 1..19: mol_type = other RNA
aagccaaatctgtctgaca

SEQ ID NO: 64213 - RNA, 19 nt, synthetic construct
  misc_feature 1..19: note = siRNA antisense sequence
  source 1..19: mol_type = other RNA
tgtcagacagatttggctt

SEQ ID NO: 64214 - RNA, 19 nt, synthetic construct
  misc_feature 1..19: note = siRNA sense sequence
  source 1..19: mol_type = other RNA
tttctcaggaagtatttag

SEQ ID NO: 64215 - RNA, 19 nt, synthetic construct
  misc_feature 1..19: note = siRNA antisense sequence
  source 1..19: mol_type = other RNA
ctaaatacttcctgagaaa

SEQ ID NO: 64216 - RNA, 19 nt, synthetic construct
  misc_feature 1..19: note = siRNA sense sequence
  source 1..19: mol_type = other RNA
ttctcaggaagtatttagt

SEQ ID NO: 64217 - RNA, 19 nt, synthetic construct
  misc_feature 1..19: note = siRNA antisense sequence
  source 1..19: mol_type = other RNA
actaaatacttcctgagaa

SEQ ID NO: 64218 - RNA, 19 nt, synthetic construct
  misc_feature 1..19: note = siRNA sense sequence
  source 1..19: mol_type = other RNA
ctcaggaagtatttagttg

SEQ ID NO: 64219 - RNA, 19 nt, synthetic construct
  misc_feature 1..19: note = siRNA antisense sequence
  source 1..19: mol_type = other RNA
caactaaatacttcctgag

SEQ ID NO: 64220 - RNA, 19 nt, synthetic construct
  misc_feature 1..19: note = siRNA sense sequence
  source 1..19: mol_type = other RNA
tcaggaagtatttagttga

SEQ ID NO: 64221 - RNA, 19 nt, synthetic construct
  misc_feature 1..19: note = siRNA antisense sequence
  source 1..19: mol_type = other RNA
tcaactaaatacttcctga

SEQ ID NO: 64222 - RNA, 19 nt, synthetic construct
  misc_feature 1..19: note = siRNA sense sequence
  source 1..19: mol_type = other RNA
catatgactttgccatttt

SEQ ID NO: 64223 - RNA, 19 nt, synthetic construct
  misc_feature 1..19: note = siRNA antisense sequence
  source 1..19: mol_type = other RNA
aaaatggcaaagtcatatg

SEQ ID NO: 64224 - RNA, 19 nt, synthetic construct
  misc_feature 1..19: note = siRNA sense sequence
  source 1..19: mol_type = other RNA
tacagggagtatacatgca

SEQ ID NO: 64225 - RNA, 19 nt, synthetic construct
  misc_feature 1..19: note = siRNA antisense sequence
  source 1..19: mol_type = other RNA
tgcatgtatactccctgta

SEQ ID NO: 64226 - RNA, 19 nt, synthetic construct
  misc_feature 1..19: note = siRNA sense sequence
  source 1..19: mol_type = other RNA
acagggagtatacatgcac

SEQ ID NO: 64227 - RNA, 19 nt, synthetic construct
  misc_feature 1..19: note = siRNA antisense sequence
  source 1..19: mol_type = other RNA
gtgcatgtatactccctgt

SEQ ID NO: 64228 - RNA, 19 nt, synthetic construct
  misc_feature 1..19: note = siRNA sense sequence
  source 1..19: mol_type = other RNA
cagggagtatacatgcacg

SEQ ID NO: 64229 - RNA, 19 nt, synthetic construct
  misc_feature 1..19: note = siRNA antisense sequence
  source 1..19: mol_type = other RNA
cgtgcatgtatactccctg

SEQ ID NO: 64230 - RNA, 19 nt, synthetic construct
  misc_feature 1..19: note = siRNA sense sequence
  source 1..19: mol_type = other RNA
agggagtatacatgcacga

SEQ ID NO: 64231 - RNA, 19 nt, synthetic construct
  misc_feature 1..19: note = siRNA antisense sequence
  source 1..19: mol_type = other RNA
tcgtgcatgtatactccct

SEQ ID NO: 64232 - RNA, 19 nt, synthetic construct
  misc_feature 1..19: note = siRNA sense sequence
  source 1..19: mol_type = other RNA
gggagtatacatgcacgag

SEQ ID NO: 64233 - RNA, 19 nt, synthetic construct
  misc_feature 1..19: note = siRNA antisense sequence
  source 1..19: mol_type = other RNA
ctcgtgcatgtatactccc

SEQ ID NO: 64234 - RNA, 19 nt, synthetic construct
  misc_feature 1..19: note = siRNA sense sequence
  source 1..19: mol_type = other RNA
ggagtatacatgcacgagt

SEQ ID NO: 64235 - RNA, 19 nt, synthetic construct
  misc_feature 1..19: note = siRNA antisense sequence
  source 1..19: mol_type = other RNA
actcgtgcatgtatactcc

SEQ ID NO: 64236 - RNA, 19 nt, synthetic construct
  misc_feature 1..19: note = siRNA sense sequence
  source 1..19: mol_type = other RNA
gagtatacatgcacgagtt

SEQ ID NO: 64237 - RNA, 19 nt, synthetic construct
  misc_feature 1..19: note = siRNA antisense sequence
  source 1..19: mol_type = other RNA
aactcgtgcatgtatactc

SEQ ID NO: 64238 - RNA, 19 nt, synthetic construct
  misc_feature 1..19: note = siRNA sense sequence
  source 1..19: mol_type = other RNA
agtatacatgcacgagttt

SEQ ID NO: 64239 - RNA, 19 nt, synthetic construct
  misc_feature 1..19: note = siRNA antisense sequence
  source 1..19: mol_type = other RNA
aaactcgtgcatgtatact

SEQ ID NO: 64240 - RNA, 19 nt, synthetic construct
  misc_feature 1..19: note = siRNA sense sequence
  source 1..19: mol_type = other RNA
gtatacatgcacgagtttg

SEQ ID NO: 64241 - RNA, 19 nt, synthetic construct
  misc_feature 1..19: note = siRNA antisense sequence
  source 1..19: mol_type = other RNA
caaactcgtgcatgtatac

SEQ ID NO: 64242 - RNA, 19 nt, synthetic construct
  misc_feature 1..19: note = siRNA sense sequence
  source 1..19: mol_type = other RNA
tatacatgcacgagtttgt

SEQ ID NO: 64243 - RNA, 19 nt, synthetic construct
  misc_feature 1..19: note = siRNA antisense sequence
  source 1..19: mol_type = other RNA
acaaactcgtgcatgtata

SEQ ID NO: 64244 - RNA, 19 nt, synthetic construct
  misc_feature 1..19: note = siRNA sense sequence
  source 1..19: mol_type = other RNA
cacgagtttgttacatggg

SEQ ID NO: 64245 - RNA, 19 nt, synthetic construct
  misc_feature 1..19: note = siRNA antisense sequence
  source 1..19: mol_type = other RNA
cccatgtaacaaactcgtg

SEQ ID NO: 64246 - RNA, 19 nt, synthetic construct
  misc_feature 1..19: note = siRNA sense sequence
  source 1..19: mol_type = other RNA
catgggtatatttgcagga

SEQ ID NO: 64247 - RNA, 19 nt, synthetic construct
  misc_feature 1..19: note = siRNA antisense sequence
  source 1..19: mol_type = other RNA
tcctgcaaatatacccatg

SEQ ID NO: 64248 - RNA, 19 nt, synthetic construct
  misc_feature 1..19: note = siRNA sense sequence
  source 1..19: mol_type = other RNA
atgggtatatttgcaggat

SEQ ID NO: 64249 - RNA, 19 nt, synthetic construct
  misc_feature 1..19: note = siRNA antisense sequence
  source 1..19: mol_type = other RNA
atcctgcaaatatacccat

SEQ ID NO: 64250 - RNA, 19 nt, synthetic construct
  misc_feature 1..19: note = siRNA sense sequence
  source 1..19: mol_type = other RNA
tgggtatatttgcaggata

SEQ ID NO: 64251 - RNA, 19 nt, synthetic construct
  misc_feature 1..19: note = siRNA antisense sequence
  source 1..19: mol_type = other RNA
tatcctgcaaatataccca

SEQ ID NO: 64252 - RNA, 19 nt, synthetic construct
  misc_feature 1..19: note = siRNA sense sequence
  source 1..19: mol_type = other RNA
tatttgcaggatattgagg

SEQ ID NO: 64253 - RNA, 19 nt, synthetic construct
  misc_feature 1..19: note = siRNA antisense sequence
  source 1..19: mol_type = other RNA
cctcaatatcctgcaaata

SEQ ID NO: 64254 - RNA, 19 nt, synthetic construct
  misc_feature 1..19: note = siRNA sense sequence
  source 1..19: mol_type = other RNA
atttgcaggatattgaggt

SEQ ID NO: 64255 - RNA, 19 nt, synthetic construct
  misc_feature 1..19: note = siRNA antisense sequence
  source 1..19: mol_type = other RNA
acctcaatatcctgcaaat

SEQ ID NO: 64256 - RNA, 19 nt, synthetic construct
  misc_feature 1..19: note = siRNA sense sequence
  source 1..19: mol_type = other RNA
ttgcaggatattgaggttt

SEQ ID NO: 64257 - RNA, 19 nt, synthetic construct
  misc_feature 1..19: note = siRNA antisense sequence
  source 1..19: mol_type = other RNA
aaacctcaatatcctgcaa

SEQ ID NO: 64258 - RNA, 19 nt, synthetic construct
  misc_feature 1..19: note = siRNA sense sequence
  source 1..19: mol_type = other RNA
tgcaggatattgaggttta

SEQ ID NO: 64259 - RNA, 19 nt, synthetic construct
  misc_feature 1..19: note = siRNA antisense sequence
  source 1..19: mol_type = other RNA
taaacctcaatatcctgca

SEQ ID NO: 64260 - RNA, 19 nt, synthetic construct
  misc_feature 1..19: note = siRNA sense sequence
  source 1..19: mol_type = other RNA
gcaggatattgaggtttag

SEQ ID NO: 64261 - RNA, 19 nt, synthetic construct
  misc_feature 1..19: note = siRNA antisense sequence
  source 1..19: mol_type = other RNA
ctaaacctcaatatcctgc

SEQ ID NO: 64262 - RNA, 19 nt, synthetic construct
  misc_feature 1..19: note = siRNA sense sequence
  source 1..19: mol_type = other RNA
caggatattgaggtttagg

SEQ ID NO: 64263 - RNA, 19 nt, synthetic construct
  misc_feature 1..19: note = siRNA antisense sequence
  source 1..19: mol_type = other RNA
cctaaacctcaatatcctg

SEQ ID NO: 64264 - RNA, 19 nt, synthetic construct
  misc_feature 1..19: note = siRNA sense sequence
  source 1..19: mol_type = other RNA
aggatattgaggtttaggg

SEQ ID NO: 64265 - RNA, 19 nt, synthetic construct
  misc_feature 1..19: note = siRNA antisense sequence
  source 1..19: mol_type = other RNA
ccctaaacctcaatatcct

SEQ ID NO: 64266 - RNA, 19 nt, synthetic construct
  misc_feature 1..19: note = siRNA sense sequence
  source 1..19: mol_type = other RNA
gatattgaggtttagggta

SEQ ID NO: 64267 - RNA, 19 nt, synthetic construct
  misc_feature 1..19: note = siRNA antisense sequence
  source 1..19: mol_type = other RNA
taccctaaacctcaatatc

SEQ ID NO: 64268 - RNA, 19 nt, synthetic construct
  misc_feature 1..19: note = siRNA sense sequence
  source 1..19: mol_type = other RNA
atattgaggtttagggtac

SEQ ID NO: 64269 - RNA, 19 nt, synthetic construct
  misc_feature 1..19: note = siRNA antisense sequence
  source 1..19: mol_type = other RNA
gtaccctaaacctcaatat

SEQ ID NO: 64270 - RNA, 19 nt, synthetic construct
  misc_feature 1..19: note = siRNA sense sequence
  source 1..19: mol_type = other RNA
tattgaggtttagggtaca

SEQ ID NO: 64271 - RNA, 19 nt, synthetic construct
  misc_feature 1..19: note = siRNA antisense sequence
  source 1..19: mol_type = other RNA
tgtaccctaaacctcaata

SEQ ID NO: 64272 - RNA, 19 nt, synthetic construct
  misc_feature 1..19: note = siRNA sense sequence
  source 1..19: mol_type = other RNA
gtttagggtacagattcca

SEQ ID NO: 64273 - RNA, 19 nt, synthetic construct
  misc_feature 1..19: note = siRNA antisense sequence
  source 1..19: mol_type = other RNA
tggaatctgtaccctaaac

SEQ ID NO: 64274 - RNA, 19 nt, synthetic construct
  misc_feature 1..19: note = siRNA sense sequence
  source 1..19: mol_type = other RNA
tttagggtacagattccat

SEQ ID NO: 64275 - RNA, 19 nt, synthetic construct
  misc_feature 1..19: note = siRNA antisense sequence
  source 1..19: mol_type = other RNA
atggaatctgtaccctaaa

SEQ ID NO: 64276 - RNA, 19 nt, synthetic construct
  misc_feature 1..19: note = siRNA sense sequence
  source 1..19: mol_type = other RNA
ttagggtacagattccatc

SEQ ID NO: 64277 - RNA, 19 nt, synthetic construct
  misc_feature 1..19: note = siRNA antisense sequence
  source 1..19: mol_type = other RNA
gatggaatctgtaccctaa

SEQ ID NO: 64278 - RNA, 19 nt, synthetic construct
  misc_feature 1..19: note = siRNA sense sequence
  source 1..19: mol_type = other RNA
tagggtacagattccatcg

SEQ ID NO: 64279 - RNA, 19 nt, synthetic construct
  misc_feature 1..19: note = siRNA antisense sequence
  source 1..19: mol_type = other RNA
cgatggaatctgtacccta

SEQ ID NO: 64280 - RNA, 19 nt, synthetic construct
  misc_feature 1..19: note = siRNA sense sequence
  source 1..19: mol_type = other RNA
agggtacagattccatcgc

SEQ ID NO: 64281 - RNA, 19 nt, synthetic construct
  misc_feature 1..19: note = siRNA antisense sequence
  source 1..19: mol_type = other RNA
gcgatggaatctgtaccct

SEQ ID NO: 64282 - RNA, 19 nt, synthetic construct
  misc_feature 1..19: note = siRNA sense sequence
  source 1..19: mol_type = other RNA
gggtacagattccatcgct

SEQ ID NO: 64283 - RNA, 19 nt, synthetic construct
  misc_feature 1..19: note = siRNA antisense sequence
  source 1..19: mol_type = other RNA
agcgatggaatctgtaccc

SEQ ID NO: 64284 - RNA, 19 nt, synthetic construct
  misc_feature 1..19: note = siRNA sense sequence
  source 1..19: mol_type = other RNA
ggtacagattccatcgctc

SEQ ID NO: 64285 - RNA, 19 nt, synthetic construct
  misc_feature 1..19: note = siRNA antisense sequence
  source 1..19: mol_type = other RNA
gagcgatggaatctgtacc

SEQ ID NO: 64286 - RNA, 19 nt, synthetic construct
  misc_feature 1..19: note = siRNA sense sequence
  source 1..19: mol_type = other RNA
gtacagattccatcgctca

SEQ ID NO: 64287 - RNA, 19 nt, synthetic construct
  misc_feature 1..19: note = siRNA antisense sequence
  source 1..19: mol_type = other RNA
tgagcgatggaatctgtac

SEQ ID NO: 64288 - RNA, 19 nt, synthetic construct
  misc_feature 1..19: note = siRNA sense sequence
  source 1..19: mol_type = other RNA
tacagattccatcgctcag

SEQ ID NO: 64289 - RNA, 19 nt, synthetic construct
  misc_feature 1..19: note = siRNA antisense sequence
  source 1..19: mol_type = other RNA
ctgagcgatggaatctgta

SEQ ID NO: 64290 - RNA, 19 nt, synthetic construct
  misc_feature 1..19: note = siRNA sense sequence
  source 1..19: mol_type = other RNA
acagattccatcgctcagg

SEQ ID NO: 64291 - RNA, 19 nt, synthetic construct
  misc_feature 1..19: note = siRNA antisense sequence
  source 1..19: mol_type = other RNA
cctgagcgatggaatctgt

SEQ ID NO: 64292 - RNA, 19 nt, synthetic construct
  misc_feature 1..19: note = siRNA sense sequence
  source 1..19: mol_type = other RNA
cagattccatcgctcaggt

SEQ ID NO: 64293 - RNA, 19 nt, synthetic construct
  misc_feature 1..19: note = siRNA antisense sequence
  source 1..19: mol_type = other RNA
acctgagcgatggaatctg

SEQ ID NO: 64294 - RNA, 19 nt, synthetic construct
  misc_feature 1..19: note = siRNA sense sequence
  source 1..19: mol_type = other RNA
agattccatcgctcaggta

SEQ ID NO: 64295 - RNA, 19 nt, synthetic construct
  misc_feature 1..19: note = siRNA antisense sequence
  source 1..19: mol_type = other RNA
tacctgagcgatggaatct

SEQ ID NO: 64296 - RNA, 19 nt, synthetic construct
  misc_feature 1..19: note = siRNA sense sequence
  source 1..19: mol_type = other RNA
gattccatcgctcaggtag

SEQ ID NO: 64297 - RNA, 19 nt, synthetic construct
  misc_feature 1..19: note = siRNA antisense sequence
  source 1..19: mol_type = other RNA
ctacctgagcgatggaatc

SEQ ID NO: 64298 - RNA, 19 nt, synthetic construct
  misc_feature 1..19: note = siRNA sense sequence
  source 1..19: mol_type = other RNA
attccatcgctcaggtagt

SEQ ID NO: 64299 - RNA, 19 nt, synthetic construct
  misc_feature 1..19: note = siRNA antisense sequence
  source 1..19: mol_type = other RNA
actacctgagcgatggaat

SEQ ID NO: 64300 - RNA, 19 nt, synthetic construct
  misc_feature 1..19: note = siRNA sense sequence
  source 1..19: mol_type = other RNA
ttccatcgctcaggtagtg

SEQ ID NO: 64301 - RNA, 19 nt, synthetic construct
  misc_feature 1..19: note = siRNA antisense sequence
  source 1..19: mol_type = other RNA
cactacctgagcgatggaa

SEQ ID NO: 64302 - RNA, 19 nt, synthetic construct
  misc_feature 1..19: note = siRNA sense sequence
  source 1..19: mol_type = other RNA
tccatcgctcaggtagtgg

SEQ ID NO: 64303 - RNA, 19 nt, synthetic construct
  misc_feature 1..19: note = siRNA antisense sequence
  source 1..19: mol_type = other RNA
ccactacctgagcgatgga

SEQ ID NO: 64304 - RNA, 19 nt, synthetic construct
  misc_feature 1..19: note = siRNA sense sequence
  source 1..19: mol_type = other RNA
ccatcgctcaggtagtggg

SEQ ID NO: 64305 - RNA, 19 nt, synthetic construct
  misc_feature 1..19: note = siRNA antisense sequence
  source 1..19: mol_type = other RNA
cccactacctgagcgatgg

SEQ ID NO: 64306 - RNA, 19 nt, synthetic construct
  misc_feature 1..19: note = siRNA sense sequence
  source 1..19: mol_type = other RNA
catcgctcaggtagtgggc

SEQ ID NO: 64307 - RNA, 19 nt, synthetic construct
  misc_feature 1..19: note = siRNA antisense sequence
  source 1..19: mol_type = other RNA
gcccactacctgagcgatg

SEQ ID NO: 64308 - RNA, 19 nt, synthetic construct
  misc_feature 1..19: note = siRNA sense sequence
  source 1..19: mol_type = other RNA
atcgctcaggtagtgggca

SEQ ID NO: 64309 - RNA, 19 nt, synthetic construct
  misc_feature 1..19: note = siRNA antisense sequence
  source 1..19: mol_type = other RNA
tgcccactacctgagcgat

SEQ ID NO: 64310 - RNA, 19 nt, synthetic construct
  misc_feature 1..19: note = siRNA sense sequence
  source 1..19: mol_type = other RNA
tcgctcaggtagtgggcat

SEQ ID NO: 64311 - RNA, 19 nt, synthetic construct
  misc_feature 1..19: note = siRNA antisense sequence
  source 1..19: mol_type = other RNA
atgcccactacctgagcga

SEQ ID NO: 64312 - RNA, 19 nt, synthetic construct
  misc_feature 1..19: note = siRNA sense sequence
  source 1..19: mol_type = other RNA
cgctcaggtagtgggcata

SEQ ID NO: 64313 - RNA, 19 nt, synthetic construct
  misc_feature 1..19: note = siRNA antisense sequence
  source 1..19: mol_type = other RNA
tatgcccactacctgagcg

SEQ ID NO: 64314 - RNA, 19 nt, synthetic construct
  misc_feature 1..19: note = siRNA sense sequence
  source 1..19: mol_type = other RNA
gctcaggtagtgggcataa

SEQ ID NO: 64315 - RNA, 19 nt, synthetic construct
  misc_feature 1..19: note = siRNA antisense sequence
  source 1..19: mol_type = other RNA
ttatgcccactacctgagc

SEQ ID NO: 64316 - RNA, 19 nt, synthetic construct
  misc_feature 1..19: note = siRNA sense sequence
  source 1..19: mol_type = other RNA
ctcaggtagtgggcataat

SEQ ID NO: 64317 - RNA, 19 nt, synthetic construct
  misc_feature 1..19: note = siRNA antisense sequence
  source 1..19: mol_type = other RNA
attatgcccactacctgag

SEQ ID NO: 64318 - RNA, 19 nt, synthetic construct
  misc_feature 1..19: note = siRNA sense sequence
  source 1..19: mol_type = other RNA
tcaggtagtgggcataata

SEQ ID NO: 64319 - RNA, 19 nt, synthetic construct
  misc_feature 1..19: note = siRNA antisense sequence
  source 1..19: mol_type = other RNA
tattatgcccactacctga

SEQ ID NO: 64320 - RNA, 19 nt, synthetic construct
  misc_feature 1..19: note = siRNA sense sequence
  source 1..19: mol_type = other RNA
tttgtcagctcctccaagt

SEQ ID NO: 64321 - RNA, 19 nt, synthetic construct
  misc_feature 1..19: note = siRNA antisense sequence
  source 1..19: mol_type = other RNA
acttggaggagctgacaaa

SEQ ID NO: 64322 - RNA, 19 nt, synthetic construct
  misc_feature 1..19: note = siRNA sense sequence
  source 1..19: mol_type = other RNA
ttgtcagctcctccaagta

SEQ ID NO: 64323 - RNA, 19 nt, synthetic construct
  misc_feature 1..19: note = siRNA antisense sequence
  source 1..19: mol_type = other RNA
tacttggaggagctgacaa

SEQ ID NO: 64324 - RNA, 19 nt, synthetic construct
  misc_feature 1..19: note = siRNA sense sequence
  source 1..19: mol_type = other RNA
tgtcagctcctccaagtag

SEQ ID NO: 64325 - RNA, 19 nt, synthetic construct
  misc_feature 1..19: note = siRNA antisense sequence
  source 1..19: mol_type = other RNA
ctacttggaggagctgaca

SEQ ID NO: 64326 - RNA, 19 nt, synthetic construct
  misc_feature 1..19: note = siRNA sense sequence
  source 1..19: mol_type = other RNA
gtcagctcctccaagtagt

SEQ ID NO: 64327 - RNA, 19 nt, synthetic construct
  misc_feature 1..19: note = siRNA antisense sequence
  source 1..19: mol_type = other RNA
actacttggaggagctgac

SEQ ID NO: 64328 - RNA, 19 nt, synthetic construct
  misc_feature 1..19: note = siRNA sense sequence
  source 1..19: mol_type = other RNA
tcagctcctccaagtagtc

SEQ ID NO: 64329 - RNA, 19 nt, synthetic construct
  misc_feature 1..19: note = siRNA antisense sequence
  source 1..19: mol_type = other RNA
gactacttggaggagctga

SEQ ID NO: 64330 - RNA, 19 nt, synthetic construct
  misc_feature 1..19: note = siRNA sense sequence
  source 1..19: mol_type = other RNA
cagctcctccaagtagtcc

SEQ ID NO: 64331 - RNA, 19 nt, synthetic construct
  misc_feature 1..19: note = siRNA antisense sequence
  source 1..19: mol_type = other RNA
ggactacttggaggagctg

SEQ ID NO: 64332 - RNA, 19 nt, synthetic construct
  misc_feature 1..19: note = siRNA sense sequence
  source 1..19: mol_type = other RNA
agctcctccaagtagtcca

SEQ ID NO: 64333 - RNA, 19 nt, synthetic construct
  misc_feature 1..19: note = siRNA antisense sequence
  source 1..19: mol_type = other RNA
tggactacttggaggagct

SEQ ID NO: 64334 - RNA, 19 nt, synthetic construct
  misc_feature 1..19: note = siRNA sense sequence
  source 1..19: mol_type = other RNA
gctcctccaagtagtccat

SEQ ID NO: 64335 - RNA, 19 nt, synthetic construct
  misc_feature 1..19: note = siRNA antisense sequence
  source 1..19: mol_type = other RNA
atggactacttggaggagc

SEQ ID NO: 64336 - RNA, 19 nt, synthetic construct
  misc_feature 1..19: note = siRNA sense sequence
  source 1..19: mol_type = other RNA
ctccaagtagtccatggtg

SEQ ID NO: 64337 - RNA, 19 nt, synthetic construct
  misc_feature 1..19: note = siRNA antisense sequence
  source 1..19: mol_type = other RNA
caccatggactacttggag

SEQ ID NO: 64338 - RNA, 19 nt, synthetic construct
  misc_feature 1..19: note = siRNA sense sequence
  source 1..19: mol_type = other RNA
tccaagtagtccatggtgt

SEQ ID NO: 64339 - RNA, 19 nt, synthetic construct
  misc_feature 1..19: note = siRNA antisense sequence
  source 1..19: mol_type = other RNA
acaccatggactacttgga

SEQ ID NO: 64340 - RNA, 19 nt, synthetic construct
  misc_feature 1..19: note = siRNA sense sequence
  source 1..19: mol_type = other RNA
ccatgagtacccaaggctt

SEQ ID NO: 64341 - RNA, 19 nt, synthetic construct
  misc_feature 1..19: note = siRNA antisense sequence
  source 1..19: mol_type = other RNA
aagccttgggtactcatgg

SEQ ID NO: 64342 - RNA, 19 nt, synthetic construct
  misc_feature 1..19: note = siRNA sense sequence
  source 1..19: mol_type = other RNA
catgagtacccaaggctta

SEQ ID NO: 64343 - RNA, 19 nt, synthetic construct
  misc_feature 1..19: note = siRNA antisense sequence
  source 1..19: mol_type = other RNA
taagccttgggtactcatg

SEQ ID NO: 64344 - RNA, 19 nt, synthetic construct
  misc_feature 1..19: note = siRNA sense sequence
  source 1..19: mol_type = other RNA
atgagtacccaaggcttaa

SEQ ID NO: 64345 - RNA, 19 nt, synthetic construct
  misc_feature 1..19: note = siRNA antisense sequence
  source 1..19: mol_type = other RNA
ttaagccttgggtactcat

SEQ ID NO: 64346 - RNA, 19 nt, synthetic construct
  misc_feature 1..19: note = siRNA sense sequence
  source 1..19: mol_type = other RNA
tgagtacccaaggcttaac

SEQ ID NO: 64347 - RNA, 19 nt, synthetic construct
  misc_feature 1..19: note = siRNA antisense sequence
  source 1..19: mol_type = other RNA
gttaagccttgggtactca

SEQ ID NO: 64348 - RNA, 19 nt, synthetic construct
  misc_feature 1..19: note = siRNA sense sequence
  source 1..19: mol_type = other RNA
gagtacccaaggcttaact

SEQ ID NO: 64349 - RNA, 19 nt, synthetic construct
  misc_feature 1..19: note = siRNA antisense sequence
  source 1..19: mol_type = other RNA
agttaagccttgggtactc

SEQ ID NO: 64350 - RNA, 19 nt, synthetic construct
  misc_feature 1..19: note = siRNA sense sequence
  source 1..19: mol_type = other RNA
agtacccaaggcttaactc

SEQ ID NO: 64351 - RNA, 19 nt, synthetic construct
  misc_feature 1..19: note = siRNA antisense sequence
  source 1..19: mol_type = other RNA
gagttaagccttgggtact

SEQ ID NO: 64352 - RNA, 19 nt, synthetic construct
  misc_feature 1..19: note = siRNA sense sequence
  source 1..19: mol_type = other RNA
tacccaaggcttaactctc

SEQ ID NO: 64353 - RNA, 19 nt, synthetic construct
  misc_feature 1..19: note = siRNA antisense sequence
  source 1..19: mol_type = other RNA
gagagttaagccttgggta

SEQ ID NO: 64354 - RNA, 19 nt, synthetic construct
  misc_feature 1..19: note = siRNA sense sequence
  source 1..19: mol_type = other RNA
acccaaggcttaactctca

SEQ ID NO: 64355 - RNA, 19 nt, synthetic construct
  misc_feature 1..19: note = siRNA antisense sequence
  source 1..19: mol_type = other RNA
tgagagttaagccttgggt

SEQ ID NO: 64356 - RNA, 19 nt, synthetic construct
  misc_feature 1..19: note = siRNA sense sequence
  source 1..19: mol_type = other RNA
cccaaggcttaactctcac

SEQ ID NO: 64357 - RNA, 19 nt, synthetic construct
  misc_feature 1..19: note = siRNA antisense sequence
  source 1..19: mol_type = other RNA
gtgagagttaagccttggg

SEQ ID NO: 64358 - RNA, 19 nt, synthetic construct
  misc_feature 1..19: note = siRNA sense sequence
  source 1..19: mol_type = other RNA
ccaaggcttaactctcact

SEQ ID NO: 64359 - RNA, 19 nt, synthetic construct
  misc_feature 1..19: note = siRNA antisense sequence
  source 1..19: mol_type = other RNA
agtgagagttaagccttgg

SEQ ID NO: 64360 - RNA, 19 nt, synthetic construct
  misc_feature 1..19: note = siRNA sense sequence
  source 1..19: mol_type = other RNA
caaggcttaactctcactt

SEQ ID NO: 64361 - RNA, 19 nt, synthetic construct
  misc_feature 1..19: note = siRNA antisense sequence
  source 1..19: mol_type = other RNA
aagtgagagttaagccttg

SEQ ID NO: 64362 - RNA, 19 nt, synthetic construct
  misc_feature 1..19: note = siRNA sense sequence
  source 1..19: mol_type = other RNA
aaggcttaactctcactta

SEQ ID NO: 64363 - RNA, 19 nt, synthetic construct
  misc_feature 1..19: note = siRNA antisense sequence
  source 1..19: mol_type = other RNA
taagtgagagttaagcctt

SEQ ID NO: 64364 - RNA, 19 nt, synthetic construct
  misc_feature 1..19: note = siRNA sense sequence
  source 1..19: mol_type = other RNA
aggcttaactctcacttat

SEQ ID NO: 64365 - RNA, 19 nt, synthetic construct
  misc_feature 1..19: note = siRNA antisense sequence
  source 1..19: mol_type = other RNA
ataagtgagagttaagcct

SEQ ID NO: 64366 - RNA, 19 nt, synthetic construct
  misc_feature 1..19: note = siRNA sense sequence
  source 1..19: mol_type = other RNA
gcttaactctcacttatac

SEQ ID NO: 64367 - RNA, 19 nt, synthetic construct
  misc_feature 1..19: note = siRNA antisense sequence
  source 1..19: mol_type = other RNA
gtataagtgagagttaagc

SEQ ID NO: 64368 - RNA, 19 nt, synthetic construct
  misc_feature 1..19: note = siRNA sense sequence
  source 1..19: mol_type = other RNA
cttaactctcacttatacg

SEQ ID NO: 64369 - RNA, 19 nt, synthetic construct
  misc_feature 1..19: note = siRNA antisense sequence
  source 1..19: mol_type = other RNA
cgtataagtgagagttaag

SEQ ID NO: 64370 - RNA, 19 nt, synthetic construct
  misc_feature 1..19: note = siRNA sense sequence
  source 1..19: mol_type = other RNA
taactctcacttatacgtg

SEQ ID NO: 64371 - RNA, 19 nt, synthetic construct
  misc_feature 1..19: note = siRNA antisense sequence
  source 1..19: mol_type = other RNA
cacgtataagtgagagtta

SEQ ID NO: 64372 - RNA, 19 nt, synthetic construct
  misc_feature 1..19: note = siRNA sense sequence
  source 1..19: mol_type = other RNA
tggtatttggttttctgtt

SEQ ID NO: 64373 - RNA, 19 nt, synthetic construct
  misc_feature 1..19: note = siRNA antisense sequence
  source 1..19: mol_type = other RNA
aacagaaaaccaaatacca

SEQ ID NO: 64374 - RNA, 19 nt, synthetic construct
  misc_feature 1..19: note = siRNA sense sequence
  source 1..19: mol_type = other RNA
ggtatttggttttctgttc

SEQ ID NO: 64375 - RNA, 19 nt, synthetic construct
  misc_feature 1..19: note = siRNA antisense sequence
  source 1..19: mol_type = other RNA
gaacagaaaaccaaatacc

SEQ ID NO: 64376 - RNA, 19 nt, synthetic construct
  misc_feature 1..19: note = siRNA sense sequence
  source 1..19: mol_type = other RNA
gtatttggttttctgttcc

SEQ ID NO: 64377 - RNA, 19 nt, synthetic construct
  misc_feature 1..19: note = siRNA antisense sequence
  source 1..19: mol_type = other RNA
ggaacagaaaaccaaatac

SEQ ID NO: 64378 - RNA, 19 nt, synthetic construct
  misc_feature 1..19: note = siRNA sense sequence
  source 1..19: mol_type = other RNA
tatttggttttctgttcct

SEQ ID NO: 64379 - RNA, 19 nt, synthetic construct
  misc_feature 1..19: note = siRNA antisense sequence
  source 1..19: mol_type = other RNA
aggaacagaaaaccaaata

SEQ ID NO: 64380 - RNA, 19 nt, synthetic construct
  misc_feature 1..19: note = siRNA sense sequence
  source 1..19: mol_type = other RNA
tggttttctgttcctgtgg

SEQ ID NO: 64381 - RNA, 19 nt, synthetic construct
  misc_feature 1..19: note = siRNA antisense sequence
  source 1..19: mol_type = other RNA
ccacaggaacagaaaacca

SEQ ID NO: 64382 - RNA, 19 nt, synthetic construct
  misc_feature 1..19: note = siRNA sense sequence
  source 1..19: mol_type = other RNA
ggttttctgttcctgtgga

SEQ ID NO: 64383 - RNA, 19 nt, synthetic construct
  misc_feature 1..19: note = siRNA antisense sequence
  source 1..19: mol_type = other RNA
tccacaggaacagaaaacc

SEQ ID NO: 64384 - RNA, 19 nt, synthetic construct
  misc_feature 1..19: note = siRNA sense sequence
  source 1..19: mol_type = other RNA
tcctgtggaatttgcttag

SEQ ID NO: 64385 - RNA, 19 nt, synthetic construct
  misc_feature 1..19: note = siRNA antisense sequence
  source 1..19: mol_type = other RNA
ctaagcaaattccacagga

SEQ ID NO: 64386 - RNA, 19 nt, synthetic construct
  misc_feature 1..19: note = siRNA sense sequence
  source 1..19: mol_type = other RNA
cctgtggaatttgcttagg

SEQ ID NO: 64387 - RNA, 19 nt, synthetic construct
  misc_feature 1..19: note = siRNA antisense sequence
  source 1..19: mol_type = other RNA
cctaagcaaattccacagg

SEQ ID NO: 64388 - RNA, 19 nt, synthetic construct
  misc_feature 1..19: note = siRNA sense sequence
  source 1..19: mol_type = other RNA
ctgtggaatttgcttagga

SEQ ID NO: 64389 - RNA, 19 nt, synthetic construct
  misc_feature 1..19: note = siRNA antisense sequence
  source 1..19: mol_type = other RNA
tcctaagcaaattccacag

SEQ ID NO: 64390 - RNA, 19 nt, synthetic construct
  misc_feature 1..19: note = siRNA sense sequence
  source 1..19: mol_type = other RNA
tgtggaatttgcttaggat

SEQ ID NO: 64391 - RNA, 19 nt, synthetic construct
  misc_feature 1..19: note = siRNA antisense sequence
  source 1..19: mol_type = other RNA
atcctaagcaaattccaca

SEQ ID NO: 64392 - RNA, 19 nt, synthetic construct
  misc_feature 1..19: note = siRNA sense sequence
  source 1..19: mol_type = other RNA
gtggaatttgcttaggatt

SEQ ID NO: 64393 - RNA, 19 nt, synthetic construct
  misc_feature 1..19: note = siRNA antisense sequence
  source 1..19: mol_type = other RNA
aatcctaagcaaattccac

SEQ ID NO: 64394 - RNA, 19 nt, synthetic construct
  misc_feature 1..19: note = siRNA sense sequence
  source 1..19: mol_type = other RNA
tccatctgcatgtatgttg

SEQ ID NO: 64395 - RNA, 19 nt, synthetic construct
  misc_feature 1..19: note = siRNA antisense sequence
  source 1..19: mol_type = other RNA
caacatacatgcagatgga

SEQ ID NO: 64396 - RNA, 19 nt, synthetic construct
  misc_feature 1..19: note = siRNA sense sequence
  source 1..19: mol_type = other RNA
ccatctgcatgtatgttgc

SEQ ID NO: 64397 - RNA, 19 nt, synthetic construct
  misc_feature 1..19: note = siRNA antisense sequence
  source 1..19: mol_type = other RNA
gcaacatacatgcagatgg

SEQ ID NO: 64398 - RNA, 19 nt, synthetic construct
  misc_feature 1..19: note = siRNA sense sequence
  source 1..19: mol_type = other RNA
atctgcatgtatgttgctg

SEQ ID NO: 64399 - RNA, 19 nt, synthetic construct
  misc_feature 1..19: note = siRNA antisense sequence
  source 1..19: mol_type = other RNA
cagcaacatacatgcagat

SEQ ID NO: 64400 - RNA, 19 nt, synthetic construct
  misc_feature 1..19: note = siRNA sense sequence
  source 1..19: mol_type = other RNA
tgcagtgttccatggtgta

SEQ ID NO: 64401 - RNA, 19 nt, synthetic construct
  misc_feature 1..19: note = siRNA antisense sequence
  source 1..19: mol_type = other RNA
tacaccatggaacactgca

SEQ ID NO: 64402 - RNA, 19 nt, synthetic construct
  misc_feature 1..19: note = siRNA sense sequence
  source 1..19: mol_type = other RNA
gcagtgttccatggtgtat

SEQ ID NO: 64403 - RNA, 19 nt, synthetic construct
  misc_feature 1..19: note = siRNA antisense sequence
  source 1..19: mol_type = other RNA
atacaccatggaacactgc

SEQ ID NO: 64404 - RNA, 19 nt, synthetic construct
  misc_feature 1..19: note = siRNA sense sequence
  source 1..19: mol_type = other RNA
tgttccatggtgtatatgt

SEQ ID NO: 64405 - RNA, 19 nt, synthetic construct
  misc_feature 1..19: note = siRNA antisense sequence
  source 1..19: mol_type = other RNA
acatatacaccatggaaca

SEQ ID NO: 64406 - RNA, 19 nt, synthetic construct
  misc_feature 1..19: note = siRNA sense sequence
  source 1..19: mol_type = other RNA
gttccatggtgtatatgta

SEQ ID NO: 64407 - RNA, 19 nt, synthetic construct
  misc_feature 1..19: note = siRNA antisense sequence
  source 1..19: mol_type = other RNA
tacatatacaccatggaac

SEQ ID NO: 64408 - RNA, 19 nt, synthetic construct
  misc_feature 1..19: note = siRNA sense sequence
  source 1..19: mol_type = other RNA
ttccatggtgtatatgtac

SEQ ID NO: 64409 - RNA, 19 nt, synthetic construct
  misc_feature 1..19: note = siRNA antisense sequence
  source 1..19: mol_type = other RNA
gtacatatacaccatggaa

SEQ ID NO: 64410 - RNA, 19 nt, synthetic construct
  misc_feature 1..19: note = siRNA sense sequence
  source 1..19: mol_type = other RNA
atattttctttatccaggc

SEQ ID NO: 64411 - RNA, 19 nt, synthetic construct
  misc_feature 1..19: note = siRNA antisense sequence
  source 1..19: mol_type = other RNA
gcctggataaagaaaatat

SEQ ID NO: 64412 - RNA, 19 nt, synthetic construct
  misc_feature 1..19: note = siRNA sense sequence
  source 1..19: mol_type = other RNA
tattttctttatccaggcc

SEQ ID NO: 64413 - RNA, 19 nt, synthetic construct
  misc_feature 1..19: note = siRNA antisense sequence
  source 1..19: mol_type = other RNA
ggcctggataaagaaaata

SEQ ID NO: 64414 - RNA, 19 nt, synthetic construct
  misc_feature 1..19: note = siRNA sense sequence
  source 1..19: mol_type = other RNA
attttctttatccaggcca

SEQ ID NO: 64415 - RNA, 19 nt, synthetic construct
  misc_feature 1..19: note = siRNA antisense sequence
  source 1..19: mol_type = other RNA
tggcctggataaagaaaat

SEQ ID NO: 64416 - RNA, 19 nt, synthetic construct
  misc_feature 1..19: note = siRNA sense sequence
  source 1..19: mol_type = other RNA
ccaggccactgttgatggg

SEQ ID NO: 64417 - RNA, 19 nt, synthetic construct
  misc_feature 1..19: note = siRNA antisense sequence
  source 1..19: mol_type = other RNA
cccatcaacagtggcctgg

SEQ ID NO: 64418 - RNA, 19 nt, synthetic construct
  misc_feature 1..19: note = siRNA sense sequence
  source 1..19: mol_type = other RNA
caggccactgttgatgggc

SEQ ID NO: 64419 - RNA, 19 nt, synthetic construct
  misc_feature 1..19: note = siRNA antisense sequence
  source 1..19: mol_type = other RNA
gcccatcaacagtggcctg

SEQ ID NO: 64420 - RNA, 19 nt, synthetic construct
  misc_feature 1..19: note = siRNA sense sequence
  source 1..19: mol_type = other RNA
ggcacctatgttaattcca

SEQ ID NO: 64421 - RNA, 19 nt, synthetic construct
  misc_feature 1..19: note = siRNA antisense sequence
  source 1..19: mol_type = other RNA
tggaattaacataggtgcc

SEQ ID NO: 64422 - RNA, 19 nt, synthetic construct
  misc_feature 1..19: note = siRNA sense sequence
  source 1..19: mol_type = other RNA
cactgcaatgaagatatga

SEQ ID NO: 64423 - RNA, 19 nt, synthetic construct
  misc_feature 1..19: note = siRNA antisense sequence
  source 1..19: mol_type = other RNA
tcatatcttcattgcagtg

SEQ ID NO: 64424 - RNA, 19 nt, synthetic construct
  misc_feature 1..19: note = siRNA sense sequence
  source 1..19: mol_type = other RNA
actgcaatgaagatatgac

SEQ ID NO: 64425 - RNA, 19 nt, synthetic construct
  misc_feature 1..19: note = siRNA antisense sequence
  source 1..19: mol_type = other RNA
gtcatatcttcattgcagt

SEQ ID NO: 64426 - RNA, 19 nt, synthetic construct
  misc_feature 1..19: note = siRNA sense sequence
  source 1..19: mol_type = other RNA
ctgcaatgaagatatgacc

SEQ ID NO: 64427 - RNA, 19 nt, synthetic construct
  misc_feature 1..19: note = siRNA antisense sequence
  source 1..19: mol_type = other RNA
ggtcatatcttcattgcag

SEQ ID NO: 64428 - RNA, 19 nt, synthetic construct
  misc_feature 1..19: note = siRNA sense sequence
  source 1..19: mol_type = other RNA
gcaatgaagatatgaccgc

SEQ ID NO: 64429 - RNA, 19 nt, synthetic construct
  misc_feature 1..19: note = siRNA antisense sequence
  source 1..19: mol_type = other RNA
gcggtcatatcttcattgc

SEQ ID NO: 64430 - RNA, 19 nt, synthetic construct
  misc_feature 1..19: note = siRNA sense sequence
  source 1..19: mol_type = other RNA
caatgaagatatgaccgca

SEQ ID NO: 64431 - RNA, 19 nt, synthetic construct
  misc_feature 1..19: note = siRNA antisense sequence
  source 1..19: mol_type = other RNA
tgcggtcatatcttcattg

SEQ ID NO: 64432 - RNA, 19 nt, synthetic construct
  misc_feature 1..19: note = siRNA sense sequence
  source 1..19: mol_type = other RNA
acagtttctttcgggtata

SEQ ID NO: 64433 - RNA, 19 nt, synthetic construct
  misc_feature 1..19: note = siRNA antisense sequence
  source 1..19: mol_type = other RNA
tatacccgaaagaaactgt

SEQ ID NO: 64434 - RNA, 19 nt, synthetic construct
  misc_feature 1..19: note = siRNA sense sequence
  source 1..19: mol_type = other RNA
cagtttctttcgggtatat

SEQ ID NO: 64435 - RNA, 19 nt, synthetic construct
  misc_feature 1..19: note = siRNA antisense sequence
  source 1..19: mol_type = other RNA
atatacccgaaagaaactg

SEQ ID NO: 64436 - RNA, 19 nt, synthetic construct
  misc_feature 1..19: note = siRNA sense sequence
  source 1..19: mol_type = other RNA
agtttctttcgggtatata

SEQ ID NO: 64437 - RNA, 19 nt, synthetic construct
  misc_feature 1..19: note = siRNA antisense sequence
  source 1..19: mol_type = other RNA
tatatacccgaaagaaact

SEQ ID NO: 64438 - RNA, 19 nt, synthetic construct
  misc_feature 1..19: note = siRNA sense sequence
  source 1..19: mol_type = other RNA
actgctttccactggctga

SEQ ID NO: 64439 - RNA, 19 nt, synthetic construct
  misc_feature 1..19: note = siRNA antisense sequence
  source 1..19: mol_type = other RNA
tcagccagtggaaagcagt

SEQ ID NO: 64440 - RNA, 19 nt, synthetic construct
  misc_feature 1..19: note = siRNA sense sequence
  source 1..19: mol_type = other RNA
tctctgctgcctcaccatt

SEQ ID NO: 64441 - RNA, 19 nt, synthetic construct
  misc_feature 1..19: note = siRNA antisense sequence
  source 1..19: mol_type = other RNA
aatggtgaggcagcagaga

SEQ ID NO: 64442 - RNA, 19 nt, synthetic construct
  misc_feature 1..19: note = siRNA sense sequence
  source 1..19: mol_type = other RNA
tctgctgcctcaccatttt

SEQ ID NO: 64443 - RNA, 19 nt, synthetic construct
  misc_feature 1..19: note = siRNA antisense sequence
  source 1..19: mol_type = other RNA
aaaatggtgaggcagcaga

SEQ ID NO: 64444 - RNA, 19 nt, synthetic construct
  misc_feature 1..19: note = siRNA sense sequence
  source 1..19: mol_type = other RNA
ctgctgcctcaccattttc

SEQ ID NO: 64445 - RNA, 19 nt, synthetic construct
  misc_feature 1..19: note = siRNA antisense sequence
  source 1..19: mol_type = other RNA
gaaaatggtgaggcagcag

SEQ ID NO: 64446 - RNA, 19 nt, synthetic construct
  misc_feature 1..19: note = siRNA sense sequence
  source 1..19: mol_type = other RNA
tgctgcctcaccattttct

SEQ ID NO: 64447 - RNA, 19 nt, synthetic construct
  misc_feature 1..19: note = siRNA antisense sequence
  source 1..19: mol_type = other RNA
agaaaatggtgaggcagca

SEQ ID NO: 64448 - RNA, 19 nt, synthetic construct
  misc_feature 1..19: note = siRNA sense sequence
  source 1..19: mol_type = other RNA
gctgcctcaccattttctg

SEQ ID NO: 64449 - RNA, 19 nt, synthetic construct
  misc_feature 1..19: note = siRNA antisense sequence
  source 1..19: mol_type = other RNA
cagaaaatggtgaggcagc

SEQ ID NO: 64450 - RNA, 19 nt, synthetic construct
  misc_feature 1..19: note = siRNA sense sequence
  source 1..19: mol_type = other RNA
ctgcctcaccattttctgt

SEQ ID NO: 64451 - RNA, 19 nt, synthetic construct
  misc_feature 1..19: note = siRNA antisense sequence
  source 1..19: mol_type = other RNA
acagaaaatggtgaggcag

SEQ ID NO: 64452 - RNA, 19 nt, synthetic construct
  misc_feature 1..19: note = siRNA sense sequence
  source 1..19: mol_type = other RNA
tgcctcaccattttctgtt

SEQ ID NO: 64453 - RNA, 19 nt, synthetic construct
  misc_feature 1..19: note = siRNA antisense sequence
  source 1..19: mol_type = other RNA
aacagaaaatggtgaggca

SEQ ID NO: 64454 - RNA, 19 nt, synthetic construct
  misc_feature 1..19: note = siRNA sense sequence
  source 1..19: mol_type = other RNA
gcctcaccattttctgtta

SEQ ID NO: 64455 - RNA, 19 nt, synthetic construct
  misc_feature 1..19: note = siRNA antisense sequence
  source 1..19: mol_type = other RNA
taacagaaaatggtgaggc

SEQ ID NO: 64456 - RNA, 19 nt, synthetic construct
  misc_feature 1..19: note = siRNA sense sequence
  source 1..19: mol_type = other RNA
cctcaccattttctgttat

SEQ ID NO: 64457 - RNA, 19 nt, synthetic construct
  misc_feature 1..19: note = siRNA antisense sequence
  source 1..19: mol_type = other RNA
ataacagaaaatggtgagg

SEQ ID NO: 64458 - RNA, 19 nt, synthetic construct
  misc_feature 1..19: note = siRNA sense sequence
  source 1..19: mol_type = other RNA
ctcaccattttctgttatt

SEQ ID NO: 64459 - RNA, 19 nt, synthetic construct
  misc_feature 1..19: note = siRNA antisense sequence
  source 1..19: mol_type = other RNA
aataacagaaaatggtgag

SEQ ID NO: 64460 - RNA, 19 nt, synthetic construct
  misc_feature 1..19: note = siRNA sense sequence
  source 1..19: mol_type = other RNA
agatggtacctacctcatt

SEQ ID NO: 64461 - RNA, 19 nt, synthetic construct
  misc_feature 1..19: note = siRNA antisense sequence
  source 1..19: mol_type = other RNA
aatgaggtaggtaccatct

SEQ ID NO: 64462 - RNA, 19 nt, synthetic construct
  misc_feature 1..19: note = siRNA sense sequence
  source 1..19: mol_type = other RNA
gatggtacctacctcattt

SEQ ID NO: 64463 - RNA, 19 nt, synthetic construct
  misc_feature 1..19: note = siRNA antisense sequence
  source 1..19: mol_type = other RNA
aaatgaggtaggtaccatc

SEQ ID NO: 64464 - RNA, 19 nt, synthetic construct
  misc_feature 1..19: note = siRNA sense sequence
  source 1..19: mol_type = other RNA
atggtacctacctcatttt

SEQ ID NO: 64465 - RNA, 19 nt, synthetic construct
  misc_feature 1..19: note = siRNA antisense sequence
  source 1..19: mol_type = other RNA
aaaatgaggtaggtaccat

SEQ ID NO: 64466 - RNA, 19 nt, synthetic construct
  misc_feature 1..19: note = siRNA sense sequence
  source 1..19: mol_type = other RNA
ggtacctacctcattttgg

SEQ ID NO: 64467 - RNA, 19 nt, synthetic construct
  misc_feature 1..19: note = siRNA antisense sequence
  source 1..19: mol_type = other RNA
ccaaaatgaggtaggtacc

SEQ ID NO: 64468 - RNA, 19 nt, synthetic construct
  misc_feature 1..19: note = siRNA sense sequence
  source 1..19: mol_type = other RNA
gtacctacctcattttggc

SEQ ID NO: 64469 - RNA, 19 nt, synthetic construct
  misc_feature 1..19: note = siRNA antisense sequence
  source 1..19: mol_type = other RNA
gccaaaatgaggtaggtac

SEQ ID NO: 64470 - RNA, 19 nt, synthetic construct
  misc_feature 1..19: note = siRNA sense sequence
  source 1..19: mol_type = other RNA
tacctacctcattttggct

SEQ ID NO: 64471 - RNA, 19 nt, synthetic construct
  misc_feature 1..19: note = siRNA antisense sequence
  source 1..19: mol_type = other RNA
agccaaaatgaggtaggta

SEQ ID NO: 64472 - RNA, 19 nt, synthetic construct
  misc_feature 1..19: note = siRNA sense sequence
  source 1..19: mol_type = other RNA
acctacctcattttggctt

SEQ ID NO: 64473 - RNA, 19 nt, synthetic construct
  misc_feature 1..19: note = siRNA antisense sequence
  source 1..19: mol_type = other RNA
aagccaaaatgaggtaggt

SEQ ID NO: 64474 - RNA, 19 nt, synthetic construct
  misc_feature 1..19: note = siRNA sense sequence
  source 1..19: mol_type = other RNA
ctacctcattttggctttt

SEQ ID NO: 64475 - RNA, 19 nt, synthetic construct
  misc_feature 1..19: note = siRNA antisense sequence
  source 1..19: mol_type = other RNA
aaaagccaaaatgaggtag

SEQ ID NO: 64476 - RNA, 19 nt, synthetic construct
  misc_feature 1..19: note = siRNA sense sequence
  source 1..19: mol_type = other RNA
tacctcattttggctttta

SEQ ID NO: 64477 - RNA, 19 nt, synthetic construct
  misc_feature 1..19: note = siRNA antisense sequence
  source 1..19: mol_type = other RNA
taaaagccaaaatgaggta

SEQ ID NO: 64478 - RNA, 19 nt, synthetic construct
  misc_feature 1..19: note = siRNA sense sequence
  source 1..19: mol_type = other RNA
cctcattttggcttttatt

SEQ ID NO: 64479 - RNA, 19 nt, synthetic construct
  misc_feature 1..19: note = siRNA antisense sequence
  source 1..19: mol_type = other RNA
aataaaagccaaaatgagg

SEQ ID NO: 64480 - RNA, 19 nt, synthetic construct
  misc_feature 1..19: note = siRNA sense sequence
  source 1..19: mol_type = other RNA
cattttggcttttatttgc

SEQ ID NO: 64481 - RNA, 19 nt, synthetic construct
  misc_feature 1..19: note = siRNA antisense sequence
  source 1..19: mol_type = other RNA
gcaaataaaagccaaaatg

SEQ ID NO: 64482 - RNA, 19 nt, synthetic construct
  misc_feature 1..19: note = siRNA sense sequence
  source 1..19: mol_type = other RNA
gtcacctgtatgtcatgtt

SEQ ID NO: 64483 - RNA, 19 nt, synthetic construct
  misc_feature 1..19: note = siRNA antisense sequence
  source 1..19: mol_type = other RNA
aacatgacatacaggtgac

SEQ ID NO: 64484 - RNA, 19 nt, synthetic construct
  misc_feature 1..19: note = siRNA sense sequence
  source 1..19: mol_type = other RNA
tcacctgtatgtcatgttt

SEQ ID NO: 64485 - RNA, 19 nt, synthetic construct
  misc_feature 1..19: note = siRNA antisense sequence
  source 1..19: mol_type = other RNA
aaacatgacatacaggtga

SEQ ID NO: 64486 - RNA, 19 nt, synthetic construct
  misc_feature 1..19: note = siRNA sense sequence
  source 1..19: mol_type = other RNA
cacctgtatgtcatgtttt

SEQ ID NO: 64487 - RNA, 19 nt, synthetic construct
  misc_feature 1..19: note = siRNA antisense sequence
  source 1..19: mol_type = other RNA
aaaacatgacatacaggtg

SEQ ID NO: 64488 - RNA, 19 nt, synthetic construct
  misc_feature 1..19: note = siRNA sense sequence
  source 1..19: mol_type = other RNA
ctgtatgtcatgttttaag

SEQ ID NO: 64489 - RNA, 19 nt, synthetic construct
  misc_feature 1..19: note = siRNA antisense sequence
  source 1..19: mol_type = other RNA
cttaaaacatgacatacag

SEQ ID NO: 64490 - RNA, 19 nt, synthetic construct
  misc_feature 1..19: note = siRNA sense sequence
  source 1..19: mol_type = other RNA
gtatgtcatgttttaagga

SEQ ID NO: 64491 - RNA, 19 nt, synthetic construct
  misc_feature 1..19: note = siRNA antisense sequence
  source 1..19: mol_type = other RNA
tccttaaaacatgacatac

SEQ ID NO: 64492 - RNA, 19 nt, synthetic construct
  misc_feature 1..19: note = siRNA sense sequence
  source 1..19: mol_type = other RNA
atgtcatgttttaaggagt

SEQ ID NO: 64493 - RNA, 19 nt, synthetic construct
  misc_feature 1..19: note = siRNA antisense sequence
  source 1..19: mol_type = other RNA
actccttaaaacatgacat

SEQ ID NO: 64494 - RNA, 19 nt, synthetic construct
  misc_feature 1..19: note = siRNA sense sequence
  source 1..19: mol_type = other RNA
tgtcatgttttaaggagtc

SEQ ID NO: 64495 - RNA, 19 nt, synthetic construct
  misc_feature 1..19: note = siRNA antisense sequence
  source 1..19: mol_type = other RNA
gactccttaaaacatgaca

SEQ ID NO: 64496 - RNA, 19 nt, synthetic construct
  misc_feature 1..19: note = siRNA sense sequence
  source 1..19: mol_type = other RNA
gtcatgttttaaggagtct

SEQ ID NO: 64497 - RNA, 19 nt, synthetic construct
  misc_feature 1..19: note = siRNA antisense sequence
  source 1..19: mol_type = other RNA
agactccttaaaacatgac

SEQ ID NO: 64498 - RNA, 19 nt, synthetic construct
  misc_feature 1..19: note = siRNA sense sequence
  source 1..19: mol_type = other RNA
tgttttaaggagtctattc

SEQ ID NO: 64499 - RNA, 19 nt, synthetic construct
  misc_feature 1..19: note = siRNA antisense sequence
  source 1..19: mol_type = other RNA
gaatagactccttaaaaca

SEQ ID NO: 64500 - RNA, 19 nt, synthetic construct
  misc_feature 1..19: note = siRNA sense sequence
  source 1..19: mol_type = other RNA
gttttaaggagtctattca

SEQ ID NO: 64501 - RNA, 19 nt, synthetic construct
  misc_feature 1..19: note = siRNA antisense sequence
  source 1..19: mol_type = other RNA
tgaatagactccttaaaac

SEQ ID NO: 64502 - RNA, 19 nt, synthetic construct
  misc_feature 1..19: note = siRNA sense sequence
  source 1..19: mol_type = other RNA
tttaaggagtctattcatg

SEQ ID NO: 64503 - RNA, 19 nt, synthetic construct
  misc_feature 1..19: note = siRNA antisense sequence
  source 1..19: mol_type = other RNA
catgaatagactccttaaa

SEQ ID NO: 64504 - RNA, 19 nt, synthetic construct
  misc_feature 1..19: note = siRNA sense sequence
  source 1..19: mol_type = other RNA
taaggagtctattcatgtc

SEQ ID NO: 64505 - RNA, 19 nt, synthetic construct
  misc_feature 1..19: note = siRNA antisense sequence
  source 1..19: mol_type = other RNA
gacatgaatagactcctta

SEQ ID NO: 64506 - RNA, 19 nt, synthetic construct
  misc_feature 1..19: note = siRNA sense sequence
  source 1..19: mol_type = other RNA
aaggagtctattcatgtcc

SEQ ID NO: 64507 - RNA, 19 nt, synthetic construct
  misc_feature 1..19: note = siRNA antisense sequence
  source 1..19: mol_type = other RNA
ggacatgaatagactcctt

SEQ ID NO: 64508 - RNA, 19 nt, synthetic construct
  misc_feature 1..19: note = siRNA sense sequence
  source 1..19: mol_type = other RNA
ggagtctattcatgtcctt

SEQ ID NO: 64509 - RNA, 19 nt, synthetic construct
  misc_feature 1..19: note = siRNA antisense sequence
  source 1..19: mol_type = other RNA
aaggacatgaatagactcc

SEQ ID NO: 64510 - RNA, 19 nt, synthetic construct
  misc_feature 1..19: note = siRNA sense sequence
  source 1..19: mol_type = other RNA
gtggttatttgttgattga

SEQ ID NO: 64511 - RNA, 19 nt, synthetic construct
  misc_feature 1..19: note = siRNA antisense sequence
  source 1..19: mol_type = other RNA
tcaatcaacaaataaccac

SEQ ID NO: 64512 - RNA, 19 nt, synthetic construct
  misc_feature 1..19: note = siRNA sense sequence
  source 1..19: mol_type = other RNA
gttgattgattgcttgctg

SEQ ID NO: 64513 - RNA, 19 nt, synthetic construct
  misc_feature 1..19: note = siRNA antisense sequence
  source 1..19: mol_type = other RNA
cagcaagcaatcaatcaac

SEQ ID NO: 64514 - RNA, 19 nt, synthetic construct
  misc_feature 1..19: note = siRNA sense sequence
  source 1..19: mol_type = other RNA
ttgattgattgcttgctga

SEQ ID NO: 64515 - RNA, 19 nt, synthetic construct
  misc_feature 1..19: note = siRNA antisense sequence
  source 1..19: mol_type = other RNA
tcagcaagcaatcaatcaa

SEQ ID NO: 64516 - RNA, 19 nt, synthetic construct
  misc_feature 1..19: note = siRNA sense sequence
  source 1..19: mol_type = other RNA
tgattgattgcttgctgag

SEQ ID NO: 64517 - RNA, 19 nt, synthetic construct
  misc_feature 1..19: note = siRNA antisense sequence
  source 1..19: mol_type = other RNA
ctcagcaagcaatcaatca

SEQ ID NO: 64518 - RNA, 19 nt, synthetic construct
  misc_feature 1..19: note = siRNA sense sequence
  source 1..19: mol_type = other RNA
tgattgcttgctgagttgt

SEQ ID NO: 64519 - RNA, 19 nt, synthetic construct
  misc_feature 1..19: note = siRNA antisense sequence
  source 1..19: mol_type = other RNA
acaactcagcaagcaatca

SEQ ID NO: 64520 - RNA, 19 nt, synthetic construct
  misc_feature 1..19: note = siRNA sense sequence
  source 1..19: mol_type = other RNA
gattgcttgctgagttgtt

SEQ ID NO: 64521 - RNA, 19 nt, synthetic construct
  misc_feature 1..19: note = siRNA antisense sequence
  source 1..19: mol_type = other RNA
aacaactcagcaagcaatc

SEQ ID NO: 64522 - RNA, 19 nt, synthetic construct
  misc_feature 1..19: note = siRNA sense sequence
  source 1..19: mol_type = other RNA
attgcttgctgagttgttc

SEQ ID NO: 64523 - RNA, 19 nt, synthetic construct
  misc_feature 1..19: note = siRNA antisense sequence
  source 1..19: mol_type = other RNA
gaacaactcagcaagcaat

SEQ ID NO: 64524 - RNA, 19 nt, synthetic construct
  misc_feature 1..19: note = siRNA sense sequence
  source 1..19: mol_type = other RNA
ttgcttgctgagttgttca

SEQ ID NO: 64525 - RNA, 19 nt, synthetic construct
  misc_feature 1..19: note = siRNA antisense sequence
  source 1..19: mol_type = other RNA
tgaacaactcagcaagcaa

SEQ ID NO: 64526 - RNA, 19 nt, synthetic construct
  misc_feature 1..19: note = siRNA sense sequence
  source 1..19: mol_type = other RNA
tgcttgctgagttgttcaa

SEQ ID NO: 64527 - RNA, 19 nt, synthetic construct
  misc_feature 1..19: note = siRNA antisense sequence
  source 1..19: mol_type = other RNA
ttgaacaactcagcaagca

SEQ ID NO: 64528 - RNA, 19 nt, synthetic construct
  misc_feature 1..19: note = siRNA sense sequence
  source 1..19: mol_type = other RNA
ttgctgagttgttcaagtt

SEQ ID NO: 64529 - RNA, 19 nt, synthetic construct
  misc_feature 1..19: note = siRNA antisense sequence
  source 1..19: mol_type = other RNA
aacttgaacaactcagcaa

SEQ ID NO: 64530 - RNA, 19 nt, synthetic construct
  misc_feature 1..19: note = siRNA sense sequence
  source 1..19: mol_type = other RNA
gttgttcaagttccttatt

SEQ ID NO: 64531 - RNA, 19 nt, synthetic construct
  misc_feature 1..19: note = siRNA antisense sequence
  source 1..19: mol_type = other RNA
aataaggaacttgaacaac

SEQ ID NO: 64532 - RNA, 19 nt, synthetic construct
  misc_feature 1..19: note = siRNA sense sequence
  source 1..19: mol_type = other RNA
caattattttctcccattc

SEQ ID NO: 64533 - RNA, 19 nt, synthetic construct
  misc_feature 1..19: note = siRNA antisense sequence
  source 1..19: mol_type = other RNA
gaatgggagaaaataattg

SEQ ID NO: 64534 - RNA, 19 nt, synthetic construct
  misc_feature 1..19: note = siRNA sense sequence
  source 1..19: mol_type = other RNA
attattttctcccattctg

SEQ ID NO: 64535 - RNA, 19 nt, synthetic construct
  misc_feature 1..19: note = siRNA antisense sequence
  source 1..19: mol_type = other RNA
cagaatgggagaaaataat

SEQ ID NO: 64536 - RNA, 19 nt, synthetic construct
  misc_feature 1..19: note = siRNA sense sequence
  source 1..19: mol_type = other RNA
ttattttctcccattctgt

SEQ ID NO: 64537 - RNA, 19 nt, synthetic construct
  misc_feature 1..19: note = siRNA antisense sequence
  source 1..19: mol_type = other RNA
acagaatgggagaaaataa

SEQ ID NO: 64538 - RNA, 19 nt, synthetic construct
  misc_feature 1..19: note = siRNA sense sequence
  source 1..19: mol_type = other RNA
tattttctcccattctgta

SEQ ID NO: 64539 - RNA, 19 nt, synthetic construct
  misc_feature 1..19: note = siRNA antisense sequence
  source 1..19: mol_type = other RNA
tacagaatgggagaaaata

SEQ ID NO: 64540 - RNA, 19 nt, synthetic construct
  misc_feature 1..19: note = siRNA sense sequence
  source 1..19: mol_type = other RNA
ttctcccattctgtaggtt

SEQ ID NO: 64541 - RNA, 19 nt, synthetic construct
  misc_feature 1..19: note = siRNA antisense sequence
  source 1..19: mol_type = other RNA
aacctacagaatgggagaa

SEQ ID NO: 64542 - RNA, 19 nt, synthetic construct
  misc_feature 1..19: note = siRNA sense sequence
  source 1..19: mol_type = other RNA
tgttgtgcagaagctcttt

SEQ ID NO: 64543 - RNA, 19 nt, synthetic construct
  misc_feature 1..19: note = siRNA antisense sequence
  source 1..19: mol_type = other RNA
aaagagcttctgcacaaca

SEQ ID NO: 64544 - RNA, 19 nt, synthetic construct
  misc_feature 1..19: note = siRNA sense sequence
  source 1..19: mol_type = other RNA
gttgtgcagaagctcttta

SEQ ID NO: 64545 - RNA, 19 nt, synthetic construct
  misc_feature 1..19: note = siRNA antisense sequence
  source 1..19: mol_type = other RNA
taaagagcttctgcacaac

SEQ ID NO: 64546 - RNA, 19 nt, synthetic construct
  misc_feature 1..19: note = siRNA sense sequence
  source 1..19: mol_type = other RNA
ttgtgcagaagctctttag

SEQ ID NO: 64547 - RNA, 19 nt, synthetic construct
  misc_feature 1..19: note = siRNA antisense sequence
  source 1..19: mol_type = other RNA
ctaaagagcttctgcacaa

SEQ ID NO: 64548 - RNA, 19 nt, synthetic construct
  misc_feature 1..19: note = siRNA sense sequence
  source 1..19: mol_type = other RNA
tgtgcagaagctctttagt

SEQ ID NO: 64549 - RNA, 19 nt, synthetic construct
  misc_feature 1..19: note = siRNA antisense sequence
  source 1..19: mol_type = other RNA
actaaagagcttctgcaca

SEQ ID NO: 64550 - RNA, 19 nt, synthetic construct
  misc_feature 1..19: note = siRNA sense sequence
  source 1..19: mol_type = other RNA
gtgcagaagctctttagtt

SEQ ID NO: 64551 - RNA, 19 nt, synthetic construct
  misc_feature 1..19: note = siRNA antisense sequence
  source 1..19: mol_type = other RNA
aactaaagagcttctgcac

SEQ ID NO: 64552 - RNA, 19 nt, synthetic construct
  misc_feature 1..19: note = siRNA sense sequence
  source 1..19: mol_type = other RNA
tgcagaagctctttagttt

SEQ ID NO: 64553 - RNA, 19 nt, synthetic construct
  misc_feature 1..19: note = siRNA antisense sequence
  source 1..19: mol_type = other RNA
aaactaaagagcttctgca

SEQ ID NO: 64554 - RNA, 19 nt, synthetic construct
  misc_feature 1..19: note = siRNA sense sequence
  source 1..19: mol_type = other RNA
gcagaagctctttagttta

SEQ ID NO: 64555 - RNA, 19 nt, synthetic construct
  misc_feature 1..19: note = siRNA antisense sequence
  source 1..19: mol_type = other RNA
taaactaaagagcttctgc

SEQ ID NO: 64556 - RNA, 19 nt, synthetic construct
  misc_feature 1..19: note = siRNA sense sequence
  source 1..19: mol_type = other RNA
cagaagctctttagtttaa

SEQ ID NO: 64557 - RNA, 19 nt, synthetic construct
  misc_feature 1..19: note = siRNA antisense sequence
  source 1..19: mol_type = other RNA
ttaaactaaagagcttctg

SEQ ID NO: 64558 - RNA, 19 nt, synthetic construct
  misc_feature 1..19: note = siRNA sense sequence
  source 1..19: mol_type = other RNA
gtttaattagatcccactt

SEQ ID NO: 64559 - RNA, 19 nt, synthetic construct
  misc_feature 1..19: note = siRNA antisense sequence
  source 1..19: mol_type = other RNA
aagtgggatctaattaaac

SEQ ID NO: 64560 - RNA, 19 nt, synthetic construct
  misc_feature 1..19: note = siRNA sense sequence
  source 1..19: mol_type = other RNA
tttaattagatcccacttg

SEQ ID NO: 64561 - RNA, 19 nt, synthetic construct
  misc_feature 1..19: note = siRNA antisense sequence
  source 1..19: mol_type = other RNA
caagtgggatctaattaaa

SEQ ID NO: 64562 - RNA, 19 nt, synthetic construct
  misc_feature 1..19: note = siRNA sense sequence
  source 1..19: mol_type = other RNA
ttaattagatcccacttgt

SEQ ID NO: 64563 - RNA, 19 nt, synthetic construct
  misc_feature 1..19: note = siRNA antisense sequence
  source 1..19: mol_type = other RNA
acaagtgggatctaattaa

SEQ ID NO: 64564 - RNA, 19 nt, synthetic construct
  misc_feature 1..19: note = siRNA sense sequence
  source 1..19: mol_type = other RNA
atggctagccagttatccc

SEQ ID NO: 64565 - RNA, 19 nt, synthetic construct
  misc_feature 1..19: note = siRNA antisense sequence
  source 1..19: mol_type = other RNA
gggataactggctagccat

SEQ ID NO: 64566 - RNA, 19 nt, synthetic construct
  misc_feature 1..19: note = siRNA sense sequence
  source 1..19: mol_type = other RNA
ttttgactagggattcctt

SEQ ID NO: 64567 - RNA, 19 nt, synthetic construct
  misc_feature 1..19: note = siRNA antisense sequence
  source 1..19: mol_type = other RNA
aaggaatccctagtcaaaa

SEQ ID NO: 64568 - RNA, 19 nt, synthetic construct
  misc_feature 1..19: note = siRNA sense sequence
  source 1..19: mol_type = other RNA
tttgactagggattccttt

SEQ ID NO: 64569 - RNA, 19 nt, synthetic construct
  misc_feature 1..19: note = siRNA antisense sequence
  source 1..19: mol_type = other RNA
aaaggaatccctagtcaaa

SEQ ID NO: 64570 - RNA, 19 nt, synthetic construct
  misc_feature 1..19: note = siRNA sense sequence
  source 1..19: mol_type = other RNA
atcaaagatcagacggctg

SEQ ID NO: 64571 - RNA, 19 nt, synthetic construct
  misc_feature 1..19: note = siRNA antisense sequence
  source 1..19: mol_type = other RNA
cagccgtctgatctttgat

SEQ ID NO: 64572 - RNA, 19 nt, synthetic construct
  misc_feature 1..19: note = siRNA sense sequence
  source 1..19: mol_type = other RNA
tcaaagatcagacggctgt

SEQ ID NO: 64573 - RNA, 19 nt, synthetic construct
  misc_feature 1..19: note = siRNA antisense sequence
  source 1..19: mol_type = other RNA
acagccgtctgatctttga

SEQ ID NO: 64574 - RNA, 19 nt, synthetic construct
  misc_feature 1..19: note = siRNA sense sequence
  source 1..19: mol_type = other RNA
gatcagacggctgtaggta

SEQ ID NO: 64575 - RNA, 19 nt, synthetic construct
  misc_feature 1..19: note = siRNA antisense sequence
  source 1..19: mol_type = other RNA
tacctacagccgtctgatc

SEQ ID NO: 64576 - RNA, 19 nt, synthetic construct
  misc_feature 1..19: note = siRNA sense sequence
  source 1..19: mol_type = other RNA
agacggctgtaggtatgtg

SEQ ID NO: 64577 - RNA, 19 nt, synthetic construct
  misc_feature 1..19: note = siRNA antisense sequence
  source 1..19: mol_type = other RNA
cacatacctacagccgtct

SEQ ID NO: 64578 - RNA, 19 nt, synthetic construct
  misc_feature 1..19: note = siRNA sense sequence
  source 1..19: mol_type = other RNA
gtttcactggtccatgtgg

SEQ ID NO: 64579 - RNA, 19 nt, synthetic construct
  misc_feature 1..19: note = siRNA antisense sequence
  source 1..19: mol_type = other RNA
ccacatggaccagtgaaac

SEQ ID NO: 64580 - RNA, 19 nt, synthetic construct
  misc_feature 1..19: note = siRNA sense sequence
  source 1..19: mol_type = other RNA
tttcactggtccatgtggc

SEQ ID NO: 64581 - RNA, 19 nt, synthetic construct
  misc_feature 1..19: note = siRNA antisense sequence
  source 1..19: mol_type = other RNA
gccacatggaccagtgaaa

SEQ ID NO: 64582 - RNA, 19 nt, synthetic construct
  misc_feature 1..19: note = siRNA sense sequence
  source 1..19: mol_type = other RNA
ttcactggtccatgtggct

SEQ ID NO: 64583 - RNA, 19 nt, synthetic construct
  misc_feature 1..19: note = siRNA antisense sequence
  source 1..19: mol_type = other RNA
agccacatggaccagtgaa

SEQ ID NO: 64584 - RNA, 19 nt, synthetic construct
  misc_feature 1..19: note = siRNA sense sequence
  source 1..19: mol_type = other RNA
tcactggtccatgtggctc

SEQ ID NO: 64585 - RNA, 19 nt, synthetic construct
  misc_feature 1..19: note = siRNA antisense sequence
  source 1..19: mol_type = other RNA
gagccacatggaccagtga

SEQ ID NO: 64586 - RNA, 19 nt, synthetic construct
  misc_feature 1..19: note = siRNA sense sequence
  source 1..19: mol_type = other RNA
cactggtccatgtggctct

SEQ ID NO: 64587 - RNA, 19 nt, synthetic construct
  misc_feature 1..19: note = siRNA antisense sequence
  source 1..19: mol_type = other RNA
agagccacatggaccagtg

SEQ ID NO: 64588 - RNA, 19 nt, synthetic construct
  misc_feature 1..19: note = siRNA sense sequence
  source 1..19: mol_type = other RNA
actggtccatgtggctctt

SEQ ID NO: 64589 - RNA, 19 nt, synthetic construct
  misc_feature 1..19: note = siRNA antisense sequence
  source 1..19: mol_type = other RNA
aagagccacatggaccagt

SEQ ID NO: 64590 - RNA, 19 nt, synthetic construct
  misc_feature 1..19: note = siRNA sense sequence
  source 1..19: mol_type = other RNA
ctggtccatgtggctcttc

SEQ ID NO: 64591 - RNA, 19 nt, synthetic construct
  misc_feature 1..19: note = siRNA antisense sequence
  source 1..19: mol_type = other RNA
gaagagccacatggaccag

SEQ ID NO: 64592 - RNA, 19 nt, synthetic construct
  misc_feature 1..19: note = siRNA sense sequence
  source 1..19: mol_type = other RNA
tggtccatgtggctcttct

SEQ ID NO: 64593 - RNA, 19 nt, synthetic construct
  misc_feature 1..19: note = siRNA antisense sequence
  source 1..19: mol_type = other RNA
agaagagccacatggacca

SEQ ID NO: 64594 - RNA, 19 nt, synthetic construct
  misc_feature 1..19: note = siRNA sense sequence
  source 1..19: mol_type = other RNA
ggtccatgtggctcttctg

SEQ ID NO: 64595 - RNA, 19 nt, synthetic construct
  misc_feature 1..19: note = siRNA antisense sequence
  source 1..19: mol_type = other RNA
cagaagagccacatggacc

SEQ ID NO: 64596 - RNA, 19 nt, synthetic construct
  misc_feature 1..19: note = siRNA sense sequence
  source 1..19: mol_type = other RNA
gtccatgtggctcttctgt

SEQ ID NO: 64597 - RNA, 19 nt, synthetic construct
  misc_feature 1..19: note = siRNA antisense sequence
  source 1..19: mol_type = other RNA
acagaagagccacatggac

SEQ ID NO: 64598 - RNA, 19 nt, synthetic construct
  misc_feature 1..19: note = siRNA sense sequence
  source 1..19: mol_type = other RNA
tccatgtggctcttctgta

SEQ ID NO: 64599 - RNA, 19 nt, synthetic construct
  misc_feature 1..19: note = siRNA antisense sequence
  source 1..19: mol_type = other RNA
tacagaagagccacatgga

SEQ ID NO: 64600 - RNA, 19 nt, synthetic construct
  misc_feature 1..19: note = siRNA sense sequence
  source 1..19: mol_type = other RNA
catgtggctcttctgtacc

SEQ ID NO: 64601 - RNA, 19 nt, synthetic construct
  misc_feature 1..19: note = siRNA antisense sequence
  source 1..19: mol_type = other RNA
ggtacagaagagccacatg

SEQ ID NO: 64602 - RNA, 19 nt, synthetic construct
  misc_feature 1..19: note = siRNA sense sequence
  source 1..19: mol_type = other RNA
tggctcttctgtaccagta

SEQ ID NO: 64603 - RNA, 19 nt, synthetic construct
  misc_feature 1..19: note = siRNA antisense sequence
  source 1..19: mol_type = other RNA
tactggtacagaagagcca

SEQ ID NO: 64604 - RNA, 19 nt, synthetic construct
  misc_feature 1..19: note = siRNA sense sequence
  source 1..19: mol_type = other RNA
ggctcttctgtaccagtat

SEQ ID NO: 64605 - RNA, 19 nt, synthetic construct
  misc_feature 1..19: note = siRNA antisense sequence
  source 1..19: mol_type = other RNA
atactggtacagaagagcc

SEQ ID NO: 64606 - RNA, 19 nt, synthetic construct
  misc_feature 1..19: note = siRNA sense sequence
  source 1..19: mol_type = other RNA
gctcttctgtaccagtatc

SEQ ID NO: 64607 - RNA, 19 nt, synthetic construct
  misc_feature 1..19: note = siRNA antisense sequence
  source 1..19: mol_type = other RNA
gatactggtacagaagagc

SEQ ID NO: 64608 - RNA, 19 nt, synthetic construct
  misc_feature 1..19: note = siRNA sense sequence
  source 1..19: mol_type = other RNA
ctcttctgtaccagtatca

SEQ ID NO: 64609 - RNA, 19 nt, synthetic construct
  misc_feature 1..19: note = siRNA antisense sequence
  source 1..19: mol_type = other RNA
tgatactggtacagaagag

SEQ ID NO: 64610 - RNA, 19 nt, synthetic construct
  misc_feature 1..19: note = siRNA sense sequence
  source 1..19: mol_type = other RNA
ccgtagccttatagtagag

SEQ ID NO: 64611 - RNA, 19 nt, synthetic construct
  misc_feature 1..19: note = siRNA antisense sequence
  source 1..19: mol_type = other RNA
ctctactataaggctacgg

SEQ ID NO: 64612 - RNA, 19 nt, synthetic construct
  misc_feature 1..19: note = siRNA sense sequence
  source 1..19: mol_type = other RNA
cgtagccttatagtagagt

SEQ ID NO: 64613 - RNA, 19 nt, synthetic construct
  misc_feature 1..19: note = siRNA antisense sequence
  source 1..19: mol_type = other RNA
actctactataaggctacg

SEQ ID NO: 64614 - RNA, 19 nt, synthetic construct
  misc_feature 1..19: note = siRNA sense sequence
  source 1..19: mol_type = other RNA
agccttatagtagagttcg

SEQ ID NO: 64615 - RNA, 19 nt, synthetic construct
  misc_feature 1..19: note = siRNA antisense sequence
  source 1..19: mol_type = other RNA
cgaactctactataaggct

SEQ ID NO: 64616 - RNA, 19 nt, synthetic construct
  misc_feature 1..19: note = siRNA sense sequence
  source 1..19: mol_type = other RNA
gccttatagtagagttcga

SEQ ID NO: 64617 - RNA, 19 nt, synthetic construct
  misc_feature 1..19: note = siRNA antisense sequence
  source 1..19: mol_type = other RNA
tcgaactctactataaggc

SEQ ID NO: 64618 - RNA, 19 nt, synthetic construct
  misc_feature 1..19: note = siRNA sense sequence
  source 1..19: mol_type = other RNA
ccttatagtagagttcgaa

SEQ ID NO: 64619 - RNA, 19 nt, synthetic construct
  misc_feature 1..19: note = siRNA antisense sequence
  source 1..19: mol_type = other RNA
ttcgaactctactataagg

SEQ ID NO: 64620 - RNA, 19 nt, synthetic construct
  misc_feature 1..19: note = siRNA sense sequence
  source 1..19: mol_type = other RNA
cttatagtagagttcgaag

SEQ ID NO: 64621 - RNA, 19 nt, synthetic construct
  misc_feature 1..19: note = siRNA antisense sequence
  source 1..19: mol_type = other RNA
cttcgaactctactataag

SEQ ID NO: 64622 - RNA, 19 nt, synthetic construct
  misc_feature 1..19: note = siRNA sense sequence
  source 1..19: mol_type = other RNA
ttatagtagagttcgaagt

SEQ ID NO: 64623 - RNA, 19 nt, synthetic construct
  misc_feature 1..19: note = siRNA antisense sequence
  source 1..19: mol_type = other RNA
acttcgaactctactataa

SEQ ID NO: 64624 - RNA, 19 nt, synthetic construct
  misc_feature 1..19: note = siRNA sense sequence
  source 1..19: mol_type = other RNA
tatagtagagttcgaagtc

SEQ ID NO: 64625 - RNA, 19 nt, synthetic construct
  misc_feature 1..19: note = siRNA antisense sequence
  source 1..19: mol_type = other RNA
gacttcgaactctactata

SEQ ID NO: 64626 - RNA, 19 nt, synthetic construct
  misc_feature 1..19: note = siRNA sense sequence
  source 1..19: mol_type = other RNA
atagtagagttcgaagtca

SEQ ID NO: 64627 - RNA, 19 nt, synthetic construct
  misc_feature 1..19: note = siRNA antisense sequence
  source 1..19: mol_type = other RNA
tgacttcgaactctactat

SEQ ID NO: 64628 - RNA, 19 nt, synthetic construct
  misc_feature 1..19: note = siRNA sense sequence
  source 1..19: mol_type = other RNA
tcaggcagtgtgatgggtc

SEQ ID NO: 64629 - RNA, 19 nt, synthetic construct
  misc_feature 1..19: note = siRNA antisense sequence
  source 1..19: mol_type = other RNA
gacccatcacactgcctga

SEQ ID NO: 64630 - RNA, 19 nt, synthetic construct
  misc_feature 1..19: note = siRNA sense sequence
  source 1..19: mol_type = other RNA
caggcagtgtgatgggtct

SEQ ID NO: 64631 - RNA, 19 nt, synthetic construct
  misc_feature 1..19: note = siRNA antisense sequence
  source 1..19: mol_type = other RNA
agacccatcacactgcctg

SEQ ID NO: 64632 - RNA, 19 nt, synthetic construct
  misc_feature 1..19: note = siRNA sense sequence
  source 1..19: mol_type = other RNA
aggcagtgtgatgggtctg

SEQ ID NO: 64633 - RNA, 19 nt, synthetic construct
  misc_feature 1..19: note = siRNA antisense sequence
  source 1..19: mol_type = other RNA
cagacccatcacactgcct

SEQ ID NO: 64634 - RNA, 19 nt, synthetic construct
  misc_feature 1..19: note = siRNA sense sequence
  source 1..19: mol_type = other RNA
ggcagtgtgatgggtctgg

SEQ ID NO: 64635 - RNA, 19 nt, synthetic construct
  misc_feature 1..19: note = siRNA antisense sequence
  source 1..19: mol_type = other RNA
ccagacccatcacactgcc

SEQ ID NO: 64636 - RNA, 19 nt, synthetic construct
  misc_feature 1..19: note = siRNA sense sequence
  source 1..19: mol_type = other RNA
gcagtgtgatgggtctggc

SEQ ID NO: 64637 - RNA, 19 nt, synthetic construct
  misc_feature 1..19: note = siRNA antisense sequence
  source 1..19: mol_type = other RNA
gccagacccatcacactgc

SEQ ID NO: 64638 - RNA, 19 nt, synthetic construct
  misc_feature 1..19: note = siRNA sense sequence
  source 1..19: mol_type = other RNA
cagtgtgatgggtctggct

SEQ ID NO: 64639 - RNA, 19 nt, synthetic construct
  misc_feature 1..19: note = siRNA antisense sequence
  source 1..19: mol_type = other RNA
agccagacccatcacactg

SEQ ID NO: 64640 - RNA, 19 nt, synthetic construct
  misc_feature 1..19: note = siRNA sense sequence
  source 1..19: mol_type = other RNA
agtgtgatgggtctggctt

SEQ ID NO: 64641 - RNA, 19 nt, synthetic construct
  misc_feature 1..19: note = siRNA antisense sequence
  source 1..19: mol_type = other RNA
aagccagacccatcacact

SEQ ID NO: 64642 - RNA, 19 nt, synthetic construct
  misc_feature 1..19: note = siRNA sense sequence
  source 1..19: mol_type = other RNA
gtgtgatgggtctggcttt

SEQ ID NO: 64643 - RNA, 19 nt, synthetic construct
  misc_feature 1..19: note = siRNA antisense sequence
  source 1..19: mol_type = other RNA
aaagccagacccatcacac

SEQ ID NO: 64644 - RNA, 19 nt, synthetic construct
  misc_feature 1..19: note = siRNA sense sequence
  source 1..19: mol_type = other RNA
attgctttggctacctgag

SEQ ID NO: 64645 - RNA, 19 nt, synthetic construct
  misc_feature 1..19: note = siRNA antisense sequence
  source 1..19: mol_type = other RNA
ctcaggtagccaaagcaat

SEQ ID NO: 64646 - RNA, 19 nt, synthetic construct
  misc_feature 1..19: note = siRNA sense sequence
  source 1..19: mol_type = other RNA
tgctttggctacctgagct

SEQ ID NO: 64647 - RNA, 19 nt, synthetic construct
  misc_feature 1..19: note = siRNA antisense sequence
  source 1..19: mol_type = other RNA
agctcaggtagccaaagca

SEQ ID NO: 64648 - RNA, 19 nt, synthetic construct
  misc_feature 1..19: note = siRNA sense sequence
  source 1..19: mol_type = other RNA
tggctacctgagctctttt

SEQ ID NO: 64649 - RNA, 19 nt, synthetic construct
  misc_feature 1..19: note = siRNA antisense sequence
  source 1..19: mol_type = other RNA
aaaagagctcaggtagcca

SEQ ID NO: 64650 - RNA, 19 nt, synthetic construct
  misc_feature 1..19: note = siRNA sense sequence
  source 1..19: mol_type = other RNA
atgttggtactttaagagc

SEQ ID NO: 64651 - RNA, 19 nt, synthetic construct
  misc_feature 1..19: note = siRNA antisense sequence
  source 1..19: mol_type = other RNA
gctcttaaagtaccaacat

SEQ ID NO: 64652 - RNA, 19 nt, synthetic construct
  misc_feature 1..19: note = siRNA sense sequence
  source 1..19: mol_type = other RNA
tgttggtactttaagagca

SEQ ID NO: 64653 - RNA, 19 nt, synthetic construct
  misc_feature 1..19: note = siRNA antisense sequence
  source 1..19: mol_type = other RNA
tgctcttaaagtaccaaca

SEQ ID NO: 64654 - RNA, 19 nt, synthetic construct
  misc_feature 1..19: note = siRNA sense sequence
  source 1..19: mol_type = other RNA
gttggtactttaagagcaa

SEQ ID NO: 64655 - RNA, 19 nt, synthetic construct
  misc_feature 1..19: note = siRNA antisense sequence
  source 1..19: mol_type = other RNA
ttgctcttaaagtaccaac

SEQ ID NO: 64656 - RNA, 19 nt, synthetic construct
  misc_feature 1..19: note = siRNA sense sequence
  source 1..19: mol_type = other RNA
ttggtactttaagagcaac

SEQ ID NO: 64657 - RNA, 19 nt, synthetic construct
  misc_feature 1..19: note = siRNA antisense sequence
  source 1..19: mol_type = other RNA
gttgctcttaaagtaccaa

SEQ ID NO: 64658 - RNA, 19 nt, synthetic construct
  misc_feature 1..19: note = siRNA sense sequence
  source 1..19: mol_type = other RNA
ttttaggtctccttttaga

SEQ ID NO: 64659 - RNA, 19 nt, synthetic construct
  misc_feature 1..19: note = siRNA antisense sequence
  source 1..19: mol_type = other RNA
tctaaaaggagacctaaaa

SEQ ID NO: 64660 - RNA, 19 nt, synthetic construct
  misc_feature 1..19: note = siRNA sense sequence
  source 1..19: mol_type = other RNA
tttaggtctccttttagag

SEQ ID NO: 64661 - RNA, 19 nt, synthetic construct
  misc_feature 1..19: note = siRNA antisense sequence
  source 1..19: mol_type = other RNA
ctctaaaaggagacctaaa

SEQ ID NO: 64662 - RNA, 19 nt, synthetic construct
  misc_feature 1..19: note = siRNA sense sequence
  source 1..19: mol_type = other RNA
attcctggatatttcagtg

SEQ ID NO: 64663 - RNA, 19 nt, synthetic construct
  misc_feature 1..19: note = siRNA antisense sequence
  source 1..19: mol_type = other RNA
cactgaaatatccaggaat

SEQ ID NO: 64664 - RNA, 19 nt, synthetic construct
  misc_feature 1..19: note = siRNA sense sequence
  source 1..19: mol_type = other RNA
ttgtagcttctgtaaatgg

SEQ ID NO: 64665 - RNA, 19 nt, synthetic construct
  misc_feature 1..19: note = siRNA antisense sequence
  source 1..19: mol_type = other RNA
ccatttacagaagctacaa

SEQ ID NO: 64666 - RNA, 19 nt, synthetic construct
  misc_feature 1..19: note = siRNA sense sequence
  source 1..19: mol_type = other RNA
gacggagtctcgctctgtc

SEQ ID NO: 64667 - RNA, 19 nt, synthetic construct
  misc_feature 1..19: note = siRNA antisense sequence
  source 1..19: mol_type = other RNA
gacagagcgagactccgtc

SEQ ID NO: 64668 - RNA, 19 nt, synthetic construct
  misc_feature 1..19: note = siRNA sense sequence
  source 1..19: mol_type = other RNA
agtctcgctctgtcgccca

SEQ ID NO: 64669 - RNA, 19 nt, synthetic construct
  misc_feature 1..19: note = siRNA antisense sequence
  source 1..19: mol_type = other RNA
tgggcgacagagcgagact

SEQ ID NO: 64670 - RNA, 19 nt, synthetic construct
  misc_feature 1..19: note = siRNA sense sequence
  source 1..19: mol_type = other RNA
gcgaccttggctcactgca

SEQ ID NO: 64671 - RNA, 19 nt, synthetic construct
  misc_feature 1..19: note = siRNA antisense sequence
  source 1..19: mol_type = other RNA
tgcagtgagccaaggtcgc

SEQ ID NO: 64672 - RNA, 19 nt, synthetic construct
  misc_feature 1..19: note = siRNA sense sequence
  source 1..19: mol_type = other RNA
cgaccttggctcactgcaa

SEQ ID NO: 64673 - RNA, 19 nt, synthetic construct
  misc_feature 1..19: note = siRNA antisense sequence
  source 1..19: mol_type = other RNA
ttgcagtgagccaaggtcg

SEQ ID NO: 64674 - RNA, 19 nt, synthetic construct
  misc_feature 1..19: note = siRNA sense sequence
  source 1..19: mol_type = other RNA
gggttcacgccattctctt

SEQ ID NO: 64675 - RNA, 19 nt, synthetic construct
  misc_feature 1..19: note = siRNA antisense sequence
  source 1..19: mol_type = other RNA
aagagaatggcgtgaaccc

SEQ ID NO: 64676 - RNA, 19 nt, synthetic construct
  misc_feature 1..19: note = siRNA sense sequence
  source 1..19: mol_type = other RNA
tgagcagctgggactacag

SEQ ID NO: 64677 - RNA, 19 nt, synthetic construct
  misc_feature 1..19: note = siRNA antisense sequence
  source 1..19: mol_type = other RNA
ctgtagtcccagctgctca

SEQ ID NO: 64678 - RNA, 19 nt, synthetic construct
  misc_feature 1..19: note = siRNA sense sequence
  source 1..19: mol_type = other RNA
caggatggtctcgatctcc

SEQ ID NO: 64679 - RNA, 19 nt, synthetic construct
  misc_feature 1..19: note = siRNA antisense sequence
  source 1..19: mol_type = other RNA
ggagatcgagaccatcctg

SEQ ID NO: 64680 - RNA, 19 nt, synthetic construct
  misc_feature 1..19: note = siRNA sense sequence
  source 1..19: mol_type = other RNA
ggatggtctcgatctcctg

SEQ ID NO: 64681 - RNA, 19 nt, synthetic construct
  misc_feature 1..19: note = siRNA antisense sequence
  source 1..19: mol_type = other RNA
caggagatcgagaccatcc

SEQ ID NO: 64682 - RNA, 19 nt, synthetic construct
  misc_feature 1..19: note = siRNA sense sequence
  source 1..19: mol_type = other RNA
gatggtctcgatctcctga

SEQ ID NO: 64683 - RNA, 19 nt, synthetic construct
  misc_feature 1..19: note = siRNA antisense sequence
  source 1..19: mol_type = other RNA
tcaggagatcgagaccatc

SEQ ID NO: 64684 - RNA, 19 nt, synthetic construct
  misc_feature 1..19: note = siRNA sense sequence
  source 1..19: mol_type = other RNA
atggtctcgatctcctgac

SEQ ID NO: 64685 - RNA, 19 nt, synthetic construct
  misc_feature 1..19: note = siRNA antisense sequence
  source 1..19: mol_type = other RNA
gtcaggagatcgagaccat

SEQ ID NO: 64686 - RNA, 19 nt, synthetic construct
  misc_feature 1..19: note = siRNA sense sequence
  source 1..19: mol_type = other RNA
ctcgatctcctgacctcat

SEQ ID NO: 64687 - RNA, 19 nt, synthetic construct
  misc_feature 1..19: note = siRNA antisense sequence
  source 1..19: mol_type = other RNA
atgaggtcaggagatcgag

SEQ ID NO: 64688 - RNA, 19 nt, synthetic construct
  misc_feature 1..19: note = siRNA sense sequence
  source 1..19: mol_type = other RNA
tcgatctcctgacctcatg

SEQ ID NO: 64689 - RNA, 19 nt, synthetic construct
  misc_feature 1..19: note = siRNA antisense sequence
  source 1..19: mol_type = other RNA
catgaggtcaggagatcga

SEQ ID NO: 64690 - RNA, 19 nt, synthetic construct
  misc_feature 1..19: note = siRNA sense sequence
  source 1..19: mol_type = other RNA
tctcctgacctcatgatct

SEQ ID NO: 64691 - RNA, 19 nt, synthetic construct
  misc_feature 1..19: note = siRNA antisense sequence
  source 1..19: mol_type = other RNA
agatcatgaggtcaggaga

SEQ ID NO: 64692 - RNA, 19 nt, synthetic construct
  misc_feature 1..19: note = siRNA sense sequence
  source 1..19: mol_type = other RNA
ctcctgacctcatgatctg

SEQ ID NO: 64693 - RNA, 19 nt, synthetic construct
  misc_feature 1..19: note = siRNA antisense sequence
  source 1..19: mol_type = other RNA
cagatcatgaggtcaggag

SEQ ID NO: 64694 - RNA, 19 nt, synthetic construct
  misc_feature 1..19: note = siRNA sense sequence
  source 1..19: mol_type = other RNA
tcctgacctcatgatctgc

SEQ ID NO: 64695 - RNA, 19 nt, synthetic construct
  misc_feature 1..19: note = siRNA antisense sequence
  source 1..19: mol_type = other RNA
gcagatcatgaggtcagga

SEQ ID NO: 64696 - RNA, 19 nt, synthetic construct
  misc_feature 1..19: note = siRNA sense sequence
  source 1..19: mol_type = other RNA
cctgacctcatgatctgcc

SEQ ID NO: 64697 - RNA, 19 nt, synthetic construct
  misc_feature 1..19: note = siRNA antisense sequence
  source 1..19: mol_type = other RNA
ggcagatcatgaggtcagg

SEQ ID NO: 64698 - RNA, 19 nt, synthetic construct
  misc_feature 1..19: note = siRNA sense sequence
  source 1..19: mol_type = other RNA
ctgacctcatgatctgccc

SEQ ID NO: 64699 - RNA, 19 nt, synthetic construct
  misc_feature 1..19: note = siRNA antisense sequence
  source 1..19: mol_type = other RNA
gggcagatcatgaggtcag

SEQ ID NO: 64700 - RNA, 19 nt, synthetic construct
  misc_feature 1..19: note = siRNA sense sequence
  source 1..19: mol_type = other RNA
tgacctcatgatctgccca

SEQ ID NO: 64701 - RNA, 19 nt, synthetic construct
  misc_feature 1..19: note = siRNA antisense sequence
  source 1..19: mol_type = other RNA
tgggcagatcatgaggtca

SEQ ID NO: 64702 - RNA, 19 nt, synthetic construct
  misc_feature 1..19: note = siRNA sense sequence
  source 1..19: mol_type = other RNA
gacctcatgatctgcccac

SEQ ID NO: 64703 - RNA, 19 nt, synthetic construct
  misc_feature 1..19: note = siRNA antisense sequence
  source 1..19: mol_type = other RNA
gtgggcagatcatgaggtc

SEQ ID NO: 64704 - RNA, 19 nt, synthetic construct
  misc_feature 1..19: note = siRNA sense sequence
  source 1..19: mol_type = other RNA
tcatgatctgcccacctca

SEQ ID NO: 64705 - RNA, 19 nt, synthetic construct
  misc_feature 1..19: note = siRNA antisense sequence
  source 1..19: mol_type = other RNA
tgaggtgggcagatcatga

SEQ ID NO: 64706 - RNA, 19 nt, synthetic construct
  misc_feature 1..19: note = siRNA sense sequence
  source 1..19: mol_type = other RNA
catgatctgcccacctcag

SEQ ID NO: 64707 - RNA, 19 nt, synthetic construct
  misc_feature 1..19: note = siRNA antisense sequence
  source 1..19: mol_type = other RNA
ctgaggtgggcagatcatg

SEQ ID NO: 64708 - RNA, 19 nt, synthetic construct
  misc_feature 1..19: note = siRNA sense sequence
  source 1..19: mol_type = other RNA
cctcagcctcccaaagtgc

SEQ ID NO: 64709 - RNA, 19 nt, synthetic construct
  misc_feature 1..19: note = siRNA antisense sequence
  source 1..19: mol_type = other RNA
gcactttgggaggctgagg

SEQ ID NO: 64710 - RNA, 19 nt, synthetic construct
  misc_feature 1..19: note = siRNA sense sequence
  source 1..19: mol_type = other RNA
ctcagcctcccaaagtgct

SEQ ID NO: 64711 - RNA, 19 nt, synthetic construct
  misc_feature 1..19: note = siRNA antisense sequence
  source 1..19: mol_type = other RNA
agcactttgggaggctgag

SEQ ID NO: 64712 - RNA, 19 nt, synthetic construct
  misc_feature 1..19: note = siRNA sense sequence
  source 1..19: mol_type = other RNA
ccaaagtgctgggattaca

SEQ ID NO: 64713 - RNA, 19 nt, synthetic construct
  misc_feature 1..19: note = siRNA antisense sequence
  source 1..19: mol_type = other RNA
tgtaatcccagcactttgg

SEQ ID NO: 64714 - RNA, 19 nt, synthetic construct
  misc_feature 1..19: note = siRNA sense sequence
  source 1..19: mol_type = other RNA
caaagtgctgggattacag

SEQ ID NO: 64715 - RNA, 19 nt, synthetic construct
  misc_feature 1..19: note = siRNA antisense sequence
  source 1..19: mol_type = other RNA
ctgtaatcccagcactttg

SEQ ID NO: 64716 - RNA, 19 nt, synthetic construct
  misc_feature 1..19: note = siRNA sense sequence
  source 1..19: mol_type = other RNA
gtgctgggattacaggcgt

SEQ ID NO: 64717 - RNA, 19 nt, synthetic construct
  misc_feature 1..19: note = siRNA antisense sequence
  source 1..19: mol_type = other RNA
acgcctgtaatcccagcac

SEQ ID NO: 64718 - RNA, 19 nt, synthetic construct
  misc_feature 1..19: note = siRNA sense sequence
  source 1..19: mol_type = other RNA
tgctgggattacaggcgtg

SEQ ID NO: 64719 - RNA, 19 nt, synthetic construct
  misc_feature 1..19: note = siRNA antisense sequence
  source 1..19: mol_type = other RNA
cacgcctgtaatcccagca

SEQ ID NO: 64720 - RNA, 19 nt, synthetic construct
  misc_feature 1..19: note = siRNA sense sequence
  source 1..19: mol_type = other RNA
gctgggattacaggcgtga

SEQ ID NO: 64721 - RNA, 19 nt, synthetic construct
  misc_feature 1..19: note = siRNA antisense sequence
  source 1..19: mol_type = other RNA
tcacgcctgtaatcccagc

SEQ ID NO: 64722 - RNA, 19 nt, synthetic construct
  misc_feature 1..19: note = siRNA sense sequence
  source 1..19: mol_type = other RNA
ctgggattacaggcgtgag

SEQ ID NO: 64723 - RNA, 19 nt, synthetic construct
  misc_feature 1..19: note = siRNA antisense sequence
  source 1..19: mol_type = other RNA
ctcacgcctgtaatcccag

SEQ ID NO: 64724 - RNA, 19 nt, synthetic construct
  misc_feature 1..19: note = siRNA sense sequence
  source 1..19: mol_type = other RNA
tgggattacaggcgtgagc

SEQ ID NO: 64725 - RNA, 19 nt, synthetic construct
  misc_feature 1..19: note = siRNA antisense sequence
  source 1..19: mol_type = other RNA
gctcacgcctgtaatccca

SEQ ID NO: 64726 - RNA, 19 nt, synthetic construct
  misc_feature 1..19: note = siRNA sense sequence
  source 1..19: mol_type = other RNA
attacaggcgtgagccacc

SEQ ID NO: 64727 - RNA, 19 nt, synthetic construct
  misc_feature 1..19: note = siRNA antisense sequence
  source 1..19: mol_type = other RNA
ggtggctcacgcctgtaat

SEQ ID NO: 64728 - RNA, 19 nt, synthetic construct
  misc_feature 1..19: note = siRNA sense sequence
  source 1..19: mol_type = other RNA
ttacaggcgtgagccaccg

SEQ ID NO: 64729 - RNA, 19 nt, synthetic construct
  misc_feature 1..19: note = siRNA antisense sequence
  source 1..19: mol_type = other RNA
cggtggctcacgcctgtaa

SEQ ID NO: 64730 - RNA, 19 nt, synthetic construct
  misc_feature 1..19: note = siRNA sense sequence
  source 1..19: mol_type = other RNA
cacccagccctgagttgtg

SEQ ID NO: 64731 - RNA, 19 nt, synthetic construct
  misc_feature 1..19: note = siRNA antisense sequence
  source 1..19: mol_type = other RNA
cacaactcagggctgggtg

SEQ ID NO: 64732 - RNA, 19 nt, synthetic construct
  misc_feature 1..19: note = siRNA sense sequence
  source 1..19: mol_type = other RNA
ccagccctgagttgtgttg

SEQ ID NO: 64733 - RNA, 19 nt, synthetic construct
  misc_feature 1..19: note = siRNA antisense sequence
  source 1..19: mol_type = other RNA
caacacaactcagggctgg

SEQ ID NO: 64734 - RNA, 19 nt, synthetic construct
  misc_feature 1..19: note = siRNA sense sequence
  source 1..19: mol_type = other RNA
cagccctgagttgtgttgt

SEQ ID NO: 64735 - RNA, 19 nt, synthetic construct
  misc_feature 1..19: note = siRNA antisense sequence
  source 1..19: mol_type = other RNA
acaacacaactcagggctg

SEQ ID NO: 64736 - RNA, 19 nt, synthetic construct
  misc_feature 1..19: note = siRNA sense sequence
  source 1..19: mol_type = other RNA
agccctgagttgtgttgtt

SEQ ID NO: 64737 - RNA, 19 nt, synthetic construct
  misc_feature 1..19: note = siRNA antisense sequence
  source 1..19: mol_type = other RNA
aacaacacaactcagggct

SEQ ID NO: 64738 - RNA, 19 nt, synthetic construct
  misc_feature 1..19: note = siRNA sense sequence
  source 1..19: mol_type = other RNA
gccctgagttgtgttgttt

SEQ ID NO: 64739 - RNA, 19 nt, synthetic construct
  misc_feature 1..19: note = siRNA antisense sequence
  source 1..19: mol_type = other RNA
aaacaacacaactcagggc

SEQ ID NO: 64740 - RNA, 19 nt, synthetic construct
  misc_feature 1..19: note = siRNA sense sequence
  source 1..19: mol_type = other RNA
ccctgagttgtgttgttta

SEQ ID NO: 64741 - RNA, 19 nt, synthetic construct
  misc_feature 1..19: note = siRNA antisense sequence
  source 1..19: mol_type = other RNA
taaacaacacaactcaggg

SEQ ID NO: 64742 - RNA, 19 nt, synthetic construct
  misc_feature 1..19: note = siRNA sense sequence
  source 1..19: mol_type = other RNA
cctgagttgtgttgtttat

SEQ ID NO: 64743 - RNA, 19 nt, synthetic construct
  misc_feature 1..19: note = siRNA antisense sequence
  source 1..19: mol_type = other RNA
ataaacaacacaactcagg

SEQ ID NO: 64744 - RNA, 19 nt, synthetic construct
  misc_feature 1..19: note = siRNA sense sequence
  source 1..19: mol_type = other RNA
ctgagttgtgttgtttatt

SEQ ID NO: 64745 - RNA, 19 nt, synthetic construct
  misc_feature 1..19: note = siRNA antisense sequence
  source 1..19: mol_type = other RNA
aataaacaacacaactcag

SEQ ID NO: 64746 - RNA, 19 nt, synthetic construct
  misc_feature 1..19: note = siRNA sense sequence
  source 1..19: mol_type = other RNA
gagttgtgttgtttatttg

SEQ ID NO: 64747 - RNA, 19 nt, synthetic construct
  misc_feature 1..19: note = siRNA antisense sequence
  source 1..19: mol_type = other RNA
caaataaacaacacaactc

SEQ ID NO: 64748 - RNA, 19 nt, synthetic construct
  misc_feature 1..19: note = siRNA sense sequence
  source 1..19: mol_type = other RNA
gttgtgttgtttatttgac

SEQ ID NO: 64749 - RNA, 19 nt, synthetic construct
  misc_feature 1..19: note = siRNA antisense sequence
  source 1..19: mol_type = other RNA
gtcaaataaacaacacaac

SEQ ID NO: 64750 - RNA, 19 nt, synthetic construct
  misc_feature 1..19: note = siRNA sense sequence
  source 1..19: mol_type = other RNA
tgtgttgtttatttgactc

SEQ ID NO: 64751 - RNA, 19 nt, synthetic construct
  misc_feature 1..19: note = siRNA antisense sequence
  source 1..19: mol_type = other RNA
gagtcaaataaacaacaca

SEQ ID NO: 64752 - RNA, 19 nt, synthetic construct
  misc_feature 1..19: note = siRNA sense sequence
  source 1..19: mol_type = other RNA
gtgttgtttatttgactct

SEQ ID NO: 64753 - RNA, 19 nt, synthetic construct
  misc_feature 1..19: note = siRNA antisense sequence
  source 1..19: mol_type = other RNA
agagtcaaataaacaacac

SEQ ID NO: 64754 - RNA, 19 nt, synthetic construct
  misc_feature 1..19: note = siRNA sense sequence
  source 1..19: mol_type = other RNA
tgttgtttatttgactctc

SEQ ID NO: 64755 - RNA, 19 nt, synthetic construct
  misc_feature 1..19: note = siRNA antisense sequence
  source 1..19: mol_type = other RNA
gagagtcaaataaacaaca

SEQ ID NO: 64756 - RNA, 19 nt, synthetic construct
  misc_feature 1..19: note = siRNA sense sequence
  source 1..19: mol_type = other RNA
tgtttatttgactctcacc

SEQ ID NO: 64757 - RNA, 19 nt, synthetic construct
  misc_feature 1..19: note = siRNA antisense sequence
  source 1..19: mol_type = other RNA
ggtgagagtcaaataaaca

SEQ ID NO: 64758 - RNA, 19 nt, synthetic construct
  misc_feature 1..19: note = siRNA sense sequence
  source 1..19: mol_type = other RNA
aggtataggatcatattac

SEQ ID NO: 64759 - RNA, 19 nt, synthetic construct
  misc_feature 1..19: note = siRNA antisense sequence
  source 1..19: mol_type = other RNA
gtaatatgatcctatacct

SEQ ID NO: 64760 - RNA, 19 nt, synthetic construct
  misc_feature 1..19: note = siRNA sense sequence
  source 1..19: mol_type = other RNA
gtataggatcatattacca

SEQ ID NO: 64761 - RNA, 19 nt, synthetic construct
  misc_feature 1..19: note = siRNA antisense sequence
  source 1..19: mol_type = other RNA
tggtaatatgatcctatac

SEQ ID NO: 64762 - RNA, 19 nt, synthetic construct
  misc_feature 1..19: note = siRNA sense sequence
  source 1..19: mol_type = other RNA
tataggatcatattaccag

SEQ ID NO: 64763 - RNA, 19 nt, synthetic construct
  misc_feature 1..19: note = siRNA antisense sequence
  source 1..19: mol_type = other RNA
ctggtaatatgatcctata

SEQ ID NO: 64764 - RNA, 19 nt, synthetic construct
  misc_feature 1..19: note = siRNA sense sequence
  source 1..19: mol_type = other RNA
ataggatcatattaccagt

SEQ ID NO: 64765 - RNA, 19 nt, synthetic construct
  misc_feature 1..19: note = siRNA antisense sequence
  source 1..19: mol_type = other RNA
actggtaatatgatcctat

SEQ ID NO: 64766 - RNA, 19 nt, synthetic construct
  misc_feature 1..19: note = siRNA sense sequence
  source 1..19: mol_type = other RNA
taggatcatattaccagtg

SEQ ID NO: 64767 - RNA, 19 nt, synthetic construct
  misc_feature 1..19: note = siRNA antisense sequence
  source 1..19: mol_type = other RNA
cactggtaatatgatccta

SEQ ID NO: 64768 - RNA, 19 nt, synthetic construct
  misc_feature 1..19: note = siRNA sense sequence
  source 1..19: mol_type = other RNA
aggatcatattaccagtgg

SEQ ID NO: 64769 - RNA, 19 nt, synthetic construct
  misc_feature 1..19: note = siRNA antisense sequence
  source 1..19: mol_type = other RNA
ccactggtaatatgatcct

SEQ ID NO: 64770 - RNA, 19 nt, synthetic construct
  misc_feature 1..19: note = siRNA sense sequence
  source 1..19: mol_type = other RNA
gcttgacttcttctattcc

SEQ ID NO: 64771 - RNA, 19 nt, synthetic construct
  misc_feature 1..19: note = siRNA antisense sequence
  source 1..19: mol_type = other RNA
ggaatagaagaagtcaagc

SEQ ID NO: 64772 - RNA, 19 nt, synthetic construct
  misc_feature 1..19: note = siRNA sense sequence
  source 1..19: mol_type = other RNA
ggacttagagtactaggtt

SEQ ID NO: 64773 - RNA, 19 nt, synthetic construct
  misc_feature 1..19: note = siRNA antisense sequence
  source 1..19: mol_type = other RNA
aacctagtactctaagtcc

SEQ ID NO: 64774 - RNA, 19 nt, synthetic construct
  misc_feature 1..19: note = siRNA sense sequence
  source 1..19: mol_type = other RNA
gacttagagtactaggttg

SEQ ID NO: 64775 - RNA, 19 nt, synthetic construct
  misc_feature 1..19: note = siRNA antisense sequence
  source 1..19: mol_type = other RNA
caacctagtactctaagtc

SEQ ID NO: 64776 - RNA, 19 nt, synthetic construct
  misc_feature 1..19: note = siRNA sense sequence
  source 1..19: mol_type = other RNA
acttagagtactaggttga

SEQ ID NO: 64777 - RNA, 19 nt, synthetic construct
  misc_feature 1..19: note = siRNA antisense sequence
  source 1..19: mol_type = other RNA
tcaacctagtactctaagt

SEQ ID NO: 64778 - RNA, 19 nt, synthetic construct
  misc_feature 1..19: note = siRNA sense sequence
  source 1..19: mol_type = other RNA
cttagagtactaggttgaa

SEQ ID NO: 64779 - RNA, 19 nt, synthetic construct
  misc_feature 1..19: note = siRNA antisense sequence
  source 1..19: mol_type = other RNA
ttcaacctagtactctaag

SEQ ID NO: 64780 - RNA, 19 nt, synthetic construct
  misc_feature 1..19: note = siRNA sense sequence
  source 1..19: mol_type = other RNA
ttagagtactaggttgaat

SEQ ID NO: 64781 - RNA, 19 nt, synthetic construct
  misc_feature 1..19: note = siRNA antisense sequence
  source 1..19: mol_type = other RNA
attcaacctagtactctaa

SEQ ID NO: 64782 - RNA, 19 nt, synthetic construct
  misc_feature 1..19: note = siRNA sense sequence
  source 1..19: mol_type = other RNA
tagagtactaggttgaata

SEQ ID NO: 64783 - RNA, 19 nt, synthetic construct
  misc_feature 1..19: note = siRNA antisense sequence
  source 1..19: mol_type = other RNA
tattcaacctagtactcta

SEQ ID NO: 64784 - RNA, 19 nt, synthetic construct
  misc_feature 1..19: note = siRNA sense sequence
  source 1..19: mol_type = other RNA
atgatattggctaggatta

SEQ ID NO: 64785 - RNA, 19 nt, synthetic construct
  misc_feature 1..19: note = siRNA antisense sequence
  source 1..19: mol_type = other RNA
taatcctagccaatatcat

SEQ ID NO: 64786 - RNA, 19 nt, synthetic construct
  misc_feature 1..19: note = siRNA sense sequence
  source 1..19: mol_type = other RNA
tgatattggctaggattag

SEQ ID NO: 64787 - RNA, 19 nt, synthetic construct
  misc_feature 1..19: note = siRNA antisense sequence
  source 1..19: mol_type = other RNA
ctaatcctagccaatatca

SEQ ID NO: 64788 - RNA, 19 nt, synthetic construct
  misc_feature 1..19: note = siRNA sense sequence
  source 1..19: mol_type = other RNA
gatattggctaggattagt

SEQ ID NO: 64789 - RNA, 19 nt, synthetic construct
  misc_feature 1..19: note = siRNA antisense sequence
  source 1..19: mol_type = other RNA
actaatcctagccaatatc

SEQ ID NO: 64790 - RNA, 19 nt, synthetic construct
  misc_feature 1..19: note = siRNA sense sequence
  source 1..19: mol_type = other RNA
atattggctaggattagtt

SEQ ID NO: 64791 - RNA, 19 nt, synthetic construct
  misc_feature 1..19: note = siRNA antisense sequence
  source 1..19: mol_type = other RNA
aactaatcctagccaatat

SEQ ID NO: 64792 - RNA, 19 nt, synthetic construct
  misc_feature 1..19: note = siRNA sense sequence
  source 1..19: mol_type = other RNA
tattggctaggattagtta

SEQ ID NO: 64793 - RNA, 19 nt, synthetic construct
  misc_feature 1..19: note = siRNA antisense sequence
  source 1..19: mol_type = other RNA
taactaatcctagccaata

SEQ ID NO: 64794 - RNA, 19 nt, synthetic construct
  misc_feature 1..19: note = siRNA sense sequence
  source 1..19: mol_type = other RNA
attggctaggattagttac

SEQ ID NO: 64795 - RNA, 19 nt, synthetic construct
  misc_feature 1..19: note = siRNA antisense sequence
  source 1..19: mol_type = other RNA
gtaactaatcctagccaat

SEQ ID NO: 64796 - RNA, 19 nt, synthetic construct
  misc_feature 1..19: note = siRNA sense sequence
  source 1..19: mol_type = other RNA
ttggctaggattagttaca

SEQ ID NO: 64797 - RNA, 19 nt, synthetic construct
  misc_feature 1..19: note = siRNA antisense sequence
  source 1..19: mol_type = other RNA
tgtaactaatcctagccaa

SEQ ID NO: 64798 - RNA, 19 nt, synthetic construct
  misc_feature 1..19: note = siRNA sense sequence
  source 1..19: mol_type = other RNA
tggctaggattagttacag

SEQ ID NO: 64799 - RNA, 19 nt, synthetic construct
  misc_feature 1..19: note = siRNA antisense sequence
  source 1..19: mol_type = other RNA
ctgtaactaatcctagcca

SEQ ID NO: 64800 - RNA, 19 nt, synthetic construct
  misc_feature 1..19: note = siRNA sense sequence
  source 1..19: mol_type = other RNA
ggctaggattagttacaga

SEQ ID NO: 64801 - RNA, 19 nt, synthetic construct
  misc_feature 1..19: note = siRNA antisense sequence
  source 1..19: mol_type = other RNA
tctgtaactaatcctagcc

SEQ ID NO: 64802 - RNA, 19 nt, synthetic construct
  misc_feature 1..19: note = siRNA sense sequence
  source 1..19: mol_type = other RNA
gctaggattagttacagat

SEQ ID NO: 64803 - RNA, 19 nt, synthetic construct
  misc_feature 1..19: note = siRNA antisense sequence
  source 1..19: mol_type = other RNA
atctgtaactaatcctagc

SEQ ID NO: 64804 - RNA, 19 nt, synthetic construct
  misc_feature 1..19: note = siRNA sense sequence
  source 1..19: mol_type = other RNA
tgtttctttgatgcctgtc

SEQ ID NO: 64805 - RNA, 19 nt, synthetic construct
  misc_feature 1..19: note = siRNA antisense sequence
  source 1..19: mol_type = other RNA
gacaggcatcaaagaaaca

SEQ ID NO: 64806 - RNA, 19 nt, synthetic construct
  misc_feature 1..19: note = siRNA sense sequence
  source 1..19: mol_type = other RNA
gtttctttgatgcctgtct

SEQ ID NO: 64807 - RNA, 19 nt, synthetic construct
  misc_feature 1..19: note = siRNA antisense sequence
  source 1..19: mol_type = other RNA
agacaggcatcaaagaaac

SEQ ID NO: 64808 - RNA, 19 nt, synthetic construct
  misc_feature 1..19: note = siRNA sense sequence
  source 1..19: mol_type = other RNA
tttctttgatgcctgtctc

SEQ ID NO: 64809 - RNA, 19 nt, synthetic construct
  misc_feature 1..19: note = siRNA antisense sequence
  source 1..19: mol_type = other RNA
gagacaggcatcaaagaaa

SEQ ID NO: 64810 - RNA, 19 nt, synthetic construct
  misc_feature 1..19: note = siRNA sense sequence
  source 1..19: mol_type = other RNA
ttctttgatgcctgtctct

SEQ ID NO: 64811 - RNA, 19 nt, synthetic construct
  misc_feature 1..19: note = siRNA antisense sequence
  source 1..19: mol_type = other RNA
agagacaggcatcaaagaa

SEQ ID NO: 64812 - RNA, 19 nt, synthetic construct
  misc_feature 1..19: note = siRNA sense sequence
  source 1..19: mol_type = other RNA
tctttgatgcctgtctcta

SEQ ID NO: 64813 - RNA, 19 nt, synthetic construct
  misc_feature 1..19: note = siRNA antisense sequence
  source 1..19: mol_type = other RNA
tagagacaggcatcaaaga

SEQ ID NO: 64814 - RNA, 19 nt, synthetic construct
  misc_feature 1..19: note = siRNA sense sequence
  source 1..19: mol_type = other RNA
ctttgatgcctgtctctac

SEQ ID NO: 64815 - RNA, 19 nt, synthetic construct
  misc_feature 1..19: note = siRNA antisense sequence
  source 1..19: mol_type = other RNA
gtagagacaggcatcaaag

SEQ ID NO: 64816 - RNA, 19 nt, synthetic construct
  misc_feature 1..19: note = siRNA sense sequence
  source 1..19: mol_type = other RNA
atgcctgtctctacctaga

SEQ ID NO: 64817 - RNA, 19 nt, synthetic construct
  misc_feature 1..19: note = siRNA antisense sequence
  source 1..19: mol_type = other RNA
tctaggtagagacaggcat

SEQ ID NO: 64818 - RNA, 19 nt, synthetic construct
  misc_feature 1..19: note = siRNA sense sequence
  source 1..19: mol_type = other RNA
tctacctagagttcttgtg

SEQ ID NO: 64819 - RNA, 19 nt, synthetic construct
  misc_feature 1..19: note = siRNA antisense sequence
  source 1..19: mol_type = other RNA
cacaagaactctaggtaga

SEQ ID NO: 64820 - RNA, 19 nt, synthetic construct
  misc_feature 1..19: note = siRNA sense sequence
  source 1..19: mol_type = other RNA
ctacctagagttcttgtgc

SEQ ID NO: 64821 - RNA, 19 nt, synthetic construct
  misc_feature 1..19: note = siRNA antisense sequence
  source 1..19: mol_type = other RNA
gcacaagaactctaggtag

SEQ ID NO: 64822 - RNA, 19 nt, synthetic construct
  misc_feature 1..19: note = siRNA sense sequence
  source 1..19: mol_type = other RNA
ggactgatgttcttcaact

SEQ ID NO: 64823 - RNA, 19 nt, synthetic construct
  misc_feature 1..19: note = siRNA antisense sequence
  source 1..19: mol_type = other RNA
agttgaagaacatcagtcc

SEQ ID NO: 64824 - RNA, 19 nt, synthetic construct
  misc_feature 1..19: note = siRNA sense sequence
  source 1..19: mol_type = other RNA
gactgatgttcttcaactg

SEQ ID NO: 64825 - RNA, 19 nt, synthetic construct
  misc_feature 1..19: note = siRNA antisense sequence
  source 1..19: mol_type = other RNA
cagttgaagaacatcagtc

SEQ ID NO: 64826 - RNA, 19 nt, synthetic construct
  misc_feature 1..19: note = siRNA sense sequence
  source 1..19: mol_type = other RNA
ttcttcaactgtggtgtaa

SEQ ID NO: 64827 - RNA, 19 nt, synthetic construct
  misc_feature 1..19: note = siRNA antisense sequence
  source 1..19: mol_type = other RNA
ttacaccacagttgaagaa

SEQ ID NO: 64828 - RNA, 19 nt, synthetic construct
  misc_feature 1..19: note = siRNA sense sequence
  source 1..19: mol_type = other RNA
cttcaactgtggtgtaagt

SEQ ID NO: 64829 - RNA, 19 nt, synthetic construct
  misc_feature 1..19: note = siRNA antisense sequence
  source 1..19: mol_type = other RNA
acttacaccacagttgaag

SEQ ID NO: 64830 - RNA, 19 nt, synthetic construct
  misc_feature 1..19: note = siRNA sense sequence
  source 1..19: mol_type = other RNA
agttgagtgtagtcatttg

SEQ ID NO: 64831 - RNA, 19 nt, synthetic construct
  misc_feature 1..19: note = siRNA antisense sequence
  source 1..19: mol_type = other RNA
caaatgactacactcaact

SEQ ID NO: 64832 - RNA, 19 nt, synthetic construct
  misc_feature 1..19: note = siRNA sense sequence
  source 1..19: mol_type = other RNA
ttgagtgtagtcatttggg

SEQ ID NO: 64833 - RNA, 19 nt, synthetic construct
  misc_feature 1..19: note = siRNA antisense sequence
  source 1..19: mol_type = other RNA
cccaaatgactacactcaa

SEQ ID NO: 64834 - RNA, 19 nt, synthetic construct
  misc_feature 1..19: note = siRNA sense sequence
  source 1..19: mol_type = other RNA
agtgtagtcatttgggttt

SEQ ID NO: 64835 - RNA, 19 nt, synthetic construct
  misc_feature 1..19: note = siRNA antisense sequence
  source 1..19: mol_type = other RNA
aaacccaaatgactacact

SEQ ID NO: 64836 - RNA, 19 nt, synthetic construct
  misc_feature 1..19: note = siRNA sense sequence
  source 1..19: mol_type = other RNA
gagggccaagtctctgtac

SEQ ID NO: 64837 - RNA, 19 nt, synthetic construct
  misc_feature 1..19: note = siRNA antisense sequence
  source 1..19: mol_type = other RNA
gtacagagacttggccctc

SEQ ID NO: 64838 - RNA, 19 nt, synthetic construct
  misc_feature 1..19: note = siRNA sense sequence
  source 1..19: mol_type = other RNA
tctttatttgtgggtgtat

SEQ ID NO: 64839 - RNA, 19 nt, synthetic construct
  misc_feature 1..19: note = siRNA antisense sequence
  source 1..19: mol_type = other RNA
atacacccacaaataaaga

SEQ ID NO: 64840 - RNA, 19 nt, synthetic construct
  misc_feature 1..19: note = siRNA sense sequence
  source 1..19: mol_type = other RNA
ctttatttgtgggtgtatg

SEQ ID NO: 64841 - RNA, 19 nt, synthetic construct
  misc_feature 1..19: note = siRNA antisense sequence
  source 1..19: mol_type = other RNA
catacacccacaaataaag

SEQ ID NO: 64842 - RNA, 19 nt, synthetic construct
  misc_feature 1..19: note = siRNA sense sequence
  source 1..19: mol_type = other RNA
tttatttgtgggtgtatgc

SEQ ID NO: 64843 - RNA, 19 nt, synthetic construct
  misc_feature 1..19: note = siRNA antisense sequence
  source 1..19: mol_type = other RNA
gcatacacccacaaataaa

SEQ ID NO: 64844 - RNA, 19 nt, synthetic construct
  misc_feature 1..19: note = siRNA sense sequence
  source 1..19: mol_type = other RNA
ttatttgtgggtgtatgct

SEQ ID NO: 64845 - RNA, 19 nt, synthetic construct
  misc_feature 1..19: note = siRNA antisense sequence
  source 1..19: mol_type = other RNA
agcatacacccacaaataa

SEQ ID NO: 64846 - RNA, 19 nt, synthetic construct
  misc_feature 1..19: note = siRNA sense sequence
  source 1..19: mol_type = other RNA
tatttgtgggtgtatgctc

SEQ ID NO: 64847 - RNA, 19 nt, synthetic construct
  misc_feature 1..19: note = siRNA antisense sequence
  source 1..19: mol_type = other RNA
gagcatacacccacaaata

SEQ ID NO: 64848 - RNA, 19 nt, synthetic construct
  misc_feature 1..19: note = siRNA sense sequence
  source 1..19: mol_type = other RNA
atttgtgggtgtatgctca

SEQ ID NO: 64849 - RNA, 19 nt, synthetic construct
  misc_feature 1..19: note = siRNA antisense sequence
  source 1..19: mol_type = other RNA
tgagcatacacccacaaat

SEQ ID NO: 64850 - RNA, 19 nt, synthetic construct
  misc_feature 1..19: note = siRNA sense sequence
  source 1..19: mol_type = other RNA
tttgtgggtgtatgctcac

SEQ ID NO: 64851 - RNA, 19 nt, synthetic construct
  misc_feature 1..19: note = siRNA antisense sequence
  source 1..19: mol_type = other RNA
gtgagcatacacccacaaa

SEQ ID NO: 64852 - RNA, 19 nt, synthetic construct
  misc_feature 1..19: note = siRNA sense sequence
  source 1..19: mol_type = other RNA
gtgggtgtatgctcacagg

SEQ ID NO: 64853 - RNA, 19 nt, synthetic construct
  misc_feature 1..19: note = siRNA antisense sequence
  source 1..19: mol_type = other RNA
cctgtgagcatacacccac

SEQ ID NO: 64854 - RNA, 19 nt, synthetic construct
  misc_feature 1..19: note = siRNA sense sequence
  source 1..19: mol_type = other RNA
tgggtgtatgctcacagga

SEQ ID NO: 64855 - RNA, 19 nt, synthetic construct
  misc_feature 1..19: note = siRNA antisense sequence
  source 1..19: mol_type = other RNA
tcctgtgagcatacaccca

SEQ ID NO: 64856 - RNA, 19 nt, synthetic construct
  misc_feature 1..19: note = siRNA sense sequence
  source 1..19: mol_type = other RNA
gggtgtatgctcacaggag

SEQ ID NO: 64857 - RNA, 19 nt, synthetic construct
  misc_feature 1..19: note = siRNA antisense sequence
  source 1..19: mol_type = other RNA
ctcctgtgagcatacaccc

SEQ ID NO: 64858 - RNA, 19 nt, synthetic construct
  misc_feature 1..19: note = siRNA sense sequence
  source 1..19: mol_type = other RNA
ggtgtatgctcacaggagt

SEQ ID NO: 64859 - RNA, 19 nt, synthetic construct
  misc_feature 1..19: note = siRNA antisense sequence
  source 1..19: mol_type = other RNA
actcctgtgagcatacacc

SEQ ID NO: 64860 - RNA, 19 nt, synthetic construct
  misc_feature 1..19: note = siRNA sense sequence
  source 1..19: mol_type = other RNA
gtgtatgctcacaggagtg

SEQ ID NO: 64861 - RNA, 19 nt, synthetic construct
  misc_feature 1..19: note = siRNA antisense sequence
  source 1..19: mol_type = other RNA
cactcctgtgagcatacac

SEQ ID NO: 64862 - RNA, 19 nt, synthetic construct
  misc_feature 1..19: note = siRNA sense sequence
  source 1..19: mol_type = other RNA
tgtatgctcacaggagtgt

SEQ ID NO: 64863 - RNA, 19 nt, synthetic construct
  misc_feature 1..19: note = siRNA antisense sequence
  source 1..19: mol_type = other RNA
acactcctgtgagcataca

SEQ ID NO: 64864 - RNA, 19 nt, synthetic construct
  misc_feature 1..19: note = siRNA sense sequence
  source 1..19: mol_type = other RNA
ttttggtgttgttgtttga

SEQ ID NO: 64865 - RNA, 19 nt, synthetic construct
  misc_feature 1..19: note = siRNA antisense sequence
  source 1..19: mol_type = other RNA
tcaaacaacaacaccaaaa

SEQ ID NO: 64866 - RNA, 19 nt, synthetic construct
  misc_feature 1..19: note = siRNA sense sequence
  source 1..19: mol_type = other RNA
ggtgttgttgtttgagctg

SEQ ID NO: 64867 - RNA, 19 nt, synthetic construct
  misc_feature 1..19: note = siRNA antisense sequence
  source 1..19: mol_type = other RNA
cagctcaaacaacaacacc

SEQ ID NO: 64868 - RNA, 19 nt, synthetic construct
  misc_feature 1..19: note = siRNA sense sequence
  source 1..19: mol_type = other RNA
gtgttgttgtttgagctgt

SEQ ID NO: 64869 - RNA, 19 nt, synthetic construct
  misc_feature 1..19: note = siRNA antisense sequence
  source 1..19: mol_type = other RNA
acagctcaaacaacaacac

SEQ ID NO: 64870 - RNA, 19 nt, synthetic construct
  misc_feature 1..19: note = siRNA sense sequence
  source 1..19: mol_type = other RNA
tgttgttgtttgagctgtg

SEQ ID NO: 64871 - RNA, 19 nt, synthetic construct
  misc_feature 1..19: note = siRNA antisense sequence
  source 1..19: mol_type = other RNA
cacagctcaaacaacaaca

SEQ ID NO: 64872 - RNA, 19 nt, synthetic construct
  misc_feature 1..19: note = siRNA sense sequence
  source 1..19: mol_type = other RNA
gttgtttgagctgtgatcc

SEQ ID NO: 64873 - RNA, 19 nt, synthetic construct
  misc_feature 1..19: note = siRNA antisense sequence
  source 1..19: mol_type = other RNA
ggatcacagctcaaacaac

SEQ ID NO: 64874 - RNA, 19 nt, synthetic construct
  misc_feature 1..19: note = siRNA sense sequence
  source 1..19: mol_type = other RNA
ttgtttgagctgtgatcca

SEQ ID NO: 64875 - RNA, 19 nt, synthetic construct
  misc_feature 1..19: note = siRNA antisense sequence
  source 1..19: mol_type = other RNA
tggatcacagctcaaacaa

SEQ ID NO: 64876 - RNA, 19 nt, synthetic construct
  misc_feature 1..19: note = siRNA sense sequence
  source 1..19: mol_type = other RNA
tgtttgagctgtgatccag

SEQ ID NO: 64877 - RNA, 19 nt, synthetic construct
  misc_feature 1..19: note = siRNA antisense sequence
  source 1..19: mol_type = other RNA
ctggatcacagctcaaaca

SEQ ID NO: 64878 - RNA, 19 nt, synthetic construct
  misc_feature 1..19: note = siRNA sense sequence
  source 1..19: mol_type = other RNA
tttgagctgtgatccagta

SEQ ID NO: 64879 - RNA, 19 nt, synthetic construct
  misc_feature 1..19: note = siRNA antisense sequence
  source 1..19: mol_type = other RNA
tactggatcacagctcaaa

SEQ ID NO: 64880 - RNA, 19 nt, synthetic construct
  misc_feature 1..19: note = siRNA sense sequence
  source 1..19: mol_type = other RNA
ctgtgatccagtagagggc

SEQ ID NO: 64881 - RNA, 19 nt, synthetic construct
  misc_feature 1..19: note = siRNA antisense sequence
  source 1..19: mol_type = other RNA
gccctctactggatcacag

SEQ ID NO: 64882 - RNA, 19 nt, synthetic construct
  misc_feature 1..19: note = siRNA sense sequence
  source 1..19: mol_type = other RNA
gatccagtagagggcaatt

SEQ ID NO: 64883 - RNA, 19 nt, synthetic construct
  misc_feature 1..19: note = siRNA antisense sequence
  source 1..19: mol_type = other RNA
aattgccctctactggatc

SEQ ID NO: 64884 - RNA, 19 nt, synthetic construct
  misc_feature 1..19: note = siRNA sense sequence
  source 1..19: mol_type = other RNA
tccagtagagggcaattaa

SEQ ID NO: 64885 - RNA, 19 nt, synthetic construct
  misc_feature 1..19: note = siRNA antisense sequence
  source 1..19: mol_type = other RNA
ttaattgccctctactgga

SEQ ID NO: 64886 - RNA, 19 nt, synthetic construct
  misc_feature 1..19: note = siRNA sense sequence
  source 1..19: mol_type = other RNA
ccagtagagggcaattaag

SEQ ID NO: 64887 - RNA, 19 nt, synthetic construct
  misc_feature 1..19: note = siRNA antisense sequence
  source 1..19: mol_type = other RNA
cttaattgccctctactgg

SEQ ID NO: 64888 - RNA, 19 nt, synthetic construct
  misc_feature 1..19: note = siRNA sense sequence
  source 1..19: mol_type = other RNA
cagtagagggcaattaagg

SEQ ID NO: 64889 - RNA, 19 nt, synthetic construct
  misc_feature 1..19: note = siRNA antisense sequence
  source 1..19: mol_type = other RNA
ccttaattgccctctactg

SEQ ID NO: 64890 - RNA, 19 nt, synthetic construct
  misc_feature 1..19: note = siRNA sense sequence
  source 1..19: mol_type = other RNA
agtagagggcaattaaggg

SEQ ID NO: 64891 - RNA, 19 nt, synthetic construct
  misc_feature 1..19: note = siRNA antisense sequence
  source 1..19: mol_type = other RNA
cccttaattgccctctact

SEQ ID NO: 64892 - RNA, 19 nt, synthetic construct
  misc_feature 1..19: note = siRNA sense sequence
  source 1..19: mol_type = other RNA
gtagagggcaattaagggt

SEQ ID NO: 64893 - RNA, 19 nt, synthetic construct
  misc_feature 1..19: note = siRNA antisense sequence
  source 1..19: mol_type = other RNA
acccttaattgccctctac

SEQ ID NO: 64894 - RNA, 19 nt, synthetic construct
  misc_feature 1..19: note = siRNA sense sequence
  source 1..19: mol_type = other RNA
tagagggcaattaagggta

SEQ ID NO: 64895 - RNA, 19 nt, synthetic construct
  misc_feature 1..19: note = siRNA antisense sequence
  source 1..19: mol_type = other RNA
tacccttaattgccctcta

SEQ ID NO: 64896 - RNA, 19 nt, synthetic construct
  misc_feature 1..19: note = siRNA sense sequence
  source 1..19: mol_type = other RNA
agagggcaattaagggtaa

SEQ ID NO: 64897 - RNA, 19 nt, synthetic construct
  misc_feature 1..19: note = siRNA antisense sequence
  source 1..19: mol_type = other RNA
ttacccttaattgccctct

SEQ ID NO: 64898 - RNA, 19 nt, synthetic construct
  misc_feature 1..19: note = siRNA sense sequence
  source 1..19: mol_type = other RNA
tagataggctcttagtctt

SEQ ID NO: 64899 - RNA, 19 nt, synthetic construct
  misc_feature 1..19: note = siRNA antisense sequence
  source 1..19: mol_type = other RNA
aagactaagagcctatcta

SEQ ID NO: 64900 - RNA, 19 nt, synthetic construct
  misc_feature 1..19: note = siRNA sense sequence
  source 1..19: mol_type = other RNA
agataggctcttagtcttg

SEQ ID NO: 64901 - RNA, 19 nt, synthetic construct
  misc_feature 1..19: note = siRNA antisense sequence
  source 1..19: mol_type = other RNA
caagactaagagcctatct

SEQ ID NO: 64902 - RNA, 19 nt, synthetic construct
  misc_feature 1..19: note = siRNA sense sequence
  source 1..19: mol_type = other RNA
gataggctcttagtcttgc

SEQ ID NO: 64903 - RNA, 19 nt, synthetic construct
  misc_feature 1..19: note = siRNA antisense sequence
  source 1..19: mol_type = other RNA
gcaagactaagagcctatc

SEQ ID NO: 64904 - RNA, 19 nt, synthetic construct
  misc_feature 1..19: note = siRNA sense sequence
  source 1..19: mol_type = other RNA
ggctcttagtcttgccact

SEQ ID NO: 64905 - RNA, 19 nt, synthetic construct
  misc_feature 1..19: note = siRNA antisense sequence
  source 1..19: mol_type = other RNA
agtggcaagactaagagcc

SEQ ID NO: 64906 - RNA, 19 nt, synthetic construct
  misc_feature 1..19: note = siRNA sense sequence
  source 1..19: mol_type = other RNA
gctcttagtcttgccactc

SEQ ID NO: 64907 - RNA, 19 nt, synthetic construct
  misc_feature 1..19: note = siRNA antisense sequence
  source 1..19: mol_type = other RNA
gagtggcaagactaagagc

SEQ ID NO: 64908 - RNA, 19 nt, synthetic construct
  misc_feature 1..19: note = siRNA sense sequence
  source 1..19: mol_type = other RNA
ctcttagtcttgccactct

SEQ ID NO: 64909 - RNA, 19 nt, synthetic construct
  misc_feature 1..19: note = siRNA antisense sequence
  source 1..19: mol_type = other RNA
agagtggcaagactaagag

SEQ ID NO: 64910 - RNA, 19 nt, synthetic construct
  misc_feature 1..19: note = siRNA sense sequence
  source 1..19: mol_type = other RNA
tcttagtcttgccactctt

SEQ ID NO: 64911 - RNA, 19 nt, synthetic construct
  misc_feature 1..19: note = siRNA antisense sequence
  source 1..19: mol_type = other RNA
aagagtggcaagactaaga

SEQ ID NO: 64912 - RNA, 19 nt, synthetic construct
  misc_feature 1..19: note = siRNA sense sequence
  source 1..19: mol_type = other RNA
cttgccactcttgtatttg

SEQ ID NO: 64913 - RNA, 19 nt, synthetic construct
  misc_feature 1..19: note = siRNA antisense sequence
  source 1..19: mol_type = other RNA
caaatacaagagtggcaag

SEQ ID NO: 64914 - RNA, 19 nt, synthetic construct
  misc_feature 1..19: note = siRNA sense sequence
  source 1..19: mol_type = other RNA
ttgccactcttgtatttgc

SEQ ID NO: 64915 - RNA, 19 nt, synthetic construct
  misc_feature 1..19: note = siRNA antisense sequence
  source 1..19: mol_type = other RNA
gcaaatacaagagtggcaa

SEQ ID NO: 64916 - RNA, 19 nt, synthetic construct
  misc_feature 1..19: note = siRNA sense sequence
  source 1..19: mol_type = other RNA
gccactcttgtatttgctc

SEQ ID NO: 64917 - RNA, 19 nt, synthetic construct
  misc_feature 1..19: note = siRNA antisense sequence
  source 1..19: mol_type = other RNA
gagcaaatacaagagtggc

SEQ ID NO: 64918 - RNA, 19 nt, synthetic construct
  misc_feature 1..19: note = siRNA sense sequence
  source 1..19: mol_type = other RNA
ccactcttgtatttgctca

SEQ ID NO: 64919 - RNA, 19 nt, synthetic construct
  misc_feature 1..19: note = siRNA antisense sequence
  source 1..19: mol_type = other RNA
tgagcaaatacaagagtgg

SEQ ID NO: 64920 - RNA, 19 nt, synthetic construct
  misc_feature 1..19: note = siRNA sense sequence
  source 1..19: mol_type = other RNA
cactcttgtatttgctcat

SEQ ID NO: 64921 - RNA, 19 nt, synthetic construct
  misc_feature 1..19: note = siRNA antisense sequence
  source 1..19: mol_type = other RNA
atgagcaaatacaagagtg

SEQ ID NO: 64922 - RNA, 19 nt, synthetic construct
  misc_feature 1..19: note = siRNA sense sequence
  source 1..19: mol_type = other RNA
actcttgtatttgctcatg

SEQ ID NO: 64923 - RNA, 19 nt, synthetic construct
  misc_feature 1..19: note = siRNA antisense sequence
  source 1..19: mol_type = other RNA
catgagcaaatacaagagt

SEQ ID NO: 64924 - RNA, 19 nt, synthetic construct
  misc_feature 1..19: note = siRNA sense sequence
  source 1..19: mol_type = other RNA
ctcttgtatttgctcatgt

SEQ ID NO: 64925 - RNA, 19 nt, synthetic construct
  misc_feature 1..19: note = siRNA antisense sequence
  source 1..19: mol_type = other RNA
acatgagcaaatacaagag

SEQ ID NO: 64926 - RNA, 19 nt, synthetic construct
  misc_feature 1..19: note = siRNA sense sequence
  source 1..19: mol_type = other RNA
ttgtatttgctcatgtttg

SEQ ID NO: 64927 - RNA, 19 nt, synthetic construct
  misc_feature 1..19: note = siRNA antisense sequence
  source 1..19: mol_type = other RNA
caaacatgagcaaatacaa

SEQ ID NO: 64928 - RNA, 19 nt, synthetic construct
  misc_feature 1..19: note = siRNA sense sequence
  source 1..19: mol_type = other RNA
tgtatttgctcatgtttgc

SEQ ID NO: 64929 - RNA, 19 nt, synthetic construct
  misc_feature 1..19: note = siRNA antisense sequence
  source 1..19: mol_type = other RNA
gcaaacatgagcaaataca

SEQ ID NO: 64930 - RNA, 19 nt, synthetic construct
  misc_feature 1..19: note = siRNA sense sequence
  source 1..19: mol_type = other RNA
gtatttgctcatgtttgca

SEQ ID NO: 64931 - RNA, 19 nt, synthetic construct
  misc_feature 1..19: note = siRNA antisense sequence
  source 1..19: mol_type = other RNA
tgcaaacatgagcaaatac

SEQ ID NO: 64932 - RNA, 19 nt, synthetic construct
  misc_feature 1..19: note = siRNA sense sequence
  source 1..19: mol_type = other RNA
atttgctcatgtttgcagg

SEQ ID NO: 64933 - RNA, 19 nt, synthetic construct
  misc_feature 1..19: note = siRNA antisense sequence
  source 1..19: mol_type = other RNA
cctgcaaacatgagcaaat

SEQ ID NO: 64934 - RNA, 19 nt, synthetic construct
  misc_feature 1..19: note = siRNA sense sequence
  source 1..19: mol_type = other RNA
tttgctcatgtttgcaggg

SEQ ID NO: 64935 - RNA, 19 nt, synthetic construct
  misc_feature 1..19: note = siRNA antisense sequence
  source 1..19: mol_type = other RNA
ccctgcaaacatgagcaaa

SEQ ID NO: 64936 - RNA, 19 nt, synthetic construct
  misc_feature 1..19: note = siRNA sense sequence
  source 1..19: mol_type = other RNA
gggtgctctgcagtgggta

SEQ ID NO: 64937 - RNA, 19 nt, synthetic construct
  misc_feature 1..19: note = siRNA antisense sequence
  source 1..19: mol_type = other RNA
tacccactgcagagcaccc

SEQ ID NO: 64938 - RNA, 19 nt, synthetic construct
  misc_feature 1..19: note = siRNA sense sequence
  source 1..19: mol_type = other RNA
ggtgctctgcagtgggtag

SEQ ID NO: 64939 - RNA, 19 nt, synthetic construct
  misc_feature 1..19: note = siRNA antisense sequence
  source 1..19: mol_type = other RNA
ctacccactgcagagcacc

SEQ ID NO: 64940 - RNA, 19 nt, synthetic construct
  misc_feature 1..19: note = siRNA sense sequence
  source 1..19: mol_type = other RNA
gtgctctgcagtgggtagg

SEQ ID NO: 64941 - RNA, 19 nt, synthetic construct
  misc_feature 1..19: note = siRNA antisense sequence
  source 1..19: mol_type = other RNA
cctacccactgcagagcac

SEQ ID NO: 64942 - RNA, 19 nt, synthetic construct
  misc_feature 1..19: note = siRNA sense sequence
  source 1..19: mol_type = other RNA
tgctctgcagtgggtaggg

SEQ ID NO: 64943 - RNA, 19 nt, synthetic construct
  misc_feature 1..19: note = siRNA antisense sequence
  source 1..19: mol_type = other RNA
ccctacccactgcagagca

SEQ ID NO: 64944 - RNA, 19 nt, synthetic construct
  misc_feature 1..19: note = siRNA sense sequence
  source 1..19: mol_type = other RNA
aggcctcctccaatcactg

SEQ ID NO: 64945 - RNA, 19 nt, synthetic construct
  misc_feature 1..19: note = siRNA antisense sequence
  source 1..19: mol_type = other RNA
cagtgattggaggaggcct

SEQ ID NO: 64946 - RNA, 19 nt, synthetic construct
  misc_feature 1..19: note = siRNA sense sequence
  source 1..19: mol_type = other RNA
atcactggcactgtaccca

SEQ ID NO: 64947 - RNA, 19 nt, synthetic construct
  misc_feature 1..19: note = siRNA antisense sequence
  source 1..19: mol_type = other RNA
tgggtacagtgccagtgat

SEQ ID NO: 64948 - RNA, 19 nt, synthetic construct
  misc_feature 1..19: note = siRNA sense sequence
  source 1..19: mol_type = other RNA
tcactggcactgtacccat

SEQ ID NO: 64949 - RNA, 19 nt, synthetic construct
  misc_feature 1..19: note = siRNA antisense sequence
  source 1..19: mol_type = other RNA
atgggtacagtgccagtga

SEQ ID NO: 64950 - RNA, 19 nt, synthetic construct
  misc_feature 1..19: note = siRNA sense sequence
  source 1..19: mol_type = other RNA
cactggcactgtacccatg

SEQ ID NO: 64951 - RNA, 19 nt, synthetic construct
  misc_feature 1..19: note = siRNA antisense sequence
  source 1..19: mol_type = other RNA
catgggtacagtgccagtg

SEQ ID NO: 64952 - RNA, 19 nt, synthetic construct
  misc_feature 1..19: note = siRNA sense sequence
  source 1..19: mol_type = other RNA
actggcactgtacccatgt

SEQ ID NO: 64953 - RNA, 19 nt, synthetic construct
  misc_feature 1..19: note = siRNA antisense sequence
  source 1..19: mol_type = other RNA
acatgggtacagtgccagt

SEQ ID NO: 64954 - RNA, 19 nt, synthetic construct
  misc_feature 1..19: note = siRNA sense sequence
  source 1..19: mol_type = other RNA
ctggcactgtacccatgtt

SEQ ID NO: 64955 - RNA, 19 nt, synthetic construct
  misc_feature 1..19: note = siRNA antisense sequence
  source 1..19: mol_type = other RNA
aacatgggtacagtgccag

SEQ ID NO: 64956 - RNA, 19 nt, synthetic construct
  misc_feature 1..19: note = siRNA sense sequence
  source 1..19: mol_type = other RNA
tggcactgtacccatgttt

SEQ ID NO: 64957 - RNA, 19 nt, synthetic construct
  misc_feature 1..19: note = siRNA antisense sequence
  source 1..19: mol_type = other RNA
aaacatgggtacagtgcca

SEQ ID NO: 64958 - RNA, 19 nt, synthetic construct
  misc_feature 1..19: note = siRNA sense sequence
  source 1..19: mol_type = other RNA
gcagaggccatggcaggta

SEQ ID NO: 64959 - RNA, 19 nt, synthetic construct
  misc_feature 1..19: note = siRNA antisense sequence
  source 1..19: mol_type = other RNA
tacctgccatggcctctgc

SEQ ID NO: 64960 - RNA, 19 nt, synthetic construct
  misc_feature 1..19: note = siRNA sense sequence
  source 1..19: mol_type = other RNA
ggccatggcaggtagatag

SEQ ID NO: 64961 - RNA, 19 nt, synthetic construct
  misc_feature 1..19: note = siRNA antisense sequence
  source 1..19: mol_type = other RNA
ctatctacctgccatggcc

SEQ ID NO: 64962 - RNA, 19 nt, synthetic construct
  misc_feature 1..19: note = siRNA sense sequence
  source 1..19: mol_type = other RNA
gccatggcaggtagatagg

SEQ ID NO: 64963 - RNA, 19 nt, synthetic construct
  misc_feature 1..19: note = siRNA antisense sequence
  source 1..19: mol_type = other RNA
cctatctacctgccatggc

SEQ ID NO: 64964 - RNA, 19 nt, synthetic construct
  misc_feature 1..19: note = siRNA sense sequence
  source 1..19: mol_type = other RNA
ccatggcaggtagataggt

SEQ ID NO: 64965 - RNA, 19 nt, synthetic construct
  misc_feature 1..19: note = siRNA antisense sequence
  source 1..19: mol_type = other RNA
acctatctacctgccatgg

SEQ ID NO: 64966 - RNA, 19 nt, synthetic construct
  misc_feature 1..19: note = siRNA sense sequence
  source 1..19: mol_type = other RNA
catggcaggtagataggtg

SEQ ID NO: 64967 - RNA, 19 nt, synthetic construct
  misc_feature 1..19: note = siRNA antisense sequence
  source 1..19: mol_type = other RNA
cacctatctacctgccatg

SEQ ID NO: 64968 - RNA, 19 nt, synthetic construct
  misc_feature 1..19: note = siRNA sense sequence
  source 1..19: mol_type = other RNA
atggcaggtagataggtga

SEQ ID NO: 64969 - RNA, 19 nt, synthetic construct
  misc_feature 1..19: note = siRNA antisense sequence
  source 1..19: mol_type = other RNA
tcacctatctacctgccat

SEQ ID NO: 64970 - RNA, 19 nt, synthetic construct
  misc_feature 1..19: note = siRNA sense sequence
  source 1..19: mol_type = other RNA
tggcaggtagataggtgac

SEQ ID NO: 64971 - RNA, 19 nt, synthetic construct
  misc_feature 1..19: note = siRNA antisense sequence
  source 1..19: mol_type = other RNA
gtcacctatctacctgcca

SEQ ID NO: 64972 - RNA, 19 nt, synthetic construct
  misc_feature 1..19: note = siRNA sense sequence
  source 1..19: mol_type = other RNA
ggcaggtagataggtgaca

SEQ ID NO: 64973 - RNA, 19 nt, synthetic construct
  misc_feature 1..19: note = siRNA antisense sequence
  source 1..19: mol_type = other RNA
tgtcacctatctacctgcc

SEQ ID NO: 64974 - RNA, 19 nt, synthetic construct
  misc_feature 1..19: note = siRNA sense sequence
  source 1..19: mol_type = other RNA
gcaggtagataggtgacac

SEQ ID NO: 64975 - RNA, 19 nt, synthetic construct
  misc_feature 1..19: note = siRNA antisense sequence
  source 1..19: mol_type = other RNA
gtgtcacctatctacctgc

SEQ ID NO: 64976 - RNA, 19 nt, synthetic construct
  misc_feature 1..19: note = siRNA sense sequence
  source 1..19: mol_type = other RNA
caggtagataggtgacacc

SEQ ID NO: 64977 - RNA, 19 nt, synthetic construct
  misc_feature 1..19: note = siRNA antisense sequence
  source 1..19: mol_type = other RNA
ggtgtcacctatctacctg

SEQ ID NO: 64978 - RNA, 19 nt, synthetic construct
  misc_feature 1..19: note = siRNA sense sequence
  source 1..19: mol_type = other RNA
cctgtggagggagtcatgc

SEQ ID NO: 64979 - RNA, 19 nt, synthetic construct
  misc_feature 1..19: note = siRNA antisense sequence
  source 1..19: mol_type = other RNA
gcatgactccctccacagg

SEQ ID NO: 64980 - RNA, 19 nt, synthetic construct
  misc_feature 1..19: note = siRNA sense sequence
  source 1..19: mol_type = other RNA
ctgtggagggagtcatgcc

SEQ ID NO: 64981 - RNA, 19 nt, synthetic construct
  misc_feature 1..19: note = siRNA antisense sequence
  source 1..19: mol_type = other RNA
ggcatgactccctccacag

SEQ ID NO: 64982 - RNA, 19 nt, synthetic construct
  misc_feature 1..19: note = siRNA sense sequence
  source 1..19: mol_type = other RNA
gtcatgccctactccagtg

SEQ ID NO: 64983 - RNA, 19 nt, synthetic construct
  misc_feature 1..19: note = siRNA antisense sequence
  source 1..19: mol_type = other RNA
cactggagtagggcatgac

SEQ ID NO: 64984 - RNA, 19 nt, synthetic construct
  misc_feature 1..19: note = siRNA sense sequence
  source 1..19: mol_type = other RNA
tcatgccctactccagtgc

SEQ ID NO: 64985 - RNA, 19 nt, synthetic construct
  misc_feature 1..19: note = siRNA antisense sequence
  source 1..19: mol_type = other RNA
gcactggagtagggcatga

SEQ ID NO: 64986 - RNA, 19 nt, synthetic construct
  misc_feature 1..19: note = siRNA sense sequence
  source 1..19: mol_type = other RNA
catgccctactccagtgct

SEQ ID NO: 64987 - RNA, 19 nt, synthetic construct
  misc_feature 1..19: note = siRNA antisense sequence
  source 1..19: mol_type = other RNA
agcactggagtagggcatg

SEQ ID NO: 64988 - RNA, 19 nt, synthetic construct
  misc_feature 1..19: note = siRNA sense sequence
  source 1..19: mol_type = other RNA
ctactccagtgctggccca

SEQ ID NO: 64989 - RNA, 19 nt, synthetic construct
  misc_feature 1..19: note = siRNA antisense sequence
  source 1..19: mol_type = other RNA
tgggccagcactggagtag

SEQ ID NO: 64990 - RNA, 19 nt, synthetic construct
  misc_feature 1..19: note = siRNA sense sequence
  source 1..19: mol_type = other RNA
ggcccacgaatccatgttt

SEQ ID NO: 64991 - RNA, 19 nt, synthetic construct
  misc_feature 1..19: note = siRNA antisense sequence
  source 1..19: mol_type = other RNA
aaacatggattcgtgggcc

SEQ ID NO: 64992 - RNA, 19 nt, synthetic construct
  misc_feature 1..19: note = siRNA sense sequence
  source 1..19: mol_type = other RNA
gcccacgaatccatgtttg

SEQ ID NO: 64993 - RNA, 19 nt, synthetic construct
  misc_feature 1..19: note = siRNA antisense sequence
  source 1..19: mol_type = other RNA
caaacatggattcgtgggc

SEQ ID NO: 64994 - RNA, 19 nt, synthetic construct
  misc_feature 1..19: note = siRNA sense sequence
  source 1..19: mol_type = other RNA
cccacgaatccatgtttgt

SEQ ID NO: 64995 - RNA, 19 nt, synthetic construct
  misc_feature 1..19: note = siRNA antisense sequence
  source 1..19: mol_type = other RNA
acaaacatggattcgtggg

SEQ ID NO: 64996 - RNA, 19 nt, synthetic construct
  misc_feature 1..19: note = siRNA sense sequence
  source 1..19: mol_type = other RNA
aatccatgtttgttaccca

SEQ ID NO: 64997 - RNA, 19 nt, synthetic construct
  misc_feature 1..19: note = siRNA antisense sequence
  source 1..19: mol_type = other RNA
tgggtaacaaacatggatt

SEQ ID NO: 64998 - RNA, 19 nt, synthetic construct
  misc_feature 1..19: note = siRNA sense sequence
  source 1..19: mol_type = other RNA
atccatgtttgttacccat

SEQ ID NO: 64999 - RNA, 19 nt, synthetic construct
  misc_feature 1..19: note = siRNA antisense sequence
  source 1..19: mol_type = other RNA
atgggtaacaaacatggat

SEQ ID NO: 65000 - RNA, 19 nt, synthetic construct
  misc_feature 1..19: note = siRNA sense sequence
  source 1..19: mol_type = other RNA
tccatgtttgttacccatc

SEQ ID NO: 65001 - RNA, 19 nt, synthetic construct
  misc_feature 1..19: note = siRNA antisense sequence
  source 1..19: mol_type = other RNA
gatgggtaacaaacatgga

SEQ ID NO: 65002 - RNA, 19 nt, synthetic construct
  misc_feature 1..19: note = siRNA sense sequence
  source 1..19: mol_type = other RNA
gtttgttacccatctcagt

SEQ ID NO: 65003 - RNA, 19 nt, synthetic construct
  misc_feature 1..19: note = siRNA antisense sequence
  source 1..19: mol_type = other RNA
actgagatgggtaacaaac

SEQ ID NO: 65004 - RNA, 19 nt, synthetic construct
  misc_feature 1..19: note = siRNA sense sequence
  source 1..19: mol_type = other RNA
tttgttacccatctcagtg

SEQ ID NO: 65005 - RNA, 19 nt, synthetic construct
  misc_feature 1..19: note = siRNA antisense sequence
  source 1..19: mol_type = other RNA
cactgagatgggtaacaaa

SEQ ID NO: 65006 - RNA, 19 nt, synthetic construct
  misc_feature 1..19: note = siRNA sense sequence
  source 1..19: mol_type = other RNA
ttgttacccatctcagtgc

SEQ ID NO: 65007 - RNA, 19 nt, synthetic construct
  misc_feature 1..19: note = siRNA antisense sequence
  source 1..19: mol_type = other RNA
gcactgagatgggtaacaa

SEQ ID NO: 65008 - RNA, 19 nt, synthetic construct
  misc_feature 1..19: note = siRNA sense sequence
  source 1..19: mol_type = other RNA
tgttacccatctcagtgct

SEQ ID NO: 65009 - RNA, 19 nt, synthetic construct
  misc_feature 1..19: note = siRNA antisense sequence
  source 1..19: mol_type = other RNA
agcactgagatgggtaaca

SEQ ID NO: 65010 - RNA, 19 nt, synthetic construct
  misc_feature 1..19: note = siRNA sense sequence
  source 1..19: mol_type = other RNA
cttgagtgccagccataga

SEQ ID NO: 65011 - RNA, 19 nt, synthetic construct
  misc_feature 1..19: note = siRNA antisense sequence
  source 1..19: mol_type = other RNA
tctatggctggcactcaag

SEQ ID NO: 65012 - RNA, 19 nt, synthetic construct
  misc_feature 1..19: note = siRNA sense sequence
  source 1..19: mol_type = other RNA
ttgagtgccagccatagat

SEQ ID NO: 65013 - RNA, 19 nt, synthetic construct
  misc_feature 1..19: note = siRNA antisense sequence
  source 1..19: mol_type = other RNA
atctatggctggcactcaa

SEQ ID NO: 65014 - RNA, 19 nt, synthetic construct
  misc_feature 1..19: note = siRNA sense sequence
  source 1..19: mol_type = other RNA
tgagtgccagccatagatc

SEQ ID NO: 65015 - RNA, 19 nt, synthetic construct
  misc_feature 1..19: note = siRNA antisense sequence
  source 1..19: mol_type = other RNA
gatctatggctggcactca

SEQ ID NO: 65016 - RNA, 19 nt, synthetic construct
  misc_feature 1..19: note = siRNA sense sequence
  source 1..19: mol_type = other RNA
gagtgccagccatagatct

SEQ ID NO: 65017 - RNA, 19 nt, synthetic construct
  misc_feature 1..19: note = siRNA antisense sequence
  source 1..19: mol_type = other RNA
agatctatggctggcactc

SEQ ID NO: 65018 - RNA, 19 nt, synthetic construct
  misc_feature 1..19: note = siRNA sense sequence
  source 1..19: mol_type = other RNA
agtgccagccatagatctc

SEQ ID NO: 65019 - RNA, 19 nt, synthetic construct
  misc_feature 1..19: note = siRNA antisense sequence
  source 1..19: mol_type = other RNA
gagatctatggctggcact

SEQ ID NO: 65020 - RNA, 19 nt, synthetic construct
  misc_feature 1..19: note = siRNA sense sequence
  source 1..19: mol_type = other RNA
gtgccagccatagatctca

SEQ ID NO: 65021 - RNA, 19 nt, synthetic construct
  misc_feature 1..19: note = siRNA antisense sequence
  source 1..19: mol_type = other RNA
tgagatctatggctggcac

SEQ ID NO: 65022 - RNA, 19 nt, synthetic construct
  misc_feature 1..19: note = siRNA sense sequence
  source 1..19: mol_type = other RNA
tgccagccatagatctcag

SEQ ID NO: 65023 - RNA, 19 nt, synthetic construct
  misc_feature 1..19: note = siRNA antisense sequence
  source 1..19: mol_type = other RNA
ctgagatctatggctggca

SEQ ID NO: 65024 - RNA, 19 nt, synthetic construct
  misc_feature 1..19: note = siRNA sense sequence
  source 1..19: mol_type = other RNA
gccatagatctcagcttgg

SEQ ID NO: 65025 - RNA, 19 nt, synthetic construct
  misc_feature 1..19: note = siRNA antisense sequence
  source 1..19: mol_type = other RNA
ccaagctgagatctatggc

SEQ ID NO: 65026 - RNA, 19 nt, synthetic construct
  misc_feature 1..19: note = siRNA sense sequence
  source 1..19: mol_type = other RNA
ccatagatctcagcttggt

SEQ ID NO: 65027 - RNA, 19 nt, synthetic construct
  misc_feature 1..19: note = siRNA antisense sequence
  source 1..19: mol_type = other RNA
accaagctgagatctatgg

SEQ ID NO: 65028 - RNA, 19 nt, synthetic construct
  misc_feature 1..19: note = siRNA sense sequence
  source 1..19: mol_type = other RNA
catagatctcagcttggta

SEQ ID NO: 65029 - RNA, 19 nt, synthetic construct
  misc_feature 1..19: note = siRNA antisense sequence
  source 1..19: mol_type = other RNA
taccaagctgagatctatg

SEQ ID NO: 65030 - RNA, 19 nt, synthetic construct
  misc_feature 1..19: note = siRNA sense sequence
  source 1..19: mol_type = other RNA
atagatctcagcttggtac

SEQ ID NO: 65031 - RNA, 19 nt, synthetic construct
  misc_feature 1..19: note = siRNA antisense sequence
  source 1..19: mol_type = other RNA
gtaccaagctgagatctat

SEQ ID NO: 65032 - RNA, 19 nt, synthetic construct
  misc_feature 1..19: note = siRNA sense sequence
  source 1..19: mol_type = other RNA
tagatctcagcttggtact

SEQ ID NO: 65033 - RNA, 19 nt, synthetic construct
  misc_feature 1..19: note = siRNA antisense sequence
  source 1..19: mol_type = other RNA
agtaccaagctgagatcta

SEQ ID NO: 65034 - RNA, 19 nt, synthetic construct
  misc_feature 1..19: note = siRNA sense sequence
  source 1..19: mol_type = other RNA
ggacatgccatctctgggt

SEQ ID NO: 65035 - RNA, 19 nt, synthetic construct
  misc_feature 1..19: note = siRNA antisense sequence
  source 1..19: mol_type = other RNA
acccagagatggcatgtcc

SEQ ID NO: 65036 - RNA, 19 nt, synthetic construct
  misc_feature 1..19: note = siRNA sense sequence
  source 1..19: mol_type = other RNA
gacatgccatctctgggtc

SEQ ID NO: 65037 - RNA, 19 nt, synthetic construct
  misc_feature 1..19: note = siRNA antisense sequence
  source 1..19: mol_type = other RNA
gacccagagatggcatgtc

SEQ ID NO: 65038 - RNA, 19 nt, synthetic construct
  misc_feature 1..19: note = siRNA sense sequence
  source 1..19: mol_type = other RNA
catgccatctctgggtctc

SEQ ID NO: 65039 - RNA, 19 nt, synthetic construct
  misc_feature 1..19: note = siRNA antisense sequence
  source 1..19: mol_type = other RNA
gagacccagagatggcatg

SEQ ID NO: 65040 - RNA, 19 nt, synthetic construct
  misc_feature 1..19: note = siRNA sense sequence
  source 1..19: mol_type = other RNA
cgcagctcagagtcaggct

SEQ ID NO: 65041 - RNA, 19 nt, synthetic construct
  misc_feature 1..19: note = siRNA antisense sequence
  source 1..19: mol_type = other RNA
agcctgactctgagctgcg

SEQ ID NO: 65042 - RNA, 19 nt, synthetic construct
  misc_feature 1..19: note = siRNA sense sequence
  source 1..19: mol_type = other RNA
gcagctcagagtcaggctc

SEQ ID NO: 65043 - RNA, 19 nt, synthetic construct
  misc_feature 1..19: note = siRNA antisense sequence
  source 1..19: mol_type = other RNA
gagcctgactctgagctgc

SEQ ID NO: 65044 - RNA, 19 nt, synthetic construct
  misc_feature 1..19: note = siRNA sense sequence
  source 1..19: mol_type = other RNA
gagtcaggctctggttgct

SEQ ID NO: 65045 - RNA, 19 nt, synthetic construct
  misc_feature 1..19: note = siRNA antisense sequence
  source 1..19: mol_type = other RNA
agcaaccagagcctgactc

SEQ ID NO: 65046 - RNA, 19 nt, synthetic construct
  misc_feature 1..19: note = siRNA sense sequence
  source 1..19: mol_type = other RNA
agtcaggctctggttgctt

SEQ ID NO: 65047 - RNA, 19 nt, synthetic construct
  misc_feature 1..19: note = siRNA antisense sequence
  source 1..19: mol_type = other RNA
aagcaaccagagcctgact

SEQ ID NO: 65048 - RNA, 19 nt, synthetic construct
  misc_feature 1..19: note = siRNA sense sequence
  source 1..19: mol_type = other RNA
gtcaggctctggttgcttt

SEQ ID NO: 65049 - RNA, 19 nt, synthetic construct
  misc_feature 1..19: note = siRNA antisense sequence
  source 1..19: mol_type = other RNA
aaagcaaccagagcctgac

SEQ ID NO: 65050 - RNA, 19 nt, synthetic construct
  misc_feature 1..19: note = siRNA sense sequence
  source 1..19: mol_type = other RNA
ggctctggttgctttggag

SEQ ID NO: 65051 - RNA, 19 nt, synthetic construct
  misc_feature 1..19: note = siRNA antisense sequence
  source 1..19: mol_type = other RNA
ctccaaagcaaccagagcc

SEQ ID NO: 65052 - RNA, 19 nt, synthetic construct
  misc_feature 1..19: note = siRNA sense sequence
  source 1..19: mol_type = other RNA
gctctggttgctttggagg

SEQ ID NO: 65053 - RNA, 19 nt, synthetic construct
  misc_feature 1..19: note = siRNA antisense sequence
  source 1..19: mol_type = other RNA
cctccaaagcaaccagagc

SEQ ID NO: 65054 - RNA, 19 nt, synthetic construct
  misc_feature 1..19: note = siRNA sense sequence
  source 1..19: mol_type = other RNA
ctctggttgctttggagga

SEQ ID NO: 65055 - RNA, 19 nt, synthetic construct
  misc_feature 1..19: note = siRNA antisense sequence
  source 1..19: mol_type = other RNA
tcctccaaagcaaccagag

SEQ ID NO: 65056 - RNA, 19 nt, synthetic construct
  misc_feature 1..19: note = siRNA sense sequence
  source 1..19: mol_type = other RNA
tctggttgctttggaggat

SEQ ID NO: 65057 - RNA, 19 nt, synthetic construct
  misc_feature 1..19: note = siRNA antisense sequence
  source 1..19: mol_type = other RNA
atcctccaaagcaaccaga

SEQ ID NO: 65058 - RNA, 19 nt, synthetic construct
  misc_feature 1..19: note = siRNA sense sequence
  source 1..19: mol_type = other RNA
ctggttgctttggaggatc

SEQ ID NO: 65059 - RNA, 19 nt, synthetic construct
  misc_feature 1..19: note = siRNA antisense sequence
  source 1..19: mol_type = other RNA
gatcctccaaagcaaccag

SEQ ID NO: 65060 - RNA, 19 nt, synthetic construct
  misc_feature 1..19: note = siRNA sense sequence
  source 1..19: mol_type = other RNA
actgcgctgtgcacatgct

SEQ ID NO: 65061 - RNA, 19 nt, synthetic construct
  misc_feature 1..19: note = siRNA antisense sequence
  source 1..19: mol_type = other RNA
agcatgtgcacagcgcagt

SEQ ID NO: 65062 - RNA, 19 nt, synthetic construct
  misc_feature 1..19: note = siRNA sense sequence
  source 1..19: mol_type = other RNA
ctgcgctgtgcacatgctc

SEQ ID NO: 65063 - RNA, 19 nt, synthetic construct
  misc_feature 1..19: note = siRNA antisense sequence
  source 1..19: mol_type = other RNA
gagcatgtgcacagcgcag

SEQ ID NO: 65064 - RNA, 19 nt, synthetic construct
  misc_feature 1..19: note = siRNA sense sequence
  source 1..19: mol_type = other RNA
gggcagttaggcagggact

SEQ ID NO: 65065 - RNA, 19 nt, synthetic construct
  misc_feature 1..19: note = siRNA antisense sequence
  source 1..19: mol_type = other RNA
agtccctgcctaactgccc

SEQ ID NO: 65066 - RNA, 19 nt, synthetic construct
  misc_feature 1..19: note = siRNA sense sequence
  source 1..19: mol_type = other RNA
ggcagttaggcagggactc

SEQ ID NO: 65067 - RNA, 19 nt, synthetic construct
  misc_feature 1..19: note = siRNA antisense sequence
  source 1..19: mol_type = other RNA
gagtccctgcctaactgcc

SEQ ID NO: 65068 - RNA, 19 nt, synthetic construct
  misc_feature 1..19: note = siRNA sense sequence
  source 1..19: mol_type = other RNA
gcagttaggcagggactct

SEQ ID NO: 65069 - RNA, 19 nt, synthetic construct
  misc_feature 1..19: note = siRNA antisense sequence
  source 1..19: mol_type = other RNA
agagtccctgcctaactgc

SEQ ID NO: 65070 - RNA, 19 nt, synthetic construct
  misc_feature 1..19: note = siRNA sense sequence
  source 1..19: mol_type = other RNA
ttaggcagggactctggga

SEQ ID NO: 65071 - RNA, 19 nt, synthetic construct
  misc_feature 1..19: note = siRNA antisense sequence
  source 1..19: mol_type = other RNA
tcccagagtccctgcctaa

SEQ ID NO: 65072 - RNA, 19 nt, synthetic construct
  misc_feature 1..19: note = siRNA sense sequence
  source 1..19: mol_type = other RNA
actctgggagggtctggca

SEQ ID NO: 65073 - RNA, 19 nt, synthetic construct
  misc_feature 1..19: note = siRNA antisense sequence
  source 1..19: mol_type = other RNA
tgccagaccctcccagagt

SEQ ID NO: 65074 - RNA, 19 nt, synthetic construct
  misc_feature 1..19: note = siRNA sense sequence
  source 1..19: mol_type = other RNA
gaatgcctgctttctcctg

SEQ ID NO: 65075 - RNA, 19 nt, synthetic construct
  misc_feature 1..19: note = siRNA antisense sequence
  source 1..19: mol_type = other RNA
caggagaaagcaggcattc

SEQ ID NO: 65076 - RNA, 19 nt, synthetic construct
  misc_feature 1..19: note = siRNA sense sequence
  source 1..19: mol_type = other RNA
gcctgctttctcctggctt

SEQ ID NO: 65077 - RNA, 19 nt, synthetic construct
  misc_feature 1..19: note = siRNA antisense sequence
  source 1..19: mol_type = other RNA
aagccaggagaaagcaggc

SEQ ID NO: 65078 - RNA, 19 nt, synthetic construct
  misc_feature 1..19: note = siRNA sense sequence
  source 1..19: mol_type = other RNA
cctgctttctcctggcttg

SEQ ID NO: 65079 - RNA, 19 nt, synthetic construct
  misc_feature 1..19: note = siRNA antisense sequence
  source 1..19: mol_type = other RNA
caagccaggagaaagcagg

SEQ ID NO: 65080 - RNA, 19 nt, synthetic construct
  misc_feature 1..19: note = siRNA sense sequence
  source 1..19: mol_type = other RNA
gctttctcctggcttgtgg

SEQ ID NO: 65081 - RNA, 19 nt, synthetic construct
  misc_feature 1..19: note = siRNA antisense sequence
  source 1..19: mol_type = other RNA
ccacaagccaggagaaagc

SEQ ID NO: 65082 - RNA, 19 nt, synthetic construct
  misc_feature 1..19: note = siRNA sense sequence
  source 1..19: mol_type = other RNA
ctcctggcttgtggtcacc

SEQ ID NO: 65083 - RNA, 19 nt, synthetic construct
  misc_feature 1..19: note = siRNA antisense sequence
  source 1..19: mol_type = other RNA
ggtgaccacaagccaggag

SEQ ID NO: 65084 - RNA, 19 nt, synthetic construct
  misc_feature 1..19: note = siRNA sense sequence
  source 1..19: mol_type = other RNA
ctcctgggctccatgctag

SEQ ID NO: 65085 - RNA, 19 nt, synthetic construct
  misc_feature 1..19: note = siRNA antisense sequence
  source 1..19: mol_type = other RNA
ctagcatggagcccaggag

SEQ ID NO: 65086 - RNA, 19 nt, synthetic construct
  misc_feature 1..19: note = siRNA sense sequence
  source 1..19: mol_type = other RNA
tcctgggctccatgctagc

SEQ ID NO: 65087 - RNA, 19 nt, synthetic construct
  misc_feature 1..19: note = siRNA antisense sequence
  source 1..19: mol_type = other RNA
gctagcatggagcccagga

SEQ ID NO: 65088 - RNA, 19 nt, synthetic construct
  misc_feature 1..19: note = siRNA sense sequence
  source 1..19: mol_type = other RNA
cctgggctccatgctagct

SEQ ID NO: 65089 - RNA, 19 nt, synthetic construct
  misc_feature 1..19: note = siRNA antisense sequence
  source 1..19: mol_type = other RNA
agctagcatggagcccagg

SEQ ID NO: 65090 - RNA, 19 nt, synthetic construct
  misc_feature 1..19: note = siRNA sense sequence
  source 1..19: mol_type = other RNA
ctgggctccatgctagctg

SEQ ID NO: 65091 - RNA, 19 nt, synthetic construct
  misc_feature 1..19: note = siRNA antisense sequence
  source 1..19: mol_type = other RNA
cagctagcatggagcccag

SEQ ID NO: 65092 - RNA, 19 nt, synthetic construct
  misc_feature 1..19: note = siRNA sense sequence
  source 1..19: mol_type = other RNA
tgggctccatgctagctga

SEQ ID NO: 65093 - RNA, 19 nt, synthetic construct
  misc_feature 1..19: note = siRNA antisense sequence
  source 1..19: mol_type = other RNA
tcagctagcatggagccca

SEQ ID NO: 65094 - RNA, 19 nt, synthetic construct
  misc_feature 1..19: note = siRNA sense sequence
  source 1..19: mol_type = other RNA
gggctccatgctagctgaa

SEQ ID NO: 65095 - RNA, 19 nt, synthetic construct
  misc_feature 1..19: note = siRNA antisense sequence
  source 1..19: mol_type = other RNA
ttcagctagcatggagccc

SEQ ID NO: 65096 - RNA, 19 nt, synthetic construct
  misc_feature 1..19: note = siRNA sense sequence
  source 1..19: mol_type = other RNA
ggctccatgctagctgaag

SEQ ID NO: 65097 - RNA, 19 nt, synthetic construct
  misc_feature 1..19: note = siRNA antisense sequence
  source 1..19: mol_type = other RNA
cttcagctagcatggagcc

SEQ ID NO: 65098 - RNA, 19 nt, synthetic construct
  misc_feature 1..19: note = siRNA sense sequence
  source 1..19: mol_type = other RNA
gctccatgctagctgaagc

SEQ ID NO: 65099 - RNA, 19 nt, synthetic construct
  misc_feature 1..19: note = siRNA antisense sequence
  source 1..19: mol_type = other RNA
gcttcagctagcatggagc

SEQ ID NO: 65100 - RNA, 19 nt, synthetic construct
  misc_feature 1..19: note = siRNA sense sequence
  source 1..19: mol_type = other RNA
ctccatgctagctgaagcc

SEQ ID NO: 65101 - RNA, 19 nt, synthetic construct
  misc_feature 1..19: note = siRNA antisense sequence
  source 1..19: mol_type = other RNA
ggcttcagctagcatggag

SEQ ID NO: 65102 - RNA, 19 nt, synthetic construct
  misc_feature 1..19: note = siRNA sense sequence
  source 1..19: mol_type = other RNA
tgctagctgaagccctgtc

SEQ ID NO: 65103 - RNA, 19 nt, synthetic construct
  misc_feature 1..19: note = siRNA antisense sequence
  source 1..19: mol_type = other RNA
gacagggcttcagctagca

SEQ ID NO: 65104 - RNA, 19 nt, synthetic construct
  misc_feature 1..19: note = siRNA sense sequence
  source 1..19: mol_type = other RNA
ctagctgaagccctgtctc

SEQ ID NO: 65105 - RNA, 19 nt, synthetic construct
  misc_feature 1..19: note = siRNA antisense sequence
  source 1..19: mol_type = other RNA
gagacagggcttcagctag

SEQ ID NO: 65106 - RNA, 19 nt, synthetic construct
  misc_feature 1..19: note = siRNA sense sequence
  source 1..19: mol_type = other RNA
agccctgtctctacctgct

SEQ ID NO: 65107 - RNA, 19 nt, synthetic construct
  misc_feature 1..19: note = siRNA antisense sequence
  source 1..19: mol_type = other RNA
agcaggtagagacagggct

SEQ ID NO: 65108 - RNA, 19 nt, synthetic construct
  misc_feature 1..19: note = siRNA sense sequence
  source 1..19: mol_type = other RNA
ccctgtctctacctgctcc

SEQ ID NO: 65109 - RNA, 19 nt, synthetic construct
  misc_feature 1..19: note = siRNA antisense sequence
  source 1..19: mol_type = other RNA
ggagcaggtagagacaggg

SEQ ID NO: 65110 - RNA, 19 nt, synthetic construct
  misc_feature 1..19: note = siRNA sense sequence
  source 1..19: mol_type = other RNA
cctgtctctacctgctccc

SEQ ID NO: 65111 - RNA, 19 nt, synthetic construct
  misc_feature 1..19: note = siRNA antisense sequence
  source 1..19: mol_type = other RNA
gggagcaggtagagacagg

SEQ ID NO: 65112 - RNA, 19 nt, synthetic construct
  misc_feature 1..19: note = siRNA sense sequence
  source 1..19: mol_type = other RNA
tctacctgctccctgggaa

SEQ ID NO: 65113 - RNA, 19 nt, synthetic construct
  misc_feature 1..19: note = siRNA antisense sequence
  source 1..19: mol_type = other RNA
ttcccagggagcaggtaga

SEQ ID NO: 65114 - RNA, 19 nt, synthetic construct
  misc_feature 1..19: note = siRNA sense sequence
  source 1..19: mol_type = other RNA
aaaatccacctgccagctc

SEQ ID NO: 65115 - RNA, 19 nt, synthetic construct
  misc_feature 1..19: note = siRNA antisense sequence
  source 1..19: mol_type = other RNA
gagctggcaggtggatttt

SEQ ID NO: 65116 - RNA, 19 nt, synthetic construct
  misc_feature 1..19: note = siRNA sense sequence
  source 1..19: mol_type = other RNA
aaatccacctgccagctca

SEQ ID NO: 65117 - RNA, 19 nt, synthetic construct
  misc_feature 1..19: note = siRNA antisense sequence
  source 1..19: mol_type = other RNA
tgagctggcaggtggattt

SEQ ID NO: 65118 - RNA, 19 nt, synthetic construct
  misc_feature 1..19: note = siRNA sense sequence
  source 1..19: mol_type = other RNA
aatccacctgccagctcac

SEQ ID NO: 65119 - RNA, 19 nt, synthetic construct
  misc_feature 1..19: note = siRNA antisense sequence
  source 1..19: mol_type = other RNA
gtgagctggcaggtggatt

SEQ ID NO: 65120 - RNA, 19 nt, synthetic construct
  misc_feature 1..19: note = siRNA sense sequence
  source 1..19: mol_type = other RNA
tccacctgccagctcacac

SEQ ID NO: 65121 - RNA, 19 nt, synthetic construct
  misc_feature 1..19: note = siRNA antisense sequence
  source 1..19: mol_type = other RNA
gtgtgagctggcaggtgga

SEQ ID NO: 65122 - RNA, 19 nt, synthetic construct
  misc_feature 1..19: note = siRNA sense sequence
  source 1..19: mol_type = other RNA
ttgggtactctgtagctta

SEQ ID NO: 65123 - RNA, 19 nt, synthetic construct
  misc_feature 1..19: note = siRNA antisense sequence
  source 1..19: mol_type = other RNA
taagctacagagtacccaa

SEQ ID NO: 65124 - RNA, 19 nt, synthetic construct
  misc_feature 1..19: note = siRNA sense sequence
  source 1..19: mol_type = other RNA
tgggtactctgtagcttag

SEQ ID NO: 65125 - RNA, 19 nt, synthetic construct
  misc_feature 1..19: note = siRNA antisense sequence
  source 1..19: mol_type = other RNA
ctaagctacagagtaccca

SEQ ID NO: 65126 - RNA, 19 nt, synthetic construct
  misc_feature 1..19: note = siRNA sense sequence
  source 1..19: mol_type = other RNA
gggtactctgtagcttaga

SEQ ID NO: 65127 - RNA, 19 nt, synthetic construct
  misc_feature 1..19: note = siRNA antisense sequence
  source 1..19: mol_type = other RNA
tctaagctacagagtaccc

SEQ ID NO: 65128 - RNA, 19 nt, synthetic construct
  misc_feature 1..19: note = siRNA sense sequence
  source 1..19: mol_type = other RNA
ggtactctgtagcttagat

SEQ ID NO: 65129 - RNA, 19 nt, synthetic construct
  misc_feature 1..19: note = siRNA antisense sequence
  source 1..19: mol_type = other RNA
atctaagctacagagtacc

SEQ ID NO: 65130 - RNA, 19 nt, synthetic construct
  misc_feature 1..19: note = siRNA sense sequence
  source 1..19: mol_type = other RNA
gtactctgtagcttagatc

SEQ ID NO: 65131 - RNA, 19 nt, synthetic construct
  misc_feature 1..19: note = siRNA antisense sequence
  source 1..19: mol_type = other RNA
gatctaagctacagagtac

SEQ ID NO: 65132 - RNA, 19 nt, synthetic construct
  misc_feature 1..19: note = siRNA sense sequence
  source 1..19: mol_type = other RNA
actctgtagcttagatccc

SEQ ID NO: 65133 - RNA, 19 nt, synthetic construct
  misc_feature 1..19: note = siRNA antisense sequence
  source 1..19: mol_type = other RNA
gggatctaagctacagagt

SEQ ID NO: 65134 - RNA, 19 nt, synthetic construct
  misc_feature 1..19: note = siRNA sense sequence
  source 1..19: mol_type = other RNA
gtagcttagatcccagatg

SEQ ID NO: 65135 - RNA, 19 nt, synthetic construct
  misc_feature 1..19: note = siRNA antisense sequence
  source 1..19: mol_type = other RNA
catctgggatctaagctac

SEQ ID NO: 65136 - RNA, 19 nt, synthetic construct
  misc_feature 1..19: note = siRNA sense sequence
  source 1..19: mol_type = other RNA
agcttagatcccagatgtc

SEQ ID NO: 65137 - RNA, 19 nt, synthetic construct
  misc_feature 1..19: note = siRNA antisense sequence
  source 1..19: mol_type = other RNA
gacatctgggatctaagct

SEQ ID NO: 65138 - RNA, 19 nt, synthetic construct
  misc_feature 1..19: note = siRNA sense sequence
  source 1..19: mol_type = other RNA
gcttagatcccagatgtct

SEQ ID NO: 65139 - RNA, 19 nt, synthetic construct
  misc_feature 1..19: note = siRNA antisense sequence
  source 1..19: mol_type = other RNA
agacatctgggatctaagc

SEQ ID NO: 65140 - RNA, 19 nt, synthetic construct
  misc_feature 1..19: note = siRNA sense sequence
  source 1..19: mol_type = other RNA
cttagatcccagatgtctg

SEQ ID NO: 65141 - RNA, 19 nt, synthetic construct
  misc_feature 1..19: note = siRNA antisense sequence
  source 1..19: mol_type = other RNA
cagacatctgggatctaag

SEQ ID NO: 65142 - RNA, 19 nt, synthetic construct
  misc_feature 1..19: note = siRNA sense sequence
  source 1..19: mol_type = other RNA
ttagatcccagatgtctgt

SEQ ID NO: 65143 - RNA, 19 nt, synthetic construct
  misc_feature 1..19: note = siRNA antisense sequence
  source 1..19: mol_type = other RNA
acagacatctgggatctaa

SEQ ID NO: 65144 - RNA, 19 nt, synthetic construct
  misc_feature 1..19: note = siRNA sense sequence
  source 1..19: mol_type = other RNA
tagatcccagatgtctgtg

SEQ ID NO: 65145 - RNA, 19 nt, synthetic construct
  misc_feature 1..19: note = siRNA antisense sequence
  source 1..19: mol_type = other RNA
cacagacatctgggatcta

SEQ ID NO: 65146 - RNA, 19 nt, synthetic construct
  misc_feature 1..19: note = siRNA sense sequence
  source 1..19: mol_type = other RNA
agatcccagatgtctgtgg

SEQ ID NO: 65147 - RNA, 19 nt, synthetic construct
  misc_feature 1..19: note = siRNA antisense sequence
  source 1..19: mol_type = other RNA
ccacagacatctgggatct

SEQ ID NO: 65148 - RNA, 19 nt, synthetic construct
  misc_feature 1..19: note = siRNA sense sequence
  source 1..19: mol_type = other RNA
gatcccagatgtctgtggc

SEQ ID NO: 65149 - RNA, 19 nt, synthetic construct
  misc_feature 1..19: note = siRNA antisense sequence
  source 1..19: mol_type = other RNA
gccacagacatctgggatc

SEQ ID NO: 65150 - RNA, 19 nt, synthetic construct
  misc_feature 1..19: note = siRNA sense sequence
  source 1..19: mol_type = other RNA
atcccagatgtctgtggca

SEQ ID NO: 65151 - RNA, 19 nt, synthetic construct
  misc_feature 1..19: note = siRNA antisense sequence
  source 1..19: mol_type = other RNA
tgccacagacatctgggat

SEQ ID NO: 65152 - RNA, 19 nt, synthetic construct
  misc_feature 1..19: note = siRNA sense sequence
  source 1..19: mol_type = other RNA
tcccagatgtctgtggcaa

SEQ ID NO: 65153 - RNA, 19 nt, synthetic construct
  misc_feature 1..19: note = siRNA antisense sequence
  source 1..19: mol_type = other RNA
ttgccacagacatctggga

SEQ ID NO: 65154 - RNA, 19 nt, synthetic construct
  misc_feature 1..19: note = siRNA sense sequence
  source 1..19: mol_type = other RNA
cccagatgtctgtggcaag

SEQ ID NO: 65155 - RNA, 19 nt, synthetic construct
  misc_feature 1..19: note = siRNA antisense sequence
  source 1..19: mol_type = other RNA
cttgccacagacatctggg

SEQ ID NO: 65156 - RNA, 19 nt, synthetic construct
  misc_feature 1..19: note = siRNA sense sequence
  source 1..19: mol_type = other RNA
ccagatgtctgtggcaaga

SEQ ID NO: 65157 - RNA, 19 nt, synthetic construct
  misc_feature 1..19: note = siRNA antisense sequence
  source 1..19: mol_type = other RNA
tcttgccacagacatctgg

SEQ ID NO: 65158 - RNA, 19 nt, synthetic construct
  misc_feature 1..19: note = siRNA sense sequence
  source 1..19: mol_type = other RNA
cagatgtctgtggcaagag

SEQ ID NO: 65159 - RNA, 19 nt, synthetic construct
  misc_feature 1..19: note = siRNA antisense sequence
  source 1..19: mol_type = other RNA
ctcttgccacagacatctg

SEQ ID NO: 65160 - RNA, 19 nt, synthetic construct
  misc_feature 1..19: note = siRNA sense sequence
  source 1..19: mol_type = other RNA
agatgtctgtggcaagagt

SEQ ID NO: 65161 - RNA, 19 nt, synthetic construct
  misc_feature 1..19: note = siRNA antisense sequence
  source 1..19: mol_type = other RNA
actcttgccacagacatct

SEQ ID NO: 65162 - RNA, 19 nt, synthetic construct
  misc_feature 1..19: note = siRNA sense sequence
  source 1..19: mol_type = other RNA
atgtctgtggcaagagtga

SEQ ID NO: 65163 - RNA, 19 nt, synthetic construct
  misc_feature 1..19: note = siRNA antisense sequence
  source 1..19: mol_type = other RNA
tcactcttgccacagacat

SEQ ID NO: 65164 - RNA, 19 nt, synthetic construct
  misc_feature 1..19: note = siRNA sense sequence
  source 1..19: mol_type = other RNA
tgtctgtggcaagagtgag

SEQ ID NO: 65165 - RNA, 19 nt, synthetic construct
  misc_feature 1..19: note = siRNA antisense sequence
  source 1..19: mol_type = other RNA
ctcactcttgccacagaca

SEQ ID NO: 65166 - RNA, 19 nt, synthetic construct
  misc_feature 1..19: note = siRNA sense sequence
  source 1..19: mol_type = other RNA
tggcaagagtgagctgtcc

SEQ ID NO: 65167 - RNA, 19 nt, synthetic construct
  misc_feature 1..19: note = siRNA antisense sequence
  source 1..19: mol_type = other RNA
ggacagctcactcttgcca

SEQ ID NO: 65168 - RNA, 19 nt, synthetic construct
  misc_feature 1..19: note = siRNA sense sequence
  source 1..19: mol_type = other RNA
cttctccaggagccattta

SEQ ID NO: 65169 - RNA, 19 nt, synthetic construct
  misc_feature 1..19: note = siRNA antisense sequence
  source 1..19: mol_type = other RNA
taaatggctcctggagaag

SEQ ID NO: 65170 - RNA, 19 nt, synthetic construct
  misc_feature 1..19: note = siRNA sense sequence
  source 1..19: mol_type = other RNA
ttctccaggagccatttag

SEQ ID NO: 65171 - RNA, 19 nt, synthetic construct
  misc_feature 1..19: note = siRNA antisense sequence
  source 1..19: mol_type = other RNA
ctaaatggctcctggagaa

SEQ ID NO: 65172 - RNA, 19 nt, synthetic construct
  misc_feature 1..19: note = siRNA sense sequence
  source 1..19: mol_type = other RNA
tctccaggagccatttagg

SEQ ID NO: 65173 - RNA, 19 nt, synthetic construct
  misc_feature 1..19: note = siRNA antisense sequence
  source 1..19: mol_type = other RNA
cctaaatggctcctggaga

SEQ ID NO: 65174 - RNA, 19 nt, synthetic construct
  misc_feature 1..19: note = siRNA sense sequence
  source 1..19: mol_type = other RNA
ctccaggagccatttaggg

SEQ ID NO: 65175 - RNA, 19 nt, synthetic construct
  misc_feature 1..19: note = siRNA antisense sequence
  source 1..19: mol_type = other RNA
ccctaaatggctcctggag

SEQ ID NO: 65176 - RNA, 19 nt, synthetic construct
  misc_feature 1..19: note = siRNA sense sequence
  source 1..19: mol_type = other RNA
tccaggagccatttagggc

SEQ ID NO: 65177 - RNA, 19 nt, synthetic construct
  misc_feature 1..19: note = siRNA antisense sequence
  source 1..19: mol_type = other RNA
gccctaaatggctcctgga

SEQ ID NO: 65178 - RNA, 19 nt, synthetic construct
  misc_feature 1..19: note = siRNA sense sequence
  source 1..19: mol_type = other RNA
gccatttagggccaggaag

SEQ ID NO: 65179 - RNA, 19 nt, synthetic construct
  misc_feature 1..19: note = siRNA antisense sequence
  source 1..19: mol_type = other RNA
cttcctggccctaaatggc

SEQ ID NO: 65180 - RNA, 19 nt, synthetic construct
  misc_feature 1..19: note = siRNA sense sequence
  source 1..19: mol_type = other RNA
ccatttagggccaggaagt

SEQ ID NO: 65181 - RNA, 19 nt, synthetic construct
  misc_feature 1..19: note = siRNA antisense sequence
  source 1..19: mol_type = other RNA
acttcctggccctaaatgg

SEQ ID NO: 65182 - RNA, 19 nt, synthetic construct
  misc_feature 1..19: note = siRNA sense sequence
  source 1..19: mol_type = other RNA
atttagggccaggaagtag

SEQ ID NO: 65183 - RNA, 19 nt, synthetic construct
  misc_feature 1..19: note = siRNA antisense sequence
  source 1..19: mol_type = other RNA
ctacttcctggccctaaat

SEQ ID NO: 65184 - RNA, 19 nt, synthetic construct
  misc_feature 1..19: note = siRNA sense sequence
  source 1..19: mol_type = other RNA
tttagggccaggaagtagc

SEQ ID NO: 65185 - RNA, 19 nt, synthetic construct
  misc_feature 1..19: note = siRNA antisense sequence
  source 1..19: mol_type = other RNA
gctacttcctggccctaaa

SEQ ID NO: 65186 - RNA, 19 nt, synthetic construct
  misc_feature 1..19: note = siRNA sense sequence
  source 1..19: mol_type = other RNA
ttagggccaggaagtagcc

SEQ ID NO: 65187 - RNA, 19 nt, synthetic construct
  misc_feature 1..19: note = siRNA antisense sequence
  source 1..19: mol_type = other RNA
ggctacttcctggccctaa

SEQ ID NO: 65188 - RNA, 19 nt, synthetic construct
  misc_feature 1..19: note = siRNA sense sequence
  source 1..19: mol_type = other RNA
ggccaggaagtagcccaag

SEQ ID NO: 65189 - RNA, 19 nt, synthetic construct
  misc_feature 1..19: note = siRNA antisense sequence
  source 1..19: mol_type = other RNA
cttgggctacttcctggcc

SEQ ID NO: 65190 - RNA, 19 nt, synthetic construct
  misc_feature 1..19: note = siRNA sense sequence
  source 1..19: mol_type = other RNA
gccaggaagtagcccaagc

SEQ ID NO: 65191 - RNA, 19 nt, synthetic construct
  misc_feature 1..19: note = siRNA antisense sequence
  source 1..19: mol_type = other RNA
gcttgggctacttcctggc

SEQ ID NO: 65192 - RNA, 19 nt, synthetic construct
  misc_feature 1..19: note = siRNA sense sequence
  source 1..19: mol_type = other RNA
ccaggaagtagcccaagca

SEQ ID NO: 65193 - RNA, 19 nt, synthetic construct
  misc_feature 1..19: note = siRNA antisense sequence
  source 1..19: mol_type = other RNA
tgcttgggctacttcctgg

SEQ ID NO: 65194 - RNA, 19 nt, synthetic construct
  misc_feature 1..19: note = siRNA sense sequence
  source 1..19: mol_type = other RNA
caggaagtagcccaagcat

SEQ ID NO: 65195 - RNA, 19 nt, synthetic construct
  misc_feature 1..19: note = siRNA antisense sequence
  source 1..19: mol_type = other RNA
atgcttgggctacttcctg

SEQ ID NO: 65196 - RNA, 19 nt, synthetic construct
  misc_feature 1..19: note = siRNA sense sequence
  source 1..19: mol_type = other RNA
aggaagtagcccaagcatt

SEQ ID NO: 65197 - RNA, 19 nt, synthetic construct
  misc_feature 1..19: note = siRNA antisense sequence
  source 1..19: mol_type = other RNA
aatgcttgggctacttcct

SEQ ID NO: 65198 - RNA, 19 nt, synthetic construct
  misc_feature 1..19: note = siRNA sense sequence
  source 1..19: mol_type = other RNA
ggaagtagcccaagcattc

SEQ ID NO: 65199 - RNA, 19 nt, synthetic construct
  misc_feature 1..19: note = siRNA antisense sequence
  source 1..19: mol_type = other RNA
gaatgcttgggctacttcc

SEQ ID NO: 65200 - RNA, 19 nt, synthetic construct
  misc_feature 1..19: note = siRNA sense sequence
  source 1..19: mol_type = other RNA
gaagtagcccaagcattca

SEQ ID NO: 65201 - RNA, 19 nt, synthetic construct
  misc_feature 1..19: note = siRNA antisense sequence
  source 1..19: mol_type = other RNA
tgaatgcttgggctacttc

SEQ ID NO: 65202 - RNA, 19 nt, synthetic construct
  misc_feature 1..19: note = siRNA sense sequence
  source 1..19: mol_type = other RNA
gtagcccaagcattcaggt

SEQ ID NO: 65203 - RNA, 19 nt, synthetic construct
  misc_feature 1..19: note = siRNA antisense sequence
  source 1..19: mol_type = other RNA
acctgaatgcttgggctac

SEQ ID NO: 65204 - RNA, 19 nt, synthetic construct
  misc_feature 1..19: note = siRNA sense sequence
  source 1..19: mol_type = other RNA
tagcccaagcattcaggta

SEQ ID NO: 65205 - RNA, 19 nt, synthetic construct
  misc_feature 1..19: note = siRNA antisense sequence
  source 1..19: mol_type = other RNA
tacctgaatgcttgggcta

SEQ ID NO: 65206 - RNA, 19 nt, synthetic construct
  misc_feature 1..19: note = siRNA sense sequence
  source 1..19: mol_type = other RNA
agcccaagcattcaggtac

SEQ ID NO: 65207 - RNA, 19 nt, synthetic construct
  misc_feature 1..19: note = siRNA antisense sequence
  source 1..19: mol_type = other RNA
gtacctgaatgcttgggct

SEQ ID NO: 65208 - RNA, 19 nt, synthetic construct
  misc_feature 1..19: note = siRNA sense sequence
  source 1..19: mol_type = other RNA
gcccaagcattcaggtacc

SEQ ID NO: 65209 - RNA, 19 nt, synthetic construct
  misc_feature 1..19: note = siRNA antisense sequence
  source 1..19: mol_type = other RNA
ggtacctgaatgcttgggc

SEQ ID NO: 65210 - RNA, 19 nt, synthetic construct
  misc_feature 1..19: note = siRNA sense sequence
  source 1..19: mol_type = other RNA
cccaagcattcaggtaccc

SEQ ID NO: 65211 - RNA, 19 nt, synthetic construct
  misc_feature 1..19: note = siRNA antisense sequence
  source 1..19: mol_type = other RNA
gggtacctgaatgcttggg

SEQ ID NO: 65212 - RNA, 19 nt, synthetic construct
  misc_feature 1..19: note = siRNA sense sequence
  source 1..19: mol_type = other RNA
ccaagcattcaggtaccct

SEQ ID NO: 65213 - RNA, 19 nt, synthetic construct
  misc_feature 1..19: note = siRNA antisense sequence
  source 1..19: mol_type = other RNA
agggtacctgaatgcttgg

SEQ ID NO: 65214 - RNA, 19 nt, synthetic construct
  misc_feature 1..19: note = siRNA sense sequence
  source 1..19: mol_type = other RNA
cagggttcccagcttctcc

SEQ ID NO: 65215 - RNA, 19 nt, synthetic construct
  misc_feature 1..19: note = siRNA antisense sequence
  source 1..19: mol_type = other RNA
ggagaagctgggaaccctg

SEQ ID NO: 65216 - RNA, 19 nt, synthetic construct
  misc_feature 1..19: note = siRNA sense sequence
  source 1..19: mol_type = other RNA
agggttcccagcttctccc

SEQ ID NO: 65217 - RNA, 19 nt, synthetic construct
  misc_feature 1..19: note = siRNA antisense sequence
  source 1..19: mol_type = other RNA
gggagaagctgggaaccct

SEQ ID NO: 65218 - RNA, 19 nt, synthetic construct
  misc_feature 1..19: note = siRNA sense sequence
  source 1..19: mol_type = other RNA
gggttcccagcttctccct

SEQ ID NO: 65219 - RNA, 19 nt, synthetic construct
  misc_feature 1..19: note = siRNA antisense sequence
  source 1..19: mol_type = other RNA
agggagaagctgggaaccc

SEQ ID NO: 65220 - RNA, 19 nt, synthetic construct
  misc_feature 1..19: note = siRNA sense sequence
  source 1..19: mol_type = other RNA
gttcccagcttctccctct

SEQ ID NO: 65221 - RNA, 19 nt, synthetic construct
  misc_feature 1..19: note = siRNA antisense sequence
  source 1..19: mol_type = other RNA
agagggagaagctgggaac

SEQ ID NO: 65222 - RNA, 19 nt, synthetic construct
  misc_feature 1..19: note = siRNA sense sequence
  source 1..19: mol_type = other RNA
agcttctccctcttcagcc

SEQ ID NO: 65223 - RNA, 19 nt, synthetic construct
  misc_feature 1..19: note = siRNA antisense sequence
  source 1..19: mol_type = other RNA
ggctgaagagggagaagct

SEQ ID NO: 65224 - RNA, 19 nt, synthetic construct
  misc_feature 1..19: note = siRNA sense sequence
  source 1..19: mol_type = other RNA
ttcagcctcagcatctgtg

SEQ ID NO: 65225 - RNA, 19 nt, synthetic construct
  misc_feature 1..19: note = siRNA antisense sequence
  source 1..19: mol_type = other RNA
cacagatgctgaggctgaa

SEQ ID NO: 65226 - RNA, 19 nt, synthetic construct
  misc_feature 1..19: note = siRNA sense sequence
  source 1..19: mol_type = other RNA
agcctcagcatctgtgttg

SEQ ID NO: 65227 - RNA, 19 nt, synthetic construct
  misc_feature 1..19: note = siRNA antisense sequence
  source 1..19: mol_type = other RNA
caacacagatgctgaggct

SEQ ID NO: 65228 - RNA, 19 nt, synthetic construct
  misc_feature 1..19: note = siRNA sense sequence
  source 1..19: mol_type = other RNA
gcctcagcatctgtgttgc

SEQ ID NO: 65229 - RNA, 19 nt, synthetic construct
  misc_feature 1..19: note = siRNA antisense sequence
  source 1..19: mol_type = other RNA
gcaacacagatgctgaggc

SEQ ID NO: 65230 - RNA, 19 nt, synthetic construct
  misc_feature 1..19: note = siRNA sense sequence
  source 1..19: mol_type = other RNA
cctcagcatctgtgttgcc

SEQ ID NO: 65231 - RNA, 19 nt, synthetic construct
  misc_feature 1..19: note = siRNA antisense sequence
  source 1..19: mol_type = other RNA
ggcaacacagatgctgagg

SEQ ID NO: 65232 - RNA, 19 nt, synthetic construct
  misc_feature 1..19: note = siRNA sense sequence
  source 1..19: mol_type = other RNA
ctcagcatctgtgttgcct

SEQ ID NO: 65233 - RNA, 19 nt, synthetic construct
  misc_feature 1..19: note = siRNA antisense sequence
  source 1..19: mol_type = other RNA
aggcaacacagatgctgag

SEQ ID NO: 65234 - RNA, 19 nt, synthetic construct
  misc_feature 1..19: note = siRNA sense sequence
  source 1..19: mol_type = other RNA
cttgcggtgttttctccct

SEQ ID NO: 65235 - RNA, 19 nt, synthetic construct
  misc_feature 1..19: note = siRNA antisense sequence
  source 1..19: mol_type = other RNA
agggagaaaacaccgcaag

SEQ ID NO: 65236 - RNA, 19 nt, synthetic construct
  misc_feature 1..19: note = siRNA sense sequence
  source 1..19: mol_type = other RNA
ttgcggtgttttctcccta

SEQ ID NO: 65237 - RNA, 19 nt, synthetic construct
  misc_feature 1..19: note = siRNA antisense sequence
  source 1..19: mol_type = other RNA
tagggagaaaacaccgcaa

SEQ ID NO: 65238 - RNA, 19 nt, synthetic construct
  misc_feature 1..19: note = siRNA sense sequence
  source 1..19: mol_type = other RNA
tgcggtgttttctccctag

SEQ ID NO: 65239 - RNA, 19 nt, synthetic construct
  misc_feature 1..19: note = siRNA antisense sequence
  source 1..19: mol_type = other RNA
ctagggagaaaacaccgca

SEQ ID NO: 65240 - RNA, 19 nt, synthetic construct
  misc_feature 1..19: note = siRNA sense sequence
  source 1..19: mol_type = other RNA
gcggtgttttctccctaga

SEQ ID NO: 65241 - RNA, 19 nt, synthetic construct
  misc_feature 1..19: note = siRNA antisense sequence
  source 1..19: mol_type = other RNA
tctagggagaaaacaccgc

SEQ ID NO: 65242 - RNA, 19 nt, synthetic construct
  misc_feature 1..19: note = siRNA sense sequence
  source 1..19: mol_type = other RNA
cggtgttttctccctagag

SEQ ID NO: 65243 - RNA, 19 nt, synthetic construct
  misc_feature 1..19: note = siRNA antisense sequence
  source 1..19: mol_type = other RNA
ctctagggagaaaacaccg

SEQ ID NO: 65244 - RNA, 19 nt, synthetic construct
  misc_feature 1..19: note = siRNA sense sequence
  source 1..19: mol_type = other RNA
gatcagatctgcccaaatt

SEQ ID NO: 65245 - RNA, 19 nt, synthetic construct
  misc_feature 1..19: note = siRNA antisense sequence
  source 1..19: mol_type = other RNA
aatttgggcagatctgatc

SEQ ID NO: 65246 - RNA, 19 nt, synthetic construct
  misc_feature 1..19: note = siRNA sense sequence
  source 1..19: mol_type = other RNA
atcagatctgcccaaatta

SEQ ID NO: 65247 - RNA, 19 nt, synthetic construct
  misc_feature 1..19: note = siRNA antisense sequence
  source 1..19: mol_type = other RNA
taatttgggcagatctgat

SEQ ID NO: 65248 - RNA, 19 nt, synthetic construct
  misc_feature 1..19: note = siRNA sense sequence
  source 1..19: mol_type = other RNA
tcagatctgcccaaattat

SEQ ID NO: 65249 - RNA, 19 nt, synthetic construct
  misc_feature 1..19: note = siRNA antisense sequence
  source 1..19: mol_type = other RNA
ataatttgggcagatctga

SEQ ID NO: 65250 - RNA, 19 nt, synthetic construct
  misc_feature 1..19: note = siRNA sense sequence
  source 1..19: mol_type = other RNA
tacttgataatttgggatc

SEQ ID NO: 65251 - RNA, 19 nt, synthetic construct
  misc_feature 1..19: note = siRNA antisense sequence
  source 1..19: mol_type = other RNA
gatcccaaattatcaagta

SEQ ID NO: 65252 - RNA, 19 nt, synthetic construct
  misc_feature 1..19: note = siRNA sense sequence
  source 1..19: mol_type = other RNA
tgataatttgggatctctt

SEQ ID NO: 65253 - RNA, 19 nt, synthetic construct
  misc_feature 1..19: note = siRNA antisense sequence
  source 1..19: mol_type = other RNA
aagagatcccaaattatca

SEQ ID NO: 65254 - RNA, 19 nt, synthetic construct
  misc_feature 1..19: note = siRNA sense sequence
  source 1..19: mol_type = other RNA
gataatttgggatctctta

SEQ ID NO: 65255 - RNA, 19 nt, synthetic construct
  misc_feature 1..19: note = siRNA antisense sequence
  source 1..19: mol_type = other RNA
taagagatcccaaattatc

SEQ ID NO: 65256 - RNA, 19 nt, synthetic construct
  misc_feature 1..19: note = siRNA sense sequence
  source 1..19: mol_type = other RNA
aatttgggatctcttagtg

SEQ ID NO: 65257 - RNA, 19 nt, synthetic construct
  misc_feature 1..19: note = siRNA antisense sequence
  source 1..19: mol_type = other RNA
cactaagagatcccaaatt

SEQ ID NO: 65258 - RNA, 19 nt, synthetic construct
  misc_feature 1..19: note = siRNA sense sequence
  source 1..19: mol_type = other RNA
atttgggatctcttagtgg

SEQ ID NO: 65259 - RNA, 19 nt, synthetic construct
  misc_feature 1..19: note = siRNA antisense sequence
  source 1..19: mol_type = other RNA
ccactaagagatcccaaat

SEQ ID NO: 65260 - RNA, 19 nt, synthetic construct
  misc_feature 1..19: note = siRNA sense sequence
  source 1..19: mol_type = other RNA
tttgggatctcttagtggg

SEQ ID NO: 65261 - RNA, 19 nt, synthetic construct
  misc_feature 1..19: note = siRNA antisense sequence
  source 1..19: mol_type = other RNA
cccactaagagatcccaaa

SEQ ID NO: 65262 - RNA, 19 nt, synthetic construct
  misc_feature 1..19: note = siRNA sense sequence
  source 1..19: mol_type = other RNA
atggctgtgtctagttagc

SEQ ID NO: 65263 - RNA, 19 nt, synthetic construct
  misc_feature 1..19: note = siRNA antisense sequence
  source 1..19: mol_type = other RNA
gctaactagacacagccat

SEQ ID NO: 65264 - RNA, 19 nt, synthetic construct
  misc_feature 1..19: note = siRNA sense sequence
  source 1..19: mol_type = other RNA
ttcatcaccagaatgtagt

SEQ ID NO: 65265 - RNA, 19 nt, synthetic construct
  misc_feature 1..19: note = siRNA antisense sequence
  source 1..19: mol_type = other RNA
actacattctggtgatgaa

SEQ ID NO: 65266 - RNA, 19 nt, synthetic construct
  misc_feature 1..19: note = siRNA sense sequence
  source 1..19: mol_type = other RNA
tcatcaccagaatgtagtt

SEQ ID NO: 65267 - RNA, 19 nt, synthetic construct
  misc_feature 1..19: note = siRNA antisense sequence
  source 1..19: mol_type = other RNA
aactacattctggtgatga

SEQ ID NO: 65268 - RNA, 19 nt, synthetic construct
  misc_feature 1..19: note = siRNA sense sequence
  source 1..19: mol_type = other RNA
catcaccagaatgtagttg

SEQ ID NO: 65269 - RNA, 19 nt, synthetic construct
  misc_feature 1..19: note = siRNA antisense sequence
  source 1..19: mol_type = other RNA
caactacattctggtgatg

SEQ ID NO: 65270 - RNA, 19 nt, synthetic construct
  misc_feature 1..19: note = siRNA sense sequence
  source 1..19: mol_type = other RNA
atcaccagaatgtagttgt

SEQ ID NO: 65271 - RNA, 19 nt, synthetic construct
  misc_feature 1..19: note = siRNA antisense sequence
  source 1..19: mol_type = other RNA
acaactacattctggtgat

SEQ ID NO: 65272 - RNA, 19 nt, synthetic construct
  misc_feature 1..19: note = siRNA sense sequence
  source 1..19: mol_type = other RNA
tcaccagaatgtagttgtt

SEQ ID NO: 65273 - RNA, 19 nt, synthetic construct
  misc_feature 1..19: note = siRNA antisense sequence
  source 1..19: mol_type = other RNA
aacaactacattctggtga

SEQ ID NO: 65274 - RNA, 19 nt, synthetic construct
  misc_feature 1..19: note = siRNA sense sequence
  source 1..19: mol_type = other RNA
caccagaatgtagttgttt

SEQ ID NO: 65275 - RNA, 19 nt, synthetic construct
  misc_feature 1..19: note = siRNA antisense sequence
  source 1..19: mol_type = other RNA
aaacaactacattctggtg

SEQ ID NO: 65276 - RNA, 19 nt, synthetic construct
  misc_feature 1..19: note = siRNA sense sequence
  source 1..19: mol_type = other RNA
ttttcattccataacgagg

SEQ ID NO: 65277 - RNA, 19 nt, synthetic construct
  misc_feature 1..19: note = siRNA antisense sequence
  source 1..19: mol_type = other RNA
cctcgttatggaatgaaaa

SEQ ID NO: 65278 - RNA, 19 nt, synthetic construct
  misc_feature 1..19: note = siRNA sense sequence
  source 1..19: mol_type = other RNA
tttcattccataacgagga

SEQ ID NO: 65279 - RNA, 19 nt, synthetic construct
  misc_feature 1..19: note = siRNA antisense sequence
  source 1..19: mol_type = other RNA
tcctcgttatggaatgaaa

SEQ ID NO: 65280 - RNA, 19 nt, synthetic construct
  misc_feature 1..19: note = siRNA sense sequence
  source 1..19: mol_type = other RNA
ttcattccataacgaggat

SEQ ID NO: 65281 - RNA, 19 nt, synthetic construct
  misc_feature 1..19: note = siRNA antisense sequence
  source 1..19: mol_type = other RNA
atcctcgttatggaatgaa

SEQ ID NO: 65282 - RNA, 19 nt, synthetic construct
  misc_feature 1..19: note = siRNA sense sequence
  source 1..19: mol_type = other RNA
tcattccataacgaggatc

SEQ ID NO: 65283 - RNA, 19 nt, synthetic construct
  misc_feature 1..19: note = siRNA antisense sequence
  source 1..19: mol_type = other RNA
gatcctcgttatggaatga

SEQ ID NO: 65284 - RNA, 19 nt, synthetic construct
  misc_feature 1..19: note = siRNA sense sequence
  source 1..19: mol_type = other RNA
cattccataacgaggatct

SEQ ID NO: 65285 - RNA, 19 nt, synthetic construct
  misc_feature 1..19: note = siRNA antisense sequence
  source 1..19: mol_type = other RNA
agatcctcgttatggaatg

SEQ ID NO: 65286 - RNA, 19 nt, synthetic construct
  misc_feature 1..19: note = siRNA sense sequence
  source 1..19: mol_type = other RNA
attccataacgaggatcta

SEQ ID NO: 65287 - RNA, 19 nt, synthetic construct
  misc_feature 1..19: note = siRNA antisense sequence
  source 1..19: mol_type = other RNA
tagatcctcgttatggaat

SEQ ID NO: 65288 - RNA, 19 nt, synthetic construct
  misc_feature 1..19: note = siRNA sense sequence
  source 1..19: mol_type = other RNA
ttccataacgaggatctaa

SEQ ID NO: 65289 - RNA, 19 nt, synthetic construct
  misc_feature 1..19: note = siRNA antisense sequence
  source 1..19: mol_type = other RNA
ttagatcctcgttatggaa

SEQ ID NO: 65290 - RNA, 19 nt, synthetic construct
  misc_feature 1..19: note = siRNA sense sequence
  source 1..19: mol_type = other RNA
tccataacgaggatctaag

SEQ ID NO: 65291 - RNA, 19 nt, synthetic construct
  misc_feature 1..19: note = siRNA antisense sequence
  source 1..19: mol_type = other RNA
cttagatcctcgttatgga

SEQ ID NO: 65292 - RNA, 19 nt, synthetic construct
  misc_feature 1..19: note = siRNA sense sequence
  source 1..19: mol_type = other RNA
ccataacgaggatctaagt

SEQ ID NO: 65293 - RNA, 19 nt, synthetic construct
  misc_feature 1..19: note = siRNA antisense sequence
  source 1..19: mol_type = other RNA
acttagatcctcgttatgg

SEQ ID NO: 65294 - RNA, 19 nt, synthetic construct
  misc_feature 1..19: note = siRNA sense sequence
  source 1..19: mol_type = other RNA
cataacgaggatctaagta

SEQ ID NO: 65295 - RNA, 19 nt, synthetic construct
  misc_feature 1..19: note = siRNA antisense sequence
  source 1..19: mol_type = other RNA
tacttagatcctcgttatg

SEQ ID NO: 65296 - RNA, 19 nt, synthetic construct
  misc_feature 1..19: note = siRNA sense sequence
  source 1..19: mol_type = other RNA
ataacgaggatctaagtaa

SEQ ID NO: 65297 - RNA, 19 nt, synthetic construct
  misc_feature 1..19: note = siRNA antisense sequence
  source 1..19: mol_type = other RNA
ttacttagatcctcgttat

SEQ ID NO: 65298 - RNA, 19 nt, synthetic construct
  misc_feature 1..19: note = siRNA sense sequence
  source 1..19: mol_type = other RNA
taacgaggatctaagtaag

SEQ ID NO: 65299 - RNA, 19 nt, synthetic construct
  misc_feature 1..19: note = siRNA antisense sequence
  source 1..19: mol_type = other RNA
cttacttagatcctcgtta

SEQ ID NO: 65300 - RNA, 19 nt, synthetic construct
  misc_feature 1..19: note = siRNA sense sequence
  source 1..19: mol_type = other RNA
aacgaggatctaagtaagg

SEQ ID NO: 65301 - RNA, 19 nt, synthetic construct
  misc_feature 1..19: note = siRNA antisense sequence
  source 1..19: mol_type = other RNA
ccttacttagatcctcgtt

SEQ ID NO: 65302 - RNA, 19 nt, synthetic construct
  misc_feature 1..19: note = siRNA sense sequence
  source 1..19: mol_type = other RNA
acgaggatctaagtaagga

SEQ ID NO: 65303 - RNA, 19 nt, synthetic construct
  misc_feature 1..19: note = siRNA antisense sequence
  source 1..19: mol_type = other RNA
tccttacttagatcctcgt

SEQ ID NO: 65304 - RNA, 19 nt, synthetic construct
  misc_feature 1..19: note = siRNA sense sequence
  source 1..19: mol_type = other RNA
ggatctaagtaaggatttt

SEQ ID NO: 65305 - RNA, 19 nt, synthetic construct
  misc_feature 1..19: note = siRNA antisense sequence
  source 1..19: mol_type = other RNA
aaaatccttacttagatcc

SEQ ID NO: 65306 - RNA, 19 nt, synthetic construct
  misc_feature 1..19: note = siRNA sense sequence
  source 1..19: mol_type = other RNA
gatctaagtaaggattttc

SEQ ID NO: 65307 - RNA, 19 nt, synthetic construct
  misc_feature 1..19: note = siRNA antisense sequence
  source 1..19: mol_type = other RNA
gaaaatccttacttagatc

SEQ ID NO: 65308 - RNA, 19 nt, synthetic construct
  misc_feature 1..19: note = siRNA sense sequence
  source 1..19: mol_type = other RNA
tctaagtaaggattttcag

SEQ ID NO: 65309 - RNA, 19 nt, synthetic construct
  misc_feature 1..19: note = siRNA antisense sequence
  source 1..19: mol_type = other RNA
ctgaaaatccttacttaga

SEQ ID NO: 65310 - RNA, 19 nt, synthetic construct
  misc_feature 1..19: note = siRNA sense sequence
  source 1..19: mol_type = other RNA
ctaagtaaggattttcagt

SEQ ID NO: 65311 - RNA, 19 nt, synthetic construct
  misc_feature 1..19: note = siRNA antisense sequence
  source 1..19: mol_type = other RNA
actgaaaatccttacttag

SEQ ID NO: 65312 - RNA, 19 nt, synthetic construct
  misc_feature 1..19: note = siRNA sense sequence
  source 1..19: mol_type = other RNA
taagtaaggattttcagtg

SEQ ID NO: 65313 - RNA, 19 nt, synthetic construct
  misc_feature 1..19: note = siRNA antisense sequence
  source 1..19: mol_type = other RNA
cactgaaaatccttactta

SEQ ID NO: 65314 - RNA, 19 nt, synthetic construct
  misc_feature 1..19: note = siRNA sense sequence
  source 1..19: mol_type = other RNA
aagtaaggattttcagtgg

SEQ ID NO: 65315 - RNA, 19 nt, synthetic construct
  misc_feature 1..19: note = siRNA antisense sequence
  source 1..19: mol_type = other RNA
ccactgaaaatccttactt

SEQ ID NO: 65316 - RNA, 19 nt, synthetic construct
  misc_feature 1..19: note = siRNA sense sequence
  source 1..19: mol_type = other RNA
aaggattttcagtggcaaa

SEQ ID NO: 65317 - RNA, 19 nt, synthetic construct
  misc_feature 1..19: note = siRNA antisense sequence
  source 1..19: mol_type = other RNA
tttgccactgaaaatcctt

SEQ ID NO: 65318 - RNA, 19 nt, synthetic construct
  misc_feature 1..19: note = siRNA sense sequence
  source 1..19: mol_type = other RNA
gtggcaaatgagggaggac

SEQ ID NO: 65319 - RNA, 19 nt, synthetic construct
  misc_feature 1..19: note = siRNA antisense sequence
  source 1..19: mol_type = other RNA
gtcctccctcatttgccac

SEQ ID NO: 65320 - RNA, 19 nt, synthetic construct
  misc_feature 1..19: note = siRNA sense sequence
  source 1..19: mol_type = other RNA
agtgcacggttattatttg

SEQ ID NO: 65321 - RNA, 19 nt, synthetic construct
  misc_feature 1..19: note = siRNA antisense sequence
  source 1..19: mol_type = other RNA
caaataataaccgtgcact

SEQ ID NO: 65322 - RNA, 19 nt, synthetic construct
  misc_feature 1..19: note = siRNA sense sequence
  source 1..19: mol_type = other RNA
gtgcacggttattatttga

SEQ ID NO: 65323 - RNA, 19 nt, synthetic construct
  misc_feature 1..19: note = siRNA antisense sequence
  source 1..19: mol_type = other RNA
tcaaataataaccgtgcac

SEQ ID NO: 65324 - RNA, 19 nt, synthetic construct
  misc_feature 1..19: note = siRNA sense sequence
  source 1..19: mol_type = other RNA
tgcacggttattatttgat

SEQ ID NO: 65325 - RNA, 19 nt, synthetic construct
  misc_feature 1..19: note = siRNA antisense sequence
  source 1..19: mol_type = other RNA
atcaaataataaccgtgca

SEQ ID NO: 65326 - RNA, 19 nt, synthetic construct
  misc_feature 1..19: note = siRNA sense sequence
  source 1..19: mol_type = other RNA
gcacggttattatttgata

SEQ ID NO: 65327 - RNA, 19 nt, synthetic construct
  misc_feature 1..19: note = siRNA antisense sequence
  source 1..19: mol_type = other RNA
tatcaaataataaccgtgc

SEQ ID NO: 65328 - RNA, 19 nt, synthetic construct
  misc_feature 1..19: note = siRNA sense sequence
  source 1..19: mol_type = other RNA
cacggttattatttgatac

SEQ ID NO: 65329 - RNA, 19 nt, synthetic construct
  misc_feature 1..19: note = siRNA antisense sequence
  source 1..19: mol_type = other RNA
gtatcaaataataaccgtg

SEQ ID NO: 65330 - RNA, 19 nt, synthetic construct
  misc_feature 1..19: note = siRNA sense sequence
  source 1..19: mol_type = other RNA
tatttgatactaccagttc

SEQ ID NO: 65331 - RNA, 19 nt, synthetic construct
  misc_feature 1..19: note = siRNA antisense sequence
  source 1..19: mol_type = other RNA
gaactggtagtatcaaata

SEQ ID NO: 65332 - RNA, 19 nt, synthetic construct
  misc_feature 1..19: note = siRNA sense sequence
  source 1..19: mol_type = other RNA
atttgatactaccagttcc

SEQ ID NO: 65333 - RNA, 19 nt, synthetic construct
  misc_feature 1..19: note = siRNA antisense sequence
  source 1..19: mol_type = other RNA
ggaactggtagtatcaaat

SEQ ID NO: 65334 - RNA, 19 nt, synthetic construct
  misc_feature 1..19: note = siRNA sense sequence
  source 1..19: mol_type = other RNA
tttgatactaccagttcca

SEQ ID NO: 65335 - RNA, 19 nt, synthetic construct
  misc_feature 1..19: note = siRNA antisense sequence
  source 1..19: mol_type = other RNA
tggaactggtagtatcaaa

SEQ ID NO: 65336 - RNA, 19 nt, synthetic construct
  misc_feature 1..19: note = siRNA sense sequence
  source 1..19: mol_type = other RNA
ttgatactaccagttccat

SEQ ID NO: 65337 - RNA, 19 nt, synthetic construct
  misc_feature 1..19: note = siRNA antisense sequence
  source 1..19: mol_type = other RNA
atggaactggtagtatcaa

SEQ ID NO: 65338 - RNA, 19 nt, synthetic construct
  misc_feature 1..19: note = siRNA sense sequence
  source 1..19: mol_type = other RNA
tgatactaccagttccatt

SEQ ID NO: 65339 - RNA, 19 nt, synthetic construct
  misc_feature 1..19: note = siRNA antisense sequence
  source 1..19: mol_type = other RNA
aatggaactggtagtatca

SEQ ID NO: 65340 - RNA, 19 nt, synthetic construct
  misc_feature 1..19: note = siRNA sense sequence
  source 1..19: mol_type = other RNA
gatactaccagttccattt

SEQ ID NO: 65341 - RNA, 19 nt, synthetic construct
  misc_feature 1..19: note = siRNA antisense sequence
  source 1..19: mol_type = other RNA
aaatggaactggtagtatc

SEQ ID NO: 65342 - RNA, 19 nt, synthetic construct
  misc_feature 1..19: note = siRNA sense sequence
  source 1..19: mol_type = other RNA
atactaccagttccatttg

SEQ ID NO: 65343 - RNA, 19 nt, synthetic construct
  misc_feature 1..19: note = siRNA antisense sequence
  source 1..19: mol_type = other RNA
caaatggaactggtagtat

SEQ ID NO: 65344 - RNA, 19 nt, synthetic construct
  misc_feature 1..19: note = siRNA sense sequence
  source 1..19: mol_type = other RNA
tactaccagttccatttgg

SEQ ID NO: 65345 - RNA, 19 nt, synthetic construct
  misc_feature 1..19: note = siRNA antisense sequence
  source 1..19: mol_type = other RNA
ccaaatggaactggtagta

SEQ ID NO: 65346 - RNA, 19 nt, synthetic construct
  misc_feature 1..19: note = siRNA sense sequence
  source 1..19: mol_type = other RNA
actaccagttccatttgga

SEQ ID NO: 65347 - RNA, 19 nt, synthetic construct
  misc_feature 1..19: note = siRNA antisense sequence
  source 1..19: mol_type = other RNA
tccaaatggaactggtagt

SEQ ID NO: 65348 - RNA, 19 nt, synthetic construct
  misc_feature 1..19: note = siRNA sense sequence
  source 1..19: mol_type = other RNA
tgactagctctcattttga

SEQ ID NO: 65349 - RNA, 19 nt, synthetic construct
  misc_feature 1..19: note = siRNA antisense sequence
  source 1..19: mol_type = other RNA
tcaaaatgagagctagtca

SEQ ID NO: 65350 - RNA, 19 nt, synthetic construct
  misc_feature 1..19: note = siRNA sense sequence
  source 1..19: mol_type = other RNA
gactagctctcattttgat

SEQ ID NO: 65351 - RNA, 19 nt, synthetic construct
  misc_feature 1..19: note = siRNA antisense sequence
  source 1..19: mol_type = other RNA
atcaaaatgagagctagtc

SEQ ID NO: 65352 - RNA, 19 nt, synthetic construct
  misc_feature 1..19: note = siRNA sense sequence
  source 1..19: mol_type = other RNA
actagctctcattttgatt

SEQ ID NO: 65353 - RNA, 19 nt, synthetic construct
  misc_feature 1..19: note = siRNA antisense sequence
  source 1..19: mol_type = other RNA
aatcaaaatgagagctagt

SEQ ID NO: 65354 - RNA, 19 nt, synthetic construct
  misc_feature 1..19: note = siRNA sense sequence
  source 1..19: mol_type = other RNA
ctagctctcattttgatta

SEQ ID NO: 65355 - RNA, 19 nt, synthetic construct
  misc_feature 1..19: note = siRNA antisense sequence
  source 1..19: mol_type = other RNA
taatcaaaatgagagctag

SEQ ID NO: 65356 - RNA, 19 nt, synthetic construct
  misc_feature 1..19: note = siRNA sense sequence
  source 1..19: mol_type = other RNA
tagctctcattttgattag

SEQ ID NO: 65357 - RNA, 19 nt, synthetic construct
  misc_feature 1..19: note = siRNA antisense sequence
  source 1..19: mol_type = other RNA
ctaatcaaaatgagagcta

SEQ ID NO: 65358 - RNA, 19 nt, synthetic construct
  misc_feature 1..19: note = siRNA sense sequence
  source 1..19: mol_type = other RNA
agctctcattttgattagc

SEQ ID NO: 65359 - RNA, 19 nt, synthetic construct
  misc_feature 1..19: note = siRNA antisense sequence
  source 1..19: mol_type = other RNA
gctaatcaaaatgagagct

SEQ ID NO: 65360 - RNA, 19 nt, synthetic construct
  misc_feature 1..19: note = siRNA sense sequence
  source 1..19: mol_type = other RNA
gctctcattttgattagca

SEQ ID NO: 65361 - RNA, 19 nt, synthetic construct
  misc_feature 1..19: note = siRNA antisense sequence
  source 1..19: mol_type = other RNA
tgctaatcaaaatgagagc

SEQ ID NO: 65362 - RNA, 19 nt, synthetic construct
  misc_feature 1..19: note = siRNA sense sequence
  source 1..19: mol_type = other RNA
ctctcattttgattagcat

SEQ ID NO: 65363 - RNA, 19 nt, synthetic construct
  misc_feature 1..19: note = siRNA antisense sequence
  source 1..19: mol_type = other RNA
atgctaatcaaaatgagag

SEQ ID NO: 65364 - RNA, 19 nt, synthetic construct
  misc_feature 1..19: note = siRNA sense sequence
  source 1..19: mol_type = other RNA
aatcctatttgcttttcag

SEQ ID NO: 65365 - RNA, 19 nt, synthetic construct
  misc_feature 1..19: note = siRNA antisense sequence
  source 1..19: mol_type = other RNA
ctgaaaagcaaataggatt

SEQ ID NO: 65366 - RNA, 19 nt, synthetic construct
  misc_feature 1..19: note = siRNA sense sequence
  source 1..19: mol_type = other RNA
atcctatttgcttttcagt

SEQ ID NO: 65367 - RNA, 19 nt, synthetic construct
  misc_feature 1..19: note = siRNA antisense sequence
  source 1..19: mol_type = other RNA
actgaaaagcaaataggat

SEQ ID NO: 65368 - RNA, 19 nt, synthetic construct
  misc_feature 1..19: note = siRNA sense sequence
  source 1..19: mol_type = other RNA
tcctatttgcttttcagtc

SEQ ID NO: 65369 - RNA, 19 nt, synthetic construct
  misc_feature 1..19: note = siRNA antisense sequence
  source 1..19: mol_type = other RNA
gactgaaaagcaaatagga

SEQ ID NO: 65370 - RNA, 19 nt, synthetic construct
  misc_feature 1..19: note = siRNA sense sequence
  source 1..19: mol_type = other RNA
tttccagcttaaatcttac

SEQ ID NO: 65371 - RNA, 19 nt, synthetic construct
  misc_feature 1..19: note = siRNA antisense sequence
  source 1..19: mol_type = other RNA
gtaagatttaagctggaaa

SEQ ID NO: 65372 - RNA, 19 nt, synthetic construct
  misc_feature 1..19: note = siRNA sense sequence
  source 1..19: mol_type = other RNA
ttccagcttaaatcttact

SEQ ID NO: 65373 - RNA, 19 nt, synthetic construct
  misc_feature 1..19: note = siRNA antisense sequence
  source 1..19: mol_type = other RNA
agtaagatttaagctggaa

SEQ ID NO: 65374 - RNA, 19 nt, synthetic construct
  misc_feature 1..19: note = siRNA sense sequence
  source 1..19: mol_type = other RNA
tccagcttaaatcttacta

SEQ ID NO: 65375 - RNA, 19 nt, synthetic construct
  misc_feature 1..19: note = siRNA antisense sequence
  source 1..19: mol_type = other RNA
tagtaagatttaagctgga

SEQ ID NO: 65376 - RNA, 19 nt, synthetic construct
  misc_feature 1..19: note = siRNA sense sequence
  source 1..19: mol_type = other RNA
ccagcttaaatcttactat

SEQ ID NO: 65377 - RNA, 19 nt, synthetic construct
  misc_feature 1..19: note = siRNA antisense sequence
  source 1..19: mol_type = other RNA
atagtaagatttaagctgg

SEQ ID NO: 65378 - RNA, 19 nt, synthetic construct
  misc_feature 1..19: note = siRNA sense sequence
  source 1..19: mol_type = other RNA
aaatgcatctctggtttta

SEQ ID NO: 65379 - RNA, 19 nt, synthetic construct
  misc_feature 1..19: note = siRNA antisense sequence
  source 1..19: mol_type = other RNA
taaaaccagagatgcattt

SEQ ID NO: 65380 - RNA, 19 nt, synthetic construct
  misc_feature 1..19: note = siRNA sense sequence
  source 1..19: mol_type = other RNA
aatgcatctctggttttaa

SEQ ID NO: 65381 - RNA, 19 nt, synthetic construct
  misc_feature 1..19: note = siRNA antisense sequence
  source 1..19: mol_type = other RNA
ttaaaaccagagatgcatt

SEQ ID NO: 65382 - RNA, 19 nt, synthetic construct
  misc_feature 1..19: note = siRNA sense sequence
  source 1..19: mol_type = other RNA
atgcatctctggttttaag

SEQ ID NO: 65383 - RNA, 19 nt, synthetic construct
  misc_feature 1..19: note = siRNA antisense sequence
  source 1..19: mol_type = other RNA
cttaaaaccagagatgcat

SEQ ID NO: 65384 - RNA, 19 nt, synthetic construct
  misc_feature 1..19: note = siRNA sense sequence
  source 1..19: mol_type = other RNA
tgcatctctggttttaagt

SEQ ID NO: 65385 - RNA, 19 nt, synthetic construct
  misc_feature 1..19: note = siRNA antisense sequence
  source 1..19: mol_type = other RNA
acttaaaaccagagatgca

SEQ ID NO: 65386 - RNA, 19 nt, synthetic construct
  misc_feature 1..19: note = siRNA sense sequence
  source 1..19: mol_type = other RNA
atctctggttttaagtagc

SEQ ID NO: 65387 - RNA, 19 nt, synthetic construct
  misc_feature 1..19: note = siRNA antisense sequence
  source 1..19: mol_type = other RNA
gctacttaaaaccagagat

SEQ ID NO: 65388 - RNA, 19 nt, synthetic construct
  misc_feature 1..19: note = siRNA sense sequence
  source 1..19: mol_type = other RNA
tctctggttttaagtagca

SEQ ID NO: 65389 - RNA, 19 nt, synthetic construct
  misc_feature 1..19: note = siRNA antisense sequence
  source 1..19: mol_type = other RNA
tgctacttaaaaccagaga

SEQ ID NO: 65390 - RNA, 19 nt, synthetic construct
  misc_feature 1..19: note = siRNA sense sequence
  source 1..19: mol_type = other RNA
ctctggttttaagtagcag

SEQ ID NO: 65391 - RNA, 19 nt, synthetic construct
  misc_feature 1..19: note = siRNA antisense sequence
  source 1..19: mol_type = other RNA
ctgctacttaaaaccagag

SEQ ID NO: 65392 - RNA, 19 nt, synthetic construct
  misc_feature 1..19: note = siRNA sense sequence
  source 1..19: mol_type = other RNA
acattatgcatttcactct

SEQ ID NO: 65393 - RNA, 19 nt, synthetic construct
  misc_feature 1..19: note = siRNA antisense sequence
  source 1..19: mol_type = other RNA
agagtgaaatgcataatgt

SEQ ID NO: 65394 - RNA, 19 nt, synthetic construct
  misc_feature 1..19: note = siRNA sense sequence
  source 1..19: mol_type = other RNA
actctgaattttgtgacat

SEQ ID NO: 65395 - RNA, 19 nt, synthetic construct
  misc_feature 1..19: note = siRNA antisense sequence
  source 1..19: mol_type = other RNA
atgtcacaaaattcagagt

SEQ ID NO: 65396 - RNA, 19 nt, synthetic construct
  misc_feature 1..19: note = siRNA sense sequence
  source 1..19: mol_type = other RNA
ctctgaattttgtgacata

SEQ ID NO: 65397 - RNA, 19 nt, synthetic construct
  misc_feature 1..19: note = siRNA antisense sequence
  source 1..19: mol_type = other RNA
tatgtcacaaaattcagag

SEQ ID NO: 65398 - RNA, 19 nt, synthetic construct
  misc_feature 1..19: note = siRNA sense sequence
  source 1..19: mol_type = other RNA
tataattgttgatagtccc

SEQ ID NO: 65399 - RNA, 19 nt, synthetic construct
  misc_feature 1..19: note = siRNA antisense sequence
  source 1..19: mol_type = other RNA
gggactatcaacaattata

SEQ ID NO: 65400 - RNA, 19 nt, synthetic construct
  misc_feature 1..19: note = siRNA sense sequence
  source 1..19: mol_type = other RNA
taattgttgatagtccctt

SEQ ID NO: 65401 - RNA, 19 nt, synthetic construct
  misc_feature 1..19: note = siRNA antisense sequence
  source 1..19: mol_type = other RNA
aagggactatcaacaatta

SEQ ID NO: 65402 - RNA, 19 nt, synthetic construct
  misc_feature 1..19: note = siRNA sense sequence
  source 1..19: mol_type = other RNA
aattgttgatagtccctta

SEQ ID NO: 65403 - RNA, 19 nt, synthetic construct
  misc_feature 1..19: note = siRNA antisense sequence
  source 1..19: mol_type = other RNA
taagggactatcaacaatt

SEQ ID NO: 65404 - RNA, 19 nt, synthetic construct
  misc_feature 1..19: note = siRNA sense sequence
  source 1..19: mol_type = other RNA
tgttgatagtcccttaagc

SEQ ID NO: 65405 - RNA, 19 nt, synthetic construct
  misc_feature 1..19: note = siRNA antisense sequence
  source 1..19: mol_type = other RNA
gcttaagggactatcaaca

SEQ ID NO: 65406 - RNA, 19 nt, synthetic construct
  misc_feature 1..19: note = siRNA sense sequence
  source 1..19: mol_type = other RNA
gttgatagtcccttaagca

SEQ ID NO: 65407 - RNA, 19 nt, synthetic construct
  misc_feature 1..19: note = siRNA antisense sequence
  source 1..19: mol_type = other RNA
tgcttaagggactatcaac

SEQ ID NO: 65408 - RNA, 19 nt, synthetic construct
  misc_feature 1..19: note = siRNA sense sequence
  source 1..19: mol_type = other RNA
ttgatagtcccttaagcag

SEQ ID NO: 65409 - RNA, 19 nt, synthetic construct
  misc_feature 1..19: note = siRNA antisense sequence
  source 1..19: mol_type = other RNA
ctgcttaagggactatcaa

SEQ ID NO: 65410 - RNA, 19 nt, synthetic construct
  misc_feature 1..19: note = siRNA sense sequence
  source 1..19: mol_type = other RNA
tgatagtcccttaagcagt

SEQ ID NO: 65411 - RNA, 19 nt, synthetic construct
  misc_feature 1..19: note = siRNA antisense sequence
  source 1..19: mol_type = other RNA
actgcttaagggactatca

SEQ ID NO: 65412 - RNA, 19 nt, synthetic construct
  misc_feature 1..19: note = siRNA sense sequence
  source 1..19: mol_type = other RNA
tcccttaagcagtgactgg

SEQ ID NO: 65413 - RNA, 19 nt, synthetic construct
  misc_feature 1..19: note = siRNA antisense sequence
  source 1..19: mol_type = other RNA
ccagtcactgcttaaggga

SEQ ID NO: 65414 - RNA, 19 nt, synthetic construct
  misc_feature 1..19: note = siRNA sense sequence
  source 1..19: mol_type = other RNA
cccttaagcagtgactggt

SEQ ID NO: 65415 - RNA, 19 nt, synthetic construct
  misc_feature 1..19: note = siRNA antisense sequence
  source 1..19: mol_type = other RNA
accagtcactgcttaaggg

SEQ ID NO: 65416 - RNA, 19 nt, synthetic construct
  misc_feature 1..19: note = siRNA sense sequence
  source 1..19: mol_type = other RNA
ccttaagcagtgactggta

SEQ ID NO: 65417 - RNA, 19 nt, synthetic construct
  misc_feature 1..19: note = siRNA antisense sequence
  source 1..19: mol_type = other RNA
taccagtcactgcttaagg

SEQ ID NO: 65418 - RNA, 19 nt, synthetic construct
  misc_feature 1..19: note = siRNA sense sequence
  source 1..19: mol_type = other RNA
cttaagcagtgactggtat

SEQ ID NO: 65419 - RNA, 19 nt, synthetic construct
  misc_feature 1..19: note = siRNA antisense sequence
  source 1..19: mol_type = other RNA
ataccagtcactgcttaag

SEQ ID NO: 65420 - RNA, 19 nt, synthetic construct
  misc_feature 1..19: note = siRNA sense sequence
  source 1..19: mol_type = other RNA
ttaagcagtgactggtatt

SEQ ID NO: 65421 - RNA, 19 nt, synthetic construct
  misc_feature 1..19: note = siRNA antisense sequence
  source 1..19: mol_type = other RNA
aataccagtcactgcttaa

SEQ ID NO: 65422 - RNA, 19 nt, synthetic construct
  misc_feature 1..19: note = siRNA sense sequence
  source 1..19: mol_type = other RNA
taagcagtgactggtattg

SEQ ID NO: 65423 - RNA, 19 nt, synthetic construct
  misc_feature 1..19: note = siRNA antisense sequence
  source 1..19: mol_type = other RNA
caataccagtcactgctta

SEQ ID NO: 65424 - RNA, 19 nt, synthetic construct
  misc_feature 1..19: note = siRNA sense sequence
  source 1..19: mol_type = other RNA
aagcagtgactggtattgc

SEQ ID NO: 65425 - RNA, 19 nt, synthetic construct
  misc_feature 1..19: note = siRNA antisense sequence
  source 1..19: mol_type = other RNA
gcaataccagtcactgctt

SEQ ID NO: 65426 - RNA, 19 nt, synthetic construct
  misc_feature 1..19: note = siRNA sense sequence
  source 1..19: mol_type = other RNA
cagtgactggtattgctct

SEQ ID NO: 65427 - RNA, 19 nt, synthetic construct
  misc_feature 1..19: note = siRNA antisense sequence
  source 1..19: mol_type = other RNA
agagcaataccagtcactg

SEQ ID NO: 65428 - RNA, 19 nt, synthetic construct
  misc_feature 1..19: note = siRNA sense sequence
  source 1..19: mol_type = other RNA
agtgactggtattgctctc

SEQ ID NO: 65429 - RNA, 19 nt, synthetic construct
  misc_feature 1..19: note = siRNA antisense sequence
  source 1..19: mol_type = other RNA
gagagcaataccagtcact

SEQ ID NO: 65430 - RNA, 19 nt, synthetic construct
  misc_feature 1..19: note = siRNA sense sequence
  source 1..19: mol_type = other RNA
gtgactggtattgctctcg

SEQ ID NO: 65431 - RNA, 19 nt, synthetic construct
  misc_feature 1..19: note = siRNA antisense sequence
  source 1..19: mol_type = other RNA
cgagagcaataccagtcac

SEQ ID NO: 65432 - RNA, 19 nt, synthetic construct
  misc_feature 1..19: note = siRNA sense sequence
  source 1..19: mol_type = other RNA
tgactggtattgctctcgg

SEQ ID NO: 65433 - RNA, 19 nt, synthetic construct
  misc_feature 1..19: note = siRNA antisense sequence
  source 1..19: mol_type = other RNA
ccgagagcaataccagtca

SEQ ID NO: 65434 - RNA, 19 nt, synthetic construct
  misc_feature 1..19: note = siRNA sense sequence
  source 1..19: mol_type = other RNA
gactggtattgctctcggt

SEQ ID NO: 65435 - RNA, 19 nt, synthetic construct
  misc_feature 1..19: note = siRNA antisense sequence
  source 1..19: mol_type = other RNA
accgagagcaataccagtc

SEQ ID NO: 65436 - RNA, 19 nt, synthetic construct
  misc_feature 1..19: note = siRNA sense sequence
  source 1..19: mol_type = other RNA
actggtattgctctcggta

SEQ ID NO: 65437 - RNA, 19 nt, synthetic construct
  misc_feature 1..19: note = siRNA antisense sequence
  source 1..19: mol_type = other RNA
taccgagagcaataccagt

SEQ ID NO: 65438 - RNA, 19 nt, synthetic construct
  misc_feature 1..19: note = siRNA sense sequence
  source 1..19: mol_type = other RNA
ctggtattgctctcggtaa

SEQ ID NO: 65439 - RNA, 19 nt, synthetic construct
  misc_feature 1..19: note = siRNA antisense sequence
  source 1..19: mol_type = other RNA
ttaccgagagcaataccag

SEQ ID NO: 65440 - RNA, 19 nt, synthetic construct
  misc_feature 1..19: note = siRNA sense sequence
  source 1..19: mol_type = other RNA
tggtattgctctcggtaag

SEQ ID NO: 65441 - RNA, 19 nt, synthetic construct
  misc_feature 1..19: note = siRNA antisense sequence
  source 1..19: mol_type = other RNA
cttaccgagagcaatacca

SEQ ID NO: 65442 - RNA, 19 nt, synthetic construct
  misc_feature 1..19: note = siRNA sense sequence
  source 1..19: mol_type = other RNA
ggtattgctctcggtaagt

SEQ ID NO: 65443 - RNA, 19 nt, synthetic construct
  misc_feature 1..19: note = siRNA antisense sequence
  source 1..19: mol_type = other RNA
acttaccgagagcaatacc

SEQ ID NO: 65444 - RNA, 19 nt, synthetic construct
  misc_feature 1..19: note = siRNA sense sequence
  source 1..19: mol_type = other RNA
gtattgctctcggtaagtg

SEQ ID NO: 65445 - RNA, 19 nt, synthetic construct
  misc_feature 1..19: note = siRNA antisense sequence
  source 1..19: mol_type = other RNA
cacttaccgagagcaatac

SEQ ID NO: 65446 - RNA, 19 nt, synthetic construct
  misc_feature 1..19: note = siRNA sense sequence
  source 1..19: mol_type = other RNA
tattgctctcggtaagtga

SEQ ID NO: 65447 - RNA, 19 nt, synthetic construct
  misc_feature 1..19: note = siRNA antisense sequence
  source 1..19: mol_type = other RNA
tcacttaccgagagcaata

SEQ ID NO: 65448 - RNA, 19 nt, synthetic construct
  misc_feature 1..19: note = siRNA sense sequence
  source 1..19: mol_type = other RNA
gctctcggtaagtgacaga

SEQ ID NO: 65449 - RNA, 19 nt, synthetic construct
  misc_feature 1..19: note = siRNA antisense sequence
  source 1..19: mol_type = other RNA
tctgtcacttaccgagagc

SEQ ID NO: 65450 - RNA, 19 nt, synthetic construct
  misc_feature 1..19: note = siRNA sense sequence
  source 1..19: mol_type = other RNA
ctctcggtaagtgacagac

SEQ ID NO: 65451 - RNA, 19 nt, synthetic construct
  misc_feature 1..19: note = siRNA antisense sequence
  source 1..19: mol_type = other RNA
gtctgtcacttaccgagag

SEQ ID NO: 65452 - RNA, 19 nt, synthetic construct
  misc_feature 1..19: note = siRNA sense sequence
  source 1..19: mol_type = other RNA
tctcggtaagtgacagaca

SEQ ID NO: 65453 - RNA, 19 nt, synthetic construct
  misc_feature 1..19: note = siRNA antisense sequence
  source 1..19: mol_type = other RNA
tgtctgtcacttaccgaga

SEQ ID NO: 65454 - RNA, 19 nt, synthetic construct
  misc_feature 1..19: note = siRNA sense sequence
  source 1..19: mol_type = other RNA
ctcggtaagtgacagacac

SEQ ID NO: 65455 - RNA, 19 nt, synthetic construct
  misc_feature 1..19: note = siRNA antisense sequence
  source 1..19: mol_type = other RNA
gtgtctgtcacttaccgag

SEQ ID NO: 65456 - RNA, 19 nt, synthetic construct
  misc_feature 1..19: note = siRNA sense sequence
  source 1..19: mol_type = other RNA
gtgacagacactatttgct

SEQ ID NO: 65457 - RNA, 19 nt, synthetic construct
  misc_feature 1..19: note = siRNA antisense sequence
  source 1..19: mol_type = other RNA
agcaaatagtgtctgtcac

SEQ ID NO: 65458 - RNA, 19 nt, synthetic construct
  misc_feature 1..19: note = siRNA sense sequence
  source 1..19: mol_type = other RNA
tgacagacactatttgctt

SEQ ID NO: 65459 - RNA, 19 nt, synthetic construct
  misc_feature 1..19: note = siRNA antisense sequence
  source 1..19: mol_type = other RNA
aagcaaatagtgtctgtca

SEQ ID NO: 65460 - RNA, 19 nt, synthetic construct
  misc_feature 1..19: note = siRNA sense sequence
  source 1..19: mol_type = other RNA
gacagacactatttgcttc

SEQ ID NO: 65461 - RNA, 19 nt, synthetic construct
  misc_feature 1..19: note = siRNA antisense sequence
  source 1..19: mol_type = other RNA
gaagcaaatagtgtctgtc

SEQ ID NO: 65462 - RNA, 19 nt, synthetic construct
  misc_feature 1..19: note = siRNA sense sequence
  source 1..19: mol_type = other RNA
ttagtcttattcatccttg

SEQ ID NO: 65463 - RNA, 19 nt, synthetic construct
  misc_feature 1..19: note = siRNA antisense sequence
  source 1..19: mol_type = other RNA
caaggatgaataagactaa

SEQ ID NO: 65464 - RNA, 19 nt, synthetic construct
  misc_feature 1..19: note = siRNA sense sequence
  source 1..19: mol_type = other RNA
tagtcttattcatccttgt

SEQ ID NO: 65465 - RNA, 19 nt, synthetic construct
  misc_feature 1..19: note = siRNA antisense sequence
  source 1..19: mol_type = other RNA
acaaggatgaataagacta

SEQ ID NO: 65466 - RNA, 19 nt, synthetic construct
  misc_feature 1..19: note = siRNA sense sequence
  source 1..19: mol_type = other RNA
agtcttattcatccttgta

SEQ ID NO: 65467 - RNA, 19 nt, synthetic construct
  misc_feature 1..19: note = siRNA antisense sequence
  source 1..19: mol_type = other RNA
tacaaggatgaataagact

SEQ ID NO: 65468 - RNA, 19 nt, synthetic construct
  misc_feature 1..19: note = siRNA sense sequence
  source 1..19: mol_type = other RNA
ttcatccttgtaagacact

SEQ ID NO: 65469 - RNA, 19 nt, synthetic construct
  misc_feature 1..19: note = siRNA antisense sequence
  source 1..19: mol_type = other RNA
agtgtcttacaaggatgaa

SEQ ID NO: 65470 - RNA, 19 nt, synthetic construct
  misc_feature 1..19: note = siRNA sense sequence
  source 1..19: mol_type = other RNA
tcatccttgtaagacactg

SEQ ID NO: 65471 - RNA, 19 nt, synthetic construct
  misc_feature 1..19: note = siRNA antisense sequence
  source 1..19: mol_type = other RNA
cagtgtcttacaaggatga

SEQ ID NO: 65472 - RNA, 19 nt, synthetic construct
  misc_feature 1..19: note = siRNA sense sequence
  source 1..19: mol_type = other RNA
ccttgtaagacactgggaa

SEQ ID NO: 65473 - RNA, 19 nt, synthetic construct
  misc_feature 1..19: note = siRNA antisense sequence
  source 1..19: mol_type = other RNA
ttcccagtgtcttacaagg

SEQ ID NO: 65474 - RNA, 19 nt, synthetic construct
  misc_feature 1..19: note = siRNA sense sequence
  source 1..19: mol_type = other RNA
caattcacatgccgcattt

SEQ ID NO: 65475 - RNA, 19 nt, synthetic construct
  misc_feature 1..19: note = siRNA antisense sequence
  source 1..19: mol_type = other RNA
aaatgcggcatgtgaattg

SEQ ID NO: 65476 - RNA, 19 nt, synthetic construct
  misc_feature 1..19: note = siRNA sense sequence
  source 1..19: mol_type = other RNA
attcacatgccgcatttga

SEQ ID NO: 65477 - RNA, 19 nt, synthetic construct
  misc_feature 1..19: note = siRNA antisense sequence
  source 1..19: mol_type = other RNA
tcaaatgcggcatgtgaat

SEQ ID NO: 65478 - RNA, 19 nt, synthetic construct
  misc_feature 1..19: note = siRNA sense sequence
  source 1..19: mol_type = other RNA
ttcacatgccgcatttgac

SEQ ID NO: 65479 - RNA, 19 nt, synthetic construct
  misc_feature 1..19: note = siRNA antisense sequence
  source 1..19: mol_type = other RNA
gtcaaatgcggcatgtgaa

SEQ ID NO: 65480 - RNA, 19 nt, synthetic construct
  misc_feature 1..19: note = siRNA sense sequence
  source 1..19: mol_type = other RNA
tcacatgccgcatttgact

SEQ ID NO: 65481 - RNA, 19 nt, synthetic construct
  misc_feature 1..19: note = siRNA antisense sequence
  source 1..19: mol_type = other RNA
agtcaaatgcggcatgtga

SEQ ID NO: 65482 - RNA, 19 nt, synthetic construct
  misc_feature 1..19: note = siRNA sense sequence
  source 1..19: mol_type = other RNA
cacatgccgcatttgactt

SEQ ID NO: 65483 - RNA, 19 nt, synthetic construct
  misc_feature 1..19: note = siRNA antisense sequence
  source 1..19: mol_type = other RNA
aagtcaaatgcggcatgtg

SEQ ID NO: 65484 - RNA, 19 nt, synthetic construct
  misc_feature 1..19: note = siRNA sense sequence
  source 1..19: mol_type = other RNA
acatgccgcatttgacttt

SEQ ID NO: 65485 - RNA, 19 nt, synthetic construct
  misc_feature 1..19: note = siRNA antisense sequence
  source 1..19: mol_type = other RNA
aaagtcaaatgcggcatgt

SEQ ID NO: 65486 - RNA, 19 nt, synthetic construct
  misc_feature 1..19: note = siRNA sense sequence
  source 1..19: mol_type = other RNA
catgccgcatttgacttta

SEQ ID NO: 65487 - RNA, 19 nt, synthetic construct
  misc_feature 1..19: note = siRNA antisense sequence
  source 1..19: mol_type = other RNA
taaagtcaaatgcggcatg

SEQ ID NO: 65488 - RNA, 19 nt, synthetic construct
  misc_feature 1..19: note = siRNA sense sequence
  source 1..19: mol_type = other RNA
ccgcatttgactttatcac

SEQ ID NO: 65489 - RNA, 19 nt, synthetic construct
  misc_feature 1..19: note = siRNA antisense sequence
  source 1..19: mol_type = other RNA
gtgataaagtcaaatgcgg

SEQ ID NO: 65490 - RNA, 19 nt, synthetic construct
  misc_feature 1..19: note = siRNA sense sequence
  source 1..19: mol_type = other RNA
cacttataactatcacggt

SEQ ID NO: 65491 - RNA, 19 nt, synthetic construct
  misc_feature 1..19: note = siRNA antisense sequence
  source 1..19: mol_type = other RNA
accgtgatagttataagtg

SEQ ID NO: 65492 - RNA, 19 nt, synthetic construct
  misc_feature 1..19: note = siRNA sense sequence
  source 1..19: mol_type = other RNA
acttataactatcacggta

SEQ ID NO: 65493 - RNA, 19 nt, synthetic construct
  misc_feature 1..19: note = siRNA antisense sequence
  source 1..19: mol_type = other RNA
taccgtgatagttataagt

SEQ ID NO: 65494 - RNA, 19 nt, synthetic construct
  misc_feature 1..19: note = siRNA sense sequence
  source 1..19: mol_type = other RNA
cttataactatcacggtaa

SEQ ID NO: 65495 - RNA, 19 nt, synthetic construct
  misc_feature 1..19: note = siRNA antisense sequence
  source 1..19: mol_type = other RNA
ttaccgtgatagttataag

SEQ ID NO: 65496 - RNA, 19 nt, synthetic construct
  misc_feature 1..19: note = siRNA sense sequence
  source 1..19: mol_type = other RNA
ataactatcacggtaaatg

SEQ ID NO: 65497 - RNA, 19 nt, synthetic construct
  misc_feature 1..19: note = siRNA antisense sequence
  source 1..19: mol_type = other RNA
catttaccgtgatagttat

SEQ ID NO: 65498 - RNA, 19 nt, synthetic construct
  misc_feature 1..19: note = siRNA sense sequence
  source 1..19: mol_type = other RNA
taactatcacggtaaatgg

SEQ ID NO: 65499 - RNA, 19 nt, synthetic construct
  misc_feature 1..19: note = siRNA antisense sequence
  source 1..19: mol_type = other RNA
ccatttaccgtgatagtta

SEQ ID NO: 65500 - RNA, 19 nt, synthetic construct
  misc_feature 1..19: note = siRNA sense sequence
  source 1..19: mol_type = other RNA
aactatcacggtaaatgga

SEQ ID NO: 65501 - RNA, 19 nt, synthetic construct
  misc_feature 1..19: note = siRNA antisense sequence
  source 1..19: mol_type = other RNA
tccatttaccgtgatagtt

SEQ ID NO: 65502 - RNA, 19 nt, synthetic construct
  misc_feature 1..19: note = siRNA sense sequence
  source 1..19: mol_type = other RNA
actatcacggtaaatggat

SEQ ID NO: 65503 - RNA, 19 nt, synthetic construct
  misc_feature 1..19: note = siRNA antisense sequence
  source 1..19: mol_type = other RNA
atccatttaccgtgatagt

SEQ ID NO: 65504 - RNA, 19 nt, synthetic construct
  misc_feature 1..19: note = siRNA sense sequence
  source 1..19: mol_type = other RNA
ctatcacggtaaatggatg

SEQ ID NO: 65505 - RNA, 19 nt, synthetic construct
  misc_feature 1..19: note = siRNA antisense sequence
  source 1..19: mol_type = other RNA
catccatttaccgtgatag

SEQ ID NO: 65506 - RNA, 19 nt, synthetic construct
  misc_feature 1..19: note = siRNA sense sequence
  source 1..19: mol_type = other RNA
tatcacggtaaatggatgt

SEQ ID NO: 65507 - RNA, 19 nt, synthetic construct
  misc_feature 1..19: note = siRNA antisense sequence
  source 1..19: mol_type = other RNA
acatccatttaccgtgata

SEQ ID NO: 65508 - RNA, 19 nt, synthetic construct
  misc_feature 1..19: note = siRNA sense sequence
  source 1..19: mol_type = other RNA
atcacggtaaatggatgtt

SEQ ID NO: 65509 - RNA, 19 nt, synthetic construct
  misc_feature 1..19: note = siRNA antisense sequence
  source 1..19: mol_type = other RNA
aacatccatttaccgtgat

SEQ ID NO: 65510 - RNA, 19 nt, synthetic construct
  misc_feature 1..19: note = siRNA sense sequence
  source 1..19: mol_type = other RNA
tcacggtaaatggatgttt

SEQ ID NO: 65511 - RNA, 19 nt, synthetic construct
  misc_feature 1..19: note = siRNA antisense sequence
  source 1..19: mol_type = other RNA
aaacatccatttaccgtga

SEQ ID NO: 65512 - RNA, 19 nt, synthetic construct
  misc_feature 1..19: note = siRNA sense sequence
  source 1..19: mol_type = other RNA
cacggtaaatggatgtttt

SEQ ID NO: 65513 - RNA, 19 nt, synthetic construct
  misc_feature 1..19: note = siRNA antisense sequence
  source 1..19: mol_type = other RNA
aaaacatccatttaccgtg

SEQ ID NO: 65514 - RNA, 19 nt, synthetic construct
  misc_feature 1..19: note = siRNA sense sequence
  source 1..19: mol_type = other RNA
caaatgatgcagttgtaac

SEQ ID NO: 65515 - RNA, 19 nt, synthetic construct
  misc_feature 1..19: note = siRNA antisense sequence
  source 1..19: mol_type = other RNA
gttacaactgcatcatttg

SEQ ID NO: 65516 - RNA, 19 nt, synthetic construct
  misc_feature 1..19: note = siRNA sense sequence
  source 1..19: mol_type = other RNA
aaatgatgcagttgtaact

SEQ ID NO: 65517 - RNA, 19 nt, synthetic construct
  misc_feature 1..19: note = siRNA antisense sequence
  source 1..19: mol_type = other RNA
agttacaactgcatcattt

SEQ ID NO: 65518 - RNA, 19 nt, synthetic construct
  misc_feature 1..19: note = siRNA sense sequence
  source 1..19: mol_type = other RNA
aatgatgcagttgtaactt

SEQ ID NO: 65519 - RNA, 19 nt, synthetic construct
  misc_feature 1..19: note = siRNA antisense sequence
  source 1..19: mol_type = other RNA
aagttacaactgcatcatt

SEQ ID NO: 65520 - RNA, 19 nt, synthetic construct
  misc_feature 1..19: note = siRNA sense sequence
  source 1..19: mol_type = other RNA
atgatgcagttgtaacttt

SEQ ID NO: 65521 - RNA, 19 nt, synthetic construct
  misc_feature 1..19: note = siRNA antisense sequence
  source 1..19: mol_type = other RNA
aaagttacaactgcatcat

SEQ ID NO: 65522 - RNA, 19 nt, synthetic construct
  misc_feature 1..19: note = siRNA sense sequence
  source 1..19: mol_type = other RNA
tgatgcagttgtaactttc

SEQ ID NO: 65523 - RNA, 19 nt, synthetic construct
  misc_feature 1..19: note = siRNA antisense sequence
  source 1..19: mol_type = other RNA
gaaagttacaactgcatca

SEQ ID NO: 65524 - RNA, 19 nt, synthetic construct
  misc_feature 1..19: note = siRNA sense sequence
  source 1..19: mol_type = other RNA
gatgcagttgtaactttcc

SEQ ID NO: 65525 - RNA, 19 nt, synthetic construct
  misc_feature 1..19: note = siRNA antisense sequence
  source 1..19: mol_type = other RNA
ggaaagttacaactgcatc

SEQ ID NO: 65526 - RNA, 19 nt, synthetic construct
  misc_feature 1..19: note = siRNA sense sequence
  source 1..19: mol_type = other RNA
tgtaactttcctccttaaa

SEQ ID NO: 65527 - RNA, 19 nt, synthetic construct
  misc_feature 1..19: note = siRNA antisense sequence
  source 1..19: mol_type = other RNA
tttaaggaggaaagttaca

SEQ ID NO: 65528 - RNA, 19 nt, synthetic construct
  misc_feature 1..19: note = siRNA sense sequence
  source 1..19: mol_type = other RNA
gtaactttcctccttaaaa

SEQ ID NO: 65529 - RNA, 19 nt, synthetic construct
  misc_feature 1..19: note = siRNA antisense sequence
  source 1..19: mol_type = other RNA
ttttaaggaggaaagttac

SEQ ID NO: 65530 - RNA, 19 nt, synthetic construct
  misc_feature 1..19: note = siRNA sense sequence
  source 1..19: mol_type = other RNA
ttcctccttaaaagctgac

SEQ ID NO: 65531 - RNA, 19 nt, synthetic construct
  misc_feature 1..19: note = siRNA antisense sequence
  source 1..19: mol_type = other RNA
gtcagcttttaaggaggaa

SEQ ID NO: 65532 - RNA, 19 nt, synthetic construct
  misc_feature 1..19: note = siRNA sense sequence
  source 1..19: mol_type = other RNA
cctccttaaaagctgacat

SEQ ID NO: 65533 - RNA, 19 nt, synthetic construct
  misc_feature 1..19: note = siRNA antisense sequence
  source 1..19: mol_type = other RNA
atgtcagcttttaaggagg

SEQ ID NO: 65534 - RNA, 19 nt, synthetic construct
  misc_feature 1..19: note = siRNA sense sequence
  source 1..19: mol_type = other RNA
ctccttaaaagctgacatt

SEQ ID NO: 65535 - RNA, 19 nt, synthetic construct
  misc_feature 1..19: note = siRNA antisense sequence
  source 1..19: mol_type = other RNA
aatgtcagcttttaaggag

SEQ ID NO: 65536 - RNA, 19 nt, synthetic construct
  misc_feature 1..19: note = siRNA sense sequence
  source 1..19: mol_type = other RNA
atgcagctgatatctgaag

SEQ ID NO: 65537 - RNA, 19 nt, synthetic construct
  misc_feature 1..19: note = siRNA antisense sequence
  source 1..19: mol_type = other RNA
cttcagatatcagctgcat

SEQ ID NO: 65538 - RNA, 19 nt, synthetic construct
  misc_feature 1..19: note = siRNA sense sequence
  source 1..19: mol_type = other RNA
tgcagctgatatctgaaga

SEQ ID NO: 65539 - RNA, 19 nt, synthetic construct
  misc_feature 1..19: note = siRNA antisense sequence
  source 1..19: mol_type = other RNA
tcttcagatatcagctgca

SEQ ID NO: 65540 - RNA, 19 nt, synthetic construct
  misc_feature 1..19: note = siRNA sense sequence
  source 1..19: mol_type = other RNA
cagctgatatctgaagagc

SEQ ID NO: 65541 - RNA, 19 nt, synthetic construct
  misc_feature 1..19: note = siRNA antisense sequence
  source 1..19: mol_type = other RNA
gctcttcagatatcagctg

SEQ ID NO: 65542 - RNA, 19 nt, synthetic construct
  misc_feature 1..19: note = siRNA sense sequence
  source 1..19: mol_type = other RNA
agctgatatctgaagagca

SEQ ID NO: 65543 - RNA, 19 nt, synthetic construct
  misc_feature 1..19: note = siRNA antisense sequence
  source 1..19: mol_type = other RNA
tgctcttcagatatcagct

SEQ ID NO: 65544 - RNA, 19 nt, synthetic construct
  misc_feature 1..19: note = siRNA sense sequence
  source 1..19: mol_type = other RNA
gctgatatctgaagagcag

SEQ ID NO: 65545 - RNA, 19 nt, synthetic construct
  misc_feature 1..19: note = siRNA antisense sequence
  source 1..19: mol_type = other RNA
ctgctcttcagatatcagc

SEQ ID NO: 65546 - RNA, 19 nt, synthetic construct
  misc_feature 1..19: note = siRNA sense sequence
  source 1..19: mol_type = other RNA
ctgatatctgaagagcagc

SEQ ID NO: 65547 - RNA, 19 nt, synthetic construct
  misc_feature 1..19: note = siRNA antisense sequence
  source 1..19: mol_type = other RNA
gctgctcttcagatatcag

SEQ ID NO: 65548 - RNA, 19 nt, synthetic construct
  misc_feature 1..19: note = siRNA sense sequence
  source 1..19: mol_type = other RNA
tatctgaagagcagccgca

SEQ ID NO: 65549 - RNA, 19 nt, synthetic construct
  misc_feature 1..19: note = siRNA antisense sequence
  source 1..19: mol_type = other RNA
tgcggctgctcttcagata

SEQ ID NO: 65550 - RNA, 19 nt, synthetic construct
  misc_feature 1..19: note = siRNA sense sequence
  source 1..19: mol_type = other RNA
atctgaagagcagccgcaa

SEQ ID NO: 65551 - RNA, 19 nt, synthetic construct
  misc_feature 1..19: note = siRNA antisense sequence
  source 1..19: mol_type = other RNA
ttgcggctgctcttcagat

SEQ ID NO: 65552 - RNA, 19 nt, synthetic construct
  misc_feature 1..19: note = siRNA sense sequence
  source 1..19: mol_type = other RNA
caaattcagacttgagtcc

SEQ ID NO: 65553 - RNA, 19 nt, synthetic construct
  misc_feature 1..19: note = siRNA antisense sequence
  source 1..19: mol_type = other RNA
ggactcaagtctgaatttg

SEQ ID NO: 65554 - RNA, 19 nt, synthetic construct
  misc_feature 1..19: note = siRNA sense sequence
  source 1..19: mol_type = other RNA
aaattcagacttgagtcct

SEQ ID NO: 65555 - RNA, 19 nt, synthetic construct
  misc_feature 1..19: note = siRNA antisense sequence
  source 1..19: mol_type = other RNA
aggactcaagtctgaattt

SEQ ID NO: 65556 - RNA, 19 nt, synthetic construct
  misc_feature 1..19: note = siRNA sense sequence
  source 1..19: mol_type = other RNA
aattcagacttgagtcctc

SEQ ID NO: 65557 - RNA, 19 nt, synthetic construct
  misc_feature 1..19: note = siRNA antisense sequence
  source 1..19: mol_type = other RNA
gaggactcaagtctgaatt

SEQ ID NO: 65558 - RNA, 19 nt, synthetic construct
  misc_feature 1..19: note = siRNA sense sequence
  source 1..19: mol_type = other RNA
cagacttgagtcctcagta

SEQ ID NO: 65559 - RNA, 19 nt, synthetic construct
  misc_feature 1..19: note = siRNA antisense sequence
  source 1..19: mol_type = other RNA
tactgaggactcaagtctg

SEQ ID NO: 65560 - RNA, 19 nt, synthetic construct
  misc_feature 1..19: note = siRNA sense sequence
  source 1..19: mol_type = other RNA
agacttgagtcctcagtaa

SEQ ID NO: 65561 - RNA, 19 nt, synthetic construct
  misc_feature 1..19: note = siRNA antisense sequence
  source 1..19: mol_type = other RNA
ttactgaggactcaagtct

SEQ ID NO: 65562 - RNA, 19 nt, synthetic construct
  misc_feature 1..19: note = siRNA sense sequence
  source 1..19: mol_type = other RNA
gacttgagtcctcagtaaa

SEQ ID NO: 65563 - RNA, 19 nt, synthetic construct
  misc_feature 1..19: note = siRNA antisense sequence
  source 1..19: mol_type = other RNA
tttactgaggactcaagtc

SEQ ID NO: 65564 - RNA, 19 nt, synthetic construct
  misc_feature 1..19: note = siRNA sense sequence
  source 1..19: mol_type = other RNA
acttgagtcctcagtaaaa

SEQ ID NO: 65565 - RNA, 19 nt, synthetic construct
  misc_feature 1..19: note = siRNA antisense sequence
  source 1..19: mol_type = other RNA
ttttactgaggactcaagt

SEQ ID NO: 65566 - RNA, 19 nt, synthetic construct
  misc_feature 1..19: note = siRNA sense sequence
  source 1..19: mol_type = other RNA
aattaataagccaaggtga

SEQ ID NO: 65567 - RNA, 19 nt, synthetic construct
  misc_feature 1..19: note = siRNA antisense sequence
  source 1..19: mol_type = other RNA
tcaccttggcttattaatt

SEQ ID NO: 65568 - RNA, 19 nt, synthetic construct
  misc_feature 1..19: note = siRNA sense sequence
  source 1..19: mol_type = other RNA
cacatgcaggcacttcagc

SEQ ID NO: 65569 - RNA, 19 nt, synthetic construct
  misc_feature 1..19: note = siRNA antisense sequence
  source 1..19: mol_type = other RNA
gctgaagtgcctgcatgtg

SEQ ID NO: 65570 - RNA, 19 nt, synthetic construct
  misc_feature 1..19: note = siRNA sense sequence
  source 1..19: mol_type = other RNA
tgcaggcacttcagcatga

SEQ ID NO: 65571 - RNA, 19 nt, synthetic construct
  misc_feature 1..19: note = siRNA antisense sequence
  source 1..19: mol_type = other RNA
tcatgctgaagtgcctgca

SEQ ID NO: 65572 - RNA, 19 nt, synthetic construct
  misc_feature 1..19: note = siRNA sense sequence
  source 1..19: mol_type = other RNA
gcaggcacttcagcatgat

SEQ ID NO: 65573 - RNA, 19 nt, synthetic construct
  misc_feature 1..19: note = siRNA antisense sequence
  source 1..19: mol_type = other RNA
atcatgctgaagtgcctgc

SEQ ID NO: 65574 - RNA, 19 nt, synthetic construct
  misc_feature 1..19: note = siRNA sense sequence
  source 1..19: mol_type = other RNA
caggcacttcagcatgatc

SEQ ID NO: 65575 - RNA, 19 nt, synthetic construct
  misc_feature 1..19: note = siRNA antisense sequence
  source 1..19: mol_type = other RNA
gatcatgctgaagtgcctg

SEQ ID NO: 65576 - RNA, 19 nt, synthetic construct
  misc_feature 1..19: note = siRNA sense sequence
  source 1..19: mol_type = other RNA
aggcacttcagcatgatct

SEQ ID NO: 65577 - RNA, 19 nt, synthetic construct
  misc_feature 1..19: note = siRNA antisense sequence
  source 1..19: mol_type = other RNA
agatcatgctgaagtgcct

SEQ ID NO: 65578 - RNA, 19 nt, synthetic construct
  misc_feature 1..19: note = siRNA sense sequence
  source 1..19: mol_type = other RNA
ggcacttcagcatgatctc

SEQ ID NO: 65579 - RNA, 19 nt, synthetic construct
  misc_feature 1..19: note = siRNA antisense sequence
  source 1..19: mol_type = other RNA
gagatcatgctgaagtgcc

SEQ ID NO: 65580 - RNA, 19 nt, synthetic construct
  misc_feature 1..19: note = siRNA sense sequence
  source 1..19: mol_type = other RNA
gcacttcagcatgatctcc

SEQ ID NO: 65581 - RNA, 19 nt, synthetic construct
  misc_feature 1..19: note = siRNA antisense sequence
  source 1..19: mol_type = other RNA
ggagatcatgctgaagtgc

SEQ ID NO: 65582 - RNA, 19 nt, synthetic construct
  misc_feature 1..19: note = siRNA sense sequence
  source 1..19: mol_type = other RNA
cacttcagcatgatctccc

SEQ ID NO: 65583 - RNA, 19 nt, synthetic construct
  misc_feature 1..19: note = siRNA antisense sequence
  source 1..19: mol_type = other RNA
gggagatcatgctgaagtg

SEQ ID NO: 65584 - RNA, 19 nt, synthetic construct
  misc_feature 1..19: note = siRNA sense sequence
  source 1..19: mol_type = other RNA
actttaaatatcccatgtg

SEQ ID NO: 65585 - RNA, 19 nt, synthetic construct
  misc_feature 1..19: note = siRNA antisense sequence
  source 1..19: mol_type = other RNA
cacatgggatatttaaagt

SEQ ID NO: 65586 - RNA, 19 nt, synthetic construct
  misc_feature 1..19: note = siRNA sense sequence
  source 1..19: mol_type = other RNA
ctttaaatatcccatgtgg

SEQ ID NO: 65587 - RNA, 19 nt, synthetic construct
  misc_feature 1..19: note = siRNA antisense sequence
  source 1..19: mol_type = other RNA
ccacatgggatatttaaag

SEQ ID NO: 65588 - RNA, 19 nt, synthetic construct
  misc_feature 1..19: note = siRNA sense sequence
  source 1..19: mol_type = other RNA
tttaaatatcccatgtgga

SEQ ID NO: 65589 - RNA, 19 nt, synthetic construct
  misc_feature 1..19: note = siRNA antisense sequence
  source 1..19: mol_type = other RNA
tccacatgggatatttaaa

SEQ ID NO: 65590 - RNA, 19 nt, synthetic construct
  misc_feature 1..19: note = siRNA sense sequence
  source 1..19: mol_type = other RNA
tggaagctccctaactttc

SEQ ID NO: 65591 - RNA, 19 nt, synthetic construct
  misc_feature 1..19: note = siRNA antisense sequence
  source 1..19: mol_type = other RNA
gaaagttagggagcttcca

SEQ ID NO: 65592 - RNA, 19 nt, synthetic construct
  misc_feature 1..19: note = siRNA sense sequence
  source 1..19: mol_type = other RNA
agctccctaactttcagat

SEQ ID NO: 65593 - RNA, 19 nt, synthetic construct
  misc_feature 1..19: note = siRNA antisense sequence
  source 1..19: mol_type = other RNA
atctgaaagttagggagct

SEQ ID NO: 65594 - RNA, 19 nt, synthetic construct
  misc_feature 1..19: note = siRNA sense sequence
  source 1..19: mol_type = other RNA
ctccctaactttcagatgt

SEQ ID NO: 65595 - RNA, 19 nt, synthetic construct
  misc_feature 1..19: note = siRNA antisense sequence
  source 1..19: mol_type = other RNA
acatctgaaagttagggag

SEQ ID NO: 65596 - RNA, 19 nt, synthetic construct
  misc_feature 1..19: note = siRNA sense sequence
  source 1..19: mol_type = other RNA
tccctaactttcagatgtt

SEQ ID NO: 65597 - RNA, 19 nt, synthetic construct
  misc_feature 1..19: note = siRNA antisense sequence
  source 1..19: mol_type = other RNA
aacatctgaaagttaggga

SEQ ID NO: 65598 - RNA, 19 nt, synthetic construct
  misc_feature 1..19: note = siRNA sense sequence
  source 1..19: mol_type = other RNA
ccctaactttcagatgttc

SEQ ID NO: 65599 - RNA, 19 nt, synthetic construct
  misc_feature 1..19: note = siRNA antisense sequence
  source 1..19: mol_type = other RNA
gaacatctgaaagttaggg

SEQ ID NO: 65600 - RNA, 19 nt, synthetic construct
  misc_feature 1..19: note = siRNA sense sequence
  source 1..19: mol_type = other RNA
cctaactttcagatgttct

SEQ ID NO: 65601 - RNA, 19 nt, synthetic construct
  misc_feature 1..19: note = siRNA antisense sequence
  source 1..19: mol_type = other RNA
agaacatctgaaagttagg

SEQ ID NO: 65602 - RNA, 19 nt, synthetic construct
  misc_feature 1..19: note = siRNA sense sequence
  source 1..19: mol_type = other RNA
ctaactttcagatgttctt

SEQ ID NO: 65603 - RNA, 19 nt, synthetic construct
  misc_feature 1..19: note = siRNA antisense sequence
  source 1..19: mol_type = other RNA
aagaacatctgaaagttag

SEQ ID NO: 65604 - RNA, 19 nt, synthetic construct
  misc_feature 1..19: note = siRNA sense sequence
  source 1..19: mol_type = other RNA
ttccaatatcaatgacttc

SEQ ID NO: 65605 - RNA, 19 nt, synthetic construct
  misc_feature 1..19: note = siRNA antisense sequence
  source 1..19: mol_type = other RNA
gaagtcattgatattggaa

SEQ ID NO: 65606 - RNA, 19 nt, synthetic construct
  misc_feature 1..19: note = siRNA sense sequence
  source 1..19: mol_type = other RNA
tccaatatcaatgacttct

SEQ ID NO: 65607 - RNA, 19 nt, synthetic construct
  misc_feature 1..19: note = siRNA antisense sequence
  source 1..19: mol_type = other RNA
agaagtcattgatattgga

SEQ ID NO: 65608 - RNA, 19 nt, synthetic construct
  misc_feature 1..19: note = siRNA sense sequence
  source 1..19: mol_type = other RNA
ccaatatcaatgacttctg

SEQ ID NO: 65609 - RNA, 19 nt, synthetic construct
  misc_feature 1..19: note = siRNA antisense sequence
  source 1..19: mol_type = other RNA
cagaagtcattgatattgg

SEQ ID NO: 65610 - RNA, 19 nt, synthetic construct
  misc_feature 1..19: note = siRNA sense sequence
  source 1..19: mol_type = other RNA
cttctgataagtatacgct

SEQ ID NO: 65611 - RNA, 19 nt, synthetic construct
  misc_feature 1..19: note = siRNA antisense sequence
  source 1..19: mol_type = other RNA
agcgtatacttatcagaag

SEQ ID NO: 65612 - RNA, 19 nt, synthetic construct
  misc_feature 1..19: note = siRNA sense sequence
  source 1..19: mol_type = other RNA
ttctgataagtatacgctt

SEQ ID NO: 65613 - RNA, 19 nt, synthetic construct
  misc_feature 1..19: note = siRNA antisense sequence
  source 1..19: mol_type = other RNA
aagcgtatacttatcagaa

SEQ ID NO: 65614 - RNA, 19 nt, synthetic construct
  misc_feature 1..19: note = siRNA sense sequence
  source 1..19: mol_type = other RNA
tctgataagtatacgcttt

SEQ ID NO: 65615 - RNA, 19 nt, synthetic construct
  misc_feature 1..19: note = siRNA antisense sequence
  source 1..19: mol_type = other RNA
aaagcgtatacttatcaga

SEQ ID NO: 65616 - RNA, 19 nt, synthetic construct
  misc_feature 1..19: note = siRNA sense sequence
  source 1..19: mol_type = other RNA
ctgataagtatacgctttt

SEQ ID NO: 65617 - RNA, 19 nt, synthetic construct
  misc_feature 1..19: note = siRNA antisense sequence
  source 1..19: mol_type = other RNA
aaaagcgtatacttatcag

SEQ ID NO: 65618 - RNA, 19 nt, synthetic construct
  misc_feature 1..19: note = siRNA sense sequence
  source 1..19: mol_type = other RNA
tgataagtatacgcttttc

SEQ ID NO: 65619 - RNA, 19 nt, synthetic construct
  misc_feature 1..19: note = siRNA antisense sequence
  source 1..19: mol_type = other RNA
gaaaagcgtatacttatca

SEQ ID NO: 65620 - RNA, 19 nt, synthetic construct
  misc_feature 1..19: note = siRNA sense sequence
  source 1..19: mol_type = other RNA
gataagtatacgcttttca

SEQ ID NO: 65621 - RNA, 19 nt, synthetic construct
  misc_feature 1..19: note = siRNA antisense sequence
  source 1..19: mol_type = other RNA
tgaaaagcgtatacttatc

SEQ ID NO: 65622 - RNA, 19 nt, synthetic construct
  misc_feature 1..19: note = siRNA sense sequence
  source 1..19: mol_type = other RNA
taagtatacgcttttcaag

SEQ ID NO: 65623 - RNA, 19 nt, synthetic construct
  misc_feature 1..19: note = siRNA antisense sequence
  source 1..19: mol_type = other RNA
cttgaaaagcgtatactta

SEQ ID NO: 65624 - RNA, 19 nt, synthetic construct
  misc_feature 1..19: note = siRNA sense sequence
  source 1..19: mol_type = other RNA
aagtatacgcttttcaaga

SEQ ID NO: 65625 - RNA, 19 nt, synthetic construct
  misc_feature 1..19: note = siRNA antisense sequence
  source 1..19: mol_type = other RNA
tcttgaaaagcgtatactt

SEQ ID NO: 65626 - RNA, 19 nt, synthetic construct
  misc_feature 1..19: note = siRNA sense sequence
  source 1..19: mol_type = other RNA
agtatacgcttttcaagaa

SEQ ID NO: 65627 - RNA, 19 nt, synthetic construct
  misc_feature 1..19: note = siRNA antisense sequence
  source 1..19: mol_type = other RNA
ttcttgaaaagcgtatact

SEQ ID NO: 65628 - RNA, 19 nt, synthetic construct
  misc_feature 1..19: note = siRNA sense sequence
  source 1..19: mol_type = other RNA
cataagcaatgcaaaatgc

SEQ ID NO: 65629 - RNA, 19 nt, synthetic construct
  misc_feature 1..19: note = siRNA antisense sequence
  source 1..19: mol_type = other RNA
gcattttgcattgcttatg

SEQ ID NO: 65630 - RNA, 19 nt, synthetic construct
  misc_feature 1..19: note = siRNA sense sequence
  source 1..19: mol_type = other RNA
tccttacatagaatagcca

SEQ ID NO: 65631 - RNA, 19 nt, synthetic construct
  misc_feature 1..19: note = siRNA antisense sequence
  source 1..19: mol_type = other RNA
tggctattctatgtaagga

SEQ ID NO: 65632 - RNA, 19 nt, synthetic construct
  misc_feature 1..19: note = siRNA sense sequence
  source 1..19: mol_type = other RNA
ccttacatagaatagccaa

SEQ ID NO: 65633 - RNA, 19 nt, synthetic construct
  misc_feature 1..19: note = siRNA antisense sequence
  source 1..19: mol_type = other RNA
ttggctattctatgtaagg

SEQ ID NO: 65634 - RNA, 19 nt, synthetic construct
  misc_feature 1..19: note = siRNA sense sequence
  source 1..19: mol_type = other RNA
cttacatagaatagccaac

SEQ ID NO: 65635 - RNA, 19 nt, synthetic construct
  misc_feature 1..19: note = siRNA antisense sequence
  source 1..19: mol_type = other RNA
gttggctattctatgtaag

SEQ ID NO: 65636 - RNA, 19 nt, synthetic construct
  misc_feature 1..19: note = siRNA sense sequence
  source 1..19: mol_type = other RNA
tgagtatggtttatgttgg

SEQ ID NO: 65637 - RNA, 19 nt, synthetic construct
  misc_feature 1..19: note = siRNA antisense sequence
  source 1..19: mol_type = other RNA
ccaacataaaccatactca

SEQ ID NO: 65638 - RNA, 19 nt, synthetic construct
  misc_feature 1..19: note = siRNA sense sequence
  source 1..19: mol_type = other RNA
gagtatggtttatgttgga

SEQ ID NO: 65639 - RNA, 19 nt, synthetic construct
  misc_feature 1..19: note = siRNA antisense sequence
  source 1..19: mol_type = other RNA
tccaacataaaccatactc

SEQ ID NO: 65640 - RNA, 19 nt, synthetic construct
  misc_feature 1..19: note = siRNA sense sequence
  source 1..19: mol_type = other RNA
agtatggtttatgttggaa

SEQ ID NO: 65641 - RNA, 19 nt, synthetic construct
  misc_feature 1..19: note = siRNA antisense sequence
  source 1..19: mol_type = other RNA
ttccaacataaaccatact

SEQ ID NO: 65642 - RNA, 19 nt, synthetic construct
  misc_feature 1..19: note = siRNA sense sequence
  source 1..19: mol_type = other RNA
ttctacattcatcctaaag

SEQ ID NO: 65643 - RNA, 19 nt, synthetic construct
  misc_feature 1..19: note = siRNA antisense sequence
  source 1..19: mol_type = other RNA
ctttaggatgaatgtagaa

SEQ ID NO: 65644 - RNA, 19 nt, synthetic construct
  misc_feature 1..19: note = siRNA sense sequence
  source 1..19: mol_type = other RNA
tctacattcatcctaaagg

SEQ ID NO: 65645 - RNA, 19 nt, synthetic construct
  misc_feature 1..19: note = siRNA antisense sequence
  source 1..19: mol_type = other RNA
cctttaggatgaatgtaga

SEQ ID NO: 65646 - RNA, 19 nt, synthetic construct
  misc_feature 1..19: note = siRNA sense sequence
  source 1..19: mol_type = other RNA
ctacattcatcctaaagga

SEQ ID NO: 65647 - RNA, 19 nt, synthetic construct
  misc_feature 1..19: note = siRNA antisense sequence
  source 1..19: mol_type = other RNA
tcctttaggatgaatgtag

SEQ ID NO: 65648 - RNA, 19 nt, synthetic construct
  misc_feature 1..19: note = siRNA sense sequence
  source 1..19: mol_type = other RNA
tacattcatcctaaaggaa

SEQ ID NO: 65649 - RNA, 19 nt, synthetic construct
  misc_feature 1..19: note = siRNA antisense sequence
  source 1..19: mol_type = other RNA
ttcctttaggatgaatgta

SEQ ID NO: 65650 - RNA, 19 nt, synthetic construct
  misc_feature 1..19: note = siRNA sense sequence
  source 1..19: mol_type = other RNA
tttgtaattgtgtgatctg

SEQ ID NO: 65651 - RNA, 19 nt, synthetic construct
  misc_feature 1..19: note = siRNA antisense sequence
  source 1..19: mol_type = other RNA
cagatcacacaattacaaa

SEQ ID NO: 65652 - RNA, 19 nt, synthetic construct
  misc_feature 1..19: note = siRNA sense sequence
  source 1..19: mol_type = other RNA
ttgtaattgtgtgatctga

SEQ ID NO: 65653 - RNA, 19 nt, synthetic construct
  misc_feature 1..19: note = siRNA antisense sequence
  source 1..19: mol_type = other RNA
tcagatcacacaattacaa

SEQ ID NO: 65654 - RNA, 19 nt, synthetic construct
  misc_feature 1..19: note = siRNA sense sequence
  source 1..19: mol_type = other RNA
tgtaattgtgtgatctgag

SEQ ID NO: 65655 - RNA, 19 nt, synthetic construct
  misc_feature 1..19: note = siRNA antisense sequence
  source 1..19: mol_type = other RNA
ctcagatcacacaattaca

SEQ ID NO: 65656 - RNA, 19 nt, synthetic construct
  misc_feature 1..19: note = siRNA sense sequence
  source 1..19: mol_type = other RNA
gtaattgtgtgatctgagg

SEQ ID NO: 65657 - RNA, 19 nt, synthetic construct
  misc_feature 1..19: note = siRNA antisense sequence
  source 1..19: mol_type = other RNA
cctcagatcacacaattac

SEQ ID NO: 65658 - RNA, 19 nt, synthetic construct
  misc_feature 1..19: note = siRNA sense sequence
  source 1..19: mol_type = other RNA
taattgtgtgatctgagga

SEQ ID NO: 65659 - RNA, 19 nt, synthetic construct
  misc_feature 1..19: note = siRNA antisense sequence
  source 1..19: mol_type = other RNA
tcctcagatcacacaatta

SEQ ID NO: 65660 - RNA, 19 nt, synthetic construct
  misc_feature 1..19: note = siRNA sense sequence
  source 1..19: mol_type = other RNA
aaagtcactgatcttatct

SEQ ID NO: 65661 - RNA, 19 nt, synthetic construct
  misc_feature 1..19: note = siRNA antisense sequence
  source 1..19: mol_type = other RNA
agataagatcagtgacttt

SEQ ID NO: 65662 - RNA, 19 nt, synthetic construct
  misc_feature 1..19: note = siRNA sense sequence
  source 1..19: mol_type = other RNA
aagtcactgatcttatcta

SEQ ID NO: 65663 - RNA, 19 nt, synthetic construct
  misc_feature 1..19: note = siRNA antisense sequence
  source 1..19: mol_type = other RNA
tagataagatcagtgactt

SEQ ID NO: 65664 - RNA, 19 nt, synthetic construct
  misc_feature 1..19: note = siRNA sense sequence
  source 1..19: mol_type = other RNA
agtcactgatcttatctag

SEQ ID NO: 65665 - RNA, 19 nt, synthetic construct
  misc_feature 1..19: note = siRNA antisense sequence
  source 1..19: mol_type = other RNA
ctagataagatcagtgact

SEQ ID NO: 65666 - RNA, 19 nt, synthetic construct
  misc_feature 1..19: note = siRNA sense sequence
  source 1..19: mol_type = other RNA
gtcactgatcttatctaga

SEQ ID NO: 65667 - RNA, 19 nt, synthetic construct
  misc_feature 1..19: note = siRNA antisense sequence
  source 1..19: mol_type = other RNA
tctagataagatcagtgac

SEQ ID NO: 65668 - RNA, 19 nt, synthetic construct
  misc_feature 1..19: note = siRNA sense sequence
  source 1..19: mol_type = other RNA
tcttatctagattccggtt

SEQ ID NO: 65669 - RNA, 19 nt, synthetic construct
  misc_feature 1..19: note = siRNA antisense sequence
  source 1..19: mol_type = other RNA
aaccggaatctagataaga

SEQ ID NO: 65670 - RNA, 19 nt, synthetic construct
  misc_feature 1..19: note = siRNA sense sequence
  source 1..19: mol_type = other RNA
cttatctagattccggttt

SEQ ID NO: 65671 - RNA, 19 nt, synthetic construct
  misc_feature 1..19: note = siRNA antisense sequence
  source 1..19: mol_type = other RNA
aaaccggaatctagataag

SEQ ID NO: 65672 - RNA, 19 nt, synthetic construct
  misc_feature 1..19: note = siRNA sense sequence
  source 1..19: mol_type = other RNA
ttatctagattccggtttc

SEQ ID NO: 65673 - RNA, 19 nt, synthetic construct
  misc_feature 1..19: note = siRNA antisense sequence
  source 1..19: mol_type = other RNA
gaaaccggaatctagataa

SEQ ID NO: 65674 - RNA, 19 nt, synthetic construct
  misc_feature 1..19: note = siRNA sense sequence
  source 1..19: mol_type = other RNA
tatctagattccggtttcc

SEQ ID NO: 65675 - RNA, 19 nt, synthetic construct
  misc_feature 1..19: note = siRNA antisense sequence
  source 1..19: mol_type = other RNA
ggaaaccggaatctagata

SEQ ID NO: 65676 - RNA, 19 nt, synthetic construct
  misc_feature 1..19: note = siRNA sense sequence
  source 1..19: mol_type = other RNA
atctgtaagttcagggaat

SEQ ID NO: 65677 - RNA, 19 nt, synthetic construct
  misc_feature 1..19: note = siRNA antisense sequence
  source 1..19: mol_type = other RNA
attccctgaacttacagat

SEQ ID NO: 65678 - RNA, 19 nt, synthetic construct
  misc_feature 1..19: note = siRNA sense sequence
  source 1..19: mol_type = other RNA
tctgtaagttcagggaatt

SEQ ID NO: 65679 - RNA, 19 nt, synthetic construct
  misc_feature 1..19: note = siRNA antisense sequence
  source 1..19: mol_type = other RNA
aattccctgaacttacaga

SEQ ID NO: 65680 - RNA, 19 nt, synthetic construct
  misc_feature 1..19: note = siRNA sense sequence
  source 1..19: mol_type = other RNA
ctgtaagttcagggaattg

SEQ ID NO: 65681 - RNA, 19 nt, synthetic construct
  misc_feature 1..19: note = siRNA antisense sequence
  source 1..19: mol_type = other RNA
caattccctgaacttacag

SEQ ID NO: 65682 - RNA, 19 nt, synthetic construct
  misc_feature 1..19: note = siRNA sense sequence
  source 1..19: mol_type = other RNA
tgtaagttcagggaattgt

SEQ ID NO: 65683 - RNA, 19 nt, synthetic construct
  misc_feature 1..19: note = siRNA antisense sequence
  source 1..19: mol_type = other RNA
acaattccctgaacttaca

SEQ ID NO: 65684 - RNA, 19 nt, synthetic construct
  misc_feature 1..19: note = siRNA sense sequence
  source 1..19: mol_type = other RNA
gtaagttcagggaattgtt

SEQ ID NO: 65685 - RNA, 19 nt, synthetic construct
  misc_feature 1..19: note = siRNA antisense sequence
  source 1..19: mol_type = other RNA
aacaattccctgaacttac

SEQ ID NO: 65686 - RNA, 19 nt, synthetic construct
  misc_feature 1..19: note = siRNA sense sequence
  source 1..19: mol_type = other RNA
taagttcagggaattgttt

SEQ ID NO: 65687 - RNA, 19 nt, synthetic construct
  misc_feature 1..19: note = siRNA antisense sequence
  source 1..19: mol_type = other RNA
aaacaattccctgaactta

SEQ ID NO: 65688 - RNA, 19 nt, synthetic construct
  misc_feature 1..19: note = siRNA sense sequence
  source 1..19: mol_type = other RNA
agttcagggaattgtttta

SEQ ID NO: 65689 - RNA, 19 nt, synthetic construct
  misc_feature 1..19: note = siRNA antisense sequence
  source 1..19: mol_type = other RNA
taaaacaattccctgaact

SEQ ID NO: 65690 - RNA, 19 nt, synthetic construct
  misc_feature 1..19: note = siRNA sense sequence
  source 1..19: mol_type = other RNA
gggaattgttttacatatg

SEQ ID NO: 65691 - RNA, 19 nt, synthetic construct
  misc_feature 1..19: note = siRNA antisense sequence
  source 1..19: mol_type = other RNA
catatgtaaaacaattccc

SEQ ID NO: 65692 - RNA, 19 nt, synthetic construct
  misc_feature 1..19: note = siRNA sense sequence
  source 1..19: mol_type = other RNA
aaatctgccttgctgggct

SEQ ID NO: 65693 - RNA, 19 nt, synthetic construct
  misc_feature 1..19: note = siRNA antisense sequence
  source 1..19: mol_type = other RNA
agcccagcaaggcagattt

SEQ ID NO: 65694 - RNA, 19 nt, synthetic construct
  misc_feature 1..19: note = siRNA sense sequence
  source 1..19: mol_type = other RNA
aatctgccttgctgggctt

SEQ ID NO: 65695 - RNA, 19 nt, synthetic construct
  misc_feature 1..19: note = siRNA antisense sequence
  source 1..19: mol_type = other RNA
aagcccagcaaggcagatt

SEQ ID NO: 65696 - RNA, 19 nt, synthetic construct
  misc_feature 1..19: note = siRNA sense sequence
  source 1..19: mol_type = other RNA
ctgccttgctgggcttagt

SEQ ID NO: 65697 - RNA, 19 nt, synthetic construct
  misc_feature 1..19: note = siRNA antisense sequence
  source 1..19: mol_type = other RNA
actaagcccagcaaggcag

SEQ ID NO: 65698 - RNA, 19 nt, synthetic construct
  misc_feature 1..19: note = siRNA sense sequence
  source 1..19: mol_type = other RNA
tgccttgctgggcttagtg

SEQ ID NO: 65699 - RNA, 19 nt, synthetic construct
  misc_feature 1..19: note = siRNA antisense sequence
  source 1..19: mol_type = other RNA
cactaagcccagcaaggca

SEQ ID NO: 65700 - RNA, 19 nt, synthetic construct
  misc_feature 1..19: note = siRNA sense sequence
  source 1..19: mol_type = other RNA
gccttgctgggcttagtgg

SEQ ID NO: 65701 - RNA, 19 nt, synthetic construct
  misc_feature 1..19: note = siRNA antisense sequence
  source 1..19: mol_type = other RNA
ccactaagcccagcaaggc

SEQ ID NO: 65702 - RNA, 19 nt, synthetic construct
  misc_feature 1..19: note = siRNA sense sequence
  source 1..19: mol_type = other RNA
tctgtcatcccagcctact

SEQ ID NO: 65703 - RNA, 19 nt, synthetic construct
  misc_feature 1..19: note = siRNA antisense sequence
  source 1..19: mol_type = other RNA
agtaggctgggatgacaga

SEQ ID NO: 65704 - RNA, 19 nt, synthetic construct
  misc_feature 1..19: note = siRNA sense sequence
  source 1..19: mol_type = other RNA
ctgtcatcccagcctactc

SEQ ID NO: 65705 - RNA, 19 nt, synthetic construct
  misc_feature 1..19: note = siRNA antisense sequence
  source 1..19: mol_type = other RNA
gagtaggctgggatgacag

SEQ ID NO: 65706 - RNA, 19 nt, synthetic construct
  misc_feature 1..19: note = siRNA sense sequence
  source 1..19: mol_type = other RNA
tgtcatcccagcctactcg

SEQ ID NO: 65707 - RNA, 19 nt, synthetic construct
  misc_feature 1..19: note = siRNA antisense sequence
  source 1..19: mol_type = other RNA
cgagtaggctgggatgaca

SEQ ID NO: 65708 - RNA, 19 nt, synthetic construct
  misc_feature 1..19: note = siRNA sense sequence
  source 1..19: mol_type = other RNA
gtcatcccagcctactcgg

SEQ ID NO: 65709 - RNA, 19 nt, synthetic construct
  misc_feature 1..19: note = siRNA antisense sequence
  source 1..19: mol_type = other RNA
ccgagtaggctgggatgac

SEQ ID NO: 65710 - RNA, 19 nt, synthetic construct
  misc_feature 1..19: note = siRNA sense sequence
  source 1..19: mol_type = other RNA
actttagcccaggagtttg

SEQ ID NO: 65711 - RNA, 19 nt, synthetic construct
  misc_feature 1..19: note = siRNA antisense sequence
  source 1..19: mol_type = other RNA
caaactcctgggctaaagt

SEQ ID NO: 65712 - RNA, 19 nt, synthetic construct
  misc_feature 1..19: note = siRNA sense sequence
  source 1..19: mol_type = other RNA
ctttagcccaggagtttga

SEQ ID NO: 65713 - RNA, 19 nt, synthetic construct
  misc_feature 1..19: note = siRNA antisense sequence
  source 1..19: mol_type = other RNA
tcaaactcctgggctaaag

SEQ ID NO: 65714 - RNA, 19 nt, synthetic construct
  misc_feature 1..19: note = siRNA sense sequence
  source 1..19: mol_type = other RNA
aactgtcataatggtctga

SEQ ID NO: 65715 - RNA, 19 nt, synthetic construct
  misc_feature 1..19: note = siRNA antisense sequence
  source 1..19: mol_type = other RNA
tcagaccattatgacagtt

SEQ ID NO: 65716 - RNA, 19 nt, synthetic construct
  misc_feature 1..19: note = siRNA sense sequence
  source 1..19: mol_type = other RNA
actgtcataatggtctgat

SEQ ID NO: 65717 - RNA, 19 nt, synthetic construct
  misc_feature 1..19: note = siRNA antisense sequence
  source 1..19: mol_type = other RNA
atcagaccattatgacagt

SEQ ID NO: 65718 - RNA, 19 nt, synthetic construct
  misc_feature 1..19: note = siRNA sense sequence
  source 1..19: mol_type = other RNA
ctgtcataatggtctgatg

SEQ ID NO: 65719 - RNA, 19 nt, synthetic construct
  misc_feature 1..19: note = siRNA antisense sequence
  source 1..19: mol_type = other RNA
catcagaccattatgacag

SEQ ID NO: 65720 - RNA, 19 nt, synthetic construct
  misc_feature 1..19: note = siRNA sense sequence
  source 1..19: mol_type = other RNA
tgtcataatggtctgatgc

SEQ ID NO: 65721 - RNA, 19 nt, synthetic construct
  misc_feature 1..19: note = siRNA antisense sequence
  source 1..19: mol_type = other RNA
gcatcagaccattatgaca

SEQ ID NO: 65722 - RNA, 19 nt, synthetic construct
  misc_feature 1..19: note = siRNA sense sequence
  source 1..19: mol_type = other RNA
gtcataatggtctgatgct

SEQ ID NO: 65723 - RNA, 19 nt, synthetic construct
  misc_feature 1..19: note = siRNA antisense sequence
  source 1..19: mol_type = other RNA
agcatcagaccattatgac

SEQ ID NO: 65724 - RNA, 19 nt, synthetic construct
  misc_feature 1..19: note = siRNA sense sequence
  source 1..19: mol_type = other RNA
tcataatggtctgatgctg

SEQ ID NO: 65725 - RNA, 19 nt, synthetic construct
  misc_feature 1..19: note = siRNA antisense sequence
  source 1..19: mol_type = other RNA
cagcatcagaccattatga

SEQ ID NO: 65726 - RNA, 19 nt, synthetic construct
  misc_feature 1..19: note = siRNA sense sequence
  source 1..19: mol_type = other RNA
cataatggtctgatgctgt

SEQ ID NO: 65727 - RNA, 19 nt, synthetic construct
  misc_feature 1..19: note = siRNA antisense sequence
  source 1..19: mol_type = other RNA
acagcatcagaccattatg

SEQ ID NO: 65728 - RNA, 19 nt, synthetic construct
  misc_feature 1..19: note = siRNA sense sequence
  source 1..19: mol_type = other RNA
ataatggtctgatgctgta

SEQ ID NO: 65729 - RNA, 19 nt, synthetic construct
  misc_feature 1..19: note = siRNA antisense sequence
  source 1..19: mol_type = other RNA
tacagcatcagaccattat

SEQ ID NO: 65730 - RNA, 19 nt, synthetic construct
  misc_feature 1..19: note = siRNA sense sequence
  source 1..19: mol_type = other RNA
ggtctgatgctgtatatgt

SEQ ID NO: 65731 - RNA, 19 nt, synthetic construct
  misc_feature 1..19: note = siRNA antisense sequence
  source 1..19: mol_type = other RNA
acatatacagcatcagacc

SEQ ID NO: 65732 - RNA, 19 nt, synthetic construct
  misc_feature 1..19: note = siRNA sense sequence
  source 1..19: mol_type = other RNA
gtctgatgctgtatatgtc

SEQ ID NO: 65733 - RNA, 19 nt, synthetic construct
  misc_feature 1..19: note = siRNA antisense sequence
  source 1..19: mol_type = other RNA
gacatatacagcatcagac

SEQ ID NO: 65734 - RNA, 19 nt, synthetic construct
  misc_feature 1..19: note = siRNA sense sequence
  source 1..19: mol_type = other RNA
tctgatgctgtatatgtct

SEQ ID NO: 65735 - RNA, 19 nt, synthetic construct
  misc_feature 1..19: note = siRNA antisense sequence
  source 1..19: mol_type = other RNA
agacatatacagcatcaga

SEQ ID NO: 65736 - RNA, 19 nt, synthetic construct
  misc_feature 1..19: note = siRNA sense sequence
  source 1..19: mol_type = other RNA
ctgatgctgtatatgtcta

SEQ ID NO: 65737 - RNA, 19 nt, synthetic construct
  misc_feature 1..19: note = siRNA antisense sequence
  source 1..19: mol_type = other RNA
tagacatatacagcatcag

SEQ ID NO: 65738 - RNA, 19 nt, synthetic construct
  misc_feature 1..19: note = siRNA sense sequence
  source 1..19: mol_type = other RNA
tgatgctgtatatgtctac

SEQ ID NO: 65739 - RNA, 19 nt, synthetic construct
  misc_feature 1..19: note = siRNA antisense sequence
  source 1..19: mol_type = other RNA
gtagacatatacagcatca

SEQ ID NO: 65740 - RNA, 19 nt, synthetic construct
  misc_feature 1..19: note = siRNA sense sequence
  source 1..19: mol_type = other RNA
gtatatgtctacattcttg

SEQ ID NO: 65741 - RNA, 19 nt, synthetic construct
  misc_feature 1..19: note = siRNA antisense sequence
  source 1..19: mol_type = other RNA
caagaatgtagacatatac

SEQ ID NO: 65742 - RNA, 19 nt, synthetic construct
  misc_feature 1..19: note = siRNA sense sequence
  source 1..19: mol_type = other RNA
tatatgtctacattcttgc

SEQ ID NO: 65743 - RNA, 19 nt, synthetic construct
  misc_feature 1..19: note = siRNA antisense sequence
  source 1..19: mol_type = other RNA
gcaagaatgtagacatata

SEQ ID NO: 65744 - RNA, 19 nt, synthetic construct
  misc_feature 1..19: note = siRNA sense sequence
  source 1..19: mol_type = other RNA
gtctacattcttgccagct

SEQ ID NO: 65745 - RNA, 19 nt, synthetic construct
  misc_feature 1..19: note = siRNA antisense sequence
  source 1..19: mol_type = other RNA
agctggcaagaatgtagac

SEQ ID NO: 65746 - RNA, 19 nt, synthetic construct
  misc_feature 1..19: note = siRNA sense sequence
  source 1..19: mol_type = other RNA
tctacattcttgccagctc

SEQ ID NO: 65747 - RNA, 19 nt, synthetic construct
  misc_feature 1..19: note = siRNA antisense sequence
  source 1..19: mol_type = other RNA
gagctggcaagaatgtaga

SEQ ID NO: 65748 - RNA, 19 nt, synthetic construct
  misc_feature 1..19: note = siRNA sense sequence
  source 1..19: mol_type = other RNA
ctacattcttgccagctct

SEQ ID NO: 65749 - RNA, 19 nt, synthetic construct
  misc_feature 1..19: note = siRNA antisense sequence
  source 1..19: mol_type = other RNA
agagctggcaagaatgtag

SEQ ID NO: 65750 - RNA, 19 nt, synthetic construct
  misc_feature 1..19: note = siRNA sense sequence
  source 1..19: mol_type = other RNA
acattcttgccagctctgt

SEQ ID NO: 65751 - RNA, 19 nt, synthetic construct
  misc_feature 1..19: note = siRNA antisense sequence
  source 1..19: mol_type = other RNA
acagagctggcaagaatgt

SEQ ID NO: 65752 - RNA, 19 nt, synthetic construct
  misc_feature 1..19: note = siRNA sense sequence
  source 1..19: mol_type = other RNA
cattcttgccagctctgtc

SEQ ID NO: 65753 - RNA, 19 nt, synthetic construct
  misc_feature 1..19: note = siRNA antisense sequence
  source 1..19: mol_type = other RNA
gacagagctggcaagaatg

SEQ ID NO: 65754 - RNA, 19 nt, synthetic construct
  misc_feature 1..19: note = siRNA sense sequence
  source 1..19: mol_type = other RNA
attcttgccagctctgtca

SEQ ID NO: 65755 - RNA, 19 nt, synthetic construct
  misc_feature 1..19: note = siRNA antisense sequence
  source 1..19: mol_type = other RNA
tgacagagctggcaagaat

SEQ ID NO: 65756 - RNA, 19 nt, synthetic construct
  misc_feature 1..19: note = siRNA sense sequence
  source 1..19: mol_type = other RNA
ttgccagctctgtcaccta

SEQ ID NO: 65757 - RNA, 19 nt, synthetic construct
  misc_feature 1..19: note = siRNA antisense sequence
  source 1..19: mol_type = other RNA
taggtgacagagctggcaa

SEQ ID NO: 65758 - RNA, 19 nt, synthetic construct
  misc_feature 1..19: note = siRNA sense sequence
  source 1..19: mol_type = other RNA
tgccagctctgtcacctac

SEQ ID NO: 65759 - RNA, 19 nt, synthetic construct
  misc_feature 1..19: note = siRNA antisense sequence
  source 1..19: mol_type = other RNA
gtaggtgacagagctggca

SEQ ID NO: 65760 - RNA, 19 nt, synthetic construct
  misc_feature 1..19: note = siRNA sense sequence
  source 1..19: mol_type = other RNA
gctctgtcacctacctgga

SEQ ID NO: 65761 - RNA, 19 nt, synthetic construct
  misc_feature 1..19: note = siRNA antisense sequence
  source 1..19: mol_type = other RNA
tccaggtaggtgacagagc

SEQ ID NO: 65762 - RNA, 19 nt, synthetic construct
  misc_feature 1..19: note = siRNA sense sequence
  source 1..19: mol_type = other RNA
ctctgtcacctacctggag

SEQ ID NO: 65763 - RNA, 19 nt, synthetic construct
  misc_feature 1..19: note = siRNA antisense sequence
  source 1..19: mol_type = other RNA
ctccaggtaggtgacagag

SEQ ID NO: 65764 - RNA, 19 nt, synthetic construct
  misc_feature 1..19: note = siRNA sense sequence
  source 1..19: mol_type = other RNA
agaggttttgattagtatc

SEQ ID NO: 65765 - RNA, 19 nt, synthetic construct
  misc_feature 1..19: note = siRNA antisense sequence
  source 1..19: mol_type = other RNA
gatactaatcaaaacctct

SEQ ID NO: 65766 - RNA, 19 nt, synthetic construct
  misc_feature 1..19: note = siRNA sense sequence
  source 1..19: mol_type = other RNA
tctaccctaatcttccctc

SEQ ID NO: 65767 - RNA, 19 nt, synthetic construct
  misc_feature 1..19: note = siRNA antisense sequence
  source 1..19: mol_type = other RNA
gagggaagattagggtaga

SEQ ID NO: 65768 - RNA, 19 nt, synthetic construct
  misc_feature 1..19: note = siRNA sense sequence
  source 1..19: mol_type = other RNA
ctaccctaatcttccctct

SEQ ID NO: 65769 - RNA, 19 nt, synthetic construct
  misc_feature 1..19: note = siRNA antisense sequence
  source 1..19: mol_type = other RNA
agagggaagattagggtag

SEQ ID NO: 65770 - RNA, 19 nt, synthetic construct
  misc_feature 1..19: note = siRNA sense sequence
  source 1..19: mol_type = other RNA
ctaatcttccctctaggta

SEQ ID NO: 65771 - RNA, 19 nt, synthetic construct
  misc_feature 1..19: note = siRNA antisense sequence
  source 1..19: mol_type = other RNA
tacctagagggaagattag

SEQ ID NO: 65772 - RNA, 19 nt, synthetic construct
  misc_feature 1..19: note = siRNA sense sequence
  source 1..19: mol_type = other RNA
taatcttccctctaggtaa

SEQ ID NO: 65773 - RNA, 19 nt, synthetic construct
  misc_feature 1..19: note = siRNA antisense sequence
  source 1..19: mol_type = other RNA
ttacctagagggaagatta

SEQ ID NO: 65774 - RNA, 19 nt, synthetic construct
  misc_feature 1..19: note = siRNA sense sequence
  source 1..19: mol_type = other RNA
aatcttccctctaggtaaa

SEQ ID NO: 65775 - RNA, 19 nt, synthetic construct
  misc_feature 1..19: note = siRNA antisense sequence
  source 1..19: mol_type = other RNA
tttacctagagggaagatt

SEQ ID NO: 65776 - RNA, 19 nt, synthetic construct
  misc_feature 1..19: note = siRNA sense sequence
  source 1..19: mol_type = other RNA
atcttccctctaggtaaag

SEQ ID NO: 65777 - RNA, 19 nt, synthetic construct
  misc_feature 1..19: note = siRNA antisense sequence
  source 1..19: mol_type = other RNA
ctttacctagagggaagat

SEQ ID NO: 65778 - RNA, 19 nt, synthetic construct
  misc_feature 1..19: note = siRNA sense sequence
  source 1..19: mol_type = other RNA
tgttactgttaaaggcaaa

SEQ ID NO: 65779 - RNA, 19 nt, synthetic construct
  misc_feature 1..19: note = siRNA antisense sequence
  source 1..19: mol_type = other RNA
tttgcctttaacagtaaca

SEQ ID NO: 65780 - RNA, 19 nt, synthetic construct
  misc_feature 1..19: note = siRNA sense sequence
  source 1..19: mol_type = other RNA
gttactgttaaaggcaaat

SEQ ID NO: 65781 - RNA, 19 nt, synthetic construct
  misc_feature 1..19: note = siRNA antisense sequence
  source 1..19: mol_type = other RNA
atttgcctttaacagtaac

SEQ ID NO: 65782 - RNA, 19 nt, synthetic construct
  misc_feature 1..19: note = siRNA sense sequence
  source 1..19: mol_type = other RNA
tactgttaaaggcaaatac

SEQ ID NO: 65783 - RNA, 19 nt, synthetic construct
  misc_feature 1..19: note = siRNA antisense sequence
  source 1..19: mol_type = other RNA
gtatttgcctttaacagta

SEQ ID NO: 65784 - RNA, 19 nt, synthetic construct
  misc_feature 1..19: note = siRNA sense sequence
  source 1..19: mol_type = other RNA
aggcaaatacagggcttga

SEQ ID NO: 65785 - RNA, 19 nt, synthetic construct
  misc_feature 1..19: note = siRNA antisense sequence
  source 1..19: mol_type = other RNA
tcaagccctgtatttgcct

SEQ ID NO: 65786 - RNA, 19 nt, synthetic construct
  misc_feature 1..19: note = siRNA sense sequence
  source 1..19: mol_type = other RNA
ggcaaatacagggcttgaa

SEQ ID NO: 65787 - RNA, 19 nt, synthetic construct
  misc_feature 1..19: note = siRNA antisense sequence
  source 1..19: mol_type = other RNA
ttcaagccctgtatttgcc

SEQ ID NO: 65788 - RNA, 19 nt, synthetic construct
  misc_feature 1..19: note = siRNA sense sequence
  source 1..19: mol_type = other RNA
aactattactagccattga

SEQ ID NO: 65789 - RNA, 19 nt, synthetic construct
  misc_feature 1..19: note = siRNA antisense sequence
  source 1..19: mol_type = other RNA
tcaatggctagtaatagtt

SEQ ID NO: 65790 - RNA, 19 nt, synthetic construct
  misc_feature 1..19: note = siRNA sense sequence
  source 1..19: mol_type = other RNA
actattactagccattgat

SEQ ID NO: 65791 - RNA, 19 nt, synthetic construct
  misc_feature 1..19: note = siRNA antisense sequence
  source 1..19: mol_type = other RNA
atcaatggctagtaatagt

SEQ ID NO: 65792 - RNA, 19 nt, synthetic construct
  misc_feature 1..19: note = siRNA sense sequence
  source 1..19: mol_type = other RNA
ctattactagccattgata

SEQ ID NO: 65793 - RNA, 19 nt, synthetic construct
  misc_feature 1..19: note = siRNA antisense sequence
  source 1..19: mol_type = other RNA
tatcaatggctagtaatag

SEQ ID NO: 65794 - RNA, 19 nt, synthetic construct
  misc_feature 1..19: note = siRNA sense sequence
  source 1..19: mol_type = other RNA
gccattgatatctacccta

SEQ ID NO: 65795 - RNA, 19 nt, synthetic construct
  misc_feature 1..19: note = siRNA antisense sequence
  source 1..19: mol_type = other RNA
tagggtagatatcaatggc

SEQ ID NO: 65796 - RNA, 19 nt, synthetic construct
  misc_feature 1..19: note = siRNA sense sequence
  source 1..19: mol_type = other RNA
ccattgatatctaccctaa

SEQ ID NO: 65797 - RNA, 19 nt, synthetic construct
  misc_feature 1..19: note = siRNA antisense sequence
  source 1..19: mol_type = other RNA
ttagggtagatatcaatgg

SEQ ID NO: 65798 - RNA, 19 nt, synthetic construct
  misc_feature 1..19: note = siRNA sense sequence
  source 1..19: mol_type = other RNA
cacagagcagataggtttc

SEQ ID NO: 65799 - RNA, 19 nt, synthetic construct
  misc_feature 1..19: note = siRNA antisense sequence
  source 1..19: mol_type = other RNA
gaaacctatctgctctgtg

SEQ ID NO: 65800 - RNA, 19 nt, synthetic construct
  misc_feature 1..19: note = siRNA sense sequence
  source 1..19: mol_type = other RNA
acagagcagataggtttca

SEQ ID NO: 65801 - RNA, 19 nt, synthetic construct
  misc_feature 1..19: note = siRNA antisense sequence
  source 1..19: mol_type = other RNA
tgaaacctatctgctctgt

SEQ ID NO: 65802 - RNA, 19 nt, synthetic construct
  misc_feature 1..19: note = siRNA sense sequence
  source 1..19: mol_type = other RNA
cagagcagataggtttcat

SEQ ID NO: 65803 - RNA, 19 nt, synthetic construct
  misc_feature 1..19: note = siRNA antisense sequence
  source 1..19: mol_type = other RNA
atgaaacctatctgctctg

SEQ ID NO: 65804 - RNA, 19 nt, synthetic construct
  misc_feature 1..19: note = siRNA sense sequence
  source 1..19: mol_type = other RNA
agagcagataggtttcatt

SEQ ID NO: 65805 - RNA, 19 nt, synthetic construct
  misc_feature 1..19: note = siRNA antisense sequence
  source 1..19: mol_type = other RNA
aatgaaacctatctgctct

SEQ ID NO: 65806 - RNA, 19 nt, synthetic construct
  misc_feature 1..19: note = siRNA sense sequence
  source 1..19: mol_type = other RNA
gagcagataggtttcattg

SEQ ID NO: 65807 - RNA, 19 nt, synthetic construct
  misc_feature 1..19: note = siRNA antisense sequence
  source 1..19: mol_type = other RNA
caatgaaacctatctgctc

SEQ ID NO: 65808 - RNA, 19 nt, synthetic construct
  misc_feature 1..19: note = siRNA sense sequence
  source 1..19: mol_type = other RNA
agcagataggtttcattga

SEQ ID NO: 65809 - RNA, 19 nt, synthetic construct
  misc_feature 1..19: note = siRNA antisense sequence
  source 1..19: mol_type = other RNA
tcaatgaaacctatctgct

SEQ ID NO: 65810 - RNA, 19 nt, synthetic construct
  misc_feature 1..19: note = siRNA sense sequence
  source 1..19: mol_type = other RNA
gcagataggtttcattgag

SEQ ID NO: 65811 - RNA, 19 nt, synthetic construct
  misc_feature 1..19: note = siRNA antisense sequence
  source 1..19: mol_type = other RNA
ctcaatgaaacctatctgc

SEQ ID NO: 65812 - RNA, 19 nt, synthetic construct
  misc_feature 1..19: note = siRNA sense sequence
  source 1..19: mol_type = other RNA
cagataggtttcattgagg

SEQ ID NO: 65813 - RNA, 19 nt, synthetic construct
  misc_feature 1..19: note = siRNA antisense sequence
  source 1..19: mol_type = other RNA
cctcaatgaaacctatctg

SEQ ID NO: 65814 - RNA, 19 nt, synthetic construct
  misc_feature 1..19: note = siRNA sense sequence
  source 1..19: mol_type = other RNA
agataggtttcattgaggt

SEQ ID NO: 65815 - RNA, 19 nt, synthetic construct
  misc_feature 1..19: note = siRNA antisense sequence
  source 1..19: mol_type = other RNA
acctcaatgaaacctatct

SEQ ID NO: 65816 - RNA, 19 nt, synthetic construct
  misc_feature 1..19: note = siRNA sense sequence
  source 1..19: mol_type = other RNA
gataggtttcattgaggtt

SEQ ID NO: 65817 - RNA, 19 nt, synthetic construct
  misc_feature 1..19: note = siRNA antisense sequence
  source 1..19: mol_type = other RNA
aacctcaatgaaacctatc

SEQ ID NO: 65818 - RNA, 19 nt, synthetic construct
  misc_feature 1..19: note = siRNA sense sequence
  source 1..19: mol_type = other RNA
ataggtttcattgaggttt

SEQ ID NO: 65819 - RNA, 19 nt, synthetic construct
  misc_feature 1..19: note = siRNA antisense sequence
  source 1..19: mol_type = other RNA
aaacctcaatgaaacctat

SEQ ID NO: 65820 - RNA, 19 nt, synthetic construct
  misc_feature 1..19: note = siRNA sense sequence
  source 1..19: mol_type = other RNA
ttcattgaggtttgagtgc

SEQ ID NO: 65821 - RNA, 19 nt, synthetic construct
  misc_feature 1..19: note = siRNA antisense sequence
  source 1..19: mol_type = other RNA
gcactcaaacctcaatgaa

SEQ ID NO: 65822 - RNA, 19 nt, synthetic construct
  misc_feature 1..19: note = siRNA sense sequence
  source 1..19: mol_type = other RNA
tcattgaggtttgagtgcc

SEQ ID NO: 65823 - RNA, 19 nt, synthetic construct
  misc_feature 1..19: note = siRNA antisense sequence
  source 1..19: mol_type = other RNA
ggcactcaaacctcaatga

SEQ ID NO: 65824 - RNA, 19 nt, synthetic construct
  misc_feature 1..19: note = siRNA sense sequence
  source 1..19: mol_type = other RNA
cattgaggtttgagtgcca

SEQ ID NO: 65825 - RNA, 19 nt, synthetic construct
  misc_feature 1..19: note = siRNA antisense sequence
  source 1..19: mol_type = other RNA
tggcactcaaacctcaatg

SEQ ID NO: 65826 - RNA, 19 nt, synthetic construct
  misc_feature 1..19: note = siRNA sense sequence
  source 1..19: mol_type = other RNA
ggtttgagtgccaccctga

SEQ ID NO: 65827 - RNA, 19 nt, synthetic construct
  misc_feature 1..19: note = siRNA antisense sequence
  source 1..19: mol_type = other RNA
tcagggtggcactcaaacc

SEQ ID NO: 65828 - RNA, 19 nt, synthetic construct
  misc_feature 1..19: note = siRNA sense sequence
  source 1..19: mol_type = other RNA
gtttgagtgccaccctgag

SEQ ID NO: 65829 - RNA, 19 nt, synthetic construct
  misc_feature 1..19: note = siRNA antisense sequence
  source 1..19: mol_type = other RNA
ctcagggtggcactcaaac

SEQ ID NO: 65830 - RNA, 19 nt, synthetic construct
  misc_feature 1..19: note = siRNA sense sequence
  source 1..19: mol_type = other RNA
acactaaaagcggtccatt

SEQ ID NO: 65831 - RNA, 19 nt, synthetic construct
  misc_feature 1..19: note = siRNA antisense sequence
  source 1..19: mol_type = other RNA
aatggaccgcttttagtgt

SEQ ID NO: 65832 - RNA, 19 nt, synthetic construct
  misc_feature 1..19: note = siRNA sense sequence
  source 1..19: mol_type = other RNA
cactaaaagcggtccattt

SEQ ID NO: 65833 - RNA, 19 nt, synthetic construct
  misc_feature 1..19: note = siRNA antisense sequence
  source 1..19: mol_type = other RNA
aaatggaccgcttttagtg

SEQ ID NO: 65834 - RNA, 19 nt, synthetic construct
  misc_feature 1..19: note = siRNA sense sequence
  source 1..19: mol_type = other RNA
aaagcggtccattttacag

SEQ ID NO: 65835 - RNA, 19 nt, synthetic construct
  misc_feature 1..19: note = siRNA antisense sequence
  source 1..19: mol_type = other RNA
ctgtaaaatggaccgcttt

SEQ ID NO: 65836 - RNA, 19 nt, synthetic construct
  misc_feature 1..19: note = siRNA sense sequence
  source 1..19: mol_type = other RNA
aagcggtccattttacagc

SEQ ID NO: 65837 - RNA, 19 nt, synthetic construct
  misc_feature 1..19: note = siRNA antisense sequence
  source 1..19: mol_type = other RNA
gctgtaaaatggaccgctt

SEQ ID NO: 65838 - RNA, 19 nt, synthetic construct
  misc_feature 1..19: note = siRNA sense sequence
  source 1..19: mol_type = other RNA
agcggtccattttacagct

SEQ ID NO: 65839 - RNA, 19 nt, synthetic construct
  misc_feature 1..19: note = siRNA antisense sequence
  source 1..19: mol_type = other RNA
agctgtaaaatggaccgct

SEQ ID NO: 65840 - RNA, 19 nt, synthetic construct
  misc_feature 1..19: note = siRNA sense sequence
  source 1..19: mol_type = other RNA
gcggtccattttacagctt

SEQ ID NO: 65841 - RNA, 19 nt, synthetic construct
  misc_feature 1..19: note = siRNA antisense sequence
  source 1..19: mol_type = other RNA
aagctgtaaaatggaccgc

SEQ ID NO: 65842 - RNA, 19 nt, synthetic construct
  misc_feature 1..19: note = siRNA sense sequence
  source 1..19: mol_type = other RNA
cattttacagctttgcttc

SEQ ID NO: 65843 - RNA, 19 nt, synthetic construct
  misc_feature 1..19: note = siRNA antisense sequence
  source 1..19: mol_type = other RNA
gaagcaaagctgtaaaatg

SEQ ID NO: 65844 - RNA, 19 nt, synthetic construct
  misc_feature 1..19: note = siRNA sense sequence
  source 1..19: mol_type = other RNA
ttacagctttgcttcagtt

SEQ ID NO: 65845 - RNA, 19 nt, synthetic construct
  misc_feature 1..19: note = siRNA antisense sequence
  source 1..19: mol_type = other RNA
aactgaagcaaagctgtaa

SEQ ID NO: 65846 - RNA, 19 nt, synthetic construct
  misc_feature 1..19: note = siRNA sense sequence
  source 1..19: mol_type = other RNA
tacagctttgcttcagtta

SEQ ID NO: 65847 - RNA, 19 nt, synthetic construct
  misc_feature 1..19: note = siRNA antisense sequence
  source 1..19: mol_type = other RNA
taactgaagcaaagctgta

SEQ ID NO: 65848 - RNA, 19 nt, synthetic construct
  misc_feature 1..19: note = siRNA sense sequence
  source 1..19: mol_type = other RNA
acagctttgcttcagttaa

SEQ ID NO: 65849 - RNA, 19 nt, synthetic construct
  misc_feature 1..19: note = siRNA antisense sequence
  source 1..19: mol_type = other RNA
ttaactgaagcaaagctgt

SEQ ID NO: 65850 - RNA, 19 nt, synthetic construct
  misc_feature 1..19: note = siRNA sense sequence
  source 1..19: mol_type = other RNA
cagctttgcttcagttaaa

SEQ ID NO: 65851 - RNA, 19 nt, synthetic construct
  misc_feature 1..19: note = siRNA antisense sequence
  source 1..19: mol_type = other RNA
tttaactgaagcaaagctg

SEQ ID NO: 65852 - RNA, 19 nt, synthetic construct
  misc_feature 1..19: note = siRNA sense sequence
  source 1..19: mol_type = other RNA
agctttgcttcagttaaaa

SEQ ID NO: 65853 - RNA, 19 nt, synthetic construct
  misc_feature 1..19: note = siRNA antisense sequence
  source 1..19: mol_type = other RNA
ttttaactgaagcaaagct

SEQ ID NO: 65854 - RNA, 19 nt, synthetic construct
  misc_feature 1..19: note = siRNA sense sequence
  source 1..19: mol_type = other RNA
aacctgatttatacatgtg

SEQ ID NO: 65855 - RNA, 19 nt, synthetic construct
  misc_feature 1..19: note = siRNA antisense sequence
  source 1..19: mol_type = other RNA
cacatgtataaatcaggtt

SEQ ID NO: 65856 - RNA, 19 nt, synthetic construct
  misc_feature 1..19: note = siRNA sense sequence
  source 1..19: mol_type = other RNA
acctgatttatacatgtgg

SEQ ID NO: 65857 - RNA, 19 nt, synthetic construct
  misc_feature 1..19: note = siRNA antisense sequence
  source 1..19: mol_type = other RNA
ccacatgtataaatcaggt

SEQ ID NO: 65858 - RNA, 19 nt, synthetic construct
  misc_feature 1..19: note = siRNA sense sequence
  source 1..19: mol_type = other RNA
cctgatttatacatgtgga

SEQ ID NO: 65859 - RNA, 19 nt, synthetic construct
  misc_feature 1..19: note = siRNA antisense sequence
  source 1..19: mol_type = other RNA
tccacatgtataaatcagg

SEQ ID NO: 65860 - RNA, 19 nt, synthetic construct
  misc_feature 1..19: note = siRNA sense sequence
  source 1..19: mol_type = other RNA
ctgatttatacatgtggac

SEQ ID NO: 65861 - RNA, 19 nt, synthetic construct
  misc_feature 1..19: note = siRNA antisense sequence
  source 1..19: mol_type = other RNA
gtccacatgtataaatcag

SEQ ID NO: 65862 - RNA, 19 nt, synthetic construct
  misc_feature 1..19: note = siRNA sense sequence
  source 1..19: mol_type = other RNA
tgatttatacatgtggacc

SEQ ID NO: 65863 - RNA, 19 nt, synthetic construct
  misc_feature 1..19: note = siRNA antisense sequence
  source 1..19: mol_type = other RNA
ggtccacatgtataaatca

SEQ ID NO: 65864 - RNA, 19 nt, synthetic construct
  misc_feature 1..19: note = siRNA sense sequence
  source 1..19: mol_type = other RNA
gatttatacatgtggaccc

SEQ ID NO: 65865 - RNA, 19 nt, synthetic construct
  misc_feature 1..19: note = siRNA antisense sequence
  source 1..19: mol_type = other RNA
gggtccacatgtataaatc

SEQ ID NO: 65866 - RNA, 19 nt, synthetic construct
  misc_feature 1..19: note = siRNA sense sequence
  source 1..19: mol_type = other RNA
atttatacatgtggaccca

SEQ ID NO: 65867 - RNA, 19 nt, synthetic construct
  misc_feature 1..19: note = siRNA antisense sequence
  source 1..19: mol_type = other RNA
tgggtccacatgtataaat

SEQ ID NO: 65868 - RNA, 19 nt, synthetic construct
  misc_feature 1..19: note = siRNA sense sequence
  source 1..19: mol_type = other RNA
tttatacatgtggacccag

SEQ ID NO: 65869 - RNA, 19 nt, synthetic construct
  misc_feature 1..19: note = siRNA antisense sequence
  source 1..19: mol_type = other RNA
ctgggtccacatgtataaa

SEQ ID NO: 65870 - RNA, 19 nt, synthetic construct
  misc_feature 1..19: note = siRNA sense sequence
  source 1..19: mol_type = other RNA
ttatacatgtggacccagt

SEQ ID NO: 65871 - RNA, 19 nt, synthetic construct
  misc_feature 1..19: note = siRNA antisense sequence
  source 1..19: mol_type = other RNA
actgggtccacatgtataa

SEQ ID NO: 65872 - RNA, 19 nt, synthetic construct
  misc_feature 1..19: note = siRNA sense sequence
  source 1..19: mol_type = other RNA
tatacatgtggacccagtg

SEQ ID NO: 65873 - RNA, 19 nt, synthetic construct
  misc_feature 1..19: note = siRNA antisense sequence
  source 1..19: mol_type = other RNA
cactgggtccacatgtata

SEQ ID NO: 65874 - RNA, 19 nt, synthetic construct
  misc_feature 1..19: note = siRNA sense sequence
  source 1..19: mol_type = other RNA
atgtggacccagtgataag

SEQ ID NO: 65875 - RNA, 19 nt, synthetic construct
  misc_feature 1..19: note = siRNA antisense sequence
  source 1..19: mol_type = other RNA
cttatcactgggtccacat

SEQ ID NO: 65876 - RNA, 19 nt, synthetic construct
  misc_feature 1..19: note = siRNA sense sequence
  source 1..19: mol_type = other RNA
tgtggacccagtgataagt

SEQ ID NO: 65877 - RNA, 19 nt, synthetic construct
  misc_feature 1..19: note = siRNA antisense sequence
  source 1..19: mol_type = other RNA
acttatcactgggtccaca

SEQ ID NO: 65878 - RNA, 19 nt, synthetic construct
  misc_feature 1..19: note = siRNA sense sequence
  source 1..19: mol_type = other RNA
gtggacccagtgataagtc

SEQ ID NO: 65879 - RNA, 19 nt, synthetic construct
  misc_feature 1..19: note = siRNA antisense sequence
  source 1..19: mol_type = other RNA
gacttatcactgggtccac

SEQ ID NO: 65880 - RNA, 19 nt, synthetic construct
  misc_feature 1..19: note = siRNA sense sequence
  source 1..19: mol_type = other RNA
tggacccagtgataagtca

SEQ ID NO: 65881 - RNA, 19 nt, synthetic construct
  misc_feature 1..19: note = siRNA antisense sequence
  source 1..19: mol_type = other RNA
tgacttatcactgggtcca

SEQ ID NO: 65882 - RNA, 19 nt, synthetic construct
  misc_feature 1..19: note = siRNA sense sequence
  source 1..19: mol_type = other RNA
ggacccagtgataagtcaa

SEQ ID NO: 65883 - RNA, 19 nt, synthetic construct
  misc_feature 1..19: note = siRNA antisense sequence
  source 1..19: mol_type = other RNA
ttgacttatcactgggtcc

SEQ ID NO: 65884 - RNA, 19 nt, synthetic construct
  misc_feature 1..19: note = siRNA sense sequence
  source 1..19: mol_type = other RNA
gacccagtgataagtcaag

SEQ ID NO: 65885 - RNA, 19 nt, synthetic construct
  misc_feature 1..19: note = siRNA antisense sequence
  source 1..19: mol_type = other RNA
cttgacttatcactgggtc

SEQ ID NO: 65886 - RNA, 19 nt, synthetic construct
  misc_feature 1..19: note = siRNA sense sequence
  source 1..19: mol_type = other RNA
acccagtgataagtcaagt

SEQ ID NO: 65887 - RNA, 19 nt, synthetic construct
  misc_feature 1..19: note = siRNA antisense sequence
  source 1..19: mol_type = other RNA
acttgacttatcactgggt

SEQ ID NO: 65888 - RNA, 19 nt, synthetic construct
  misc_feature 1..19: note = siRNA sense sequence
  source 1..19: mol_type = other RNA
cccagtgataagtcaagta

SEQ ID NO: 65889 - RNA, 19 nt, synthetic construct
  misc_feature 1..19: note = siRNA antisense sequence
  source 1..19: mol_type = other RNA
tacttgacttatcactggg

SEQ ID NO: 65890 - RNA, 19 nt, synthetic construct
  misc_feature 1..19: note = siRNA sense sequence
  source 1..19: mol_type = other RNA
ccagtgataagtcaagtag

SEQ ID NO: 65891 - RNA, 19 nt, synthetic construct
  misc_feature 1..19: note = siRNA antisense sequence
  source 1..19: mol_type = other RNA
ctacttgacttatcactgg

SEQ ID NO: 65892 - RNA, 19 nt, synthetic construct
  misc_feature 1..19: note = siRNA sense sequence
  source 1..19: mol_type = other RNA
cagtgataagtcaagtaga

SEQ ID NO: 65893 - RNA, 19 nt, synthetic construct
  misc_feature 1..19: note = siRNA antisense sequence
  source 1..19: mol_type = other RNA
tctacttgacttatcactg

SEQ ID NO: 65894 - RNA, 19 nt, synthetic construct
  misc_feature 1..19: note = siRNA sense sequence
  source 1..19: mol_type = other RNA
agtgataagtcaagtagaa

SEQ ID NO: 65895 - RNA, 19 nt, synthetic construct
  misc_feature 1..19: note = siRNA antisense sequence
  source 1..19: mol_type = other RNA
ttctacttgacttatcact

SEQ ID NO: 65896 - RNA, 19 nt, synthetic construct
  misc_feature 1..19: note = siRNA sense sequence
  source 1..19: mol_type = other RNA
gtgataagtcaagtagaag

SEQ ID NO: 65897 - RNA, 19 nt, synthetic construct
  misc_feature 1..19: note = siRNA antisense sequence
  source 1..19: mol_type = other RNA
cttctacttgacttatcac

SEQ ID NO: 65898 - RNA, 19 nt, synthetic construct
  misc_feature 1..19: note = siRNA sense sequence
  source 1..19: mol_type = other RNA
tgataagtcaagtagaaga

SEQ ID NO: 65899 - RNA, 19 nt, synthetic construct
  misc_feature 1..19: note = siRNA antisense sequence
  source 1..19: mol_type = other RNA
tcttctacttgacttatca

SEQ ID NO: 65900 - RNA, 19 nt, synthetic construct
  misc_feature 1..19: note = siRNA sense sequence
  source 1..19: mol_type = other RNA
gataagtcaagtagaagaa

SEQ ID NO: 65901 - RNA, 19 nt, synthetic construct
  misc_feature 1..19: note = siRNA antisense sequence
  source 1..19: mol_type = other RNA
ttcttctacttgacttatc

SEQ ID NO: 65902 - RNA, 19 nt, synthetic construct
  misc_feature 1..19: note = siRNA sense sequence
  source 1..19: mol_type = other RNA
attgtggtataatgaagag

SEQ ID NO: 65903 - RNA, 19 nt, synthetic construct
  misc_feature 1..19: note = siRNA antisense sequence
  source 1..19: mol_type = other RNA
ctcttcattataccacaat

SEQ ID NO: 65904 - RNA, 19 nt, synthetic construct
  misc_feature 1..19: note = siRNA sense sequence
  source 1..19: mol_type = other RNA
ttgtggtataatgaagagc

SEQ ID NO: 65905 - RNA, 19 nt, synthetic construct
  misc_feature 1..19: note = siRNA antisense sequence
  source 1..19: mol_type = other RNA
gctcttcattataccacaa

SEQ ID NO: 65906 - RNA, 19 nt, synthetic construct
  misc_feature 1..19: note = siRNA sense sequence
  source 1..19: mol_type = other RNA
tgtggtataatgaagagca

SEQ ID NO: 65907 - RNA, 19 nt, synthetic construct
  misc_feature 1..19: note = siRNA antisense sequence
  source 1..19: mol_type = other RNA
tgctcttcattataccaca

SEQ ID NO: 65908 - RNA, 19 nt, synthetic construct
  misc_feature 1..19: note = siRNA sense sequence
  source 1..19: mol_type = other RNA
gtggtataatgaagagcac

SEQ ID NO: 65909 - RNA, 19 nt, synthetic construct
  misc_feature 1..19: note = siRNA antisense sequence
  source 1..19: mol_type = other RNA
gtgctcttcattataccac

SEQ ID NO: 65910 - RNA, 19 nt, synthetic construct
  misc_feature 1..19: note = siRNA sense sequence
  source 1..19: mol_type = other RNA
tataatgaagagcacactg

SEQ ID NO: 65911 - RNA, 19 nt, synthetic construct
  misc_feature 1..19: note = siRNA antisense sequence
  source 1..19: mol_type = other RNA
cagtgtgctcttcattata

SEQ ID NO: 65912 - RNA, 19 nt, synthetic construct
  misc_feature 1..19: note = siRNA sense sequence
  source 1..19: mol_type = other RNA
actgggagtgaatacatat

SEQ ID NO: 65913 - RNA, 19 nt, synthetic construct
  misc_feature 1..19: note = siRNA antisense sequence
  source 1..19: mol_type = other RNA
atatgtattcactcccagt

SEQ ID NO: 65914 - RNA, 19 nt, synthetic construct
  misc_feature 1..19: note = siRNA sense sequence
  source 1..19: mol_type = other RNA
ctgggagtgaatacatatg

SEQ ID NO: 65915 - RNA, 19 nt, synthetic construct
  misc_feature 1..19: note = siRNA antisense sequence
  source 1..19: mol_type = other RNA
catatgtattcactcccag

SEQ ID NO: 65916 - RNA, 19 nt, synthetic construct
  misc_feature 1..19: note = siRNA sense sequence
  source 1..19: mol_type = other RNA
tgggagtgaatacatatgc

SEQ ID NO: 65917 - RNA, 19 nt, synthetic construct
  misc_feature 1..19: note = siRNA antisense sequence
  source 1..19: mol_type = other RNA
gcatatgtattcactccca

SEQ ID NO: 65918 - RNA, 19 nt, synthetic construct
  misc_feature 1..19: note = siRNA sense sequence
  source 1..19: mol_type = other RNA
tcacttacccatacacttg

SEQ ID NO: 65919 - RNA, 19 nt, synthetic construct
  misc_feature 1..19: note = siRNA antisense sequence
  source 1..19: mol_type = other RNA
caagtgtatgggtaagtga

SEQ ID NO: 65920 - RNA, 19 nt, synthetic construct
  misc_feature 1..19: note = siRNA sense sequence
  source 1..19: mol_type = other RNA
agactttctcaggttctta

SEQ ID NO: 65921 - RNA, 19 nt, synthetic construct
  misc_feature 1..19: note = siRNA antisense sequence
  source 1..19: mol_type = other RNA
taagaacctgagaaagtct

SEQ ID NO: 65922 - RNA, 19 nt, synthetic construct
  misc_feature 1..19: note = siRNA sense sequence
  source 1..19: mol_type = other RNA
gactttctcaggttcttat

SEQ ID NO: 65923 - RNA, 19 nt, synthetic construct
  misc_feature 1..19: note = siRNA antisense sequence
  source 1..19: mol_type = other RNA
ataagaacctgagaaagtc

SEQ ID NO: 65924 - RNA, 19 nt, synthetic construct
  misc_feature 1..19: note = siRNA sense sequence
  source 1..19: mol_type = other RNA
actttctcaggttcttatg

SEQ ID NO: 65925 - RNA, 19 nt, synthetic construct
  misc_feature 1..19: note = siRNA antisense sequence
  source 1..19: mol_type = other RNA
cataagaacctgagaaagt

SEQ ID NO: 65926 - RNA, 19 nt, synthetic construct
  misc_feature 1..19: note = siRNA sense sequence
  source 1..19: mol_type = other RNA
ctttctcaggttcttatga

SEQ ID NO: 65927 - RNA, 19 nt, synthetic construct
  misc_feature 1..19: note = siRNA antisense sequence
  source 1..19: mol_type = other RNA
tcataagaacctgagaaag

SEQ ID NO: 65928 - RNA, 19 nt, synthetic construct
  misc_feature 1..19: note = siRNA sense sequence
  source 1..19: mol_type = other RNA
tttctcaggttcttatgac

SEQ ID NO: 65929 - RNA, 19 nt, synthetic construct
  misc_feature 1..19: note = siRNA antisense sequence
  source 1..19: mol_type = other RNA
gtcataagaacctgagaaa

SEQ ID NO: 65930 - RNA, 19 nt, synthetic construct
  misc_feature 1..19: note = siRNA sense sequence
  source 1..19: mol_type = other RNA
ttctcaggttcttatgaca

SEQ ID NO: 65931 - RNA, 19 nt, synthetic construct
  misc_feature 1..19: note = siRNA antisense sequence
  source 1..19: mol_type = other RNA
tgtcataagaacctgagaa

SEQ ID NO: 65932 - RNA, 19 nt, synthetic construct
  misc_feature 1..19: note = siRNA sense sequence
  source 1..19: mol_type = other RNA
aactgcgacattccaatct

SEQ ID NO: 65933 - RNA, 19 nt, synthetic construct
  misc_feature 1..19: note = siRNA antisense sequence
  source 1..19: mol_type = other RNA
agattggaatgtcgcagtt

SEQ ID NO: 65934 - RNA, 19 nt, synthetic construct
  misc_feature 1..19: note = siRNA sense sequence
  source 1..19: mol_type = other RNA
actgcgacattccaatcta

SEQ ID NO: 65935 - RNA, 19 nt, synthetic construct
  misc_feature 1..19: note = siRNA antisense sequence
  source 1..19: mol_type = other RNA
tagattggaatgtcgcagt

SEQ ID NO: 65936 - RNA, 19 nt, synthetic construct
  misc_feature 1..19: note = siRNA sense sequence
  source 1..19: mol_type = other RNA
ctgcgacattccaatctaa

SEQ ID NO: 65937 - RNA, 19 nt, synthetic construct
  misc_feature 1..19: note = siRNA antisense sequence
  source 1..19: mol_type = other RNA
ttagattggaatgtcgcag

SEQ ID NO: 65938 - RNA, 19 nt, synthetic construct
  misc_feature 1..19: note = siRNA sense sequence
  source 1..19: mol_type = other RNA
tgcgacattccaatctaaa

SEQ ID NO: 65939 - RNA, 19 nt, synthetic construct
  misc_feature 1..19: note = siRNA antisense sequence
  source 1..19: mol_type = other RNA
tttagattggaatgtcgca

SEQ ID NO: 65940 - RNA, 19 nt, synthetic construct
  misc_feature 1..19: note = siRNA sense sequence
  source 1..19: mol_type = other RNA
ttgtgataatacagtagtg

SEQ ID NO: 65941 - RNA, 19 nt, synthetic construct
  misc_feature 1..19: note = siRNA antisense sequence
  source 1..19: mol_type = other RNA
cactactgtattatcacaa

SEQ ID NO: 65942 - RNA, 19 nt, synthetic construct
  misc_feature 1..19: note = siRNA sense sequence
  source 1..19: mol_type = other RNA
tgtgataatacagtagtgt

SEQ ID NO: 65943 - RNA, 19 nt, synthetic construct
  misc_feature 1..19: note = siRNA antisense sequence
  source 1..19: mol_type = other RNA
acactactgtattatcaca

SEQ ID NO: 65944 - RNA, 19 nt, synthetic construct
  misc_feature 1..19: note = siRNA sense sequence
  source 1..19: mol_type = other RNA
taatactttggttctccct

SEQ ID NO: 65945 - RNA, 19 nt, synthetic construct
  misc_feature 1..19: note = siRNA antisense sequence
  source 1..19: mol_type = other RNA
agggagaaccaaagtatta

SEQ ID NO: 65946 - RNA, 19 nt, synthetic construct
  misc_feature 1..19: note = siRNA sense sequence
  source 1..19: mol_type = other RNA
aatactttggttctccctg

SEQ ID NO: 65947 - RNA, 19 nt, synthetic construct
  misc_feature 1..19: note = siRNA antisense sequence
  source 1..19: mol_type = other RNA
cagggagaaccaaagtatt

SEQ ID NO: 65948 - RNA, 19 nt, synthetic construct
  misc_feature 1..19: note = siRNA sense sequence
  source 1..19: mol_type = other RNA
atactttggttctccctga

SEQ ID NO: 65949 - RNA, 19 nt, synthetic construct
  misc_feature 1..19: note = siRNA antisense sequence
  source 1..19: mol_type = other RNA
tcagggagaaccaaagtat

SEQ ID NO: 65950 - RNA, 19 nt, synthetic construct
  misc_feature 1..19: note = siRNA sense sequence
  source 1..19: mol_type = other RNA
tactttggttctccctgag

SEQ ID NO: 65951 - RNA, 19 nt, synthetic construct
  misc_feature 1..19: note = siRNA antisense sequence
  source 1..19: mol_type = other RNA
ctcagggagaaccaaagta

SEQ ID NO: 65952 - RNA, 19 nt, synthetic construct
  misc_feature 1..19: note = siRNA sense sequence
  source 1..19: mol_type = other RNA
ttggttctccctgagttaa

SEQ ID NO: 65953 - RNA, 19 nt, synthetic construct
  misc_feature 1..19: note = siRNA antisense sequence
  source 1..19: mol_type = other RNA
ttaactcagggagaaccaa

SEQ ID NO: 65954 - RNA, 19 nt, synthetic construct
  misc_feature 1..19: note = siRNA sense sequence
  source 1..19: mol_type = other RNA
tggttctccctgagttaaa

SEQ ID NO: 65955 - RNA, 19 nt, synthetic construct
  misc_feature 1..19: note = siRNA antisense sequence
  source 1..19: mol_type = other RNA
tttaactcagggagaacca

SEQ ID NO: 65956 - RNA, 19 nt, synthetic construct
  misc_feature 1..19: note = siRNA sense sequence
  source 1..19: mol_type = other RNA
cccttgagcattccaatcc

SEQ ID NO: 65957 - RNA, 19 nt, synthetic construct
  misc_feature 1..19: note = siRNA antisense sequence
  source 1..19: mol_type = other RNA
ggattggaatgctcaaggg

SEQ ID NO: 65958 - RNA, 19 nt, synthetic construct
  misc_feature 1..19: note = siRNA sense sequence
  source 1..19: mol_type = other RNA
cttgagcattccaatccat

SEQ ID NO: 65959 - RNA, 19 nt, synthetic construct
  misc_feature 1..19: note = siRNA antisense sequence
  source 1..19: mol_type = other RNA
atggattggaatgctcaag

SEQ ID NO: 65960 - RNA, 19 nt, synthetic construct
  misc_feature 1..19: note = siRNA sense sequence
  source 1..19: mol_type = other RNA
tgagcattccaatccattg

SEQ ID NO: 65961 - RNA, 19 nt, synthetic construct
  misc_feature 1..19: note = siRNA antisense sequence
  source 1..19: mol_type = other RNA
caatggattggaatgctca

SEQ ID NO: 65962 - RNA, 19 nt, synthetic construct
  misc_feature 1..19: note = siRNA sense sequence
  source 1..19: mol_type = other RNA
gagcattccaatccattga

SEQ ID NO: 65963 - RNA, 19 nt, synthetic construct
  misc_feature 1..19: note = siRNA antisense sequence
  source 1..19: mol_type = other RNA
tcaatggattggaatgctc

SEQ ID NO: 65964 - RNA, 19 nt, synthetic construct
  misc_feature 1..19: note = siRNA sense sequence
  source 1..19: mol_type = other RNA
agcattccaatccattgac

SEQ ID NO: 65965 - RNA, 19 nt, synthetic construct
  misc_feature 1..19: note = siRNA antisense sequence
  source 1..19: mol_type = other RNA
gtcaatggattggaatgct

SEQ ID NO: 65966 - RNA, 19 nt, synthetic construct
  misc_feature 1..19: note = siRNA sense sequence
  source 1..19: mol_type = other RNA
gcattccaatccattgaca

SEQ ID NO: 65967 - RNA, 19 nt, synthetic construct
  misc_feature 1..19: note = siRNA antisense sequence
  source 1..19: mol_type = other RNA
tgtcaatggattggaatgc

SEQ ID NO: 65968 - RNA, 19 nt, synthetic construct
  misc_feature 1..19: note = siRNA sense sequence
  source 1..19: mol_type = other RNA
cattccaatccattgacat

SEQ ID NO: 65969 - RNA, 19 nt, synthetic construct
  misc_feature 1..19: note = siRNA antisense sequence
  source 1..19: mol_type = other RNA
atgtcaatggattggaatg

SEQ ID NO: 65970 - RNA, 19 nt, synthetic construct
  misc_feature 1..19: note = siRNA sense sequence
  source 1..19: mol_type = other RNA
attccaatccattgacatt

SEQ ID NO: 65971 - RNA, 19 nt, synthetic construct
  misc_feature 1..19: note = siRNA antisense sequence
  source 1..19: mol_type = other RNA
aatgtcaatggattggaat

SEQ ID NO: 65972 - RNA, 19 nt, synthetic construct
  misc_feature 1..19: note = siRNA sense sequence
  source 1..19: mol_type = other RNA
tccaatccattgacattta

SEQ ID NO: 65973 - RNA, 19 nt, synthetic construct
  misc_feature 1..19: note = siRNA antisense sequence
  source 1..19: mol_type = other RNA
taaatgtcaatggattgga

SEQ ID NO: 65974 - RNA, 19 nt, synthetic construct
  misc_feature 1..19: note = siRNA sense sequence
  source 1..19: mol_type = other RNA
ccaatccattgacatttaa

SEQ ID NO: 65975 - RNA, 19 nt, synthetic construct
  misc_feature 1..19: note = siRNA antisense sequence
  source 1..19: mol_type = other RNA
ttaaatgtcaatggattgg

SEQ ID NO: 65976 - RNA, 19 nt, synthetic construct
  misc_feature 1..19: note = siRNA sense sequence
  source 1..19: mol_type = other RNA
caatccattgacatttaac

SEQ ID NO: 65977 - RNA, 19 nt, synthetic construct
  misc_feature 1..19: note = siRNA antisense sequence
  source 1..19: mol_type = other RNA
gttaaatgtcaatggattg

SEQ ID NO: 65978 - RNA, 19 nt, synthetic construct
  misc_feature 1..19: note = siRNA sense sequence
  source 1..19: mol_type = other RNA
aatccattgacatttaacc

SEQ ID NO: 65979 - RNA, 19 nt, synthetic construct
  misc_feature 1..19: note = siRNA antisense sequence
  source 1..19: mol_type = other RNA
ggttaaatgtcaatggatt

SEQ ID NO: 65980 - RNA, 19 nt, synthetic construct
  misc_feature 1..19: note = siRNA sense sequence
  source 1..19: mol_type = other RNA
atccattgacatttaaccc

SEQ ID NO: 65981 - RNA, 19 nt, synthetic construct
  misc_feature 1..19: note = siRNA antisense sequence
  source 1..19: mol_type = other RNA
gggttaaatgtcaatggat

SEQ ID NO: 65982 - RNA, 19 nt, synthetic construct
  misc_feature 1..19: note = siRNA sense sequence
  source 1..19: mol_type = other RNA
agatttagactagatgaag

SEQ ID NO: 65983 - RNA, 19 nt, synthetic construct
  misc_feature 1..19: note = siRNA antisense sequence
  source 1..19: mol_type = other RNA
cttcatctagtctaaatct

SEQ ID NO: 65984 - RNA, 19 nt, synthetic construct
  misc_feature 1..19: note = siRNA sense sequence
  source 1..19: mol_type = other RNA
gatttagactagatgaaga

SEQ ID NO: 65985 - RNA, 19 nt, synthetic construct
  misc_feature 1..19: note = siRNA antisense sequence
  source 1..19: mol_type = other RNA
tcttcatctagtctaaatc

SEQ ID NO: 65986 - RNA, 19 nt, synthetic construct
  misc_feature 1..19: note = siRNA sense sequence
  source 1..19: mol_type = other RNA
atttagactagatgaagag

SEQ ID NO: 65987 - RNA, 19 nt, synthetic construct
  misc_feature 1..19: note = siRNA antisense sequence
  source 1..19: mol_type = other RNA
ctcttcatctagtctaaat

SEQ ID NO: 65988 - RNA, 19 nt, synthetic construct
  misc_feature 1..19: note = siRNA sense sequence
  source 1..19: mol_type = other RNA
tttagactagatgaagagc

SEQ ID NO: 65989 - RNA, 19 nt, synthetic construct
  misc_feature 1..19: note = siRNA antisense sequence
  source 1..19: mol_type = other RNA
gctcttcatctagtctaaa

SEQ ID NO: 65990 - RNA, 19 nt, synthetic construct
  misc_feature 1..19: note = siRNA sense sequence
  source 1..19: mol_type = other RNA
ttagactagatgaagagca

SEQ ID NO: 65991 - RNA, 19 nt, synthetic construct
  misc_feature 1..19: note = siRNA antisense sequence
  source 1..19: mol_type = other RNA
tgctcttcatctagtctaa

SEQ ID NO: 65992 - RNA, 19 nt, synthetic construct
  misc_feature 1..19: note = siRNA sense sequence
  source 1..19: mol_type = other RNA
tagactagatgaagagcat

SEQ ID NO: 65993 - RNA, 19 nt, synthetic construct
  misc_feature 1..19: note = siRNA antisense sequence
  source 1..19: mol_type = other RNA
atgctcttcatctagtcta

SEQ ID NO: 65994 - RNA, 19 nt, synthetic construct
  misc_feature 1..19: note = siRNA sense sequence
  source 1..19: mol_type = other RNA
agactagatgaagagcatt

SEQ ID NO: 65995 - RNA, 19 nt, synthetic construct
  misc_feature 1..19: note = siRNA antisense sequence
  source 1..19: mol_type = other RNA
aatgctcttcatctagtct

SEQ ID NO: 65996 - RNA, 19 nt, synthetic construct
  misc_feature 1..19: note = siRNA sense sequence
  source 1..19: mol_type = other RNA
gactagatgaagagcattt

SEQ ID NO: 65997 - RNA, 19 nt, synthetic construct
  misc_feature 1..19: note = siRNA antisense sequence
  source 1..19: mol_type = other RNA
aaatgctcttcatctagtc

SEQ ID NO: 65998 - RNA, 19 nt, synthetic construct
  misc_feature 1..19: note = siRNA sense sequence
  source 1..19: mol_type = other RNA
actagatgaagagcatttt

SEQ ID NO: 65999 - RNA, 19 nt, synthetic construct
  misc_feature 1..19: note = siRNA antisense sequence
  source 1..19: mol_type = other RNA
aaaatgctcttcatctagt

SEQ ID NO: 66000 - RNA, 19 nt, synthetic construct
  misc_feature 1..19: note = siRNA sense sequence
  source 1..19: mol_type = other RNA
ctagatgaagagcattttc

SEQ ID NO: 66001 - RNA, 19 nt, synthetic construct
  misc_feature 1..19: note = siRNA antisense sequence
  source 1..19: mol_type = other RNA
gaaaatgctcttcatctag

SEQ ID NO: 66002 - RNA, 19 nt, synthetic construct
  misc_feature 1..19: note = siRNA sense sequence
  source 1..19: mol_type = other RNA
tagatgaagagcattttct

SEQ ID NO: 66003 - RNA, 19 nt, synthetic construct
  misc_feature 1..19: note = siRNA antisense sequence
  source 1..19: mol_type = other RNA
agaaaatgctcttcatcta

SEQ ID NO: 66004 - RNA, 19 nt, synthetic construct
  misc_feature 1..19: note = siRNA sense sequence
  source 1..19: mol_type = other RNA
agatgaagagcattttcta

SEQ ID NO: 66005 - RNA, 19 nt, synthetic construct
  misc_feature 1..19: note = siRNA antisense sequence
  source 1..19: mol_type = other RNA
tagaaaatgctcttcatct

SEQ ID NO: 66006 - RNA, 19 nt, synthetic construct
  misc_feature 1..19: note = siRNA sense sequence
  source 1..19: mol_type = other RNA
gatgaagagcattttctaa

SEQ ID NO: 66007 - RNA, 19 nt, synthetic construct
  misc_feature 1..19: note = siRNA antisense sequence
  source 1..19: mol_type = other RNA
ttagaaaatgctcttcatc

SEQ ID NO: 66008 - RNA, 19 nt, synthetic construct
  misc_feature 1..19: note = siRNA sense sequence
  source 1..19: mol_type = other RNA
agattaatgcactggtaga

SEQ ID NO: 66009 - RNA, 19 nt, synthetic construct
  misc_feature 1..19: note = siRNA antisense sequence
  source 1..19: mol_type = other RNA
tctaccagtgcattaatct

SEQ ID NO: 66010 - RNA, 19 nt, synthetic construct
  misc_feature 1..19: note = siRNA sense sequence
  source 1..19: mol_type = other RNA
gattaatgcactggtagag

SEQ ID NO: 66011 - RNA, 19 nt, synthetic construct
  misc_feature 1..19: note = siRNA antisense sequence
  source 1..19: mol_type = other RNA
ctctaccagtgcattaatc

SEQ ID NO: 66012 - RNA, 19 nt, synthetic construct
  misc_feature 1..19: note = siRNA sense sequence
  source 1..19: mol_type = other RNA
agaattgtagcctgcaaga

SEQ ID NO: 66013 - RNA, 19 nt, synthetic construct
  misc_feature 1..19: note = siRNA antisense sequence
  source 1..19: mol_type = other RNA
tcttgcaggctacaattct

SEQ ID NO: 66014 - RNA, 19 nt, synthetic construct
  misc_feature 1..19: note = siRNA sense sequence
  source 1..19: mol_type = other RNA
gaattgtagcctgcaagaa

SEQ ID NO: 66015 - RNA, 19 nt, synthetic construct
  misc_feature 1..19: note = siRNA antisense sequence
  source 1..19: mol_type = other RNA
ttcttgcaggctacaattc

SEQ ID NO: 66016 - RNA, 19 nt, synthetic construct
  misc_feature 1..19: note = siRNA sense sequence
  source 1..19: mol_type = other RNA
tcaatgttccaggagttct

SEQ ID NO: 66017 - RNA, 19 nt, synthetic construct
  misc_feature 1..19: note = siRNA antisense sequence
  source 1..19: mol_type = other RNA
agaactcctggaacattga

SEQ ID NO: 66018 - RNA, 19 nt, synthetic construct
  misc_feature 1..19: note = siRNA sense sequence
  source 1..19: mol_type = other RNA
caatgttccaggagttcta

SEQ ID NO: 66019 - RNA, 19 nt, synthetic construct
  misc_feature 1..19: note = siRNA antisense sequence
  source 1..19: mol_type = other RNA
tagaactcctggaacattg

SEQ ID NO: 66020 - RNA, 19 nt, synthetic construct
  misc_feature 1..19: note = siRNA sense sequence
  source 1..19: mol_type = other RNA
aatgttccaggagttctaa

SEQ ID NO: 66021 - RNA, 19 nt, synthetic construct
  misc_feature 1..19: note = siRNA antisense sequence
  source 1..19: mol_type = other RNA
ttagaactcctggaacatt

SEQ ID NO: 66022 - RNA, 19 nt, synthetic construct
  misc_feature 1..19: note = siRNA sense sequence
  source 1..19: mol_type = other RNA
atgttccaggagttctaat

SEQ ID NO: 66023 - RNA, 19 nt, synthetic construct
  misc_feature 1..19: note = siRNA antisense sequence
  source 1..19: mol_type = other RNA
attagaactcctggaacat

SEQ ID NO: 66024 - RNA, 19 nt, synthetic construct
  misc_feature 1..19: note = siRNA sense sequence
  source 1..19: mol_type = other RNA
tgttccaggagttctaata

SEQ ID NO: 66025 - RNA, 19 nt, synthetic construct
  misc_feature 1..19: note = siRNA antisense sequence
  source 1..19: mol_type = other RNA
tattagaactcctggaaca

SEQ ID NO: 66026 - RNA, 19 nt, synthetic construct
  misc_feature 1..19: note = siRNA sense sequence
  source 1..19: mol_type = other RNA
gttccaggagttctaatag

SEQ ID NO: 66027 - RNA, 19 nt, synthetic construct
  misc_feature 1..19: note = siRNA antisense sequence
  source 1..19: mol_type = other RNA
ctattagaactcctggaac

SEQ ID NO: 66028 - RNA, 19 nt, synthetic construct
  misc_feature 1..19: note = siRNA sense sequence
  source 1..19: mol_type = other RNA
ttccaggagttctaatagg

SEQ ID NO: 66029 - RNA, 19 nt, synthetic construct
  misc_feature 1..19: note = siRNA antisense sequence
  source 1..19: mol_type = other RNA
cctattagaactcctggaa

SEQ ID NO: 66030 - RNA, 19 nt, synthetic construct
  misc_feature 1..19: note = siRNA sense sequence
  source 1..19: mol_type = other RNA
ccaggagttctaataggtg

SEQ ID NO: 66031 - RNA, 19 nt, synthetic construct
  misc_feature 1..19: note = siRNA antisense sequence
  source 1..19: mol_type = other RNA
cacctattagaactcctgg

SEQ ID NO: 66032 - RNA, 19 nt, synthetic construct
  misc_feature 1..19: note = siRNA sense sequence
  source 1..19: mol_type = other RNA
aggagttctaataggtgtt

SEQ ID NO: 66033 - RNA, 19 nt, synthetic construct
  misc_feature 1..19: note = siRNA antisense sequence
  source 1..19: mol_type = other RNA
aacacctattagaactcct

SEQ ID NO: 66034 - RNA, 19 nt, synthetic construct
  misc_feature 1..19: note = siRNA sense sequence
  source 1..19: mol_type = other RNA
ggagttctaataggtgttt

SEQ ID NO: 66035 - RNA, 19 nt, synthetic construct
  misc_feature 1..19: note = siRNA antisense sequence
  source 1..19: mol_type = other RNA
aaacacctattagaactcc

SEQ ID NO: 66036 - RNA, 19 nt, synthetic construct
  misc_feature 1..19: note = siRNA sense sequence
  source 1..19: mol_type = other RNA
gagttctaataggtgttta

SEQ ID NO: 66037 - RNA, 19 nt, synthetic construct
  misc_feature 1..19: note = siRNA antisense sequence
  source 1..19: mol_type = other RNA
taaacacctattagaactc

SEQ ID NO: 66038 - RNA, 19 nt, synthetic construct
  misc_feature 1..19: note = siRNA sense sequence
  source 1..19: mol_type = other RNA
aattttcagcttgctattc

SEQ ID NO: 66039 - RNA, 19 nt, synthetic construct
  misc_feature 1..19: note = siRNA antisense sequence
  source 1..19: mol_type = other RNA
gaatagcaagctgaaaatt

SEQ ID NO: 66040 - RNA, 19 nt, synthetic construct
  misc_feature 1..19: note = siRNA sense sequence
  source 1..19: mol_type = other RNA
attttcagcttgctattca

SEQ ID NO: 66041 - RNA, 19 nt, synthetic construct
  misc_feature 1..19: note = siRNA antisense sequence
  source 1..19: mol_type = other RNA
tgaatagcaagctgaaaat

SEQ ID NO: 66042 - RNA, 19 nt, synthetic construct
  misc_feature 1..19: note = siRNA sense sequence
  source 1..19: mol_type = other RNA
ttttcagcttgctattcaa

SEQ ID NO: 66043 - RNA, 19 nt, synthetic construct
  misc_feature 1..19: note = siRNA antisense sequence
  source 1..19: mol_type = other RNA
ttgaatagcaagctgaaaa

SEQ ID NO: 66044 - RNA, 19 nt, synthetic construct
  misc_feature 1..19: note = siRNA sense sequence
  source 1..19: mol_type = other RNA
tttcagcttgctattcaaa

SEQ ID NO: 66045 - RNA, 19 nt, synthetic construct
  misc_feature 1..19: note = siRNA antisense sequence
  source 1..19: mol_type = other RNA
tttgaatagcaagctgaaa

SEQ ID NO: 66046 - RNA, 19 nt, synthetic construct
  misc_feature 1..19: note = siRNA sense sequence
  source 1..19: mol_type = other RNA
ttcagcttgctattcaaat

SEQ ID NO: 66047 - RNA, 19 nt, synthetic construct
  misc_feature 1..19: note = siRNA antisense sequence
  source 1..19: mol_type = other RNA
atttgaatagcaagctgaa

SEQ ID NO: 66048 - RNA, 19 nt, synthetic construct
  misc_feature 1..19: note = siRNA sense sequence
  source 1..19: mol_type = other RNA
tcagcttgctattcaaata

SEQ ID NO: 66049 - RNA, 19 nt, synthetic construct
  misc_feature 1..19: note = siRNA antisense sequence
  source 1..19: mol_type = other RNA
tatttgaatagcaagctga

SEQ ID NO: 66050 - RNA, 19 nt, synthetic construct
  misc_feature 1..19: note = siRNA sense sequence
  source 1..19: mol_type = other RNA
cagcttgctattcaaatat

SEQ ID NO: 66051 - RNA, 19 nt, synthetic construct
  misc_feature 1..19: note = siRNA antisense sequence
  source 1..19: mol_type = other RNA
atatttgaatagcaagctg

SEQ ID NO: 66052 - RNA, 19 nt, synthetic construct
  misc_feature 1..19: note = siRNA sense sequence
  source 1..19: mol_type = other RNA
agcttgctattcaaatatc

SEQ ID NO: 66053 - RNA, 19 nt, synthetic construct
  misc_feature 1..19: note = siRNA antisense sequence
  source 1..19: mol_type = other RNA
gatatttgaatagcaagct

SEQ ID NO: 66054 - RNA, 19 nt, synthetic construct
  misc_feature 1..19: note = siRNA sense sequence
  source 1..19: mol_type = other RNA
gcttgctattcaaatatcc

SEQ ID NO: 66055 - RNA, 19 nt, synthetic construct
  misc_feature 1..19: note = siRNA antisense sequence
  source 1..19: mol_type = other RNA
ggatatttgaatagcaagc

SEQ ID NO: 66056 - RNA, 19 nt, synthetic construct
  misc_feature 1..19: note = siRNA sense sequence
  source 1..19: mol_type = other RNA
ttcaaatatccaaagatgg

SEQ ID NO: 66057 - RNA, 19 nt, synthetic construct
  misc_feature 1..19: note = siRNA antisense sequence
  source 1..19: mol_type = other RNA
ccatctttggatatttgaa

SEQ ID NO: 66058 - RNA, 19 nt, synthetic construct
  misc_feature 1..19: note = siRNA sense sequence
  source 1..19: mol_type = other RNA
caaatatccaaagatgggc

SEQ ID NO: 66059 - RNA, 19 nt, synthetic construct
  misc_feature 1..19: note = siRNA antisense sequence
  source 1..19: mol_type = other RNA
gcccatctttggatatttg

SEQ ID NO: 66060 - RNA, 19 nt, synthetic construct
  misc_feature 1..19: note = siRNA sense sequence
  source 1..19: mol_type = other RNA
aaatatccaaagatgggct

SEQ ID NO: 66061 - RNA, 19 nt, synthetic construct
  misc_feature 1..19: note = siRNA antisense sequence
  source 1..19: mol_type = other RNA
agcccatctttggatattt

SEQ ID NO: 66062 - RNA, 19 nt, synthetic construct
  misc_feature 1..19: note = siRNA sense sequence
  source 1..19: mol_type = other RNA
aatatccaaagatgggcta

SEQ ID NO: 66063 - RNA, 19 nt, synthetic construct
  misc_feature 1..19: note = siRNA antisense sequence
  source 1..19: mol_type = other RNA
tagcccatctttggatatt

SEQ ID NO: 66064 - RNA, 19 nt, synthetic construct
  misc_feature 1..19: note = siRNA sense sequence
  source 1..19: mol_type = other RNA
atatccaaagatgggctac

SEQ ID NO: 66065 - RNA, 19 nt, synthetic construct
  misc_feature 1..19: note = siRNA antisense sequence
  source 1..19: mol_type = other RNA
gtagcccatctttggatat

SEQ ID NO: 66066 - RNA, 19 nt, synthetic construct
  misc_feature 1..19: note = siRNA sense sequence
  source 1..19: mol_type = other RNA
tatccaaagatgggctacc

SEQ ID NO: 66067 - RNA, 19 nt, synthetic construct
  misc_feature 1..19: note = siRNA antisense sequence
  source 1..19: mol_type = other RNA
ggtagcccatctttggata

SEQ ID NO: 66068 - RNA, 19 nt, synthetic construct
  misc_feature 1..19: note = siRNA sense sequence
  source 1..19: mol_type = other RNA
atccaaagatgggctaccg

SEQ ID NO: 66069 - RNA, 19 nt, synthetic construct
  misc_feature 1..19: note = siRNA antisense sequence
  source 1..19: mol_type = other RNA
cggtagcccatctttggat

SEQ ID NO: 66070 - RNA, 19 nt, synthetic construct
  misc_feature 1..19: note = siRNA sense sequence
  source 1..19: mol_type = other RNA
tccaaagatgggctaccgg

SEQ ID NO: 66071 - RNA, 19 nt, synthetic construct
  misc_feature 1..19: note = siRNA antisense sequence
  source 1..19: mol_type = other RNA
ccggtagcccatctttgga

SEQ ID NO: 66072 - RNA, 19 nt, synthetic construct
  misc_feature 1..19: note = siRNA sense sequence
  source 1..19: mol_type = other RNA
ccaaagatgggctaccggg

SEQ ID NO: 66073 - RNA, 19 nt, synthetic construct
  misc_feature 1..19: note = siRNA antisense sequence
  source 1..19: mol_type = other RNA
cccggtagcccatctttgg

SEQ ID NO: 66074 - RNA, 19 nt, synthetic construct
  misc_feature 1..19: note = siRNA sense sequence
  source 1..19: mol_type = other RNA
gcagagtgccattatgggt

SEQ ID NO: 66075 - RNA, 19 nt, synthetic construct
  misc_feature 1..19: note = siRNA antisense sequence
  source 1..19: mol_type = other RNA
acccataatggcactctgc

SEQ ID NO: 66076 - RNA, 19 nt, synthetic construct
  misc_feature 1..19: note = siRNA sense sequence
  source 1..19: mol_type = other RNA
cagagtgccattatgggtc

SEQ ID NO: 66077 - RNA, 19 nt, synthetic construct
  misc_feature 1..19: note = siRNA antisense sequence
  source 1..19: mol_type = other RNA
gacccataatggcactctg

SEQ ID NO: 66078 - RNA, 19 nt, synthetic construct
  misc_feature 1..19: note = siRNA sense sequence
  source 1..19: mol_type = other RNA
agagtgccattatgggtca

SEQ ID NO: 66079 - RNA, 19 nt, synthetic construct
  misc_feature 1..19: note = siRNA antisense sequence
  source 1..19: mol_type = other RNA
tgacccataatggcactct

SEQ ID NO: 66080 - RNA, 19 nt, synthetic construct
  misc_feature 1..19: note = siRNA sense sequence
  source 1..19: mol_type = other RNA
gagtgccattatgggtcat

SEQ ID NO: 66081 - RNA, 19 nt, synthetic construct
  misc_feature 1..19: note = siRNA antisense sequence
  source 1..19: mol_type = other RNA
atgacccataatggcactc

SEQ ID NO: 66082 - RNA, 19 nt, synthetic construct
  misc_feature 1..19: note = siRNA sense sequence
  source 1..19: mol_type = other RNA
agtgccattatgggtcatc

SEQ ID NO: 66083 - RNA, 19 nt, synthetic construct
  misc_feature 1..19: note = siRNA antisense sequence
  source 1..19: mol_type = other RNA
gatgacccataatggcact

SEQ ID NO: 66084 - RNA, 19 nt, synthetic construct
  misc_feature 1..19: note = siRNA sense sequence
  source 1..19: mol_type = other RNA
gtgccattatgggtcatcc

SEQ ID NO: 66085 - RNA, 19 nt, synthetic construct
  misc_feature 1..19: note = siRNA antisense sequence
  source 1..19: mol_type = other RNA
ggatgacccataatggcac

SEQ ID NO: 66086 - RNA, 19 nt, synthetic construct
  misc_feature 1..19: note = siRNA sense sequence
  source 1..19: mol_type = other RNA
tgccattatgggtcatcct

SEQ ID NO: 66087 - RNA, 19 nt, synthetic construct
  misc_feature 1..19: note = siRNA antisense sequence
  source 1..19: mol_type = other RNA
aggatgacccataatggca

SEQ ID NO: 66088 - RNA, 19 nt, synthetic construct
  misc_feature 1..19: note = siRNA sense sequence
  source 1..19: mol_type = other RNA
gccattatgggtcatcctg

SEQ ID NO: 66089 - RNA, 19 nt, synthetic construct
  misc_feature 1..19: note = siRNA antisense sequence
  source 1..19: mol_type = other RNA
caggatgacccataatggc

SEQ ID NO: 66090 - RNA, 19 nt, synthetic construct
  misc_feature 1..19: note = siRNA sense sequence
  source 1..19: mol_type = other RNA
ccattatgggtcatcctgc

SEQ ID NO: 66091 - RNA, 19 nt, synthetic construct
  misc_feature 1..19: note = siRNA antisense sequence
  source 1..19: mol_type = other RNA
gcaggatgacccataatgg

SEQ ID NO: 66092 - RNA, 19 nt, synthetic construct
  misc_feature 1..19: note = siRNA sense sequence
  source 1..19: mol_type = other RNA
cattatgggtcatcctgct

SEQ ID NO: 66093 - RNA, 19 nt, synthetic construct
  misc_feature 1..19: note = siRNA antisense sequence
  source 1..19: mol_type = other RNA
agcaggatgacccataatg

SEQ ID NO: 66094 - RNA, 19 nt, synthetic construct
  misc_feature 1..19: note = siRNA sense sequence
  source 1..19: mol_type = other RNA
ggtcatcctgctgagtgct

SEQ ID NO: 66095 - RNA, 19 nt, synthetic construct
  misc_feature 1..19: note = siRNA antisense sequence
  source 1..19: mol_type = other RNA
agcactcagcaggatgacc

SEQ ID NO: 66096 - RNA, 19 nt, synthetic construct
  misc_feature 1..19: note = siRNA sense sequence
  source 1..19: mol_type = other RNA
gtcatcctgctgagtgctt

SEQ ID NO: 66097 - RNA, 19 nt, synthetic construct
  misc_feature 1..19: note = siRNA antisense sequence
  source 1..19: mol_type = other RNA
aagcactcagcaggatgac

SEQ ID NO: 66098 - RNA, 19 nt, synthetic construct
  misc_feature 1..19: note = siRNA sense sequence
  source 1..19: mol_type = other RNA
tcatcctgctgagtgcttt

SEQ ID NO: 66099 - RNA, 19 nt, synthetic construct
  misc_feature 1..19: note = siRNA antisense sequence
  source 1..19: mol_type = other RNA
aaagcactcagcaggatga

SEQ ID NO: 66100 - RNA, 19 nt, synthetic construct
  misc_feature 1..19: note = siRNA sense sequence
  source 1..19: mol_type = other RNA
cctgctgagtgcttttgcc

SEQ ID NO: 66101 - RNA, 19 nt, synthetic construct
  misc_feature 1..19: note = siRNA antisense sequence
  source 1..19: mol_type = other RNA
ggcaaaagcactcagcagg

SEQ ID NO: 66102 - RNA, 19 nt, synthetic construct
  misc_feature 1..19: note = siRNA sense sequence
  source 1..19: mol_type = other RNA
ctgctgagtgcttttgccg

SEQ ID NO: 66103 - RNA, 19 nt, synthetic construct
  misc_feature 1..19: note = siRNA antisense sequence
  source 1..19: mol_type = other RNA
cggcaaaagcactcagcag

SEQ ID NO: 66104 - RNA, 19 nt, synthetic construct
  misc_feature 1..19: note = siRNA sense sequence
  source 1..19: mol_type = other RNA
tgctgagtgcttttgccgg

SEQ ID NO: 66105 - RNA, 19 nt, synthetic construct
  misc_feature 1..19: note = siRNA antisense sequence
  source 1..19: mol_type = other RNA
ccggcaaaagcactcagca

SEQ ID NO: 66106 - RNA, 19 nt, synthetic construct
  misc_feature 1..19: note = siRNA sense sequence
  source 1..19: mol_type = other RNA
gctgagtgcttttgccgga

SEQ ID NO: 66107 - RNA, 19 nt, synthetic construct
  misc_feature 1..19: note = siRNA antisense sequence
  source 1..19: mol_type = other RNA
tccggcaaaagcactcagc

SEQ ID NO: 66108 - RNA, 19 nt, synthetic construct
  misc_feature 1..19: note = siRNA sense sequence
  source 1..19: mol_type = other RNA
ctgagtgcttttgccggat

SEQ ID NO: 66109 - RNA, 19 nt, synthetic construct
  misc_feature 1..19: note = siRNA antisense sequence
  source 1..19: mol_type = other RNA
atccggcaaaagcactcag

SEQ ID NO: 66110 - RNA, 19 nt, synthetic construct
  misc_feature 1..19: note = siRNA sense sequence
  source 1..19: mol_type = other RNA
tgagtgcttttgccggatt

SEQ ID NO: 66111 - RNA, 19 nt, synthetic construct
  misc_feature 1..19: note = siRNA antisense sequence
  source 1..19: mol_type = other RNA
aatccggcaaaagcactca

SEQ ID NO: 66112 - RNA, 19 nt, synthetic construct
  misc_feature 1..19: note = siRNA sense sequence
  source 1..19: mol_type = other RNA
gagtgcttttgccggattg

SEQ ID NO: 66113 - RNA, 19 nt, synthetic construct
  misc_feature 1..19: note = siRNA antisense sequence
  source 1..19: mol_type = other RNA
caatccggcaaaagcactc

SEQ ID NO: 66114 - RNA, 19 nt, synthetic construct
  misc_feature 1..19: note = siRNA sense sequence
  source 1..19: mol_type = other RNA
agtgcttttgccggattgt

SEQ ID NO: 66115 - RNA, 19 nt, synthetic construct
  misc_feature 1..19: note = siRNA antisense sequence
  source 1..19: mol_type = other RNA
acaatccggcaaaagcact

SEQ ID NO: 66116 - RNA, 19 nt, synthetic construct
  misc_feature 1..19: note = siRNA sense sequence
  source 1..19: mol_type = other RNA
gtgcttttgccggattgtt

SEQ ID NO: 66117 - RNA, 19 nt, synthetic construct
  misc_feature 1..19: note = siRNA antisense sequence
  source 1..19: mol_type = other RNA
aacaatccggcaaaagcac

SEQ ID NO: 66118 - RNA, 19 nt, synthetic construct
  misc_feature 1..19: note = siRNA sense sequence
  source 1..19: mol_type = other RNA
ttttgccggattgttgctg

SEQ ID NO: 66119 - RNA, 19 nt, synthetic construct
  misc_feature 1..19: note = siRNA antisense sequence
  source 1..19: mol_type = other RNA
cagcaacaatccggcaaaa

SEQ ID NO: 66120 - RNA, 19 nt, synthetic construct
  misc_feature 1..19: note = siRNA sense sequence
  source 1..19: mol_type = other RNA
tttgccggattgttgctgt

SEQ ID NO: 66121 - RNA, 19 nt, synthetic construct
  misc_feature 1..19: note = siRNA antisense sequence
  source 1..19: mol_type = other RNA
acagcaacaatccggcaaa

SEQ ID NO: 66122 - RNA, 19 nt, synthetic construct
  misc_feature 1..19: note = siRNA sense sequence
  source 1..19: mol_type = other RNA
ttgccggattgttgctgtt

SEQ ID NO: 66123 - RNA, 19 nt, synthetic construct
  misc_feature 1..19: note = siRNA antisense sequence
  source 1..19: mol_type = other RNA
aacagcaacaatccggcaa

SEQ ID NO: 66124 - RNA, 19 nt, synthetic construct
  misc_feature 1..19: note = siRNA sense sequence
  source 1..19: mol_type = other RNA
tgccggattgttgctgtta

SEQ ID NO: 66125 - RNA, 19 nt, synthetic construct
  misc_feature 1..19: note = siRNA antisense sequence
  source 1..19: mol_type = other RNA
taacagcaacaatccggca

SEQ ID NO: 66126 - RNA, 19 nt, synthetic construct
  misc_feature 1..19: note = siRNA sense sequence
  source 1..19: mol_type = other RNA
gccggattgttgctgttaa

SEQ ID NO: 66127 - RNA, 19 nt, synthetic construct
  misc_feature 1..19: note = siRNA antisense sequence
  source 1..19: mol_type = other RNA
ttaacagcaacaatccggc

SEQ ID NO: 66128 - RNA, 19 nt, synthetic construct
  misc_feature 1..19: note = siRNA sense sequence
  source 1..19: mol_type = other RNA
ccggattgttgctgttaat

SEQ ID NO: 66129 - RNA, 19 nt, synthetic construct
  misc_feature 1..19: note = siRNA antisense sequence
  source 1..19: mol_type = other RNA
attaacagcaacaatccgg

SEQ ID NO: 66130 - RNA, 19 nt, synthetic construct
  misc_feature 1..19: note = siRNA sense sequence
  source 1..19: mol_type = other RNA
cggattgttgctgttaatg

SEQ ID NO: 66131 - RNA, 19 nt, synthetic construct
  misc_feature 1..19: note = siRNA antisense sequence
  source 1..19: mol_type = other RNA
cattaacagcaacaatccg

SEQ ID NO: 66132 - RNA, 19 nt, synthetic construct
  misc_feature 1..19: note = siRNA sense sequence
  source 1..19: mol_type = other RNA
gattgttgctgttaatgct

SEQ ID NO: 66133 - RNA, 19 nt, synthetic construct
  misc_feature 1..19: note = siRNA antisense sequence
  source 1..19: mol_type = other RNA
agcattaacagcaacaatc

SEQ ID NO: 66134 - RNA, 19 nt, synthetic construct
  misc_feature 1..19: note = siRNA sense sequence
  source 1..19: mol_type = other RNA
attgttgctgttaatgctg

SEQ ID NO: 66135 - RNA, 19 nt, synthetic construct
  misc_feature 1..19: note = siRNA antisense sequence
  source 1..19: mol_type = other RNA
cagcattaacagcaacaat

SEQ ID NO: 66136 - RNA, 19 nt, synthetic construct
  misc_feature 1..19: note = siRNA sense sequence
  source 1..19: mol_type = other RNA
tgctgttaatgctgctcat

SEQ ID NO: 66137 - RNA, 19 nt, synthetic construct
  misc_feature 1..19: note = siRNA antisense sequence
  source 1..19: mol_type = other RNA
atgagcagcattaacagca

SEQ ID NO: 66138 - RNA, 19 nt, synthetic construct
  misc_feature 1..19: note = siRNA sense sequence
  source 1..19: mol_type = other RNA
tcattttagcactgtggaa

SEQ ID NO: 66139 - RNA, 19 nt, synthetic construct
  misc_feature 1..19: note = siRNA antisense sequence
  source 1..19: mol_type = other RNA
ttccacagtgctaaaatga

SEQ ID NO: 66140 - RNA, 19 nt, synthetic construct
  misc_feature 1..19: note = siRNA sense sequence
  source 1..19: mol_type = other RNA
ttttagcactgtggaaggt

SEQ ID NO: 66141 - RNA, 19 nt, synthetic construct
  misc_feature 1..19: note = siRNA antisense sequence
  source 1..19: mol_type = other RNA
accttccacagtgctaaaa

SEQ ID NO: 66142 - RNA, 19 nt, synthetic construct
  misc_feature 1..19: note = siRNA sense sequence
  source 1..19: mol_type = other RNA
tttagcactgtggaaggta

SEQ ID NO: 66143 - RNA, 19 nt, synthetic construct
  misc_feature 1..19: note = siRNA antisense sequence
  source 1..19: mol_type = other RNA
taccttccacagtgctaaa

SEQ ID NO: 66144 - RNA, 19 nt, synthetic construct
  misc_feature 1..19: note = siRNA sense sequence
  source 1..19: mol_type = other RNA
ttagcactgtggaaggtaa

SEQ ID NO: 66145 - RNA, 19 nt, synthetic construct
  misc_feature 1..19: note = siRNA antisense sequence
  source 1..19: mol_type = other RNA
ttaccttccacagtgctaa

SEQ ID NO: 66146 - RNA, 19 nt, synthetic construct
  misc_feature 1..19: note = siRNA sense sequence
  source 1..19: mol_type = other RNA
tagcactgtggaaggtaaa

SEQ ID NO: 66147 - RNA, 19 nt, synthetic construct
  misc_feature 1..19: note = siRNA antisense sequence
  source 1..19: mol_type = other RNA
tttaccttccacagtgcta

SEQ ID NO: 66148 - RNA, 19 nt, synthetic construct
  misc_feature 1..19: note = siRNA sense sequence
  source 1..19: mol_type = other RNA
aattcctttgactctctac

SEQ ID NO: 66149 - RNA, 19 nt, synthetic construct
  misc_feature 1..19: note = siRNA antisense sequence
  source 1..19: mol_type = other RNA
gtagagagtcaaaggaatt

SEQ ID NO: 66150 - RNA, 19 nt, synthetic construct
  misc_feature 1..19: note = siRNA sense sequence
  source 1..19: mol_type = other RNA
cctttgactctctacttca

SEQ ID NO: 66151 - RNA, 19 nt, synthetic construct
  misc_feature 1..19: note = siRNA antisense sequence
  source 1..19: mol_type = other RNA
tgaagtagagagtcaaagg

SEQ ID NO: 66152 - RNA, 19 nt, synthetic construct
  misc_feature 1..19: note = siRNA sense sequence
  source 1..19: mol_type = other RNA
tgactctctacttcaatca

SEQ ID NO: 66153 - RNA, 19 nt, synthetic construct
  misc_feature 1..19: note = siRNA antisense sequence
  source 1..19: mol_type = other RNA
tgattgaagtagagagtca

SEQ ID NO: 66154 - RNA, 19 nt, synthetic construct
  misc_feature 1..19: note = siRNA sense sequence
  source 1..19: mol_type = other RNA
gactctctacttcaatcat

SEQ ID NO: 66155 - RNA, 19 nt, synthetic construct
  misc_feature 1..19: note = siRNA antisense sequence
  source 1..19: mol_type = other RNA
atgattgaagtagagagtc

SEQ ID NO: 66156 - RNA, 19 nt, synthetic construct
  misc_feature 1..19: note = siRNA sense sequence
  source 1..19: mol_type = other RNA
actctctacttcaatcatc

SEQ ID NO: 66157 - RNA, 19 nt, synthetic construct
  misc_feature 1..19: note = siRNA antisense sequence
  source 1..19: mol_type = other RNA
gatgattgaagtagagagt

SEQ ID NO: 66158 - RNA, 19 nt, synthetic construct
  misc_feature 1..19: note = siRNA sense sequence
  source 1..19: mol_type = other RNA
ctctctacttcaatcatca

SEQ ID NO: 66159 - RNA, 19 nt, synthetic construct
  misc_feature 1..19: note = siRNA antisense sequence
  source 1..19: mol_type = other RNA
tgatgattgaagtagagag

SEQ ID NO: 66160 - RNA, 19 nt, synthetic construct
  misc_feature 1..19: note = siRNA sense sequence
  source 1..19: mol_type = other RNA
tctctacttcaatcatcaa

SEQ ID NO: 66161 - RNA, 19 nt, synthetic construct
  misc_feature 1..19: note = siRNA antisense sequence
  source 1..19: mol_type = other RNA
ttgatgattgaagtagaga

SEQ ID NO: 66162 - RNA, 19 nt, synthetic construct
  misc_feature 1..19: note = siRNA sense sequence
  source 1..19: mol_type = other RNA
ctctacttcaatcatcaac

SEQ ID NO: 66163 - RNA, 19 nt, synthetic construct
  misc_feature 1..19: note = siRNA antisense sequence
  source 1..19: mol_type = other RNA
gttgatgattgaagtagag

SEQ ID NO: 66164 - RNA, 19 nt, synthetic construct
  misc_feature 1..19: note = siRNA sense sequence
  source 1..19: mol_type = other RNA
tagagtttagtatgatagg

SEQ ID NO: 66165 - RNA, 19 nt, synthetic construct
  misc_feature 1..19: note = siRNA antisense sequence
  source 1..19: mol_type = other RNA
cctatcatactaaactcta

SEQ ID NO: 66166 - RNA, 19 nt, synthetic construct
  misc_feature 1..19: note = siRNA sense sequence
  source 1..19: mol_type = other RNA
agagtttagtatgataggg

SEQ ID NO: 66167 - RNA, 19 nt, synthetic construct
  misc_feature 1..19: note = siRNA antisense sequence
  source 1..19: mol_type = other RNA
ccctatcatactaaactct

SEQ ID NO: 66168 - RNA, 19 nt, synthetic construct
  misc_feature 1..19: note = siRNA sense sequence
  source 1..19: mol_type = other RNA
gggactttcacatgtgtaa

SEQ ID NO: 66169 - RNA, 19 nt, synthetic construct
  misc_feature 1..19: note = siRNA antisense sequence
  source 1..19: mol_type = other RNA
ttacacatgtgaaagtccc

SEQ ID NO: 66170 - RNA, 19 nt, synthetic construct
  misc_feature 1..19: note = siRNA sense sequence
  source 1..19: mol_type = other RNA
ggactttcacatgtgtaac

SEQ ID NO: 66171 - RNA, 19 nt, synthetic construct
  misc_feature 1..19: note = siRNA antisense sequence
  source 1..19: mol_type = other RNA
gttacacatgtgaaagtcc

SEQ ID NO: 66172 - RNA, 19 nt, synthetic construct
  misc_feature 1..19: note = siRNA sense sequence
  source 1..19: mol_type = other RNA
ttcctatgtcaatttaagg

SEQ ID NO: 66173 - RNA, 19 nt, synthetic construct
  misc_feature 1..19: note = siRNA antisense sequence
  source 1..19: mol_type = other RNA
ccttaaattgacataggaa

SEQ ID NO: 66174 - RNA, 19 nt, synthetic construct
  misc_feature 1..19: note = siRNA sense sequence
  source 1..19: mol_type = other RNA
aaggatatataagcagtag

SEQ ID NO: 66175 - RNA, 19 nt, synthetic construct
  misc_feature 1..19: note = siRNA antisense sequence
  source 1..19: mol_type = other RNA
ctactgcttatatatcctt

SEQ ID NO: 66176 - RNA, 19 nt, synthetic construct
  misc_feature 1..19: note = siRNA sense sequence
  source 1..19: mol_type = other RNA
aggatatataagcagtaga

SEQ ID NO: 66177 - RNA, 19 nt, synthetic construct
  misc_feature 1..19: note = siRNA antisense sequence
  source 1..19: mol_type = other RNA
tctactgcttatatatcct

SEQ ID NO: 66178 - RNA, 19 nt, synthetic construct
  misc_feature 1..19: note = siRNA sense sequence
  source 1..19: mol_type = other RNA
ggatatataagcagtagat

SEQ ID NO: 66179 - RNA, 19 nt, synthetic construct
  misc_feature 1..19: note = siRNA antisense sequence
  source 1..19: mol_type = other RNA
atctactgcttatatatcc

SEQ ID NO: 66180 - RNA, 19 nt, synthetic construct
  misc_feature 1..19: note = siRNA sense sequence
  source 1..19: mol_type = other RNA
tataagcagtagattcaag

SEQ ID NO: 66181 - RNA, 19 nt, synthetic construct
  misc_feature 1..19: note = siRNA antisense sequence
  source 1..19: mol_type = other RNA
cttgaatctactgcttata

SEQ ID NO: 66182 - RNA, 19 nt, synthetic construct
  misc_feature 1..19: note = siRNA sense sequence
  source 1..19: mol_type = other RNA
ataagcagtagattcaagg

SEQ ID NO: 66183 - RNA, 19 nt, synthetic construct
  misc_feature 1..19: note = siRNA antisense sequence
  source 1..19: mol_type = other RNA
ccttgaatctactgcttat

SEQ ID NO: 66184 - RNA, 19 nt, synthetic construct
  misc_feature 1..19: note = siRNA sense sequence
  source 1..19: mol_type = other RNA
taagcagtagattcaaggt

SEQ ID NO: 66185 - RNA, 19 nt, synthetic construct
  misc_feature 1..19: note = siRNA antisense sequence
  source 1..19: mol_type = other RNA
accttgaatctactgctta

SEQ ID NO: 66186 - RNA, 19 nt, synthetic construct
  misc_feature 1..19: note = siRNA sense sequence
  source 1..19: mol_type = other RNA
aagcagtagattcaaggtt

SEQ ID NO: 66187 - RNA, 19 nt, synthetic construct
  misc_feature 1..19: note = siRNA antisense sequence
  source 1..19: mol_type = other RNA
aaccttgaatctactgctt

SEQ ID NO: 66188 - RNA, 19 nt, synthetic construct
  misc_feature 1..19: note = siRNA sense sequence
  source 1..19: mol_type = other RNA
agcagtagattcaaggtta

SEQ ID NO: 66189 - RNA, 19 nt, synthetic construct
  misc_feature 1..19: note = siRNA antisense sequence
  source 1..19: mol_type = other RNA
taaccttgaatctactgct

SEQ ID NO: 66190 - RNA, 19 nt, synthetic construct
  misc_feature 1..19: note = siRNA sense sequence
  source 1..19: mol_type = other RNA
gcagtagattcaaggttaa

SEQ ID NO: 66191 - RNA, 19 nt, synthetic construct
  misc_feature 1..19: note = siRNA antisense sequence
  source 1..19: mol_type = other RNA
ttaaccttgaatctactgc

SEQ ID NO: 66192 - RNA, 19 nt, synthetic construct
  misc_feature 1..19: note = siRNA sense sequence
  source 1..19: mol_type = other RNA
cagtagattcaaggttaaa

SEQ ID NO: 66193 - RNA, 19 nt, synthetic construct
  misc_feature 1..19: note = siRNA antisense sequence
  source 1..19: mol_type = other RNA
tttaaccttgaatctactg

SEQ ID NO: 66194 - RNA, 19 nt, synthetic construct
  misc_feature 1..19: note = siRNA sense sequence
  source 1..19: mol_type = other RNA
ttcaaggttaaaataagcc

SEQ ID NO: 66195 - RNA, 19 nt, synthetic construct
  misc_feature 1..19: note = siRNA antisense sequence
  source 1..19: mol_type = other RNA
ggcttattttaaccttgaa

SEQ ID NO: 66196 - RNA, 19 nt, synthetic construct
  misc_feature 1..19: note = siRNA sense sequence
  source 1..19: mol_type = other RNA
tcaaggttaaaataagcct

SEQ ID NO: 66197 - RNA, 19 nt, synthetic construct
  misc_feature 1..19: note = siRNA antisense sequence
  source 1..19: mol_type = other RNA
aggcttattttaaccttga

SEQ ID NO: 66198 - RNA, 19 nt, synthetic construct
  misc_feature 1..19: note = siRNA sense sequence
  source 1..19: mol_type = other RNA
taagccttgttttaatcac

SEQ ID NO: 66199 - RNA, 19 nt, synthetic construct
  misc_feature 1..19: note = siRNA antisense sequence
  source 1..19: mol_type = other RNA
gtgattaaaacaaggctta

SEQ ID NO: 66200 - RNA, 19 nt, synthetic construct
  misc_feature 1..19: note = siRNA sense sequence
  source 1..19: mol_type = other RNA
aagccttgttttaatcaca

SEQ ID NO: 66201 - RNA, 19 nt, synthetic construct
  misc_feature 1..19: note = siRNA antisense sequence
  source 1..19: mol_type = other RNA
tgtgattaaaacaaggctt

SEQ ID NO: 66202 - RNA, 19 nt, synthetic construct
  misc_feature 1..19: note = siRNA sense sequence
  source 1..19: mol_type = other RNA
agccttgttttaatcacat

SEQ ID NO: 66203 - RNA, 19 nt, synthetic construct
  misc_feature 1..19: note = siRNA antisense sequence
  source 1..19: mol_type = other RNA
atgtgattaaaacaaggct

SEQ ID NO: 66204 - RNA, 19 nt, synthetic construct
  misc_feature 1..19: note = siRNA sense sequence
  source 1..19: mol_type = other RNA
gccttgttttaatcacatc

SEQ ID NO: 66205 - RNA, 19 nt, synthetic construct
  misc_feature 1..19: note = siRNA antisense sequence
  source 1..19: mol_type = other RNA
gatgtgattaaaacaaggc

SEQ ID NO: 66206 - RNA, 19 nt, synthetic construct
  misc_feature 1..19: note = siRNA sense sequence
  source 1..19: mol_type = other RNA
tctccatgtgtcttaaata

SEQ ID NO: 66207 - RNA, 19 nt, synthetic construct
  misc_feature 1..19: note = siRNA antisense sequence
  source 1..19: mol_type = other RNA
tatttaagacacatggaga

SEQ ID NO: 66208 - RNA, 19 nt, synthetic construct
  misc_feature 1..19: note = siRNA sense sequence
  source 1..19: mol_type = other RNA
ctccatgtgtcttaaatat

SEQ ID NO: 66209 - RNA, 19 nt, synthetic construct
  misc_feature 1..19: note = siRNA antisense sequence
  source 1..19: mol_type = other RNA
atatttaagacacatggag

SEQ ID NO: 66210 - RNA, 19 nt, synthetic construct
  misc_feature 1..19: note = siRNA sense sequence
  source 1..19: mol_type = other RNA
tccatgtgtcttaaatatc

SEQ ID NO: 66211 - RNA, 19 nt, synthetic construct
  misc_feature 1..19: note = siRNA antisense sequence
  source 1..19: mol_type = other RNA
gatatttaagacacatgga

SEQ ID NO: 66212 - RNA, 19 nt, synthetic construct
  misc_feature 1..19: note = siRNA sense sequence
  source 1..19: mol_type = other RNA
ccatgtgtcttaaatatca

SEQ ID NO: 66213 - RNA, 19 nt, synthetic construct
  misc_feature 1..19: note = siRNA antisense sequence
  source 1..19: mol_type = other RNA
tgatatttaagacacatgg

SEQ ID NO: 66214 - RNA, 19 nt, synthetic construct
  misc_feature 1..19: note = siRNA sense sequence
  source 1..19: mol_type = other RNA
gtaataaattgtgtgcctg

SEQ ID NO: 66215 - RNA, 19 nt, synthetic construct
  misc_feature 1..19: note = siRNA antisense sequence
  source 1..19: mol_type = other RNA
caggcacacaatttattac

SEQ ID NO: 66216 - RNA, 19 nt, synthetic construct
  misc_feature 1..19: note = siRNA sense sequence
  source 1..19: mol_type = other RNA
taataaattgtgtgcctga

SEQ ID NO: 66217 - RNA, 19 nt, synthetic construct
  misc_feature 1..19: note = siRNA antisense sequence
  source 1..19: mol_type = other RNA
tcaggcacacaatttatta

SEQ ID NO: 66218 - RNA, 19 nt, synthetic construct
  misc_feature 1..19: note = siRNA sense sequence
  source 1..19: mol_type = other RNA
aataaattgtgtgcctgag

SEQ ID NO: 66219 - RNA, 19 nt, synthetic construct
  misc_feature 1..19: note = siRNA antisense sequence
  source 1..19: mol_type = other RNA
ctcaggcacacaatttatt

SEQ ID NO: 66220 - RNA, 19 nt, synthetic construct
  misc_feature 1..19: note = siRNA sense sequence
  source 1..19: mol_type = other RNA
aattgtgtgcctgagtgga

SEQ ID NO: 66221 - RNA, 19 nt, synthetic construct
  misc_feature 1..19: note = siRNA antisense sequence
  source 1..19: mol_type = other RNA
tccactcaggcacacaatt

SEQ ID NO: 66222 - RNA, 19 nt, synthetic construct
  misc_feature 1..19: note = siRNA sense sequence
  source 1..19: mol_type = other RNA
attgtgtgcctgagtggag

SEQ ID NO: 66223 - RNA, 19 nt, synthetic construct
  misc_feature 1..19: note = siRNA antisense sequence
  source 1..19: mol_type = other RNA
ctccactcaggcacacaat

SEQ ID NO: 66224 - RNA, 19 nt, synthetic construct
  misc_feature 1..19: note = siRNA sense sequence
  source 1..19: mol_type = other RNA
gtgtgcctgagtggaggat

SEQ ID NO: 66225 - RNA, 19 nt, synthetic construct
  misc_feature 1..19: note = siRNA antisense sequence
  source 1..19: mol_type = other RNA
atcctccactcaggcacac

SEQ ID NO: 66226 - RNA, 19 nt, synthetic construct
  misc_feature 1..19: note = siRNA sense sequence
  source 1..19: mol_type = other RNA
tgtgcctgagtggaggata

SEQ ID NO: 66227 - RNA, 19 nt, synthetic construct
  misc_feature 1..19: note = siRNA antisense sequence
  source 1..19: mol_type = other RNA
tatcctccactcaggcaca

SEQ ID NO: 66228 - RNA, 19 nt, synthetic construct
  misc_feature 1..19: note = siRNA sense sequence
  source 1..19: mol_type = other RNA
gtgcctgagtggaggataa

SEQ ID NO: 66229 - RNA, 19 nt, synthetic construct
  misc_feature 1..19: note = siRNA antisense sequence
  source 1..19: mol_type = other RNA
ttatcctccactcaggcac

SEQ ID NO: 66230 - RNA, 19 nt, synthetic construct
  misc_feature 1..19: note = siRNA sense sequence
  source 1..19: mol_type = other RNA
tgcctgagtggaggataag

SEQ ID NO: 66231 - RNA, 19 nt, synthetic construct
  misc_feature 1..19: note = siRNA antisense sequence
  source 1..19: mol_type = other RNA
cttatcctccactcaggca

SEQ ID NO: 66232 - RNA, 19 nt, synthetic construct
  misc_feature 1..19: note = siRNA sense sequence
  source 1..19: mol_type = other RNA
gcctgagtggaggataagg

SEQ ID NO: 66233 - RNA, 19 nt, synthetic construct
  misc_feature 1..19: note = siRNA antisense sequence
  source 1..19: mol_type = other RNA
ccttatcctccactcaggc

SEQ ID NO: 66234 - RNA, 19 nt, synthetic construct
  misc_feature 1..19: note = siRNA sense sequence
  source 1..19: mol_type = other RNA
cctgagtggaggataaggg

SEQ ID NO: 66235 - RNA, 19 nt, synthetic construct
  misc_feature 1..19: note = siRNA antisense sequence
  source 1..19: mol_type = other RNA
cccttatcctccactcagg

SEQ ID NO: 66236 - RNA, 19 nt, synthetic construct
  misc_feature 1..19: note = siRNA sense sequence
  source 1..19: mol_type = other RNA
gaggataagggatcagctg

SEQ ID NO: 66237 - RNA, 19 nt, synthetic construct
  misc_feature 1..19: note = siRNA antisense sequence
  source 1..19: mol_type = other RNA
cagctgatcccttatcctc

SEQ ID NO: 66238 - RNA, 19 nt, synthetic construct
  misc_feature 1..19: note = siRNA sense sequence
  source 1..19: mol_type = other RNA
aggataagggatcagctga

SEQ ID NO: 66239 - RNA, 19 nt, synthetic construct
  misc_feature 1..19: note = siRNA antisense sequence
  source 1..19: mol_type = other RNA
tcagctgatcccttatcct

SEQ ID NO: 66240 - RNA, 19 nt, synthetic construct
  misc_feature 1..19: note = siRNA sense sequence
  source 1..19: mol_type = other RNA
agatcttaaagtttcacag

SEQ ID NO: 66241 - RNA, 19 nt, synthetic construct
  misc_feature 1..19: note = siRNA antisense sequence
  source 1..19: mol_type = other RNA
ctgtgaaactttaagatct

SEQ ID NO: 66242 - RNA, 19 nt, synthetic construct
  misc_feature 1..19: note = siRNA sense sequence
  source 1..19: mol_type = other RNA
gatcttaaagtttcacaga

SEQ ID NO: 66243 - RNA, 19 nt, synthetic construct
  misc_feature 1..19: note = siRNA antisense sequence
  source 1..19: mol_type = other RNA
tctgtgaaactttaagatc

SEQ ID NO: 66244 - RNA, 19 nt, synthetic construct
  misc_feature 1..19: note = siRNA sense sequence
  source 1..19: mol_type = other RNA
atcttaaagtttcacagac

SEQ ID NO: 66245 - RNA, 19 nt, synthetic construct
  misc_feature 1..19: note = siRNA antisense sequence
  source 1..19: mol_type = other RNA
gtctgtgaaactttaagat

SEQ ID NO: 66246 - RNA, 19 nt, synthetic construct
  misc_feature 1..19: note = siRNA sense sequence
  source 1..19: mol_type = other RNA
tcttaaagtttcacagact

SEQ ID NO: 66247 - RNA, 19 nt, synthetic construct
  misc_feature 1..19: note = siRNA antisense sequence
  source 1..19: mol_type = other RNA
agtctgtgaaactttaaga

SEQ ID NO: 66248 - RNA, 19 nt, synthetic construct
  misc_feature 1..19: note = siRNA sense sequence
  source 1..19: mol_type = other RNA
cttaaagtttcacagactc

SEQ ID NO: 66249 - RNA, 19 nt, synthetic construct
  misc_feature 1..19: note = siRNA antisense sequence
  source 1..19: mol_type = other RNA
gagtctgtgaaactttaag

SEQ ID NO: 66250 - RNA, 19 nt, synthetic construct
  misc_feature 1..19: note = siRNA sense sequence
  source 1..19: mol_type = other RNA
ttaaagtttcacagactcc

SEQ ID NO: 66251 - RNA, 19 nt, synthetic construct
  misc_feature 1..19: note = siRNA antisense sequence
  source 1..19: mol_type = other RNA
ggagtctgtgaaactttaa

SEQ ID NO: 66252 - RNA, 19 nt, synthetic construct
  misc_feature 1..19: note = siRNA sense sequence
  source 1..19: mol_type = other RNA
aaagtttcacagactccta

SEQ ID NO: 66253 - RNA, 19 nt, synthetic construct
  misc_feature 1..19: note = siRNA antisense sequence
  source 1..19: mol_type = other RNA
taggagtctgtgaaacttt

SEQ ID NO: 66254 - RNA, 19 nt, synthetic construct
  misc_feature 1..19: note = siRNA sense sequence
  source 1..19: mol_type = other RNA
aagtttcacagactcctat

SEQ ID NO: 66255 - RNA, 19 nt, synthetic construct
  misc_feature 1..19: note = siRNA antisense sequence
  source 1..19: mol_type = other RNA
ataggagtctgtgaaactt

SEQ ID NO: 66256 - RNA, 19 nt, synthetic construct
  misc_feature 1..19: note = siRNA sense sequence
  source 1..19: mol_type = other RNA
agtttcacagactcctatt

SEQ ID NO: 66257 - RNA, 19 nt, synthetic construct
  misc_feature 1..19: note = siRNA antisense sequence
  source 1..19: mol_type = other RNA
aataggagtctgtgaaact

SEQ ID NO: 66258 - RNA, 19 nt, synthetic construct
  misc_feature 1..19: note = siRNA sense sequence
  source 1..19: mol_type = other RNA
gtttcacagactcctattt

SEQ ID NO: 66259 - RNA, 19 nt, synthetic construct
  misc_feature 1..19: note = siRNA antisense sequence
  source 1..19: mol_type = other RNA
aaataggagtctgtgaaac

SEQ ID NO: 66260 - RNA, 19 nt, synthetic construct
  misc_feature 1..19: note = siRNA sense sequence
  source 1..19: mol_type = other RNA
tttcacagactcctatttc

SEQ ID NO: 66261 - RNA, 19 nt, synthetic construct
  misc_feature 1..19: note = siRNA antisense sequence
  source 1..19: mol_type = other RNA
gaaataggagtctgtgaaa

SEQ ID NO: 66262 - RNA, 19 nt, synthetic construct
  misc_feature 1..19: note = siRNA sense sequence
  source 1..19: mol_type = other RNA
acagactcctatttcaaat

SEQ ID NO: 66263 - RNA, 19 nt, synthetic construct
  misc_feature 1..19: note = siRNA antisense sequence
  source 1..19: mol_type = other RNA
atttgaaataggagtctgt

SEQ ID NO: 66264 - RNA, 19 nt, synthetic construct
  misc_feature 1..19: note = siRNA sense sequence
  source 1..19: mol_type = other RNA
cagactcctatttcaaatt

SEQ ID NO: 66265 - RNA, 19 nt, synthetic construct
  misc_feature 1..19: note = siRNA antisense sequence
  source 1..19: mol_type = other RNA
aatttgaaataggagtctg

SEQ ID NO: 66266 - RNA, 19 nt, synthetic construct
  misc_feature 1..19: note = siRNA sense sequence
  source 1..19: mol_type = other RNA
agactcctatttcaaattc

SEQ ID NO: 66267 - RNA, 19 nt, synthetic construct
  misc_feature 1..19: note = siRNA antisense sequence
  source 1..19: mol_type = other RNA
gaatttgaaataggagtct

SEQ ID NO: 66268 - RNA, 19 nt, synthetic construct
  misc_feature 1..19: note = siRNA sense sequence
  source 1..19: mol_type = other RNA
gactcctatttcaaattct

SEQ ID NO: 66269 - RNA, 19 nt, synthetic construct
  misc_feature 1..19: note = siRNA antisense sequence
  source 1..19: mol_type = other RNA
agaatttgaaataggagtc

SEQ ID NO: 66270 - RNA, 19 nt, synthetic construct
  misc_feature 1..19: note = siRNA sense sequence
  source 1..19: mol_type = other RNA
actcctatttcaaattctg

SEQ ID NO: 66271 - RNA, 19 nt, synthetic construct
  misc_feature 1..19: note = siRNA antisense sequence
  source 1..19: mol_type = other RNA
cagaatttgaaataggagt

SEQ ID NO: 66272 - RNA, 19 nt, synthetic construct
  misc_feature 1..19: note = siRNA sense sequence
  source 1..19: mol_type = other RNA
ctcctatttcaaattctgt

SEQ ID NO: 66273 - RNA, 19 nt, synthetic construct
  misc_feature 1..19: note = siRNA antisense sequence
  source 1..19: mol_type = other RNA
acagaatttgaaataggag

SEQ ID NO: 66274 - RNA, 19 nt, synthetic construct
  misc_feature 1..19: note = siRNA sense sequence
  source 1..19: mol_type = other RNA
tcctatttcaaattctgtg

SEQ ID NO: 66275 - RNA, 19 nt, synthetic construct
  misc_feature 1..19: note = siRNA antisense sequence
  source 1..19: mol_type = other RNA
cacagaatttgaaatagga

SEQ ID NO: 66276 - RNA, 19 nt, synthetic construct
  misc_feature 1..19: note = siRNA sense sequence
  source 1..19: mol_type = other RNA
cctatttcaaattctgtgg

SEQ ID NO: 66277 - RNA, 19 nt, synthetic construct
  misc_feature 1..19: note = siRNA antisense sequence
  source 1..19: mol_type = other RNA
ccacagaatttgaaatagg

SEQ ID NO: 66278 - RNA, 19 nt, synthetic construct
  misc_feature 1..19: note = siRNA sense sequence
  source 1..19: mol_type = other RNA
tcaaattctgtggtaaatg

SEQ ID NO: 66279 - RNA, 19 nt, synthetic construct
  misc_feature 1..19: note = siRNA antisense sequence
  source 1..19: mol_type = other RNA
catttaccacagaatttga

SEQ ID NO: 66280 - RNA, 19 nt, synthetic construct
  misc_feature 1..19: note = siRNA sense sequence
  source 1..19: mol_type = other RNA
caaattctgtggtaaatgt

SEQ ID NO: 66281 - RNA, 19 nt, synthetic construct
  misc_feature 1..19: note = siRNA antisense sequence
  source 1..19: mol_type = other RNA
acatttaccacagaatttg

SEQ ID NO: 66282 - RNA, 19 nt, synthetic construct
  misc_feature 1..19: note = siRNA sense sequence
  source 1..19: mol_type = other RNA
aaattctgtggtaaatgtg

SEQ ID NO: 66283 - RNA, 19 nt, synthetic construct
  misc_feature 1..19: note = siRNA antisense sequence
  source 1..19: mol_type = other RNA
cacatttaccacagaattt

SEQ ID NO: 66284 - RNA, 19 nt, synthetic construct
  misc_feature 1..19: note = siRNA sense sequence
  source 1..19: mol_type = other RNA
aatgtgagtaaccacctat

SEQ ID NO: 66285 - RNA, 19 nt, synthetic construct
  misc_feature 1..19: note = siRNA antisense sequence
  source 1..19: mol_type = other RNA
ataggtggttactcacatt

SEQ ID NO: 66286 - RNA, 19 nt, synthetic construct
  misc_feature 1..19: note = siRNA sense sequence
  source 1..19: mol_type = other RNA
tgtgagtaaccacctattt

SEQ ID NO: 66287 - RNA, 19 nt, synthetic construct
  misc_feature 1..19: note = siRNA antisense sequence
  source 1..19: mol_type = other RNA
aaataggtggttactcaca

SEQ ID NO: 66288 - RNA, 19 nt, synthetic construct
  misc_feature 1..19: note = siRNA sense sequence
  source 1..19: mol_type = other RNA
gtgagtaaccacctatttt

SEQ ID NO: 66289 - RNA, 19 nt, synthetic construct
  misc_feature 1..19: note = siRNA antisense sequence
  source 1..19: mol_type = other RNA
aaaataggtggttactcac

SEQ ID NO: 66290 - RNA, 19 nt, synthetic construct
  misc_feature 1..19: note = siRNA sense sequence
  source 1..19: mol_type = other RNA
agtaaccacctattttgtg

SEQ ID NO: 66291 - RNA, 19 nt, synthetic construct
  misc_feature 1..19: note = siRNA antisense sequence
  source 1..19: mol_type = other RNA
cacaaaataggtggttact

SEQ ID NO: 66292 - RNA, 19 nt, synthetic construct
  misc_feature 1..19: note = siRNA sense sequence
  source 1..19: mol_type = other RNA
gtaaccacctattttgtgt

SEQ ID NO: 66293 - RNA, 19 nt, synthetic construct
  misc_feature 1..19: note = siRNA antisense sequence
  source 1..19: mol_type = other RNA
acacaaaataggtggttac

SEQ ID NO: 66294 - RNA, 19 nt, synthetic construct
  misc_feature 1..19: note = siRNA sense sequence
  source 1..19: mol_type = other RNA
taaccacctattttgtgtc

SEQ ID NO: 66295 - RNA, 19 nt, synthetic construct
  misc_feature 1..19: note = siRNA antisense sequence
  source 1..19: mol_type = other RNA
gacacaaaataggtggtta

SEQ ID NO: 66296 - RNA, 19 nt, synthetic construct
  misc_feature 1..19: note = siRNA sense sequence
  source 1..19: mol_type = other RNA
aaccacctattttgtgtca

SEQ ID NO: 66297 - RNA, 19 nt, synthetic construct
  misc_feature 1..19: note = siRNA antisense sequence
  source 1..19: mol_type = other RNA
tgacacaaaataggtggtt

SEQ ID NO: 66298 - RNA, 19 nt, synthetic construct
  misc_feature 1..19: note = siRNA sense sequence
  source 1..19: mol_type = other RNA
cacctattttgtgtcaagt

SEQ ID NO: 66299 - RNA, 19 nt, synthetic construct
  misc_feature 1..19: note = siRNA antisense sequence
  source 1..19: mol_type = other RNA
acttgacacaaaataggtg

SEQ ID NO: 66300 - RNA, 19 nt, synthetic construct
  misc_feature 1..19: note = siRNA sense sequence
  source 1..19: mol_type = other RNA
ctattttgtgtcaagtaac

SEQ ID NO: 66301 - RNA, 19 nt, synthetic construct
  misc_feature 1..19: note = siRNA antisense sequence
  source 1..19: mol_type = other RNA
gttacttgacacaaaatag

SEQ ID NO: 66302 - RNA, 19 nt, synthetic construct
  misc_feature 1..19: note = siRNA sense sequence
  source 1..19: mol_type = other RNA
attttgtgtcaagtaactc

SEQ ID NO: 66303 - RNA, 19 nt, synthetic construct
  misc_feature 1..19: note = siRNA antisense sequence
  source 1..19: mol_type = other RNA
gagttacttgacacaaaat

SEQ ID NO: 66304 - RNA, 19 nt, synthetic construct
  misc_feature 1..19: note = siRNA sense sequence
  source 1..19: mol_type = other RNA
ttttgtgtcaagtaactct

SEQ ID NO: 66305 - RNA, 19 nt, synthetic construct
  misc_feature 1..19: note = siRNA antisense sequence
  source 1..19: mol_type = other RNA
agagttacttgacacaaaa

SEQ ID NO: 66306 - RNA, 19 nt, synthetic construct
  misc_feature 1..19: note = siRNA sense sequence
  source 1..19: mol_type = other RNA
tcaagtaactctggatatt

SEQ ID NO: 66307 - RNA, 19 nt, synthetic construct
  misc_feature 1..19: note = siRNA antisense sequence
  source 1..19: mol_type = other RNA
aatatccagagttacttga

SEQ ID NO: 66308 - RNA, 19 nt, synthetic construct
  misc_feature 1..19: note = siRNA sense sequence
  source 1..19: mol_type = other RNA
caagtaactctggatattt

SEQ ID NO: 66309 - RNA, 19 nt, synthetic construct
  misc_feature 1..19: note = siRNA antisense sequence
  source 1..19: mol_type = other RNA
aaatatccagagttacttg

SEQ ID NO: 66310 - RNA, 19 nt, synthetic construct
  misc_feature 1..19: note = siRNA sense sequence
  source 1..19: mol_type = other RNA
gtaactctggatatttatg

SEQ ID NO: 66311 - RNA, 19 nt, synthetic construct
  misc_feature 1..19: note = siRNA antisense sequence
  source 1..19: mol_type = other RNA
cataaatatccagagttac

SEQ ID NO: 66312 - RNA, 19 nt, synthetic construct
  misc_feature 1..19: note = siRNA sense sequence
  source 1..19: mol_type = other RNA
tgtaatgttttgcttaggc

SEQ ID NO: 66313 - RNA, 19 nt, synthetic construct
  misc_feature 1..19: note = siRNA antisense sequence
  source 1..19: mol_type = other RNA
gcctaagcaaaacattaca

SEQ ID NO: 66314 - RNA, 19 nt, synthetic construct
  misc_feature 1..19: note = siRNA sense sequence
  source 1..19: mol_type = other RNA
gtaatgttttgcttaggct

SEQ ID NO: 66315 - RNA, 19 nt, synthetic construct
  misc_feature 1..19: note = siRNA antisense sequence
  source 1..19: mol_type = other RNA
agcctaagcaaaacattac

SEQ ID NO: 66316 - RNA, 19 nt, synthetic construct
  misc_feature 1..19: note = siRNA sense sequence
  source 1..19: mol_type = other RNA
taatgttttgcttaggctg

SEQ ID NO: 66317 - RNA, 19 nt, synthetic construct
  misc_feature 1..19: note = siRNA antisense sequence
  source 1..19: mol_type = other RNA
cagcctaagcaaaacatta

SEQ ID NO: 66318 - RNA, 19 nt, synthetic construct
  misc_feature 1..19: note = siRNA sense sequence
  source 1..19: mol_type = other RNA
aatgttttgcttaggctga

SEQ ID NO: 66319 - RNA, 19 nt, synthetic construct
  misc_feature 1..19: note = siRNA antisense sequence
  source 1..19: mol_type = other RNA
tcagcctaagcaaaacatt

SEQ ID NO: 66320 - RNA, 19 nt, synthetic construct
  misc_feature 1..19: note = siRNA sense sequence
  source 1..19: mol_type = other RNA
atgttttgcttaggctgaa

SEQ ID NO: 66321 - RNA, 19 nt, synthetic construct
  misc_feature 1..19: note = siRNA antisense sequence
  source 1..19: mol_type = other RNA
ttcagcctaagcaaaacat

SEQ ID NO: 66322 - RNA, 19 nt, synthetic construct
  misc_feature 1..19: note = siRNA sense sequence
  source 1..19: mol_type = other RNA
tcttagcagctgtataatt

SEQ ID NO: 66323 - RNA, 19 nt, synthetic construct
  misc_feature 1..19: note = siRNA antisense sequence
  source 1..19: mol_type = other RNA
aattatacagctgctaaga

SEQ ID NO: 66324 - RNA, 19 nt, synthetic construct
  misc_feature 1..19: note = siRNA sense sequence
  source 1..19: mol_type = other RNA
cttagcagctgtataattt

SEQ ID NO: 66325 - RNA, 19 nt, synthetic construct
  misc_feature 1..19: note = siRNA antisense sequence
  source 1..19: mol_type = other RNA
aaattatacagctgctaag

SEQ ID NO: 66326 - RNA, 19 nt, synthetic construct
  misc_feature 1..19: note = siRNA sense sequence
  source 1..19: mol_type = other RNA
tagcagctgtataattttc

SEQ ID NO: 66327 - RNA, 19 nt, synthetic construct
  misc_feature 1..19: note = siRNA antisense sequence
  source 1..19: mol_type = other RNA
gaaaattatacagctgcta

SEQ ID NO: 66328 - RNA, 19 nt, synthetic construct
  misc_feature 1..19: note = siRNA sense sequence
  source 1..19: mol_type = other RNA
gcagctgtataattttcac

SEQ ID NO: 66329 - RNA, 19 nt, synthetic construct
  misc_feature 1..19: note = siRNA antisense sequence
  source 1..19: mol_type = other RNA
gtgaaaattatacagctgc

SEQ ID NO: 66330 - RNA, 19 nt, synthetic construct
  misc_feature 1..19: note = siRNA sense sequence
  source 1..19: mol_type = other RNA
cagctgtataattttcaca

SEQ ID NO: 66331 - RNA, 19 nt, synthetic construct
  misc_feature 1..19: note = siRNA antisense sequence
  source 1..19: mol_type = other RNA
tgtgaaaattatacagctg

SEQ ID NO: 66332 - RNA, 19 nt, synthetic construct
  misc_feature 1..19: note = siRNA sense sequence
  source 1..19: mol_type = other RNA
cacattaagtagaattgag

SEQ ID NO: 66333 - RNA, 19 nt, synthetic construct
  misc_feature 1..19: note = siRNA antisense sequence
  source 1..19: mol_type = other RNA
ctcaattctacttaatgtg

SEQ ID NO: 66334 - RNA, 19 nt, synthetic construct
  misc_feature 1..19: note = siRNA sense sequence
  source 1..19: mol_type = other RNA
agatgacagcttttgggat

SEQ ID NO: 66335 - RNA, 19 nt, synthetic construct
  misc_feature 1..19: note = siRNA antisense sequence
  source 1..19: mol_type = other RNA
atcccaaaagctgtcatct

SEQ ID NO: 66336 - RNA, 19 nt, synthetic construct
  misc_feature 1..19: note = siRNA sense sequence
  source 1..19: mol_type = other RNA
gatgacagcttttgggata

SEQ ID NO: 66337 - RNA, 19 nt, synthetic construct
  misc_feature 1..19: note = siRNA antisense sequence
  source 1..19: mol_type = other RNA
tatcccaaaagctgtcatc

SEQ ID NO: 66338 - RNA, 19 nt, synthetic construct
  misc_feature 1..19: note = siRNA sense sequence
  source 1..19: mol_type = other RNA
atgacagcttttgggataa

SEQ ID NO: 66339 - RNA, 19 nt, synthetic construct
  misc_feature 1..19: note = siRNA antisense sequence
  source 1..19: mol_type = other RNA
ttatcccaaaagctgtcat

SEQ ID NO: 66340 - RNA, 19 nt, synthetic construct
  misc_feature 1..19: note = siRNA sense sequence
  source 1..19: mol_type = other RNA
tgacagcttttgggataag

SEQ ID NO: 66341 - RNA, 19 nt, synthetic construct
  misc_feature 1..19: note = siRNA antisense sequence
  source 1..19: mol_type = other RNA
cttatcccaaaagctgtca

SEQ ID NO: 66342 - RNA, 19 nt, synthetic construct
  misc_feature 1..19: note = siRNA sense sequence
  source 1..19: mol_type = other RNA
acagcttttgggataagtt

SEQ ID NO: 66343 - RNA, 19 nt, synthetic construct
  misc_feature 1..19: note = siRNA antisense sequence
  source 1..19: mol_type = other RNA
aacttatcccaaaagctgt

SEQ ID NO: 66344 - RNA, 19 nt, synthetic construct
  misc_feature 1..19: note = siRNA sense sequence
  source 1..19: mol_type = other RNA
cagcttttgggataagttg

SEQ ID NO: 66345 - RNA, 19 nt, synthetic construct
  misc_feature 1..19: note = siRNA antisense sequence
  source 1..19: mol_type = other RNA
caacttatcccaaaagctg

SEQ ID NO: 66346 - RNA, 19 nt, synthetic construct
  misc_feature 1..19: note = siRNA sense sequence
  source 1..19: mol_type = other RNA
agcttttgggataagttga

SEQ ID NO: 66347 - RNA, 19 nt, synthetic construct
  misc_feature 1..19: note = siRNA antisense sequence
  source 1..19: mol_type = other RNA
tcaacttatcccaaaagct

SEQ ID NO: 66348 - RNA, 19 nt, synthetic construct
  misc_feature 1..19: note = siRNA sense sequence
  source 1..19: mol_type = other RNA
gcttttgggataagttgaa

SEQ ID NO: 66349 - RNA, 19 nt, synthetic construct
  misc_feature 1..19: note = siRNA antisense sequence
  source 1..19: mol_type = other RNA
ttcaacttatcccaaaagc

SEQ ID NO: 66350 - RNA, 19 nt, synthetic construct
  misc_feature 1..19: note = siRNA sense sequence
  source 1..19: mol_type = other RNA
cttttgggataagttgaat

SEQ ID NO: 66351 - RNA, 19 nt, synthetic construct
  misc_feature 1..19: note = siRNA antisense sequence
  source 1..19: mol_type = other RNA
attcaacttatcccaaaag

SEQ ID NO: 66352 - RNA, 19 nt, synthetic construct
  misc_feature 1..19: note = siRNA sense sequence
  source 1..19: mol_type = other RNA
acatcccatacagagttga

SEQ ID NO: 66353 - RNA, 19 nt, synthetic construct
  misc_feature 1..19: note = siRNA antisense sequence
  source 1..19: mol_type = other RNA
tcaactctgtatgggatgt

SEQ ID NO: 66354 - RNA, 19 nt, synthetic construct
  misc_feature 1..19: note = siRNA sense sequence
  source 1..19: mol_type = other RNA
catcccatacagagttgaa

SEQ ID NO: 66355 - RNA, 19 nt, synthetic construct
  misc_feature 1..19: note = siRNA antisense sequence
  source 1..19: mol_type = other RNA
ttcaactctgtatgggatg

SEQ ID NO: 66356 - RNA, 19 nt, synthetic construct
  misc_feature 1..19: note = siRNA sense sequence
  source 1..19: mol_type = other RNA
atcccatacagagttgaat

SEQ ID NO: 66357 - RNA, 19 nt, synthetic construct
  misc_feature 1..19: note = siRNA antisense sequence
  source 1..19: mol_type = other RNA
attcaactctgtatgggat

SEQ ID NO: 66358 - RNA, 19 nt, synthetic construct
  misc_feature 1..19: note = siRNA sense sequence
  source 1..19: mol_type = other RNA
tcccatacagagttgaatg

SEQ ID NO: 66359 - RNA, 19 nt, synthetic construct
  misc_feature 1..19: note = siRNA antisense sequence
  source 1..19: mol_type = other RNA
cattcaactctgtatggga

SEQ ID NO: 66360 - RNA, 19 nt, synthetic construct
  misc_feature 1..19: note = siRNA sense sequence
  source 1..19: mol_type = other RNA
ccctagattttacctattg

SEQ ID NO: 66361 - RNA, 19 nt, synthetic construct
  misc_feature 1..19: note = siRNA antisense sequence
  source 1..19: mol_type = other RNA
caataggtaaaatctaggg

SEQ ID NO: 66362 - RNA, 19 nt, synthetic construct
  misc_feature 1..19: note = siRNA sense sequence
  source 1..19: mol_type = other RNA
aaaatataggttgtggcta

SEQ ID NO: 66363 - RNA, 19 nt, synthetic construct
  misc_feature 1..19: note = siRNA antisense sequence
  source 1..19: mol_type = other RNA
tagccacaacctatatttt

SEQ ID NO: 66364 - RNA, 19 nt, synthetic construct
  misc_feature 1..19: note = siRNA sense sequence
  source 1..19: mol_type = other RNA
aaatataggttgtggctac

SEQ ID NO: 66365 - RNA, 19 nt, synthetic construct
  misc_feature 1..19: note = siRNA antisense sequence
  source 1..19: mol_type = other RNA
gtagccacaacctatattt

SEQ ID NO: 66366 - RNA, 19 nt, synthetic construct
  misc_feature 1..19: note = siRNA sense sequence
  source 1..19: mol_type = other RNA
aatataggttgtggctaca

SEQ ID NO: 66367 - RNA, 19 nt, synthetic construct
  misc_feature 1..19: note = siRNA antisense sequence
  source 1..19: mol_type = other RNA
tgtagccacaacctatatt

SEQ ID NO: 66368 - RNA, 19 nt, synthetic construct
  misc_feature 1..19: note = siRNA sense sequence
  source 1..19: mol_type = other RNA
taggttgtggctacatatt

SEQ ID NO: 66369 - RNA, 19 nt, synthetic construct
  misc_feature 1..19: note = siRNA antisense sequence
  source 1..19: mol_type = other RNA
aatatgtagccacaaccta

SEQ ID NO: 66370 - RNA, 19 nt, synthetic construct
  misc_feature 1..19: note = siRNA sense sequence
  source 1..19: mol_type = other RNA
aggttgtggctacatatta

SEQ ID NO: 66371 - RNA, 19 nt, synthetic construct
  misc_feature 1..19: note = siRNA antisense sequence
  source 1..19: mol_type = other RNA
taatatgtagccacaacct

SEQ ID NO: 66372 - RNA, 19 nt, synthetic construct
  misc_feature 1..19: note = siRNA sense sequence
  source 1..19: mol_type = other RNA
ggttgtggctacatattaa

SEQ ID NO: 66373 - RNA, 19 nt, synthetic construct
  misc_feature 1..19: note = siRNA antisense sequence
  source 1..19: mol_type = other RNA
ttaatatgtagccacaacc

SEQ ID NO: 66374 - RNA, 19 nt, synthetic construct
  misc_feature 1..19: note = siRNA sense sequence
  source 1..19: mol_type = other RNA
gttgtggctacatattaat

SEQ ID NO: 66375 - RNA, 19 nt, synthetic construct
  misc_feature 1..19: note = siRNA antisense sequence
  source 1..19: mol_type = other RNA
attaatatgtagccacaac

SEQ ID NO: 66376 - RNA, 19 nt, synthetic construct
  misc_feature 1..19: note = siRNA sense sequence
  source 1..19: mol_type = other RNA
tgtggctacatattaattg

SEQ ID NO: 66377 - RNA, 19 nt, synthetic construct
  misc_feature 1..19: note = siRNA antisense sequence
  source 1..19: mol_type = other RNA
caattaatatgtagccaca

SEQ ID NO: 66378 - RNA, 19 nt, synthetic construct
  misc_feature 1..19: note = siRNA sense sequence
  source 1..19: mol_type = other RNA
gtggctacatattaattgt

SEQ ID NO: 66379 - RNA, 19 nt, synthetic construct
  misc_feature 1..19: note = siRNA antisense sequence
  source 1..19: mol_type = other RNA
acaattaatatgtagccac

SEQ ID NO: 66380 - RNA, 19 nt, synthetic construct
  misc_feature 1..19: note = siRNA sense sequence
  source 1..19: mol_type = other RNA
ggctacatattaattgttc

SEQ ID NO: 66381 - RNA, 19 nt, synthetic construct
  misc_feature 1..19: note = siRNA antisense sequence
  source 1..19: mol_type = other RNA
gaacaattaatatgtagcc

SEQ ID NO: 66382 - RNA, 19 nt, synthetic construct
  misc_feature 1..19: note = siRNA sense sequence
  source 1..19: mol_type = other RNA
aattgttctattacctgag

SEQ ID NO: 66383 - RNA, 19 nt, synthetic construct
  misc_feature 1..19: note = siRNA antisense sequence
  source 1..19: mol_type = other RNA
ctcaggtaatagaacaatt

SEQ ID NO: 66384 - RNA, 19 nt, synthetic construct
  misc_feature 1..19: note = siRNA sense sequence
  source 1..19: mol_type = other RNA
attgttctattacctgagc

SEQ ID NO: 66385 - RNA, 19 nt, synthetic construct
  misc_feature 1..19: note = siRNA antisense sequence
  source 1..19: mol_type = other RNA
gctcaggtaatagaacaat

SEQ ID NO: 66386 - RNA, 19 nt, synthetic construct
  misc_feature 1..19: note = siRNA sense sequence
  source 1..19: mol_type = other RNA
ttgttctattacctgagca

SEQ ID NO: 66387 - RNA, 19 nt, synthetic construct
  misc_feature 1..19: note = siRNA antisense sequence
  source 1..19: mol_type = other RNA
tgctcaggtaatagaacaa

SEQ ID NO: 66388 - RNA, 19 nt, synthetic construct
  misc_feature 1..19: note = siRNA sense sequence
  source 1..19: mol_type = other RNA
tgttctattacctgagcaa

SEQ ID NO: 66389 - RNA, 19 nt, synthetic construct
  misc_feature 1..19: note = siRNA antisense sequence
  source 1..19: mol_type = other RNA
ttgctcaggtaatagaaca

SEQ ID NO: 66390 - RNA, 19 nt, synthetic construct
  misc_feature 1..19: note = siRNA sense sequence
  source 1..19: mol_type = other RNA
gttctattacctgagcaac

SEQ ID NO: 66391 - RNA, 19 nt, synthetic construct
  misc_feature 1..19: note = siRNA antisense sequence
  source 1..19: mol_type = other RNA
gttgctcaggtaatagaac

SEQ ID NO: 66392 - RNA, 19 nt, synthetic construct
  misc_feature 1..19: note = siRNA sense sequence
  source 1..19: mol_type = other RNA
ccaactgttcctatccttt

SEQ ID NO: 66393 - RNA, 19 nt, synthetic construct
  misc_feature 1..19: note = siRNA antisense sequence
  source 1..19: mol_type = other RNA
aaaggataggaacagttgg

SEQ ID NO: 66394 - RNA, 19 nt, synthetic construct
  misc_feature 1..19: note = siRNA sense sequence
  source 1..19: mol_type = other RNA
ctgttcctatcctttctta

SEQ ID NO: 66395 - RNA, 19 nt, synthetic construct
  misc_feature 1..19: note = siRNA antisense sequence
  source 1..19: mol_type = other RNA
taagaaaggataggaacag

SEQ ID NO: 66396 - RNA, 19 nt, synthetic construct
  misc_feature 1..19: note = siRNA sense sequence
  source 1..19: mol_type = other RNA
tgttcctatcctttcttac

SEQ ID NO: 66397 - RNA, 19 nt, synthetic construct
  misc_feature 1..19: note = siRNA antisense sequence
  source 1..19: mol_type = other RNA
gtaagaaaggataggaaca

SEQ ID NO: 66398 - RNA, 19 nt, synthetic construct
  misc_feature 1..19: note = siRNA sense sequence
  source 1..19: mol_type = other RNA
gttcctatcctttcttact

SEQ ID NO: 66399 - RNA, 19 nt, synthetic construct
  misc_feature 1..19: note = siRNA antisense sequence
  source 1..19: mol_type = other RNA
agtaagaaaggataggaac

SEQ ID NO: 66400 - RNA, 19 nt, synthetic construct
  misc_feature 1..19: note = siRNA sense sequence
  source 1..19: mol_type = other RNA
ttcctatcctttcttactc

SEQ ID NO: 66401 - RNA, 19 nt, synthetic construct
  misc_feature 1..19: note = siRNA antisense sequence
  source 1..19: mol_type = other RNA
gagtaagaaaggataggaa

SEQ ID NO: 66402 - RNA, 19 nt, synthetic construct
  misc_feature 1..19: note = siRNA sense sequence
  source 1..19: mol_type = other RNA
tcctatcctttcttactct

SEQ ID NO: 66403 - RNA, 19 nt, synthetic construct
  misc_feature 1..19: note = siRNA antisense sequence
  source 1..19: mol_type = other RNA
agagtaagaaaggatagga

SEQ ID NO: 66404 - RNA, 19 nt, synthetic construct
  misc_feature 1..19: note = siRNA sense sequence
  source 1..19: mol_type = other RNA
cctatcctttcttactctc

SEQ ID NO: 66405 - RNA, 19 nt, synthetic construct
  misc_feature 1..19: note = siRNA antisense sequence
  source 1..19: mol_type = other RNA
gagagtaagaaaggatagg

SEQ ID NO: 66406 - RNA, 19 nt, synthetic construct
  misc_feature 1..19: note = siRNA sense sequence
  source 1..19: mol_type = other RNA
tcctttcttactctcctat

SEQ ID NO: 66407 - RNA, 19 nt, synthetic construct
  misc_feature 1..19: note = siRNA antisense sequence
  source 1..19: mol_type = other RNA
ataggagagtaagaaagga

SEQ ID NO: 66408 - RNA, 19 nt, synthetic construct
  misc_feature 1..19: note = siRNA sense sequence
  source 1..19: mol_type = other RNA
cctttcttactctcctatg

SEQ ID NO: 66409 - RNA, 19 nt, synthetic construct
  misc_feature 1..19: note = siRNA antisense sequence
  source 1..19: mol_type = other RNA
cataggagagtaagaaagg

SEQ ID NO: 66410 - RNA, 19 nt, synthetic construct
  misc_feature 1..19: note = siRNA sense sequence
  source 1..19: mol_type = other RNA
tcttactctcctatgactc

SEQ ID NO: 66411 - RNA, 19 nt, synthetic construct
  misc_feature 1..19: note = siRNA antisense sequence
  source 1..19: mol_type = other RNA
gagtcataggagagtaaga

SEQ ID NO: 66412 - RNA, 19 nt, synthetic construct
  misc_feature 1..19: note = siRNA sense sequence
  source 1..19: mol_type = other RNA
cttactctcctatgactca

SEQ ID NO: 66413 - RNA, 19 nt, synthetic construct
  misc_feature 1..19: note = siRNA antisense sequence
  source 1..19: mol_type = other RNA
tgagtcataggagagtaag

SEQ ID NO: 66414 - RNA, 19 nt, synthetic construct
  misc_feature 1..19: note = siRNA sense sequence
  source 1..19: mol_type = other RNA
ttactctcctatgactcac

SEQ ID NO: 66415 - RNA, 19 nt, synthetic construct
  misc_feature 1..19: note = siRNA antisense sequence
  source 1..19: mol_type = other RNA
gtgagtcataggagagtaa

SEQ ID NO: 66416 - RNA, 19 nt, synthetic construct
  misc_feature 1..19: note = siRNA sense sequence
  source 1..19: mol_type = other RNA
tactctcctatgactcact

SEQ ID NO: 66417 - RNA, 19 nt, synthetic construct
  misc_feature 1..19: note = siRNA antisense sequence
  source 1..19: mol_type = other RNA
agtgagtcataggagagta

SEQ ID NO: 66418 - RNA, 19 nt, synthetic construct
  misc_feature 1..19: note = siRNA sense sequence
  source 1..19: mol_type = other RNA
actctcctatgactcactt

SEQ ID NO: 66419 - RNA, 19 nt, synthetic construct
  misc_feature 1..19: note = siRNA antisense sequence
  source 1..19: mol_type = other RNA
aagtgagtcataggagagt

SEQ ID NO: 66420 - RNA, 19 nt, synthetic construct
  misc_feature 1..19: note = siRNA sense sequence
  source 1..19: mol_type = other RNA
gggcttagtctcagaggag

SEQ ID NO: 66421 - RNA, 19 nt, synthetic construct
  misc_feature 1..19: note = siRNA antisense sequence
  source 1..19: mol_type = other RNA
ctcctctgagactaagccc

SEQ ID NO: 66422 - RNA, 19 nt, synthetic construct
  misc_feature 1..19: note = siRNA sense sequence
  source 1..19: mol_type = other RNA
agccagatgtaggtcagtg

SEQ ID NO: 66423 - RNA, 19 nt, synthetic construct
  misc_feature 1..19: note = siRNA antisense sequence
  source 1..19: mol_type = other RNA
cactgacctacatctggct

SEQ ID NO: 66424 - RNA, 19 nt, synthetic construct
  misc_feature 1..19: note = siRNA sense sequence
  source 1..19: mol_type = other RNA
gccagatgtaggtcagtgg

SEQ ID NO: 66425 - RNA, 19 nt, synthetic construct
  misc_feature 1..19: note = siRNA antisense sequence
  source 1..19: mol_type = other RNA
ccactgacctacatctggc

SEQ ID NO: 66426 - RNA, 19 nt, synthetic construct
  misc_feature 1..19: note = siRNA sense sequence
  source 1..19: mol_type = other RNA
taggtcagtggcatttaat

SEQ ID NO: 66427 - RNA, 19 nt, synthetic construct
  misc_feature 1..19: note = siRNA antisense sequence
  source 1..19: mol_type = other RNA
attaaatgccactgaccta

SEQ ID NO: 66428 - RNA, 19 nt, synthetic construct
  misc_feature 1..19: note = siRNA sense sequence
  source 1..19: mol_type = other RNA
aggtcagtggcatttaatt

SEQ ID NO: 66429 - RNA, 19 nt, synthetic construct
  misc_feature 1..19: note = siRNA antisense sequence
  source 1..19: mol_type = other RNA
aattaaatgccactgacct

SEQ ID NO: 66430 - RNA, 19 nt, synthetic construct
  misc_feature 1..19: note = siRNA sense sequence
  source 1..19: mol_type = other RNA
ggtcagtggcatttaattc

SEQ ID NO: 66431 - RNA, 19 nt, synthetic construct
  misc_feature 1..19: note = siRNA antisense sequence
  source 1..19: mol_type = other RNA
gaattaaatgccactgacc

SEQ ID NO: 66432 - RNA, 19 nt, synthetic construct
  misc_feature 1..19: note = siRNA sense sequence
  source 1..19: mol_type = other RNA
gtcagtggcatttaattca

SEQ ID NO: 66433 - RNA, 19 nt, synthetic construct
  misc_feature 1..19: note = siRNA antisense sequence
  source 1..19: mol_type = other RNA
tgaattaaatgccactgac

SEQ ID NO: 66434 - RNA, 19 nt, synthetic construct
  misc_feature 1..19: note = siRNA sense sequence
  source 1..19: mol_type = other RNA
tcagtggcatttaattcag

SEQ ID NO: 66435 - RNA, 19 nt, synthetic construct
  misc_feature 1..19: note = siRNA antisense sequence
  source 1..19: mol_type = other RNA
ctgaattaaatgccactga

SEQ ID NO: 66436 - RNA, 19 nt, synthetic construct
  misc_feature 1..19: note = siRNA sense sequence
  source 1..19: mol_type = other RNA
cagtggcatttaattcagt

SEQ ID NO: 66437 - RNA, 19 nt, synthetic construct
  misc_feature 1..19: note = siRNA antisense sequence
  source 1..19: mol_type = other RNA
actgaattaaatgccactg

SEQ ID NO: 66438 - RNA, 19 nt, synthetic construct
  misc_feature 1..19: note = siRNA sense sequence
  source 1..19: mol_type = other RNA
agtggcatttaattcagta

SEQ ID NO: 66439 - RNA, 19 nt, synthetic construct
  misc_feature 1..19: note = siRNA antisense sequence
  source 1..19: mol_type = other RNA
tactgaattaaatgccact

SEQ ID NO: 66440 - RNA, 19 nt, synthetic construct
  misc_feature 1..19: note = siRNA sense sequence
  source 1..19: mol_type = other RNA
gtggcatttaattcagtaa

SEQ ID NO: 66441 - RNA, 19 nt, synthetic construct
  misc_feature 1..19: note = siRNA antisense sequence
  source 1..19: mol_type = other RNA
ttactgaattaaatgccac

SEQ ID NO: 66442 - RNA, 19 nt, synthetic construct
  misc_feature 1..19: note = siRNA sense sequence
  source 1..19: mol_type = other RNA
taaatagaatccatggctt

SEQ ID NO: 66443 - RNA, 19 nt, synthetic construct
  misc_feature 1..19: note = siRNA antisense sequence
  source 1..19: mol_type = other RNA
aagccatggattctattta

SEQ ID NO: 66444 - RNA, 19 nt, synthetic construct
  misc_feature 1..19: note = siRNA sense sequence
  source 1..19: mol_type = other RNA
aaatagaatccatggcttt

SEQ ID NO: 66445 - RNA, 19 nt, synthetic construct
  misc_feature 1..19: note = siRNA antisense sequence
  source 1..19: mol_type = other RNA
aaagccatggattctattt

SEQ ID NO: 66446 - RNA, 19 nt, synthetic construct
  misc_feature 1..19: note = siRNA sense sequence
  source 1..19: mol_type = other RNA
aatagaatccatggctttt

SEQ ID NO: 66447 - RNA, 19 nt, synthetic construct
  misc_feature 1..19: note = siRNA antisense sequence
  source 1..19: mol_type = other RNA
aaaagccatggattctatt

SEQ ID NO: 66448 - RNA, 19 nt, synthetic construct
  misc_feature 1..19: note = siRNA sense sequence
  source 1..19: mol_type = other RNA
atagaatccatggcttttc

SEQ ID NO: 66449 - RNA, 19 nt, synthetic construct
  misc_feature 1..19: note = siRNA antisense sequence
  source 1..19: mol_type = other RNA
gaaaagccatggattctat

SEQ ID NO: 66450 - RNA, 19 nt, synthetic construct
  misc_feature 1..19: note = siRNA sense sequence
  source 1..19: mol_type = other RNA
atccatggcttttctctag

SEQ ID NO: 66451 - RNA, 19 nt, synthetic construct
  misc_feature 1..19: note = siRNA antisense sequence
  source 1..19: mol_type = other RNA
ctagagaaaagccatggat

SEQ ID NO: 66452 - RNA, 19 nt, synthetic construct
  misc_feature 1..19: note = siRNA sense sequence
  source 1..19: mol_type = other RNA
ccatggcttttctctagca

SEQ ID NO: 66453 - RNA, 19 nt, synthetic construct
  misc_feature 1..19: note = siRNA antisense sequence
  source 1..19: mol_type = other RNA
tgctagagaaaagccatgg

SEQ ID NO: 66454 - RNA, 19 nt, synthetic construct
  misc_feature 1..19: note = siRNA sense sequence
  source 1..19: mol_type = other RNA
catggcttttctctagcaa

SEQ ID NO: 66455 - RNA, 19 nt, synthetic construct
  misc_feature 1..19: note = siRNA antisense sequence
  source 1..19: mol_type = other RNA
ttgctagagaaaagccatg

SEQ ID NO: 66456 - RNA, 19 nt, synthetic construct
  misc_feature 1..19: note = siRNA sense sequence
  source 1..19: mol_type = other RNA
atggcttttctctagcaaa

SEQ ID NO: 66457 - RNA, 19 nt, synthetic construct
  misc_feature 1..19: note = siRNA antisense sequence
  source 1..19: mol_type = other RNA
tttgctagagaaaagccat

SEQ ID NO: 66458 - RNA, 19 nt, synthetic construct
  misc_feature 1..19: note = siRNA sense sequence
  source 1..19: mol_type = other RNA
ttttctctagcaaagttcc

SEQ ID NO: 66459 - RNA, 19 nt, synthetic construct
  misc_feature 1..19: note = siRNA antisense sequence
  source 1..19: mol_type = other RNA
ggaactttgctagagaaaa

SEQ ID NO: 66460 - RNA, 19 nt, synthetic construct
  misc_feature 1..19: note = siRNA sense sequence
  source 1..19: mol_type = other RNA
caaaattctccactatagc

SEQ ID NO: 66461 - RNA, 19 nt, synthetic construct
  misc_feature 1..19: note = siRNA antisense sequence
  source 1..19: mol_type = other RNA
gctatagtggagaattttg

SEQ ID NO: 66462 - RNA, 19 nt, synthetic construct
  misc_feature 1..19: note = siRNA sense sequence
  source 1..19: mol_type = other RNA
aaaattctccactatagcc

SEQ ID NO: 66463 - RNA, 19 nt, synthetic construct
  misc_feature 1..19: note = siRNA antisense sequence
  source 1..19: mol_type = other RNA
ggctatagtggagaatttt

SEQ ID NO: 66464 - RNA, 19 nt, synthetic construct
  misc_feature 1..19: note = siRNA sense sequence
  source 1..19: mol_type = other RNA
aaattctccactatagcca

SEQ ID NO: 66465 - RNA, 19 nt, synthetic construct
  misc_feature 1..19: note = siRNA antisense sequence
  source 1..19: mol_type = other RNA
tggctatagtggagaattt

SEQ ID NO: 66466 - RNA, 19 nt, synthetic construct
  misc_feature 1..19: note = siRNA sense sequence
  source 1..19: mol_type = other RNA
aattctccactatagccaa

SEQ ID NO: 66467 - RNA, 19 nt, synthetic construct
  misc_feature 1..19: note = siRNA antisense sequence
  source 1..19: mol_type = other RNA
ttggctatagtggagaatt

SEQ ID NO: 66468 - RNA, 19 nt, synthetic construct
  misc_feature 1..19: note = siRNA sense sequence
  source 1..19: mol_type = other RNA
ttctccactatagccaatg

SEQ ID NO: 66469 - RNA, 19 nt, synthetic construct
  misc_feature 1..19: note = siRNA antisense sequence
  source 1..19: mol_type = other RNA
cattggctatagtggagaa

SEQ ID NO: 66470 - RNA, 19 nt, synthetic construct
  misc_feature 1..19: note = siRNA sense sequence
  source 1..19: mol_type = other RNA
tctccactatagccaatgt

SEQ ID NO: 66471 - RNA, 19 nt, synthetic construct
  misc_feature 1..19: note = siRNA antisense sequence
  source 1..19: mol_type = other RNA
acattggctatagtggaga

SEQ ID NO: 66472 - RNA, 19 nt, synthetic construct
  misc_feature 1..19: note = siRNA sense sequence
  source 1..19: mol_type = other RNA
ctccactatagccaatgtc

SEQ ID NO: 66473 - RNA, 19 nt, synthetic construct
  misc_feature 1..19: note = siRNA antisense sequence
  source 1..19: mol_type = other RNA
gacattggctatagtggag

SEQ ID NO: 66474 - RNA, 19 nt, synthetic construct
  misc_feature 1..19: note = siRNA sense sequence
  source 1..19: mol_type = other RNA
tccactatagccaatgtcc

SEQ ID NO: 66475 - RNA, 19 nt, synthetic construct
  misc_feature 1..19: note = siRNA antisense sequence
  source 1..19: mol_type = other RNA
ggacattggctatagtgga

SEQ ID NO: 66476 - RNA, 19 nt, synthetic construct
  misc_feature 1..19: note = siRNA sense sequence
  source 1..19: mol_type = other RNA
ccactatagccaatgtcca

SEQ ID NO: 66477 - RNA, 19 nt, synthetic construct
  misc_feature 1..19: note = siRNA antisense sequence
  source 1..19: mol_type = other RNA
tggacattggctatagtgg

SEQ ID NO: 66478 - RNA, 19 nt, synthetic construct
  misc_feature 1..19: note = siRNA sense sequence
  source 1..19: mol_type = other RNA
tatagccaatgtccagctc

SEQ ID NO: 66479 - RNA, 19 nt, synthetic construct
  misc_feature 1..19: note = siRNA antisense sequence
  source 1..19: mol_type = other RNA
gagctggacattggctata

SEQ ID NO: 66480 - RNA, 19 nt, synthetic construct
  misc_feature 1..19: note = siRNA sense sequence
  source 1..19: mol_type = other RNA
atagccaatgtccagctct

SEQ ID NO: 66481 - RNA, 19 nt, synthetic construct
  misc_feature 1..19: note = siRNA antisense sequence
  source 1..19: mol_type = other RNA
agagctggacattggctat

SEQ ID NO: 66482 - RNA, 19 nt, synthetic construct
  misc_feature 1..19: note = siRNA sense sequence
  source 1..19: mol_type = other RNA
tagccaatgtccagctctt

SEQ ID NO: 66483 - RNA, 19 nt, synthetic construct
  misc_feature 1..19: note = siRNA antisense sequence
  source 1..19: mol_type = other RNA
aagagctggacattggcta

SEQ ID NO: 66484 - RNA, 19 nt, synthetic construct
  misc_feature 1..19: note = siRNA sense sequence
  source 1..19: mol_type = other RNA
agccaatgtccagctcttc

SEQ ID NO: 66485 - RNA, 19 nt, synthetic construct
  misc_feature 1..19: note = siRNA antisense sequence
  source 1..19: mol_type = other RNA
gaagagctggacattggct

SEQ ID NO: 66486 - RNA, 19 nt, synthetic construct
  misc_feature 1..19: note = siRNA sense sequence
  source 1..19: mol_type = other RNA
aatgtccagctcttccttc

SEQ ID NO: 66487 - RNA, 19 nt, synthetic construct
  misc_feature 1..19: note = siRNA antisense sequence
  source 1..19: mol_type = other RNA
gaaggaagagctggacatt

SEQ ID NO: 66488 - RNA, 19 nt, synthetic construct
  misc_feature 1..19: note = siRNA sense sequence
  source 1..19: mol_type = other RNA
agctcttccttctacttta

SEQ ID NO: 66489 - RNA, 19 nt, synthetic construct
  misc_feature 1..19: note = siRNA antisense sequence
  source 1..19: mol_type = other RNA
taaagtagaaggaagagct

SEQ ID NO: 66490 - RNA, 19 nt, synthetic construct
  misc_feature 1..19: note = siRNA sense sequence
  source 1..19: mol_type = other RNA
ctttataagggatcagtgt

SEQ ID NO: 66491 - RNA, 19 nt, synthetic construct
  misc_feature 1..19: note = siRNA antisense sequence
  source 1..19: mol_type = other RNA
acactgatcccttataaag

SEQ ID NO: 66492 - RNA, 19 nt, synthetic construct
  misc_feature 1..19: note = siRNA sense sequence
  source 1..19: mol_type = other RNA
agggatcagtgttctctct

SEQ ID NO: 66493 - RNA, 19 nt, synthetic construct
  misc_feature 1..19: note = siRNA antisense sequence
  source 1..19: mol_type = other RNA
agagagaacactgatccct

SEQ ID NO: 66494 - RNA, 19 nt, synthetic construct
  misc_feature 1..19: note = siRNA sense sequence
  source 1..19: mol_type = other RNA
gatcagtgttctctctgta

SEQ ID NO: 66495 - RNA, 19 nt, synthetic construct
  misc_feature 1..19: note = siRNA antisense sequence
  source 1..19: mol_type = other RNA
tacagagagaacactgatc

SEQ ID NO: 66496 - RNA, 19 nt, synthetic construct
  misc_feature 1..19: note = siRNA sense sequence
  source 1..19: mol_type = other RNA
tcagtgttctctctgtaat

SEQ ID NO: 66497 - RNA, 19 nt, synthetic construct
  misc_feature 1..19: note = siRNA antisense sequence
  source 1..19: mol_type = other RNA
attacagagagaacactga

SEQ ID NO: 66498 - RNA, 19 nt, synthetic construct
  misc_feature 1..19: note = siRNA sense sequence
  source 1..19: mol_type = other RNA
cagtgttctctctgtaata

SEQ ID NO: 66499 - RNA, 19 nt, synthetic construct
  misc_feature 1..19: note = siRNA antisense sequence
  source 1..19: mol_type = other RNA
tattacagagagaacactg

SEQ ID NO: 66500 - RNA, 19 nt, synthetic construct
  misc_feature 1..19: note = siRNA sense sequence
  source 1..19: mol_type = other RNA
agtgttctctctgtaatac

SEQ ID NO: 66501 - RNA, 19 nt, synthetic construct
  misc_feature 1..19: note = siRNA antisense sequence
  source 1..19: mol_type = other RNA
gtattacagagagaacact

SEQ ID NO: 66502 - RNA, 19 nt, synthetic construct
  misc_feature 1..19: note = siRNA sense sequence
  source 1..19: mol_type = other RNA
gtgttctctctgtaatacc

SEQ ID NO: 66503 - RNA, 19 nt, synthetic construct
  misc_feature 1..19: note = siRNA antisense sequence
  source 1..19: mol_type = other RNA
ggtattacagagagaacac

SEQ ID NO: 66504 - RNA, 19 nt, synthetic construct
  misc_feature 1..19: note = siRNA sense sequence
  source 1..19: mol_type = other RNA
tgttctctctgtaatacct

SEQ ID NO: 66505 - RNA, 19 nt, synthetic construct
  misc_feature 1..19: note = siRNA antisense sequence
  source 1..19: mol_type = other RNA
aggtattacagagagaaca

SEQ ID NO: 66506 - RNA, 19 nt, synthetic construct
  misc_feature 1..19: note = siRNA sense sequence
  source 1..19: mol_type = other RNA
gttctctctgtaataccta

SEQ ID NO: 66507 - RNA, 19 nt, synthetic construct
  misc_feature 1..19: note = siRNA antisense sequence
  source 1..19: mol_type = other RNA
taggtattacagagagaac

SEQ ID NO: 66508 - RNA, 19 nt, synthetic construct
  misc_feature 1..19: note = siRNA sense sequence
  source 1..19: mol_type = other RNA
ttctctctgtaatacctag

SEQ ID NO: 66509 - RNA, 19 nt, synthetic construct
  misc_feature 1..19: note = siRNA antisense sequence
  source 1..19: mol_type = other RNA
ctaggtattacagagagaa

SEQ ID NO: 66510 - RNA, 19 nt, synthetic construct
  misc_feature 1..19: note = siRNA sense sequence
  source 1..19: mol_type = other RNA
tctctctgtaatacctagc

SEQ ID NO: 66511 - RNA, 19 nt, synthetic construct
  misc_feature 1..19: note = siRNA antisense sequence
  source 1..19: mol_type = other RNA
gctaggtattacagagaga

SEQ ID NO: 66512 - RNA, 19 nt, synthetic construct
  misc_feature 1..19: note = siRNA sense sequence
  source 1..19: mol_type = other RNA
ctctctgtaatacctagct

SEQ ID NO: 66513 - RNA, 19 nt, synthetic construct
  misc_feature 1..19: note = siRNA antisense sequence
  source 1..19: mol_type = other RNA
agctaggtattacagagag

SEQ ID NO: 66514 - RNA, 19 nt, synthetic construct
  misc_feature 1..19: note = siRNA sense sequence
  source 1..19: mol_type = other RNA
tctctgtaatacctagctt

SEQ ID NO: 66515 - RNA, 19 nt, synthetic construct
  misc_feature 1..19: note = siRNA antisense sequence
  source 1..19: mol_type = other RNA
aagctaggtattacagaga

SEQ ID NO: 66516 - RNA, 19 nt, synthetic construct
  misc_feature 1..19: note = siRNA sense sequence
  source 1..19: mol_type = other RNA
gtaatacctagctttgcca

SEQ ID NO: 66517 - RNA, 19 nt, synthetic construct
  misc_feature 1..19: note = siRNA antisense sequence
  source 1..19: mol_type = other RNA
tggcaaagctaggtattac

SEQ ID NO: 66518 - RNA, 19 nt, synthetic construct
  misc_feature 1..19: note = siRNA sense sequence
  source 1..19: mol_type = other RNA
taatacctagctttgccac

SEQ ID NO: 66519 - RNA, 19 nt, synthetic construct
  misc_feature 1..19: note = siRNA antisense sequence
  source 1..19: mol_type = other RNA
gtggcaaagctaggtatta

SEQ ID NO: 66520 - RNA, 19 nt, synthetic construct
  misc_feature 1..19: note = siRNA sense sequence
  source 1..19: mol_type = other RNA
atacctagctttgccacac

SEQ ID NO: 66521 - RNA, 19 nt, synthetic construct
  misc_feature 1..19: note = siRNA antisense sequence
  source 1..19: mol_type = other RNA
gtgtggcaaagctaggtat

SEQ ID NO: 66522 - RNA, 19 nt, synthetic construct
  misc_feature 1..19: note = siRNA sense sequence
  source 1..19: mol_type = other RNA
tacctagctttgccacact

SEQ ID NO: 66523 - RNA, 19 nt, synthetic construct
  misc_feature 1..19: note = siRNA antisense sequence
  source 1..19: mol_type = other RNA
agtgtggcaaagctaggta

SEQ ID NO: 66524 - RNA, 19 nt, synthetic construct
  misc_feature 1..19: note = siRNA sense sequence
  source 1..19: mol_type = other RNA
acctagctttgccacactg

SEQ ID NO: 66525 - RNA, 19 nt, synthetic construct
  misc_feature 1..19: note = siRNA antisense sequence
  source 1..19: mol_type = other RNA
cagtgtggcaaagctaggt

SEQ ID NO: 66526 - RNA, 19 nt, synthetic construct
  misc_feature 1..19: note = siRNA sense sequence
  source 1..19: mol_type = other RNA
cctagctttgccacactgt

SEQ ID NO: 66527 - RNA, 19 nt, synthetic construct
  misc_feature 1..19: note = siRNA antisense sequence
  source 1..19: mol_type = other RNA
acagtgtggcaaagctagg

SEQ ID NO: 66528 - RNA, 19 nt, synthetic construct
  misc_feature 1..19: note = siRNA sense sequence
  source 1..19: mol_type = other RNA
actgtggtacccaaggcct

SEQ ID NO: 66529 - RNA, 19 nt, synthetic construct
  misc_feature 1..19: note = siRNA antisense sequence
  source 1..19: mol_type = other RNA
aggccttgggtaccacagt

SEQ ID NO: 66530 - RNA, 19 nt, synthetic construct
  misc_feature 1..19: note = siRNA sense sequence
  source 1..19: mol_type = other RNA
ctgtggtacccaaggcctg

SEQ ID NO: 66531 - RNA, 19 nt, synthetic construct
  misc_feature 1..19: note = siRNA antisense sequence
  source 1..19: mol_type = other RNA
caggccttgggtaccacag

SEQ ID NO: 66532 - RNA, 19 nt, synthetic construct
  misc_feature 1..19: note = siRNA sense sequence
  source 1..19: mol_type = other RNA
tggtacccaaggcctggct

SEQ ID NO: 66533 - RNA, 19 nt, synthetic construct
  misc_feature 1..19: note = siRNA antisense sequence
  source 1..19: mol_type = other RNA
agccaggccttgggtacca

SEQ ID NO: 66534 - RNA, 19 nt, synthetic construct
  misc_feature 1..19: note = siRNA sense sequence
  source 1..19: mol_type = other RNA
ggtacccaaggcctggctt

SEQ ID NO: 66535 - RNA, 19 nt, synthetic construct
  misc_feature 1..19: note = siRNA antisense sequence
  source 1..19: mol_type = other RNA
aagccaggccttgggtacc

SEQ ID NO: 66536 - RNA, 19 nt, synthetic construct
  misc_feature 1..19: note = siRNA sense sequence
  source 1..19: mol_type = other RNA
gtacccaaggcctggctta

SEQ ID NO: 66537 - RNA, 19 nt, synthetic construct
  misc_feature 1..19: note = siRNA antisense sequence
  source 1..19: mol_type = other RNA
taagccaggccttgggtac

SEQ ID NO: 66538 - RNA, 19 nt, synthetic construct
  misc_feature 1..19: note = siRNA sense sequence
  source 1..19: mol_type = other RNA
tacccaaggcctggcttat

SEQ ID NO: 66539 - RNA, 19 nt, synthetic construct
  misc_feature 1..19: note = siRNA antisense sequence
  source 1..19: mol_type = other RNA
ataagccaggccttgggta

SEQ ID NO: 66540 - RNA, 19 nt, synthetic construct
  misc_feature 1..19: note = siRNA sense sequence
  source 1..19: mol_type = other RNA
acccaaggcctggcttatt

SEQ ID NO: 66541 - RNA, 19 nt, synthetic construct
  misc_feature 1..19: note = siRNA antisense sequence
  source 1..19: mol_type = other RNA
aataagccaggccttgggt

SEQ ID NO: 66542 - RNA, 19 nt, synthetic construct
  misc_feature 1..19: note = siRNA sense sequence
  source 1..19: mol_type = other RNA
cccaaggcctggcttattg

SEQ ID NO: 66543 - RNA, 19 nt, synthetic construct
  misc_feature 1..19: note = siRNA antisense sequence
  source 1..19: mol_type = other RNA
caataagccaggccttggg

SEQ ID NO: 66544 - RNA, 19 nt, synthetic construct
  misc_feature 1..19: note = siRNA sense sequence
  source 1..19: mol_type = other RNA
aggcctggcttattggtgt

SEQ ID NO: 66545 - RNA, 19 nt, synthetic construct
  misc_feature 1..19: note = siRNA antisense sequence
  source 1..19: mol_type = other RNA
acaccaataagccaggcct

SEQ ID NO: 66546 - RNA, 19 nt, synthetic construct
  misc_feature 1..19: note = siRNA sense sequence
  source 1..19: mol_type = other RNA
ggcctggcttattggtgtc

SEQ ID NO: 66547 - RNA, 19 nt, synthetic construct
  misc_feature 1..19: note = siRNA antisense sequence
  source 1..19: mol_type = other RNA
gacaccaataagccaggcc

SEQ ID NO: 66548 - RNA, 19 nt, synthetic construct
  misc_feature 1..19: note = siRNA sense sequence
  source 1..19: mol_type = other RNA
gcctggcttattggtgtca

SEQ ID NO: 66549 - RNA, 19 nt, synthetic construct
  misc_feature 1..19: note = siRNA antisense sequence
  source 1..19: mol_type = other RNA
tgacaccaataagccaggc

SEQ ID NO: 66550 - RNA, 19 nt, synthetic construct
  misc_feature 1..19: note = siRNA sense sequence
  source 1..19: mol_type = other RNA
cctggcttattggtgtcaa

SEQ ID NO: 66551 - RNA, 19 nt, synthetic construct
  misc_feature 1..19: note = siRNA antisense sequence
  source 1..19: mol_type = other RNA
ttgacaccaataagccagg

SEQ ID NO: 66552 - RNA, 19 nt, synthetic construct
  misc_feature 1..19: note = siRNA sense sequence
  source 1..19: mol_type = other RNA
ctggcttattggtgtcaag

SEQ ID NO: 66553 - RNA, 19 nt, synthetic construct
  misc_feature 1..19: note = siRNA antisense sequence
  source 1..19: mol_type = other RNA
cttgacaccaataagccag

SEQ ID NO: 66554 - RNA, 19 nt, synthetic construct
  misc_feature 1..19: note = siRNA sense sequence
  source 1..19: mol_type = other RNA
tggcttattggtgtcaagg

SEQ ID NO: 66555 - RNA, 19 nt, synthetic construct
  misc_feature 1..19: note = siRNA antisense sequence
  source 1..19: mol_type = other RNA
ccttgacaccaataagcca

SEQ ID NO: 66556 - RNA, 19 nt, synthetic construct
  misc_feature 1..19: note = siRNA sense sequence
  source 1..19: mol_type = other RNA
ggcttattggtgtcaaggt

SEQ ID NO: 66557 - RNA, 19 nt, synthetic construct
  misc_feature 1..19: note = siRNA antisense sequence
  source 1..19: mol_type = other RNA
accttgacaccaataagcc

SEQ ID NO: 66558 - RNA, 19 nt, synthetic construct
  misc_feature 1..19: note = siRNA sense sequence
  source 1..19: mol_type = other RNA
gcttattggtgtcaaggtt

SEQ ID NO: 66559 - RNA, 19 nt, synthetic construct
  misc_feature 1..19: note = siRNA antisense sequence
  source 1..19: mol_type = other RNA
aaccttgacaccaataagc

SEQ ID NO: 66560 - RNA, 19 nt, synthetic construct
  misc_feature 1..19: note = siRNA sense sequence
  source 1..19: mol_type = other RNA
cttattggtgtcaaggttg

SEQ ID NO: 66561 - RNA, 19 nt, synthetic construct
  misc_feature 1..19: note = siRNA antisense sequence
  source 1..19: mol_type = other RNA
caaccttgacaccaataag

SEQ ID NO: 66562 - RNA, 19 nt, synthetic construct
  misc_feature 1..19: note = siRNA sense sequence
  source 1..19: mol_type = other RNA
ttattggtgtcaaggttgt

SEQ ID NO: 66563 - RNA, 19 nt, synthetic construct
  misc_feature 1..19: note = siRNA antisense sequence
  source 1..19: mol_type = other RNA
acaaccttgacaccaataa

SEQ ID NO: 66564 - RNA, 19 nt, synthetic construct
  misc_feature 1..19: note = siRNA sense sequence
  source 1..19: mol_type = other RNA
tattggtgtcaaggttgta

SEQ ID NO: 66565 - RNA, 19 nt, synthetic construct
  misc_feature 1..19: note = siRNA antisense sequence
  source 1..19: mol_type = other RNA
tacaaccttgacaccaata

SEQ ID NO: 66566 - RNA, 19 nt, synthetic construct
  misc_feature 1..19: note = siRNA sense sequence
  source 1..19: mol_type = other RNA
tggtgtcaaggttgtactt

SEQ ID NO: 66567 - RNA, 19 nt, synthetic construct
  misc_feature 1..19: note = siRNA antisense sequence
  source 1..19: mol_type = other RNA
aagtacaaccttgacacca

SEQ ID NO: 66568 - RNA, 19 nt, synthetic construct
  misc_feature 1..19: note = siRNA sense sequence
  source 1..19: mol_type = other RNA
aagtggtttcttcatttct

SEQ ID NO: 66569 - RNA, 19 nt, synthetic construct
  misc_feature 1..19: note = siRNA antisense sequence
  source 1..19: mol_type = other RNA
agaaatgaagaaaccactt

SEQ ID NO: 66570 - RNA, 19 nt, synthetic construct
  misc_feature 1..19: note = siRNA sense sequence
  source 1..19: mol_type = other RNA
agtggtttcttcatttcta

SEQ ID NO: 66571 - RNA, 19 nt, synthetic construct
  misc_feature 1..19: note = siRNA antisense sequence
  source 1..19: mol_type = other RNA
tagaaatgaagaaaccact

SEQ ID NO: 66572 - RNA, 19 nt, synthetic construct
  misc_feature 1..19: note = siRNA sense sequence
  source 1..19: mol_type = other RNA
gtggtttcttcatttctat

SEQ ID NO: 66573 - RNA, 19 nt, synthetic construct
  misc_feature 1..19: note = siRNA antisense sequence
  source 1..19: mol_type = other RNA
atagaaatgaagaaaccac

SEQ ID NO: 66574 - RNA, 19 nt, synthetic construct
  misc_feature 1..19: note = siRNA sense sequence
  source 1..19: mol_type = other RNA
tggtttcttcatttctatg

SEQ ID NO: 66575 - RNA, 19 nt, synthetic construct
  misc_feature 1..19: note = siRNA antisense sequence
  source 1..19: mol_type = other RNA
catagaaatgaagaaacca

SEQ ID NO: 66576 - RNA, 19 nt, synthetic construct
  misc_feature 1..19: note = siRNA sense sequence
  source 1..19: mol_type = other RNA
ggtttcttcatttctatgc

SEQ ID NO: 66577 - RNA, 19 nt, synthetic construct
  misc_feature 1..19: note = siRNA antisense sequence
  source 1..19: mol_type = other RNA
gcatagaaatgaagaaacc

SEQ ID NO: 66578 - RNA, 19 nt, synthetic construct
  misc_feature 1..19: note = siRNA sense sequence
  source 1..19: mol_type = other RNA
tcttcatttctatgcacct

SEQ ID NO: 66579 - RNA, 19 nt, synthetic construct
  misc_feature 1..19: note = siRNA antisense sequence
  source 1..19: mol_type = other RNA
aggtgcatagaaatgaaga

SEQ ID NO: 66580 - RNA, 19 nt, synthetic construct
  misc_feature 1..19: note = siRNA sense sequence
  source 1..19: mol_type = other RNA
tttctatgcacctctaata

SEQ ID NO: 66581 - RNA, 19 nt, synthetic construct
  misc_feature 1..19: note = siRNA antisense sequence
  source 1..19: mol_type = other RNA
tattagaggtgcatagaaa

SEQ ID NO: 66582 - RNA, 19 nt, synthetic construct
  misc_feature 1..19: note = siRNA sense sequence
  source 1..19: mol_type = other RNA
ttttcagcatagtcttctg

SEQ ID NO: 66583 - RNA, 19 nt, synthetic construct
  misc_feature 1..19: note = siRNA antisense sequence
  source 1..19: mol_type = other RNA
cagaagactatgctgaaaa

SEQ ID NO: 66584 - RNA, 19 nt, synthetic construct
  misc_feature 1..19: note = siRNA sense sequence
  source 1..19: mol_type = other RNA
tttcagcatagtcttctgt

SEQ ID NO: 66585 - RNA, 19 nt, synthetic construct
  misc_feature 1..19: note = siRNA antisense sequence
  source 1..19: mol_type = other RNA
acagaagactatgctgaaa

SEQ ID NO: 66586 - RNA, 19 nt, synthetic construct
  misc_feature 1..19: note = siRNA sense sequence
  source 1..19: mol_type = other RNA
ttcagcatagtcttctgtt

SEQ ID NO: 66587 - RNA, 19 nt, synthetic construct
  misc_feature 1..19: note = siRNA antisense sequence
  source 1..19: mol_type = other RNA
aacagaagactatgctgaa

SEQ ID NO: 66588 - RNA, 19 nt, synthetic construct
  misc_feature 1..19: note = siRNA sense sequence
  source 1..19: mol_type = other RNA
tcagcatagtcttctgttc

SEQ ID NO: 66589 - RNA, 19 nt, synthetic construct
  misc_feature 1..19: note = siRNA antisense sequence
  source 1..19: mol_type = other RNA
gaacagaagactatgctga

SEQ ID NO: 66590 - RNA, 19 nt, synthetic construct
  misc_feature 1..19: note = siRNA sense sequence
  source 1..19: mol_type = other RNA
cagcatagtcttctgttct

SEQ ID NO: 66591 - RNA, 19 nt, synthetic construct
  misc_feature 1..19: note = siRNA antisense sequence
  source 1..19: mol_type = other RNA
agaacagaagactatgctg

SEQ ID NO: 66592 - RNA, 19 nt, synthetic construct
  misc_feature 1..19: note = siRNA sense sequence
  source 1..19: mol_type = other RNA
tctcagcactgcacttacc

SEQ ID NO: 66593 - RNA, 19 nt, synthetic construct
  misc_feature 1..19: note = siRNA antisense sequence
  source 1..19: mol_type = other RNA
ggtaagtgcagtgctgaga

SEQ ID NO: 66594 - RNA, 19 nt, synthetic construct
  misc_feature 1..19: note = siRNA sense sequence
  source 1..19: mol_type = other RNA
ctcagcactgcacttacct

SEQ ID NO: 66595 - RNA, 19 nt, synthetic construct
  misc_feature 1..19: note = siRNA antisense sequence
  source 1..19: mol_type = other RNA
aggtaagtgcagtgctgag

SEQ ID NO: 66596 - RNA, 19 nt, synthetic construct
  misc_feature 1..19: note = siRNA sense sequence
  source 1..19: mol_type = other RNA
actgcacttacctctatgg

SEQ ID NO: 66597 - RNA, 19 nt, synthetic construct
  misc_feature 1..19: note = siRNA antisense sequence
  source 1..19: mol_type = other RNA
ccatagaggtaagtgcagt

SEQ ID NO: 66598 - RNA, 19 nt, synthetic construct
  misc_feature 1..19: note = siRNA sense sequence
  source 1..19: mol_type = other RNA
ctgcacttacctctatggt

SEQ ID NO: 66599 - RNA, 19 nt, synthetic construct
  misc_feature 1..19: note = siRNA antisense sequence
  source 1..19: mol_type = other RNA
accatagaggtaagtgcag

SEQ ID NO: 66600 - RNA, 19 nt, synthetic construct
  misc_feature 1..19: note = siRNA sense sequence
  source 1..19: mol_type = other RNA
tgcacttacctctatggtt

SEQ ID NO: 66601 - RNA, 19 nt, synthetic construct
  misc_feature 1..19: note = siRNA antisense sequence
  source 1..19: mol_type = other RNA
aaccatagaggtaagtgca

SEQ ID NO: 66602 - RNA, 19 nt, synthetic construct
  misc_feature 1..19: note = siRNA sense sequence
  source 1..19: mol_type = other RNA
gcacttacctctatggttt

SEQ ID NO: 66603 - RNA, 19 nt, synthetic construct
  misc_feature 1..19: note = siRNA antisense sequence
  source 1..19: mol_type = other RNA
aaaccatagaggtaagtgc

SEQ ID NO: 66604 - RNA, 19 nt, synthetic construct
  misc_feature 1..19: note = siRNA sense sequence
  source 1..19: mol_type = other RNA
cacttacctctatggtttt

SEQ ID NO: 66605 - RNA, 19 nt, synthetic construct
  misc_feature 1..19: note = siRNA antisense sequence
  source 1..19: mol_type = other RNA
aaaaccatagaggtaagtg

SEQ ID NO: 66606 - RNA, 19 nt, synthetic construct
  misc_feature 1..19: note = siRNA sense sequence
  source 1..19: mol_type = other RNA
acttacctctatggtttta

SEQ ID NO: 66607 - RNA, 19 nt, synthetic construct
  misc_feature 1..19: note = siRNA antisense sequence
  source 1..19: mol_type = other RNA
taaaaccatagaggtaagt

SEQ ID NO: 66608 - RNA, 19 nt, synthetic construct
  misc_feature 1..19: note = siRNA sense sequence
  source 1..19: mol_type = other RNA
cttacctctatggttttag

SEQ ID NO: 66609 - RNA, 19 nt, synthetic construct
  misc_feature 1..19: note = siRNA antisense sequence
  source 1..19: mol_type = other RNA
ctaaaaccatagaggtaag

SEQ ID NO: 66610 - RNA, 19 nt, synthetic construct
  misc_feature 1..19: note = siRNA sense sequence
  source 1..19: mol_type = other RNA
aaccagagctgatatttgg

SEQ ID NO: 66611 - RNA, 19 nt, synthetic construct
  misc_feature 1..19: note = siRNA antisense sequence
  source 1..19: mol_type = other RNA
ccaaatatcagctctggtt

SEQ ID NO: 66612 - RNA, 19 nt, synthetic construct
  misc_feature 1..19: note = siRNA sense sequence
  source 1..19: mol_type = other RNA
accagagctgatatttgga

SEQ ID NO: 66613 - RNA, 19 nt, synthetic construct
  misc_feature 1..19: note = siRNA antisense sequence
  source 1..19: mol_type = other RNA
tccaaatatcagctctggt

SEQ ID NO: 66614 - RNA, 19 nt, synthetic construct
  misc_feature 1..19: note = siRNA sense sequence
  source 1..19: mol_type = other RNA
ccagagctgatatttggat

SEQ ID NO: 66615 - RNA, 19 nt, synthetic construct
  misc_feature 1..19: note = siRNA antisense sequence
  source 1..19: mol_type = other RNA
atccaaatatcagctctgg

SEQ ID NO: 66616 - RNA, 19 nt, synthetic construct
  misc_feature 1..19: note = siRNA sense sequence
  source 1..19: mol_type = other RNA
cagagctgatatttggata

SEQ ID NO: 66617 - RNA, 19 nt, synthetic construct
  misc_feature 1..19: note = siRNA antisense sequence
  source 1..19: mol_type = other RNA
tatccaaatatcagctctg

SEQ ID NO: 66618 - RNA, 19 nt, synthetic construct
  misc_feature 1..19: note = siRNA sense sequence
  source 1..19: mol_type = other RNA
agagctgatatttggatag

SEQ ID NO: 66619 - RNA, 19 nt, synthetic construct
  misc_feature 1..19: note = siRNA antisense sequence
  source 1..19: mol_type = other RNA
ctatccaaatatcagctct

SEQ ID NO: 66620 - RNA, 19 nt, synthetic construct
  misc_feature 1..19: note = siRNA sense sequence
  source 1..19: mol_type = other RNA
gagctgatatttggatagg

SEQ ID NO: 66621 - RNA, 19 nt, synthetic construct
  misc_feature 1..19: note = siRNA antisense sequence
  source 1..19: mol_type = other RNA
cctatccaaatatcagctc

SEQ ID NO: 66622 - RNA, 19 nt, synthetic construct
  misc_feature 1..19: note = siRNA sense sequence
  source 1..19: mol_type = other RNA
agctgatatttggataggt

SEQ ID NO: 66623 - RNA, 19 nt, synthetic construct
  misc_feature 1..19: note = siRNA antisense sequence
  source 1..19: mol_type = other RNA
acctatccaaatatcagct

SEQ ID NO: 66624 - RNA, 19 nt, synthetic construct
  misc_feature 1..19: note = siRNA sense sequence
  source 1..19: mol_type = other RNA
gctgatatttggataggtt

SEQ ID NO: 66625 - RNA, 19 nt, synthetic construct
  misc_feature 1..19: note = siRNA antisense sequence
  source 1..19: mol_type = other RNA
aacctatccaaatatcagc

SEQ ID NO: 66626 - RNA, 19 nt, synthetic construct
  misc_feature 1..19: note = siRNA sense sequence
  source 1..19: mol_type = other RNA
ctgatatttggataggttc

SEQ ID NO: 66627 - RNA, 19 nt, synthetic construct
  misc_feature 1..19: note = siRNA antisense sequence
  source 1..19: mol_type = other RNA
gaacctatccaaatatcag

SEQ ID NO: 66628 - RNA, 19 nt, synthetic construct
  misc_feature 1..19: note = siRNA sense sequence
  source 1..19: mol_type = other RNA
tgatatttggataggttct

SEQ ID NO: 66629 - RNA, 19 nt, synthetic construct
  misc_feature 1..19: note = siRNA antisense sequence
  source 1..19: mol_type = other RNA
agaacctatccaaatatca

SEQ ID NO: 66630 - RNA, 19 nt, synthetic construct
  misc_feature 1..19: note = siRNA sense sequence
  source 1..19: mol_type = other RNA
gatatttggataggttctt

SEQ ID NO: 66631 - RNA, 19 nt, synthetic construct
  misc_feature 1..19: note = siRNA antisense sequence
  source 1..19: mol_type = other RNA
aagaacctatccaaatatc

SEQ ID NO: 66632 - RNA, 19 nt, synthetic construct
  misc_feature 1..19: note = siRNA sense sequence
  source 1..19: mol_type = other RNA
tggataggttctttcaggc

SEQ ID NO: 66633 - RNA, 19 nt, synthetic construct
  misc_feature 1..19: note = siRNA antisense sequence
  source 1..19: mol_type = other RNA
gcctgaaagaacctatcca

SEQ ID NO: 66634 - RNA, 19 nt, synthetic construct
  misc_feature 1..19: note = siRNA sense sequence
  source 1..19: mol_type = other RNA
ggataggttctttcaggcc

SEQ ID NO: 66635 - RNA, 19 nt, synthetic construct
  misc_feature 1..19: note = siRNA antisense sequence
  source 1..19: mol_type = other RNA
ggcctgaaagaacctatcc

SEQ ID NO: 66636 - RNA, 19 nt, synthetic construct
  misc_feature 1..19: note = siRNA sense sequence
  source 1..19: mol_type = other RNA
gataggttctttcaggcct

SEQ ID NO: 66637 - RNA, 19 nt, synthetic construct
  misc_feature 1..19: note = siRNA antisense sequence
  source 1..19: mol_type = other RNA
aggcctgaaagaacctatc

SEQ ID NO: 66638 - RNA, 19 nt, synthetic construct
  misc_feature 1..19: note = siRNA sense sequence
  source 1..19: mol_type = other RNA
ataggttctttcaggcctt

SEQ ID NO: 66639 - RNA, 19 nt, synthetic construct
  misc_feature 1..19: note = siRNA antisense sequence
  source 1..19: mol_type = other RNA
aaggcctgaaagaacctat

SEQ ID NO: 66640 - RNA, 19 nt, synthetic construct
  misc_feature 1..19: note = siRNA sense sequence
  source 1..19: mol_type = other RNA
taggttctttcaggccttg

SEQ ID NO: 66641 - RNA, 19 nt, synthetic construct
  misc_feature 1..19: note = siRNA antisense sequence
  source 1..19: mol_type = other RNA
caaggcctgaaagaaccta

SEQ ID NO: 66642 - RNA, 19 nt, synthetic construct
  misc_feature 1..19: note = siRNA sense sequence
  source 1..19: mol_type = other RNA
aggttctttcaggccttgt

SEQ ID NO: 66643 - RNA, 19 nt, synthetic construct
  misc_feature 1..19: note = siRNA antisense sequence
  source 1..19: mol_type = other RNA
acaaggcctgaaagaacct

SEQ ID NO: 66644 - RNA, 19 nt, synthetic construct
  misc_feature 1..19: note = siRNA sense sequence
  source 1..19: mol_type = other RNA
ggttctttcaggccttgta

SEQ ID NO: 66645 - RNA, 19 nt, synthetic construct
  misc_feature 1..19: note = siRNA antisense sequence
  source 1..19: mol_type = other RNA
tacaaggcctgaaagaacc

SEQ ID NO: 66646 - RNA, 19 nt, synthetic construct
  misc_feature 1..19: note = siRNA sense sequence
  source 1..19: mol_type = other RNA
gttctttcaggccttgtac

SEQ ID NO: 66647 - RNA, 19 nt, synthetic construct
  misc_feature 1..19: note = siRNA antisense sequence
  source 1..19: mol_type = other RNA
gtacaaggcctgaaagaac

SEQ ID NO: 66648 - RNA, 19 nt, synthetic construct
  misc_feature 1..19: note = siRNA sense sequence
  source 1..19: mol_type = other RNA
ttctttcaggccttgtacc

SEQ ID NO: 66649 - RNA, 19 nt, synthetic construct
  misc_feature 1..19: note = siRNA antisense sequence
  source 1..19: mol_type = other RNA
ggtacaaggcctgaaagaa

SEQ ID NO: 66650 - RNA, 19 nt, synthetic construct
  misc_feature 1..19: note = siRNA sense sequence
  source 1..19: mol_type = other RNA
tctttcaggccttgtacct

SEQ ID NO: 66651 - RNA, 19 nt, synthetic construct
  misc_feature 1..19: note = siRNA antisense sequence
  source 1..19: mol_type = other RNA
aggtacaaggcctgaaaga

SEQ ID NO: 66652 - RNA, 19 nt, synthetic construct
  misc_feature 1..19: note = siRNA sense sequence
  source 1..19: mol_type = other RNA
tcaggccttgtacctctgt

SEQ ID NO: 66653 - RNA, 19 nt, synthetic construct
  misc_feature 1..19: note = siRNA antisense sequence
  source 1..19: mol_type = other RNA
acagaggtacaaggcctga

SEQ ID NO: 66654 - RNA, 19 nt, synthetic construct
  misc_feature 1..19: note = siRNA sense sequence
  source 1..19: mol_type = other RNA
caggccttgtacctctgtt

SEQ ID NO: 66655 - RNA, 19 nt, synthetic construct
  misc_feature 1..19: note = siRNA antisense sequence
  source 1..19: mol_type = other RNA
aacagaggtacaaggcctg

SEQ ID NO: 66656 - RNA, 19 nt, synthetic construct
  misc_feature 1..19: note = siRNA sense sequence
  source 1..19: mol_type = other RNA
aggccttgtacctctgttt

SEQ ID NO: 66657 - RNA, 19 nt, synthetic construct
  misc_feature 1..19: note = siRNA antisense sequence
  source 1..19: mol_type = other RNA
aaacagaggtacaaggcct

SEQ ID NO: 66658 - RNA, 19 nt, synthetic construct
  misc_feature 1..19: note = siRNA sense sequence
  source 1..19: mol_type = other RNA
ctaagctcattgtttcatc

SEQ ID NO: 66659 - RNA, 19 nt, synthetic construct
  misc_feature 1..19: note = siRNA antisense sequence
  source 1..19: mol_type = other RNA
gatgaaacaatgagcttag

SEQ ID NO: 66660 - RNA, 19 nt, synthetic construct
  misc_feature 1..19: note = siRNA sense sequence
  source 1..19: mol_type = other RNA
taagctcattgtttcatcc

SEQ ID NO: 66661 - RNA, 19 nt, synthetic construct
  misc_feature 1..19: note = siRNA antisense sequence
  source 1..19: mol_type = other RNA
ggatgaaacaatgagctta

SEQ ID NO: 66662 - RNA, 19 nt, synthetic construct
  misc_feature 1..19: note = siRNA sense sequence
  source 1..19: mol_type = other RNA
aagctcattgtttcatcca

SEQ ID NO: 66663 - RNA, 19 nt, synthetic construct
  misc_feature 1..19: note = siRNA antisense sequence
  source 1..19: mol_type = other RNA
tggatgaaacaatgagctt

SEQ ID NO: 66664 - RNA, 19 nt, synthetic construct
  misc_feature 1..19: note = siRNA sense sequence
  source 1..19: mol_type = other RNA
agctcattgtttcatccag

SEQ ID NO: 66665 - RNA, 19 nt, synthetic construct
  misc_feature 1..19: note = siRNA antisense sequence
  source 1..19: mol_type = other RNA
ctggatgaaacaatgagct

SEQ ID NO: 66666 - RNA, 19 nt, synthetic construct
  misc_feature 1..19: note = siRNA sense sequence
  source 1..19: mol_type = other RNA
gctcattgtttcatccaga

SEQ ID NO: 66667 - RNA, 19 nt, synthetic construct
  misc_feature 1..19: note = siRNA antisense sequence
  source 1..19: mol_type = other RNA
tctggatgaaacaatgagc

SEQ ID NO: 66668 - RNA, 19 nt, synthetic construct
  misc_feature 1..19: note = siRNA sense sequence
  source 1..19: mol_type = other RNA
ctcattgtttcatccagat

SEQ ID NO: 66669 - RNA, 19 nt, synthetic construct
  misc_feature 1..19: note = siRNA antisense sequence
  source 1..19: mol_type = other RNA
atctggatgaaacaatgag

SEQ ID NO: 66670 - RNA, 19 nt, synthetic construct
  misc_feature 1..19: note = siRNA sense sequence
  source 1..19: mol_type = other RNA
tcattgtttcatccagata

SEQ ID NO: 66671 - RNA, 19 nt, synthetic construct
  misc_feature 1..19: note = siRNA antisense sequence
  source 1..19: mol_type = other RNA
tatctggatgaaacaatga
